United States Patent Application Publication US 2021/0199660 A1 - sequence listing, part 51

SEQ ID NO: 729962 - DNA, 120 bp, Artificial Sequence
  ENSG00000198633_13 (sequence is synthesized)
ttccgtcagaattcacaccttgcacaacatagggatattcatactggagagaagccttacagttgtaatgaatgtggcaaggtcttccgtcggaattcacaccttgtgcgacataggaat

SEQ ID NO: 729963 - DNA, 120 bp, Artificial Sequence
  ENSG00000198633_14 (sequence is synthesized)
gttcatactggagaaaagccttacagttgtaatgaatgtggcaaggtcttcagtcggaattcacaccttgcgcgacataggaatattcatactggagagaagcctcacagttgtaatgaa

SEQ ID NO: 729964 - DNA, 120 bp, Artificial Sequence
  ENSG00000198633_15 (sequence is synthesized)
tgtggcaaggtcttcagtcggaattcacaccttgcgcgacataggaaaattcatactggagagaagctttacaaatgtaatgaatgtagcaaggtcttcagtcggaattcacgccttgca

SEQ ID NO: 729965 - DNA, 120 bp, Artificial Sequence
  ENSG00000198633_16 (sequence is synthesized)
caacataggaatattcatactggagtgaagccttacagttgtaatgaatgtggcaaggtctttagtaaaaattccatcctagtacaacattgcagtattcataccagagagaagccttaa

SEQ ID NO: 729966 - DNA, 120 bp, Artificial Sequence
  ENSG00000198633_17 (sequence is synthesized)
caaactttgtgggaaatgactcccctctgccctcgcccctcgctctgctaccatttccttccgtttctgcttcgcttggcgatgcaaaacgcgcgaggctcacggcagagggccgaggcc

SEQ ID NO: 729967 - DNA, 120 bp, Artificial Sequence
  ENSG00000198633_18 (sequence is synthesized)
acgggactctcagggccgggcccgcccctcggccgcgcagtgcggcgccgcacgccccggacgctgtccagcgttggccgcctgagcagaggctgccgcggagctaagacacccgccgtt

SEQ ID NO: 729968 - DNA, 120 bp, Artificial Sequence
  ENSG00000198633_19 (sequence is synthesized)
tgtacagtgcctgtgattacacaccaccacctatggagaaggctcttgtgaaaacggacattcagacagcgcttccttctggatgttatggagagtagctccaaggtctggcttggctgc

SEQ ID NO: 729969 - DNA, 120 bp, Artificial Sequence
  ENSG00000198633_20 (sequence is synthesized)
aaaacactttgttgatgtaggagctggtatcacagatgaagattatagaggaaatgttggtgttgtactctttaatttttgcaaagaaaagtttgaagtcaaaaaaaggtgatcgaattg

SEQ ID NO: 729970 - DNA, 120 bp, Artificial Sequence
  ENSG00000198633_21 (sequence is synthesized)
cacagctcatttgtgaacggattttttaatccagaaatagaagaagttcaagctttggatgacaccaaaaggggatcaggaggttttggctctaccggaaagaattaaaatttatgccaa

SEQ ID NO: 729971 - DNA, 120 bp, Artificial Sequence
  ENSG00000198633_22 (sequence is synthesized)
gaacagaaaacgagaagtcatacctttttcttaaaaacaaagagtttttgcttaaagtgttttggtgttttacacttctgtaaacttactagctttaccttctaaaagtactgcattttt

SEQ ID NO: 729972 - DNA, 120 bp, Artificial Sequence
  ENSG00000198633_23 (sequence is synthesized)
tttttatgatcaaagaagagatcatttaaaaaaagcatttctttgtgtttggatcacaaagaaactttgtttttctgcagttgatggttatttgtaaatctactttgtggtgacctgatg

SEQ ID NO: 729973 - DNA, 120 bp, Artificial Sequence
  ENSG00000198633_24 (sequence is synthesized)
taaacagtgtcttcttaaatgtacatcaattacagattaaaaaaaaaatcctgtattatttaactcaagaaatgataccccttcagcaacttaaaaaaaaaagtttgtttttgttttgtg

SEQ ID NO: 729974 - DNA, 120 bp, Artificial Sequence
  ENSG00000198642_0 (sequence is synthesized)
ggtatcctgggactaggcttttccggaaggagcggctcggtgttggggctaggccggtattctaggcccaagcccaggcccaggcctgtgttcccggcccttgctcaaagacaggccggt

SEQ ID NO: 729975 - DNA, 120 bp, Artificial Sequence
  ENSG00000198642_1 (sequence is synthesized)
ggccgctgcgacactctaggtacagcggagggcgcagcgggccgttcgctgaggtgtccggacccgccgccgagcgggccgtggagccacagtacgtggcggcgcctcttccttgcccga

SEQ ID NO: 729976 - DNA, 120 bp, Artificial Sequence
  ENSG00000198642_2 (sequence is synthesized)
agcggaactgctgaaggagcggcagcgcaggccggacgaggtgaaccaggtcatttaaccgccttcaggtgatgaatcatctgtctaataatcagatttgaggtccacagccctttgtgg

SEQ ID NO: 729977 - DNA, 120 bp, Artificial Sequence
  ENSG00000198642_3 (sequence is synthesized)
tcctgctacagggtgattttcagtggatgactgactggcgtggcccgaggggtgccgcagtgactgccttcccttgataaggaaacgagctttctgttctttctggacacctcgttacct

SEQ ID NO: 729978 - DNA, 120 bp, Artificial Sequence
  ENSG00000198642_4 (sequence is synthesized)
gtaaaacattccggttataacttctttatccggcttgcatctctgtgcaagaggaaagctttcacatgaaagtgtcccttggtaacggcgaaatgggcgtctctgcccatttgcagcctt

SEQ ID NO: 729979 - DNA, 120 bp, Artificial Sequence
  ENSG00000198642_5 (sequence is synthesized)
gtaaggcaggaaccacacgcttttttaccagcaatactcacagttcggtggtattgcaaggctttgatcagcttagaatagaaggattgctttgtgatgtgaccctggtaccaggtgatg

SEQ ID NO: 729980 - DNA, 120 bp, Artificial Sequence
  ENSG00000198642_6 (sequence is synthesized)
gagatgaaatcttccctgttcacagagctatgatggcgtctgctagtgattatttcaaagccatgttcacaggtggaatgaaagaacaagatttgatgtgcattaagcttcatggggtga

SEQ ID NO: 729981 - DNA, 120 bp, Artificial Sequence
  ENSG00000198642_7 (sequence is synthesized)
acaaggttggtctgaagaaaatcattgattttatttatactgcaaaactttctcttaatatggacaatcttcaggacacacttgaagctgctagctttttacaaatattacccgttttgg

SEQ ID NO: 729982 - DNA, 120 bp, Artificial Sequence
  ENSG00000198642_8 (sequence is synthesized)
atttctgtaaagtatttcttatatcaggagtctctttggataactgtgttgaggttggacgaattgctaacacctacaatcttatagaagtggataaatatgttaataatttcatcctga

SEQ ID NO: 729983 - DNA, 120 bp, Artificial Sequence
  ENSG00000198642_9 (sequence is synthesized)
agaactttcctgctttattgagtactggggagtttctaaaactcccttttgaacgacttgcatttgtgctttccagtaatagtcttaagcactgtaccgaacttgaactctttaaggcag

SEQ ID NO: 729984 - DNA, 120 bp, Artificial Sequence
  ENSG00000198642_10 (sequence is synthesized)
cctgtcgctggctaaggttggaagaccctcggatggattatgctgcaaagttaatgaagaatattcgatttccactgatgacaccacaggatctcatcaattacgtgcagacagtagatt

SEQ ID NO: 729985 - DNA, 120 bp, Artificial Sequence
  ENSG00000198642_11 (sequence is synthesized)
tcatgagaacagacaatacctgcgtgaatttgcttttggaagctagcaattaccaaatgatgccatatatgcagccagtgatgcagtcagatagaactgccattcgatctgactccactc

SEQ ID NO: 729986 - DNA, 120 bp, Artificial Sequence
  ENSG00000198642_12 (sequence is synthesized)
acttggttacattaggaggagttttgaggcagcagctggttgtcagtaaagaattacggatgtatgatgaaagggcacaagaatggagatctttagccccaatggatgctccccgttacc

SEQ ID NO: 729987 - DNA, 120 bp, Artificial Sequence
  ENSG00000198642_13 (sequence is synthesized)
agcatggtattgctgtcattggaaactttctttatgtagttggtggtcagagtaattatgatacaaaaggaaaaactgctgttgatacagttttcagatttgatcctcggtataataaat

SEQ ID NO: 729988 - DNA, 120 bp, Artificial Sequence
  ENSG00000198642_14 (sequence is synthesized)
ggatgcaggttgcatcattaaatgaaaagcgcacattctttcacttgagtgccctcaaaggacatttgtatgcagttggtgggcgcagtgcagctggtgaactggccacagtagaatgtt

SEQ ID NO: 729989 - DNA, 120 bp, Artificial Sequence
  ENSG00000198642_15 (sequence is synthesized)
acaacccaagaatgaatgagtggagctatgttgcaaaaatgagtgaaccccactatggtcatgctggaacagtatatggaggcttaatgtatatttcaggaggaattacccatgacactt

SEQ ID NO: 729990 - DNA, 120 bp, Artificial Sequence
  ENSG00000198642_16 (sequence is synthesized)
tccaaaatgagctcatgtgttttgacccagatacagataaatggatgcaaaaggctccaatgactacagtcagaggtctgcattgcatgtgtacagttggagataagctctatgtcattg

SEQ ID NO: 729991 - DNA, 120 bp, Artificial Sequence
  ENSG00000198642_17 (sequence is synthesized)
gtggcaatcacttcagaggaacaagtgattatgatgatgttctaagctgtgaatactattcaccaacccttgaccagtggaccccaattgccgccatgttaagaggccaaagtgatgttg

SEQ ID NO: 729992 - DNA, 120 bp, Artificial Sequence
  ENSG00000198642_18 (sequence is synthesized)
gagttgccgtctttgaaaataaaatctatgttgttggtggatattcttggaataatcgttgtatggtagaaattgtccagaaatatgacccagaaaaagatgagtggcataaagtttttg

SEQ ID NO: 729993 - DNA, 120 bp, Artificial Sequence
  ENSG00000198642_19 (sequence is synthesized)
atcttccagagtcacttggtggcattcgagcctgtacactcacagtttttccacctgaagaaaaccctgggtcaccttctagagaatcacctctttcagcaccttcagatcattcttagg

SEQ ID NO: 729994 - DNA, 120 bp, Artificial Sequence
  ENSG00000198642_20 (sequence is synthesized)
tctaaggtgtaacacctttgcagtacgtcatgggtgatctaatacttccccttcagttgtatcttcttacagtgattggtacagttattagatataaaggtaactgatgttattcgtctt

SEQ ID NO: 729995 - DNA, 120 bp, Artificial Sequence
  ENSG00000198642_21 (sequence is synthesized)
gtatggcttttagtatgtttatcaagtggctaacaaatgcattctgaaaatgtatttaacatagctgttttaacaaatgaaaaaaagacgtagaaaaatgtttagatgtctttttgtgat

SEQ ID NO: 729996 - DNA, 120 bp, Artificial Sequence
  ENSG00000198642_22 (sequence is synthesized)
gttatataaaattgtagatgactgtggtaaatgtgtaattatgtccattatgcttcaaagttgagttttcatctttgactccaaaatgtcagagggaggccgctctaaactaaaaataac

SEQ ID NO: 729997 - DNA, 120 bp, Artificial Sequence
  ENSG00000198642_23 (sequence is synthesized)
aagtttcttacgtagacagaaataataaaaatattaactaggaaaaaacagtatagcaccaagccagtatttggtatctctctctagagcgagcaagagagggagagaggaggaaaaaat

SEQ ID NO: 729998 - DNA, 120 bp, Artificial Sequence
  ENSG00000198642_24 (sequence is synthesized)
acacataatacaaacatacatgcatgcacacatacatacatatgtatacacacacataatttgaaaactgattggcacttcaacgatgctgaaattgtttttaaattgaagtttctttct

SEQ ID NO: 729999 - DNA, 120 bp, Artificial Sequence
  ENSG00000198642_25 (sequence is synthesized)
tccacaaagcagccgtttctattcaaatggaaattcagtaccagagaataaatgtctatgtagtcatactgaatttagatagataagggctacagcatactaaatcgacaaccaaatttg

SEQ ID NO: 730000 - DNA, 120 bp, Artificial Sequence
  ENSG00000198642_26 (sequence is synthesized)
tcatgtgactaaaccgttacttcagatgaagcttacattactgttttctgcttgtgtattttctgtagagtacttttacacagattggtaaagttcaggtttcagagaactgcttttgtg

SEQ ID NO: 730001 - DNA, 120 bp, Artificial Sequence
  ENSG00000198642_27 (sequence is synthesized)
cagaaaatttaggttcttttttccacctttttggtcagtaaaacttaatgaaaaaagcaaagaaaaaaatattctgaacaaagctatagggttttaagttcagcctcccaacttagtcat

SEQ ID NO: 730002 - DNA, 120 bp, Artificial Sequence
  ENSG00000198642_28 (sequence is synthesized)
cctaacatgattattttgtgatttggggtgcttgccctggtgctgttccagtccatgtgcatcctgagctgtgtgatctgcctcgaggctatgatctgagcaagcaggagataacatttt

SEQ ID NO: 730003 - DNA, 120 bp, Artificial Sequence
  ENSG00000198642_29 (sequence is synthesized)
cttctgcatcaagtgaggaaaaatgtgcttttggccatgtctcaaagacaggaccaacttcagattcccaaagaagccagctacagagcctctggaacactatggtcttacaagcagtac

SEQ ID NO: 730004 - DNA, 120 bp, Artificial Sequence
  ENSG00000198642_30 (sequence is synthesized)
taaaatcaaccctcagcctcttcaatgccaaaggtatccctattggttgagaaccacatggtaatttttaatgggacttttatcagcaaatggagttacaggaattctctgtaatgagtg

SEQ ID NO: 730005 - DNA, 120 bp, Artificial Sequence
  ENSG00000198642_31 (sequence is synthesized)
attctgaagaggtactttcctggaataattgtctacctgaagaaaaaaaatttatatatacattgtgtgtgtgtgtaatacacacacacaaccccctatacctggaagattgtcagcatg

SEQ ID NO: 730006 - DNA, 120 bp, Artificial Sequence
  ENSG00000198642_32 (sequence is synthesized)
taaatcaggaacaactttctccttattgacaatcccataataaaactcaggaaccaaggcaaaatgaattggcttctaggggtctgaaccttactgcccatacaagtgttgattcatttt

SEQ ID NO: 730007 - DNA, 120 bp, Artificial Sequence
  ENSG00000198642_33 (sequence is synthesized)
aatgctgtttatgatttctgcattggcagaaattttcatactttctatgtttttttaattactcagttttttattactaaaaatagcacatttgagtacatttgaaaagtagaaaaatta

SEQ ID NO: 730008 - DNA, 120 bp, Artificial Sequence
  ENSG00000198642_34 (sequence is synthesized)
gaaattattaactttattgaataagcaagaagtgcatcctaatcctttgattattaatgaggttgaatatttgtgtgctatcggtagctgtgtttctttgatcagatgttcctgtccttt

SEQ ID NO: 730009 - DNA, 120 bp, Artificial Sequence
  ENSG00000198642_35 (sequence is synthesized)
tgcccttctgttatctgttggagttgctttgtttttcgtatcaagttataggatctctttatataataaatgtaatttaacttgcatttgcttgcatttatttcttccctcaatctgttg

SEQ ID NO: 730010 - DNA, 89 bp, Artificial Sequence
  ENSG00000198642_36 (sequence is synthesized)
cttgcatttgcttgcatttatttcttccctcaatctgttgtagttttacaaaggcaacgctgttcagttaatttttgagatcaaatttg

SEQ ID NO: 730011 - DNA, 85 bp, Artificial Sequence
  ENSG00000198642_37 (sequence is synthesized)
gttgtgcagtctggagtgcaatggcacgatgtgtgctcactgaaacctctgcctctcatgttcaggcgattctcccataccacca

SEQ ID NO: 730012 - DNA, 120 bp, Artificial Sequence
  ENSG00000198642_38 (sequence is synthesized)
gggataattttgatatggtttattttttatgtagtatttcagtgcttattctgacatatcaaggtgatactgccctgcctctattttgtacaggcttttccttttattgaaaaaaagtac

SEQ ID NO: 730013 - DNA, 120 bp, Artificial Sequence
  ENSG00000198642_39 (sequence is synthesized)
tttttattacatcttatgtctgaacctggtgcttcctattgaaataagtattgctttactaggtaaactgctctatctacatcccccacctccagcttcacccaccctgcctctcatttt

SEQ ID NO: 730014 - DNA, 120 bp, Artificial Sequence
  ENSG00000198642_40 (sequence is synthesized)
tttactttcccgtattctgcagttgacagttctcttggtaatcatacaggtagctgactaatgctatgctaatacaggttgagcagccctaatccaaaaatccaaattgctccaaaattt

SEQ ID NO: 730015 - DNA, 120 bp, Artificial Sequence
  ENSG00000198642_41 (sequence is synthesized)
aaaactttttgagggccaacaggatgccacaagtagaaaattccacaccagagctcatgtgacaggttacactcaaaacacagtgaagacttgtttcatgcacaacattattaagactat

SEQ ID NO: 730016 - DNA, 120 bp, Artificial Sequence
  ENSG00000198642_42 (sequence is synthesized)
tataattaccttcagactacgtgtctgaaacgtgaaatataaccgaagttttaagtaatattgtttagacttgggtccctcccccaggatacgtcatgtacatgcaaatattccaaaatc

SEQ ID NO: 730017 - DNA, 120 bp, Artificial Sequence
  ENSG00000198642_43 (sequence is synthesized)
ttctggtcccaagcatttcagataagggatattcaatctgtactgctcattaaacctggagtttcttatagagagaaattttaggtggttgaaatgattaaatggaaagagatttatttt

SEQ ID NO: 730018 - DNA, 120 bp, Artificial Sequence
  ENSG00000198642_44 (sequence is synthesized)
tttattttcataagctggtaattttttaaagaaagttcagactggaaaaatatttagaggataaaaactaaaagcacataaagcattatgttaacatttcttgttttagtttttcggaaa

SEQ ID NO: 730019 - DNA, 120 bp, Artificial Sequence
  ENSG00000198642_45 (sequence is synthesized)
gtattcaaaaattaacatttgttagcttttttgatatgtctattatagaacgtacaggaaaataaaagcaaactaatttatcagtgattccacatgttgaagataatttctattaatagt

SEQ ID NO: 730020 - DNA, 120 bp, Artificial Sequence
  ENSG00000198642_46 (sequence is synthesized)
atattatatatatatatatacgtacatatgtgcaggcatttgtcaaatatttttcaagtatgccagaccttaggctaaaagctggataatgaaaataaatccaccttccaaagactccta

SEQ ID NO: 730021 - DNA, 120 bp, Artificial Sequence
  ENSG00000198643_0 (sequence is synthesized)
aacactccgtctcaccctctgggcccactgcatctagaggagggccgtctgtgaggccactacccctccagcaactgggaggtgggactgtcagaagctggcccagggtggtggtcagct

SEQ ID NO: 730022 - DNA, 120 bp, Artificial Sequence
  ENSG00000198643_1 (sequence is synthesized)
gggtcagggacctacggcacctgctggaccacctcgccttctccatcgaagcagggaagtgggagcctcgagccctcgggtggaagctgaccccaagccacccttcacctggacaggatg

SEQ ID NO: 730023 - DNA, 120 bp, Artificial Sequence
  ENSG00000198643_2 (sequence is synthesized)
agagtgtcaggtgtgcttcgcctcctggccctcatctttgccatagtcacgacatggatgtttattcgaagctacatgagcttcagcatgaaaaccatccgtctgccacgctggctggca

SEQ ID NO: 730024 - DNA, 120 bp, Artificial Sequence
  ENSG00000198643_3 (sequence is synthesized)
gcctcgcccaccaaggagatccaggttaaaaagtacaagtgtggcctcatcaagccctgcccagccaactactttgcgtttaaaatctgcagtggggccgccaacgtcgtgggccctact

SEQ ID NO: 730025 - DNA, 120 bp, Artificial Sequence
  ENSG00000198643_4 (sequence is synthesized)
atgtgctttgaagaccgcatgatcatgagtcctgtgaaaaacaatgtgggcagaggcctaaacatcgccctggtgaatggaaccacgggagctgtgctgggacagaaggcatttgacatg

SEQ ID NO: 730026 - DNA, 120 bp, Artificial Sequence
  ENSG00000198643_5 (sequence is synthesized)
ccggggggtgcactggtgctggtggcctcctacgacgatccagggaccaaaatgaacgatgaaagcaggaaactcttctctgacttggggagttcctacgcaaaacaactgggcttccgg

SEQ ID NO: 730027 - DNA, 120 bp, Artificial Sequence
  ENSG00000198643_6 (sequence is synthesized)
gacagctgggtcttcataggagccaaagacctcaggggtaaaagcccctttgagcagttcttaaagaacagcccagacacaaacaaatacgagggatggccagagctgctggagatggag

SEQ ID NO: 730028 - DNA, 120 bp, Artificial Sequence
  ENSG00000198643_7 (sequence is synthesized)
ggctgcatgcccccgaagccattttagggtggctgtggctcttcctcagccaggggcctgaagaagctcctgcctgacttaggagtcagagcccggcaggggctgaggaggaggagcagg

SEQ ID NO: 730029 - DNA, 120 bp, Artificial Sequence
  ENSG00000198643_8 (sequence is synthesized)
gggtgctgcgtggaaggtgctgcaggtccttgcacgctgtgtcgcgcctctcctcctcggaaacagaaccctcccacagcacatcctacccggaagaccagcctcagagggtccttctgg

SEQ ID NO: 730030 - DNA, 120 bp, Artificial Sequence
  ENSG00000198643_9 (sequence is synthesized)
aaccagctgtctgtggagagaatggggtgctttcgtcagggactgctgacggctggtcctgaggaaggacaaactgcccagacttgagcccaattaaattttatttttgctggttttgaa

SEQ ID NO: 730031 - DNA, 120 bp, Artificial Sequence
  ENSG00000198643_10 (sequence is synthesized)
ggtagctctgcaggtgctgggagggcaactcagcccagaggaagagcaggctggggagccctcaccgcccaatggggactgacccctggcccctgcccctctccaccccactgccctgaa

SEQ ID NO: 730032 - DNA, 120 bp, Artificial Sequence
  ENSG00000198643_11 (sequence is synthesized)
gccagatttcctgctcagcatggacaggacagcaagaggctaaccctctgcccaggtggaagctgaccccaagccacccttcacctggacaggatgagagtgtcagcccccagcccccaa

SEQ ID NO: 730033 - DNA, 80 bp, Artificial Sequence
  ENSG00000198646_0 (sequence is synthesized)
gcggccgggcgcgggcggcgggacagacgggcgcacgcgaggactgacggacggacgcaccgagggcggcgggcacgcac

SEQ ID NO: 730034 - DNA, 120 bp, Artificial Sequence
  ENSG00000198646_1 (sequence is synthesized)
gcacgcacggcccgggccggcgctccaaggcccgcccgggagggccggggccgcgctcagaattttgatttggctgctgggctgctaccttgaaatccaagccctaaaaatgccagcttc

SEQ ID NO: 730035 - DNA, 120 bp, Artificial Sequence
  ENSG00000198646_2 (sequence is synthesized)
tttggacttagaagatgacctggataaatgataaaaattaagaaagagattttgaagttttcttattgtcctcttggcatatgcttctggaataatattcaccatggttttggatgacct

SEQ ID NO: 730036 - DNA, 120 bp, Artificial Sequence
  ENSG00000198646_3 (sequence is synthesized)
tccaaacttagaagacatctatacttccttgtgttcatcaacaatggaagactcagagatggattttgactctggactagaagatgatgacacaaaaagtgatagtattttggaggattc

SEQ ID NO: 730037 - DNA, 120 bp, Artificial Sequence
  ENSG00000198646_4 (sequence is synthesized)
cacaatttttgtggccttcaaaggaaatatagatgataaagacttcaaatggaaattagatgcaatattgaaaaacgtgcccaatttgttacacatggagtccagcaagctaaaagtaca

SEQ ID NO: 730038 - DNA, 120 bp, Artificial Sequence
  ENSG00000198646_5 (sequence is synthesized)
gaaggtggagccctggaacagcgtgcgtgtgacattcaacatcccccgggaagcagcggagcggctacggatccttgctcagagcaacaaccagcagcttcgggatttagggattctctc

SEQ ID NO: 730039 - DNA, 120 bp, Artificial Sequence
  ENSG00000198646_6 (sequence is synthesized)
cgttcagattgaaggggaaggtgctattaacctggctttggctcagaaccgaagccaagatgtgagaatgaatggacccatgggagctggaaattcagttaggatggaggcgggatttcc

SEQ ID NO: 730040 - DNA, 120 bp, Artificial Sequence
  ENSG00000198646_7 (sequence is synthesized)
tatggcaagtggtccaggaataataaggatgaacaaccctgccactgttatgatacccccgggtggaaatgtgtcatcttccatgatggcaccaggccccaatccagagctgcagcccag

SEQ ID NO: 730041 - DNA, 120 bp, Artificial Sequence
  ENSG00000198646_8 (sequence is synthesized)
gactcctcgccctgcttctcagtcagatgcaatggatccactcctctctgggctccatatacagcagcaaagtcatccctcaggatctttagctcccccacatcacccaatgcagcctgt

SEQ ID NO: 730042 - DNA, 120 bp, Artificial Sequence
  ENSG00000198646_9 (sequence is synthesized)
ctcccccacatcacccaatgcagcctgtctctgtgaacagacaaatgaacccagctaattttccccagctgcagcagcagcagcaacaacaacaacagcagcagcagcagcagcagcagc

SEQ ID NO: 730043 - DNA, 120 bp, Artificial Sequence
  ENSG00000198646_10 (sequence is synthesized)
gcaggcaagacccccacagcaacatcagcagcaacagccacagggaattcgaccccagtttactgccccaactcaggtgcctgttcctccaggctggaaccagctgccttctggagccct

SEQ ID NO: 730044 - DNA, 120 bp, Artificial Sequence
  ENSG00000198646_11 (sequence is synthesized)
tcaacctcctccagcccagggttctctgggcacaatgactgcaaaccaagggtggaagaaggctcccttgcccggcccaatgcaacagcaactccaggcaagaccatccttagccacggt

SEQ ID NO: 730045 - DNA, 120 bp, Artificial Sequence
  ENSG00000198646_12 (sequence is synthesized)
acagacgccttcccaccctccccctccatatccctttggcagccagcaagcctcacaagcccacacaaactttcctcagatgagcaacccaggccagttcacagctcctcagatgaagag

SEQ ID NO: 730046 - DNA, 120 bp, Artificial Sequence
  ENSG00000198646_13 (sequence is synthesized)
tttgcagggagggccctctagggtcccaactcccttgcagcagccccacctcaccaacaagtctcctgcctcctcaccctcctccttccagcagggatcccctgcatcctccccaacggt

SEQ ID NO: 730047 - DNA, 120 bp, Artificial Sequence
  ENSG00000198646_14 (sequence is synthesized)
taaccaaactcagcagcagatgggaccaaggccacctcaaaataacccacttccccagggatttcagcagcctgtcagctctccgggtcggaatcctatggttcaacagggaaatgtgcc

SEQ ID NO: 730048 - DNA, 120 bp, Artificial Sequence
  ENSG00000198646_15 (sequence is synthesized)
acctaacttcatggtgatgcagcagcaaccaccaaaccaggggccacagagtttacatccaggcctaggaggaatgcctaaacgcctcccacctggcttctcagcaggacaggccaatcc

SEQ ID NO: 730049 - DNA, 120 bp, Artificial Sequence
  ENSG00000198646_16 (sequence is synthesized)
gaactttatgcaaggtcaggtgccttcgaccacagcaaccacccctgggaattcaggagcccctcagctgcaagcaaatcaaaatgtccagcatgcaggtggtcaaggagctggtcctcc

SEQ ID NO: 730050 - DNA, 120 bp, Artificial Sequence
  ENSG00000198646_17 (sequence is synthesized)
tcaaaaccagatgcaggtgtcccacgggccgccaaatatgatgcagcccagcctcatgggaattcatggcaacatgaacaatcagcaggctggtacttctggggttcctcaagtgaacct

SEQ ID NO: 730051 - DNA, 120 bp, Artificial Sequence
  ENSG00000198646_18 (sequence is synthesized)
cagcaacatgcaaggccagccccagcagggcccaccatctcagctgatgggcatgcaccagcaaatcgtgccctcccagggccagatggtccagcaacaaggaaccttgaaccctcagaa

SEQ ID NO: 730052 - DNA, 120 bp, Artificial Sequence
  ENSG00000198646_19 (sequence is synthesized)
ccctatgatcctttcaagggcccagcttatgccacagggccagatgatggtgaaccccccgagccaaaatcttgggccctcgccccaaaggatgaccccacccaagcagatgctttccca

SEQ ID NO: 730053 - DNA, 120 bp, Artificial Sequence
  ENSG00000198646_20 (sequence is synthesized)
gcagggcccacaaatgatggcgccacataaccagatgatggggcctcaggggcaggttttgctccaacagaacccaatgatagagcagattatgaccaatcaaatgcaggggaataagca

SEQ ID NO: 730054 - DNA, 120 bp, Artificial Sequence
  ENSG00000198646_21 (sequence is synthesized)
gcagtttaacactcagaaccagtccaatgtcatgccgggaccagcccagataatgaggggaccaactccaaacatgcaaggaaatatggtgcagtttacgggacagatgtcaggacagat

SEQ ID NO: 730055 - DNA, 120 bp, Artificial Sequence
  ENSG00000198646_22 (sequence is synthesized)
gctgccccagcaagggcctgtgaacaacagtccatctcaggttatgggcattcagggacaggtcctgcggccaccagggcccagcccacacatggcccagcagcatggtgatcctgctac

SEQ ID NO: 730056 - DNA, 120 bp, Artificial Sequence
  ENSG00000198646_23 (sequence is synthesized)
tacagcaaataacgatgtcagtttatctcagatgatgcctgatgttagcattcaacaaaccaacatggtcccccctcatgtgcaggccatgcagggaaacagtgcctcgggaaaccactt

SEQ ID NO: 730057 - DNA, 120 bp, Artificial Sequence
  ENSG00000198646_24 (sequence is synthesized)
ctcaggccatgggatgtctttcaatgcacctttcagtggagctcccaatggaaatcagatgtcctgtggtcaaaatccaggcttcccagtcaataaggatgtcacgctaacgagcccatt

SEQ ID NO: 730058 - DNA, 120 bp, Artificial Sequence
  ENSG00000198646_25 (sequence is synthesized)
gttggtcaacttattgcagagtgacatatctgcaggccattttggggtaaacaataagcaaaataataccaacgcaaataaaccgaagaagaagaaaccccctcggaagaagaaaaatag

SEQ ID NO: 730059 - DNA, 120 bp, Artificial Sequence
  ENSG00000198646_26 (sequence is synthesized)
tcagcaagatctaaacaccccagatactcgcccagctggtctggaagaggctgatcagccaccgttgcctggagaacaaggaattaacttggataactcaggccctaaactgccagaatt

SEQ ID NO: 730060 - DNA, 120 bp, Artificial Sequence
  ENSG00000198646_27 (sequence is synthesized)
ttcaaaccggccaccaggttatccttctcaaccagttgaacagaggccacttcagcagatgcctcctcaactcatgcagcatgtggcacccccaccacagccaccacagcagcagccaca

SEQ ID NO: 730061 - DNA, 120 bp, Artificial Sequence
  ENSG00000198646_28 (sequence is synthesized)
gccacaactgcctcagcagcagcagccaccacctcccagtcagccacagtctcagcagcagcagcagcagcagcaacaaatgatgatgatgctcatgatgcagcaggatcccaaatcagt

SEQ ID NO: 730062 - DNA, 120 bp, Artificial Sequence
  ENSG00000198646_29 (sequence is synthesized)
gcttccagtctctcaaaatgtccatcctccaaggggccccctgaaccccgactcccagagaatgcccatgcaacagagtggcagtgtgcctgtcatggtcagtctgcaaggacctgcctc

SEQ ID NO: 730063 - DNA, 120 bp, Artificial Sequence
  ENSG00000198646_30 (sequence is synthesized)
cgtgccaccatcacctgataaacaaagaatgccaatgcctgtgaatactcccttgggaagcaattcaaggaaaatggtctatcaggagagcccgcagaatccttccagctcgccactggc

SEQ ID NO: 730064 - DNA, 120 bp, Artificial Sequence
  ENSG00000198646_31 (sequence is synthesized)
ggagatggcctcactccctgaagcaagtggcagtgaagcaccatctgtcccaggaggcccaaacaacatgccttcacatgtagtacttccccagaatcagttaatgatgacagggccaaa

SEQ ID NO: 730065 - DNA, 120 bp, Artificial Sequence
  ENSG00000198646_32 (sequence is synthesized)
acctggaccatcgcccctttcagcaactcaaggtgcaactccccagcaaccccctgtaaattccctgcccagctctcacggccaccacttcccaaatgtggctgcgccaacccagacatc

SEQ ID NO: 730066 - DNA, 120 bp, Artificial Sequence
  ENSG00000198646_33 (sequence is synthesized)
taggcccaaaacaccaaacagagccagccccagaccctattatcctcagacacccaacaaccgccctcccagcacagaaccttcagaaatcagtctgtcaccagaaagactcaatgcctc

SEQ ID NO: 730067 - DNA, 120 bp, Artificial Sequence
  ENSG00000198646_34 (sequence is synthesized)
catagcaggactcttccctccacagattaatattcctttacctcctaggccaaatttaaacaggggctttgatcaacaaggcctaaatccaacaactttgaaggccatcgggcaagcacc

SEQ ID NO: 730068 - DNA, 120 bp, Artificial Sequence
  ENSG00000198646_35 (sequence is synthesized)
ttcaaatcttaccatgaatccttccaattttgctaccccacaaactcacaaattagattctgtggtagtgaattctggaaagcagtctaattctggagcaacaaaacgggcaagtccaag

SEQ ID NO: 730069 - DNA, 120 bp, Artificial Sequence
  ENSG00000198646_36 (sequence is synthesized)
caacagtcgcaggtctagtcctgggtccagtaggaaaaccactccaagccctgggaggcaaaattcaaaagcccctaaacttactctggcctctcagacaaatgcagccctattgcagaa

SEQ ID NO: 730070 - DNA, 120 bp, Artificial Sequence
  ENSG00000198646_37 (sequence is synthesized)
tgtggagttgccgagaaatgtattggtcagtcccactcctctggccaatccccctgtacctgggagctttcctaacaacagtgggctgaatcctcagaattctactgtgtctgtggctgc

SEQ ID NO: 730071 - DNA, 120 bp, Artificial Sequence
  ENSG00000198646_38 (sequence is synthesized)
agttgggggtgttgttgaggataacaaggagagcttgaatgtgcctcaggacagtgattgccagaattcccagagtaggaaggaacaggtaaacattgaactaaaagcagtccctgccca

SEQ ID NO: 730072 - DNA, 120 bp, Artificial Sequence
  ENSG00000198646_39 (sequence is synthesized)
agaagttaaaatggttgtccctgaagatcagtccaaaaaggatgggcagccttcggatcctaacaaacttcccagtgtcgaagagaacaaaaatttggtgtctcctgctatgagggaagc

SEQ ID NO: 730073 - DNA, 120 bp, Artificial Sequence
  ENSG00000198646_40 (sequence is synthesized)
accaacatcgttaagtcaacttcttgacaactctggagctcccaatgtgacaattaaaccccctgggcttacagatctggaagtaacacctccagtagtttctggggaggacctcaaaaa

SEQ ID NO: 730074 - DNA, 120 bp, Artificial Sequence
  ENSG00000198646_41 (sequence is synthesized)
agcatctgtcattcccacactgcaggatctgtcttcttctaaagaaccttctaattccctaaacttacctcacagtaatgagctgtgttcatcccttgtgcatcccgaattgagtgaggt

SEQ ID NO: 730075 - DNA, 120 bp, Artificial Sequence
  ENSG00000198646_42 (sequence is synthesized)
cagttctaacgttgcaccaagcatccctccagtaatgtcaagacctgttagctcttcctccatttccactcccttgcccccaaatcaaataactgtatttgtcacttccaatcccatcac

SEQ ID NO: 730076 - DNA, 120 bp, Artificial Sequence
  ENSG00000198646_43 (sequence is synthesized)
aacttcagctaacacatcagcagctttgccaactcacttgcagtctgcattgatgtcaacagttgtcacaatgcccaatgcgggtagcaaggttatggtttctgagggacagtcagctgc

SEQ ID NO: 730077 - DNA, 120 bp, Artificial Sequence
  ENSG00000198646_44 (sequence is synthesized)
tcagtctaatgcccggcctcagttcattacacctgtctttatcaattcatcctcaataattcaggttatgaaaggatcacagccaagcacaattcctgcagccccactgacaaccaactc

SEQ ID NO: 730078 - DNA, 120 bp, Artificial Sequence
  ENSG00000198646_45 (sequence is synthesized)
tggcctgatgcctccctctgttgcagttgttggccctttacacatacctcagaacataaaattttcttctgctcctgtaccgcctaatgccctctccagtagtcctgctccaaacatcca

SEQ ID NO: 730079 - DNA, 120 bp, Artificial Sequence
  ENSG00000198646_46 (sequence is synthesized)
gacaggtcgacctttggtccttagctcacgagccacccctgttcagcttccttcccctccttgtacgtcttctccagttgtcccttctcatccccctgtgcagcaagtgaaagaattgaa

SEQ ID NO: 730080 - DNA, 120 bp, Artificial Sequence
  ENSG00000198646_47 (sequence is synthesized)
tccagatgaggctagccctcaggtgaacacctcagcagatcagaacactcttccctcttcacagtcaaccacaatggtttctccccttttgaccaatagtccagggtcctctggcaaccg

SEQ ID NO: 730081 - DNA, 120 bp, Artificial Sequence
  ENSG00000198646_48 (sequence is synthesized)
gcgaagcccagtctcgtctagtaagggcaaaggaaaagtggacaaaattggccaaattttgttgaccaaggcatgtaagaaagttacaggctctcttgagaaaggggaagaacaatatgg

SEQ ID NO: 730082 - DNA, 120 bp, Artificial Sequence
  ENSG00000198646_49 (sequence is synthesized)
tgcagatggagagactgaaggccaagggctagacaccacagctccggggctcatgggaacagagcagttatccacagagctggacagtaaaaccccaacgcccccagcacccactctgct

SEQ ID NO: 730083 - DNA, 120 bp, Artificial Sequence
  ENSG00000198646_50 (sequence is synthesized)
aaaaatgacctctagccctgtgggcccgggcactgcctcagcaggacccagcttacctggcggtgctctccccaccagtgtacgctcgatagtaaccactctggtaccctccgagctcat

SEQ ID NO: 730084 - DNA, 120 bp, Artificial Sequence
  ENSG00000198646_51 (sequence is synthesized)
ctccgccgtaccgaccacaaaaagcaatcatggtggcatagcatctgagtcacttgcgggtggcctagtggaggagaaggtgggatcccatccagaacttctacccagcatagccccgtc

SEQ ID NO: 730085 - DNA, 120 bp, Artificial Sequence
  ENSG00000198646_52 (sequence is synthesized)
gcagaatttagtctcaaaggaaacttcaaccacagcactgcaggcctctgttgccagaccagagctggaggtaaatgctgccatagtctctggacaaagcagtgagcccaaagagatagt

SEQ ID NO: 730086 - DNA, 120 bp, Artificial Sequence
  ENSG00000198646_53 (sequence is synthesized)
tgaaaagtccaaaatcccaggccgaagaaactcccgaactgaagagccaactgtggcctctgaaagtgtggaaaatggacatcgtaaacgatcttctcgacctgcttcagcctccagctc

SEQ ID NO: 730087 - DNA, 120 bp, Artificial Sequence
  ENSG00000198646_54 (sequence is synthesized)
tactaaagacataaccagtgcggtgcaatccaagcgaagaaaatccaagtaaacaagcaggactgcgacttgatacttggaaatgtgtgtgacttttacaaagagcaattttgagctgtg

SEQ ID NO: 730088 - DNA, 120 bp, Artificial Sequence
  ENSG00000198646_55 (sequence is synthesized)
acttttttaaatcaatttctgtacagttagtaattttaataatgtggcccttttcctagtccctgcaacctgtttcataaagtgcaatggggaaagcaggactgttgagcccttttggtg

SEQ ID NO: 730089 - DNA, 120 bp, Artificial Sequence
  ENSG00000198646_56 (sequence is synthesized)
ttgcgagttgaagttcaaggtttctaaaatgttgtcttgtattgaaaggagctaatgccattataaatgttactagttttcacatttcctaagcagcctagagtacagggtgagcatttt

SEQ ID NO: 730090 - DNA, 120 bp, Artificial Sequence
  ENSG00000198646_57 (sequence is synthesized)
tagatctcctaatgatgtattgtgccgtggaagtactgtgtgtgaatagcagtagtgggggcaaaagcaatcttctcatttggaaatgttgtaaataattttattatatagtgttttgga

SEQ ID NO: 730091 - DNA, 120 bp, Artificial Sequence
  ENSG00000198646_58 (sequence is synthesized)
tgtatttgttgtagaaatggaccagtgaataaagagaatctaaggatttgtacaatgtgaaataacgtgttaaataaatgtcattgtcatagaacataaagttatgttattggtaaggga

SEQ ID NO: 730092 - DNA, 120 bp, Artificial Sequence
  ENSG00000198646_59 (sequence is synthesized)
actccgtctcaaaaaaaaaaaaaaaagtgaaaggaaaatgaggggagaattctcattgataataagggcgaaaaggtttttttggcagagtaatagagttttggaaaccattgcaaagct

SEQ ID NO: 730093 - DNA, 120 bp, Artificial Sequence
  ENSG00000198646_60 (sequence is synthesized)
agttttggaaaccattgcaaagctgtcaagtgtggtgtagtttttggttaaggaaatcagaggtgtcagcagacataaaagacaggggaaaacatgggaagtgtcctacctatagtgtag

SEQ ID NO: 730094 - DNA, 120 bp, Artificial Sequence
  ENSG00000198646_61 (sequence is synthesized)
aaaaagcacaactatctatgtcagaggtcgacagactgtggtccataggtcaaatctggcccacgatctgtttttgtaaataacgttttattggaacatagccacactcatttatttata

SEQ ID NO: 730095 - DNA, 120 bp, Artificial Sequence
  ENSG00000198646_62 (sequence is synthesized)
tattgtccatatcttcttttgtggtaccaatagcagagttgagtagtcgtgacagagatgtgttgtgtcagctcacaaagctggaaatactctttacaaaaacatttgccaacccctgat

SEQ ID NO: 730096 - DNA, 120 bp, Artificial Sequence
  ENSG00000198646_63 (sequence is synthesized)
ctatgtgtttgagtgttggatgttcaacctctaatttgccatccaatgtctatatgatgatagagaatgaataaacgtcttggctctgccctttgggctggattacccatgctctgtgta

SEQ ID NO: 730097 - DNA, 120 bp, Artificial Sequence
  ENSG00000198646_64 (sequence is synthesized)
cctgcagcataacacagacccctgaatatttatatcagtcagtgatggcaaggtctattgttctggagtgtactgtgtggtaactgtggtagtgccagctttacacggattagataatgc

SEQ ID NO: 730098 - DNA, 120 bp, Artificial Sequence
  ENSG00000198646_65 (sequence is synthesized)
tcgggcttgttttgccattttttttattgggttgtcttttacaaaagatttatttatatattctgattattaatcctttgttgttggtagatattacagatgtcatttcccagtttcttg

SEQ ID NO: 730099 - DNA, 81 bp, Artificial Sequence
  ENSG00000198646_66 (sequence is synthesized)
gcttattttaaaacatctgttttaaggtgtcatttgttaaaaagttctgaattttagtatcaactttatcaatcttttcct

SEQ ID NO: 730100 - DNA, 120 bp, Artificial Sequence
  ENSG00000198646_67 (sequence is synthesized)
tcatttgttaaaaagttctgaattttagtatcaactttatcaatcttttcctttaagatttgcagttattctttgttttgaggcagggtctcgctctgtcaccgaggctggagtgcagtg

SEQ ID NO: 730101 - DNA, 120 bp, Artificial Sequence
  ENSG00000198646_68 (sequence is synthesized)
agcctcaacctcctgggctcaagcaaccctcccacctcccatgccagttgagaccacaggcatgcgccaccatgccctgctactttttgcattttttgtagaggcggggtttcgccatgt

SEQ ID NO: 730102 - DNA, 77 bp, Artificial Sequence
  ENSG00000198646_69 (sequence is synthesized)
tccgcaattattctttatattctggaatacctactgttgttttcaatggttagatctttaatgtatctggaatggat

SEQ ID NO: 730103 - DNA, 120 bp, Artificial Sequence
  ENSG00000198646_70 (sequence is synthesized)
tgttttcaatggttagatctttaatgtatctggaatggattcttatgtgtagtgtaaggtcgggtccagtttcattttttttccctatgtataaccagtgatcccagcatcatttattga

SEQ ID NO: 730104 - DNA, 120 bp, Artificial Sequence
  ENSG00000198646_71 (sequence is synthesized)
atggggcttgctttcaaattgtgagctctttttggtggagtctgtctcaggtccttattaagcactgctgcttgctgattgtgtgaccttggacaaataaaacctcattgcgcctcagtc

SEQ ID NO: 730105 - DNA, 120 bp, Artificial Sequence
  ENSG00000198646_72 (sequence is synthesized)
tttaaggataatagtaatctcatagggttttgtgaggattaaatgagtcaatatacataacgtgtaaaacagtgcttggcacctagaacatgctcaataaatattagctgtactttagca

SEQ ID NO: 730106 - DNA, 120 bp, Artificial Sequence
  ENSG00000198646_73 (sequence is synthesized)
ctactgttcatttctgattcctcagcacctggtacagagcaggggctcattttgctcaattaaattgccaaattaatttggttttcaggtcaatcagaatggtgagagttgggctgagtg

SEQ ID NO: 730107 - DNA, 120 bp, Artificial Sequence
  ENSG00000198646_74 (sequence is synthesized)
ttgcaggagatgcttccaaggagctacttagttttaggggctgccttagattatctgctaggatagaactcttctcacgccatcacttttgcagagaacttctgtagcagaggttgcaaa

SEQ ID NO: 730108 - DNA, 120 bp, Artificial Sequence
  ENSG00000198646_75 (sequence is synthesized)
ctggcaacctgtggttggatttgacctgtataagtattttgtttggtttacacaatatttttaatgtcttaaaaatgtacacagacctctgagtttctgacttaaccttgaaaaattgga

SEQ ID NO: 730109 - DNA, 120 bp, Artificial Sequence
  ENSG00000198646_76 (sequence is synthesized)
agatctgtcaacagcaagcccatattcatttatagcggtaaccagctgaaacttttaggtcctgggaggaatggagaggggtcccactgactaacttttctgagagtggtcagagagttc

SEQ ID NO: 730110 - DNA, 120 bp, Artificial Sequence
  ENSG00000198646_77 (sequence is synthesized)
ctcccagtctcaacctcaaggcatcgtggtttgtttgtgtgaactgcgcttaatggccctgtcagcaaggaggtgatgatcaggacaggattcacttcagagagaagagacatttgggtg

SEQ ID NO: 730111 - DNA, 120 bp, Artificial Sequence
  ENSG00000198646_78 (sequence is synthesized)
gttttcaattgtttgctgccacaaataatgctacagtgactatccttggatatacagaatagtttcagagaagtgaactgcaagattgataggaacttcctgctacacaacccaaggaga

SEQ ID NO: 730112 - DNA, 120 bp, Artificial Sequence
  ENSG00000198646_79 (sequence is synthesized)
tttggggagttgaagctttgggcttatatgaaattagaggttgcaactgagacccttgataaatctaggacccttgaagggctacacccacagtgaaagaacaaactaggggaaaaacca

SEQ ID NO: 730113 - DNA, 120 bp, Artificial Sequence
  ENSG00000198646_80 (sequence is synthesized)
acacctactagcgaagggagacaaaaaggatgtgtccatcttgacctggtctttgggtaagagggaaaataatctcctgagaatttgaaaccacatgcctaccctccatgagtctggcgt

SEQ ID NO: 730114 - DNA, 120 bp, Artificial Sequence
  ENSG00000198646_81 (sequence is synthesized)
tcacatttgcatcacctgcatggctgggaatctcgaagctgagaaattaatataaaaagcgacccactctgaaatgatctctcagatgcctggaagaaataaatgtaaatcctctctgga

SEQ ID NO: 730115 - DNA, 120 bp, Artificial Sequence
  ENSG00000198646_82 (sequence is synthesized)
aaaagtggcaacaaggtggatggagatgttttaaaatgaaaacggtctcttccacatgagaggaagagacttattttgctaacctggttgtaactggatgaaatatgaacaaggaagggt

SEQ ID NO: 730116 - DNA, 120 bp, Artificial Sequence
  ENSG00000198646_83 (sequence is synthesized)
gaacttagttctattaatccaaacagattatttcaccatgtggagtagaaataaaaatagaccaagtgtcttatgtcccaaacaaaccaagttgtatctgtgccagctttgtctccatac

SEQ ID NO: 730117 - DNA, 120 bp, Artificial Sequence
  ENSG00000198646_84 (sequence is synthesized)
catgtagggtgagaatcctgctgggcacagggacactttagcctaaatagggcatagagaattcttgtagactcctagcttctctctgtggcagctcccacatttcatttctatccttta

SEQ ID NO: 730118 - DNA, 120 bp, Artificial Sequence
  ENSG00000198646_85 (sequence is synthesized)
tggctttgaagaaactagccctgttcagcactgtgccagtttccccatctgcagaatggctggctccatgctcccttaacatacctcccagtctcaacctcaaggcatcgtggtttgttt

SEQ ID NO: 730119 - DNA, 120 bp, Artificial Sequence
  ENSG00000198646_86 (sequence is synthesized)
gtgtgaactgcgcttaatggccctgtcagcaaggaggtgatgatcaggacaggattcacttcagagagaagagctggtgctcccatgaaggaccaaatgctatgtgtggagagggccaca

SEQ ID NO: 730120 - DNA, 120 bp, Artificial Sequence
  ENSG00000198646_87 (sequence is synthesized)
gagagtggtcccctgccaacagaaagtgagaaaacagggccttgctaatatggtcacaagaaaatgaattcttccaacatccagagggagcttggaagttgatctttctctagtcaagcc

SEQ ID NO: 730121 - DNA, 120 bp, Artificial Sequence
  ENSG00000198646_88 (sequence is synthesized)
tccatatgaggacacacctggccaacaccttgatttcagacttgtgggatcccaagcagagaacccagatgtgcctagacttctgacttagagaattgtgagctaataaacaggtgctgt

SEQ ID NO: 730122 - DNA, 120 bp, Artificial Sequence
  ENSG00000198646_89 (sequence is synthesized)
ttcagagagaagagcagctggtgctcccatgaaggaccaaatgctatgtgtggagagggccacaagaggaggacccaagagggacctctacaagctgagagttgagagtggtcccctgcc

SEQ ID NO: 730123 - DNA, 120 bp, Artificial Sequence
  ENSG00000198648_0 (sequence is synthesized)
gctccctcccctcctagctggcttcggcggggacggcggcggcggcggcgggcggggagggcgtgcgccggccgagaggtgtcggcggcgaggcaaaggaagtttcaagtggaaggtcgt

SEQ ID NO: 730124 - DNA, 120 bp, Artificial Sequence
  ENSG00000198648_1 (sequence is synthesized)
ccgtcggccggcgcgtcctcctgctctcctccgcagcatcatggcggagccgagcggctcgcccgtgcacgtccagcttccccagcaggcggccccggtgacagcggcggcggcggcggc

SEQ ID NO: 730125 - DNA, 120 bp, Artificial Sequence
  ENSG00000198648_2 (sequence is synthesized)
ggccccggcagctcccgcggccccggccccggccccggccccggcggcacaggctgtcggctggcccatctgcagggacgcgtacgagctgcaggaggttatcggcagtggagctactgc

SEQ ID NO: 730126 - DNA, 120 bp, Artificial Sequence
  ENSG00000198648_3 (sequence is synthesized)
ggttatcggcagtggagctactgctgtggttcaggcagccctatgcaaacccaggcaagaacgtgtagcaataaaacggatcaacttggaaaaatgccagaccagtatggatgaactatt

SEQ ID NO: 730127 - DNA, 120 bp, Artificial Sequence
  ENSG00000198648_4 (sequence is synthesized)
aaaagaaattcaagccatgagtcagtgcagccatcccaacgtagtgacctattacacctcttttgtggtcaaagatgaactttggctggtcatgaaattactaagtggaggttcaatgtt

SEQ ID NO: 730128 - DNA, 120 bp, Artificial Sequence
  ENSG00000198648_5 (sequence is synthesized)
ggatatcataaaatacattgtcaaccgaggagaacacaagaatggagttctggaagaggcaataatagcaacaattcttaaagaggttttggaaggcttagactatctacacagaaacgg

SEQ ID NO: 730129 - DNA, 120 bp, Artificial Sequence
  ENSG00000198648_6 (sequence is synthesized)
tcagattcacagggatttgaaagctggtaatattcttctgggtgaggatggttcagtacaaatagcagattttggggtaagtgcgttcctagcaacagggggtgatgttacccgaaataa

SEQ ID NO: 730130 - DNA, 120 bp, Artificial Sequence
  ENSG00000198648_7 (sequence is synthesized)
agtaagaaaaacattcgttggcaccccatgttggatggctcctgaagtcatggaacaggtgagaggctatgacttcaaggctgacatgtggagttttggaataactgccattgaattagc

SEQ ID NO: 730131 - DNA, 120 bp, Artificial Sequence
  ENSG00000198648_8 (sequence is synthesized)
aacaggagcagcgccttatcacaaatatcctcccatgaaagtgttaatgttgactttgcaaaatgatccacccactttggaaacaggggtagaggataaagaaatgatgaaaaagtacgg

SEQ ID NO: 730132 - DNA, 120 bp, Artificial Sequence
  ENSG00000198648_9 (sequence is synthesized)
caagtcctttagaaaattactttcactgtgtcttcagaaagatccttccaaaaggcccacagcagcagaacttttaaaatgcaaattcttccagaaagccaagaacagagagtacctgat

SEQ ID NO: 730133 - DNA, 120 bp, Artificial Sequence
  ENSG00000198648_10 (sequence is synthesized)
tgagaagctgcttacaagaacaccagacatagcccaaagagccaaaaaggtaagaagagttcctgggtcaagtggtcaccttcataaaaccgaagacggggactgggagtggagtgacga

SEQ ID NO: 730134 - DNA, 120 bp, Artificial Sequence
  ENSG00000198648_11 (sequence is synthesized)
cgagatggatgagaagagcgaagaagggaaagcagctttttctcaggaaaagtcacgaagagtaaaagaagaaaatccagagattgcagtgagtgccagcaccatccccgaacaaataca

SEQ ID NO: 730135 - DNA, 120 bp, Artificial Sequence
  ENSG00000198648_12 (sequence is synthesized)
gtccctctctgtgcacgactctcagggcccacccaatgctaatgaagactacagagaagcttcttcttgtgccgtgaacctcgttttgagattaagaaactccagaaaggaacttaatga

SEQ ID NO: 730136 - DNA, 120 bp, Artificial Sequence
  ENSG00000198648_13 (sequence is synthesized)
cagcagatggtgtatctcaggagctcttctctgctggcttggtggatggtcacgatgtagttatagtggctgctaatttacagaagattgtagatgatcccaaagctttaaaaacattga

SEQ ID NO: 730137 - DNA, 120 bp, Artificial Sequence
  ENSG00000198648_14 (sequence is synthesized)
catttaagttggcttctggctgtgatgggtcggagattcctgatgaagtgaagctgattgggtttgctcagttgagtgtcagctgatgtatgtcccttgatgtcaccctgatctgtcatg

SEQ ID NO: 730138 - DNA, 120 bp, Artificial Sequence
  ENSG00000198648_15 (sequence is synthesized)
ccccaccgccacccctactcccttcaaccctccctctttctgcccatttcctcccaccccctcactcccatttcctagcaaaatcagaagattgtgaagaggccggcttcaacaaaatgg

SEQ ID NO: 730139 - DNA, 120 bp, Artificial Sequence
  ENSG00000198648_16 (sequence is synthesized)
gataaaaaaataattttttaaaacttacaacactccgagttctgctttattctctagcaatccacagtacaagaacaagcaaatgccacagctgcacgactgttgctcatttttccaaaa

SEQ ID NO: 730140 - DNA, 120 bp, Artificial Sequence
  ENSG00000198648_17 (sequence is synthesized)
gctatttaatattcttagcaatcaatttggatatcccttaagtgaaaagaatctgaaatacactcaggtggtcttatttattggcaacaaaaggaattttctatccagaagcctatttct

SEQ ID NO: 730141 - DNA, 120 bp, Artificial Sequence
  ENSG00000198648_18 (sequence is synthesized)
cctttcattgttgttatttctgttataatactttaattgtacatctgacaatactgcctcttttatgttgtatttagaaattaatatacttataaaattaagatttattagccaaacttg

SEQ ID NO: 730142 - DNA, 120 bp, Artificial Sequence
  ENSG00000198648_19 (sequence is synthesized)
aattctagttttaaaactgactgtgaattttatttttcatatatttatgcattacacaccttagctataagaaaaaaagggttttgattatatgcttcttgcagttaatctcgttattta

SEQ ID NO: 730143 - DNA, 120 bp, Artificial Sequence
  ENSG00000198648_20 (sequence is synthesized)
aacaaaaagttttgggtctgtctttggagtatttgtaacttctaaattttgaaatgactgaattaggaatttggatgcttattcttttagtctgtttgcctaaaaaccaatttacaatct

SEQ ID NO: 730144 - DNA, 120 bp, Artificial Sequence
  ENSG00000198648_21 (sequence is synthesized)
gactgtctcttgggagagggaggtgccttgcaaactttcacattaagaatgtgcctgaggctgctttactctggaatagtctcagatctaaaatttcctctatataaggtggcatatgtt

SEQ ID NO: 730145 - DNA, 120 bp, Artificial Sequence
  ENSG00000198648_22 (sequence is synthesized)
aagttttgcttcattggaccgtttagaatgctatgtaaaatgttgccattctgttagattgctaactatatacccatctctgatttggctctccttaagtgataggatttgttattctaa

SEQ ID NO: 730146 - DNA, 120 bp, Artificial Sequence
  ENSG00000198648_23 (sequence is synthesized)
aggtgataaacttgaaaatatcagaatctgagttttacttgaaattttgcagaatacccaggtggagtgaaaattggaagggttttgtgcaatgactaaaaggtaaaacgctgttaaggt

SEQ ID NO: 730147 - DNA, 120 bp, Artificial Sequence
  ENSG00000198648_24 (sequence is synthesized)
tcaagaatcaatactttcaacccaagtagccctctgcttgactgtatattatggaactagtaaaccttaggattttgaaaattggagtctaatctttcaaggaggtgggctcccaggatg

SEQ ID NO: 730148 - DNA, 120 bp, Artificial Sequence
  ENSG00000198648_25 (sequence is synthesized)
gtaccattgctctttcctagctaaccctagatatggcagctctttaatgtacttcaaaaagcaaatatatattactaaggaaaaaaagttatttataattgccttgtcataattgttaag

SEQ ID NO: 730149 - DNA, 120 bp, Artificial Sequence
  ENSG00000198648_26 (sequence is synthesized)
gtgttctagagccatttgcatacaatttaatgtaatttcattccattctattgtttacacaacgattactcgaagatgactgcaaaggtaaaaggaaaataaaagtgtattgcacaatga

SEQ ID NO: 730150 - DNA, 120 bp, Artificial Sequence
  ENSG00000198648_27 (sequence is synthesized)
agacaatggagaagagggctgggaaacagtttagggctcattttataggagagtttctaatcatggaagccgggcaaagatgaaatagactggaactgcaatcataaaggatctctagaa

SEQ ID NO: 730151 - DNA, 120 bp, Artificial Sequence
  ENSG00000198648_28 (sequence is synthesized)
ttggtggatggtcacgatgtagttatagtggctgctaatttacagaagattgtagatgatcccaaagctttaaaaacattgacatttaagttgaatcaatttttgcatttggaagcattt

SEQ ID NO: 730152 - DNA, 120 bp, Artificial Sequence
  ENSG00000198648_29 (sequence is synthesized)
aagagcggccatataagaatcttgaagcctagatcattttgcttgcagtttgtattgcaacttgaccataaagacaaaattacactgaattcaaagcaacactcttaataaagctttcct

SEQ ID NO: 730153 - DNA, 120 bp, Artificial Sequence
  ENSG00000198650_0 (sequence is synthesized)
attgcccctgtaacctgtcaaagaagagctaagggagctttcggggttggcttcttggaggctgctttctcctttacttggaaggcttcgctagtgatggacccatacatgattcagatg

SEQ ID NO: 730154 - DNA, 120 bp, Artificial Sequence
  ENSG00000198650_1 (sequence is synthesized)
agcagcaaaggcaacctcccctcaattctggacgtgcatgtcaacgttggtgggagaagctctgtgccgggaaaaatgaaaggcagaaaggccaggtggtctgtgaggccctcagacatg

SEQ ID NO: 730155 - DNA, 120 bp, Artificial Sequence
  ENSG00000198650_2 (sequence is synthesized)
gccaagaaaactttcaaccccatccgagccattgtggacaacatgaaggtgaaaccaaatccaaacaaaaccatgatttccctgtccattggggaccctactgtgtttggaaacctgcct

SEQ ID NO: 730156 - DNA, 120 bp, Artificial Sequence
  ENSG00000198650_3 (sequence is synthesized)
acagaccctgaagttacccaggcaatgaaagatgccctggactcgggcaaatataatggctatgccccatccatcggcttcctatccagtcgggaggagattgcttcttattaccactgt

SEQ ID NO: 730157 - DNA, 120 bp, Artificial Sequence
  ENSG00000198650_4 (sequence is synthesized)
cctgaggcacccctagaagctaaggacgtcattctgacaagtggctgcagccaagctattgacctttgtttagctgtgttggccaacccagggcaaaacatcctggttccaagacctggt

SEQ ID NO: 730158 - DNA, 120 bp, Artificial Sequence
  ENSG00000198650_5 (sequence is synthesized)
ttctctctctacaagactctggctgagtctatgggaattgaggtcaaactctacaatttgttgccagagaaatcttgggaaattgacctgaaacaactggaatatctaattgatgaaaag

SEQ ID NO: 730159 - DNA, 120 bp, Artificial Sequence
  ENSG00000198650_6 (sequence is synthesized)
acagcttgtctcattgtcaataatccatcaaacccctgtgggtcagtgttcagcaaacgtcatcttcagaagattctggcagtggctgcacggcagtgtgtccccatcttagctgatgag

SEQ ID NO: 730160 - DNA, 120 bp, Artificial Sequence
  ENSG00000198650_7 (sequence is synthesized)
atctatggagacatggtgttttcggattgcaaatatgaaccactggccaccctcagcaccgatgtccccatcctgtcctgtggagggctggccaagcgctggctggttcctggctggagg

SEQ ID NO: 730161 - DNA, 120 bp, Artificial Sequence
  ENSG00000198650_8 (sequence is synthesized)
ttgggctggatcctcattcatgaccgaagagacatttttggcaatgagatccgagatgggctggtgaagctgagtcagcgcattttgggaccctgtaccattgtccagggagctctgaaa

SEQ ID NO: 730162 - DNA, 120 bp, Artificial Sequence
  ENSG00000198650_9 (sequence is synthesized)
agcatcctatgtcgcaccccgggagagttttaccacaacactctgagcttcctcaagtccaatgctgatctctgttatggggcgttggctgccatccctggactccggccagtccgccct

SEQ ID NO: 730163 - DNA, 120 bp, Artificial Sequence
  ENSG00000198650_10 (sequence is synthesized)
tctggggctatgtacctcatggttggaattgagatggaacatttcccagaatttgagaacgatgtggagttcacggagcggttagttgctgagcagtctgtccactgcctcccagcaacg

SEQ ID NO: 730164 - DNA, 120 bp, Artificial Sequence
  ENSG00000198650_11 (sequence is synthesized)
tgctttgagtacccgaatttcatccgagtggtcatcacagtccccgaggtgatgatgctggaggcgtgcagccggatccaggagttctgtgagcagcactaccattgtgctgaaggcagc

SEQ ID NO: 730165 - DNA, 120 bp, Artificial Sequence
  ENSG00000198650_12 (sequence is synthesized)
caggaggagtgtgataaataggcctgcatccattctcctgaggatgtgtcccatctagggaaggctggactaggccttgcggctcctcagggactcaggtggccctactgggagaggggc

SEQ ID NO: 730166 - DNA, 120 bp, Artificial Sequence
  ENSG00000198650_13 (sequence is synthesized)
ctcaaatgcaccatgtcaagggttcaagattgttcctgcttttccccaagtacaaccacacccacactcagatcctcctcattcacatcgcagattctcccttgctctgcgctgctagag

SEQ ID NO: 730167 - DNA, 120 bp, Artificial Sequence
  ENSG00000198650_14 (sequence is synthesized)
tgactcactaattcattaatctgcctccctctcgtaagatttccttctttttttcttgaaagtaccaggtgaacaaagtttaccagaaagcagttgagacaagaaaataagagctcagga

SEQ ID NO: 730168 - DNA, 120 bp, Artificial Sequence
  ENSG00000198650_15 (sequence is synthesized)
tgagggaaaagaaaaagattgagagaatttgtgcccccaaccatttcctcagactctaagaaagaacacgctctctccaggcaggtctgaagctcaactctcttattgcctcacttcagg

SEQ ID NO: 730169 - DNA, 120 bp, Artificial Sequence
  ENSG00000198650_16 (sequence is synthesized)
tttattgatttttggggggagtaaagaattattttgtgatgcaaataaatatcctttaattgatcgacttgccaaatttagatttgtgtgcatcaggctttcttttttttctttttttag

SEQ ID NO: 730170 - DNA, 86 bp, Artificial Sequence
  ENSG00000198650_17 (sequence is synthesized)
gatttgtgtgcatcaggctttcttttttttctttttttagagaagttcaatataagcttttcttttctttgtttctttctttcttt

SEQ ID NO: 730171 - DNA, 80 bp, Artificial Sequence
  ENSG00000198650_18 (sequence is synthesized)
gcctgggtctccggcatcaggctttcttaaagtgagagcacgcctgtactagagcaagcaggaatcagagaccttccaga

SEQ ID NO: 730172 - DNA, 120 bp, Artificial Sequence
  ENSG00000198650_19 (sequence is synthesized)
cgcctgtactagagcaagcaggaatcagagaccttccagaaatactactgtgtaagggccagaaatatcttcacttgtcattgttatataatcattattacttttgctgtaatgttaata

SEQ ID NO: 730173 - DNA, 120 bp, Artificial Sequence
  ENSG00000198650_20 (sequence is synthesized)
tattatcttttcatacattttctaagaaacatttatattgataagatcttttattttgccaagggcataaattattgtttttctttttttttttttaataaatttcaccaagtatggctc

SEQ ID NO: 730174 - DNA, 120 bp, Artificial Sequence
  ENSG00000198650_21 (sequence is synthesized)
tcaccaagtatggctcttctgtgatgtgtttttttctccgtttgggaatttctaatcccaggcactcctcagtctcattgtttcattacctatgaggtttcatttacttctttgtaaatg

SEQ ID NO: 730175 - DNA, 120 bp, Artificial Sequence
  ENSG00000198650_22 (sequence is synthesized)
tactgacttttggagttacttaagaaccacagttcctaaaacattttatttgggagctcaacttctggcttcctacttaccaagaggcagtaagttataacctctggcctttgtctttac

SEQ ID NO: 730176 - DNA, 120 bp, Artificial Sequence
  ENSG00000198650_23 (sequence is synthesized)
attttcaactttctggatccctaacctctggtcccaagttactacgcttgcctatatccactaaccactcactaggtcacaaagttgatggctctggcttgacccagtgaatgagaagtg

SEQ ID NO: 730177 - DNA, 120 bp, Artificial Sequence
  ENSG00000198650_24 (sequence is synthesized)
tcctagatgtttttttttttttttttttttcgcaaatcttcataggcacagttgcctgtttaattttttcttcagcccttcccttagaggagggagccttaagttacctttcaaggttgg

SEQ ID NO: 730178 - DNA, 120 bp, Artificial Sequence
  ENSG00000198650_25 (sequence is synthesized)
gggttaggaatctatcataactagtctagagatttctcaccaagggaaattttccttatctaaaagaggaacttcaggtctcaaccctgccagtcacacccaattaatgtccttcacaaa

SEQ ID NO: 730179 - DNA, 120 bp, Artificial Sequence
  ENSG00000198650_26 (sequence is synthesized)
aataaacagcatatgttccctttcaatttgagttcagtgagctcacagcaaaatttaccttttaattttcttcagcaaatccaagacgaatatacaaaggatgagattagataaagattt

SEQ ID NO: 730180 - DNA, 120 bp, Artificial Sequence
  ENSG00000198650_27 (sequence is synthesized)
cagtttcccgtatgccaccgctgccgccaattttccaaaaaagcctggctcctcttttcctgttcctccatccaagcccccaaagatctctaaccagaaataaacaggaagactcagtga

SEQ ID NO: 730181 - DNA, 120 bp, Artificial Sequence
  ENSG00000198650_28 (sequence is synthesized)
tttacaaaagacattttagttttacacgtacagaaaattctacccagcattacagaattcttagacttcttaaattcctgattttccttggtatttacattttgataagggagccaatgg

SEQ ID NO: 730182 - DNA, 120 bp, Artificial Sequence
  ENSG00000198650_29 (sequence is synthesized)
ttcttcaaacatttgaaaagaacacatacacactggacaatttcaaacgatacaaacaaacgcaactgtccttctttctcattcctgtccttcagccacccagtttcttctcccctgagg

SEQ ID NO: 730183 - DNA, 120 bp, Artificial Sequence
  ENSG00000198650_30 (sequence is synthesized)
gaatcagttatcatttgctggtcatacttccagattatactgtgcctatgtaagtgtgtgtgtgtgtgtgtgtgtgtgcacttttcattttttcaaataaagtattactcaactttgtaa

SEQ ID NO: 730184 - DNA, 120 bp, Artificial Sequence
  ENSG00000198650_31 (sequence is synthesized)
tgagctggtttttagcctgatcttttctcctccaacaaaatgtcttctcatttgataagattcaaactgatgtgtctcatggatcctatttaaaatttgcttctcccccccatcataatc

SEQ ID NO: 730185 - DNA, 120 bp, Artificial Sequence
  ENSG00000198650_32 (sequence is synthesized)
cccacaagtcattttaagatgaatgaactcagttgctgacttagcatcccagtcatgggagctgaatgaactgatggccctgatgaaatggtaccacttcttgtggatcagggtcctgac

SEQ ID NO: 730186 - DNA, 120 bp, Artificial Sequence
  ENSG00000198650_33 (sequence is synthesized)
tagtgctcttataacaggactaaatgtctagcaatcctcttcactttcctgatgcacaattcctaaggagaggctaagattacatggtcctttggatttgggaaccgggtctcgggatgc

SEQ ID NO: 730187 - DNA, 120 bp, Artificial Sequence
  ENSG00000198650_34 (sequence is synthesized)
tacttatttgtcaagtaaagctcctatcctatcattactaattctaatctgaaggccttgagtctggcaggagctttgtgtttgctgagcctctaggtcctaaatggatttacttattgc

SEQ ID NO: 730188 - DNA, 120 bp, Artificial Sequence
  ENSG00000198650_35 (sequence is synthesized)
tctgtgtatatagctcctttgcttcatttctgcttctctatgtattgaaggcctattttcattatggtcctgagcacattgaaatgcaattgttaccgtttatgactaacgggtttaaac

SEQ ID NO: 730189 - DNA, 120 bp, Artificial Sequence
  ENSG00000198650_36 (sequence is synthesized)
aaacaaataaacaaacacccaagaacaacaaaaaatgggctgtcaaactgaaggatagaaggttgtttctgatagattgaaattactcctttttaggtttctctccatctattaaaaatt

SEQ ID NO: 730190 - DNA, 120 bp, Artificial Sequence
  ENSG00000198650_37 (sequence is synthesized)
tctaccctgaatattttggtaaagtacatgattccttgactttcagtattgaacattttttttccttatgtgtacatagaaacacattcttaatgcagaataaaaccccagtttcatgat

SEQ ID NO: 730191 - DNA, 120 bp, Artificial Sequence
  ENSG00000198650_38 (sequence is synthesized)
aaaatcaaattttaaaaacactttaaagagttatatcggggacttcgtggtttttcggttgattacttacattttataaagtttcatacaacaaaaataaaagcaaaatcaagaccaaaa

SEQ ID NO: 730192 - DNA, 120 bp, Artificial Sequence
  ENSG00000198650_39 (sequence is synthesized)
cattgtcctcctctactctcatgttcacaggctggttggagaagatggcagttgggggtgagtctgagtactgaacatgggagaataacctcttggctccttttgtgttttcctcccata

SEQ ID NO: 730193 - DNA, 120 bp, Artificial Sequence
  ENSG00000198663_0 (sequence is synthesized)
gaagcgctggacgagaggaggaattactctagggtacaaggcctcgcccaggagtggggggttgcttccgggtcgcgctcccggaaacaggaagttgcccatcctcctcgcccggcggca

SEQ ID NO: 730194 - DNA, 120 bp, Artificial Sequence
  ENSG00000198663_1 (sequence is synthesized)
gctgtccccgaggcgggaggagcccgaggggcgcgagccccgcatggattttatattggaagacatggatcttgctgccaacgagatcagcatttatgacaaactttcagagactgttga

SEQ ID NO: 730195 - DNA, 120 bp, Artificial Sequence
  ENSG00000198663_2 (sequence is synthesized)
tttggtgagacagaccggccatcagtgtggcatgtcagagaaggcaattgaaaaatttatcagacagctgctggaaaagaatgaacctcagagaccccccccgcagtatcctctccttat

SEQ ID NO: 730196 - DNA, 120 bp, Artificial Sequence
  ENSG00000198663_3 (sequence is synthesized)
agttgtgtataaggttctcgcaaccttgggattaatcttgctcactgcctactttgtgattcaacctttcagcccattagcacctgagccagtgctttctggagctcacacctggcgctc

SEQ ID NO: 730197 - DNA, 120 bp, Artificial Sequence
  ENSG00000198663_4 (sequence is synthesized)
actcatccatcacattaggctgatgtccttgcccattgccaagaagtacatgtcagaaaataagggagttcctctgcatgggggtgatgaagacagaccctttccagactttgacccctg

SEQ ID NO: 730198 - DNA, 120 bp, Artificial Sequence
  ENSG00000198663_5 (sequence is synthesized)
tttgagaggctccatccactggtgatcaagacgggaaagcccctgttggaggaagagattcagcattttttgtgccagtaccctgaggcgacagaaggcttctctgaagggtttttcgcc

SEQ ID NO: 730199 - DNA, 120 bp, Artificial Sequence
  ENSG00000198663_6 (sequence is synthesized)
aagtggtggcgctgctttcctgagcggtggttcccatttccttatccatggaggagacctctgaacagatcacaaatgttacgtgagctttttcctgttttcactcacctgccatttcca

SEQ ID NO: 730200 - DNA, 120 bp, Artificial Sequence
  ENSG00000198663_7 (sequence is synthesized)
aaagatgcctctttaaacaagtgctcctttcttcacccagaacctgttgtggggagtaagatgcataagatgcctgacctatttatcattggcagcggtgaggccatgttgcagctcatc

SEQ ID NO: 730201 - DNA, 120 bp, Artificial Sequence
  ENSG00000198663_8 (sequence is synthesized)
cctcccttccagtgccgaagacattgtcagtctgtggccatgccaatagagccaggggatatcggctatgtcgacaccacccactggaaggtctacgttatagccagaggggtccagcct

SEQ ID NO: 730202 - DNA, 120 bp, Artificial Sequence
  ENSG00000198663_9 (sequence is synthesized)
ttggtcatctgcgatggaaccgctttctcagaactgtaggaaatagaactgtgcacaggaacagcttccagagccgaaaaccaggttgaaaggggaaaaataaaaacaaaaacgatgaaa

SEQ ID NO: 730203 - DNA, 120 bp, Artificial Sequence
  ENSG00000198663_10 (sequence is synthesized)
atgctgcagagggagaggacaacagctccagtaaacaaaaaggtcagggcagacaggagtattatggaactgctccaggactcttgattttcaagcttatggtgtcaggaatgggatcta

SEQ ID NO: 730204 - DNA, 120 bp, Artificial Sequence
  ENSG00000198663_11 (sequence is synthesized)
aagtggagcttctagcgacccccaggagcactgagtgaacatgcaaggtacctgcaggatccacttgtgtctattgatctctcacagcagctggggatcacagaacctgcagattggatc

SEQ ID NO: 730205 - DNA, 120 bp, Artificial Sequence
  ENSG00000198663_12 (sequence is synthesized)
gtctgagaacaccagagaaagagaaagactgtccttgccatccacactacagcaaaactttggagctttaaaccttgggttcataatctcacagctgagaagggtccctccacactcctg

SEQ ID NO: 730206 - DNA, 120 bp, Artificial Sequence
  ENSG00000198663_13 (sequence is synthesized)
cagtggccagagcctcgccctcctgactcttcctgcaggtggctcaggaaggattcagcctggccacttggctaggactctgccagcacccatctgagactgacctcttccgggcctttg

SEQ ID NO: 730207 - DNA, 120 bp, Artificial Sequence
  ENSG00000198663_14 (sequence is synthesized)
gacactatgaccttgatgctgcccttcaggcaggaaacagggctggtgcctttcttcacctgcatggccagcttccttccctggcagtggagagggcagccaacaggttctaatgtcaga

SEQ ID NO: 730208 - DNA, 120 bp, Artificial Sequence
  ENSG00000198663_15 (sequence is synthesized)
gccatcctttaccaggtgggcctgcttgtccctgtcttgcctgccacatcactctactttttggaaggccatggctgattaaagaagttcttgtagtttcccaagcaaagtggaatctag

SEQ ID NO: 730209 - DNA, 120 bp, Artificial Sequence
  ENSG00000198663_16 (sequence is synthesized)
aaacagtgaaaaaagttcagataactttgaattgcattcaagaagtacacttctttcccattgtccgtggctcttggagtctccgtgatgccaggctagagtctgattatataataattc

SEQ ID NO: 730210 - DNA, 120 bp, Artificial Sequence
  ENSG00000198663_17 (sequence is synthesized)
aaaatggtaactcccaaggtaatgctttcttccatttcatcaggttcttttatccccactgcaccccctccccttctcccttgcctatctggatggcttctcagaagctcggccctagtc

SEQ ID NO: 730211 - DNA, 120 bp, Artificial Sequence
  ENSG00000198663_18 (sequence is synthesized)
ctccctgccttggcggggccagagcccactactgctgaggcagcactgctctcgtcagctgtgttgcctttaccaagtgtcttcagagggttatgagttagagtagctggcctggggaga

SEQ ID NO: 730212 - DNA, 120 bp, Artificial Sequence
  ENSG00000198663_19 (sequence is synthesized)
gggtgcctccctgggtttgatctttagggtctgactttctgcagagaagatgttttacagatgtgtcaaagctgatgtaatgtggttgggggaggaaatccagacccaaagtgtttgtca

SEQ ID NO: 730213 - DNA, 120 bp, Artificial Sequence
  ENSG00000198663_20 (sequence is synthesized)
gctgggtgtacaactgcctatgtgatcctctgtcttaaaatgatttctgtctgtgctgcgaaacaaagacaaggtgaggtgtttttcttttttgtaataatataaagctgtgtgtttctg

SEQ ID NO: 730214 - DNA, 120 bp, Artificial Sequence
  ENSG00000198663_21 (sequence is synthesized)
gctgtccccgaggcgggaggagcccgaggggcgcgagccccgcatgtctatgccactgttagaatcaggctaactcttcagaacttccccctgtagcaaagctcactttggccagagttg

SEQ ID NO: 730215 - DNA, 120 bp, Artificial Sequence
  ENSG00000198663_22 (sequence is synthesized)
aataaggatgttcttttcctgttccttttatttttttctctctttattattcttttattgacaccactagatagctggccactggtcatgccattgccaagatgaagaaaaagcaaacta

SEQ ID NO: 730216 - DNA, 120 bp, Artificial Sequence
  ENSG00000198663_23 (sequence is synthesized)
cactttggcctctggttctgaattgcagaaatcaaaggatgcagtaggtgtctatgtcagaattatggatcagaggcagacaatgacgagtgaagatggttgtgaagccctcttcattcc

SEQ ID NO: 730217 - DNA, 120 bp, Artificial Sequence
  ENSG00000198663_24 (sequence is synthesized)
tggaggagcctgcatctcatctctcaggccctctttctctgtgggtctcatgaacagcagtggggaccattgagcacttgaatggcctgtttgtctatgggcttgcaaaggacaagcaga

SEQ ID NO: 730218 - DNA, 120 bp, Artificial Sequence
  ENSG00000198663_25 (sequence is synthesized)
gttcacagagctcaggatagaaacatcagagcctcctccacgggcttcagtgaaactccgatgaactgtacctgagggaattttttcttaatcaaccccttgtgtggatgaatacaggaa

SEQ ID NO: 730219 - DNA, 120 bp, Artificial Sequence
  ENSG00000198663_26 (sequence is synthesized)
caacaaaacttgtgtacgtatgaaagtcatgttgttaagcagttatgatttaagaggttttaagtcagagggatcatctggaggccggctttgtgcaagcttttacagccttctgcagtg

SEQ ID NO: 730220 - DNA, 120 bp, Artificial Sequence
  ENSG00000198663_27 (sequence is synthesized)
tccttaccctggctgtacatggggaagggctatgtgtaaacaagtgctttagaggcctctgagagtttttaaaaatcagacccattaacaaaagagagggtttcttaggaacaaagcaac

SEQ ID NO: 730221 - DNA, 120 bp, Artificial Sequence
  ENSG00000198663_28 (sequence is synthesized)
tattttgattactgagatctctgttttgtttctgtgagttactctgtattcctttccccatttcactcttgcccttcacatcttaaatgtccataagaaacccttgcatgtgttggtatt

SEQ ID NO: 730222 - DNA, 120 bp, Artificial Sequence
  ENSG00000198663_29 (sequence is synthesized)
tcccctaagtcccattttgtacttcaacaaaaaatgactgtagcagaagataagtggagacttttatggatatactactcattttacttaaaatctacccagttcagacttgaatgtaaa

SEQ ID NO: 730223 - DNA, 120 bp, Artificial Sequence
  ENSG00000198663_30 (sequence is synthesized)
cttgtattaggggaaaattctccaaagagggttttctacatacacagaagcagttcaacttctcaagttaattttgataagcagaatctactactggccagagcgacaggagtggctagg

SEQ ID NO: 730224 - DNA, 120 bp, Artificial Sequence
  ENSG00000198663_31 (sequence is synthesized)
ggttgccagccagtccctttctgatgatcaaggccctgcacagcaggatgccacaggatgcccctgccatctagctggaagcatcaaaagtccctctgtatgacccggtgtgggaaagag

SEQ ID NO: 730225 - DNA, 120 bp, Artificial Sequence
  ENSG00000198663_32 (sequence is synthesized)
ggttgtcaggatgagaaagtggggctgcagggtgacgataagaccacctaaccaactccccacctccaccaccacaataagaacaaaactgtagggctctaaagagagggggtggtttac

SEQ ID NO: 730226 - DNA, 120 bp, Artificial Sequence
  ENSG00000198663_33 (sequence is synthesized)
aagtttattgagcatttactaggaagtgacatggcgatgacctctgtacatgagttaggttcactttcatgtggcctcccactacagagatgcgtatgcccagaagtcagctctctgagg

SEQ ID NO: 730227 - DNA, 120 bp, Artificial Sequence
  ENSG00000198663_34 (sequence is synthesized)
agacaggctactttggccccagtttgaagcattctgtccaaatgtcctgagctctccagcagtcaagtagtgaatggataccatacttattatggttgatgaaaaaaggcagagcttatc

SEQ ID NO: 730228 - DNA, 120 bp, Artificial Sequence
  ENSG00000198663_35 (sequence is synthesized)
acttattatggttgatgaaaaaaggcagagcttatcctcaattttttttagggaagagaaggaataaaataaaagtggttcaagctgggcatggtggctcacacctgtaattgcagcact

SEQ ID NO: 730229 - DNA, 88 bp, Artificial Sequence
  ENSG00000198663_36 (sequence is synthesized)
attgtgccacttcataaggaaaggaaagaaaagaaaaaaaaaaagagagagagaaaagaagaggggaggggagggaaagggaagggag

SEQ ID NO: 730230 - DNA, 120 bp, Artificial Sequence
  ENSG00000198663_37 (sequence is synthesized)
gagagaaaagaagaggggaggggagggaaagggaagggaggggaggggaggagaggagagcagattgggggggctcatgttctgagagaaaggaataatagcatttgtctagtacattcc

SEQ ID NO: 730231 - DNA, 120 bp, Artificial Sequence
  ENSG00000198663_38 (sequence is synthesized)
agtttacaaagtgcctgatatacatgatctcctttaatcttcacccaatcctgtaaagtaggtgttagatccccattttgcaagtaaataagtggaggcttagagcagttaaccgctggc

SEQ ID NO: 730232 - DNA, 120 bp, Artificial Sequence
  ENSG00000198663_39 (sequence is synthesized)
aggtaggtagctggttccatagcacatcattttcctgcggcatcacggcatggtgccgaagaagacagctgtggatgtcgttgactcagatgtgcctccgttggggtgggagaacccagg

SEQ ID NO: 730233 - DNA, 120 bp, Artificial Sequence
  ENSG00000198663_40 (sequence is synthesized)
gatgggggtcagcaagccaggaactccgcagggtttgtttttaaaactctgctggacagaagtggaggaggaaagaatctaaccatatgacttttataaaaatcctttcacttttcccct

SEQ ID NO: 730234 - DNA, 120 bp, Artificial Sequence
  ENSG00000198663_41 (sequence is synthesized)
ccccatttgaaaactctttttaagagtgaatgtagctgaaacacaactgtgtccagccattttcctgtctccacattcttccagatgtgtgacagaggagggactctgctcaattccagt

SEQ ID NO: 730235 - DNA, 120 bp, Artificial Sequence
  ENSG00000198663_42 (sequence is synthesized)
tgtgggtccccttggagtttacatcacttgtttttcaattcttggttttctgttcccttctaccaaaacccagcataggactcagtgtacacttactttaaaacaaaaactcacatttct

SEQ ID NO: 730236 - DNA, 120 bp, Artificial Sequence
  ENSG00000198663_43 (sequence is synthesized)
tagctgcaggtgatggcctcagtcattttaatacagcctggaatgagtttgcttattacccagtcactttcgtagtgaatgttcaaaccccaaagcaaatgtttgcatctccttgtccat

SEQ ID NO: 730237 - DNA, 120 bp, Artificial Sequence
  ENSG00000198663_44 (sequence is synthesized)
aaaggagaaagccaggttataggagaaagagagagaaaggcgcatgtctgtttgcacagagagaggcaattttgtctacctttcgagaatcagttataaacagaagggcctcttaggatt

SEQ ID NO: 730238 - DNA, 120 bp, Artificial Sequence
  ENSG00000198663_45 (sequence is synthesized)
ttgagctctcctgacaatgaaggaaaagctctcttgagtatacaagttccacactcattacctttcagtggtgacccatcacccactacaatttgttgaaggaagggagtgtcagagata

SEQ ID NO: 730239 - DNA, 120 bp, Artificial Sequence
  ENSG00000198663_46 (sequence is synthesized)
tgctttaaagttgtactttaggctgaaattctctctgtatttggacctgcagatgttgtgtacagaaccgatgcatggcagggtcaggaagctaggagagtgaaggcgcttgtggagaca

SEQ ID NO: 730240 - DNA, 120 bp, Artificial Sequence
  ENSG00000198663_47 (sequence is synthesized)
gctctgtagcaaatgaaacacggaagcctccgggaatgtgtttgtgtcaccagcagcaggcatttccctgtcctccccacccccagtctccacatccccagcagcctcttccagaagcat

SEQ ID NO: 730241 - DNA, 120 bp, Artificial Sequence
  ENSG00000198663_48 (sequence is synthesized)
gtcagggagacggacaggtgctctccttctcgtgcaccacatccaagtccacccaccgtggacgcagtgtgactaaatgctggccttgaagagaaaccctcagccagcttgtctgttgtc

SEQ ID NO: 730242 - DNA, 120 bp, Artificial Sequence
  ENSG00000198663_49 (sequence is synthesized)
caggtccctcagtgtctctggtttccctgccctgcataatttaagcattagtgccaaatacatctgtcatattcctctccctggagactgcgaaatgtccagactttttcagactagtgg

SEQ ID NO: 730243 - DNA, 120 bp, Artificial Sequence
  ENSG00000198663_50 (sequence is synthesized)
agggaaggaatgttacataactaagtggaggcctggaactgtcaggatttgacagggctggaccagagacccttccgcctctgcctagtgtgtctgtcaggcaggcagcagccatcaatc

SEQ ID NO: 730244 - DNA, 120 bp, Artificial Sequence
  ENSG00000198663_51 (sequence is synthesized)
caagaatgagccatggcggcaagcactgtgtggagaaaggaacccagccgaggtctgagtttcagacagaaactggggagttgggacatcttctctgtgccaggcttcattgacaccatc

SEQ ID NO: 730245 - DNA, 120 bp, Artificial Sequence
  ENSG00000198663_52 (sequence is synthesized)
gctccccacagcagctccttggggcagggggctcacctgtgcagccacccttactcacagtagcatcccattcttcacactgcaaccccccagcactgtggacccttccagggaggtgac

SEQ ID NO: 730246 - DNA, 120 bp, Artificial Sequence
  ENSG00000198663_53 (sequence is synthesized)
aggagccagcagacacatgacattcccagaaagccccatcttatccagacaggcttccctccatacttctttccacagttttaccctcagaaaaatgttggctgcagtcttcccttcctt

SEQ ID NO: 730247 - DNA, 120 bp, Artificial Sequence
  ENSG00000198663_54 (sequence is synthesized)
cacctccaccctggggaagggtcagtaaccaatgccgagggtcggggaaggaggagtcacaggcaagacagggactcagcgcagtgctcccgccatcatcggggacaggtgccagggtca

SEQ ID NO: 730248 - DNA, 120 bp, Artificial Sequence
  ENSG00000198663_55 (sequence is synthesized)
gctgcagctctccttccgggagcagggtgtggtggccctggatggtcccagggagcagagggaggcaggcagctgtcacagccacagcggctctgaatggcttgagcttttagtatgtgt

SEQ ID NO: 730249 - DNA, 120 bp, Artificial Sequence
  ENSG00000198663_56 (sequence is synthesized)
tcaagtgcaggatactacaaactggtaaagacttccaccatgtgaagaatgtatgtaaattaaagtttattgtaatgaaggtttttactttttgcaattaaaagtgttggttgataagaa

SEQ ID NO: 730250 - DNA, 120 bp, Artificial Sequence
  ENSG00000198668_0 (sequence is synthesized)
ggcagtggtgctgggagtgtcgtggacgccgtgccgttactcgtagtcaggcggcggcgcaggcggcggcggcggcatagcgcacagcgcgccttagcagcagcagcagcagcagcggca

SEQ ID NO: 730251 - DNA, 120 bp, Artificial Sequence
  ENSG00000198668_1 (sequence is synthesized)
tcggaggtacccccgccgtcgcagcccccgcgctggtgcagccaccctcgctccctctgctcttcctcccttcgctcgcaccatggctgatcagctgaccgaagaacagattgctgaatt

SEQ ID NO: 730252 - DNA, 120 bp, Artificial Sequence
  ENSG00000198668_2 (sequence is synthesized)
caaggaagccttctccctatttgataaagatggcgatggcaccatcacaacaaaggaacttggaactgtcatgaggtcactgggtcagaacccaacagaagctgaattgcaggatatgat

SEQ ID NO: 730253 - DNA, 120 bp, Artificial Sequence
  ENSG00000198668_3 (sequence is synthesized)
caatgaagtggatgctgatggtaatggcaccattgacttccccgaatttttgactatgatggctagaaaaatgaaagatacagatagtgaagaagaaatccgtgaggcattccgagtctt

SEQ ID NO: 730254 - DNA, 120 bp, Artificial Sequence
  ENSG00000198668_4 (sequence is synthesized)
tgacaaggatggcaatggttatatcagtgcagcagaactacgtcacgtcatgacaaacttaggagaaaaactaacagatgaagaagtagatgaaatgatcagagaagcagatattgatgg

SEQ ID NO: 730255 - DNA, 120 bp, Artificial Sequence
  ENSG00000198668_5 (sequence is synthesized)
agacggacaagtcaactatgaagaattcgtacagatgatgactgcaaaatgaagacctactttcaactcctttttcccccctctagaagaatcaaattgaatcttttacttacctcttgc

SEQ ID NO: 730256 - DNA, 120 bp, Artificial Sequence
  ENSG00000198668_6 (sequence is synthesized)
aaaaaaaagaaaaaagaaaaaagttcatttattcattctgtttctatatagcaaaactgaatgtcaaaagtaccttctgtccacacacacaaaatctgcatgtattggttggtggtcctg

SEQ ID NO: 730257 - DNA, 120 bp, Artificial Sequence
  ENSG00000198668_7 (sequence is synthesized)
tcccctaaagatcaagctacacatcagttttacaatataaatacttgtactaccttaatgataaggactccttaaagttccatttgctaatgattaatacactgtttgggctggccagtt

SEQ ID NO: 730258 - DNA, 120 bp, Artificial Sequence
  ENSG00000198668_8 (sequence is synthesized)
tttcatgcatgcagcttgacgattgagcacagtcaggcctttgtattaaaaatgaaaaatgaaaaaacaaattcaaaacctattcaaatgggttctagttcaatttgtttagtataaatt

SEQ ID NO: 730259 - DNA, 120 bp, Artificial Sequence
  ENSG00000198668_9 (sequence is synthesized)
gtcatagctggtttactgaaaacaaacacatttaaaattggtttacctcaggatgacgtgcagaaaaatgggtgaaggataaaccgttgagacgtggccccactggtaggatggtcctct

SEQ ID NO: 730260 - DNA, 120 bp, Artificial Sequence
  ENSG00000198668_10 (sequence is synthesized)
tgtacttcgtgtgctccgacccatggtgacgatgacacaccctggtggcatgcccgtgtatgttggtttagcgttgtctgcattgttctagagtgaaacaggtgtcaggctgtcactgtt

SEQ ID NO: 730261 - DNA, 120 bp, Artificial Sequence
  ENSG00000198668_11 (sequence is synthesized)
cacacaaatttttaataagaaacatttaccaagggagcatctttggactctctgtttttaaaaccttctgaaccatgacttggagccggcagagtaggctgtggctgtggacttcagcac

SEQ ID NO: 730262 - DNA, 120 bp, Artificial Sequence
  ENSG00000198668_12 (sequence is synthesized)
aaccatcaacattgctgttcaaagaaattacagtttacgtccattccaagttgtaaatgctagtctttttttttttttttccaataaaaagaccattaacttaaagtggtgttaaatgct

SEQ ID NO: 730263 - DNA, 120 bp, Artificial Sequence
  ENSG00000198668_13 (sequence is synthesized)
ttgtaaagctgagatctaaatggggacaaggcaggtggaggggaggccagtgtacatgtaaatgcccacagcccagcattgggtttccctcccaaggccccagcaccaacctctgagccc

SEQ ID NO: 730264 - DNA, 120 bp, Artificial Sequence
  ENSG00000198668_14 (sequence is synthesized)
aagaccttgcctgaaaacaagcagataccgattgcttcatcctatttatggacatgtaggtctagttgcattttcactggggggaggggggaaggtgaattatggtaacttttaatgatc

SEQ ID NO: 730265 - DNA, 120 bp, Artificial Sequence
  ENSG00000198668_15 (sequence is synthesized)
tattcaggcagtagagctcttaaggaaaaaaaaaaacccactttctctcaagcatgtatttaggggttgttctcaattgtgctgctgattacctgtcttatgtaactacttgagaccatc

SEQ ID NO: 730266 - DNA, 120 bp, Artificial Sequence
  ENSG00000198668_16 (sequence is synthesized)
tgcaagagacatgatttagtgtgtctgtaattcaatcttcgctgtgtgtggtagaagcagtagtcacttttgtaagccagtctcttcatgcctaaaagacactaccagtcacctttgatt

SEQ ID NO: 730267 - DNA, 120 bp, Artificial Sequence
  ENSG00000198668_17 (sequence is synthesized)
gacttttaatttatgattatacttagcctcctcctcctttttttttttttcccaagttgacttgactttgcttttttccccccaagtagaactaatgctagcttccagcttgaaagtaaa

SEQ ID NO: 730268 - DNA, 120 bp, Artificial Sequence
  ENSG00000198668_18 (sequence is synthesized)
actccagtgtggagtgaattttgtgtctaattataaacctgtaaccaaaactcagacatctggtactggtctttgcattgagattggtccctgtaaaaccccctttaaaagcatattgca

SEQ ID NO: 730269 - DNA, 120 bp, Artificial Sequence
  ENSG00000198668_19 (sequence is synthesized)
tttagtacagagctcttttttgaaatgaaggctggagatgtgcatttttcacggtgttaactggttgtatcttattagcaaggagattggggttttgagtgtttgcgtgggtggtttcaa

SEQ ID NO: 730270 - DNA, 120 bp, Artificial Sequence
  ENSG00000198668_20 (sequence is synthesized)
tttgccagggaacagtggcaggctgctagcaaggcagtgagaagctcttggcagccaaatgggtgcattcagggctgatttatagagacccttggcttctccttctcctactccctgtct

SEQ ID NO: 730271 - DNA, 120 bp, Artificial Sequence
  ENSG00000198668_21 (sequence is synthesized)
ttctggcattttgtagcttgttagattttctgccagaggggtgggtcagagcagtggaggggagacatcgcccatgtgcttctgctactggtccttgggctgggtggttggtagaggaga

SEQ ID NO: 730272 - DNA, 120 bp, Artificial Sequence
  ENSG00000198668_22 (sequence is synthesized)
tgttgacactatgagctaagggttggcttttgtaattacctgaatctgaaaggaatgcctaaggttaccttggggtttctcttctggtgagatagggttcctggtttgagtaagttaatg

SEQ ID NO: 730273 - DNA, 120 bp, Artificial Sequence
  ENSG00000198668_23 (sequence is synthesized)
tcctggatatttcttgtggcagggggtggtcaaagagcctgattgctgacccagtctcaggcctgtggtcgatgacctctcggtagtttcaaagggggctggagggggatatttgacttg

SEQ ID NO: 730274 - DNA, 120 bp, Artificial Sequence
  ENSG00000198668_24 (sequence is synthesized)
ttttttcgaaatgtagccttctaaccctcaagtctttagaagctgggtggactcttagtggtcctgcagcgtatcctaaaagactacctttgaaacaggattcttgtatggccaggatcc

SEQ ID NO: 730275 - DNA, 120 bp, Artificial Sequence
  ENSG00000198668_25 (sequence is synthesized)
tgtctgggaaccagaaaccctacaccctccccctccagggaatgctgagttccagttttgagcagaggtgaggcagaatccactgtagccttccgccctggtatttggggggatgaccag

SEQ ID NO: 730276 - DNA, 120 bp, Artificial Sequence
  ENSG00000198668_26 (sequence is synthesized)
cccaggcgttgggtgttagtctgcatgagtttgtgagaggaaatagctgggtgtcctggcagtgcccttgaagttggttaggaccttcctgtaaactcttgcccctacttctaactactc

SEQ ID NO: 730277 - DNA, 120 bp, Artificial Sequence
  ENSG00000198668_27 (sequence is synthesized)
tataaatatatacatatatttatatataaagtgattagttgaactggcatcctgctttagcctgagacttgccataagaaactgctgagtacttggcaaaccctttcatagttttgttct

SEQ ID NO: 730278 - DNA, 120 bp, Artificial Sequence
  ENSG00000198668_28 (sequence is synthesized)
ccatctgtttggggtaggtgttgagcgaggcaaatggatctcgatatttcagatgggcttttgatgcactgttgccaaggaaggctttttctgattttttgacaaatgaatttttgcaca

SEQ ID NO: 730279 - DNA, 120 bp, Artificial Sequence
  ENSG00000198668_29 (sequence is synthesized)
ctttcattggtgtctttcggcaacttacacacattgaaaatgagctattgtacatatttttatattctctttataaatgcatgtctgattgtacttgtaacaatattgtaatgaacggct

SEQ ID NO: 730280 - DNA, 120 bp, Artificial Sequence
  ENSG00000198668_30 (sequence is synthesized)
gtgcagtaggcccagcgctgctgtgtctcgtcagaggaatagcttaccacgaacccctcagcatactgggaatctcttcctgaacaacgaatgtaaatttggtcaagtctactcttccgt

SEQ ID NO: 730281 - DNA, 120 bp, Artificial Sequence
  ENSG00000198668_31 (sequence is synthesized)
tcattcaattattttaagcatttgaattatttattgtatatcctaaatatatttctcctttggcagtgactagatttccactaatgtgtcttaatctatccctccagctggcagttactg

SEQ ID NO: 730282 - DNA, 120 bp, Artificial Sequence
  ENSG00000198668_32 (sequence is synthesized)
tttttttaatcccctgaagttgtcctgtaggagacagaaattctttgctgtctgtatcccttggagtaagaaggtagtggcatgggtggagtgtgtgttctttctccaaatctattatga

SEQ ID NO: 730283 - DNA, 120 bp, Artificial Sequence
  ENSG00000198668_33 (sequence is synthesized)
tgtttattaaacacttctgtagcaaagatggtggtagttcttttgttactgaagttgcccttcaccatggctatttgaaaaggagatgtacttggacgtttctgtaaatcttgagataaa

SEQ ID NO: 730284 - DNA, 120 bp, Artificial Sequence
  ENSG00000198668_34 (sequence is synthesized)
ctgtttggagatttaaccacctctctgatgggggaccaactctatggaaattgtaaatacgttttatttataaacctggcactgtattcaataaacatttctgcagcctttcatctctaa

SEQ ID NO: 730285 - DNA, 120 bp, Artificial Sequence
  ENSG00000198668_35 (sequence is synthesized)
aatattaaaagtataactggaaaacctatgttgaaatcaaccaaacatgtcgtggactgaatgataaccttttctttcttcatataggctgatcagctgaccgaagaacagattgctgaa

SEQ ID NO: 730286 - DNA, 120 bp, Artificial Sequence
  ENSG00000198668_36 (sequence is synthesized)
ctataataatgttatagacagaagacttaaatctaactgcctgagcctctgatctcactttcaaaaatcctccttatggtaaccgtatcaggggagggtaggcataataaataggaattt

SEQ ID NO: 730287 - DNA, 120 bp, Artificial Sequence
  ENSG00000198668_37 (sequence is synthesized)
gtataattaaatactatcctgggcactgatgatgagtttgaaattatgtgaaattgccctgtgaagtgtttgaacgttttagacctgcagatgattgaacctagtaagatagtctgcccc

SEQ ID NO: 730288 - DNA, 120 bp, Artificial Sequence
  ENSG00000198668_38 (sequence is synthesized)
tttgtcctagtacatgtttaccgttccgtacagtggttctgaaatgattactgcagagcagcgttaatggagtgcttactttacatgagctttttgttttttaattcgaggtaatggcac

SEQ ID NO: 730289 - DNA, 120 bp, Artificial Sequence
  ENSG00000198668_39 (sequence is synthesized)
gccctgcgcccgggcggggccctgcggtgtggccgtggcttgttcctgccgctttcgcaccctgcggccccccacccagtgcagcagtgcgggcgggcgtgagcctcggtgcaccaggag

SEQ ID NO: 730290 - DNA, 86 bp, Artificial Sequence
  ENSG00000198668_40 (sequence is synthesized)
cacccagtgcagcagtgcgggcgggcgtgagcctcggtgcaccaggaggcacttcccgcgggaggcgctgggctcgcgctaataac

SEQ ID NO: 730291 - DNA, 120 bp, Artificial Sequence
  ENSG00000198668_41 (sequence is synthesized)
cgcaaagtttctgctccgggaggaggcggcggcgccgcgggctcgtcgcctgggggagcagaagcgggtgggaggtgcgggtggccttggcctcagccctggtgcgcgggggccgggggt

SEQ ID NO: 730292 - DNA, 120 bp, Artificial Sequence
  ENSG00000198668_42 (sequence is synthesized)
cgtccagacgcccgctcgggggccgccttcccccccacgcctgcccccgggcacgcgccctgcccggtccctcgccccgcgccacttccagtccgcagagagatgccctccacgtttctg

SEQ ID NO: 730293 - DNA, 120 bp, Artificial Sequence
  ENSG00000198668_43 (sequence is synthesized)
ccgcagagagatgccctccacgtttctgctttctctgcagcctctagattgccagatgcgactgtgcgcctcgctgggtgtgttttccacagccccttcctcctcggcgtgcagggctga

SEQ ID NO: 730294 - DNA, 120 bp, Artificial Sequence
  ENSG00000198668_44 (sequence is synthesized)
catcaccgactgcgtttctggtttggcgggtggggagatggttccccgcagggttctggtacacctttgcccccagggctagcgccatttgggggaggaggttttcgttgtcgagaaagt

SEQ ID NO: 730295 - DNA, 120 bp, Artificial Sequence
  ENSG00000198668_45 (sequence is synthesized)
tggatgctcctggtaacccctctaacaagagagttctgtagcgaggtgggactgttctccccataaggtgacagtttctcttgcgaggtgtggcagcgcttcctgttgtacaagacagat

SEQ ID NO: 730296 - DNA, 120 bp, Artificial Sequence
  ENSG00000198668_46 (sequence is synthesized)
gttgccttggcgttacgtaaatcatcgtgtctccgtcatttaaagaaagccaatttttagtgattgaggtagaaagaaagatccgtttataatttgtaaaaacaaattttcacccagaat

SEQ ID NO: 730297 - DNA, 120 bp, Artificial Sequence
  ENSG00000198668_47 (sequence is synthesized)
caatatattggaacaccattcctactgttaaagttttcacttaagagtataaacttcatcagctttctattaggacttattttgtaattggcttcttaggcatccttctttaaaagagaa

SEQ ID NO: 730298 - DNA, 120 bp, Artificial Sequence
  ENSG00000198668_48 (sequence is synthesized)
atccacgttagctctccttgaggtctcgagttccctcggctggaggcacaggttcagtggagaccaaataatgcaggtgaattaccttcgtggccattactgcctccaacgaagtgtgtt

SEQ ID NO: 730299 - DNA, 120 bp, Artificial Sequence
  ENSG00000198668_49 (sequence is synthesized)
tattaagaacagttcttatgtcattcttaaggtaggtagggttaatactctccagcaaatttagtagatactctttgccagaaaagagaggagtatatatagtttgataattattgtgta

SEQ ID NO: 730300 - DNA, 120 bp, Artificial Sequence
  ENSG00000198668_50 (sequence is synthesized)
gtaacacttcatttgtaagatggtaccattttttcctggcttctgaatcataggatagtttgacccagggcattagccattgtaatggtaggcttttaacaaataactgcctaatttaaa

SEQ ID NO: 730301 - DNA, 120 bp, Artificial Sequence
  ENSG00000198668_51 (sequence is synthesized)
ggattggaaagcatttgttacatggaaatgaagttggtggcgtacccagttgctgtatctttattttttctacttaattatttctcataaaatggatataaaagcctgttaatccaaccc

SEQ ID NO: 730302 - DNA, 120 bp, Artificial Sequence
  ENSG00000198668_52 (sequence is synthesized)
aatgccattatgtaacgccagtttggagatttcgagggcctggagcagtgcgcaaggtgcgctgaaagcctgcccctggatgagatccttatcctggctgtgatggcagtggcagtgggc

SEQ ID NO: 730303 - DNA, 120 bp, Artificial Sequence
  ENSG00000198668_53 (sequence is synthesized)
tgggtcccttgttgagtggaaagggggactgcggtgtccatggtgcagtaggtggcgctcttctgtcttagagcctgccgccactgcagctggtgccaaggggccttctgccactagagg

SEQ ID NO: 730304 - DNA, 120 bp, Artificial Sequence
  ENSG00000198668_54 (sequence is synthesized)
tgccatttttcacatgatgaacttagcctagttagatcgcagagcaagctgtaagccatgggcccagaaaagaaaacttgaagtgagcagatgttgtcacttccttgtaatcctttgtta

SEQ ID NO: 730305 - DNA, 120 bp, Artificial Sequence
  ENSG00000198668_55 (sequence is synthesized)
gcaaatgtgcaaagatcctttctgtggttgccccagggccattgacaattaaaatagaagatgatgggccttgcgtccatcctgcttagtgtctagaatgttttctgcatgggatcacta

SEQ ID NO: 730306 - DNA, 120 bp, Artificial Sequence
  ENSG00000198668_56 (sequence is synthesized)
tgactgttactttgaattgttgtgagcttttgcaaatcctgttttctgcattagctgtttgcatgtatttagtaggttagaggtgggaactagagatcagagaattgtttatggcagcag

SEQ ID NO: 730307 - DNA, 120 bp, Artificial Sequence
  ENSG00000198668_57 (sequence is synthesized)
tcagtggagaccaaataatgcaggtgaattaccttcgtggccattactgcctccaacgaagtgtgtttattaagaacagttcttatgtcattcttaaggctgatcagctgaccgaagaac

SEQ ID NO: 730308 - DNA, 120 bp, Artificial Sequence
  ENSG00000198668_58 (sequence is synthesized)
agctgaaggagtgtggccaatctgcctccacctccccgcggaccccctactctcaggacctcctgcagcaccccaaactggaagtggccgctgcagacccaaggacgaggggcacgcggg

SEQ ID NO: 730309 - DNA, 120 bp, Artificial Sequence
  ENSG00000198668_59 (sequence is synthesized)
gttttctaagaatttatttaaataagaacagtaagcagaaacactgaggtcagatgttattcttgccagtactttatagatgaggtgaaaggaagtaaaactaaggatgcccacatgtta

SEQ ID NO: 730310 - DNA, 120 bp, Artificial Sequence
  ENSG00000198668_60 (sequence is synthesized)
aactctggagaatttgaccatgtttcacaatgtgcaaagtttgcgtatgattaattgtactgagcctgctactcagcggtttagtttacaattcttatgccatgggtctttcagtaatct

SEQ ID NO: 730311 - DNA, 120 bp, Artificial Sequence
  ENSG00000198668_61 (sequence is synthesized)
gccgtgccgttactcgtagtcaggcggcggcgcaggcggcggcggcggcatagcgcacagcgcgccttagcagcagcagcagcagcagcggcatcggaggctgatcagctgaccgaagaa

SEQ ID NO: 730312 - DNA, 120 bp, Artificial Sequence
  ENSG00000198668_62 (sequence is synthesized)
gggcagtggagaatgaatgggctggagctggccggtggcgcacattgttccggccgggtgttgaggggcgcagtcagcgcccgccacctccccactttggccggccctgctgggcgccct

SEQ ID NO: 730313 - DNA, 120 bp, Artificial Sequence
  ENSG00000198670_0 (sequence is synthesized)
ctgggattgggacacactttctgggcactgctggccagtcccaaaatggaacataaggaagtggttcttctacttcttttatttctgaaatcagcagcacctgagcaaagccatgtggtc

SEQ ID NO: 730314 - DNA, 120 bp, Artificial Sequence
  ENSG00000198670_1 (sequence is synthesized)
caggattgctaccatggtgatggacagagttatcgaggcacgtactccaccactgtcacaggaaggacctgccaagcttggtcatctatgacaccacatcaacataataggaccacagaa

SEQ ID NO: 730315 - DNA, 120 bp, Artificial Sequence
  ENSG00000198670_2 (sequence is synthesized)
aactacccaaatgctggcttgatcatgaactactgcaggaatccagatgctgtggcagctccttattgttatacgagggatcccggtgtcaggtgggagtactgcaacctgacgcaatgc

SEQ ID NO: 730316 - DNA, 120 bp, Artificial Sequence
  ENSG00000198670_3 (sequence is synthesized)
tcagacgcagaagggactgccgtcgcgcctccgactgttaccccggttccaagcctagaggctccttccgaacaagcaccgactgagcaaaggcctggggtgcaggagtgctaccatggt

SEQ ID NO: 730317 - DNA, 120 bp, Artificial Sequence
  ENSG00000198670_4 (sequence is synthesized)
aatggacagagttatcgaggcacatactccaccactgtcacaggaagaacctgccaagcttggtcatctatgacaccacactcgcatagtcggaccccagaatactacccaaatgctggc

SEQ ID NO: 730318 - DNA, 120 bp, Artificial Sequence
  ENSG00000198670_5 (sequence is synthesized)
ttgatcatgaactactgcaggaatccagatgctgtggcagctccttattgttatacgagggatcccggtgtcaggtgggagtactgcaacctgacgcaatgctcagacgcagaagggact

SEQ ID NO: 730319 - DNA, 120 bp, Artificial Sequence
  ENSG00000198670_6 (sequence is synthesized)
gccgtcgcgcctccgactgttaccccggttccaagcctagaggctccttccgaacaagcaccgactgagcaaaggcctggggtgcaggagtgctaccatggtaatggacagagttatcga

SEQ ID NO: 730320 - DNA, 120 bp, Artificial Sequence
  ENSG00000198670_7 (sequence is synthesized)
ggcacatactccaccactgtcacaggaagaacctgccaagcttggtcatctatgacaccacactcgcatagtcggaccccagaatactacccaaatgctggcttgatcatgaactactgc

SEQ ID NO: 730321 - DNA, 120 bp, Artificial Sequence
  ENSG00000198670_8 (sequence is synthesized)
aggaatccagatgctgtggcagctccttattgttatacgagggatcccggtgtcaggtgggagtactgcaacctgacgcaatgctcagacgcagaagggactgccgtcgcgcctccgact

SEQ ID NO: 730322 - DNA, 120 bp, Artificial Sequence
  ENSG00000198670_9 (sequence is synthesized)
gttaccccggttccaagcctagaggctccttccgaacaagcaccgactgagcagaggcctggggtgcaggagtgctaccacggtaatggacagagttatcgaggcacatactccaccact

SEQ ID NO: 730323 - DNA, 120 bp, Artificial Sequence
  ENSG00000198670_10 (sequence is synthesized)
gtcactggaagaacctgccaagcttggtcatctatgacaccacactcgcatagtcggaccccagaatactacccaaatgctggcttgatcatgaactactgcaggaatccagatgctgtg

SEQ ID NO: 730324 - DNA, 120 bp, Artificial Sequence
  ENSG00000198670_11 (sequence is synthesized)
gcagctccttattgttatacgagggatcccggtgtcaggtgggagtactgcaacctgacgcaatgctcagacgcagaagggactgccgtcgcgcctccgactgttaccccggttccaagc

SEQ ID NO: 730325 - DNA, 120 bp, Artificial Sequence
  ENSG00000198670_12 (sequence is synthesized)
ctagaggctccttccgaacaagcaccgactgagcaaaggcctggggtgcaggagtgctaccatggtaatggacagagttatcgaggcacatactccaccactgtcacaggaagaacctgc

SEQ ID NO: 730326 - DNA, 120 bp, Artificial Sequence
  ENSG00000198670_13 (sequence is synthesized)
caagcttggtcatctatgacaccacactcgcatagtcggaccccagaatactacccaaatgctggcttgatcatgaactactgcaggaatccagatgctgtggcagctccttattgttat

SEQ ID NO: 730327 - DNA, 120 bp, Artificial Sequence
  ENSG00000198670_14 (sequence is synthesized)
acgagggatcccggtgtcaggtgggagtactgcaacctgacgcaatgctcagacgcagaagggactgccgtcgcgcctccgactgttaccccggttccaagcctagaggctccttccgaa

SEQ ID NO: 730328 - DNA, 120 bp, Artificial Sequence
  ENSG00000198670_15 (sequence is synthesized)
caagcaccgactgagcaaaggcctggggtgcaggagtgctaccatggtaatggacagagttatcgaggcacatactccaccactgtcacaggaagaacctgccaagcttggtcatctatg

SEQ ID NO: 730329 - DNA, 120 bp, Artificial Sequence
  ENSG00000198670_16 (sequence is synthesized)
acaccacactcgcatagtcggaccccagaatactacccaaatgctggcttgatcatgaactactgcaggaatccagatgctgtggcagctccttattgttatacgagggatcccggtgtc

SEQ ID NO: 730330 - DNA, 120 bp, Artificial Sequence
  ENSG00000198670_17 (sequence is synthesized)
aggtgggagtactgcaacctgacgcaatgctcagacgcagaagggactgccgtcgcgcctccgactgttaccccggttccaagcctagaggctccttccgaacaagcaccgactgagcaa

SEQ ID NO: 730331 - DNA, 120 bp, Artificial Sequence
  ENSG00000198670_18 (sequence is synthesized)
aggcctggggtgcaggagtgctaccatggtaatggacagagttatcgaggcacatactccaccactgtcacaggaagaacctgccaagcttggtcatctatgacaccacactcgcatagt

SEQ ID NO: 730332 - DNA, 120 bp, Artificial Sequence
  ENSG00000198670_19 (sequence is synthesized)
cggaccccagaatactacccaaatgctggcttgatcatgaactactgcaggaatccagatgctgtggcagctccttattgttatacgagggatcccggtgtcaggtgggagtactgcaac

SEQ ID NO: 730333 - DNA, 120 bp, Artificial Sequence
  ENSG00000198670_20 (sequence is synthesized)
ctgacgcaatgctcagacgcagaagggactgccgtcgcgcctccgactgttaccccggttccaagcctagaggctccttccgaacaagcaccgactgagcagaggcctggggtgcaggag

SEQ ID NO: 730334 - DNA, 120 bp, Artificial Sequence
  ENSG00000198670_21 (sequence is synthesized)
tgctaccacggtaatggacagagttatcgaggcacatactccaccactgtcactggaagaacctgccaagcttggtcatctatgacaccacactcgcatagtcggaccccagaatactac

SEQ ID NO: 730335 - DNA, 120 bp, Artificial Sequence
  ENSG00000198670_22 (sequence is synthesized)
ccaaatgctggcttgatcatgaactactgcaggaatccagatcctgtggcagccccttattgttatacgagggatcccagtgtcaggtgggagtactgcaacctgacacaatgctcagac

SEQ ID NO: 730336 - DNA, 120 bp, Artificial Sequence
  ENSG00000198670_23 (sequence is synthesized)
gcagaagggactgccgtcgcgcctccaactattaccccgattccaagcctagaggctccttctgaacaagcaccaactgagcaaaggcctggggtgcaggagtgctaccacggaaatgga

SEQ ID NO: 730337 - DNA, 120 bp, Artificial Sequence
  ENSG00000198670_24 (sequence is synthesized)
cagagttatcaaggcacatacttcattactgtcacaggaagaacctgccaagcttggtcatctatgacaccacactcgcatagtcggaccccagcatactacccaaatgctggcttgatc

SEQ ID NO: 730338 - DNA, 120 bp, Artificial Sequence
  ENSG00000198670_25 (sequence is synthesized)
aagaactactgccgaaatccagatcctgtggcagccccttggtgttatacaacagatcccagtgtcaggtgggagtactgcaacctgacacgatgctcagatgcagaatggactgccttc

SEQ ID NO: 730339 - DNA, 120 bp, Artificial Sequence
  ENSG00000198670_26 (sequence is synthesized)
ctgactgaggaaacccccggggtacaggactgctactaccattatggacagagttaccgaggcacatactccaccactgtcacaggaagaacttgccaagcttggtcatctatgacacca

SEQ ID NO: 730340 - DNA, 120 bp, Artificial Sequence
  ENSG00000198670_27 (sequence is synthesized)
caccagcatagtcggaccccagaaaactacccaaatgctggcctgaccaggaactactgcaggaatccagatgctgagattcgcccttggtgttacaccatggatcccagtgtcaggtgg

SEQ ID NO: 730341 - DNA, 120 bp, Artificial Sequence
  ENSG00000198670_28 (sequence is synthesized)
gagtactgcaacctgacacaatgcctggtgacagaatcaagtgtccttgcaactctcacggtggtcccagatccaagcacagaggcttcttctgaagaagcaccaacggagcaaagcccc

SEQ ID NO: 730342 - DNA, 120 bp, Artificial Sequence
  ENSG00000198670_29 (sequence is synthesized)
ggggtccaggattgctaccatggtgatggacagagttatcgaggctcattctctaccactgtcacaggaaggacatgtcagtcttggtcctctatgacaccacactggcatcagaggaca

SEQ ID NO: 730343 - DNA, 120 bp, Artificial Sequence
  ENSG00000198670_30 (sequence is synthesized)
acagaatattatccaaatggtggcctgaccaggaactactgcaggaatccagatgctgagattagtccttggtgttataccatggatcccaatgtcagatgggagtactgcaacctgaca

SEQ ID NO: 730344 - DNA, 120 bp, Artificial Sequence
  ENSG00000198670_31 (sequence is synthesized)
caatgtccagtgacagaatcaagtgtccttgcgacgtccacggctgtttctgaacaagcaccaacggagcaaagccccacagtccaggactgctaccatggtgatggacagagttatcga

SEQ ID NO: 730345 - DNA, 120 bp, Artificial Sequence
  ENSG00000198670_32 (sequence is synthesized)
ggctcattctccaccactgttacaggaaggacatgtcagtcttggtcctctatgacaccacactggcatcagagaaccacagaatactacccaaatggtggcctgaccaggaactactgc

SEQ ID NO: 730346 - DNA, 120 bp, Artificial Sequence
  ENSG00000198670_33 (sequence is synthesized)
aggaatccagatgctgagattcgcccttggtgttataccatggatcccagtgtcagatgggagtactgcaacctgacgcaatgtccagtgatggaatcaactctcctcacaactcccacg

SEQ ID NO: 730347 - DNA, 120 bp, Artificial Sequence
  ENSG00000198670_34 (sequence is synthesized)
gtggtcccagttccaagcacagagcttccttctgaagaagcaccaactgaaaacagcactggggtccaggactgctaccgaggtgatggacagagttatcgaggcacactctccaccact

SEQ ID NO: 730348 - DNA, 120 bp, Artificial Sequence
  ENSG00000198670_35 (sequence is synthesized)
atcacaggaagaacatgtcagtcttggtcgtctatgacaccacattggcatcggaggatcccattatactatccaaatgctggcctgaccaggaactactgcaggaatccagatgctgag

SEQ ID NO: 730349 - DNA, 120 bp, Artificial Sequence
  ENSG00000198670_36 (sequence is synthesized)
attcgcccttggtgttacaccatggatcccagtgtcaggtgggagtactgcaacctgacacgatgtccagtgacagaatcgagtgtcctcacaactcccacagtggccccggttccaagc

SEQ ID NO: 730350 - DNA, 120 bp, Artificial Sequence
  ENSG00000198670_37 (sequence is synthesized)
acagaggctccttctgaacaagcaccacctgagaaaagccctgtggtccaggattgctaccatggtgatggacggagttatcgaggcatatcctccaccactgtcacaggaaggacctgt

SEQ ID NO: 730351 - DNA, 120 bp, Artificial Sequence
  ENSG00000198670_38 (sequence is synthesized)
caatcttggtcatctatgataccacactggcatcagaggaccccagaaaactacccaaatgctggcctgaccgagaactactgcaggaatccagattctgggaaacaaccctggtgttac

SEQ ID NO: 730352 - DNA, 120 bp, Artificial Sequence
  ENSG00000198670_39 (sequence is synthesized)
acaaccgatccgtgtgtgaggtgggagtactgcaatctgacacaatgctcagaaacagaatcaggtgtcctagagactcccactgttgttccagttccaagcatggaggctcattctgaa

SEQ ID NO: 730353 - DNA, 120 bp, Artificial Sequence
  ENSG00000198670_40 (sequence is synthesized)
gcagcaccaactgagcaaacccctgtggtccggcagtgctaccatggtaatggccagagttatcgaggcacattctccaccactgtcacaggaaggacatgtcaatcttggtcatccatg

SEQ ID NO: 730354 - DNA, 120 bp, Artificial Sequence
  ENSG00000198670_41 (sequence is synthesized)
acaccacaccggcatcagaggaccccagaaaactacccaaatgatggcctgacaatgaactactgcaggaatccagatgccgatacaggcccttggtgttttaccatggaccccagcatc

SEQ ID NO: 730355 - DNA, 120 bp, Artificial Sequence
  ENSG00000198670_42 (sequence is synthesized)
aggtgggagtactgcaacctgacgcgatgctcagacacagaagggactgtggtcgctcctccgactgtcatccaggttccaagcctagggcctccttctgaacaagactgtatgtttggg

SEQ ID NO: 730356 - DNA, 120 bp, Artificial Sequence
  ENSG00000198670_43 (sequence is synthesized)
aatgggaaaggataccggggcaagaaggcaaccactgttactgggacgccatgccaggaatgggctgcccaggagccccatagacacagcacgttcattccagggacaaataaatgggca

SEQ ID NO: 730357 - DNA, 120 bp, Artificial Sequence
  ENSG00000198670_44 (sequence is synthesized)
ggtctggaaaaaaattactgccgtaaccctgatggtgacatcaatggtccctggtgctacacaatgaatccaagaaaactttttgactactgtgatatccctctctgtgcatcctcttca

SEQ ID NO: 730358 - DNA, 120 bp, Artificial Sequence
  ENSG00000198670_45 (sequence is synthesized)
tttgattgtgggaagcctcaagtggagccgaagaaatgtcctggaagcattgtaggggggtgtgtggcccacccacattcctggccctggcaagtcagtctcagaacaaggtttggaaag

SEQ ID NO: 730359 - DNA, 120 bp, Artificial Sequence
  ENSG00000198670_46 (sequence is synthesized)
cacttctgtggaggcaccttaatatccccagagtgggtgctgactgctgctcactgcttgaagaagtcctcaaggccttcatcctacaaggtcatcctgggtgcacaccaagaagtgaac

SEQ ID NO: 730360 - DNA, 120 bp, Artificial Sequence
  ENSG00000198670_47 (sequence is synthesized)
ctcgaatctcatgttcaggaaatagaagtgtctaggctgttcttggagcccacacaagcagatattgccttgctaaagctaagcaggcctgccgtcatcactgacaaagtaatgccagct

SEQ ID NO: 730361 - DNA, 120 bp, Artificial Sequence
  ENSG00000198670_48 (sequence is synthesized)
tgtctgccatccccagactacatggtcaccgccaggactgaatgttacatcactggctggggagaaacccaaggtacctttgggactggccttctcaaggaagcccagctccttgttatt

SEQ ID NO: 730362 - DNA, 120 bp, Artificial Sequence
  ENSG00000198670_49 (sequence is synthesized)
gagaatgaagtgtgcaatcactataagtatatttgtgctgagcatttggccagaggcactgacagttgccagggtgacagtggagggcctctggtttgcttcgagaaggacaaatacatt

SEQ ID NO: 730363 - DNA, 120 bp, Artificial Sequence
  ENSG00000198670_50 (sequence is synthesized)
ttacaaggagtcacttcttggggtcttggctgtgcacgccccaataagcctggtgtctatgctcgtgtttcaaggtttgttacttggattgagggaatgatgagaaataattaattggac

SEQ ID NO: 730364 - DNA, 120 bp, Artificial Sequence
  ENSG00000198670_51 (sequence is synthesized)
gggagacagagtgaagcatcaacctacttagaagctgaaacgtgggtaaggatttagcatgctggaaataatagacagcaatcaaacgaagacactgttcccagctaccagctatgccaa

SEQ ID NO: 730365 - DNA, 120 bp, Artificial Sequence
  ENSG00000198670_52 (sequence is synthesized)
accttggcatttttggtatttttgtgtataagcttttaaggtctgactgacaaattctgtattaaggtgtcatagctatgacatttgttaaaaataaactctgcacttattttgatttga

SEQ ID NO: 730366 - DNA, 120 bp, Artificial Sequence
  ENSG00000198673_0 (sequence is synthesized)
ttttataccagttgcctcctcatcttttactgtctcgttctttttctgcaggaccgttgtttgctctcaacggcagttgctggggctaacagaactggctgttgggagagagaggcgagg

SEQ ID NO: 730367 - DNA, 120 bp, Artificial Sequence
  ENSG00000198673_1 (sequence is synthesized)
caacgccgcccggccctgccattccattttactgcttaactcaacctggagtgtcaggacctattctcctgcattctcgctgcactatacgggggagccaagtcactctgtactcactgg

SEQ ID NO: 730368 - DNA, 120 bp, Artificial Sequence
  ENSG00000198673_2 (sequence is synthesized)
acagccaggctgggtggaatagggttctagagtggagcaggggctctgccctttatggcgactttctaaaagattagcatcagtgtcttttgacagtatagcatctggggtgggacgcgg

SEQ ID NO: 730369 - DNA, 120 bp, Artificial Sequence
  ENSG00000198673_3 (sequence is synthesized)
agaggaggctttgcttgctaaacggcttctttctccgccggtgatctggatttgtttcctcggccccctccccccgctcctttctttctcccctcccgcctttagcaaagtgacacaggc

SEQ ID NO: 730370 - DNA, 120 bp, Artificial Sequence
  ENSG00000198673_4 (sequence is synthesized)
gacacctgctcgcttgtgttcgatgttggaactcgcacctcctcggtggtgacggtgccagggcactgctaccagggggacatcggcgggtttcccttccttccagcccacgatgcctag

SEQ ID NO: 730371 - DNA, 120 bp, Artificial Sequence
  ENSG00000198673_5 (sequence is synthesized)
aagggcagcgggtgggctgcgtggggctctgcccgcagcacttcgaggcgggattgaggggctgaagctggccaggagttgctgctaagtggattcgagtggaaggcgccaagtctccgc

SEQ ID NO: 730372 - DNA, 120 bp, Artificial Sequence
  ENSG00000198673_6 (sequence is synthesized)
gagggcaccagcggggacctatctgcgagcagtgggaacaggggcacctggacggaggaacgcgggcgtctggaggggggacatcggctgagctcagagcctctcctccttcctgtcccg

SEQ ID NO: 730373 - DNA, 120 bp, Artificial Sequence
  ENSG00000198673_7 (sequence is synthesized)
agcttcccagcaactccgccacgttggagacccggtacctgcgagagccagggaactcgagaagtgcgtggccgaggctgctttcctgaaggtgaatcattctgtccaattgcctttccc

SEQ ID NO: 730374 - DNA, 120 bp, Artificial Sequence
  ENSG00000198673_8 (sequence is synthesized)
cagagaacaagagggagggcgggagagagggaacggaggatgtgtgagtgtgtgtgtgtgtgagagggagagacgacgtgaggcgagaggaaaagtctttagtcggccttaaaagcaaac

SEQ ID NO: 730375 - DNA, 120 bp, Artificial Sequence
  ENSG00000198673_9 (sequence is synthesized)
aaatcagagatggaataagagcggtaattgcagcaagaccgccttgattcttgcagtccagggagctgagcgcaccgcgcgcatccggcgaggacaggaggcgaccgcgggcgctgccaa

SEQ ID NO: 730376 - DNA, 120 bp, Artificial Sequence
  ENSG00000198673_10 (sequence is synthesized)
gggctgcgggactttggcttttcctcagtaaacaaatcttttgattactttgacactgtggaataaagaagcggggagaaggatcaggctcaccttcacccgcttcagggggattccagc

SEQ ID NO: 730377 - DNA, 120 bp, Artificial Sequence
  ENSG00000198673_11 (sequence is synthesized)
ttggatgtcagattcctgaaccgtctttgccatcggaggaggaaacacatccacacacgcgcgcgcacactcgcacgctcagggccacactcacacgccgccctccacgatcacacagca

SEQ ID NO: 730378 - DNA, 120 bp, Artificial Sequence
  ENSG00000198673_12 (sequence is synthesized)
ccagacttcggttccctatgcccctggatggtgacggcggattggcatcttggaagcgatgcgagagcgataaggctggcgccggcccgcaaaagctgcaggagcatcgctaggtgttgc

SEQ ID NO: 730379 - DNA, 120 bp, Artificial Sequence
  ENSG00000198673_13 (sequence is synthesized)
cgccaccgggaagcggggctgcaggatgagtaagagatacttacagaaagcaacaaaaggaaaactgctaataataatatttattgtaaccttgtgggggaaagttgtatccagtgcaaa

SEQ ID NO: 730380 - DNA, 120 bp, Artificial Sequence
  ENSG00000198673_14 (sequence is synthesized)
ccatcataaagctcaccatgttaaaacgggaacttgtgaggtggtggcactccacagatgctgtaataagaacaagatagaagaacggtcacaaacagtcaagtgctcctgcttccctgg

SEQ ID NO: 730381 - DNA, 120 bp, Artificial Sequence
  ENSG00000198673_15 (sequence is synthesized)
gcaggtggcaggcaccacgcgagctgctccatcatgtgtggatgcttcaatagtggaacagaaatggtggtgccatatgcagccatgtctagagggagaagaatgtaaagttcttccgga

SEQ ID NO: 730382 - DNA, 120 bp, Artificial Sequence
  ENSG00000198673_16 (sequence is synthesized)
tcggaaaggatggagctgttcctctgggaataaagtcaaaacaactagggtaacccattaacccaggagaaatcaagtgatcctcaaggctgatgacattgaacatgcgcatagaaactt

SEQ ID NO: 730383 - DNA, 120 bp, Artificial Sequence
  ENSG00000198673_17 (sequence is synthesized)
ggcgctcaatagtctatttccaagggatttcatggcctcttcttgaaatcaagactttttaaaagtcagacatgaacttgcatgtcatgaagatttcagcagatttgaactgtgttcaac

SEQ ID NO: 730384 - DNA, 120 bp, Artificial Sequence
  ENSG00000198673_18 (sequence is synthesized)
ttgtaaattgttaaaagaatttgaagtcactgtctgaggagctggtgaagagttgtttttttcagggtgatgttagagacagtcaccttttgagttattggctccagatgtgactacttt

SEQ ID NO: 730385 - DNA, 120 bp, Artificial Sequence
  ENSG00000198673_19 (sequence is synthesized)
tcttgtttctgcaagctgtatcccaagtgcactgtccttctgtcctggatgtgttcctgggtcctatgttcatttgctagtgggactacacatggctttaatgacatttcctttgagaac

SEQ ID NO: 730386 - DNA, 120 bp, Artificial Sequence
  ENSG00000198673_20 (sequence is synthesized)
ttttcctctggcatggtgtagactgagacaattttatttatatcctaatcttggagctcagaaagcctacatgttttaacatcttaaagttgcttttgttaaaggaatggaaatatatat

SEQ ID NO: 730387 - DNA, 120 bp, Artificial Sequence
  ENSG00000198673_21 (sequence is synthesized)
ccattggtaataatgttggcaagtaatagttatctgaataaatcaatcatataagaatgtatagacaagctgacatatttccctaaggctaacaacaccctgctgaagctctttgtcaaa

SEQ ID NO: 730388 - DNA, 120 bp, Artificial Sequence
  ENSG00000198673_22 (sequence is synthesized)
taggtagtagttagaactggattgccattttcattatataatactttgtacctctagagcactctccctttctgtttttttttaagtgagcttttctttaattttttatgtttacttatt

SEQ ID NO: 730389 - DNA, 120 bp, Artificial Sequence
  ENSG00000198673_23 (sequence is synthesized)
cccttcacagaaatcagcagtgagcagtcaagttaatgggtagccttcagtttcaaaaaaattgacagggatgcatgtgagtttctgatttcttagcttgaacattattcacttagattt

SEQ ID NO: 730390 - DNA, 120 bp, Artificial Sequence
  ENSG00000198673_24 (sequence is synthesized)
cttccagtattttttaaaaaactgtcctatctcattttaaaagactttcttttgcttgatcccaatgactgtttgaatgcttatatatttgttcaatctgttgatagaaaaaattgttca

SEQ ID NO: 730391 - DNA, 120 bp, Artificial Sequence
  ENSG00000198673_25 (sequence is synthesized)
ttttcctcagtctcaaatttataaatatttgcttacagttttcctattcaaacaatttgttaggccaatattttgtgacatttttgtagcgattttaacgtttatggttttggttctaca

SEQ ID NO: 730392 - DNA, 120 bp, Artificial Sequence
  ENSG00000198673_26 (sequence is synthesized)
ggaaagtcataaatatttaaaggccttaaacatgtatgtactttttttttctaagttatagaatgtataattttgtactacatttattttgtttcatttgtgatatgaagggagagaaga

SEQ ID NO: 730393 - DNA, 120 bp, Artificial Sequence
  ENSG00000198673_27 (sequence is synthesized)
aagaaaagtgcatagccattctgtaacaatattgtgtaaacctatagtttgaaggaatgcaaggagaaggatttctgtgttttactcattttaggctgttcagaagatgcttcaaaaatt

SEQ ID NO: 730394 - DNA, 120 bp, Artificial Sequence
  ENSG00000198673_28 (sequence is synthesized)
gtcctgttagaatttccatcatggaaggtggtatggaagaaggtatggaaatactttgtattctaaaaactcactgacgtggtcagttagacatacgttggtttccaggatagaggccca

SEQ ID NO: 730395 - DNA, 120 bp, Artificial Sequence
  ENSG00000198673_29 (sequence is synthesized)
tatatcctggggagctttggtctattagtttgtgacaatattcaaaggccaaaacactactcagacactttcctgggaagagcaactaaaaatgtaaaattggttaaaaataaaatctga

SEQ ID NO: 730396 - DNA, 120 bp, Artificial Sequence
  ENSG00000198673_30 (sequence is synthesized)
aaagtatgtatctcacattgaactaaaatccactgtctcataagttcatggaatgaaatggctttctgcctccattttaatcatgcataaaatgaattagatggctttgagtggattttc

SEQ ID NO: 730397 - DNA, 120 bp, Artificial Sequence
  ENSG00000198673_31 (sequence is synthesized)
acaatggctcaagactatatgaaattataaaaaaaaagttgccctggggtttctgcatcaattagaatatcattaatttctttgtaaccaagtgaaaaactatactttttggaaattatg

SEQ ID NO: 730398 - DNA, 120 bp, Artificial Sequence
  ENSG00000198673_32 (sequence is synthesized)
aatttgtcctaggtttgtttgagatttgaaattatacatcatgcttctcattttttaaactatgttctttaaatcaacactggaaactctgtattatatacaagtgtaatacatgcatat

SEQ ID NO: 730399 - DNA, 120 bp, Artificial Sequence
  ENSG00000198673_33 (sequence is synthesized)
aatagaaaaaaaacatggaatttcaaatatactaactagattatccccagtagattaatgttgtgactattcagaaaaggtgaataaaattgggatataaaatggactctctttcataaa

SEQ ID NO: 730400 - DNA, 120 bp, Artificial Sequence
  ENSG00000198673_34 (sequence is synthesized)
aaagtaattttctgaagggaagctgcagaatatggaaaacatatattggagctacatggatcatgtcaagttcagactgtaaggagtagatgcagtagtgaagctgtccatctcaggtga

SEQ ID NO: 730401 - DNA, 120 bp, Artificial Sequence
  ENSG00000198673_35 (sequence is synthesized)
aggacttggcagccaacgttttgaaatgtaaacatccagggagatagcaactcaatctctcagtttctgtgagacgtaggagccaaacttgagcctcaaaatcaccttgtcataaagaga

SEQ ID NO: 730402 - DNA, 120 bp, Artificial Sequence
  ENSG00000198673_36 (sequence is synthesized)
ctaagctgcagtgaaaaacatgtcccagttcatcggtgaacagggagtagaatatggacagtattgaataatgccagatactaaaggaagaaaacgtgcgagaaaccctcttgtttatac

SEQ ID NO: 730403 - DNA, 120 bp, Artificial Sequence
  ENSG00000198673_37 (sequence is synthesized)
aggatagtaacattttcttagccccatcttcgtatggtgccgtacacctgaaatgaaactagatatgtctttaatttgaagtcaacgattatgttacaaaatagaaaatcgagtcgctta

SEQ ID NO: 730404 - DNA, 120 bp, Artificial Sequence
  ENSG00000198673_38 (sequence is synthesized)
aaaatcaaatgccaaggtcacacagcaggtggagaggttaaaagattaagagtttctctaaccacggctaccctctaaaagtcacattttccccctttttccagtcactctctgaaagag

SEQ ID NO: 730405 - DNA, 120 bp, Artificial Sequence
  ENSG00000198673_39 (sequence is synthesized)
ctaatgttggataatctagaaaaagttctctggctaaagccttttccatatccagatccaaatgagtttgatctccctgtgatacaggggttggaggcagaaagagaggaggctgggaaa

SEQ ID NO: 730406 - DNA, 120 bp, Artificial Sequence
  ENSG00000198673_40 (sequence is synthesized)
acaaaaacaagaacaaaaccaagccaaacaaaaaatcaatgactggctctgactttagatagatctggtttgaatctcagctccaatatataataacaggtgtagccctaactactagca

SEQ ID NO: 730407 - DNA, 120 bp, Artificial Sequence
  ENSG00000198673_41 (sequence is synthesized)
gaggcaagagaatagagctatgccacttcttccatcagtaagggagcactcaatgtaaactccctaggaaagagctgctaacaaaagtctttgtgtttcaattaaaccaaggaaagtgaa

SEQ ID NO: 730408 - DNA, 120 bp, Artificial Sequence
  ENSG00000198673_42 (sequence is synthesized)
ctggctctctctcgctagagggatgccaccgccctgtcctcccgtcctcagcgttgccttcccctccctctttcccactgacgccttgaaaacccttatttgcgcattcactcacgcttg

SEQ ID NO: 730409 - DNA, 120 bp, Artificial Sequence
  ENSG00000198673_43 (sequence is synthesized)
gagttgaagaccagcctgggtaacacagtgagacctcctcatctcaaaacaacccagtgtggtggtccagcatgggtgacagagacccatctctaaaattaataaacaaataaatctcta

SEQ ID NO: 730410 - DNA, 120 bp, Artificial Sequence
  ENSG00000198673_44 (sequence is synthesized)
gaagtatagatgtttgggaacacataggaaaaataattaatagagtgggttaccaaaattaagtatgttttcctaaagaagataactcttgtcctgagccttaacaaatgagttggagct

SEQ ID NO: 730411 - DNA, 120 bp, Artificial Sequence
  ENSG00000198673_45 (sequence is synthesized)
aactaggcagaggaggttgttgacagatgcagtatgatggtgccaaggatttcaattaagtccatttgaggagccatttataacatattctttatatcatgaactcaatactttgaaaca

SEQ ID NO: 730412 - DNA, 120 bp, Artificial Sequence
  ENSG00000198673_46 (sequence is synthesized)
aatgccatcattccctctctgtgttgatttctggtgaagctcagagctgcatttcagagtcagaatgcactgggtgactgggggaagctgtgatgtatgaagcagaaagaagattgattt

SEQ ID NO: 730413 - DNA, 120 bp, Artificial Sequence
  ENSG00000198673_47 (sequence is synthesized)
tgttcctctgggaataaagtcaaaacaactagggcaaacgtgtaaaactcttcaagttcgaatggagaagtagaaagagaaggtttctgctgtgcctgatgacaatttttgatttctcca

SEQ ID NO: 730414 - DNA, 120 bp, Artificial Sequence
  ENSG00000198673_48 (sequence is synthesized)
cactcaaaaaagttttggctccatgttggagcactagttgtggcgaatcctagtgttggtcggattctaaggaagggacagaagtttcattgagaagtaaagattcaaaacaactccaga

SEQ ID NO: 730415 - DNA, 120 bp, Artificial Sequence
  ENSG00000198673_49 (sequence is synthesized)
aaagttcttgccctttaattgaatcataaaattgagtataataatacctaccttaagggatttttatgaagattaaatgaaacaatttgtgtttattgcctgggacgtaatagccattca

SEQ ID NO: 730416 - DNA, 120 bp, Artificial Sequence
  ENSG00000198673_50 (sequence is synthesized)
tgacagggtgaattgtacagtatgtgaattatacctcaataaagctattgaaaaaaggtgttaggggctttgaaggcaaaactgtgctctccttcattgtataaacataacataaccaag

SEQ ID NO: 730417 - DNA, 120 bp, Artificial Sequence
  ENSG00000198673_51 (sequence is synthesized)
tagcaataaatcatttataccctaatgtccactttcccttaagagaaaatgcatttttgaagtgttgacagctacaaccatacaatgaagtaaaataatattttcttcacttgcaccatg

SEQ ID NO: 730418 - DNA, 120 bp, Artificial Sequence
  ENSG00000198673_52 (sequence is synthesized)
ctcaaggcagcaggttaactggatatagacgtgtaaattcaatgccaatttgaattatacatcagatttatggagccgttttgtagacctaagtaactgccatcagagtcaggaaagaga

SEQ ID NO: 730419 - DNA, 120 bp, Artificial Sequence
  ENSG00000198673_53 (sequence is synthesized)
gcagtgatgagtcaaatattgtctcatcagcattcatcatgatgcgtctggcataaaaaagagcattcttctcctgagacacatggggagcagggaaaagtcaatcagggtgaagaagcc

SEQ ID NO: 730420 - DNA, 120 bp, Artificial Sequence
  ENSG00000198673_54 (sequence is synthesized)
atgcatttcttctatacatgtatgatttctcctgagatttatgttgtttatcagttcacatcacagaataagaaaatcctcactttttaactgtctactgaccagccaaaagctcctggt

SEQ ID NO: 730421 - DNA, 120 bp, Artificial Sequence
  ENSG00000198673_55 (sequence is synthesized)
ggtgatgatattcagtgggtataaagtttcagttatgcaaaatgaggaagccaaaagatgggacaaccctgccctaggccttcacattcactctctactaactcactgactcacccagag

SEQ ID NO: 730422 - DNA, 120 bp, Artificial Sequence
  ENSG00000198673_56 (sequence is synthesized)
acaggtgtgaaccactgtgcccagcctcctttttaacagaaggaaaagccaaaactcagagaggttatataacttatcaaggtcatgtaacactactcggataaatgggagaacgagtct

SEQ ID NO: 730423 - DNA, 120 bp, Artificial Sequence
  ENSG00000198673_57 (sequence is synthesized)
acgagtctggcgaagtggcttcagaggaatgaatatgagacacagaatgtgaattacagtgtcactctctgaaagagaacaaagtaattttctgaagggaagctgcagaatatggaaaac

SEQ ID NO: 730424 - DNA, 120 bp, Artificial Sequence
  ENSG00000198673_58 (sequence is synthesized)
aggtggagagtcactctctgaaagagaacaaagtaattttctgaagggaagctgcagaatatggaaaacatatattggagctacatggattaggagacactttcctggttatggccagag

SEQ ID NO: 730425 - DNA, 120 bp, Artificial Sequence
  ENSG00000198673_59 (sequence is synthesized)
agtgatgtgactatggaagaatggctttgaagatggaataaaggggccatgagccaaggaatgtggaaggcttctcgaatttagaaggaacaaggaaatgaattctctgttaaagcctcc

SEQ ID NO: 730426 - DNA, 120 bp, Artificial Sequence
  ENSG00000198673_60 (sequence is synthesized)
agaaaggatcagagccttgctaaaaccttgatttttagcacatgataagtagtagaagagcctactttaaggaagaagaaatgttagaaagtttaggactaggaagtctgatgagaaagt

SEQ ID NO: 730427 - DNA, 120 bp, Artificial Sequence
  ENSG00000198673_61 (sequence is synthesized)
atgtggatggacctatgggactcggcacaaagtgtaaagatttttgcattacaagtgaacaccaaccataaaggatatatcacaaaagaggtactgaataaacagaatgactccaatggt

SEQ ID NO: 730428 - DNA, 120 bp, Artificial Sequence
  ENSG00000198673_62 (sequence is synthesized)
tggcatcaacaagcttctatcctcaaagctggaacaatgggcacaagaagggtagtcatcatgactgtggatggccccacagcatgagctctcacttaccaacagtgatttggctattgc

SEQ ID NO: 730429 - DNA, 120 bp, Artificial Sequence
  ENSG00000198673_63 (sequence is synthesized)
tgctgccaaatgtccaacctgtcaggaacagagaccaatattgagcccttgatatagaatcatccatggaggagaatcaaatgacaagttaattacatggatcccttctattatgtaagg

SEQ ID NO: 730430 - DNA, 120 bp, Artificial Sequence
  ENSG00000198673_64 (sequence is synthesized)
aggtatggattttcctttcctgccaatagtgcttcagctgcttccaccatacttatggagtgtttgatctcatgacacaggatcttcccaatatcacatcaaacaaagggattcatttta

SEQ ID NO: 730431 - DNA, 120 bp, Artificial Sequence
  ENSG00000198673_65 (sequence is synthesized)
ttgcaaaagagatgtggtagtgagcacgtgaccatgtgattcactgattctttcacataacacttcacccagaactgtaaacaattgccggccggatagagcaacggaatggcctgttga

SEQ ID NO: 730432 - DNA, 120 bp, Artificial Sequence
  ENSG00000198673_66 (sequence is synthesized)
agaatcagcttaagcaccaccttagatacaataataccctatgcagtataccctctgaatcaatggccagcatatgttgctgtgttcccagcaaatagaatttatggatatgggaatcaa

SEQ ID NO: 730433 - DNA, 120 bp, Artificial Sequence
  ENSG00000198673_67 (sequence is synthesized)
atgtagaagtagaggtggtcctgtttaccatcattgtcagtgacccaattggggattttgtgctactcatctccatagctctgagatttgtaggtttagaggtattgttcccaaaaggtg

SEQ ID NO: 730434 - DNA, 120 bp, Artificial Sequence
  ENSG00000198673_68 (sequence is synthesized)
agcatttccaccaggagacacagcaagaggcccagtgaactttaaactatggctgtcactggggcatttctgccttctactgccaaaggatcaggcaacgagagcagtcaccatcctggc

SEQ ID NO: 730435 - DNA, 120 bp, Artificial Sequence
  ENSG00000198673_69 (sequence is synthesized)
aggtttatcattctaaatactgggaggaggtcaggctgctcttatacagtgatggcaaaaaggaatgtatttggcatctcttggtatgcccttgcacaactttgacagtaaattgactag

SEQ ID NO: 730436 - DNA, 120 bp, Artificial Sequence
  ENSG00000198673_70 (sequence is synthesized)
taaagtattgatgacctgagaaaggtatggtgactctcaaggatgagtgactggatcatcccaccaggtaagccaacaagaccagcagaggagctagtcaagagaggatcacatgaagcc

SEQ ID NO: 730437 - DNA, 120 bp, Artificial Sequence
  ENSG00000198673_71 (sequence is synthesized)
atatcagtattatgattatgattgcttatttctgcgtaataatactattttgcattatcatgccaaccttgaattgagagttttaaaacaactttcagtgactgctatttctggcttttc

SEQ ID NO: 730438 - DNA, 120 bp, Artificial Sequence
  ENSG00000198673_72 (sequence is synthesized)
aaaatattgaaatgtttaagcagcctctgaagtctttcttaagcctcataataatggatggactttagaaagctaaaaatcatttcaaatatgctgatcatttttaaatttttatactca

SEQ ID NO: 730439 - DNA, 120 bp, Artificial Sequence
  ENSG00000198674_0 (sequence is synthesized)
atgttagagggtgttgagcatctccttctgctacttcttttgacagatgtgaacagcaaggaactgcaaagtggaaaccagacttctgtgtctcacttcattttggtgggcctgcaccac

SEQ ID NO: 730440 - DNA, 120 bp, Artificial Sequence
  ENSG00000198674_1 (sequence is synthesized)
ccaccacagctgggagcgccactcttcttagctttccttgtcatctatctcctcactgtttctggaaatgggctcatcatcctcactgtcttagtggacatccggctccatcgtcccatg

SEQ ID NO: 730441 - DNA, 120 bp, Artificial Sequence
  ENSG00000198674_2 (sequence is synthesized)
tgcttgttcctgtgtcacctctccttcttggacatgaccatttcttgtgctattgtccccaagatgctggctggctttctcttgggtagtaggattatctcctttgggggctgtgtaatc

SEQ ID NO: 730442 - DNA, 120 bp, Artificial Sequence
  ENSG00000198674_3 (sequence is synthesized)
caactattttctttccatttcctgggctgtactgagtgcttcctttacacactcatggcttatgaccgtttccttgccatttgtaagcccttacactatgctaccatcatgacccacaga

SEQ ID NO: 730443 - DNA, 120 bp, Artificial Sequence
  ENSG00000198674_4 (sequence is synthesized)
actatccattcacttttccaaacaagttttgtattccggctgcccttctgtggccccaatcgggtcgactacatcttctgtgacattcctgccatgctgcgtctagcctgcgccgatacg

SEQ ID NO: 730444 - DNA, 120 bp, Artificial Sequence
  ENSG00000198674_5 (sequence is synthesized)
gccatcaacgagctggtcacctttgcagacattggcttcctggccctcacctgcttcatgctcatcctcacttcctatggctatattgtagctgccatcctgcgaattccgtcagcagat

SEQ ID NO: 730445 - DNA, 120 bp, Artificial Sequence
  ENSG00000198674_6 (sequence is synthesized)
gggcgccgcaatgccttctccacttgtgctgcccacctcactgttgtcattgtttactatgtgccctgcaccttcatttacctgcggccttgttcacaggagcccctggatggggtggta

SEQ ID NO: 730446 - DNA, 120 bp, Artificial Sequence
  ENSG00000198674_7 (sequence is synthesized)
gctgtcttttacactgtcatcactcccttgcttaactccatcatctacacactgtgcaacaaagaaatgaaggcagcattacagaggctagggggccacaaggaagtgcagcctcactga

SEQ ID NO: 730447 - DNA, 120 bp, Artificial Sequence
  ENSG00000198677_0 (sequence is synthesized)
atgagtcctgggaaaggcgcatgcgctctcattgcagcctcggcgtttgtagaagaggagcatctgctccagatggaaaatgggtaaggaacaatcaaattcaattcgggaagaatatag

SEQ ID NO: 730448 - DNA, 120 bp, Artificial Sequence
  ENSG00000198677_1 (sequence is synthesized)
aggtggtaataattggtaaaagtctgcagggttttttttaaccaaaggaaactggtttgagaaaattgtgaaatcagcattgaaatttgttacctactccaatcaagatttgcaaactac

SEQ ID NO: 730449 - DNA, 120 bp, Artificial Sequence
  ENSG00000198677_2 (sequence is synthesized)
aaaaaaatcattctgaagctttcacctataaatatataccaagataatttcagataagaatgtccagcaaggaagtgaagactgctctaaaaagtgctagagatgcaatcagaaacaaag

SEQ ID NO: 730450 - DNA, 120 bp, Artificial Sequence
  ENSG00000198677_3 (sequence is synthesized)
aatacaaagaagctttgaaacactgtaagacagtgttaaagcaagagaaaaataactataatgcctgggtttttattggcgttgctgcagctgaactagaacaacctgatcaggcccaga

SEQ ID NO: 730451 - DNA, 120 bp, Artificial Sequence
  ENSG00000198677_4 (sequence is synthesized)
gtgcctataaaaaagctgctgaattagagccagaccaattactagcttggcaggggttagcaaacttgtatgagaaatataatcacataaatgctaaggatgacttgcctggtgtttacc

SEQ ID NO: 730452 - DNA, 120 bp, Artificial Sequence
  ENSG00000198677_5 (sequence is synthesized)
aaaagctcctggatctttatgagagtgttgacaagcagaagtggtgtgatgtctgcaagaaacttgtggatctatattaccaagaaaagaaacacctagaggtggctcgaacatggcaca

SEQ ID NO: 730453 - DNA, 120 bp, Artificial Sequence
  ENSG00000198677_6 (sequence is synthesized)
agttgataaaaacacggcaggaacaaggtgcagaaaatgaagagcttcatcaactatggagaaaattgactcagttcctggctgaaagtacagaggaccagaataatgaaactcagcaat

SEQ ID NO: 730454 - DNA, 120 bp, Artificial Sequence
  ENSG00000198677_7 (sequence is synthesized)
tgctttttactgcttttgagaatgcactgggattatcagataagattcctagtgaagatcaccaagtactttataggcatttcattcagagtttatccaaatttcctcatgagtctgcta

SEQ ID NO: 730455 - DNA, 120 bp, Artificial Sequence
  ENSG00000198677_8 (sequence is synthesized)
gattgaagaaggcctgtgaaggaatgataaacatctatcctactgtacagtatccattagaagtgctttgtttgcatttaattgaatcaggaaatcttactgatgaggggcagcagtatt

SEQ ID NO: 730456 - DNA, 120 bp, Artificial Sequence
  ENSG00000198677_9 (sequence is synthesized)
gttgtagattagtggaaatggattcaaaaagtggtccaggcctcattggcttaggcattaaagcattacaagacaaaaagtatgaagatgctgttaggaacctaacagaagggttaaagg

SEQ ID NO: 730457 - DNA, 120 bp, Artificial Sequence
  ENSG00000198677_10 (sequence is synthesized)
aaagccctgtctgcacaagtggatggtatcatctggcagaagcccaagtcaaaatgcatagacctaaagaagctgttctttcatgcagtcaagctctgaagatcgtagataatcttggtg

SEQ ID NO: 730458 - DNA, 120 bp, Artificial Sequence
  ENSG00000198677_11 (sequence is synthesized)
cgtctggtaacagtctttatcagaggaatctttgtcttcatttgaaagcagaggctttgattaaactctcagattatgactcttcagaggaagcaattcgtacgcttgatcagatttctg

SEQ ID NO: 730459 - DNA, 120 bp, Artificial Sequence
  ENSG00000198677_12 (sequence is synthesized)
atgcagataatatcccaggacttttggttctcaaaagcttggcctatcggaacaaaggttcatttgatgaagctgcaaagattatggaagaccttctctcttcttaccctgacctagctg

SEQ ID NO: 730460 - DNA, 120 bp, Artificial Sequence
  ENSG00000198677_13 (sequence is synthesized)
aagttcatgcccttgaggctttgattcatttcaccaaaaaggactatctacaagcagaaaaatgttttcagagagctcttgagaaagataccgaagttgcagaatatcattaccaacttg

SEQ ID NO: 730461 - DNA, 120 bp, Artificial Sequence
  ENSG00000198677_14 (sequence is synthesized)
gattaacatactggttcatgggtgaagagacaagaaaagataaaacaaaggctcttacccactttctgaaggctgcaagactggatacatatatgggcaaagttttctgctatttaggtc

SEQ ID NO: 730462 - DNA, 120 bp, Artificial Sequence
  ENSG00000198677_15 (sequence is synthesized)
attattatagagacgtagtgggagataaaaacagagctcgtggatgttataggaaagcctttgaattagatgacactgatgctgaatctggagctgcagcagttgacctaagtgtggagc

SEQ ID NO: 730463 - DNA, 120 bp, Artificial Sequence
  ENSG00000198677_16 (sequence is synthesized)
ttgaagatatggaaatggctttagctatcctaacaacagtaactcaaaaggcaagtgctggaacggcaaaatgggcctggcttaggcgaggactatactatttgaaagctggtcagcatt

SEQ ID NO: 730464 - DNA, 120 bp, Artificial Sequence
  ENSG00000198677_17 (sequence is synthesized)
ctcaagcagtggctgatttacaggcagcattaagagcagacccaaaggacttcaattgttgggaatcgttaggagaagcatacttaagcagaggaggctacacaacagccttgaagtcct

SEQ ID NO: 730465 - DNA, 120 bp, Artificial Sequence
  ENSG00000198677_18 (sequence is synthesized)
tcacaaaagccagtgagctgaacccagaatccatatacagtgtgtttaaggttgcagcaatacagcaaatcctaggcaaatataaggaggctgtagctcaataccagatgatcattaaaa

SEQ ID NO: 730466 - DNA, 120 bp, Artificial Sequence
  ENSG00000198677_19 (sequence is synthesized)
agaaagaagattatgtgcctgctttaaaaggtttgggtgaatgccatcttatgatggcaaaagcagctctagttgattatcttgatggaaaagccgtagactacatagaaaaagcactgg

SEQ ID NO: 730467 - DNA, 120 bp, Artificial Sequence
  ENSG00000198677_20 (sequence is synthesized)
aatattttacttgtgctctacagcatcgagctgatgtgtcctgcctctggaagctagctggggatgcttgtacctgtctgtatgctgtcgcaccatctaaagtgaatgttcatgttttag

SEQ ID NO: 730468 - DNA, 120 bp, Artificial Sequence
  ENSG00000198677_21 (sequence is synthesized)
gagtccttctaggtcagaaagaaggaaaacaagtattaaagaaaaatgagctcctccaccttggaggaaggtgttatggtcgtgcattaaaactgatgtctacatctaatacatggtgtg

SEQ ID NO: 730469 - DNA, 120 bp, Artificial Sequence
  ENSG00000198677_22 (sequence is synthesized)
accttggaattaattattatcgccaagcacaacatctagcagaaacaggcagcaacatgaatgatcttaaggagttgctggagaaatctttacattgtctgaaaaaagcagtgagactcg

SEQ ID NO: 730470 - DNA, 120 bp, Artificial Sequence
  ENSG00000198677_23 (sequence is synthesized)
atgcccttgctcagcactgtttcatcaaatcaatccagtcagaacaaattaatgctgttgcatggaccaacttgggagtgttatacctcacaaatgaaaacattgagcaagctcatgagg

SEQ ID NO: 730471 - DNA, 120 bp, Artificial Sequence
  ENSG00000198677_24 (sequence is synthesized)
ctttcaaaatggctcaatcccttgatccatcttatttaatgtgctggattggacaagctcttattgctgaggcagttggaagttatgacaccatggatctcttcaggcacactacagaac

SEQ ID NO: 730472 - DNA, 120 bp, Artificial Sequence
  ENSG00000198677_25 (sequence is synthesized)
taaatatgcatactgaaggagcattaggttatgcgtattgggtctgcacaacattgcaagataaaagcaacagagaaacagagctgtaccagtacaacatcctccagatgaatgctattc

SEQ ID NO: 730473 - DNA, 120 bp, Artificial Sequence
  ENSG00000198677_26 (sequence is synthesized)
cagcagcacaagttattttgaataaatatgtagaaagaattcagaattatgccccagctttcacaatgttgggttacttaaacgaacatctacaactgaaaaaggaagcagcaaatgcat

SEQ ID NO: 730474 - DNA, 120 bp, Artificial Sequence
  ENSG00000198677_27 (sequence is synthesized)
accaaagggcaattttgttgttacagactgcagaagaccaagatacttacaatgttgcaataagaaattacggcagattgttatgttccactggtgaatatgataaagctatccaggctt

SEQ ID NO: 730475 - DNA, 120 bp, Artificial Sequence
  ENSG00000198677_28 (sequence is synthesized)
ttaagtcaacaccccttgaagtgttagaagacatcataggttttgcattggctttattcatgaaggggctttataaagagagcagcaaagcctatgagagagccttgtctattgttgaat

SEQ ID NO: 730476 - DNA, 120 bp, Artificial Sequence
  ENSG00000198677_29 (sequence is synthesized)
cggagcaagacaaagcccatatcttgacagctctggcaataactgaatataaacaaggaaaaacggatgtagccaagacattgctatttaaatgctctatcttaaaggaaccaaccacag

SEQ ID NO: 730477 - DNA, 120 bp, Artificial Sequence
  ENSG00000198677_30 (sequence is synthesized)
aaagccttcaagccctgtgtgctctagggttggcaatgcaggatgctacactgtcaaaagcagcacttaatgagttactgaagcacatcaaacacaaagacagtaattatcagaggtgcc

SEQ ID NO: 730478 - DNA, 120 bp, Artificial Sequence
  ENSG00000198677_31 (sequence is synthesized)
ttcttacatcagcgatttatgcactccaaggccgcagtgtggctgtgcaaaaacaaatatctaaagctgttcacagcaaccctggtgaccctgctctttggtctctgttgtctcgagttg

SEQ ID NO: 730479 - DNA, 120 bp, Artificial Sequence
  ENSG00000198677_32 (sequence is synthesized)
ttgcacagtatgctcaacgaaatgcaaagggaggtgttgtagcaggaaatgtggctcatattctggactcaaatcatggaaagaaggcattactgtacactgcggtaaatcagttggcta

SEQ ID NO: 730480 - DNA, 120 bp, Artificial Sequence
  ENSG00000198677_33 (sequence is synthesized)
tgggaagcagttcagcagaagatgaaaaaaatactgcactaaagaccattcagaaggcagctctcctttctccaggtgatcctgctatctgggctgggctaatggcagcctgtcacgctg

SEQ ID NO: 730481 - DNA, 120 bp, Artificial Sequence
  ENSG00000198677_34 (sequence is synthesized)
atgataaactggccttagtgaacaacactcagccaaagaggatagatttatacttggcactgttatctgctgtttctgcttcaattaaagacgaaaaattctttgaaaattacaaccagt

SEQ ID NO: 730482 - DNA, 120 bp, Artificial Sequence
  ENSG00000198677_35 (sequence is synthesized)
cccttgaaaagtggtctctctcacaagctgtcactggtctaatagacacaggaagaatatctgaagctgaaactctctgcacaaagaatttaaaaagtaaccctgatcagccagccgtta

SEQ ID NO: 730483 - DNA, 120 bp, Artificial Sequence
  ENSG00000198677_36 (sequence is synthesized)
tcttacttttgagacaagttcagtgtaaaccactcctggagtcacaaaagccactcccagatgctgtacttgaagaactacaaaaaacagtcatgtccaactcaacctctgttccagctt

SEQ ID NO: 730484 - DNA, 120 bp, Artificial Sequence
  ENSG00000198677_37 (sequence is synthesized)
ggcagtggctggcacatgtgtatcaatcccaaggaatgatgagagctgcagagatgtgttacagaaagagtctacaattggcatcccaacggggcagttggagtgggaagctctcaagtc

SEQ ID NO: 730485 - DNA, 120 bp, Artificial Sequence
  ENSG00000198677_38 (sequence is synthesized)
tgttgagactagcactacttgcattaaaagtctgtatggctaacatttccaatgatcactggccatctttggttcaagaggctacaactgaggccttgaagctttgcttttgtccactgg

SEQ ID NO: 730486 - DNA, 120 bp, Artificial Sequence
  ENSG00000198677_39 (sequence is synthesized)
ctgttcttttacaagctttgttacaattcaaacgcaaaatgggggcaagagagacacggcgtcttttggaaagagtggtatatcagcctgggtatcccaaatctattgcatcaactgcac

SEQ ID NO: 730487 - DNA, 120 bp, Artificial Sequence
  ENSG00000198677_40 (sequence is synthesized)
gttggtacctactgagacacttatatgccaaagatgactatgagcttattgacgtgctggtaaacaatgccaaaactcatggagatacaagagcattggaactgaatcagagattgtcct

SEQ ID NO: 730488 - DNA, 120 bp, Artificial Sequence
  ENSG00000198677_41 (sequence is synthesized)
cacaataacattggattattttatagtaaggaagcaaagaaaaagctgtaagaatgaagcaatgaatcaagacttctacccaaagcaacatttttttaaactatatttattccttttcta

SEQ ID NO: 730489 - DNA, 120 bp, Artificial Sequence
  ENSG00000198677_42 (sequence is synthesized)
aaggaatctagagaagttgaagtttttaagttaggaatgcaattttctgttaactccaaacctgattttaatctgaaaaaaaaaaaatttaatttgggaaaaccagaatgaaaggaaaac

SEQ ID NO: 730490 - DNA, 120 bp, Artificial Sequence
  ENSG00000198677_43 (sequence is synthesized)
cattattgccttggttgcttaacattatttgtaaaccattattttctgcatcttgcatggtgcacaatagaatatcttttactgtaatcccttacaataaagccttaatagccattttct

SEQ ID NO: 730491 - DNA, 120 bp, Artificial Sequence
  ENSG00000198677_44 (sequence is synthesized)
atgtaatatgcaaaagtagattagcacaatgcacaattttcttttgttaaaaatcaaattcaaagatttaattcttgctatgaattctaaagttcggcaaaccaattcatcataaaatcc

SEQ ID NO: 730492 - DNA, 120 bp, Artificial Sequence
  ENSG00000198677_45 (sequence is synthesized)
aaataatcttgtaacctatttatctagtgattcatctccaattctgttgaaaaagcataatataaatgttgatgagactagactctaatggatatgtttatataattccaaacactcagg

SEQ ID NO: 730493 - DNA, 120 bp, Artificial Sequence
  ENSG00000198677_46 (sequence is synthesized)
tgtgtgaatgcatttaaaaacattaatggaaaataatgctgataatatttaattgatcatgcaattccttcaattatgatggaaagacttgaactttctgaaataaaacaaaaatacagc

SEQ ID NO: 730494 - DNA, 120 bp, Artificial Sequence
  ENSG00000198677_47 (sequence is synthesized)
attgcagcctcggcgtttgtagaagaggagcatctgctccagtgtcaataggagcaggtgctgcagtgatttggagcaagacagatattttagagccttagagacgttgtgctggaagaa

SEQ ID NO: 730495 - DNA, 120 bp, Artificial Sequence
  ENSG00000198677_48 (sequence is synthesized)
tctaagaggcttctagtcctacttcccatctgacattcagtttatcctaaaacattcctgctgagtggattgtccagcctgtgctttttcatctccagtgatgggaaacacttccattga

SEQ ID NO: 730496 - DNA, 120 bp, Artificial Sequence
  ENSG00000198677_49 (sequence is synthesized)
tttgaaaaaactgtcactttggatttgtggttttaaaaatattttcagacacttacatatttattgtacagaaaatatgtggttacgcgatttatgtatgtggcttttctaaaccagcag

SEQ ID NO: 730497 - DNA, 120 bp, Artificial Sequence
  ENSG00000198677_50 (sequence is synthesized)
catcaggatgttactttttaagataatataaattgacaatatcctatagttaagttgtacttcagaggttaataattgaactgaattttcatctggtgtttcccaaatctggctgaacat

SEQ ID NO: 730498 - DNA, 120 bp, Artificial Sequence
  ENSG00000198677_51 (sequence is synthesized)
tataatcattcatacccatgcaatcagaatctttaaggatggggacaggcctaggactctgcattttaaaggtatgccgaagaaatcctaatgtttattcagattttcaaactactatat

SEQ ID NO: 730499 - DNA, 120 bp, Artificial Sequence
  ENSG00000198677_52 (sequence is synthesized)
tactccaatgatgattcttccctttatttcttcagcaaggttcaacacgtgccattctctgctcatttcttccttatcttcataactgtcaaactgattcagtgattttaacaacctggt

SEQ ID NO: 730500 - DNA, 120 bp, Artificial Sequence
  ENSG00000198677_53 (sequence is synthesized)
ccacagacttagccacagatgcacttcaaaaggctgcctgcatagccctcatctccatgccgtttcctcaggaaaacacttcagctttttcttccagaacgggttggctccatctaccta

SEQ ID NO: 730501 - DNA, 120 bp, Artificial Sequence
  ENSG00000198677_54 (sequence is synthesized)
aatgctttgtattcagttcttgccctccatctgttttctggagcgtcacttgcttcacaagattaccctttgcttcgggaccataatcaaagggtaaccttttgacttttttgccaaatt

SEQ ID NO: 730502 - DNA, 120 bp, Artificial Sequence
  ENSG00000198677_55 (sequence is synthesized)
ctgccttccagggacctcaaacccaggtttttctagactggagggttggaaaaacacctgagttgatactttctcaggtcattcttttttgcatttatgtgcacacattctcccttaact

SEQ ID NO: 730503 - DNA, 120 bp, Artificial Sequence
  ENSG00000198677_56 (sequence is synthesized)
ttcgttgccttcttctcaaattgccacccagttaccgtgagcctcagataatttctgctcacataatttttatggagcttactttgtgccagagctaggctaagtgttcttaacattgtc

SEQ ID NO: 730504 - DNA, 120 bp, Artificial Sequence
  ENSG00000198677_57 (sequence is synthesized)
atttaatactaattaataaaggtgaatggtgttaaacaacatgcctaaagcaaaggaaattcacgaatcagtgttatcagattccagaaactctaaaacagtggccagaatgtcttttgg

SEQ ID NO: 730505 - DNA, 120 bp, Artificial Sequence
  ENSG00000198677_58 (sequence is synthesized)
ttcatattagtatttcttttgttatattttgtttgagaattgtagtgaattttctgctatttttatccattttttattattgattaattagatgtttatacactagtttggcatctgata

SEQ ID NO: 730506 - DNA, 120 bp, Artificial Sequence
  ENSG00000198677_59 (sequence is synthesized)
cactagtttggcatctgataatttcctatgggaaaaacatgtttcagcttccaagtaaacttttggaacataatctgtttggggtcacttgtcatttttcatgaagtgtcccttttaatt

SEQ ID NO: 730507 - DNA, 120 bp, Artificial Sequence
  ENSG00000198677_60 (sequence is synthesized)
tctggtcaggaaaaaacaatctaaaatcctgtgctctcttttcactttatgaaaaggagctattaaacttcctttagtttagaattctctacagaataggattagatagaaatactcata

SEQ ID NO: 730508 - DNA, 120 bp, Artificial Sequence
  ENSG00000198677_61 (sequence is synthesized)
cattaagggagttcaaagatgtggttatttaaaacagtataaaacattaggtaaatatttactagtttgtaatgtatgaatatgaaggtatacatacttggttgctgcataaaaagtttg

SEQ ID NO: 730509 - DNA, 120 bp, Artificial Sequence
  ENSG00000198677_62 (sequence is synthesized)
atacctcctttgggaaagttttataagaatacaaaaatgaagcctattttggagtatgagtgaatgtggcttgcagatccctttttgtcttggcacattaaaaaatgtagaaactttgtt

SEQ ID NO: 730510 - DNA, 120 bp, Artificial Sequence
  ENSG00000198677_63 (sequence is synthesized)
aaattatgaattatgaaaattgatgcgttaaaaagtttagaaggttttgggttgtgggtgtcatcctttttatatgattgtctcatacttgtttttgtttaatttagatggaaaatgggt

SEQ ID NO: 730511 - DNA, 120 bp, Artificial Sequence
  ENSG00000198677_64 (sequence is synthesized)
gatgttattaatcaaaaaatgttttagtgtctaccatgtttaaggtgttgtttctgtgtttctggacataaaaagaagtataatgtgtagtctttgtgtatatgaaaagactaataaata

SEQ ID NO: 730512 - DNA, 120 bp, Artificial Sequence
  ENSG00000198677_65 (sequence is synthesized)
taggaaagtacagtaatacagaagaattatgagttgccagatttattgttagtcagtgaaatctttttaatggtggaaattggagggggtcttgaattttttatagaaactaggtaaaca

SEQ ID NO: 730513 - DNA, 120 bp, Artificial Sequence
  ENSG00000198677_66 (sequence is synthesized)
ataaaccttttcaaaaacataatgcttttctcgaagttgttttggatgaagtaaatagtgttttcacataaaaccacatatatcttgatatacatgctgctattccaagaaataaaaatt

SEQ ID NO: 730514 - DNA, 120 bp, Artificial Sequence
  ENSG00000198677_67 (sequence is synthesized)
atctaatttaacttcttttcagtgtctgaaaaaagcagtgagactcgacagtaataatcacttatactggaatgctcttggtgtggttgcatgttacagtggtgagaattgagtaacact

SEQ ID NO: 730515 - DNA, 120 bp, Artificial Sequence
  ENSG00000198677_68 (sequence is synthesized)
gtatttttcttatttttagtattgagttgattattgaagcaatgatgagcttcacggtgccttgaactttatttattttactagagtatgtaagttttaaaaatactatgtattttcata

SEQ ID NO: 730516 - DNA, 120 bp, Artificial Sequence
  ENSG00000198677_69 (sequence is synthesized)
tagtaagccatgttagtttatctttgtgatctctctcagtctttatattttatattgttagaaaatgtgtacatttcgttggtaaaattatataacttttgaaccttcaaatgaatattt

SEQ ID NO: 730517 - DNA, 120 bp, Artificial Sequence
  ENSG00000198677_70 (sequence is synthesized)
tgaaagtagagttggtcacagtagaaaagatttcctttcacaagattattagtcttttcaaacaacaataataaattgatacttttaagaagtttaggagttgtgaatgtggtaaaactg

SEQ ID NO: 730518 - DNA, 90 bp, Artificial Sequence
  ENSG00000198677_71 (sequence is synthesized)
gaaaagtgttatccttgttaagggaatgaatagatattgggctaggcatagtggcttatgcctgtaatcccagtgatttgggacctggac

SEQ ID NO: 730519 - DNA, 75 bp, Artificial Sequence
  ENSG00000198677_72 (sequence is synthesized)
aagaccctgtctcttaaaaaaaaaaattaaaaattagccaggtatgatggtgtagtcctggagtttcaggataca

SEQ ID NO: 730520 - DNA, 120 bp, Artificial Sequence
  ENSG00000198677_73 (sequence is synthesized)
tgggcaacagagcaagattctgtctctaagaaaaggaaaaagaaaatgaatagatagtggtattagatgttaatgacatcagttgtttttattctttattctttcttagaaacagattag

SEQ ID NO: 730521 - DNA, 120 bp, Artificial Sequence
  ENSG00000198677_74 (sequence is synthesized)
atttgtttttatcttaaaggacaaagatagtgatttttaaaaaccaaaatgctatattttgtattttaaattgctaattttaatttcaataagtttaaataaaagtctgcatgcatgtgt

SEQ ID NO: 730522 - DNA, 120 bp, Artificial Sequence
  ENSG00000198677_75 (sequence is synthesized)
aaaagatagacatgagataaggagtaggcatggtagacatttctagattatttatgaaaatgttgtagaattcatttttttttttggtctgacctttggcaatggtgctgaggaagggaa

SEQ ID NO: 730523 - DNA, 120 bp, Artificial Sequence
  ENSG00000198677_76 (sequence is synthesized)
agccagcccatcaggcaaggctctgttttctgcattttatcccgtttgattcttctcgttaggattggagcaaataatttcaatatgttcttcgctgtgttttatcatagtgacccttca

SEQ ID NO: 730524 - DNA, 120 bp, Artificial Sequence
  ENSG00000198677_77 (sequence is synthesized)
tttaaaggtacttttaacaattgacttaaagaacactgagatgtgatatttattgtattgaagtgcattgttttacttcttattataatttttattgacacatttattatcctatgtctg

SEQ ID NO: 730525 - DNA, 120 bp, Artificial Sequence
  ENSG00000198678_0 (sequence is synthesized)
atggaagtcagcaacatgaccacagtcactgtgtttattctcctaggactgtccaacaaccctcaggttcaggcactgctctttgttctgttcctggtgatttacctcttgactctactg

SEQ ID NO: 730526 - DNA, 120 bp, Artificial Sequence
  ENSG00000198678_1 (sequence is synthesized)
gggaacctgctgatggtgctggtgatcagtactgattcccacctctgcacccctatgtacttcttcctgagacaactctccttcctggatgctttctattcctcaattattgtgcctaaa

SEQ ID NO: 730527 - DNA, 120 bp, Artificial Sequence
  ENSG00000198678_2 (sequence is synthesized)
ctgctagagaaccttctttctaagggggagacaatatccttccttgagtgtttcactcagatctccctggtcatattttctggagctactgaggcttgcctcctctcggtcatggcctat

SEQ ID NO: 730528 - DNA, 120 bp, Artificial Sequence
  ENSG00000198678_3 (sequence is synthesized)
atggggactggcctaattaacaccctcctcctggctcagcagcacttctgcggccctaatgtcatccacagttttgcctgcgagcttcctccggtgctcttattgacctgttctgacccc

SEQ ID NO: 730529 - DNA, 120 bp, Artificial Sequence
  ENSG00000198678_4 (sequence is synthesized)
tgcgctagcatcgtctccattctcactaccatgtcagtcctgggccttggcacccttgtccttttgctgggttcctacagctgtatcatcatgacagccctgaggatcaactctgctaca

SEQ ID NO: 730530 - DNA, 120 bp, Artificial Sequence
  ENSG00000198678_5 (sequence is synthesized)
ggtcggagcaagatcttttccacctgctcttcccatttccttgtggtcaccatcttttatacttcaggagttctcaggtatatgattccagcatctggctcagccctagaacaagtgctc

SEQ ID NO: 730531 - DNA, 120 bp, Artificial Sequence
  ENSG00000198678_6 (sequence is synthesized)
tccgtgcagtacagtgtgataacccccctgctgaaccccctcatctacagtctgaagagccaggaggtaaaggtggctctgaggaggatgctggccaggaagtccaggcttcccttgtag

SEQ ID NO: 730532 - DNA, 120 bp, Artificial Sequence
  ENSG00000198680_0 (sequence is synthesized)
gacctcctctcctcctccgtcgtcaccccggccgccctgccagccccgaacttgcccgcgcctggccgcgcggcccctcagcccacggggctggcggcgcggttgggatgggaccgatgt

SEQ ID NO: 730533 - DNA, 120 bp, Artificial Sequence
  ENSG00000198680_1 (sequence is synthesized)
gggatgggaccgatgtggcgcatgcgtggtggcgccactaggcgcgggagttgctgcggcggggacggtgctgcggacggccgagggccaggccgctccggccgggctcgtggtgggggc

SEQ ID NO: 730534 - DNA, 120 bp, Artificial Sequence
  ENSG00000198680_2 (sequence is synthesized)
cggcggcggcggcggcgtgggctggcgaggccgcgcggacggcgcccgacagcagctggaggagcggtttgccgacctggcggcgagccacttggaggccatccgtgcgcgggacgagtg

SEQ ID NO: 730535 - DNA, 120 bp, Artificial Sequence
  ENSG00000198680_3 (sequence is synthesized)
agtgggaccggcagaacgcgcggctgcgtcaggagaacgcccggctgcggctcgagaaccggcggctgaagcgcgagaaccgcagcctcttccgtcaggctttgcggctccccggcgaag

SEQ ID NO: 730536 - DNA, 120 bp, Artificial Sequence
  ENSG00000198680_4 (sequence is synthesized)
gcggcaacgggacgcccgcggaggcacgccgggtccctgaagaggccagcacgaaccggagggctagagacagcggccgagaggacgagccgggcagccccagggccctgagggcccgac

SEQ ID NO: 730537 - DNA, 120 bp, Artificial Sequence
  ENSG00000198680_5 (sequence is synthesized)
ttgagaagctggaagccatgtaccgccgggccctgctgcagctgcacctcgagcagcggggaccacgtccgagcggggacaaggaggagcagcctctacaggaacccgactccggcctcc

SEQ ID NO: 730538 - DNA, 120 bp, Artificial Sequence
  ENSG00000198680_6 (sequence is synthesized)
gctcccgggactcggagccctctgggccctggctgtagccgaggccgcagccggtgagaggcggagcctcgagcgggcccctcctcctccgttcccagctacccccgacctcgcgcacgc

SEQ ID NO: 730539 - DNA, 120 bp, Artificial Sequence
  ENSG00000198680_7 (sequence is synthesized)
cctggcccgctccctgcccgcggataccttggactacggtgccttcccgcccccaccagtggacacttccgggtggcgcttggccatccgcttggtggaggtcgagtgggtgcaagggcc

SEQ ID NO: 730540 - DNA, 120 bp, Artificial Sequence
  ENSG00000198680_8 (sequence is synthesized)
cacatgtacagttcccctgcctcttgccccggctagtttccctggagagaggcctagccaacaacgaagggacggattttaaaacagcgagaactgggtgccaagaaacacttcatattc

SEQ ID NO: 730541 - DNA, 120 bp, Artificial Sequence
  ENSG00000198680_9 (sequence is synthesized)
cctgaacttttctggatgttgtgcgaacctgttgtatttttttttttcctgtattttggttctgagggatgagtaatgtgtttttagttggttgagtttatccattcttcaatcccctaa

SEQ ID NO: 730542 - DNA, 120 bp, Artificial Sequence
  ENSG00000198680_10 (sequence is synthesized)
agccttcagctattctttcatatgtggccaacattttaagtacagtgtttgcttttataagtcggtgttacttggatgtcctataaaatacccactttttataaagatgatatttataac

SEQ ID NO: 730543 - DNA, 120 bp, Artificial Sequence
  ENSG00000198680_11 (sequence is synthesized)
ctaggaactcatgcctgtcttggctgcagtccctgtacatctaatatatactgatttgtttgcccccagagaatttttaaggtatctgcctatatcgtgatcttttgaaatggtaaataa

SEQ ID NO: 730544 - DNA, 120 bp, Artificial Sequence
  ENSG00000198680_12 (sequence is synthesized)
atctggtgcattaaaaattatctgaaaggttgcggcgagtattatttgaagtgtgttacatttttatatttttaaaaagatacctttatgaatatactaatttaaatctggttttagttg

SEQ ID NO: 730545 - DNA, 120 bp, Artificial Sequence
  ENSG00000198680_13 (sequence is synthesized)
tccttagtaaactatcatgttcttttagcttcatgtaacagtgatcttttaaaataatctaaagattaggtagtctaaaagttattttaatctttaatgttcaattagcttaattagtac

SEQ ID NO: 730546 - DNA, 120 bp, Artificial Sequence
  ENSG00000198680_14 (sequence is synthesized)
gtagataatttgccttattttgactaaggacttttaagaaattataaattacttgtatatcaaaagttcccctaacaaagtaatttaagtctcagttgttatttcaatggcacaaaaaag

SEQ ID NO: 730547 - DNA, 120 bp, Artificial Sequence
  ENSG00000198680_15 (sequence is synthesized)
tgactagtttagcaataaatgtcctaaaattacttttattgcgcttcgttaataacacttttgccaactaagtaatgaagaggataccattgtgcctgataaaaaaatcataggtccaag

SEQ ID NO: 730548 - DNA, 120 bp, Artificial Sequence
  ENSG00000198680_16 (sequence is synthesized)
agtgtttcaatgatggaaaacatttcaggggaaaaaatcatgaatagaattgtcaagggaataaaatatactagttatggcatagtccaaaagtattaaatattatatattacaaaacaa

SEQ ID NO: 730549 - DNA, 120 bp, Artificial Sequence
  ENSG00000198681_0 (sequence is synthesized)
agagagaagcgaggtttccattctgagggacggcgtagagttcggccgaaggaacctgacccaggctctgtgaggaggcaaggttttcaggggacaggccaacccagaggacaggattcc

SEQ ID NO: 730550 - DNA, 120 bp, Artificial Sequence
  ENSG00000198681_1 (sequence is synthesized)
ctggaggccacagaggagcaccaaggagaagatctgcctgtgggtcttcattgcccagctcctgcccacactcctgcctgctgccctgacgagagtcatcatgtctcttgagcagaggag

SEQ ID NO: 730551 - DNA, 120 bp, Artificial Sequence
  ENSG00000198681_2 (sequence is synthesized)
tctgcactgcaagcctgaggaagcccttgaggcccaacaagaggccctgggcctggtgtgtgtgcaggctgccacctcctcctcctctcctctggtcctgggcaccctggaggaggtgcc

SEQ ID NO: 730552 - DNA, 120 bp, Artificial Sequence
  ENSG00000198681_3 (sequence is synthesized)
cactgctgggtcaacagatcctccccagagtcctcagggagcctccgcctttcccactaccatcaacttcactcgacagaggcaacccagtgagggttccagcagccgtgaagaggaggg

SEQ ID NO: 730553 - DNA, 120 bp, Artificial Sequence
  ENSG00000198681_4 (sequence is synthesized)
gccaagcacctcttgtatcctggagtccttgttccgagcagtaatcactaagaaggtggctgatttggttggttttctgctcctcaaatatcgagccagggagccagtcacaaaggcaga

SEQ ID NO: 730554 - DNA, 120 bp, Artificial Sequence
  ENSG00000198681_5 (sequence is synthesized)
aatgctggagagtgtcatcaaaaattacaagcactgttttcctgagatcttcggcaaagcctctgagtccttgcagctggtctttggcattgacgtgaaggaagcagaccccaccggcca

SEQ ID NO: 730555 - DNA, 120 bp, Artificial Sequence
  ENSG00000198681_6 (sequence is synthesized)
ctcctatgtccttgtcacctgcctaggtctctcctatgatggcctgctgggtgataatcagatcatgcccaagacaggcttcctgataattgtcctggtcatgattgcaatggagggcgg

SEQ ID NO: 730556 - DNA, 120 bp, Artificial Sequence
  ENSG00000198681_7 (sequence is synthesized)
ctgagtgtgatggaggtgtatgatgggagggagcacagtgcctatggggagcccaggaagctgctcacccaagatttggtgcaggaaaagtacctggagtaccggcaggtgccggacagt

SEQ ID NO: 730557 - DNA, 120 bp, Artificial Sequence
  ENSG00000198681_8 (sequence is synthesized)
gatcccgcacgctatgagttcctgtggggtccaagggccctcgctgaaaccagctatgtgaaagtccttgagtatgtgatcaaggtcagtgcaagagttcgctttttcttcccatccctg

SEQ ID NO: 730558 - DNA, 120 bp, Artificial Sequence
  ENSG00000198681_9 (sequence is synthesized)
cgtgaagcagctttgagagaggaggaagagggagtctgagcatgagttgcagccaaggccagtgggagggggactgggccagtgcaccttccagggccgcgtccagcagcttcccctgcc

SEQ ID NO: 730559 - DNA, 120 bp, Artificial Sequence
  ENSG00000198681_10 (sequence is synthesized)
tcgtgtgacatgaggcccattcttcactctgaagagagcggtcagtgttctcagtagtaggtttctgttctattgggtgacttggagatttatctttgttctcttttggaattgttcaaa

SEQ ID NO: 730560 - DNA, 120 bp, Artificial Sequence
  ENSG00000198681_11 (sequence is synthesized)
tgtttttttttaagggatggttgaatgaacttcagcatccaagtttatgaatgacagcagtcacacagttctgtgtatatagtttaagggtaagagtcttgtgttttattcagattggga

SEQ ID NO: 730561 - DNA, 120 bp, Artificial Sequence
  ENSG00000198681_12 (sequence is synthesized)
aatccattctattttgtgaattgggataataacagcagtggaataagtacttagaaatgtgaaaaatgagcagtaaaatagatgagataaagaactaaagaaattaagagatagtcaatt

SEQ ID NO: 730562 - DNA, 120 bp, Artificial Sequence
  ENSG00000198681_13 (sequence is synthesized)
cttgccttatacctcagtctattctgtaaaatttttaaagatatatgcatacctggatttccttggcttctttgagaatgtaagagaaattaaatctgaataaagaattcttcctgttca

SEQ ID NO: 730563 - DNA, 80 bp, Artificial Sequence
  ENSG00000198682_0 (sequence is synthesized)
gcgtgccgggcgtgccatctgccgctccgctgcaaggtctcgcccgggaccggggctggcggagcgcgcgcccgcgagta

SEQ ID NO: 730564 - DNA, 120 bp, Artificial Sequence
  ENSG00000198682_1 (sequence is synthesized)
ccgggtccccaaggctgggcgctgcttgcggaaccgacggggcggagaggagcgtggcgggaggaggagtaggagaagggggctggtcaagggaagtgcgacgtgtctgcggagcctttt

SEQ ID NO: 730565 - DNA, 120 bp, Artificial Sequence
  ENSG00000198682_2 (sequence is synthesized)
tatacctccttcccgggagtccggcagccgctgctgctgctgctgctgctgctgccgccgccgccgccgccgtccctgcgtccttcggtctctgctcccgggacccgggctccgccgcag

SEQ ID NO: 730566 - DNA, 120 bp, Artificial Sequence
  ENSG00000198682_3 (sequence is synthesized)
ccagccagcatgtcggggatcaagaagcaaaagacggagaaccagcagaaatccaccaatgtagtctatcaggcccaccatgtgagcaggaataagagagggcaagtggttggaacaagg

SEQ ID NO: 730567 - DNA, 120 bp, Artificial Sequence
  ENSG00000198682_4 (sequence is synthesized)
ggtgggttccgaggatgtaccgtgtggctaacaggtctctctggtgctggaaaaacaacgataagttttgccctggaggagtaccttgtctcccatgccatcccttgttactccctggat

SEQ ID NO: 730568 - DNA, 120 bp, Artificial Sequence
  ENSG00000198682_5 (sequence is synthesized)
ggggacaatgtccgtcatggccttaacagaaatctcggattctctcctggggacagagaggaaaatatccgccggattgctgaggtggctaagctgtttgctgatgctggtctggtctgc

SEQ ID NO: 730569 - DNA, 120 bp, Artificial Sequence
  ENSG00000198682_6 (sequence is synthesized)
attaccagctttatttctccattcgcaaaggatcgtgagaatgcccgcaaaatacatgaatcagcagggctgccattctttgaaatatttgtagatgcacctctaaatatttgtgaaagc

SEQ ID NO: 730570 - DNA, 120 bp, Artificial Sequence
  ENSG00000198682_7 (sequence is synthesized)
agagacgtaaaaggcctctataaaagggccagagctggggagattaaaggatttacaggtattgattctgattatgagaaacctgaaactcctgagcgtgtgcttaaaaccaatttgtcc

SEQ ID NO: 730571 - DNA, 120 bp, Artificial Sequence
  ENSG00000198682_8 (sequence is synthesized)
acagtgagtgactgtgtccaccaggtagtggaacttctgcaagagcagaacattgtaccctatactataatcaaagatatccacgaactctttgtgccggaaaacaaacttgaccacgtc

SEQ ID NO: 730572 - DNA, 120 bp, Artificial Sequence
  ENSG00000198682_9 (sequence is synthesized)
cgagctgaggctgaaactctcccttcattatcaattactaagctggatctccagtgggtccaggttttgagcgaaggctgggccactcccctcaaaggtttcatgcgggagaaggagtac

SEQ ID NO: 730573 - DNA, 120 bp, Artificial Sequence
  ENSG00000198682_10 (sequence is synthesized)
ttacaggttatgcactttgacaccctgctagatgatggcgtgatcaacatgagcatccccattgtactgcccgtctctgcagaggataagacacggctggaagggtgcagcaagtttgtc

SEQ ID NO: 730574 - DNA, 120 bp, Artificial Sequence
  ENSG00000198682_11 (sequence is synthesized)
ctggcacatggtggacggagggtagctatcttacgagacgctgaattctatgaacacagaaaagaggaacgctgttcccgtgtttgggggacaacatgtacaaaacacccccatatcaaa

SEQ ID NO: 730575 - DNA, 120 bp, Artificial Sequence
  ENSG00000198682_12 (sequence is synthesized)
atggtgatggaaagtggggactggctggttggtggagaccttcaggtgctggagaaaataagatggaatgatgggctggaccaataccgtctgacacctctggagctcaaacagaaatgt

SEQ ID NO: 730576 - DNA, 120 bp, Artificial Sequence
  ENSG00000198682_13 (sequence is synthesized)
aaagaaatgaatgctgatgcggtgtttgcattccagttgcgcaatcctgtccacaatggccatgccctgttgatgcaggacactcgccgcaggctcctagagaggggctacaagcacccg

SEQ ID NO: 730577 - DNA, 120 bp, Artificial Sequence
  ENSG00000198682_14 (sequence is synthesized)
gtcctcctactacaccctctgggcggctggaccaaggatgacgatgtgcctctagactggcggatgaagcagcacgcggctgtgctcgaggaaggggtcctggatcccaagtcaaccatt

SEQ ID NO: 730578 - DNA, 120 bp, Artificial Sequence
  ENSG00000198682_15 (sequence is synthesized)
gttgccatctttccgtctcccatgttatatgctggccccacagaggtccagtggcactgcaggtcccggatgattgcgggtgccaatttctacattgtggggagggaccctgcaggaatg

SEQ ID NO: 730579 - DNA, 120 bp, Artificial Sequence
  ENSG00000198682_16 (sequence is synthesized)
cctacaacaaagccaaaaaagccatggacttctatgatccagcaaggcacaatgagtttgacttcatctcaggaactcgaatgaggaagctcgcccgggaaggagagaatcccccagatg

SEQ ID NO: 730580 - DNA, 120 bp, Artificial Sequence
  ENSG00000198682_17 (sequence is synthesized)
gcttcatggcccccaaagcatggaaggtcctgacagattattacaggtccctggagaagaactaagcctttggctccagagtttctttctgaagtgctctttgattaccttttctatttt

SEQ ID NO: 730581 - DNA, 120 bp, Artificial Sequence
  ENSG00000198682_18 (sequence is synthesized)
taaattgcttctcaatgatgcattttaatcttttataatgaagtaaaagttgtgtctataattaaaaaaaaatatatatatatacacacacacatatacatacaaagtcaaactgaagac

SEQ ID NO: 730582 - DNA, 120 bp, Artificial Sequence
  ENSG00000198682_19 (sequence is synthesized)
tacaaagtcaaactgaagaccaaatcttagcaggtaaaagcaatattcttatacatttcataataaaattagctctatgtattttctactgcacctgagcaggcaggtcccagatttctt

SEQ ID NO: 730583 - DNA, 120 bp, Artificial Sequence
  ENSG00000198682_20 (sequence is synthesized)
aaggctttgtttgaccatgtgtctagttacttgctgaaaagtgaatatattttccagcatgtcttgacaacctgtactcttccaatgtcatttatcagttgtaaaatatatcagattgtg

SEQ ID NO: 730584 - DNA, 120 bp, Artificial Sequence
  ENSG00000198682_21 (sequence is synthesized)
tcctcttctgtacaattgacaaaaaaaaaaatttttttttctcactctaaaagaggtgtggctcacatcaagattcttcctgatattttacctcatgctgtacaaagccttaatgttgta

SEQ ID NO: 730585 - DNA, 120 bp, Artificial Sequence
  ENSG00000198682_22 (sequence is synthesized)
atcatatcttacgtgttgaagacctgactggagaaacaaaatgtgcaataacgtgaattttatcttagagatctgtgcagcctatttctgtcacaaaagttatattgtctaataagagaa

SEQ ID NO: 730586 - DNA, 120 bp, Artificial Sequence
  ENSG00000198682_23 (sequence is synthesized)
gtcttaatggcctctgtgaataatgtaactccagttacacggtgacttttaatagcatacagtgatttgatgaaaggacgtcaaacaatgtggcgatgtcgtggaaagttatctttcccg

SEQ ID NO: 730587 - DNA, 120 bp, Artificial Sequence
  ENSG00000198682_24 (sequence is synthesized)
ctctttgctgtggtcattgtgtcttgcagaaaggatggccctgatgcagcagcagcgccagctgtaataaaaaataattcacactatcagactagcaaggcactagaactggaaaagacc

SEQ ID NO: 730588 - DNA, 120 bp, Artificial Sequence
  ENSG00000198682_25 (sequence is synthesized)
acagaaaacaaagaatccaaccctttcatcttacaggtgaacaaactgtgatgatgcacatgtatgtgttttgtaagctgtgagcaccgtaacaaaatgtaaatttgccattattaggaa

SEQ ID NO: 730589 - DNA, 120 bp, Artificial Sequence
  ENSG00000198682_26 (sequence is synthesized)
gtgctggtggcagtgaagaagcacccaggccacttgactcccagtctggtgccctgtctacaccagacaacacaggagctgggtcagattcccctcagctgcttaacaaagttcctcgaa

SEQ ID NO: 730590 - DNA, 120 bp, Artificial Sequence
  ENSG00000198682_27 (sequence is synthesized)
cagaaagtgcttacaaagctgccttctcggatactgaaaggtcgagttttctgaactgcactgattttattgcagttgaaaaaaaaaaaaagctattccaaagatttcaagctgttctga

SEQ ID NO: 730591 - DNA, 120 bp, Artificial Sequence
  ENSG00000198682_28 (sequence is synthesized)
gacatcttctgatggctttacttcctgagaggcaatgtttttactttatgcataattcattgttgccaaggaataaagtgaagaaacagcaccttttaatatataggtctctctggaaga

SEQ ID NO: 730592 - DNA, 120 bp, Artificial Sequence
  ENSG00000198682_29 (sequence is synthesized)
gacctaaattagaaagagaaaactgtgacaattttcatattctcattcttaaaaaacactaatcttaactaacaaaagttcttttgagaataagttacacacaatggccacagcagtttg

SEQ ID NO: 730593 - DNA, 120 bp, Artificial Sequence
  ENSG00000198682_30 (sequence is synthesized)
tctttaatagtatagtgcctatactcatgtaatcggttactcactactgcctttaaaaaaaaaaaccagcatatttattgaaaacatgagacaggattatagtgccttaaccgatatatt

SEQ ID NO: 730594 - DNA, 120 bp, Artificial Sequence
  ENSG00000198682_31 (sequence is synthesized)
ttgtgacttaaaaaatacatttaaaactgctcttctgctctagtaccatgcttagtgcaaatgattatttctatgtacaactgatgcttgttcttattttaataaatttatcagagtgaa

SEQ ID NO: 730595 - DNA, 80 bp, Artificial Sequence
  ENSG00000198689_0 (sequence is synthesized)
tttcccgtgagccctcggggagtggtccgaccgcgggcggccgccggtgaggtaggggcgggaggcggggggagacatgg

SEQ ID NO: 730596 - DNA, 120 bp, Artificial Sequence
  ENSG00000198689_1 (sequence is synthesized)
cggcagcagtccccgagcccgcaggctcatgcggcccctttggttgctcctcgcagtgggcgtctttgactgggcaggggcttcggacggcggcggcggagaggctagagccatggacga

SEQ ID NO: 730597 - DNA, 120 bp, Artificial Sequence
  ENSG00000198689_2 (sequence is synthesized)
ggagatcgtgtccgagaagcaagccgaggagagccaccggcaggacagcgccaacctgctcatcttcatcctgctgctcaccctcaccattctcacaatctggctcttcaagcaccgccg

SEQ ID NO: 730598 - DNA, 120 bp, Artificial Sequence
  ENSG00000198689_3 (sequence is synthesized)
ggcccgcttcctgcacgaaaccggcctggctatgatttatggtcttttggtgggccttgtgcttcggtatggcattcatgttccgagtgatgtaaataatgtgaccctgagctgtgaagt

SEQ ID NO: 730599 - DNA, 120 bp, Artificial Sequence
  ENSG00000198689_4 (sequence is synthesized)
gcagtcaagtccaactaccttactggtaaatgttagtggaaaattttatgagtatatgctgaaaggagagattagttcacatgaactcaataatgttcaagataatgaaatgcttagaaa

SEQ ID NO: 730600 - DNA, 120 bp, Artificial Sequence
  ENSG00000198689_5 (sequence is synthesized)
ggttacttttgatccagaagtatttttcaacatattacttcctcctatcatattttatgcaggttatagcctgaaaaggagacatttttttcgaaatcttgggtctatcctagcatacgc

SEQ ID NO: 730601 - DNA, 120 bp, Artificial Sequence
  ENSG00000198689_6 (sequence is synthesized)
ttttcttggaacagcaatttcttgtttcgttattgggtcaataatgtatggctgtgtaacgctgatgaaggtaacgggacaacttgcaggagatttttactttacagattgcctactgtt

SEQ ID NO: 730602 - DNA, 120 bp, Artificial Sequence
  ENSG00000198689_7 (sequence is synthesized)
tggtgccattgtatcagcaactgatccagtgactgttcttgctatattccacgagcttcaagttgatgttgaactctatgcacttctttttggtgaaagtgtcctcaatgatgctgttgc

SEQ ID NO: 730603 - DNA, 120 bp, Artificial Sequence
  ENSG00000198689_8 (sequence is synthesized)
catagtgctgtcctcctcaatagtggcataccagccagctggagacaacagtcacacctttgatgtcacagcgatgttcaagtctattgggatcttccttggaatcttcagtggatcttt

SEQ ID NO: 730604 - DNA, 120 bp, Artificial Sequence
  ENSG00000198689_9 (sequence is synthesized)
tgcaatgggtgctgctactggagtggtgacagctttagtgacaaagttcaccaaattacgggagttccagttgttggagacaggcctgttcttcttgatgtcctggagtaccttcctctt

SEQ ID NO: 730605 - DNA, 120 bp, Artificial Sequence
  ENSG00000198689_10 (sequence is synthesized)
ggctgaagcatggggcttcacaggtgtagttgcagtattgttttgtggcatcacacaagcacattatacgtataataatttgtccacggagtctcagcatagaactaaacagttgtttga

SEQ ID NO: 730606 - DNA, 120 bp, Artificial Sequence
  ENSG00000198689_11 (sequence is synthesized)
gcttctcaatttcttggcagagaatttcatcttctcctacatggggctgacactgttcaccttccagaaccatgtctttaacccaacatttgtagtaggagcatttgttgctattttctt

SEQ ID NO: 730607 - DNA, 120 bp, Artificial Sequence
  ENSG00000198689_12 (sequence is synthesized)
gggaagagctgccaatatttaccccttgtccctcttacttaatttgggtagaagaagtaagattggatcaaattttcaacacatgatgatgtttgctggccttcgtggtgcaatggcatt

SEQ ID NO: 730608 - DNA, 120 bp, Artificial Sequence
  ENSG00000198689_13 (sequence is synthesized)
tgccttggccattcgagatactgccacttatgcacggcaaatgatgttcagcaccacgcttctgattgtgttttttaccgtgtgggtatttggtggtggcaccactgcaatgctgtcatg

SEQ ID NO: 730609 - DNA, 120 bp, Artificial Sequence
  ENSG00000198689_14 (sequence is synthesized)
cttgcatatcagggttggtgttgattcagaccaagaacacttgggtgttcctgaaaatgaaaggagaactaccaaagcagagagtgcttggcttttccggatgtggtacaactttgatca

SEQ ID NO: 730610 - DNA, 120 bp, Artificial Sequence
  ENSG00000198689_15 (sequence is synthesized)
taactatctgaagcctctgctgacccacagcgggcctccgctgacaacaacactccctgcctgctgtggacccatcgccaggtgcctcaccagcccccaggcttacgaaaaccaggaaca

SEQ ID NO: 730611 - DNA, 120 bp, Artificial Sequence
  ENSG00000198689_16 (sequence is synthesized)
gttgaaagatgatgattctgatcttattctcaatgatggtgacatcagtttgacatatggagattctactgtgaacactgaaccggccacatccagcgccccaaggagatttatgggaaa

SEQ ID NO: 730612 - DNA, 120 bp, Artificial Sequence
  ENSG00000198689_17 (sequence is synthesized)
cagttctgaagatgccttggatcgggagcttgcatttggggaccatgaactggtcattcgaggaacacgcctggttcttccaatggatgattctgaacccccgctaaatttgttagataa

SEQ ID NO: 730613 - DNA, 120 bp, Artificial Sequence
  ENSG00000198689_18 (sequence is synthesized)
tacgagacatggtccagcctaagcttactaatactcacttagtgatttgtaaaatttgcacatgtgattgtgaagaaatttgtactacctaaaagtcccagtgcatgtctctgaatgtgt

SEQ ID NO: 730614 - DNA, 120 bp, Artificial Sequence
  ENSG00000198689_19 (sequence is synthesized)
tcctgtacacggcagattgtgaacaaactatattcctttaagttttcctggttgcactctgtagactggatctgttttaggaagttactttcacagtgatgttgtgtgttctgttagttt

SEQ ID NO: 730615 - DNA, 120 bp, Artificial Sequence
  ENSG00000198689_20 (sequence is synthesized)
tatgtctcagttaaagtgtaaaaagtgacggattttctctttcttaaacttacctgacacttaaccagagtaccagttctcgtgatgtgaattaatttttttgtgtgctaggggagggag

SEQ ID NO: 730616 - DNA, 120 bp, Artificial Sequence
  ENSG00000198689_21 (sequence is synthesized)
agtgaggagggagtgttatttccttgggaacctagggaggagaggttcctttgttgggaaacttttgttgatagctgctgcctttgtcctgatcgttttctttcccttttctctggtggc

SEQ ID NO: 730617 - DNA, 120 bp, Artificial Sequence
  ENSG00000198689_22 (sequence is synthesized)
ctgttgtggtgcaacgagctgatggcatttgatcttgccccattcaggttggggagtgaagtgtgaggacccttttcccccgcttgctgtgaaagcacagattcattgactacagtacac

SEQ ID NO: 730618 - DNA, 120 bp, Artificial Sequence
  ENSG00000198689_23 (sequence is synthesized)
tgttgttcagaaaagaaggctgcaaatgacttctgagactttatgtcttttcttccagaccaagaccgtagaaggagtcacatctagccggcttagccaaagtacaggtgtatatagttc

SEQ ID NO: 730619 - DNA, 120 bp, Artificial Sequence
  ENSG00000198689_24 (sequence is synthesized)
agggcacttgatttagatttggaggggctggggtgggcagagagcaagaggcgagtaaagagaatggtggtttcagagatctctcttcccaaatgtgtaaatattctataccagataagt

SEQ ID NO: 730620 - DNA, 120 bp, Artificial Sequence
  ENSG00000198689_25 (sequence is synthesized)
ttaaataagaaatttaattgctgcttaatttttgattatgtactttatctgtatagcaggctttgtcgtcagaagtttttatatcgatttaaattgctgctctttagcagccaaacagga

SEQ ID NO: 730621 - DNA, 120 bp, Artificial Sequence
  ENSG00000198689_26 (sequence is synthesized)
gcaaaatgtaaaatttttgaacttactgtgtctaatcatcatttgttagtctgtagttaatgtcaacagttaatttatgaacccacgatcgttccacactgcaccaaagtcagtcataag

SEQ ID NO: 730622 - DNA, 120 bp, Artificial Sequence
  ENSG00000198689_27 (sequence is synthesized)
agaaatcgaatattctggagcactgattgcagcagggtggctcctttgtgtgcagcaggtgtagtagtcttcattttcatggtacgttttaatattaattacctaagctgccatgcattt

SEQ ID NO: 730623 - DNA, 120 bp, Artificial Sequence
  ENSG00000198689_28 (sequence is synthesized)
ttttttttacagttctcaaggaagagcacagaacaatttctcatttcatatttggagtatgaaagtagattctattttgtaatgctgataatacctaaagatgcattgaatgcttggaag

SEQ ID NO: 730624 - DNA, 120 bp, Artificial Sequence
  ENSG00000198689_29 (sequence is synthesized)
aatgctttttgatgttgattttgacctgttcatgattcagaagaaaaacaaacttttttggattttttttccctcaggtctgagtagcattgccttaaatcttatccagttagaacattg

SEQ ID NO: 730625 - DNA, 120 bp, Artificial Sequence
  ENSG00000198689_30 (sequence is synthesized)
atttatttacatgatgttcagattttccagtgaaaaatacccttctgaacaaaacatgtacttactctccgaaaggcatctatctgtgctattgcaaacactccttgagattttagggga

SEQ ID NO: 730626 - DNA, 120 bp, Artificial Sequence
  ENSG00000198689_31 (sequence is synthesized)
attctaatgttgtaccctttcgtggcagctttgactgttggcatagccatttgttatgtagtggtagcgactttcctgctatgcaggaatccctcccatgacgtgtatgttttacatgat

SEQ ID NO: 730627 - DNA, 120 bp, Artificial Sequence
  ENSG00000198689_32 (sequence is synthesized)
gtgtgcctcttcacgcagtaaatagtttcttgttaatgtatgtttgaggagtttgaacgtcagtgtcacttacccacaaagttattcaagttgtaaaaggttatacaataatttaacaac

SEQ ID NO: 730628 - DNA, 120 bp, Artificial Sequence
  ENSG00000198689_33 (sequence is synthesized)
taccttttttattctgtcgggttactgacctcactttatgtaaatacttcgcatgacaaattcagtaactcgtctatttcagcatgcataagacttttcactagggaaactgataaagct

SEQ ID NO: 730629 - DNA, 120 bp, Artificial Sequence
  ENSG00000198689_34 (sequence is synthesized)
tgagtcaactaaatctgccttcatactttatcaaggggaaccaagcctgctgtgcttacatcagcatctggaagactttcctctcctctaatctgtgtacacatctccaagcaaggaaga

SEQ ID NO: 730630 - DNA, 120 bp, Artificial Sequence
  ENSG00000198689_35 (sequence is synthesized)
aaaaacaaactctgctcagacgcctatgaaacacctgaatgaactttgatgaagtacagtctgagttaccatcatgcacaagtagaactgctcttggacttgttttcctgttgtttgtgg

SEQ ID NO: 730631 - DNA, 120 bp, Artificial Sequence
  ENSG00000198689_36 (sequence is synthesized)
aacctacgcgtttgaatggcttgaacgttgcatcttttaaagttattttttaaggtttcttggcatttatcctagttgtccgtgtttggcaatgtgctgttaaagtaatagacttttaat

SEQ ID NO: 730632 - DNA, 120 bp, Artificial Sequence
  ENSG00000198689_37 (sequence is synthesized)
ctttatgtattttttgttttctctggagtacttggacagatgttatagtggtttcttttaggaaaatctgtcattaaaaaagttatagccttgcaaataaccactcacagtatttgagtc

SEQ ID NO: 730633 - DNA, 120 bp, Artificial Sequence
  ENSG00000198689_38 (sequence is synthesized)
acagtttattttagtgagacgtaaagagtgctgacttcatttatttttctacctatatacctagtggaaaaggggaagactaatgttttcaaataaacaaacagaaacctaacagaactt

SEQ ID NO: 730634 - DNA, 120 bp, Artificial Sequence
  ENSG00000198689_39 (sequence is synthesized)
gggttatgaaagatcaattcctatgaaagatcaattcccctgagagctctgagaataggatcaaagtagaaagcgcagtctgcctctgcttggttacactgagccgatgtttctttagcc

SEQ ID NO: 730635 - DNA, 120 bp, Artificial Sequence
  ENSG00000198689_40 (sequence is synthesized)
aaaggcagtgggctagtttagacggcctttcattcccggcagcgcctgtgggtgcgtgtgacctgggacagaggggcaaaggaacctggcagagcgagcttgggatgccgcggccccttt

SEQ ID NO: 730636 - DNA, 120 bp, Artificial Sequence
  ENSG00000198689_41 (sequence is synthesized)
ctttaagagcggcggcggcggcgcgcgctccgacggctacccccgggccccgcccctttcccgtgagccctcggggagtggtccgaccgcgggcggccgccggtgagtgggcgtctttga

SEQ ID NO: 730637 - DNA, 120 bp, Artificial Sequence
  ENSG00000198689_42 (sequence is synthesized)
ggcctttcctgtgcttcagctccctggaaactggcactgcagaaggaggcaagggtgttaaaacgaggaggcagtgtcaggacaaaatcccaggatctggaaccccaaatacttggctcg

SEQ ID NO: 730638 - DNA, 120 bp, Artificial Sequence
  ENSG00000198689_43 (sequence is synthesized)
aggaatgccgggaagaagcagaaagctacacggaaaaaggtccgcgagaacccacgaacctgcgctatggaggcctctctaggagggccggagcccaacggagtcataaacgaagaggcg

SEQ ID NO: 730639 - DNA, 120 bp, Artificial Sequence
  ENSG00000198689_44 (sequence is synthesized)
gctcagtaaaccattttaagttcctccagtgacccctgactgagtggcaaagctttgtaaactgcatatcacaagttcccaacactcagtgaaaagtgggtttatgctgggacaaaacag

SEQ ID NO: 730640 - DNA, 120 bp, Artificial Sequence
  ENSG00000198689_45 (sequence is synthesized)
gaagtatagagcagtgctggatggagagagaagtacattctcgggggagcagaagcctcagggggattggctgcctggtagaagttactaccatttcaagattcctcctagaactcgagt

SEQ ID NO: 730641 - DNA, 120 bp, Artificial Sequence
  ENSG00000198689_46 (sequence is synthesized)
acaaagagattgctgaggggcatactaagttgctggggccacataaacagaggtggagtctggtgcttgaagacatttcctgactctggtcagggaagcaatctgtggcttcgggttttt

SEQ ID NO: 730642 - DNA, 120 bp, Artificial Sequence
  ENSG00000198689_47 (sequence is synthesized)
agtaattctgaaacagaatcacaaaagaataatactgcacagtatcttggggatgggggaaaaagcttggtgcaattttcatatagaggattttacaatgttctaccccccccccgaaat

SEQ ID NO: 730643 - DNA, 120 bp, Artificial Sequence
  ENSG00000198689_48 (sequence is synthesized)
acgacagagcccgtgagcctcaggatgagggctgcccttgagcagttgggatggaaaggagagaagacttgagagaccgtttagaggaggaatgaacagagtttgtgagtgcccgtgttt

SEQ ID NO: 730644 - DNA, 120 bp, Artificial Sequence
  ENSG00000198689_49 (sequence is synthesized)
agggaatagagaggagccagagaactttgtagtgaagcttttccctgggatacagaaagcaggaattttaaacagataaaacaagagttgtgaagaagcaaggctaatgtctatccatta

SEQ ID NO: 730645 - DNA, 120 bp, Artificial Sequence
  ENSG00000198689_50 (sequence is synthesized)
gcctatgaaaaacctgtaattgggccctctcttcagtcatcgtaacagaatgttgccatgagagctgcgaagtgaattgcactgtgccatccttgtttttggagctagccagtaattctt

SEQ ID NO: 730646 - DNA, 120 bp, Artificial Sequence
  ENSG00000198689_51 (sequence is synthesized)
gaactcacagtctttttggggagactgacagggttggtgttgattcagaccaagaacacttggtaaatatgcgtttttgttgttcctggcatttctgtcaaatgtgcagtcatttggaaa

SEQ ID NO: 730647 - DNA, 120 bp, Artificial Sequence
  ENSG00000198689_52 (sequence is synthesized)
gaaaacaatctactataaacttcaaccttctatttagatcctgtcctctttgcctcagctttggaggaatgatatcattcctggcttttctcactgctccatagagacaaaaccaagttt

SEQ ID NO: 730648 - DNA, 120 bp, Artificial Sequence
  ENSG00000198689_53 (sequence is synthesized)
gccacagtgccatagtgtgtggttatcaagggtgacagctttcatgtctctgggccatcctgcctgggcttttgtcccagaggagagcagtcttttaagcactcctgggttttcgagtga

SEQ ID NO: 730649 - DNA, 120 bp, Artificial Sequence
  ENSG00000198689_54 (sequence is synthesized)
acccggcccccacattgattttttaagtgagagtagattcgtaagttagcaagcagcctgagtaatagaggtgttcagaaaaacatttcaatttcctattccaaagctgcaatatacaaa

SEQ ID NO: 730650 - DNA, 120 bp, Artificial Sequence
  ENSG00000198689_55 (sequence is synthesized)
gggaagtgctcagtaaaccattttaaggtcctggagaaagattcgcgcaaaaagaggtgtagcgcggggggagtgttttgtcgtgaaaagaaccagcttacattaaggaagaaatgaaag

SEQ ID NO: 730651 - DNA, 120 bp, Artificial Sequence
  ENSG00000198689_56 (sequence is synthesized)
aggaaattttaaaatgctaataacgcagccttcttgccttgtctctatctctgatccgggtaaaatgtatactcctctgcccatttttctttgtcttcatctcctgaaatgtagacattt

SEQ ID NO: 730652 - DNA, 120 bp, Artificial Sequence
  ENSG00000198689_57 (sequence is synthesized)
aatagtgagcttctccccttgacctcatcactctgctgtcccctggggagctcacccattcattcccaccgcttcagccagcaaaggggcttcggacggcggcggcggagaggctagagc

SEQ ID NO: 730653 - DNA, 120 bp, Artificial Sequence
  ENSG00000198690_0 (sequence is synthesized)
gatcttgggtgacagggcaccgagggaaggaggacgcgagggcagccaggccctagggagcagggagagtggctcgggctcagtcgcgtggccccaggaagaagaaattgtcgagacgaa

SEQ ID NO: 730654 - DNA, 120 bp, Artificial Sequence
  ENSG00000198690_1 (sequence is synthesized)
taacatgaggtcatatagaatcccacttttggtgatttcaagtcaagaaagtaaaagtaaaccattgctatctttcaccttaaatatcctgtgttttattgctcagaacatccagttttt

SEQ ID NO: 730655 - DNA, 120 bp, Artificial Sequence
  ENSG00000198690_2 (sequence is synthesized)
ctaatactcatgatgtcagaagggaaacctcctgacaaaaaaaggcctcgtagaagcttatcaatcagcaagaataagaaaaaagcatctaattctattatttcgtgttttaacaatgca

SEQ ID NO: 730656 - DNA, 120 bp, Artificial Sequence
  ENSG00000198690_3 (sequence is synthesized)
ccacctgctaaacttgcctgccccgtttgcagtaaaatggtgcctagatatgacttaaaccggcaccttgatgaaatgtgtgctaacaatgacttcgttcaagtggatccagggcaggtt

SEQ ID NO: 730657 - DNA, 120 bp, Artificial Sequence
  ENSG00000198690_4 (sequence is synthesized)
ggcttaataaattcaaatgtgtctatggtagatttaaccagtgttaccttagaagatgtaacacctaagaagtcaccaccaccaaagacaaatttaacccctggccaaagtgattcagca

SEQ ID NO: 730658 - DNA, 120 bp, Artificial Sequence
  ENSG00000198690_5 (sequence is synthesized)
aaaagggaagtaaagcagaagatcagtccctactttaaaagtaatgatgtggtgtgcaaaaatcaagatgagctgagaaatcgtagtgtgaaagtcatttgtttgggaagcctagcatct

SEQ ID NO: 730659 - DNA, 120 bp, Artificial Sequence
  ENSG00000198690_6 (sequence is synthesized)
aaattgtccagaaaatacgtaaaggctaaaaaatcaatagataaggatgaagaatttgccggttctagtccacagagttccaaatccacagttgttaagagcctgattgataactcttca

SEQ ID NO: 730660 - DNA, 120 bp, Artificial Sequence
  ENSG00000198690_7 (sequence is synthesized)
gaaattgaggacgaggatcaaattttggagaacagttctcaaaaagaaaacgtgtttaaatgtgattctctaaaggaagagtgcattcctgaacatatggtaagaggaagtaaaataatg

SEQ ID NO: 730661 - DNA, 120 bp, Artificial Sequence
  ENSG00000198690_8 (sequence is synthesized)
gaagccgaaagccaaaaggctacccgggaatgtgagaaatcagccctcacccctggattctcagataatgcgatcatgttattctcaccagatttcactcttaggaatacattaaagtct

SEQ ID NO: 730662 - DNA, 120 bp, Artificial Sequence
  ENSG00000198690_9 (sequence is synthesized)
acttcagaagacagtcttgtaaagcaagagtgtatcaaagaagtggttgaaaaacgtgaggcatgtcattgtgaagaagtaaaaatgactgttgcttcagaagctaaaatacagctgtca

SEQ ID NO: 730663 - DNA, 120 bp, Artificial Sequence
  ENSG00000198690_10 (sequence is synthesized)
gattcagaggcaaaatctcatagttctgcagatgatgcttctgcatggagtaacatccaagaggctcctctgcaggatgacagttgcttaaacaatgatatccctcacagcattcctttg

SEQ ID NO: 730664 - DNA, 120 bp, Artificial Sequence
  ENSG00000198690_11 (sequence is synthesized)
gagcaggggtcaagctgcaatggtcctggtcaaacaaccggtcatccttactaccttcggagtttccttgtggtgctgaaaaccgtacttgagaatgaagatgatatgttgctctttgat

SEQ ID NO: 730665 - DNA, 120 bp, Artificial Sequence
  ENSG00000198690_12 (sequence is synthesized)
gagcaggagaagggaattgtaactaaattttatcagttatcagctactggtcagaagttatatgtaaggctctttcaacgtaaattaagctggattaagatgaccaaattagagtatgaa

SEQ ID NO: 730666 - DNA, 120 bp, Artificial Sequence
  ENSG00000198690_13 (sequence is synthesized)
gagattgccttagacttaacacctgtgattgaagaattgacgaatgcaggctttctacagacagaatctgagttgcaagaactctctgaagtgcttgaactcctttctgctcctgaacta

SEQ ID NO: 730667 - DNA, 120 bp, Artificial Sequence
  ENSG00000198690_14 (sequence is synthesized)
aaatccctagccaagaccttccacttggtgaatcccaatggacagaaacagcagctggtggacgcctttctcaaattggccaaacagcgttcagtctgcacttggggcaagaataagcct

SEQ ID NO: 730668 - DNA, 120 bp, Artificial Sequence
  ENSG00000198690_15 (sequence is synthesized)
ggaattggtgcagtgattttaaaaagagccaaagccttggctggacagtcagtacgaatctgtaaaggccccagggctgtgttttcccgcatcttgctactgttttcgttgaccgactca

SEQ ID NO: 730669 - DNA, 120 bp, Artificial Sequence
  ENSG00000198690_16 (sequence is synthesized)
atggaagatgaagacgccgcttgtggaggtcagggacagctttcaacagtcctgttggtcaacctcggccgaatggagtttcctagttacaccatcaatcggaaaacccacatcttccaa

SEQ ID NO: 730670 - DNA, 120 bp, Artificial Sequence
  ENSG00000198690_17 (sequence is synthesized)
gacagagatgatcttatcagatatgcagcagccacgcacatgctgagtgacatttcttccgcaatggccaatgggaactgggaagaagctaaggagctcgctcagtgtgcaaaaagggat

SEQ ID NO: 730671 - DNA, 120 bp, Artificial Sequence
  ENSG00000198690_18 (sequence is synthesized)
tggaacagactgaaaaaccacccttctctgagatgccacgaagatttaccactcttcctgcggtgtttcactgttgggtggatttatacaaggattttgtctcggtttgtggaaatactg

SEQ ID NO: 730672 - DNA, 120 bp, Artificial Sequence
  ENSG00000198690_19 (sequence is synthesized)
cagagacttcacatgtatgaggaagccgtcagagaacttgaaagccttttgtctcagagaatttattgtcctgacagcagaggccgatggtgggatcgactggcccttaatttacaccag

SEQ ID NO: 730673 - DNA, 120 bp, Artificial Sequence
  ENSG00000198690_20 (sequence is synthesized)
cggatccggaagtcagaacgggacaccgcctttcactgtatcagcgagccgtgcgcctgcgagagtctccgagctgtaaaaagttcaagcacctcttccagcagctcccagaaatggctg

SEQ ID NO: 730674 - DNA, 120 bp, Artificial Sequence
  ENSG00000198690_21 (sequence is synthesized)
tgcaagatgtgaaacacgtgaccatcacaggcaggctgtgcccacagcgtgggatgtgcaagtctgtgtttgtgatggaggccggggaggccgctgaccccaccacggtcctgtgctctg

SEQ ID NO: 730675 - DNA, 120 bp, Artificial Sequence
  ENSG00000198690_22 (sequence is synthesized)
tggaggagctggcactggcccattacagacgcagcggttttgaccaggggattcatggcgaagggtccaccttcagcaccctgtatggcctcctcctgtgggacatcatcttcatggatg

SEQ ID NO: 730676 - DNA, 120 bp, Artificial Sequence
  ENSG00000198690_23 (sequence is synthesized)
ggattccggatgtcttcagaaacgcctgtcaggcattccccctggacttgtgcacagacagcttcttcacaagcagacgcccagcccttgaggccaggctgcagctgattcatgatgccc

SEQ ID NO: 730677 - DNA, 120 bp, Artificial Sequence
  ENSG00000198690_24 (sequence is synthesized)
ccgaggagagcctgcgggcctgggtggcagccacgtggcatgagcaggaaggcagagtggcttcccttgtcagctgggatcgcttcacgtctcttcagcaagctcaggatcttgtctcct

SEQ ID NO: 730678 - DNA, 120 bp, Artificial Sequence
  ENSG00000198690_25 (sequence is synthesized)
gcctggggggccctgtgctcagtggtgtgtgcaggcacctggctgctgactttcgacactgtcgagggggcctccccgacctggtggtgtggaactcccagagccgtcactttaagctgg

SEQ ID NO: 730679 - DNA, 120 bp, Artificial Sequence
  ENSG00000198690_26 (sequence is synthesized)
tggaagttaaaggccccaatgatcgtctttcacataagcagatgatctggctggctgaactgcagaagctgggggctgaagtagaagtctgccatgtggttgcagttggagctaagagcc

SEQ ID NO: 730680 - DNA, 120 bp, Artificial Sequence
  ENSG00000198690_27 (sequence is synthesized)
aaagccttagctaaaagattccctacaggagaaaatggaaatgaggaggagagaaactccggtgtccccgaggtgtcggtgtggtgagggccgctggcgttgaagtacatcctgctctgg

SEQ ID NO: 730681 - DNA, 120 bp, Artificial Sequence
  ENSG00000198690_28 (sequence is synthesized)
cccagctccccatagcaggcctccagggggccactgcgctgttgccgcagcatcctgctcagtacgtcgacttcatcagccaggagggagagcttgtgaaaggctgtgatggagccaccc

SEQ ID NO: 730682 - DNA, 120 bp, Artificial Sequence
  ENSG00000198690_29 (sequence is synthesized)
aggctgatctgggcctcgggaacccagcggaagtagcacagtttccacagttttatgtgtgttccagagacacgtggcagaataacaccgtgcaggttggcgggtttggaaaaccattct

SEQ ID NO: 730683 - DNA, 120 bp, Artificial Sequence
  ENSG00000198690_30 (sequence is synthesized)
ctaaaatactgctccgtatcactgttctggctgtcggtttgctgagctggatctggctttggttttaatatcaatgaatttctccttggaagtaattcttggtcactgatgattccattc

SEQ ID NO: 730684 - DNA, 120 bp, Artificial Sequence
  ENSG00000198690_31 (sequence is synthesized)
tttaaggcagacggcattcctcttagtgtggagctgtagcttttctatacagaagagattttattatgttccggggattccctttttagaaagattgaaggatgcaatggcaaatataaa

SEQ ID NO: 730685 - DNA, 120 bp, Artificial Sequence
  ENSG00000198690_32 (sequence is synthesized)
ctcaatactatgaaaaattaatggaatttcagcctcaaagaacattttcctcccttcctttgtgtccttattctaatcctcctcccctggaattacacttttttatgtgttgactctacc

SEQ ID NO: 730686 - DNA, 120 bp, Artificial Sequence
  ENSG00000198690_33 (sequence is synthesized)
taggctgttactatcagcctgaatgggggcgggatgagagtacctcctatccactaatttgcttaaggataagttctaagacgggctagaaaaaacactagacctggccgattctatcaa

SEQ ID NO: 730687 - DNA, 120 bp, Artificial Sequence
  ENSG00000198690_34 (sequence is synthesized)
gaacaatggcaaactgaacagaggcagtcaggaggccaaatgtctgattctttgttctgtacctttcagtagtctgcaaattttctaccaaaaaaaatcccaagaatttatttgggaatt

SEQ ID NO: 730688 - DNA, 120 bp, Artificial Sequence
  ENSG00000198690_35 (sequence is synthesized)
attaaaaaggcaaacaatgaatgttattaggacaagaatatagcagtcaggaggccatgactacatcacagccaggcggcattccctgccacagtggcggcttgaatcatcaagaaatgg

SEQ ID NO: 730689 - DNA, 120 bp, Artificial Sequence
  ENSG00000198690_36 (sequence is synthesized)
ataaatggggctttagtaaatcaggcttgcaggctcaaagctgcaatctgcccactctcaggtactgagactttgtgggcctcagacaccaggaagaaagctgggatacagtcatttgag

SEQ ID NO: 730690 - DNA, 120 bp, Artificial Sequence
  ENSG00000198690_37 (sequence is synthesized)
ttaaaaagggaatgacccctcagaaacccgcattagcagtgttactcttggaagtgcctttacttttaacgctctctgttctgaaaaagaggtgtttggttacgtgtgagccaacatcac

SEQ ID NO: 730691 - DNA, 120 bp, Artificial Sequence
  ENSG00000198690_38 (sequence is synthesized)
gttttgttagctgtgatttacctttgtccgtttaaaagacttcacggagccattctgtatacaaggtgtgctctttccaatgtagaaggggttatggaaaagggtgcgatcctttgctgt

SEQ ID NO: 730692 - DNA, 120 bp, Artificial Sequence
  ENSG00000198690_39 (sequence is synthesized)
aaactggagagaccagtcccaaacagaggggaattttaagcccttctcatcacccaattggatgtttttgcttatagcaaattcctgcaaaataaataaataaatatttgcaaaactaaa

SEQ ID NO: 730693 - DNA, 120 bp, Artificial Sequence
  ENSG00000198690_40 (sequence is synthesized)
ttctgccacggccacccagccctcagtgttcttcaccaggatgagtgcattcctgtctcagagccttggactgactttcccctccacccagaatctgagttgcaagaactctctgaagtg

SEQ ID NO: 730694 - DNA, 120 bp, Artificial Sequence
  ENSG00000198690_41 (sequence is synthesized)
acagtaattttcttcatgaagaatatactcctttttctctgtggttaaaccagctgtggaattgaattttgtgcgtgctttgcctagaatgaaagtgctgtgtgaaatagaaggaaatgt

SEQ ID NO: 730695 - DNA, 120 bp, Artificial Sequence
  ENSG00000198690_42 (sequence is synthesized)
ctgaaggtttaaagtgaatttgatataactcagatccctgggcaacacacatgccaaccccatacttgacttgtcgcatgccaactgtaggagtgttggcctccctgagtactggtgagc

SEQ ID NO: 730696 - DNA, 120 bp, Artificial Sequence
  ENSG00000198690_43 (sequence is synthesized)
tgaactgaaacgtgagggaagccagcagcaggacggatgtgggaagcatggtaggtgggttcctctgagggaaattcaagtaggtgttaaaaactctgcaaaagacagctcaagcgaact

SEQ ID NO: 730697 - DNA, 120 bp, Artificial Sequence
  ENSG00000198690_44 (sequence is synthesized)
ttccaggtacacagcacatgatcttttattttgttgaaaatggtaaacatcttcaatatttattaagacattttttcctttgttgttacatagtgatgagaaaaattagtattttcagat

SEQ ID NO: 730698 - DNA, 120 bp, Artificial Sequence
  ENSG00000198690_45 (sequence is synthesized)
gccactttgaaaaaatcatttaggatatacagttgacccttgaatgatgcaggggttggggtaccgacccctcagacagtcaagaatctgtgtgtaacatctgacttccccactacttaa

SEQ ID NO: 730699 - DNA, 120 bp, Artificial Sequence
  ENSG00000198690_46 (sequence is synthesized)
ttaatagcttactgttgactggaagccctaccgattacatagtcaattaacacacattggatatgttatatgcattatatgctgtattcttacaataaagtaagctagggaaaagaatat

SEQ ID NO: 730700 - DNA, 74 bp, Artificial Sequence
  ENSG00000198690_47 (sequence is synthesized)
gctgtattcttacaataaagtaagctagggaaaagaatatgttattaaggaaaatcataagggggctggtggca

SEQ ID NO: 730701 - DNA, 120 bp, Artificial Sequence
  ENSG00000198690_48 (sequence is synthesized)
ttgtcaatgcttattttccatgtttctgattatagccatcctagtgtgaagtggtatctccttgtggctttctgtgtttgtttatttgtctgactctgaatcgccttgggaaatacttgt

SEQ ID NO: 730702 - DNA, 120 bp, Artificial Sequence
  ENSG00000198690_49 (sequence is synthesized)
aattcctccaaacctttggctcctgtccctgtaaataaggaatctgaagcagctccatggttcttgactgcatatgagattgacctggcgctttgatgtggcccccatgcgtgggctcct

SEQ ID NO: 730703 - DNA, 120 bp, Artificial Sequence
  ENSG00000198690_50 (sequence is synthesized)
gctctggaggttctcattgtgtggatccggggtgggacacatgttttcctacaaagctgcctaggtgatgtcctgagaaccactgagctaagttttcctgtaaagtcaggtacccctgag

SEQ ID NO: 730704 - DNA, 120 bp, Artificial Sequence
  ENSG00000198690_51 (sequence is synthesized)
gttcacaccctttgtgaggggcagctgctgggatccactgtccacctggattacagcccggtcacgctccagcacgttgactgtgaaggctctggttgccagatgcattgaaatcctcag

SEQ ID NO: 730705 - DNA, 120 bp, Artificial Sequence
  ENSG00000198690_52 (sequence is synthesized)
aataagatctaaggaaacagcctaaatctctagaagtgctgtttgctcatttgctaatcagcaaaattcaataataaacagtgggcttttctgtcaaactaaatgcatggaagccgccat

SEQ ID NO: 730706 - DNA, 120 bp, Artificial Sequence
  ENSG00000198690_53 (sequence is synthesized)
aggcgcgtgtacctggtttttttggaccagaagcatcctaagagctgttttgagtgtgtgttttcttttagactcggaataatctaaaactcgttttggacggctgtgtggccattgctc

SEQ ID NO: 730707 - DNA, 120 bp, Artificial Sequence
  ENSG00000198690_54 (sequence is synthesized)
ccagtctccccctaacgccctcctccctgaggagactgggttgcttggtgtggtcacaccctgggttgagtgacagatctcctgaatggggcctctcagcatctgccccggtttcattta

SEQ ID NO: 730708 - DNA, 120 bp, Artificial Sequence
  ENSG00000198690_55 (sequence is synthesized)
ctcactggggacctgtagagcagttctggtggttgaggctctcccagggccggaccagcgaactgtcacatccccgcagttctgcgtgtgtgagccccacgctgtgtgctctactaagtg

SEQ ID NO: 730709 - DNA, 120 bp, Artificial Sequence
  ENSG00000198690_56 (sequence is synthesized)
actgactttgtggtaagggaggtcaatcctcacgatgctacaggcaggttttcagggacttttgctgacctgaggctaatagatgttattctgctgctgtttcaggtgaccatcacaggc

SEQ ID NO: 730710 - DNA, 120 bp, Artificial Sequence
  ENSG00000198690_57 (sequence is synthesized)
agcggttttgaccagggtaactgagcaggctttctcttgtggcacccagccccgggtggacgagcagcagcactggatgggctgtcagcagtgggctgctgtcctctctctgtcctctgc

SEQ ID NO: 730711 - DNA, 120 bp, Artificial Sequence
  ENSG00000198690_58 (sequence is synthesized)
tcacagtggaagatgctgtgggctgggggatgtcttcctattcttccccttatcaatgataaggagtaggtcaggggtagttgtcccacagggcctggctctgatcttttttcttttata

SEQ ID NO: 730712 - DNA, 120 bp, Artificial Sequence
  ENSG00000198690_59 (sequence is synthesized)
aaaacttataaaagttatggaaggtactgcacaagcctttgtacagaagtcagggggacagtgtgctcaaccccacggacacccacttccattcagtgttccttctgttctctcctgccc

SEQ ID NO: 730713 - DNA, 120 bp, Artificial Sequence
  ENSG00000198690_60 (sequence is synthesized)
cttccctgggattttagaagctggccccagatatcctctcaggggccctgcggcccatgctagtcgctttcgggaacagccactgagccttccgcccttgggcctggcaggactctccct

SEQ ID NO: 730714 - DNA, 120 bp, Artificial Sequence
  ENSG00000198690_61 (sequence is synthesized)
gtgcccgggctgcagggttaccagtgttaaaaacactgatattttcagatgtgtgaaaatcaggacatgatttcagtattccccgagtgttcggaagattaacaagtactatagaaagac

SEQ ID NO: 730715 - DNA, 120 bp, Artificial Sequence
  ENSG00000198690_62 (sequence is synthesized)
aaccacaagataggagtttacaaagcccaggttctttctgatgagtgttgagattcatctacataatatctttattacttacagggaagggtgatgttattggggaagacgtgcaaatgc

SEQ ID NO: 730716 - DNA, 120 bp, Artificial Sequence
  ENSG00000198690_63 (sequence is synthesized)
cagtgaagacagagagatacagtaggcctgaaatggttagaaatagaagaatagaatgcacattcaaggccccgagagacgtggaaactggacactcgctggaggaggaagcaggctggg

SEQ ID NO: 730717 - DNA, 120 bp, Artificial Sequence
  ENSG00000198690_64 (sequence is synthesized)
acgtgggagcgctgaaatgctttcagttgagccatgagcctgaaaaacacacgattcctttcccagagtagaaactatttttccctgattaaaatcgatgccgtgaaactgggctgaact

SEQ ID NO: 730718 - DNA, 120 bp, Artificial Sequence
  ENSG00000198690_65 (sequence is synthesized)
ctggctgccaggctttatgccacagggaattttgtgtcagagcgatctcaacctcttctgggaggtgatttctgaagtactgcaccaaaaatgatttcacttataacacaaatgcacagc

SEQ ID NO: 730719 - DNA, 120 bp, Artificial Sequence
  ENSG00000198690_66 (sequence is synthesized)
atggaccacttaggagttaaggaacgaaccaggcacggtagcttacacttgtaatcccagcacttggggaggctgagacaggaggatcacttgaactctgaagacggaggtgggaggatc

SEQ ID NO: 730720 - DNA, 62 bp, Artificial Sequence
  ENSG00000198690_67 (sequence is synthesized)
caaaggagttcagaaatgatctggcctttatattcctgcctgatcgtcagtgtattcaccag

SEQ ID NO: 730721 - DNA, 120 bp, Artificial Sequence
  ENSG00000198690_68 (sequence is synthesized)
ggcctttatattcctgcctgatcgtcagtgtattcaccaggacggaacactgactggaaatcaggtcctagctccactcctggctgggaaagagcatgaagtgttctaggaagaaaagtc

SEQ ID NO: 730722 - DNA, 120 bp, Artificial Sequence
  ENSG00000198690_69 (sequence is synthesized)
ctcctggaagacttggcaacagccaggagtcctgagtgaaccgctgtccttttgaatccctgagacgggctgcagggatgaggggctagaactgacaggaagacaggacagagagcagca

SEQ ID NO: 730723 - DNA, 120 bp, Artificial Sequence
  ENSG00000198690_70 (sequence is synthesized)
cagcctcagaagtgcaggacagaggtgacccaggcaggcatgacgggctgtggcttcctgccctctgctctcacagcacccctgatcccactcactgtggtaccacgcagatgggttggg

SEQ ID NO: 730724 - DNA, 120 bp, Artificial Sequence
  ENSG00000198690_71 (sequence is synthesized)
gcctgtaaatgtcaggtgggaccagccagaggagctttgctgccagtactggcatgtcaggatgggggtctggtggtcagcacctcctctggccagtggtcttgtggggagaggcatcca

SEQ ID NO: 730725 - DNA, 120 bp, Artificial Sequence
  ENSG00000198690_72 (sequence is synthesized)
ttgtgccaaggctgaccccctcatcccacaccagaccctgcctctgactctgtgacctcagcacctgacttctgtctctcaggtcatctcccagtcagtaaaacatttgtgtgacgtgag

SEQ ID NO: 730726 - DNA, 120 bp, Artificial Sequence
  ENSG00000198690_73 (sequence is synthesized)
gaggggcactgaagtgggtgatctttaaggccagatgtctctgtaaaagccttgactatcggaagcactgggctagggcagtgtagtacccagggggatgaggtgcatcagagcagcacc

SEQ ID NO: 730727 - DNA, 120 bp, Artificial Sequence
  ENSG00000198690_74 (sequence is synthesized)
tgctgaggccaagaacggaggtggctgctgccggcctccgggaggtccccttagggaagcatttcttcaggggtggcccagggacctccggcatcagggcctgcatggggattctgtgcc

SEQ ID NO: 730728 - DNA, 120 bp, Artificial Sequence
  ENSG00000198690_75 (sequence is synthesized)
agcccagccctgctaagtcccagccttgggaacctgaggagggtatctgcctatttttcttttaaacatgtttcttaggttattcactaaagtttgagaaccactgctttgtggctttga

SEQ ID NO: 730729 - DNA, 120 bp, Artificial Sequence
  ENSG00000198690_76 (sequence is synthesized)
aatgttcatttgaatttttctatgattactaagatttttgcccttaaggctctgtatataaacaacatactgtataaaataaactgggaatggcgtgaaaacagcatttgcttctgaatc

SEQ ID NO: 730730 - DNA, 120 bp, Artificial Sequence
  ENSG00000198690_77 (sequence is synthesized)
catttgcttctgaatctaaaatatttctattattttcttgaaattgagtgtgcagtaggttatggtggtgttttggaagaaacagataaaacagattttgtgtgtgtgtgtgtgtgtgtg

SEQ ID NO: 730731 - DNA, 120 bp, Artificial Sequence
  ENSG00000198690_78 (sequence is synthesized)
gtgcccctgccccacgagtaggtccttctgcacacatccgtggctcacgcccacctgggcaccgtgtgtccacagccagcagaaaccatctctgttacggtcctttgggtcatccacagg

SEQ ID NO: 730732 - DNA, 120 bp, Artificial Sequence
  ENSG00000198690_79 (sequence is synthesized)
tcaagatgataacttattttaaaaatctgagtaatagaatttaagatgtaagtatgtgaagttttaaactttaatttagcctccaccttacatttagacctttcgtataaagtaccatca

SEQ ID NO: 730733 - DNA, 120 bp, Artificial Sequence
  ENSG00000198690_80 (sequence is synthesized)
gcatcagccctcccgagcacctgccgtgtcgcaggcactgtgccaaggagctcacagacatgggcacatctgcctgttcagaggtccacccagctaagcgaaaagctgtttttgcaaatt

SEQ ID NO: 730734 - DNA, 120 bp, Artificial Sequence
  ENSG00000198690_81 (sequence is synthesized)
attactctaaaaaacaagtttaataaattgcttttatatcaattaacttttacttatcttttgagagaaagaatgtatcggttggccggtttccaagttttgtatgtactgactagtcct

SEQ ID NO: 730735 - DNA, 120 bp, Artificial Sequence
  ENSG00000198690_82 (sequence is synthesized)
ttgttacagtaaaaacatttaaaatgttgatagcacatattaacttacagtagattgtatacttgattgaactgtaattgtttatttcagttgtagttagattgagaaggctggaaaagc

SEQ ID NO: 730736 - DNA, 120 bp, Artificial Sequence
  ENSG00000198690_83 (sequence is synthesized)
cttaattgcaatagcctggattctttcttgggttattattcaaaatttttgtcgtaataccgtactaatttccaggaccaagaaaaatcggaaggcaataggcctttggtaaattgtagt

SEQ ID NO: 730737 - DNA, 120 bp, Artificial Sequence
  ENSG00000198690_84 (sequence is synthesized)
attttattttccgagaaaaatacagttttaagtgattcttatgggattttaaggtaaactatttagtcaaatttttattttagtttttgtttactaaacaaagtataatcaggcagtctt

SEQ ID NO: 730738 - DNA, 120 bp, Artificial Sequence
  ENSG00000198690_85 (sequence is synthesized)
aatgtgcaagttttcctgagtttaaacgtaacaatttaccaaaaactgtgagtggcttcttttgtccttgagaagcccttgacctgtttcagttgaaaattacaaaaacttttagaattg

SEQ ID NO: 730739 - DNA, 120 bp, Artificial Sequence
  ENSG00000198690_86 (sequence is synthesized)
atttcttttgcccatgttatttatataatcaaactatatcaactctagcctgggaattcactactgtggagtcgaggatgaaatgagaggatgcttttgaaaacactttaacatgatgtt

SEQ ID NO: 730740 - DNA, 120 bp, Artificial Sequence
  ENSG00000198690_87 (sequence is synthesized)
gttatttattttatatatttgttttgtatatttcagttgttatgagcccatccttgttggggaggtgctataaatactaatctttaatgaaacataggtgtaataaggcagacattaaga

SEQ ID NO: 730741 - DNA, 120 bp, Artificial Sequence
  ENSG00000198690_88 (sequence is synthesized)
aaaatataaataccaacacttgaaaaaagctcgtgttatagatttttaaaaagtacttcaataaattacatacttgtaattaattgacttgagaagtatagaatcctcatctgtgtggta

SEQ ID NO: 730742 - DNA, 120 bp, Artificial Sequence
  ENSG00000198690_89 (sequence is synthesized)
tgttaaatgtcttctaagtcctttctttatctaattgtatttcttaagtatttgatgttaaccttatatgtaacattttataagcaagtaaacattaaatttagccaccctctggctggg

SEQ ID NO: 730743 - DNA, 120 bp, Artificial Sequence
  ENSG00000198690_90 (sequence is synthesized)
ggaagcgccggcgcgcggagccaggtgggaggaagaagaaattgtcgagacgaataacatgaggtcatatagaatcccacttttggtgatttcaagtcaagaaagtaaaactactggtca

SEQ ID NO: 730744 - DNA, 120 bp, Artificial Sequence
  ENSG00000198690_91 (sequence is synthesized)
gtagatgagtggctctcagttcagtggtggtgtgataggaatcccaccccttccccttcaactccatgatggtggcactcatctctcccacaccctctgggatgcagtgctgcttttggt

SEQ ID NO: 730745 - DNA, 120 bp, Artificial Sequence
  ENSG00000198690_92 (sequence is synthesized)
ttaatagcttctgcaccagaagggtgtgacatctttcactagccaagtggttctcaactgggggcatctggcatcatctggagacatttttggttgtcagtactggaggtggtgaagcta

SEQ ID NO: 730746 - DNA, 120 bp, Artificial Sequence
  ENSG00000198690_93 (sequence is synthesized)
atggcatctagtgactagaggccagggacagggcactgctgagcatcctataatttacaggacagcccctgacaacaaagaattacctagcctaaatgtcaatagtgctgaagctgaaaa

SEQ ID NO: 730747 - DNA, 120 bp, Artificial Sequence
  ENSG00000198690_94 (sequence is synthesized)
accctgctattgatggtgtctaagctgctagagtcagagggcccacatggtcctggatttaatttagacctccaagcccaccttgcagacatccagagttgaactgaattcactccaatg

SEQ ID NO: 730748 - DNA, 120 bp, Artificial Sequence
  ENSG00000198690_95 (sequence is synthesized)
ttatcctagaatagagatgctgctggaccattctgtacactagagaaggggtctgcaacccccaggccatagaccgataactgtccattgcctgttaggaactgggccacacagcagaag

SEQ ID NO: 730749 - DNA, 76 bp, Artificial Sequence
  ENSG00000198690_96 (sequence is synthesized)
ctgtccattgcctgttaggaactgggccacacagcagaaggtgagcagtgtgccagagagcatgaccgcctgagct

SEQ ID NO: 730750 - DNA, 120 bp, Artificial Sequence
  ENSG00000198690_97 (sequence is synthesized)
ttgcgtattccttatgagaatctattgcctgatgatatgaagtggaacagtttcatcccgaaacacctccctcaaccccagtccatggaaaaattctcttccatgaaaccactccttggt

SEQ ID NO: 730751 - DNA, 120 bp, Artificial Sequence
  ENSG00000198690_98 (sequence is synthesized)
acagcaccaaactttggcatatacatttgcaccacgtcttggtacacaaaatctgatgttttacctggagcctttgataatgacattttaaagaaataccattatttaatctaaatcatc

SEQ ID NO: 730752 - DNA, 120 bp, Artificial Sequence
  ENSG00000198690_99 (sequence is synthesized)
actagaataaaaaattgagaattgcttcatgttgactaggcaatacttttctgaaagttttcctggtatttgaagcactcatgaccagggtaaaccccaacctactgtgcagccgaggaa

SEQ ID NO: 730753 - DNA, 120 bp, Artificial Sequence
  ENSG00000198690_100 (sequence is synthesized)
ttgtaaagggtctgaagtggtcaaattgtccctttttagaaacggatagttttaggtcttaaagatgtcctagaaattacccttacaagcccagctctgtcattttatagtaagggacac

SEQ ID NO: 730754 - DNA, 120 bp, Artificial Sequence
  ENSG00000198690_101 (sequence is synthesized)
taagatcgcgtacagagcttgtcggaggggcttggtcttctgtctcacgctcagggttgtctcctcgttacaggagaccttgctcttaaacgtttcagagttcgcttttccccttgctga

SEQ ID NO: 730755 - DNA, 120 bp, Artificial Sequence
  ENSG00000198690_102 (sequence is synthesized)
agaataccagggatgccagcacagcatgagcatagagactggaagcttttgtcttctctttgctgattggcgagatgggcttactgtggactctgtgctggcatttaggaatcaggatct

SEQ ID NO: 730756 - DNA, 120 bp, Artificial Sequence
  ENSG00000198690_103 (sequence is synthesized)
aggaattaagggaaagggagagtcagatgactcagccgtcagcaagtcagcaagtgccttcaaggaaggtgtttgttttggaaatggtgactttgttgatttgtagcacagggtctctag

SEQ ID NO: 730757 - DNA, 120 bp, Artificial Sequence
  ENSG00000198690_104 (sequence is synthesized)
gtagaaagattggcgagaaagcgttcctttccctatcttattgcaggtcctttatgcgtgactctgtacttctgtgaggtgttttgctctgccatttggaagcgttgtttgaccttgagc

SEQ ID NO: 730758 - DNA, 120 bp, Artificial Sequence
  ENSG00000198690_105 (sequence is synthesized)
aggcaccagtgctccctgtggtggcgatctaggggcacttggaagcacagggattctgtggccaccacagccaggcgggtgaggccgcagagcctgtgcctgtgggctaggcagcaacag

SEQ ID NO: 730759 - DNA, 120 bp, Artificial Sequence
  ENSG00000198690_106 (sequence is synthesized)
tggttctttgtgtggccgccagcaggcccctccctgtctctattccagccctgcatttgagttgaatggaggggactgtgcctctgggagcttttgattttttcagtggcccattaagtg

SEQ ID NO: 730760 - DNA, 120 bp, Artificial Sequence
  ENSG00000198690_107 (sequence is synthesized)
aatcagggtgatgtaggggtggaaaaaaacgaccactggttaggaaatatgacatcttgtttttattgccgtaaactgaaaaagtgccttgttacctcacgtatcagggaaagagccagt

SEQ ID NO: 730761 - DNA, 120 bp, Artificial Sequence
  ENSG00000198690_108 (sequence is synthesized)
aaagctatttcctctcatggaggagggtgtggggcttccttaccactcggtgtttactgaggctgaaatagcaagagaaagcatctggtagcctagaaccaaatacagaaggagaaagct

SEQ ID NO: 730762 - DNA, 120 bp, Artificial Sequence
  ENSG00000198690_109 (sequence is synthesized)
tgtgtttctgtcgcctttctttcaatgaaataaaagttcaagagagtacagatttcccctctgttcacagttctgctagggggtagacaagccactgagcttatttttgagatttgagct

SEQ ID NO: 730763 - DNA, 120 bp, Artificial Sequence
  ENSG00000198690_110 (sequence is synthesized)
aagcctagttcctcctaacctctgtttccagaggtcttactggccatagctcttgttatttcattagtgttctttgatctttacctcagtctccagggaagggatcgcctagctgagtgc

SEQ ID NO: 730764 - DNA, 120 bp, Artificial Sequence
  ENSG00000198690_111 (sequence is synthesized)
taattcctgcaaagtgctctgcagccagccccggcctggccagggcagaggtggagccagctgggccctccctctccgaggccaggctgccgctgcccggcaccgtcttctgccagcgaa

SEQ ID NO: 730765 - DNA, 120 bp, Artificial Sequence
  ENSG00000198690_112 (sequence is synthesized)
cagggtgcccttcagagtctcattctcccatcttcatttccttcagccactcaactctggatggcctgagccttcactgattttcaatttcttggtttttattttttctttcacttttta

SEQ ID NO: 730766 - DNA, 120 bp, Artificial Sequence
  ENSG00000198690_113 (sequence is synthesized)
ctttttttgccccacttgtatacatttctatgactatagggaaaatgtagaagtgtgctgagattatggttgccaaaatccaaggaattttgagttagaactacaaaaacttctctggtt

SEQ ID NO: 730767 - DNA, 120 bp, Artificial Sequence
  ENSG00000198690_114 (sequence is synthesized)
agaactacaaaaacttctctggtttatgtttccaagtacctttggaagggagtattttttgtttgtttgtttgtcttaatttgagacaggatttcgcccaggctggagtgcggtggcatg

SEQ ID NO: 730768 - DNA, 74 bp, Artificial Sequence
  ENSG00000198690_115 (sequence is synthesized)
ctcggcctgtattttttttgacacagacatattaacaaacttgacttaggaatatgttgttggcatgaacaaga

SEQ ID NO: 730769 - DNA, 120 bp, Artificial Sequence
  ENSG00000198690_116 (sequence is synthesized)
acaaacttgacttaggaatatgttgttggcatgaacaagactgaatgtgaatattttcttattagtaacactttaggtaaagctattaataacttgtatattgtatatcatacatatgat

SEQ ID NO: 730770 - DNA, 120 bp, Artificial Sequence
  ENSG00000198690_117 (sequence is synthesized)
aattagatatacagatgataaattagaaattttcactaatttatattggcacacggatttagtgaaaatttggtttgtccaataaaagtagattttgaactaaaagtagaactaccatgt

SEQ ID NO: 730771 - DNA, 120 bp, Artificial Sequence
  ENSG00000198690_118 (sequence is synthesized)
gatccagcaatcccactactgggtaatatccaaaggaaaagaaataggtatattgaagagatatttgtactcccatgtctattgcagtctattcacaatagccaagatagggagtcaacc

SEQ ID NO: 730772 - DNA, 120 bp, Artificial Sequence
  ENSG00000198690_119 (sequence is synthesized)
gtggtacatatacacaatggagtactgttcagccataaaaaagaatgaaattctccatggtggcaacatggctgagctcagaggacattatgttatgtgaaataagccaggcacagaaag

SEQ ID NO: 730773 - DNA, 120 bp, Artificial Sequence
  ENSG00000198690_120 (sequence is synthesized)
acagaaagacaaatactgcatgttctcactcatatgtgggaggtaaaaaagtggatctcacagaagtagagagtagaatagtggttaccagaggctgggaggggaagggggatagggaaa

SEQ ID NO: 730774 - DNA, 120 bp, Artificial Sequence
  ENSG00000198690_121 (sequence is synthesized)
ggctgggaggggaagggggatagggaaaggttggttaacagatacaaaagtgcagctaggtagaaggaataagttctgttgttctgtagcagtgtaggatgactataattaacaacagtt

SEQ ID NO: 730775 - DNA, 120 bp, Artificial Sequence
  ENSG00000198690_122 (sequence is synthesized)
tattatatatttttaaatagaagaatggatttagaatattccccacacaaagaaatgataaatgtttgaggtgatgcctggtatggcaacacatgcctatatttctaactactcgggagg

SEQ ID NO: 730776 - DNA, 120 bp, Artificial Sequence
  ENSG00000198690_123 (sequence is synthesized)
ctggggcaggagggtcacttgagtccagaaattcgggactagcctgggcaacataatgagaccccatctctaaaacattttcaaaaaagtttgaggtgctggatatgctaattaccctaa

SEQ ID NO: 730777 - DNA, 120 bp, Artificial Sequence
  ENSG00000198690_124 (sequence is synthesized)
tttgatcattatacattgtatacatgcattgaaatatcacactgtgccacataaatatgtgcaattttatgttaattaaaaataataatagatgccaaacaaataatgggattacagtat

SEQ ID NO: 730778 - DNA, 120 bp, Artificial Sequence
  ENSG00000198690_125 (sequence is synthesized)
taaaaagcaggttttgataagaaagaatagtgtaggtcttaggaaaaaaaatttggatttccttaaaaaaaacacctttggtaagaaaaattaatttggatttcctaaaatgtcactttt

SEQ ID NO: 730779 - DNA, 120 bp, Artificial Sequence
  ENSG00000198690_126 (sequence is synthesized)
gattcttgatttggatttctgactcaaatttaaccaaaattgattgtgatatttgcttttaggaaagtcctgtgtttctaggaaagccaggtgctttaagaagtaagttattgaaatttt

SEQ ID NO: 730780 - DNA, 120 bp, Artificial Sequence
  ENSG00000198690_127 (sequence is synthesized)
tgaatcacagcagtgtcagtataatctgattttggcccattttaccttagctgtcaggaagctcagtatcttatttgtgttcaatgggaataacttttttagttaaaatctctaataaga

SEQ ID NO: 730781 - DNA, 120 bp, Artificial Sequence
  ENSG00000198691_0 (sequence is synthesized)
ggacacagcgtccggagccagaggcgctcttaacggcgtttatgtcctttgctgtctgaggggcctcagctctgaccaatctggtcttcgtgtggtcattagcatgggcttcgtgagaca

SEQ ID NO: 730782 - DNA, 120 bp, Artificial Sequence
  ENSG00000198691_1 (sequence is synthesized)
gatacagcttttgctctggaagaactggaccctgcggaaaaggcaaaagattcgctttgtggtggaactcgtgtggcctttatctttatttctggtcttgatctggttaaggaatgccaa

SEQ ID NO: 730783 - DNA, 120 bp, Artificial Sequence
  ENSG00000198691_2 (sequence is synthesized)
cccactctacagccatcatgaatgccatttccccaacaaggcgatgccctcagcaggaatgctgccgtggctccaggggatcttctgcaatgtgaacaatccctgttttcaaagccccac

SEQ ID NO: 730784 - DNA, 120 bp, Artificial Sequence
  ENSG00000198691_3 (sequence is synthesized)
cccaggagaatctcctggaattgtgtcaaactataacaactccatcttggcaagggtatatcgagattttcaagaactcctcatgaatgcaccagagagccagcaccttggccgtatttg

SEQ ID NO: 730785 - DNA, 120 bp, Artificial Sequence
  ENSG00000198691_4 (sequence is synthesized)
gacagagctacacatcttgtcccaattcatggacaccctccggactcacccggagagaattgcaggaagaggaatacgaataagggatatcttgaaagatgaagaaacactgacactatt

SEQ ID NO: 730786 - DNA, 120 bp, Artificial Sequence
  ENSG00000198691_5 (sequence is synthesized)
tctcattaaaaacatcggcctgtctgactcagtggtctaccttctgatcaactctcaagtccgtccagagcagttcgctcatggagtcccggacctggcgctgaaggacatcgcctgcag

SEQ ID NO: 730787 - DNA, 120 bp, Artificial Sequence
  ENSG00000198691_6 (sequence is synthesized)
cgaggccctcctggagcgcttcatcatcttcagccagagacgcggggcaaagacggtgcgctatgccctgtgctccctctcccagggcaccctacagtggatagaagacactctgtatgc

SEQ ID NO: 730788 - DNA, 120 bp, Artificial Sequence
  ENSG00000198691_7 (sequence is synthesized)
caacgtggacttcttcaagctcttccgtgtgcttcccacactcctagacagccgttctcaaggtatcaatctgagatcttggggaggaatattatctgatatgtcaccaagaattcaaga

SEQ ID NO: 730789 - DNA, 120 bp, Artificial Sequence
  ENSG00000198691_8 (sequence is synthesized)
gtttatccatcggccgagtatgcaggacttgctgtgggtgaccaggcccctcatgcagaatggtggtccagagacctttacaaagctgatgggcatcctgtctgacctcctgtgtggcta

SEQ ID NO: 730790 - DNA, 120 bp, Artificial Sequence
  ENSG00000198691_9 (sequence is synthesized)
ccccgagggaggtggctctcgggtgctctccttcaactggtatgaagacaataactataaggcctttctggggattgactccacaaggaaggatcctatctattcttatgacagaagaac

SEQ ID NO: 730791 - DNA, 120 bp, Artificial Sequence
  ENSG00000198691_10 (sequence is synthesized)
aacatccttttgtaatgcattgatccagagcctggagtcaaatcctttaaccaaaatcgcttggagggcggcaaagcctttgctgatgggaaaaatcctgtacactcctgattcacctgc

SEQ ID NO: 730792 - DNA, 120 bp, Artificial Sequence
  ENSG00000198691_11 (sequence is synthesized)
agcacgaaggatactgaagaatgccaactcaacttttgaagaactggaacacgttaggaagttggtcaaagcctgggaagaagtagggccccagatctggtacttctttgacaacagcac

SEQ ID NO: 730793 - DNA, 120 bp, Artificial Sequence
  ENSG00000198691_12 (sequence is synthesized)
acagatgaacatgatcagagataccctggggaacccaacagtaaaagactttttgaataggcagcttggtgaagaaggtattactgctgaagccatcctaaacttcctctacaagggccc

SEQ ID NO: 730794 - DNA, 120 bp, Artificial Sequence
  ENSG00000198691_13 (sequence is synthesized)
tcgggaaagccaggctgacgacatggccaacttcgactggagggacatatttaacatcactgatcgcaccctccgcctggtcaatcaatacctggagtgcttggtcctggataagtttga

SEQ ID NO: 730795 - DNA, 120 bp, Artificial Sequence
  ENSG00000198691_14 (sequence is synthesized)
aagctacaatgatgaaactcagctcacccaacgtgccctctctctactggaggaaaacatgttctgggccggagtggtattccctgacatgtatccctggaccagctctctaccacccca

SEQ ID NO: 730796 - DNA, 120 bp, Artificial Sequence
  ENSG00000198691_15 (sequence is synthesized)
cgtgaagtataagatccgaatggacatagacgtggtggagaaaaccaataagattaaagacaggtattgggattctggtcccagagctgatcccgtggaagatttccggtacatctgggg

SEQ ID NO: 730797 - DNA, 120 bp, Artificial Sequence
  ENSG00000198691_16 (sequence is synthesized)
cgggtttgcctatctgcaggacatggttgaacaggggatcacaaggagccaggtgcaggcggaggctccagttggaatctacctccagcagatgccctacccctgcttcgtggacgattc

SEQ ID NO: 730798 - DNA, 120 bp, Artificial Sequence
  ENSG00000198691_17 (sequence is synthesized)
tttcatgatcatcctgaaccgctgtttccctatcttcatggtgctggcatggatctactctgtctccatgactgtgaagagcatcgtcttggagaaggagttgcgactgaaggagacctt

SEQ ID NO: 730799 - DNA, 120 bp, Artificial Sequence
  ENSG00000198691_18 (sequence is synthesized)
gaaaaatcagggtgtctccaatgcagtgatttggtgtacctggttcctggacagcttctccatcatgtcgatgagcatcttcctcctgacgatattcatcatgcatggaagaatcctaca

SEQ ID NO: 730800 - DNA, 120 bp, Artificial Sequence
  ENSG00000198691_19 (sequence is synthesized)
ttacagcgacccattcatcctcttcctgttcttgttggctttctccactgccaccatcatgctgtgctttctgctcagcaccttcttctccaaggccagtctggcagcagcctgtagtgg

SEQ ID NO: 730801 - DNA, 120 bp, Artificial Sequence
  ENSG00000198691_20 (sequence is synthesized)
tgtcatctatttcaccctctacctgccacacatcctgtgcttcgcctggcaggaccgcatgaccgctgagctgaagaaggctgtgagcttactgtctccggtggcatttggatttggcac

SEQ ID NO: 730802 - DNA, 120 bp, Artificial Sequence
  ENSG00000198691_21 (sequence is synthesized)
tgagtacctggttcgctttgaagagcaaggcctggggctgcagtggagcaacatcgggaacagtcccacggaaggggacgaattcagcttcctgctgtccatgcagatgatgctccttga

SEQ ID NO: 730803 - DNA, 120 bp, Artificial Sequence
  ENSG00000198691_22 (sequence is synthesized)
tgctgctgtctatggcttactcgcttggtaccttgatcaggtgtttccaggagactatggaaccccacttccttggtactttcttctacaagagtcgtattggcttggcggtgaagggtg

SEQ ID NO: 730804 - DNA, 120 bp, Artificial Sequence
  ENSG00000198691_23 (sequence is synthesized)
ttcaaccagagaagaaagagccctggaaaagaccgagcccctaacagaggaaacggaggatccagagcacccagaaggaatacacgactccttctttgaacgtgagcatccagggtgggt

SEQ ID NO: 730805 - DNA, 120 bp, Artificial Sequence
  ENSG00000198691_24 (sequence is synthesized)
tcctggggtatgcgtgaagaatctggtaaagatttttgagccctgtggccggccagctgtggaccgtctgaacatcaccttctacgagaaccagatcaccgcattcctgggccacaatgg

SEQ ID NO: 730806 - DNA, 120 bp, Artificial Sequence
  ENSG00000198691_25 (sequence is synthesized)
agctgggaaaaccaccaccttgtccatcctgacgggtctgttgccaccaacctctgggactgtgctcgttgggggaagggacattgaaaccagcctggatgcagtccggcagagccttgg

SEQ ID NO: 730807 - DNA, 120 bp, Artificial Sequence
  ENSG00000198691_26 (sequence is synthesized)
catgtgtccacagcacaacatcctgttccaccacctcacggtggctgagcacatgctgttctatgcccagctgaaaggaaagtcccaggaggaggcccagctggagatggaagccatgtt

SEQ ID NO: 730808 - DNA, 120 bp, Artificial Sequence
  ENSG00000198691_27 (sequence is synthesized)
ggaggacacaggcctccaccacaagcggaatgaagaggctcaggacctatcaggtggcatgcagagaaagctgtcggttgccattgcctttgtgggagatgccaaggtggtgattctgga

SEQ ID NO: 730809 - DNA, 120 bp, Artificial Sequence
  ENSG00000198691_28 (sequence is synthesized)
cgaacccacctctggggtggacccttactcgagacgctcaatctgggatctgctcctgaagtatcgctcaggcagaaccatcatcatgtccactcaccacatggacgaggccgacctcct

SEQ ID NO: 730810 - DNA, 120 bp, Artificial Sequence
  ENSG00000198691_29 (sequence is synthesized)
tggggaccgcattgccatcattgcccagggaaggctctactgctcaggcaccccactcttcctgaagaactgctttggcacaggcttgtacttaaccttggtgcgcaagatgaaaaacat

SEQ ID NO: 730811 - DNA, 120 bp, Artificial Sequence
  ENSG00000198691_30 (sequence is synthesized)
aaaggaaaggcagtgaggggacctgcagctgctcgtctaagggtttctccaccacgtgtccagcccacgtcgatgacctaactccagaacaagtcctggatggggatgtaaatgagctga

SEQ ID NO: 730812 - DNA, 120 bp, Artificial Sequence
  ENSG00000198691_31 (sequence is synthesized)
tggatgtagttctccaccatgttccagaggcaaagctggtggagtgcattggtcaagaacttatcttccttcttccaaataagaacttcaagcacagagcatatgccagccttttcagag

SEQ ID NO: 730813 - DNA, 120 bp, Artificial Sequence
  ENSG00000198691_32 (sequence is synthesized)
agctggaggagacgctggctgaccttggtctcagcagttttggaatttctgacactcccctggaagagatttttctgaaggtcacggaggattctgattcaggacctctgtttgcgggtg

SEQ ID NO: 730814 - DNA, 120 bp, Artificial Sequence
  ENSG00000198691_33 (sequence is synthesized)
gcgctcagcagaaaagagaaaacgtcaacccccgacacccctgcttgggtcccagagagaaggctggacagacaccccaggactccaatgtctgctccccaggggcgccggctgctcacc

SEQ ID NO: 730815 - DNA, 120 bp, Artificial Sequence
  ENSG00000198691_34 (sequence is synthesized)
cagagggccagcctcccccagagccagagtgcccaggcccgcagctcaacacggggacacagctggtcctccagcatgtgcaggcgctgctggtcaagagattccaacacaccatccgca

SEQ ID NO: 730816 - DNA, 120 bp, Artificial Sequence
  ENSG00000198691_35 (sequence is synthesized)
gccacaaggacttcctggcgcagatcgtgctcccggctacctttgtgtttttggctctgatgctttctattgttatccctccttttggcgaataccccgctttgacccttcacccctgga

SEQ ID NO: 730817 - DNA, 120 bp, Artificial Sequence
  ENSG00000198691_36 (sequence is synthesized)
tatatgggcagcagtacaccttcttcagcatggatgaaccaggcagtgagcagttcacggtacttgcagacgtcctcctgaataagccaggctttggcaaccgctgcctgaaggaagggt

SEQ ID NO: 730818 - DNA, 120 bp, Artificial Sequence
  ENSG00000198691_37 (sequence is synthesized)
ggcttccggagtacccctgtggcaactcaacaccctggaagactccttctgtgtccccaaacatcacccagctgttccagaagcagaaatggacacaggtcaacccttcaccatcctgca

SEQ ID NO: 730819 - DNA, 120 bp, Artificial Sequence
  ENSG00000198691_38 (sequence is synthesized)
ggtgcagcaccagggagaagctcaccatgctgccagagtgccccgagggtgccgggggcctcccgcccccccagagaacacagcgcagcacggaaattctacaagacctgacggacagga

SEQ ID NO: 730820 - DNA, 120 bp, Artificial Sequence
  ENSG00000198691_39 (sequence is synthesized)
acatctccgacttcttggtaaaaacgtatcctgctcttataagaagcagcttaaagagcaaattctgggtcaatgaacagaggtatggaggaatttccattggaggaaagctcccagtcg

SEQ ID NO: 730821 - DNA, 120 bp, Artificial Sequence
  ENSG00000198691_40 (sequence is synthesized)
tccccatcacgggggaagcacttgttgggtttttaagcgaccttggccggatcatgaatgtgagcgggggccctatcactagagaggcctctaaagaaatacctgatttccttaaacatc

SEQ ID NO: 730822 - DNA, 120 bp, Artificial Sequence
  ENSG00000198691_41 (sequence is synthesized)
tagaaactgaagacaacattaaggtgtggtttaataacaaaggctggcatgccctggtcagctttctcaatgtggcccacaacgccatcttacgggccagcctgcctaaggacaggagcc

SEQ ID NO: 730823 - DNA, 120 bp, Artificial Sequence
  ENSG00000198691_42 (sequence is synthesized)
ccgaggagtatggaatcaccgtcattagccaacccctgaacctgaccaaggagcagctctcagagattacagtgctgaccacttcagtggatgctgtggttgccatctgcgtgattttct

SEQ ID NO: 730824 - DNA, 120 bp, Artificial Sequence
  ENSG00000198691_43 (sequence is synthesized)
ccatgtccttcgtcccagccagctttgtcctttatttgatccaggagcgggtgaacaaatccaagcacctccagtttatcagtggagtgagccccaccacctactgggtgaccaacttcc

SEQ ID NO: 730825 - DNA, 120 bp, Artificial Sequence
  ENSG00000198691_44 (sequence is synthesized)
tctgggacatcatgaattattccgtgagtgctgggctggtggtgggcatcttcatcgggtttcagaagaaagcctacacttctccagaaaaccttcctgcccttgtggcactgctcctgc

SEQ ID NO: 730826 - DNA, 120 bp, Artificial Sequence
  ENSG00000198691_45 (sequence is synthesized)
tgtatggatgggcggtcattcccatgatgtacccagcatccttcctgtttgatgtccccagcacagcctatgtggctttatcttgtgctaatctgttcatcggcatcaacagcagtgcta

SEQ ID NO: 730827 - DNA, 120 bp, Artificial Sequence
  ENSG00000198691_46 (sequence is synthesized)
ttaccttcatcttggaattatttgagaataaccggacgctgctcaggttcaacgccgtgctgaggaagctgctcattgtcttcccccacttctgcctgggccggggcctcattgaccttg

SEQ ID NO: 730828 - DNA, 120 bp, Artificial Sequence
  ENSG00000198691_47 (sequence is synthesized)
cactgagccaggctgtgacagatgtctatgcccggtttggtgaggagcactctgcaaatccgttccactgggacctgattgggaagaacctgtttgccatggtggtggaaggggtggtgt

SEQ ID NO: 730829 - DNA, 120 bp, Artificial Sequence
  ENSG00000198691_48 (sequence is synthesized)
acttcctcctgaccctgctggtccagcgccacttcttcctctcccaatggattgccgagcccactaaggagcccattgttgatgaagatgatgatgtggctgaagaaagacaaagaatta

SEQ ID NO: 730830 - DNA, 120 bp, Artificial Sequence
  ENSG00000198691_49 (sequence is synthesized)
ttactggtggaaataaaactgacatcttaaggctacatgaactaaccaagatttatccaggcacctccagcccagcagtggacaggctgtgtgtcggagttcgccctggagagtgctttg

SEQ ID NO: 730831 - DNA, 120 bp, Artificial Sequence
  ENSG00000198691_50 (sequence is synthesized)
gcctcctgggagtgaatggtgccggcaaaacaaccacattcaagatgctcactggggacaccacagtgacctcaggggatgccaccgtagcaggcaagagtattttaaccaatatttctg

SEQ ID NO: 730832 - DNA, 120 bp, Artificial Sequence
  ENSG00000198691_51 (sequence is synthesized)
aagtccatcaaaatatgggctactgtcctcagtttgatgcaattgatgagctgctcacaggacgagaacatctttacctttatgcccggcttcgaggtgtaccagcagaagaaatcgaaa

SEQ ID NO: 730833 - DNA, 120 bp, Artificial Sequence
  ENSG00000198691_52 (sequence is synthesized)
aggttgcaaactggagtattaagagcctgggcctgactgtctacgccgactgcctggctggcacgtacagtgggggcaacaagcggaaactctccacagccatcgcactcattggctgcc

SEQ ID NO: 730834 - DNA, 120 bp, Artificial Sequence
  ENSG00000198691_53 (sequence is synthesized)
caccgctggtgctgctggatgagcccaccacagggatggacccccaggcacgccgcatgctgtggaacgtcatcgtgagcatcatcagagaagggagggctgtggtcctcacatcccaca

SEQ ID NO: 730835 - DNA, 120 bp, Artificial Sequence
  ENSG00000198691_54 (sequence is synthesized)
gcatggaagaatgtgaggcactgtgtacccggctggccatcatggtaaagggcgcctttcgatgtatgggcaccattcagcatctcaagtccaaatttggagatggctatatcgtcacaa

SEQ ID NO: 730836 - DNA, 120 bp, Artificial Sequence
  ENSG00000198691_55 (sequence is synthesized)
tgaagatcaaatccccgaaggacgacctgcttcctgacctgaaccctgtggagcagttcttccaggggaacttcccaggcagtgtgcagagggagaggcactacaacatgctccagttcc

SEQ ID NO: 730837 - DNA, 120 bp, Artificial Sequence
  ENSG00000198691_56 (sequence is synthesized)
aggtctcctcctcctccctggcgaggatcttccagctcctcctctcccacaaggacagcctgctcatcgaggagtactcagtcacacagaccacactggaccaggtgtttgtaaattttg

SEQ ID NO: 730838 - DNA, 120 bp, Artificial Sequence
  ENSG00000198691_57 (sequence is synthesized)
ctaaacagcagactgaaagtcatgacctccctctgcaccctcgagctgctggagccagtcgacaagcccaggactgatctttcacaccgctcgttcctgcagccagaaaggaactctggg

SEQ ID NO: 730839 - DNA, 120 bp, Artificial Sequence
  ENSG00000198691_58 (sequence is synthesized)
cagctggaggcgcaggagcctgtgcccatatggtcatccaaatggactggccagcgtaaatgaccccactgcagcagaaaacaaacacacgaggagcatgcagcgaattcagaaagaggt

SEQ ID NO: 730840 - DNA, 120 bp, Artificial Sequence
  ENSG00000198691_59 (sequence is synthesized)
ctttcagaaggaaaccgaaactgacttgctcacctggaacacctgatggtgaaaccaaacaaatacaaaatccttctccagaccccagaactagaaaccccgggccatcccactagcagc

SEQ ID NO: 730841 - DNA, 120 bp, Artificial Sequence
  ENSG00000198691_60 (sequence is synthesized)
tttggcctccatattgctctcatttcaagcagatctgcttttctgcatgtttgtctgtgtgtctgcgttgtgtgtgattttcatggaaaaataaaatgcaaatgcactcatcacaaacta

SEQ ID NO: 730842 - DNA, 120 bp, Artificial Sequence
  ENSG00000198691_61 (sequence is synthesized)
tctgaaggaccagaccaagaggggaggggttctcacggtgccagggctgctgaaaggcactgggccaagggccttgtgtatctgctgtcccttgacatcttctcagaaaggcacagaact

SEQ ID NO: 730843 - DNA, 120 bp, Artificial Sequence
  ENSG00000198691_62 (sequence is synthesized)
actggaggaaaacatgttctgggccggagtggtattccctgacatgtatccctggaccagctctctaccaccccacgtgtccagcccacgtcgatgacctaactccagaacaagtcctgg

SEQ ID NO: 730844 - DNA, 120 bp, Artificial Sequence
  ENSG00000198691_63 (sequence is synthesized)
ggtgctgctggtaactgcgggcttgggccgcaccaagggcttaaaccaagtgctgggtctcttgggttggggaaataggttctgggtcggcagatttagaaactgcagcagtttggcttt

SEQ ID NO: 730845 - DNA, 120 bp, Artificial Sequence
  ENSG00000198691_64 (sequence is synthesized)
agtctggactgtttcctgtgttgctcattttgagcgatcagcccagtgtttggttcacacagctccggagaaaaacaagtcacggcacagccttgacttgggactgcgcacatcctgcgt

SEQ ID NO: 730846 - DNA, 120 bp, Artificial Sequence
  ENSG00000198691_65 (sequence is synthesized)
tcccaggatgtctcctgtggggccatcggctcacagccgggaagttcagcccactctgcggcctgtcggtgtctggtccccatacaggagcactgagctgggtcaaaggctcctgagctg

SEQ ID NO: 730847 - DNA, 120 bp, Artificial Sequence
  ENSG00000198691_66 (sequence is synthesized)
agacacggacctcgcagggggcagcgaacccacgtgacacagtcttcaagtcctttggagagccccaggaaggaacaacagcgtgtacaccctgtgatggaatgttctctagggcggttc

SEQ ID NO: 730848 - DNA, 120 bp, Artificial Sequence
  ENSG00000198691_67 (sequence is synthesized)
agtgtgaatggaatgtggggccggtgccattctaattggttctgtttccctctagtggttgatcgcggagatttcggcttctccatcaggacaagttcagatagcctgagatggtatcag

SEQ ID NO: 730849 - DNA, 120 bp, Artificial Sequence
  ENSG00000198691_68 (sequence is synthesized)
ggcccatatctggtacccacctgatccacaaatgttccatcagatcctgttcaaacaacacatctccagttaagccaaatcttgccctttctccttacggtaaaatgtactaaatctgaa

SEQ ID NO: 730850 - DNA, 120 bp, Artificial Sequence
  ENSG00000198692_0 (sequence is synthesized)
gcgcacccacctgctgcatcttagttcagtcggctcttagagtagtaaccgccagaaaggagtcggaagaggtctcacgaggctgtcatcaccgccatgcccaagaataaaggtaaagga

SEQ ID NO: 730851 - DNA, 120 bp, Artificial Sequence
  ENSG00000198692_1 (sequence is synthesized)
ggtaaaaacaggcgcaggggtaaaaatgagaatgaatctgaaaaaagagagttggtgtttaaagaggatggacaagagtatgctcaggtaatcaaaatgttgggaaatggacgattggaa

SEQ ID NO: 730852 - DNA, 120 bp, Artificial Sequence
  ENSG00000198692_2 (sequence is synthesized)
gcattgtgttttgatggtgtaaagaggttatgccatatcagagggaaattgagaaaaaaggtttggataaatacatcagacattatattggttggtctacgggactatcaggataacaaa

SEQ ID NO: 730853 - DNA, 120 bp, Artificial Sequence
  ENSG00000198692_3 (sequence is synthesized)
gctgatgtaattttaaagtacaatgcagatgaagctagaagcctgaaggcatatggcgagcttccagaacatgctaaaatcaatgaaacagacacatttggtcctggagatgatgatgaa

SEQ ID NO: 730854 - DNA, 120 bp, Artificial Sequence
  ENSG00000198692_4 (sequence is synthesized)
atccagtttgacgatattggagatgatgatgaagacattgatgatatctaaattgaaccaagtgtttttacatgacaagttctctgaggatggttctacagttgggattttggccatcat

SEQ ID NO: 730855 - DNA, 120 bp, Artificial Sequence
  ENSG00000198692_5 (sequence is synthesized)
atttagtgtgtagtttctgaaagcaaactgatttattttcattgttttaaagtatttatttctttaaaagctgaggacactgaattaccttaagttaaatgttaatactttattgttttg

SEQ ID NO: 730856 - DNA, 120 bp, Artificial Sequence
  ENSG00000198692_6 (sequence is synthesized)
atgtaatggaacttaaggataaaagaccataatatttgctgttaaaataaataaacgagtgcctttcctactgtgataacgtcaagtaattggatattttgaatacatttctgcctgata

SEQ ID NO: 730857 - DNA, 120 bp, Artificial Sequence
  ENSG00000198692_7 (sequence is synthesized)
atcatgctgggttctaataagccctacttccacctaatctgtttacagtcttttggtatgtttcagttacttagatggtctcataaggtttctgatacaatttgaagacagaaatctgca

SEQ ID NO: 730858 - DNA, 120 bp, Artificial Sequence
  ENSG00000198692_8 (sequence is synthesized)
tttagaatcagaaaacatggacatatttttcatatttatctagtcatatgtaattttatgctaacattgatagtttataaatccttttcatcctttgtgcctcggttattaaggaaaaaa

SEQ ID NO: 730859 - DNA, 120 bp, Artificial Sequence
  ENSG00000198692_9 (sequence is synthesized)
aaatgtccaacatacagtttttaaagtgtggcagttttgagtagtaacttagaatgtataagattaagagttaaagaaaccgaacaataagtggcaaccaattatcttaacattggaaat

SEQ ID NO: 730860 - DNA, 120 bp, Artificial Sequence
  ENSG00000198692_10 (sequence is synthesized)
actggggtgccattttgttttcaaaagttattcattgtaatccactgttttggctttcatgaacaagtaaattacagtgtataaatgaaaagcaatttcataataaattctataaactga

SEQ ID NO: 730861 - DNA, 120 bp, Artificial Sequence
  ENSG00000198692_11 (sequence is synthesized)
tttctgaaggaacaaattttagcaagtccttattctgccattcctgcaatcactgcaagaaagcatttattttgataagacttaattacacattgactttgtttctttttcatatatcaa

SEQ ID NO: 730862 - DNA, 120 bp, Artificial Sequence
  ENSG00000198692_12 (sequence is synthesized)
ataaaaagttgtactgtgcttttaaaatgttatttttatgtccattatattattcgaattatcattttaacaaaaactggtttgcacattacagtttgaaaagtgttggtctatttcata

SEQ ID NO: 730863 - DNA, 120 bp, Artificial Sequence
  ENSG00000198692_13 (sequence is synthesized)
ctgccattgtgacagatcactttagtttacatcttacttatattgtaaattgtaagcaatcagaacccctcctcaccccaagttggataaaatactttcaaatggggaactgtgaacatc

SEQ ID NO: 730864 - DNA, 120 bp, Artificial Sequence
  ENSG00000198692_14 (sequence is synthesized)
tgaggaaagtgattcttagtgttggcattagaaacacccacccagaagaacttttaaaaatatgcattcatgtactacaccccaggcaggtctactttcaatcttaaggaagtaggtatg

SEQ ID NO: 730865 - DNA, 120 bp, Artificial Sequence
  ENSG00000198692_15 (sequence is synthesized)
tatttttaaaatcaagctatttttcaagttccatagacaattctgttagataatctatactaagaactactgatgcatagaaaagtttattattgttgtttttgtttttttgaaggagtt

SEQ ID NO: 730866 - DNA, 120 bp, Artificial Sequence
  ENSG00000198692_16 (sequence is synthesized)
acaggcgcgagccaccgtgcctggcctagaaaagtgtattacctttttaacatcattattctttactccatttttagttttgaattgcagtgtttgaccttaaaagttttatattacaat

SEQ ID NO: 730867 - DNA, 120 bp, Artificial Sequence
  ENSG00000198692_17 (sequence is synthesized)
caatttttttaattagtcttttattttttccaagagacttctaattaaaagggaatagtaaataaaagcactgtgcttgccttttgtgcttttattaaagtgaaatctctacaatctttc

SEQ ID NO: 730868 - DNA, 120 bp, Artificial Sequence
  ENSG00000198692_18 (sequence is synthesized)
ctaagctgttaatcactgtttactaatgaacataaaccacttcctaattattcagactcaagaatttttttctagagggtattggggtaggcaaagaaaagcaggagagtttgtaacaaa

SEQ ID NO: 730869 - DNA, 120 bp, Artificial Sequence
  ENSG00000198692_19 (sequence is synthesized)
tatttaggtgaaggtatttccgtagaactcttgttttacatactgttttagtgtatacttaaaaatttgttataagtagtcttgcctatacttcagtttacttatgatactttggaaaag

SEQ ID NO: 730870 - DNA, 120 bp, Artificial Sequence
  ENSG00000198692_20 (sequence is synthesized)
aacgttatgaacttgaaagtagaagtctctaataaagagattatgaattatgaaagttcctttagtgacaactttataaattcataagctctggatttgtatataagatctgtcaaagaa

SEQ ID NO: 730871 - DNA, 120 bp, Artificial Sequence
  ENSG00000198692_21 (sequence is synthesized)
atacgttttttatagtgtttttctaaacagttctcaagactggcagttttcatttaagcagaggcaacaaatgtaatactaatgtttgattattatagaaaaaagtattcatcttagcaa

SEQ ID NO: 730872 - DNA, 120 bp, Artificial Sequence
  ENSG00000198692_22 (sequence is synthesized)
agttttaactatgggattatttttaacaaacaattgtgttttctttttcttaaagacaaacacaatgcatacttactgccgaaagcttgacaagattaaaataagtccctcatgacacca

SEQ ID NO: 730873 - DNA, 120 bp, Artificial Sequence
  ENSG00000198692_23 (sequence is synthesized)
tcaaagagaatatgcactgttgtaaagcctgagtattttacttggcagctattttcattatttatcatattgcattttatgaaaagatttttatataaacatgaagatcttgatgaaatt

SEQ ID NO: 730874 - DNA, 120 bp, Artificial Sequence
  ENSG00000198692_24 (sequence is synthesized)
attggcatttcaggaagtgctgaaatgttattggaagtgatgaaattattggcatttcaggaagtgctgaaagtttcgctttcattacttggggataagcatgatcatgatttaaccaag

SEQ ID NO: 730875 - DNA, 120 bp, Artificial Sequence
  ENSG00000198692_25 (sequence is synthesized)
tatttctcactgatttgataagtctgtttaaataattggttaactagttgttgtaatttcaagagaactttatgtattttgaggataagttgttaacctgtgctcaaatcctttttgaag

SEQ ID NO: 730876 - DNA, 120 bp, Artificial Sequence
  ENSG00000198692_26 (sequence is synthesized)
gctacatggaaatggttggctattgagttagcataatcagtctgcctaccatacttaaagtaccttttgtatatgtgctaagtgagaattaaaaataccttttaaaaacaaatgaaaaat

SEQ ID NO: 730877 - DNA, 80 bp, Artificial Sequence
  ENSG00000198692_27 (sequence is synthesized)
catctcagctccctgcattctacgcctgccaagttcaagctattttcctgcctcaccctctgcaccctctgagactacag

SEQ ID NO: 730878 - DNA, 120 bp, Artificial Sequence
  ENSG00000198692_28 (sequence is synthesized)
tattttcctgcctcaccctctgcaccctctgagactacagacatttgccaccatacctggttaattttttatttttttatttttagtagagaccagatttcaccatgttggctaggctgg

SEQ ID NO: 730879 - DNA, 120 bp, Artificial Sequence
  ENSG00000198692_29 (sequence is synthesized)
gaactcctgatctcaagtgatctgcctaccatggcctcccaaattggtgggactacaggttatataatcagtatgtctgttattttacctttagctaaaatcaatgaaacagacacattt

SEQ ID NO: 730880 - DNA, 120 bp, Artificial Sequence
  ENSG00000198695_0 (sequence is synthesized)
atgatgtatgctttgtttctgttgagtgtgggtttagtaatggggtttgtggggttttcttctaagccttctcctatttatgggggtttagtattgattgttagcggtgtggtcgggtgt

SEQ ID NO: 730881 - DNA, 120 bp, Artificial Sequence
  ENSG00000198695_1 (sequence is synthesized)
gttattattctgaattttgggggaggttatatgggtttaatagtttttttaatttatttagggggaatgatggttgtctttggatatactacagcgatggctattgaggagtatcctgag

SEQ ID NO: 730882 - DNA, 120 bp, Artificial Sequence
  ENSG00000198695_2 (sequence is synthesized)
ttagcgatggaggtaggattggtgctgtgggtgaaagagtatgatggggtggtggttgtggtaaactttaatagtgtaggaagctgaataatttatgaaggagaggggtcagggttgatt

SEQ ID NO: 730883 - DNA, 120 bp, Artificial Sequence
  ENSG00000198695_3 (sequence is synthesized)
cgggaggatcctattggtgcgggggctttgtatgattatgggcgttgattagtagtagttactggttgaacattgtttgttggtgtatatattgtaattgagattgctcgggggaatagg

SEQ ID NO: 730884 - DNA, 120 bp, Artificial Sequence
  ENSG00000198700_0 (sequence is synthesized)
gtcattcggtggcgggtcccggccgcggggctggcgggctgaggggagaaaagatggcggcggcggcggcagctggtgcggcctccgggctgccgggtccagtggcacaaggattaaagg

SEQ ID NO: 730885 - DNA, 120 bp, Artificial Sequence
  ENSG00000198700_1 (sequence is synthesized)
aagcgttagtggatacgctcaccgggatcctatccccagtacaggaggtgcgggcggctgctgaagaacagattaaggtgctggaggtgacggaggaatttggtgttcacttggcagaac

SEQ ID NO: 730886 - DNA, 120 bp, Artificial Sequence
  ENSG00000198700_2 (sequence is synthesized)
tgactgtagatccccagggggcactggcaatccgtcagctggcatcagtcatcttgaaacaatatgtggagactcactggtgtgcccaatcagagaaatttaggcctcctgaaactacag

SEQ ID NO: 730887 - DNA, 120 bp, Artificial Sequence
  ENSG00000198700_3 (sequence is synthesized)
aaagggcaaaaattgttatccgggagctattgcctaatgggttgagagaatcgataagcaaagtgcgctccagtgtggcctatgcagtgtcagccattgcccactgggactggcctgaag

SEQ ID NO: 730888 - DNA, 120 bp, Artificial Sequence
  ENSG00000198700_4 (sequence is synthesized)
cttggccccaactcttcaacctgctcatggagatgttggtgagcggagacttaaatgccgtccatggagccatgcgtgtgctgacagaattcactcgtgaagtaacagacacacagatgc

SEQ ID NO: 730889 - DNA, 120 bp, Artificial Sequence
  ENSG00000198700_5 (sequence is synthesized)
cacttgttgctcctgtcattctcccagagatgtataagatcttcaccatggctgaggtgtatggtattcgaacccgttcccgagccgtggagatttttaccacttgtgcccatatgatct

SEQ ID NO: 730890 - DNA, 120 bp, Artificial Sequence
  ENSG00000198700_6 (sequence is synthesized)
gtaacatggaggagctggaaaagggtgcagccaaagtcctgatctttcccgtggtacagcagttcacagaggcctttgttcaggccctccagataccagatggccccacatctgacagtg

SEQ ID NO: 730891 - DNA, 120 bp, Artificial Sequence
  ENSG00000198700_7 (sequence is synthesized)
ggtttaagatggaggtcctaaaggcagtgacagccctagtgaaaaacttcccaaagcacatggtgtcctccatgcagcagattctgcctattgtttggaacaccctaaccgagagtgcag

SEQ ID NO: 730892 - DNA, 120 bp, Artificial Sequence
  ENSG00000198700_8 (sequence is synthesized)
ctttttatgtgaggacagaagtaaattacacagaagaagtagaagatcctgtggattctgatggtgaagtcctgggctttgaaaatctcgtctttagcatttttgaatttgtccatgctc

SEQ ID NO: 730893 - DNA, 120 bp, Artificial Sequence
  ENSG00000198700_9 (sequence is synthesized)
tactagaaaatagcaaattcaaaagcactgttaagaaagccttgcctgaattgatttattatattatcctgtacatgcaaatcactgaggagcagattaaagtatggacagccaaccccc

SEQ ID NO: 730894 - DNA, 120 bp, Artificial Sequence
  ENSG00000198700_10 (sequence is synthesized)
aacaatttgtagaagatgaagatgatgatacattctcctatactgttagaatagcagctcaagacttgttgctggctgtggccacagatttccagaatgaaagtgcagcagccctggctg

SEQ ID NO: 730895 - DNA, 120 bp, Artificial Sequence
  ENSG00000198700_11 (sequence is synthesized)
ctgcagccactcgacatttacaagaagctgagcaaaccaaaaacagtggcactgagcactggtggaagatccatgaggcatgcatgcttgccctaggctcagtgaaggccatcatcactg

SEQ ID NO: 730896 - DNA, 120 bp, Artificial Sequence
  ENSG00000198700_12 (sequence is synthesized)
acagtgtgaaaaatggcaggattcattttgacatgcatgggttcctgaccaatgtcatccttgcagacctcaacctctcagtgtctcctttcctcttgggccgggcactttgggctgcca

SEQ ID NO: 730897 - DNA, 120 bp, Artificial Sequence
  ENSG00000198700_13 (sequence is synthesized)
gtcggttcactgttgctatgtcccctgaactgatccagcagttcctacaggcaacagttagtggtcttcacgagacacagcccccatcagttcgaatttctgcagtgagagccatctggg

SEQ ID NO: 730898 - DNA, 120 bp, Artificial Sequence
  ENSG00000198700_14 (sequence is synthesized)
gttattgtgaccaactgaaagtctcagagagtacccacgtgctccagcccttcctccccagcatccttgatggcttaattcacctagcagcccagttcagctcagaggtcctcaacctgg

SEQ ID NO: 730899 - DNA, 120 bp, Artificial Sequence
  ENSG00000198700_15 (sequence is synthesized)
tgatggagaccctgtgcatcgtttgtacagtagaccccgaattcacagcaagcatggaaagcaaaatctgccccttcaccatcgccattttcctaaagtacagtaatgatcccgtcgtcg

SEQ ID NO: 730900 - DNA, 120 bp, Artificial Sequence
  ENSG00000198700_16 (sequence is synthesized)
cctcactggctcaggacatcttcaaggagctgtcccagattgaagcctgtcagggcccaatgcaaatgaggctgattcccactctggtcagcataatgcaggccccagcagacaagattc

SEQ ID NO: 730901 - DNA, 120 bp, Artificial Sequence
  ENSG00000198700_17 (sequence is synthesized)
ctgcagggctttgtgcgacagccattgatatcctgacaacagtagtacgaaatacaaagcctcccctttcccagcttctcatctgccaagctttccctgctgtggcacagtgtacccttc

SEQ ID NO: 730902 - DNA, 120 bp, Artificial Sequence
  ENSG00000198700_18 (sequence is synthesized)
acacagatgacaatgccaccatgcagaatggcggagagtgcttgcgggcctatgtgtcagtgaccctggaacaagtagcccagtggcatgatgagcagggccacaatggactgtggtatg

SEQ ID NO: 730903 - DNA, 120 bp, Artificial Sequence
  ENSG00000198700_19 (sequence is synthesized)
tgatgcaagtggtgagccagctcctggacccccgcacctcagagttcactgcggcctttgtgggccgccttgtttccaccctcatctccaaggcagggcgggaactcggggagaatctag

SEQ ID NO: 730904 - DNA, 120 bp, Artificial Sequence
  ENSG00000198700_20 (sequence is synthesized)
accagattcttcgtgccatcctcagtaagatgcagcaggcagagacgctcagtgtcatgcagtccctgatcatggtgttcgctcatctggtgcacactcagctagaacctctcttggagt

SEQ ID NO: 730905 - DNA, 120 bp, Artificial Sequence
  ENSG00000198700_21 (sequence is synthesized)
tcctgtgtagcctcccaggacctactggcaaacctgctctagagtttgtgatggctgagtggacaagccgacagcacctgttctatggacagtatgaaggcaaagtcagctctgtggcac

SEQ ID NO: 730906 - DNA, 120 bp, Artificial Sequence
  ENSG00000198700_22 (sequence is synthesized)
tctgtaagctgctccagcatggcatcaatgcagatgacaaacggctacaggatatccgtgtgaagggagaggagatctacagcatggatgagggcatccgcacccgctctaagtcagcca

SEQ ID NO: 730907 - DNA, 120 bp, Artificial Sequence
  ENSG00000198700_23 (sequence is synthesized)
aaaacccagaacgctggacaaacattcctttgctggtcaagatcctaaagctgatcatcaacgagctctccaacgtcatggaggctaatgccgctcgccaggccactcctgcagagtgga

SEQ ID NO: 730908 - DNA, 120 bp, Artificial Sequence
  ENSG00000198700_24 (sequence is synthesized)
gtcaagatgactccaatgatatgtgggaggaccaggaggaggaagaggaggaggaggaggatggtttagctggccaacttttatctgacattcttgctacaagtaaatatgaggaggatt

SEQ ID NO: 730909 - DNA, 120 bp, Artificial Sequence
  ENSG00000198700_25 (sequence is synthesized)
actacgaggatgatgaggaagatgaccctgatgccctgaaggatcctctctatcagattgatctgcaggcatatctcacagatttcctctgccagtttgctcagcagccctgctacataa

SEQ ID NO: 730910 - DNA, 120 bp, Artificial Sequence
  ENSG00000198700_26 (sequence is synthesized)
tgttttcaggccaccttaatgacaatgagaggcgagttctacagaccatcggcatctaaaaaggggagcctttctacatttgctccttctgggccagccgcaaaccattttgcagccctc

SEQ ID NO: 730911 - DNA, 120 bp, Artificial Sequence
  ENSG00000198700_27 (sequence is synthesized)
actggccttgagatgcactttcttctcaacctaaagtggcatcttgacccttggcccttggcctcggcagtgacactgatgacaattcagaccaggctcaccggtgccgtcacttaggaa

SEQ ID NO: 730912 - DNA, 120 bp, Artificial Sequence
  ENSG00000198700_28 (sequence is synthesized)
tgctggaacaaaggacatttctcaaagttcccctgaagacatgccatctctagaaccttttttctccccgactctacccccacctctgttcctagagccctctgctggcgagtccagaaa

SEQ ID NO: 730913 - DNA, 120 bp, Artificial Sequence
  ENSG00000198700_29 (sequence is synthesized)
cattattgcccagaaggattatgtgtttatggattattttgccccgcctcaggagcgcaggaagtcactaccatttatattctaaaacagacctatctatgttcataggacttctgatgt

SEQ ID NO: 730914 - DNA, 120 bp, Artificial Sequence
  ENSG00000198700_30 (sequence is synthesized)
gttcagataggaatcctcatgagagatcattatgctttgtgccctggaccactgctgctctgggttctcaggaggaacaggcaagagcagcttcattctaagcctttccagtgacctcag

SEQ ID NO: 730915 - DNA, 120 bp, Artificial Sequence
  ENSG00000198700_31 (sequence is synthesized)
ccttgcttctcttctacaacactaaggctcctctgtcagaggaggtcgtcttgtttttgcttcattgcatgacataacccttcccctcaagctgttcctatatatacatgcacacacaaa

SEQ ID NO: 730916 - DNA, 120 bp, Artificial Sequence
  ENSG00000198700_32 (sequence is synthesized)
ataagccagacagatggcaatttgatcttccttttttagaaaaaaaaaaaaaaatggggaaaagggattttttttaaatccacctgacccaactatatttaatatgcctctcccacacat

SEQ ID NO: 730917 - DNA, 120 bp, Artificial Sequence
  ENSG00000198700_33 (sequence is synthesized)
taccacagagtctgatattcaaaggttatcccctttccctcaggaagcctctaaagtgcttaagttgtagccctcaaatttgcaacatgtatttttctaggacagtaaagtaatctttac

SEQ ID NO: 730918 - DNA, 120 bp, Artificial Sequence
  ENSG00000198700_34 (sequence is synthesized)
aaatgaatttagttgcatggtataaggtgtctcagcacctgtttgccttctattccctttagaaggtaagtaaaagtaatgggggaaaggattaggtggagcctgtctaaacattctagt

SEQ ID NO: 730919 - DNA, 120 bp, Artificial Sequence
  ENSG00000198700_35 (sequence is synthesized)
gtgtcttggcaaacatagcctgaaatgattcttaaagaactggcattgtttaatcaaatatttttaagggagattccttaattgggaagtttagtctgtttggggttcaaagagtaaatg

SEQ ID NO: 730920 - DNA, 81 bp, Artificial Sequence
  ENSG00000198700_36 (sequence is synthesized)
attgggaagtttagtctgtttggggttcaaagagtaaatgaggattagaaaatcatggagagaggctgggcgcggtggcta

SEQ ID NO: 730921 - DNA, 90 bp, Artificial Sequence
  ENSG00000198700_37 (sequence is synthesized)
gcaagactaatcatggggagaaagatgaaacctgtgttcccctttttttggtagtgcccacatctggtgccccatttttaataaccacag

SEQ ID NO: 730922 - DNA, 120 bp, Artificial Sequence
  ENSG00000198700_38 (sequence is synthesized)
gtagtgcccacatctggtgccccatttttaataaccacaggatatttctttagattgatattctcacaaagaagaaatagaatataggctgggcgtggtgtgtcacacctgtaatcccag

SEQ ID NO: 730923 - DNA, 61 bp, Artificial Sequence
  ENSG00000198700_39 (sequence is synthesized)
aatataggctgggcgtggtgtgtcacacctgtaatcccagcacttacggaggccgaagcca

SEQ ID NO: 730924 - DNA, 120 bp, Artificial Sequence
  ENSG00000198700_40 (sequence is synthesized)
aaactctgtctcaaaaaaaaaaaagagaaagaatataaagtgaatctgaatctccactcaaggggatggccccaaggatattgtagctggtaatttcttcatgccactaggtgtccccag

SEQ ID NO: 730925 - DNA, 120 bp, Artificial Sequence
  ENSG00000198700_41 (sequence is synthesized)
tgttcaacctccatgactgagattggaagaagtagagttaaaagtttttactacctttgagaagcctgcgggcatgttcacagtcgtcccatgccagccaggttctgaggctaactgctt

SEQ ID NO: 730926 - DNA, 120 bp, Artificial Sequence
  ENSG00000198700_42 (sequence is synthesized)
gtgcccctgctgcttcacatggcattgtgggagttgctgatactggggaaatgatggcagatctgaccaagtggtgctgagaaaaccaccctcggccttgcagactccatagtttatctc

SEQ ID NO: 730927 - DNA, 120 bp, Artificial Sequence
  ENSG00000198700_43 (sequence is synthesized)
aaggcagtgccagtcggatttggtgctaaaggcataaggccaagtcagcctctgatattggcacaaaagaatggtctcatgccagtagcattgaactgctgagcttgggaaggcttaagg

SEQ ID NO: 730928 - DNA, 120 bp, Artificial Sequence
  ENSG00000198700_44 (sequence is synthesized)
ctcccacacacagactgagaatgatgggggtccctctgcgtctgctaattagacaaacattctatatctagtgccaaaagtggtcctaaatcctttggcaagggtcctttctgctctcat

SEQ ID NO: 730929 - DNA, 120 bp, Artificial Sequence
  ENSG00000198700_45 (sequence is synthesized)
actgggcatcctgcctcaggagaacttgagtcctgaggaaagggccctagtaacacttaagggctacccctggctaacagatactcggctgtgggtgagagcagaaggtcttggacccct

SEQ ID NO: 730930 - DNA, 120 bp, Artificial Sequence
  ENSG00000198700_46 (sequence is synthesized)
cgatgtgcaggtacttaattgtgtttccagtgcattttcatatacattatcccatttaacctttataacaggttcacagagtggatattcccattctgttgatgagaaaaagagtggaga

SEQ ID NO: 730931 - DNA, 120 bp, Artificial Sequence
  ENSG00000198700_47 (sequence is synthesized)
gactgtgtccagtgtcagcaggaagaaaaaagatctgttggaggccagtacatgttgacagaaactctagaccatattttgtctcctgtctttggccaaagagaactagcttcagtctga

SEQ ID NO: 730932 - DNA, 120 bp, Artificial Sequence
  ENSG00000198700_48 (sequence is synthesized)
aaagggcagggctaagtggttacaaggaactaaaaagttcaaggtaagacaaatgaggtaaaaataaaaaagagcacttagctgctctgagacattttagtctcctgactggtaaacagc

SEQ ID NO: 730933 - DNA, 120 bp, Artificial Sequence
  ENSG00000198700_49 (sequence is synthesized)
agctggggcaccaaggggctcccaggagtttgtcgagcttttattggagtgaactgaaaggaaaatggaaggaatgctataagactgaaaagaagttaaagccctaggaaggaagctgat

SEQ ID NO: 730934 - DNA, 120 bp, Artificial Sequence
  ENSG00000198700_50 (sequence is synthesized)
aacacaagttacagacgtatatgtgacattgatttgggagaatgaacctacaacaaatgacccaaaagcacctaaataagagtgacgagagtttaacagacattcattatggacttcaga

SEQ ID NO: 730935 - DNA, 120 bp, Artificial Sequence
  ENSG00000198700_51 (sequence is synthesized)
gaaaatgatgctaaactggtcttagaatcttctttaattttgttaactaggtaaataatctggacattttagtcaaagcattagacagacagagaagttggtaactgaccactaactaac

SEQ ID NO: 730936 - DNA, 120 bp, Artificial Sequence
  ENSG00000198700_52 (sequence is synthesized)
aaactataaattcacccattgtgggttgacctggtaagttcccccagggctgtgtccttggcccctcctttgatattagtgacagatgactttttttatgccttacccattccacaaaag

SEQ ID NO: 730937 - DNA, 120 bp, Artificial Sequence
  ENSG00000198700_53 (sequence is synthesized)
aatttgaagccatttacacaagagatagtactagtaaattaggagtgctgatcaaatttttagataataagaaacccttaggaaggatgacaatttagaatccaaatttaggatccaaac

SEQ ID NO: 730938 - DNA, 120 bp, Artificial Sequence
  ENSG00000198700_54 (sequence is synthesized)
aaataccattacaaactataaaaatgagcagaatctaaatgtaacatttcaataaatgcagattgataataacatctgtgcagagttgaggactatagagtactgtgctgtcactaacag

SEQ ID NO: 730939 - DNA, 65 bp, Artificial Sequence
  ENSG00000198700_55 (sequence is synthesized)
cagagttgaggactatagagtactgtgctgtcactaacagtattgtgtgctactaagagtttagg

SEQ ID NO: 730940 - DNA, 71 bp, Artificial Sequence
  ENSG00000198700_56 (sequence is synthesized)
taaagtttattatgccaggagggccaggtgtggtgccacacccatgtaatcccagcactttaggaggctga

SEQ ID NO: 730941 - DNA, 120 bp, Artificial Sequence
  ENSG00000198700_57 (sequence is synthesized)
aatcccagcactttaggaggctgaggagggcagatcacttaagcccaagagtttgagaccagtctgggcaatgtggcaataccttgtctcttaaaatttaaaataaaaaaaaagtttatt

SEQ ID NO: 730942 - DNA, 120 bp, Artificial Sequence
  ENSG00000198700_58 (sequence is synthesized)
atgccaggaactgttaatgtgtccaaaaaaactccagtgtggttctaggatgagataataaaaacaggttgtctagggtagtgtggaaggtcctttcagtcttcctgtgcctatcagtga

SEQ ID NO: 730943 - DNA, 120 bp, Artificial Sequence
  ENSG00000198700_59 (sequence is synthesized)
tcctcattgccatgttcccttctggtgctcaaccggaggctccctgacagatgagtcctctgccagaggaaggctaagatgtagaggacaaatcgtgtcaaggaaaagaagcttgaagga

SEQ ID NO: 730944 - DNA, 120 bp, Artificial Sequence
  ENSG00000198700_60 (sequence is synthesized)
gctaagaatgcttagcttagagaagacaagaggaaacaggacatggctttgggaagttcaaggatggtccagtgaaatacatactatacttttgcaccccagctaagctgacccatgatc

SEQ ID NO: 730945 - DNA, 120 bp, Artificial Sequence
  ENSG00000198700_61 (sequence is synthesized)
agtaagtaggaaataaaaggccaatttctggctactcttgcccccaaccccatttcagtgaactatgaacctctattagatatgcaaggccggtgctaaatgctggagggctttggccct

SEQ ID NO: 730946 - DNA, 120 bp, Artificial Sequence
  ENSG00000198700_62 (sequence is synthesized)
ttccctcaaggagctagtctagtagggggtcagaaatacagatgggcctgaacataatgatggtttgacttccagtttttcaactttaggattgtgcaaaagctatacacattcggtaga

SEQ ID NO: 730947 - DNA, 90 bp, Artificial Sequence
  ENSG00000198700_63 (sequence is synthesized)
caactttaggattgtgcaaaagctatacacattcggtagaaacagtacttcaagtatccatacaacattcaacactttattataaaatag

SEQ ID NO: 730948 - DNA, 120 bp, Artificial Sequence
  ENSG00000198700_64 (sequence is synthesized)
aagtgatctgagtaggtttaaggtagcctaggtgtattaaatgcatttttcacttaacggtattttcaacttttgttgggtttattgggatgtagccccattataagctgaaaagcatct

SEQ ID NO: 730949 - DNA, 120 bp, Artificial Sequence
  ENSG00000198700_65 (sequence is synthesized)
gtagtataataaatgtggggagtgctgtgagagaaataagtgtactgggtttagttcccactgcccaaaaaaggaactggctaatggtaacctgggggaggaagtcgggtaagttgcatg

SEQ ID NO: 730950 - DNA, 120 bp, Artificial Sequence
  ENSG00000198700_66 (sequence is synthesized)
gagaaggcaacccttgaacacttgcaaggagctaacaatacctgcttctggagtatttaaacgccagtgggtatgctaaatacttttacctcagaccacctactaaccttacaaagtagt

SEQ ID NO: 730951 - DNA, 120 bp, Artificial Sequence
  ENSG00000198700_67 (sequence is synthesized)
ccactttgctcacccagttttacagattgatgaaactgaagcagacagatattgttaacctatcaaaggtcaccctgcaagtgtgtgattatagtccaagcagcttgtacttgttgccta

SEQ ID NO: 730952 - DNA, 120 bp, Artificial Sequence
  ENSG00000198700_68 (sequence is synthesized)
tttgttttgcctttcctgtgcatttgccaggcagatgagagtggggtaagacattgcagagaaaaagtaagaaaaggccgtcatgaaacaatttcattttcagaccttataagcacgtta

SEQ ID NO: 730953 - DNA, 120 bp, Artificial Sequence
  ENSG00000198700_69 (sequence is synthesized)
caagtactgatatttatgcttaagttcacgggagtcctggccagaaataaagctggaaggacaagtggggggcagattgtgaaggatccttcaagacctgcttcctctagagaatgggag

SEQ ID NO: 730954 - DNA, 120 bp, Artificial Sequence
  ENSG00000198700_70 (sequence is synthesized)
actacccaagataactaaacagggaagtgatcaggttttgtgtcttagaaaagtgttgcagtgttgatgcaaatgtgactagaagggtgacttggaacctggattgaaggggtgggagat

SEQ ID NO: 730955 - DNA, 120 bp, Artificial Sequence
  ENSG00000198700_71 (sequence is synthesized)
gggagaaaggaatgcagtctggcagcagctacagcagtccaggtgggaaaacccagagcctgaactaaggttgtaactagaggggatagggtggaagagctggattagagatgttgacaa

SEQ ID NO: 730956 - DNA, 120 bp, Artificial Sequence
  ENSG00000198700_72 (sequence is synthesized)
gataaagtcagtaggacttaaagactgacaagtaaggattttccaaaagtgagagctgtggaatgaattgtcttaaaatgttgcagtgagttcctcctcatcaatccaagtgctcgatca

SEQ ID NO: 730957 - DNA, 120 bp, Artificial Sequence
  ENSG00000198700_73 (sequence is synthesized)
gaggctagacctttagttagcagtcacgggaaaattccccattctcacggggatttagactaggtcttaaccatactttaccaagattccagtagcaaagcacccaaaagtaatcgcaat

SEQ ID NO: 730958 - DNA, 83 bp, Artificial Sequence
  ENSG00000198700_74 (sequence is synthesized)
acagagcgacactctgttgtgaatttaagtttccctaatggatggtacaggtcaacatttgccatctaatgacacttacattc

SEQ ID NO: 730959 - DNA, 120 bp, Artificial Sequence
  ENSG00000198700_75 (sequence is synthesized)
ggtacaggtcaacatttgccatctaatgacacttacattccagttttttccttttttgagtaactgggaaaagggtggcattactgctggcttcctaaaattgaaaagtatactagggtt

SEQ ID NO: 730960 - DNA, 120 bp, Artificial Sequence
  ENSG00000198700_76 (sequence is synthesized)
tttaaacctgtgtagaatacatgatatggtagcaaatgtgctgtaggaagaaaagcaatgaggaactactggcctgactaggaggcctagaagtccctcccaggcttgagttgttctgac

SEQ ID NO: 730961 - DNA, 120 bp, Artificial Sequence
  ENSG00000198700_77 (sequence is synthesized)
ttggcatgattacatagctgcggcaagtgacgtttccttcaagccttggttccctcatctgtaaaatagggaactaatacctacctcacaggattgtagttagaattaaggatgacttca

SEQ ID NO: 730962 - DNA, 120 bp, Artificial Sequence
  ENSG00000198700_78 (sequence is synthesized)
ttaaagcacctctagtggtggaagatgtcccatcctatcccccacccatagctgggagctatgtttggctcattcttcctgactcactggattacactgtgactcagttcaatttcacac

SEQ ID NO: 730963 - DNA, 120 bp, Artificial Sequence
  ENSG00000198700_79 (sequence is synthesized)
atgctgctgctaaattagggtcttggtgagcctttgggaggacagctctgaggaatgaattgtagcactgcagccctgcctgaggaacatgatagaaacaggtggtaggcccagctcttg

SEQ ID NO: 730964 - DNA, 120 bp, Artificial Sequence
  ENSG00000198700_80 (sequence is synthesized)
ccttccacctactaagcagtttttctgtggttagctgtgtgacataaactatcggtgtattaatttgctttcactagattcccccccccccaacaacttagtccaagaacatacctgaat

SEQ ID NO: 730965 - DNA, 120 bp, Artificial Sequence
  ENSG00000198700_81 (sequence is synthesized)
tctttgcatttccttgccttagttgcttttgtagggtggacagcaggactgcatgagaatagctgtgcttctggaccctatggtgaaagctctagtgaactgcaattaggcccagggtcc

SEQ ID NO: 730966 - DNA, 120 bp, Artificial Sequence
  ENSG00000198700_82 (sequence is synthesized)
cggaggaagaaggggagagaaaaaggggggtagttttccaaaagataagtaggggacaaaaaagtccacggggcctatgagcggtgagactcctgccctgattgtggcaaagcacctgga

SEQ ID NO: 730967 - DNA, 120 bp, Artificial Sequence
  ENSG00000198700_83 (sequence is synthesized)
gatgatagaacttcctagggaaaaggctgcatggagtccccagggatgctgggccctggtcaccaaggctccctgggaaggtctcttgtacctggggcacacagaccaacacttctgaat

SEQ ID NO: 730968 - DNA, 120 bp, Artificial Sequence
  ENSG00000198700_84 (sequence is synthesized)
ttgcaagcttaagagcatgtatgagcagaacctgtgcagaccaaggcttagagggctcacctcaatgttttgcactgtgtgagaccccaggaccttttcgtgattctggagaggggaaca

SEQ ID NO: 730969 - DNA, 120 bp, Artificial Sequence
  ENSG00000198700_85 (sequence is synthesized)
aaccataataacaacaaaccaggtagcaggatagagactcattctcatctattttggttaaaagaaaataaatgtatttcttccacacctgattttgtgattgcaaattcataactaata

SEQ ID NO: 730970 - DNA, 120 bp, Artificial Sequence
  ENSG00000198700_86 (sequence is synthesized)
tccctcgtcagctccgctgactcatccctgccacagggaggttcacagcaagagcacagaaactagggccagtgcccggttgtgtgaccttgagtaagttctttttcccttgaacaggga

SEQ ID NO: 730971 - DNA, 120 bp, Artificial Sequence
  ENSG00000198700_87 (sequence is synthesized)
gagagacacaatggatcagagtgtctctgccagttctaacttggggattctagtgggttgaaccgaacggtagtccgtttccaaaagaggaagccaagaccagagggggagtggttcctt

SEQ ID NO: 730972 - DNA, 120 bp, Artificial Sequence
  ENSG00000198700_88 (sequence is synthesized)
caagtttgcagaaccagtaagtggcagagcaggactcatatctagttagtggttcagagcatgggctccggagctagactgcctggatttgaaccctggctttgccacttgcctgttggg

SEQ ID NO: 730973 - DNA, 120 bp, Artificial Sequence
  ENSG00000198700_89 (sequence is synthesized)
tgactttggacaagctgcttaaattatgtctccatttcctaatccacagaacaagtgtaatactagttatctgtttcatggagtgattgtgaggattaaataaagttaatataacacaaa

SEQ ID NO: 730974 - DNA, 120 bp, Artificial Sequence
  ENSG00000198700_90 (sequence is synthesized)
aactaaggctcatggtgtaaaggaaatgcaaatatagcagctaaggattagaagatttgatccaccagatacagctttttcttcgttctcaaagaagtttggagattgagatgttgctgg

SEQ ID NO: 730975 - DNA, 120 bp, Artificial Sequence
  ENSG00000198700_91 (sequence is synthesized)
agtcctagaatttttctgacttgctgaatcacctcagaaaacttttggaattaaacctataaagtattaataaattgataccagggatgagtataggagagtaaaaagcagtcaagcact

SEQ ID NO: 730976 - DNA, 120 bp, Artificial Sequence
  ENSG00000198700_92 (sequence is synthesized)
ttattagcagaattaaattatactgtatttttcataaaacttgttattatgccatctatcatatttgtttggactaatttccttgaatttctaaataaaatagaacactcaccattcaaa

SEQ ID NO: 730977 - DNA, 120 bp, Artificial Sequence
  ENSG00000198704_0 (sequence is synthesized)
aaaaggggctgaaatcctggggacctcagagtcgtctaaaactcctagccatgttccagcagttccaggcctcctgtcttgtcctgtttttcctggttggctttgctcagcagaccctaa

SEQ ID NO: 730978 - DNA, 120 bp, Artificial Sequence
  ENSG00000198704_1 (sequence is synthesized)
agcctcaaaataggaaggtggattgcaacaaaggggtaacaggcaccatctatgagtatggagccctcaccctcaacggcgaggagtacatccaattcaagcagtttgcaggcaagcacg

SEQ ID NO: 730979 - DNA, 120 bp, Artificial Sequence
  ENSG00000198704_2 (sequence is synthesized)
tcctgtttgtcaatgtggccgcctattgaggcttggcagctcagtatcctgaactgaatgcactacaggaggagctgaagaattttggtgtcattgtgttggcctttccctgcaaccagt

SEQ ID NO: 730980 - DNA, 120 bp, Artificial Sequence
  ENSG00000198704_3 (sequence is synthesized)
ttggaaaacaagaaccaggaacaaactcagaaatacttcttggtctcaagtatgtgtgtccaggtagtggctttgtccccagtttccagctctttgagaaaggggatgtgaatggagaaa

SEQ ID NO: 730981 - DNA, 120 bp, Artificial Sequence
  ENSG00000198704_4 (sequence is synthesized)
aagaacagaaggtctttactttcctgaagaactcctgccctccgacctctgatcttttgggctcatcaagccaactcttctgggagcccatgaaggtccatgatatccgctggaactttg

SEQ ID NO: 730982 - DNA, 120 bp, Artificial Sequence
  ENSG00000198704_5 (sequence is synthesized)
agaaatttctggtggggcccgatggagtccctgtcatgcattggttccaccaggctccagtcagcacagtcaagtcagacatcctggagtacctaaagcagttcaatacccactaggaag

SEQ ID NO: 730983 - DNA, 120 bp, Artificial Sequence
  ENSG00000198704_6 (sequence is synthesized)
ggctagcgactgacagaaataactaccctgtctcccacctgcaggaatgtctaacaaagcatccatcttcctccttctttgctccacactcgtgcctacccagcctcctgatgaccaaac

SEQ ID NO: 730984 - DNA, 90 bp, Artificial Sequence
  ENSG00000198704_7 (sequence is synthesized)
cctgcttagcatgtgtgtgtagctatgtagaattgtatttgttggtatatgcataggtgtatgtatggtgtgtgtgtgtgtgtgtgtgtg

SEQ ID NO: 730985 - DNA, 120 bp, Artificial Sequence
  ENSG00000198704_8 (sequence is synthesized)
ttaaggaaaagaacacctatctctccaactctctgatcctgaaatatctattccaaaggaaaatcatattttagggtagatgaatcagactatcctgtgtccctaaaaaagcaatcccga

SEQ ID NO: 730986 - DNA, 120 bp, Artificial Sequence
  ENSG00000198704_9 (sequence is synthesized)
gaagttgtgacatctatcccttccccttcctgaaagttttaaagaaagcaggagctggccgcaagactctaggcctccttcatagcctctctcctctaagataggcatgcattgttaaac

SEQ ID NO: 730987 - DNA, 120 bp, Artificial Sequence
  ENSG00000198704_10 (sequence is synthesized)
tcttttctccttaattctcctttattcccctgccacccagtagttctcatgtaggacctctgaaggcagagtgagagcagaaaccccacctcacatgaagggaagggcatctccatgatg

SEQ ID NO: 730988 - DNA, 120 bp, Artificial Sequence
  ENSG00000198704_11 (sequence is synthesized)
gtggatcccaaaacccctctgggtcgcaccctgccagagccttccttggtgcctgtcccttagtgcattcaggtcatggcacctgggcaggggtgtccctgtattctgaatgatgggctt

SEQ ID NO: 730989 - DNA, 120 bp, Artificial Sequence
  ENSG00000198704_12 (sequence is synthesized)
tctcctcaccctgagcctcctcaactttaagcttattttgatcactgtctcaaatttaaaaattctgcagcaacctggctctgtgtggtgttttcccagtcccatattatgtccagtcat

SEQ ID NO: 730990 - DNA, 120 bp, Artificial Sequence
  ENSG00000198704_13 (sequence is synthesized)
acttcttctttctctgtcactttgtccctgctttcttgattcccttgtcttgttcttcagtattttgtttttctcaaaaatgctctagaactttccttggcacatataaaagcacggctg

SEQ ID NO: 730991 - DNA, 120 bp, Artificial Sequence
  ENSG00000198704_14 (sequence is synthesized)
atggtggtcatgtaagccaatactctgaaatcccagcttttggtagctctcaagaaaggagatggagaaccctaaagtccatctgcaatgttcatgcagtaccccaagtgtaccgatgcc

SEQ ID NO: 730992 - DNA, 120 bp, Artificial Sequence
  ENSG00000198704_15 (sequence is synthesized)
acagtgctcaccagcacatgctgatcccttttcttatactggggaagctgccacaaattgctcatggaatacagaatatatatgacaggaatatgaaaaggaagctctatgtccaaacca

SEQ ID NO: 730993 - DNA, 120 bp, Artificial Sequence
  ENSG00000198707_0 (sequence is synthesized)
attctggccttggcggagttggggatggtgtcgcctagcagccgctgccgctttggcttgctcgggaccatttggctggacccagagtccgcgtggaaccgcgatagggatctgtcaggg

SEQ ID NO: 730994 - DNA, 120 bp, Artificial Sequence
  ENSG00000198707_1 (sequence is synthesized)
cccgcggccgggtccagcttggtggttgcggtagtgagaggcctccgctggttgccaggcttggtctagaggtggagcacagtgaaagaattcaagatgccacctaatataaactggaaa

SEQ ID NO: 730995 - DNA, 120 bp, Artificial Sequence
  ENSG00000198707_2 (sequence is synthesized)
gaaataatgaaagttgacccagatgacctgccccgtcaagaagaactggcagataatttattgatttccttatccaaggtggaagtaaatgagctaaaaagtgaaaagcaagaaaatgtg

SEQ ID NO: 730996 - DNA, 120 bp, Artificial Sequence
  ENSG00000198707_3 (sequence is synthesized)
atacaccttttcagaattactcagtcactaatgaagatgaaagctcaagaagtggagctggctttggaagaagtagaaaaagctggagaagaacaagcaaaatttgaaaatcaattaaaa

SEQ ID NO: 730997 - DNA, 120 bp, Artificial Sequence
  ENSG00000198707_4 (sequence is synthesized)
actaaagtaatgaaactggaaaatgaactggagatggctcagcagtctgcaggtggacgagatactcggtttttacgtaatgaaatttgccaacttgaaaaacaattagaacaaaaagat

SEQ ID NO: 730998 - DNA, 120 bp, Artificial Sequence
  ENSG00000198707_5 (sequence is synthesized)
agagaattggaggacatggaaaaggagttggagaaagagaagaaagttaatgagcaattggctcttcgaaatgaggaggcagaaaatgaaaacagcaaattaagaagagagaacaaacgt

SEQ ID NO: 730999 - DNA, 120 bp, Artificial Sequence
  ENSG00000198707_6 (sequence is synthesized)
ctaaagaaaaagaatgaacaactttgtcaggatattattgactaccagaaacaaatagattcacagaaagaaacacttttatcaagaagaggggaagacagtgactaccgatcacagttg

SEQ ID NO: 731000 - DNA, 120 bp, Artificial Sequence
  ENSG00000198707_7 (sequence is synthesized)
tctaaaaaaaactatgagcttatccaatatcttgatgaaattcagactttaacagaagctaatgagaaaattgaagttcagaatcaagaaatgagaaaaaatttagaagagtctgtacag

SEQ ID NO: 731001 - DNA, 120 bp, Artificial Sequence
  ENSG00000198707_8 (sequence is synthesized)
gaaatggagaagatgactgatgaatataatagaatgaaagctattgtgcatcagacagataatgtaatagatcagttaaaaaaagaaaacgatcattatcaacttcaagtgcaggagctt

SEQ ID NO: 731002 - DNA, 120 bp, Artificial Sequence
  ENSG00000198707_9 (sequence is synthesized)
acagatcttctgaaatcaaaaaatgaagaagatgatccaattatggtagctgtcaatgcaaaagtagaagaatggaagctaattttgtcttctaaagatgatgaaattattgagtatcag

SEQ ID NO: 731003 - DNA, 120 bp, Artificial Sequence
  ENSG00000198707_10 (sequence is synthesized)
caaatgttacataacctaagggagaaacttaagaatgctcagcttgatgctgataaaagtaatgttatggctctacagcagggtatacaggaacgagacagtcaaattaagatgctcacc

SEQ ID NO: 731004 - DNA, 120 bp, Artificial Sequence
  ENSG00000198707_11 (sequence is synthesized)
gaacaagtagaacaatatacaaaagaaatggaaaagaatacttgtattattgaagatttgaaaaatgagctccaaagaaacaaaggtgcttcaaccctttctcaacagactcatatgaaa

SEQ ID NO: 731005 - DNA, 120 bp, Artificial Sequence
  ENSG00000198707_12 (sequence is synthesized)
attcagtcaacgttagacattttaaaagagaaaactaaagaggctgagagaacagctgaactggctgaggctgatgctagggaaaaggataaagaattagttgaggctctgaagaggtta

SEQ ID NO: 731006 - DNA, 120 bp, Artificial Sequence
  ENSG00000198707_13 (sequence is synthesized)
aaagattatgaatcgggagtatatggtttagaagatgctgtcgttgaaataaagaattgtaaaaaccaaattaaaataagagatcgagagattgaaatattaacaaaggaaatcaataaa

SEQ ID NO: 731007 - DNA, 120 bp, Artificial Sequence
  ENSG00000198707_14 (sequence is synthesized)
cttgaattgaagatcagtgatttccttgatgaaaatgaggcacttagagagcgtgtgggccttgaaccaaagacaatgattgatttaactgaatttagaaatagcaaacacttaaaacag

SEQ ID NO: 731008 - DNA, 120 bp, Artificial Sequence
  ENSG00000198707_15 (sequence is synthesized)
cagcagtacagagctgaaaaccagattcttttgaaagagattgaaagtctagaggaagaacgacttgatctgaaaaaaaaaattcgtcaaatggctcaagaaagaggaaaaagaagtgca

SEQ ID NO: 731009 - DNA, 120 bp, Artificial Sequence
  ENSG00000198707_16 (sequence is synthesized)
acttcaggattaaccactgaggacctgaacctaactgaaaacatttctcaaggagatagaataagtgaaagaaaattggatttattgagcctcaaaaatatgagtgaagcacaatcaaag

SEQ ID NO: 731010 - DNA, 120 bp, Artificial Sequence
  ENSG00000198707_17 (sequence is synthesized)
aatgaatttctttcaagagaactaattgaaaaagaaagagatttagaaaggagtaggacagtgatagccaaatttcagaataaattaaaagaattagttgaagaaaataagcaacttgaa

SEQ ID NO: 731011 - DNA, 120 bp, Artificial Sequence
  ENSG00000198707_18 (sequence is synthesized)
gaaggtatgaaagaaatattgcaagcaattaaggaaatgcagaaagatcctgatgttaaaggaggagaaacatctctaattatccctagccttgaaagactagttaatgctatagaatca

SEQ ID NO: 731012 - DNA, 120 bp, Artificial Sequence
  ENSG00000198707_19 (sequence is synthesized)
aagaatgcagaaggaatctttgatgcgagtctgcatttgaaagcccaagttgatcagcttaccggaagaaatgaagaattaagacaggagctcagggaatctcggaaagaggctataaat

SEQ ID NO: 731013 - DNA, 120 bp, Artificial Sequence
  ENSG00000198707_20 (sequence is synthesized)
tattcacagcagttggcaaaagctaatttaaagatagaccatcttgaaaaagaaactagtcttttacgacaatcagaaggatcaaatgttgtttttaaaggaattgacttacctgatggg

SEQ ID NO: 731014 - DNA, 120 bp, Artificial Sequence
  ENSG00000198707_21 (sequence is synthesized)
atagcaccatctagtgccagtatcattaattctcagaatgaatatttaatacatttgttacaggaactagaaaataaagaaaaaaagttaaagaatttagaagattctcttgaagattac

SEQ ID NO: 731015 - DNA, 120 bp, Artificial Sequence
  ENSG00000198707_22 (sequence is synthesized)
aacagaaaatttgctgtaattcgtcatcaacaaagtttgttgtataaagaatacctaagtgaaaaggagacctggaaaacagaatctaaaacaataaaagaggaaaagagaaaacttgag

SEQ ID NO: 731016 - DNA, 120 bp, Artificial Sequence
  ENSG00000198707_23 (sequence is synthesized)
gatcaagtccaacaagatgctataaaagtaaaagaatataataatttgctcaatgctcttcagatggattcggatgaaatgaaaaaaatacttgcagaaaatagtaggaaaattactgtt

SEQ ID NO: 731017 - DNA, 120 bp, Artificial Sequence
  ENSG00000198707_24 (sequence is synthesized)
ttgcaagtgaatgaaaaatcacttataaggcaatatacaaccttagtagaattggagcgacaacttagaaaagaaaatgagaagcaaaagaatgaattgttgtcaatggaggctgaagtt

SEQ ID NO: 731018 - DNA, 120 bp, Artificial Sequence
  ENSG00000198707_25 (sequence is synthesized)
tgtgaaaaaattgggtgtttgcaaagatttaaggaaatggccattttcaagattgcagctctccaaaaagttgtagataatagtgtttctttgtctgaactagaactggctaataaacag

SEQ ID NO: 731019 - DNA, 120 bp, Artificial Sequence
  ENSG00000198707_26 (sequence is synthesized)
tacaatgaactgactgctaagtacagggacatcttgcaaaaagataatatgcttgttcaaagaacaagtaacttggaacacctggagtgtgaaaacatctccttaaaagaacaagtggag

SEQ ID NO: 731020 - DNA, 120 bp, Artificial Sequence
  ENSG00000198707_27 (sequence is synthesized)
tctataaataaagaactggagattaccaaggaaaaacttcacactattgaacaagcctgggaacaggaaactaaattaggtaatgaatctagcatggataaggcaaagaaatcaataacc

SEQ ID NO: 731021 - DNA, 120 bp, Artificial Sequence
  ENSG00000198707_28 (sequence is synthesized)
aacagtgacattgtttccatttcaaaaaaaataactatgctggaaatgaaggaattaaatgaaaggcagcgggctgaacattgtcaaaaaatgtatgaacacttacggacttcgttaaag

SEQ ID NO: 731022 - DNA, 120 bp, Artificial Sequence
  ENSG00000198707_29 (sequence is synthesized)
caaatggaggaacgtaattttgaattggaaaccaaatttgctgagcttaccaaaatcaatttggatgcacagaaggtggaacagatgttaagagatgaattagctgatagtgtgagcaag

SEQ ID NO: 731023 - DNA, 120 bp, Artificial Sequence
  ENSG00000198707_30 (sequence is synthesized)
gcagtaagtgatgctgataggcaacggattctagaattagagaagaatgaaatggaactaaaagttgaagtgtcaaaactgagagagatttctgatattgccagaagacaagttgaaatt

SEQ ID NO: 731024 - DNA, 120 bp, Artificial Sequence
  ENSG00000198707_31 (sequence is synthesized)
ttgaatgcacaacaacaatctagggacaaggaagtagagtccctcagaatgcaactgctagactatcaggcacagtctgatgaaaagtcgctcattgccaagttgcaccaacataatgtc

SEQ ID NO: 731025 - DNA, 120 bp, Artificial Sequence
  ENSG00000198707_32 (sequence is synthesized)
gctcttggtaagttggagtcaattacatctaaactgcagaagatggaggcctacaacttgcgcttagagcagaaacttgatgaaaaagaacaggctctctattatgctcgtttggaggga

SEQ ID NO: 731026 - DNA, 120 bp, Artificial Sequence
  ENSG00000198707_33 (sequence is synthesized)
agaaacagagcaaaacatctgcgccaaacaattcagtctctacgacgacagtttagtggagctttacccttggcacaacaggaaaagttctccaaaacaatgattcaactacaaaatgac

SEQ ID NO: 731027 - DNA, 120 bp, Artificial Sequence
  ENSG00000198707_34 (sequence is synthesized)
aaacttaagataatgcaagaaatgaaaaattctcaacaagaacatagaaatatggagaacaaaacattggagatggaattaaaattaaagggcctggaagagttaataagcactttaaag

SEQ ID NO: 731028 - DNA, 120 bp, Artificial Sequence
  ENSG00000198707_35 (sequence is synthesized)
gataccaaaggagcccaaaaggtaatcaactggcatatgaaaatagaagaacttcgtcttcaagaacttaaactaaatcgggaattagtcaaggataaagaagaaataaaatatttgaat

SEQ ID NO: 731029 - DNA, 120 bp, Artificial Sequence
  ENSG00000198707_36 (sequence is synthesized)
aacataatttctgaatatgaacgtacaatcagcagtcttgaagaagaaattgtgcaacagaacaagtttcatgaagaaagacaaatggcctgggatcaaagagaagttgacctggaacgc

SEQ ID NO: 731030 - DNA, 120 bp, Artificial Sequence
  ENSG00000198707_37 (sequence is synthesized)
caactagacatttttgaccgtcagcaaaatgaaatactaaatgcggcacaaaagtttgaagaagctacaggatcaatccctgaccctagtttgccccttccaaatcaacttgagatcgct

SEQ ID NO: 731031 - DNA, 120 bp, Artificial Sequence
  ENSG00000198707_38 (sequence is synthesized)
ctaaggaaaattaaggagaacattcgaataattctagaaacacgggcaacttgcaaatcactagaagagaaactaaaagagaaagaatctgctttaaggttagcagaacaaaatatactg

SEQ ID NO: 731032 - DNA, 120 bp, Artificial Sequence
  ENSG00000198707_39 (sequence is synthesized)
tcaagagacaaagtaatcaatgaactgaggcttcgattgcctgccactgcagaaagagaaaagctcatagctgagctaggcagaaaagagatggaaccaaaatctcaccacacattgaaa

SEQ ID NO: 731033 - DNA, 120 bp, Artificial Sequence
  ENSG00000198707_40 (sequence is synthesized)
attgctcatcaaaccattgcaaacatgcaagcaaggttaaatcaaaaagaagaagtattaaagaagtatcaacgtcttctagaaaaagccagagaggagcaaagagaaattgtgaagaaa

SEQ ID NO: 731034 - DNA, 120 bp, Artificial Sequence
  ENSG00000198707_41 (sequence is synthesized)
catgaggaagaccttcatattcttcatcacagattagaactacaggctgatagttcactaaataaattcaaacaaacggcttgggatttaatgaaacagtctcccactccagttcctacc

SEQ ID NO: 731035 - DNA, 120 bp, Artificial Sequence
  ENSG00000198707_42 (sequence is synthesized)
aacaagcattttattcgtctggctgagatggaacagacagtagcagaacaagatgactctctttcctcactcttggtcaaactaaagaaagtatcacaagatttggagagacaaagagaa

SEQ ID NO: 731036 - DNA, 120 bp, Artificial Sequence
  ENSG00000198707_43 (sequence is synthesized)
atcactgaattaaaagtaaaagaatttgaaaatatcaaattacagcttcaagaaaaccatgaagatgaagtgaaaaaagtaaaagcggaagtagaggatttaaagtatcttctggaccag

SEQ ID NO: 731037 - DNA, 120 bp, Artificial Sequence
  ENSG00000198707_44 (sequence is synthesized)
tcacaaaaggagtcacagtgtttaaaatctgaacttcaggctcaaaaagaagcaaattcaagagctccaacaactacaatgagaaatctagtagaacggctaaagagccaattagccttg

SEQ ID NO: 731038 - DNA, 120 bp, Artificial Sequence
  ENSG00000198707_45 (sequence is synthesized)
aaggagaaacaacagaaagcacttagtcgggcacttttagaactccgggcagaaatgacagcagctgctgaagaacgtattatttctgcaacttctcaaaaagaggcccatctcaatgtt

SEQ ID NO: 731039 - DNA, 120 bp, Artificial Sequence
  ENSG00000198707_46 (sequence is synthesized)
caacaaatcgttgatcgacatactagagagctaaagacacaagttgaagatttaaatgaaaatcttttaaaattgaaagaagcacttaaaacaagtaaaaacagagaaaactcactaact

SEQ ID NO: 731040 - DNA, 120 bp, Artificial Sequence
  ENSG00000198707_47 (sequence is synthesized)
gataatttgaatgacttaaataatgaactgcaaaagaaacaaaaagcctataataaaatacttagagagaaagaggaaattgatcaagagaatgatgaactgaaaaggcaaattaaaaga

SEQ ID NO: 731041 - DNA, 120 bp, Artificial Sequence
  ENSG00000198707_48 (sequence is synthesized)
ctaaccagtggattacagggcaaacccctgacagataataaacaaagtctaattgaagaactccaaaggaaagttaaaaaactagagaaccaattagagggaaaggtggaggaagtagac

SEQ ID NO: 731042 - DNA, 120 bp, Artificial Sequence
  ENSG00000198707_49 (sequence is synthesized)
ctaaaacctatgaaagaaaagaatgctaaagaagaattaattaggtgggaagaaggtaaaaagtggcaagccaaaatagaaggaattcgaaacaagttaaaagagaaagagggggaagtc

SEQ ID NO: 731043 - DNA, 120 bp, Artificial Sequence
  ENSG00000198707_50 (sequence is synthesized)
tttactttaacaaagcagttgaatactttgaaggatctttttgccaaagccgataaagagaaacttactttgcagaggaaactaaaaacaactggcatgactgttgatcaggttttggga

SEQ ID NO: 731044 - DNA, 120 bp, Artificial Sequence
  ENSG00000198707_51 (sequence is synthesized)
atacgagctttggagtcagaaaaagaattggaagaattaaaaaagagaaatcttgacttagaaaatgatatattgtatatgagggcccaccaagctcttcctcgagattctgttgtagaa

SEQ ID NO: 731045 - DNA, 120 bp, Artificial Sequence
  ENSG00000198707_52 (sequence is synthesized)
gatttacatttacaaaatagatacctccaagaaaaacttcatgctttagaaaaacagttttcaaaggatacatattctaagccttcaatttcaggaatagagtcagatgatcattgtcag

SEQ ID NO: 731046 - DNA, 120 bp, Artificial Sequence
  ENSG00000198707_53 (sequence is synthesized)
agagaacaggagcttcagaaggaaaacttgaagttgtcatctgaaaatattgaactgaaatttcagcttgaacaagcaaataaagatttgccaagattaaagaatcaagtcagagatttg

SEQ ID NO: 731047 - DNA, 120 bp, Artificial Sequence
  ENSG00000198707_54 (sequence is synthesized)
aaggaaatgtgtgaatttcttaagaaagaaaaagcagaagttcagcggaaacttggccatgttagagggtctggtagaagtggaaagacaatcccagaactggaaaaaaccattggttta

SEQ ID NO: 731048 - DNA, 120 bp, Artificial Sequence
  ENSG00000198707_55 (sequence is synthesized)
atgaaaaaagtagttgaaaaagtccagagagaaaatgaacagttgaaaaaagcatcaggaatattgactagtgaaaaaatggctaatattgagcaggaaaatgaaaaattgaaggctgaa

SEQ ID NO: 731049 - DNA, 120 bp, Artificial Sequence
  ENSG00000198707_56 (sequence is synthesized)
ttagaaaaacttaaagctcatcttgggcatcagttgagcatgcactatgaatccaagaccaaaggcacagaaaaaattattgctgaaaatgaaaggcttcgtaaagaacttaaaaaagaa

SEQ ID NO: 731050 - DNA, 120 bp, Artificial Sequence
  ENSG00000198707_57 (sequence is synthesized)
actgatgctgcagagaaattacggatagcaaagaataatttagagatattaaatgagaagatgacagttcaactagaagagactggtaagagattgcagtttgcagaaagcagaggtcca

SEQ ID NO: 731051 - DNA, 120 bp, Artificial Sequence
  ENSG00000198707_58 (sequence is synthesized)
cagcttgaaggtgctgacagtaagagctggaaatccattgtggttacaagaatgtatgaaaccaagttaaaagaattggaaactgatattgccaaaaaaaatcaaagcattactgacctt

SEQ ID NO: 731052 - DNA, 120 bp, Artificial Sequence
  ENSG00000198707_59 (sequence is synthesized)
aaacagcttgtaaaagaagcaacagagagagaacaaaaagttaacaaatacaatgaagaccttgaacaacagattaagattcttaaacatgttcctgaaggtgctgagacagagcaaggc

SEQ ID NO: 731053 - DNA, 120 bp, Artificial Sequence
  ENSG00000198707_60 (sequence is synthesized)
cttaaacgggagcttcaagttcttagattagctaatcatcagctggataaagagaaagcagaattaatccatcagatagaagctaacaaggaccaaagtggagctgaaagcaccatacct

SEQ ID NO: 731054 - DNA, 120 bp, Artificial Sequence
  ENSG00000198707_61 (sequence is synthesized)
gatgctgatcaactaaaggaaaaaataaaagatctagagacacagctcaaaatgtcagatctagaaaagcagcatttgaaggaggaaataaagaagctgaaaaaagaactggaaaatttt

SEQ ID NO: 731055 - DNA, 120 bp, Artificial Sequence
  ENSG00000198707_62 (sequence is synthesized)
gatccttcattttttgaagaaattgaagatcttaagtataattacaaggaagaagtgaagaagaatattctcttagaagagaaggtaaaaaaactttcagaacaattgggagttgaatta

SEQ ID NO: 731056 - DNA, 120 bp, Artificial Sequence
  ENSG00000198707_63 (sequence is synthesized)
actagccctgttgctgcttctgaagagtttgaagatgaagaagaaagtcctgttaatttccccatttactaaaggtcacctataaactttgtttcatttaactatttattaactttataa

SEQ ID NO: 731057 - DNA, 120 bp, Artificial Sequence
  ENSG00000198707_64 (sequence is synthesized)
gttaaatatacttggaaataagcagttctccgaactgtagtatttccttctcactaccttgtacctttatacttagattggaattcttaataaataaaattatatgaaattttcaactta

SEQ ID NO: 731058 - DNA, 120 bp, Artificial Sequence
  ENSG00000198707_65 (sequence is synthesized)
tagacattgtattattgttaagtggtttgtctggatctctgaaatatcttattaatatagtgcctatgttttgtgtaataaataaataaaagatttaaatctgaattgtttaaaaggaaa

SEQ ID NO: 731059 - DNA, 120 bp, Artificial Sequence
  ENSG00000198707_66 (sequence is synthesized)
attggtaacaatatcaatttttatattgtatgttatatttgaaaaatgatgtacacttatctctaaggttttatatcactgttcattttgtcatcaccaattttaaaatataatggtact

SEQ ID NO: 731060 - DNA, 120 bp, Artificial Sequence
  ENSG00000198707_67 (sequence is synthesized)
tctagtgaatatgacttgaagattaattctttatatttggaagtacatttttctcaggacatcaaacttgttacctaaaattaatgcttttgtctggaagattggtatcaagtaactaat

SEQ ID NO: 731061 - DNA, 120 bp, Artificial Sequence
  ENSG00000198707_68 (sequence is synthesized)
gtagattcgcaaatgaatctttcgatatattcaataatggttaattaaatatcttgtttttggttgtaccttattttatgtgagatatatatatatatgtatagtttttgaaaagttgtg

SEQ ID NO: 731062 - DNA, 120 bp, Artificial Sequence
  ENSG00000198707_69 (sequence is synthesized)
tgtgttcatgtcagcagtttataaatcacatatttaaaataacatttttaatgcatagtttttattacctcgttattccttgttataaactaataattcttgcagtgttcacttgaattt

SEQ ID NO: 731063 - DNA, 120 bp, Artificial Sequence
  ENSG00000198707_70 (sequence is synthesized)
agttttaggaaaaaagttttttgcagatcaacttgtatttcctggaagaaaatttcctattttacctcagcttcctatttaatgtattatttatttatttacttaacatttatttgtttt

SEQ ID NO: 731064 - DNA, 120 bp, Artificial Sequence
  ENSG00000198707_71 (sequence is synthesized)
ttatttcacctgaactgttagtaaacttagtaaaatttggtgcctacatgtggtaactgtcctgtcccttatactcagaaacgttttccacctttgtgtcctttaggtcattgttgtgtt

SEQ ID NO: 731065 - DNA, 120 bp, Artificial Sequence
  ENSG00000198707_72 (sequence is synthesized)
atattccatttattttattttgtccattgttctctcagaaattgagggtcatacattttaagaaaacaatgatatgctatttaagagaatgtatcataaattgatttgtaaggaaaagta

SEQ ID NO: 731066 - DNA, 120 bp, Artificial Sequence
  ENSG00000198707_73 (sequence is synthesized)
aagcttaatactgagcatcaagaaattctttaataaatataagtgatatttattcagacatgtaataaggaaatgttcatgtcttatttttgtgttagatttttttagaatctacttttg

SEQ ID NO: 731067 - DNA, 120 bp, Artificial Sequence
  ENSG00000198707_74 (sequence is synthesized)
ttagagttttataaatacagttagtgtttgagatagaaagagaaaagaattagttttcttcctcttctacctgctcatgaacttgatttttttctcccaacaattgaagagccaagaaaa

SEQ ID NO: 731068 - DNA, 120 bp, Artificial Sequence
  ENSG00000198707_75 (sequence is synthesized)
agggagattcttaagagatgggaaatagaatctcatctacccctgtttcccccagaacagtgaaactgaatcttaagggtaagatagaatagtgtgtacttaacttagatggagaagaaa

SEQ ID NO: 731069 - DNA, 120 bp, Artificial Sequence
  ENSG00000198707_76 (sequence is synthesized)
ggctgccaaaatgagatctgaagcgctattacaaatatttccatcgttactgtacttcagaatgaattacaaccgtaagtttttttacttcctcattcataaatttgattattccttata

SEQ ID NO: 731070 - DNA, 120 bp, Artificial Sequence
  ENSG00000198707_77 (sequence is synthesized)
ccacttctcagctttcatcattctttattgtacttttctatgtaatgtttgcctattatacagcaacttaagagaactgtaagtttggacatttcattttggtgttgataatagaatatc

SEQ ID NO: 731071 - DNA, 120 bp, Artificial Sequence
  ENSG00000198707_78 (sequence is synthesized)
tttgaatagttctatagttgatgagtagaaccatgaaccaagtaacttaaagtccttgatgttatttattacagagaactataatagaagctctcccgctaatgtttccatcatgtgtac

SEQ ID NO: 731072 - DNA, 120 bp, Artificial Sequence
  ENSG00000198707_79 (sequence is synthesized)
aaaaagttttcttgttattaaagctagtccgtttaacttacaataagcataaatagctaagctgtgaaagttacctgtgataatgctaattttcccatttattaaaaggcaagttgtttt

SEQ ID NO: 731073 - DNA, 120 bp, Artificial Sequence
  ENSG00000198707_80 (sequence is synthesized)
ccgatcataagaaatttagaaaagccatccaaagataaattccgagtgatatattcctgctgtttgttatgttttctcaaattaattgagttttattttacaatgacaggagttattaaa

SEQ ID NO: 731074 - DNA, 120 bp, Artificial Sequence
  ENSG00000198707_81 (sequence is synthesized)
tttacaatgacaggagttattaaagtattttatttttattatgattaagattttcaaagtaacatttcttatatgaaagaaattatgttaatgcatgtttttcttacatgggaaatcata

SEQ ID NO: 731075 - DNA, 120 bp, Artificial Sequence
  ENSG00000198707_82 (sequence is synthesized)
cgttttactttaagttgtattatctttctcaaaagtggctagtgcttgaccagaaaaaaagacaccagcataactcagtgtatctttatttacataggaaatggccattttcaagattgc

SEQ ID NO: 731076 - DNA, 120 bp, Artificial Sequence
  ENSG00000198712_0 (sequence is synthesized)
atggcacatgcagcgcaagtaggtctacaagacgctacttcccctatcatagaagagcttatcacctttcatgatcacgccctcataatcattttccttatctgcttcctagtcctgtat

SEQ ID NO: 731077 - DNA, 120 bp, Artificial Sequence
  ENSG00000198712_1 (sequence is synthesized)
gcccttttcctaacactcacaacaaaactaactaatactaacatctcagacgctcaggaaatagaaaccgtctgaactatcctgcccgccatcatcctagtcctcatcgccctcccatcc

SEQ ID NO: 731078 - DNA, 120 bp, Artificial Sequence
  ENSG00000198712_2 (sequence is synthesized)
gagtacaccgactacggcggactaatcttcaactcctacatacttcccccattattcctagaaccaggcgacctgcgactccttgacgttgacaatcgagtagtactcccgattgaagcc

SEQ ID NO: 731079 - DNA, 120 bp, Artificial Sequence
  ENSG00000198712_3 (sequence is synthesized)
cccattcgtataataattacatcacaagacgtcttgcactcatgagctgtccccacattaggcttaaaaacagatgcaattcccggacgtctaaaccaaaccactttcaccgctacacga

SEQ ID NO: 731080 - DNA, 120 bp, Artificial Sequence
  ENSG00000198712_4 (sequence is synthesized)
ccgggggtatactacggtcaatgctctgaaatctgtggagcaaaccacagtttcatgcccatcgtcctagaattaattcccctaaaaatctttgaaatagggcccgtatttaccctatag

SEQ ID NO: 731081 - DNA, 120 bp, Artificial Sequence
  ENSG00000198715_0 (sequence is synthesized)
ctggcacctcttccgtcggctgaattgcggccgtatgcgcggctctgtggagtgcacctggggttgggggcactgtgcccccagccccctgctcctttggactctacttctgtttgcagc

SEQ ID NO: 731082 - DNA, 120 bp, Artificial Sequence
  ENSG00000198715_1 (sequence is synthesized)
cccatttggcctgctgggggagaagacccgccaggtgtctctggaggtcatccctaactggctgggccccctgcagaacctgcttcatatacgggcagtgggcaccaattccacactgca

SEQ ID NO: 731083 - DNA, 120 bp, Artificial Sequence
  ENSG00000198715_2 (sequence is synthesized)
ctatgtgtggagcagcctggggcctctggcagtggtaatggtggccaccaacaccccccacagcaccctgagcgtcaactggagcctcctgctatcccctgagcccgatgggggcctgat

SEQ ID NO: 731084 - DNA, 120 bp, Artificial Sequence
  ENSG00000198715_3 (sequence is synthesized)
ggtgctccctaaggacagcattcagttttcttctgcccttgtttttaccaggctgcttgagtttgacagcaccaacgtgtccgatacggcagcaaagcctttgggaagaccatatcctcc

SEQ ID NO: 731085 - DNA, 120 bp, Artificial Sequence
  ENSG00000198715_4 (sequence is synthesized)
atactccttggccgatttctcttggaacaacatcactgattcattggatcctgccaccctgagtgccacatttcaaggccaccccatgaacgaccctaccaggacttttgccaatggcag

SEQ ID NO: 731086 - DNA, 120 bp, Artificial Sequence
  ENSG00000198715_5 (sequence is synthesized)
cctggccttcagggtccaggccttttccaggtccagccgaccagcccaaccccctcgcctcctgcacacagcagacacctgtcagctagaggtggccctgattggagcctctccccgggg

SEQ ID NO: 731087 - DNA, 120 bp, Artificial Sequence
  ENSG00000198715_6 (sequence is synthesized)
ctgcccctcaatgcaggagcagcactccatcgacgatgaatatgcaccggccgtcttccagttggaccagctactgtggggctccctcccatcaggctttgcacagtggcgaccagtggc

SEQ ID NO: 731088 - DNA, 120 bp, Artificial Sequence
  ENSG00000198715_7 (sequence is synthesized)
ttactcccagaagccggggggccgagaatcagccctgccctgccaagcttcccctcttcatcctgccttagcatactctcttccccagtcacccattgtccgagccttctttgggtccca

SEQ ID NO: 731089 - DNA, 120 bp, Artificial Sequence
  ENSG00000198715_8 (sequence is synthesized)
gaataacttctgtgccttcaatctgacgttcggggcttccacaggccctggctattgggaccaacactacctcagctggtcgatgctcctgggtgtgggcttccctccagtggacggctt

SEQ ID NO: 731090 - DNA, 120 bp, Artificial Sequence
  ENSG00000198715_9 (sequence is synthesized)
gtccccactagtcctgggcatcatggcagtggccctgggtgccccagggctcatgctgctagggggcggcttggttctgctgctgcaccacaagaagtactcagagtaccagtccataaa

SEQ ID NO: 731091 - DNA, 120 bp, Artificial Sequence
  ENSG00000198715_10 (sequence is synthesized)
ttaaggcccgctctctggagggaaggacattactgaacctgtcttgctgtgcctcgaaactctggaggttggagcatcaagttccagccggccccttcactcccccatcttgcttttctg

SEQ ID NO: 731092 - DNA, 120 bp, Artificial Sequence
  ENSG00000198715_11 (sequence is synthesized)
tggaacctcagaggccagcctcgacttcctggagacccccaggtggggcttccttcatactttgttgggggactttggaggcgggcaggggacagggctattgataaggtccccttggtg

SEQ ID NO: 731093 - DNA, 120 bp, Artificial Sequence
  ENSG00000198715_12 (sequence is synthesized)
ttgccttcttgcatctccacacatttcccttggatgggacttgcaggcctaaatgagaggcattctgactggttggctgccctggaaggcaagaaaatagatttattttttttcacaggg

SEQ ID NO: 731094 - DNA, 120 bp, Artificial Sequence
  ENSG00000198715_13 (sequence is synthesized)
ggggctaggggtggagggtggctgccaagaggagggttcttcaacctggagggtgtgggagatggtcatgggtcatgggacgggattgtggagtagggcaaatgtgagggtgatgtctgg

SEQ ID NO: 731095 - DNA, 120 bp, Artificial Sequence
  ENSG00000198715_14 (sequence is synthesized)
acagaataaggctgggagtggcaaggaaaagagggtcgggcacaggttggtcctctttaccctcccttgtttgcctttcttcccagttggaccagctactgtggggctccctcccatcag

SEQ ID NO: 731096 - DNA, 120 bp, Artificial Sequence
  ENSG00000198715_15 (sequence is synthesized)
ctcagactcctgagtagctgggattacagatgcgggccaccacacctggctgtacaaactttaaaatgtttgagcaaattcaatgagtatagtaaaatatcttcctccctttaccgattc

SEQ ID NO: 731097 - DNA, 120 bp, Artificial Sequence
  ENSG00000198715_16 (sequence is synthesized)
ctccctttaccgattcccaccctattctcccccacccccaccccaggcatcaatattatggtttcttgtgcactgagtgattttttaaattattattatttttttatttttgagacagag

SEQ ID NO: 731098 - DNA, 60 bp, Artificial Sequence
  ENSG00000198715_17 (sequence is synthesized)
ctgagactacggagatggtctcaatctcctgacctgatgatccgcctgccttggcctccc

SEQ ID NO: 731099 - DNA, 120 bp, Artificial Sequence
  ENSG00000198715_18 (sequence is synthesized)
aggttgggagagaaccaaggagaagagtgcagaggagagagttcatcccaattagagggtggaactaaagactgggggtgggtgaaatagactcagatatgaaagccttggtagggggtg

SEQ ID NO: 731100 - DNA, 120 bp, Artificial Sequence
  ENSG00000198715_19 (sequence is synthesized)
tcttccaggtcaggcttcctggagagaggcagatgggtgaggaatgtaggtgggacaccattgggacctaaaactcattcaaccatttgccatttagcaacactttctttgggtcgttta

SEQ ID NO: 731101 - DNA, 120 bp, Artificial Sequence
  ENSG00000198715_20 (sequence is synthesized)
ctcagtggagacagacagaaagtgcaatatgacttacactctggcagatggagatctgcaagggggctaggggccaagaggagggctgagtccagacttggaggtttggaaaacaactca

SEQ ID NO: 731102 - DNA, 120 bp, Artificial Sequence
  ENSG00000198715_21 (sequence is synthesized)
gaagaaagaaggaagaagaagaagaaagaaaggaggaagaaggaagaagaagagccagtgtgataatacattgagtgattttttaaaaagtgcatatatgagcaaaaagttatttttccc

SEQ ID NO: 731103 - DNA, 120 bp, Artificial Sequence
  ENSG00000198715_22 (sequence is synthesized)
ttttctgaagtatggcagcatactatatagactgtctctgcatgtttatttttcccccatttaatatatcctggagatcattttatatcaatataaaaatggttttctcattcttttata

SEQ ID NO: 731104 - DNA, 120 bp, Artificial Sequence
  ENSG00000198715_23 (sequence is synthesized)
gctccaccacgaacatgtagtagaggttccacatcagcatcgacagcagtggcagaaacgtcaggccgtagccgaagcctcggaaggagcggcccacggcaaagagacatggtcttgcta

SEQ ID NO: 731105 - DNA, 120 bp, Artificial Sequence
  ENSG00000198718_0 (sequence is synthesized)
acgtggtgcccttggttacgcccggtggcagctgtggggtctagggctcagacgggggccattttgccagaggctgcctcccggagttgggggcggcctggcggcaggctgaagctgttc

SEQ ID NO: 731106 - DNA, 120 bp, Artificial Sequence
  ENSG00000198718_1 (sequence is synthesized)
ttttgcctcttctgcagcttggggcttggagaggatctggaagtctgggctccatcgagccctttggagacggcaatggtttcttccaaccaccaccacctgacaaccctgcatggcggc

SEQ ID NO: 731107 - DNA, 120 bp, Artificial Sequence
  ENSG00000198718_2 (sequence is synthesized)
tgccccctccgcgctgcttctgctgccgccctttccagtcctctctacctatcggctccagagccgcagtcgtccttccgccccagagaccgatgatagtcgagttgggggcattatgag

SEQ ID NO: 731108 - DNA, 120 bp, Artificial Sequence
  ENSG00000198718_3 (sequence is synthesized)
aggagagaaaaactactacttccgtggagctgcgggggaccacggttcctgccccactacaacttcgcctctggcctcggccctcttgatgccctcggaggcagtctcaagcagctggtc

SEQ ID NO: 731109 - DNA, 120 bp, Artificial Sequence
  ENSG00000198718_4 (sequence is synthesized)
tgagtctggaggcggtttgtcagggggagatgaagaggacactcggctccttcaactcctccgcactgcccgggatccttctgaggccttccaggctttgcaagctgctttgccgcggcg

SEQ ID NO: 731110 - DNA, 120 bp, Artificial Sequence
  ENSG00000198718_5 (sequence is synthesized)
gggcggtcgacttggcttcccccgacgcaaggaagctttgtatcgggcactgggccgagtgcttgtggaaggaggtagtgatgagaagcggctctgcttgcaacttctctcggacgttct

SEQ ID NO: 731111 - DNA, 120 bp, Artificial Sequence
  ENSG00000198718_6 (sequence is synthesized)
ccggggtcagggggaggcaggccagcttgaagaggcctttagcttagcacttttgcctcaactagttgtctcgttacgggaagagaatccagccctgcggaaagatgcgctgcagatcct

SEQ ID NO: 731112 - DNA, 120 bp, Artificial Sequence
  ENSG00000198718_7 (sequence is synthesized)
tcatatatgtctgaaacgtagtcctggagaggtgctgagaacgcttatacaacaaggactggaaagtaccgatgcccgacttagagcttccacagcactactgcttcccatcttgcttac

SEQ ID NO: 731113 - DNA, 120 bp, Artificial Sequence
  ENSG00000198718_8 (sequence is synthesized)
tactgaggacttgttgcttggtctggatctcaccgaggtgataatatccctagcccgaaagcttggtgatcaggagacagaagaagaatctgagacagctttctccgcacttcaacaaat

SEQ ID NO: 731114 - DNA, 120 bp, Artificial Sequence
  ENSG00000198718_9 (sequence is synthesized)
tggggagcgacttggccaagacaggtttcaatcttacatttctcgtctgccctctgccctgaggagacactacaatcgccgcctggagtcccagtttggaagtcaggttccttattattt

SEQ ID NO: 731115 - DNA, 120 bp, Artificial Sequence
  ENSG00000198718_10 (sequence is synthesized)
ggaacttgaagcctctggatttcctgaagatccccttccctgtgcagtgactctttccaacagcaatcttaaatttgggattattcctcaggagctgcattcacgattattggatcagga

SEQ ID NO: 731116 - DNA, 120 bp, Artificial Sequence
  ENSG00000198718_11 (sequence is synthesized)
agactataagaaccggacccaggccgtcgaagaactaaagcaggtgctgggaaaatttaaccctagttctactcctcattctagtcttgttggcttcattagtttgctatataatttgtt

SEQ ID NO: 731117 - DNA, 120 bp, Artificial Sequence
  ENSG00000198718_12 (sequence is synthesized)
agacgattctaacttcaaagtggtgcatggcacacttgaagtcctgcatttactggttattcgccttggagagcaggtacagcagttcttgggaccagttatagcagcttctgtcaaagt

SEQ ID NO: 731118 - DNA, 120 bp, Artificial Sequence
  ENSG00000198718_13 (sequence is synthesized)
gctggcggacaacaagttggtgatcaaacaagaatacatgaaaatcttcctcaagctaatgaaggaagtaggacctcagcaggtgctttgtttactcctggaacatctcaaacataagca

SEQ ID NO: 731119 - DNA, 120 bp, Artificial Sequence
  ENSG00000198718_14 (sequence is synthesized)
ttccagagtgagagaggaggtggtgaacatttgcatctgctccctgctgacctatcctagtgaggattttgacttgcccaaactgtcctttgatcttgccccagctcttgtagatagcaa

SEQ ID NO: 731120 - DNA, 120 bp, Artificial Sequence
  ENSG00000198718_15 (sequence is synthesized)
acgcagggtacgccaagcagctttagaagcttttgccgtattggcatcatcaatgggctcaggtaaaaccagcatcctttttaaagctgtggatacagttgaactgcaagataatggaga

SEQ ID NO: 731121 - DNA, 120 bp, Artificial Sequence
  ENSG00000198718_16 (sequence is synthesized)
tggagtgatgaatgctgtgcaggccagattggctaggaaaaccttaccaaggctcacagagcagggatttgtggaatatgcagtactgatgccatcttctgccgggggtaggtcaaacca

SEQ ID NO: 731122 - DNA, 120 bp, Artificial Sequence
  ENSG00000198718_17 (sequence is synthesized)
tttggcacatggagcagatacggactggcttttggctggtaacagaactcagagtgcacactgtcactgtggtgaccacgtgagggatagcatgcacatttatggatcttacagcccaac

SEQ ID NO: 731123 - DNA, 120 bp, Artificial Sequence
  ENSG00000198718_18 (sequence is synthesized)
tatctgtacccgaagggtattaagtgcaggaaaaggaaaaaataaattaccatgggaaaatgagcaacctggaatcatgggagaaaaccagacctccacttccaaggatatagagcagtt

SEQ ID NO: 731124 - DNA, 120 bp, Artificial Sequence
  ENSG00000198718_19 (sequence is synthesized)
ttcaacatatgatttcatcccatctgcaaaattaaagctttctcaaggaatgccagtcaatgatgatttatgttttagcagaaaaagagtatcaagaaacttatttcagaatagtcggga

SEQ ID NO: 731125 - DNA, 120 bp, Artificial Sequence
  ENSG00000198718_20 (sequence is synthesized)
ttttaacccagattgtcttcctttatgtgctgctggtactactgggactcatcaaacaaatctttctgggaaatgtgcacaacttggattttcacaaatatgtggtaaaactggcagtgt

SEQ ID NO: 731126 - DNA, 120 bp, Artificial Sequence
  ENSG00000198718_21 (sequence is synthesized)
gggttctgacttacaattcctagggacaactagcagtcatcaagaaaaagtgtatgctagcctcaattttggcagtaagacacagcaaacatttggtagtcaaacagagtgtacttcctc

SEQ ID NO: 731127 - DNA, 120 bp, Artificial Sequence
  ENSG00000198718_22 (sequence is synthesized)
aaatggtcaaaatccaagtccaggagcttacatccttccatcctatcctgtctcatcacctcgaactagtccaaagcatacatctcctcttattatatctccaaagaagtctcaagataa

SEQ ID NO: 731128 - DNA, 120 bp, Artificial Sequence
  ENSG00000198718_23 (sequence is synthesized)
ttctgttaatttctcaaattcctggcctcttaaaagcttcgaaggactatcaaagccaagtccacagaagaagcttgtcagccaaaaatcgtctgatcctacgggtagaaatcatggaga

SEQ ID NO: 731129 - DNA, 120 bp, Artificial Sequence
  ENSG00000198718_24 (sequence is synthesized)
aaattctcaagaaaaacctccagttcagcttacacctgccttggtgagatcgccatcttcccgacgaggtctaaatgggacaaagcctgttcctcccataccaaggggaataagcctttt

SEQ ID NO: 731130 - DNA, 120 bp, Artificial Sequence
  ENSG00000198718_25 (sequence is synthesized)
gcctgataaagctgatttaagcacagtgggacacaaaaagaaagagcctgatgatatttggaagtgtgaaaaagatagtcttccaattgatctttcagaattaaatttcaaggataaaga

SEQ ID NO: 731131 - DNA, 120 bp, Artificial Sequence
  ENSG00000198718_26 (sequence is synthesized)
gcaaaactgagtggcagtacttcagatcttgaaagccctgattctgcaatgaagctcgacttgacgatggactccccgtctctgtcttcctcaccaaacatcaattcttacagtgaaagt

SEQ ID NO: 731132 - DNA, 120 bp, Artificial Sequence
  ENSG00000198718_27 (sequence is synthesized)
ggagtttacagccaagaatcattgacttcttctctgtctacaactccccaggggaagagaataatgtcagacatatttccaacatttgggtcaaaaccttgtccaacaagactttcttct

SEQ ID NO: 731133 - DNA, 120 bp, Artificial Sequence
  ENSG00000198718_28 (sequence is synthesized)
gcaaagaaaaaaatttctcatattgctgaacaaagccccagtgcagggtcatcatcaaatccacagcaaatttccagttttgacttcacaaccacaaaggctttatcagaagactcagta

SEQ ID NO: 731134 - DNA, 120 bp, Artificial Sequence
  ENSG00000198718_29 (sequence is synthesized)
gtagttgttggaaaaggcgtatttggaagtttaagttcagcaccagcaacctgcagccaatcagtgatatcttctgtggaaaatggggatacattttcaattaaacaaagtattgaacca

SEQ ID NO: 731135 - DNA, 120 bp, Artificial Sequence
  ENSG00000198718_30 (sequence is synthesized)
ccatcagggatttatggaagatcagtccagcaaaatatttcatcatatcttgatgttgagaatgaaaaagatgctaaagtttctatttctaaatctacttataacaagatgagacaaaag

SEQ ID NO: 731136 - DNA, 120 bp, Artificial Sequence
  ENSG00000198718_31 (sequence is synthesized)
agaaaagaagagaaagaactgtttcacaataaagattgtgaaaagaaggaaaaaaattcctgggaacgaatgagacatacaggaactgagaaaatggcatctgaaagtgaaacacctact

SEQ ID NO: 731137 - DNA, 120 bp, Artificial Sequence
  ENSG00000198718_32 (sequence is synthesized)
ggagctatttcacagtataaagaaaggatgccttctgtcactcatagtccagaaataatggatctgtcagaactacgaccattctctaaaccagaaatagcactgacagaagccctgagg

SEQ ID NO: 731138 - DNA, 120 bp, Artificial Sequence
  ENSG00000198718_33 (sequence is synthesized)
cttttggctgatgaggattgggagaagaaaattgagggactgaattttattagatgcttagctgcttttcattctgagatactgaacacaaagttgcatgaaacaaattttgcagttgtt

SEQ ID NO: 731139 - DNA, 120 bp, Artificial Sequence
  ENSG00000198718_34 (sequence is synthesized)
caagaggtgaaaaatttacgttctggagtttctcgtgctgctgtggtctgtttaagtgatcttttcacttatttgaaaaagagcatggatcaagagctagataccacagtaaaagttttg

SEQ ID NO: 731140 - DNA, 120 bp, Artificial Sequence
  ENSG00000198718_35 (sequence is synthesized)
ttgcacaaggctggtgaatcaaatacatttataagagaagatgttgacaaagcattgagagctatggttaataatgtaactcctgcacgtgcagttgtttctcttatcaatggtggacaa

SEQ ID NO: 731141 - DNA, 120 bp, Artificial Sequence
  ENSG00000198718_36 (sequence is synthesized)
agccatttacacattgctgtaagaaggtgtacagcccagcatttatcagatgtattggaatttatggaaccagaacgtattttatctgcagcaaaggatatggctgaacgcatattacca

SEQ ID NO: 731142 - DNA, 120 bp, Artificial Sequence
  ENSG00000198718_37 (sequence is synthesized)
gctgctgctaagtttgctcaagacagttcacaagaaaccaggtattatggtcgaaagatgctgttcttcatgatgtgtcatcctaactttgaaaaaatgcttgaaaagtatgtcccatct

SEQ ID NO: 731143 - DNA, 120 bp, Artificial Sequence
  ENSG00000198718_38 (sequence is synthesized)
aaagatttgccatatattaaggactctgttagaaacttacagcaaaagggtttgggggagataccattagatactccttcagcaaaaggaagacgatctcatactggcagtgttggaaat

SEQ ID NO: 731144 - DNA, 120 bp, Artificial Sequence
  ENSG00000198718_39 (sequence is synthesized)
acaagatcatcatctgtttctagagatgctttcaattcagctgaaagagctgtaactgaagttcgtgaagtcaccagaaaatcagtccctcgtaattccttagaaagtgctgagtacctt

SEQ ID NO: 731145 - DNA, 120 bp, Artificial Sequence
  ENSG00000198718_40 (sequence is synthesized)
aaactcataactggcttattaaatgcaaaagactttcgtgatcgtattaatgggattaagcagcttttatcagatacagaaaataatcaagaccttgttgttggaaacattgtgaagatt

SEQ ID NO: 731146 - DNA, 120 bp, Artificial Sequence
  ENSG00000198718_41 (sequence is synthesized)
tttgatgcttttaaatctcgacttcatgattctaatagtaaagtaaatctggtggctctggaaacaatgcacaaaatgattcctctacttagagaccacttatctcctataatcaacatg

SEQ ID NO: 731147 - DNA, 120 bp, Artificial Sequence
  ENSG00000198718_42 (sequence is synthesized)
ctaattccagcaatagtggataacaatctgaattccaagaatccaggcatctatgcggctgctacaaatgttgttcaggcactgagtcagcatgtagacaattacttacttctacagcca

SEQ ID NO: 731148 - DNA, 120 bp, Artificial Sequence
  ENSG00000198718_43 (sequence is synthesized)
ttttgcacaaaagctcagtttttaaatggaaaagcaaaacaggacatgacggaaaagcttgctgatattgttacggaactttatcaaaggaagccgcatgccacagagcagaaagtgttg

SEQ ID NO: 731149 - DNA, 120 bp, Artificial Sequence
  ENSG00000198718_44 (sequence is synthesized)
gttgttttatggcatctcttaggaaatatgacaaatagtggctctctgcctggagctggaggaaatatacgaacagccacagctaaattatcaaaagcactctttgcacagatgggtcag

SEQ ID NO: 731150 - DNA, 120 bp, Artificial Sequence
  ENSG00000198718_45 (sequence is synthesized)
aatctgttaaatcaggctgcatctcaaccaccacatatcaaaaagagtttggaggaattactcgatatgacaattttaaatgaattatgaatcttcgataaaatactgtatgatgaacaa

SEQ ID NO: 731151 - DNA, 120 bp, Artificial Sequence
  ENSG00000198718_46 (sequence is synthesized)
aagtgtttacatgatgacaaatggaactttctaaaagttatgttatcagtgcctgcacttcacatccagcaaattaagtcaatggctatttttatttgcagcctatgagtacacatctgt

SEQ ID NO: 731152 - DNA, 120 bp, Artificial Sequence
  ENSG00000198718_47 (sequence is synthesized)
cctatatcaaccttaccacttatattcatcacataaaaacctaaaatattcatgaataattcatgaaatctgagtcacatgggatgaattcaattttaatatttttgagaaaagtcctgc

SEQ ID NO: 731153 - DNA, 120 bp, Artificial Sequence
  ENSG00000198718_48 (sequence is synthesized)
tcatttgcactattctatagaaactacaatttgttgccctatatgtaaaattagaattgtaattaaaaatacacattttattatgtaatcatgttctggtatgtctcatttctcagcctt

SEQ ID NO: 731154 - DNA, 120 bp, Artificial Sequence
  ENSG00000198718_49 (sequence is synthesized)
attttataacgtggaagtcattgaactatgttatcagaaactaagtttgtatattatttgtgaaaaacatgtatttctgaatcagtccgctaatatgattgtgcagtattagcttgcttt

SEQ ID NO: 731155 - DNA, 120 bp, Artificial Sequence
  ENSG00000198718_50 (sequence is synthesized)
tgctgctgtgttaatgtcatatatttgcttaccttttgggttcaattatctacataattgtgaaatttaacaagttataataaagcatgacaaccaaagttttagaaaacattaaacatt

SEQ ID NO: 731156 - DNA, 120 bp, Artificial Sequence
  ENSG00000198718_51 (sequence is synthesized)
ttaaatgcacgtttaaaaaacgtgttgaatgtaacccccctatttttgtgtgcaaacactaaattttattgctttatgttttgacctttataaaggtgttattctgctgcccagttttgt

SEQ ID NO: 731157 - DNA, 120 bp, Artificial Sequence
  ENSG00000198718_52 (sequence is synthesized)
aattctcaaaaatagtgccaggtcttctatagcttttttcagaattcatgggcttacaagtactgtatgcatctttaaaaagaaaaggaatgttataaaataaaaggatttatttcttta

SEQ ID NO: 731158 - DNA, 120 bp, Artificial Sequence
  ENSG00000198718_53 (sequence is synthesized)
ttctttgtatgaaataaattttcagttttaaaagactatgttacaatatcctaagatactacataataagcaaatatgtttaagtatttgttttgttttttgggggatttacagggtcat

SEQ ID NO: 731159 - DNA, 120 bp, Artificial Sequence
  ENSG00000198718_54 (sequence is synthesized)
ggtcagacatatttccaacatttgggtcaaaaccttgtccaacaagactttcttctgcaaagaaaaaaatttctcatattgctgaacaaagccccagtgcaggtgttccctcggaagtta

SEQ ID NO: 731160 - DNA, 120 bp, Artificial Sequence
  ENSG00000198718_55 (sequence is synthesized)
tctttttatcctataatatcttatttctaaaaatatgttcattatagaaaatgtggaaaataccatgaattagtaggaagggaatttatcacgccagttcccactaccagaataatttac

SEQ ID NO: 731161 - DNA, 120 bp, Artificial Sequence
  ENSG00000198718_56 (sequence is synthesized)
tgttaacactctactgtattttcttcaagtattttttctatgcatacattattcctttttaaattaaaagtatgaataataatatagcaatacactcatgtactgacccttccagtgaac

SEQ ID NO: 731162 - DNA, 120 bp, Artificial Sequence
  ENSG00000198718_57 (sequence is synthesized)
agtttgtcatatttgtttcctatatttaaataaatgaaacatagcatagttctctccccagttcaacatctcttccttcttcaccagaggcaatcactattaccatttatatatgtctta

SEQ ID NO: 731163 - DNA, 120 bp, Artificial Sequence
  ENSG00000198718_58 (sequence is synthesized)
tgtatttttgtactttttatattaatattatttttgtgtatttacttacggtgtgtttataccattgattttggcttatgatcagtcttttgcaattgcatacagtgaactgcaatgaac

SEQ ID NO: 731164 - DNA, 120 bp, Artificial Sequence
  ENSG00000198718_59 (sequence is synthesized)
atatttgaacctgtcctttgtgtttctgtgcaagcttacttatctttatgaaattgagatcatattgtacactcatctttgaatcctagatcactttgtgctataaaaatgttaccagta

SEQ ID NO: 731165 - DNA, 120 bp, Artificial Sequence
  ENSG00000198718_60 (sequence is synthesized)
tgataactgtacataattattatatcagacaaggaatgcggttgctgtattactttggtttcagagtactatttccatagatgcctcctttttatcatttcagtttgcttcaagtcaggt

SEQ ID NO: 731166 - DNA, 120 bp, Artificial Sequence
  ENSG00000198718_61 (sequence is synthesized)
agtcaggttaaaaaaaaagttttatattacatatataaatgcaaatacttaattatgatattttatggtcttagtctgtttttaaggtataagcatcaatcatgtaatgataatttgctc

SEQ ID NO: 731167 - DNA, 120 bp, Artificial Sequence
  ENSG00000198718_62 (sequence is synthesized)
agagttaatattactgtatattcatttttaacatatgtctttatgttaaacacatgtaaaactaacctataaagtaccaaagttggttgttaatgatttaaagtaatcaccccaacttct

SEQ ID NO: 731168 - DNA, 120 bp, Artificial Sequence
  ENSG00000198718_63 (sequence is synthesized)
gcttgtgaaatctttccttttttttttttcccaactcatttgtattttactagtgctaggaagggaattcatttgaagggaagaaacatatagaaaagacattttcctacataacttata

SEQ ID NO: 731169 - DNA, 120 bp, Artificial Sequence
  ENSG00000198718_64 (sequence is synthesized)
aatttcacctgatcctacataattttgctttgtttttataataacttaaatatagttctttttttagtgggtaattgaaaggtgagtttctgttatataattattagtaaatacaggagg

SEQ ID NO: 731170 - DNA, 120 bp, Artificial Sequence
  ENSG00000198718_65 (sequence is synthesized)
ataccattgcttttagatattcaacttttcacgcttttaatagagaagtggccctagtattaaatcaactagtagagttgttgaaaattacttatcctcccttatagttgctaatatgac

SEQ ID NO: 731171 - DNA, 120 bp, Artificial Sequence
  ENSG00000198718_66 (sequence is synthesized)
acttcctatttattattttgaatgggtcactgtttatattctttggtgtgagttgacttttgacaaaagcataagttttcatgtgcttaatgtgcttaataatgtatcaaacactttcat

SEQ ID NO: 731172 - DNA, 120 bp, Artificial Sequence
  ENSG00000198718_67 (sequence is synthesized)
tttcattagttcatttaatctttacagtaactccctgagttaagaagcaagtcaacatctattatgttttttgtttgtgtgtgtgtttgtttttacagaagaggctcagtgatgttatgt

SEQ ID NO: 731173 - DNA, 120 bp, Artificial Sequence
  ENSG00000198718_68 (sequence is synthesized)
gtcttgctcagggtcagaaagtatgtggtaggactaggattcaagcactgttcacctaactttatgttcattaagtttttcactgtactacactgccctaaatccattaaagggtttttt

SEQ ID NO: 731174 - DNA, 120 bp, Artificial Sequence
  ENSG00000198718_69 (sequence is synthesized)
gttgttgttgagtttgccttccaactatgaagacttaagaaatttatggatgtttgctttaactgaaaacagatactttcattaaatgattaatcttatgaatcaaatgtaaacaaaaca

SEQ ID NO: 731175 - DNA, 120 bp, Artificial Sequence
  ENSG00000198718_70 (sequence is synthesized)
cattcaatgactcatagaactttaatctagtaggcagttcagattcaataagttatttattgaagatctgataagaatggacacttagacattattatctcataaaaccctggagggttt

SEQ ID NO: 731176 - DNA, 120 bp, Artificial Sequence
  ENSG00000198718_71 (sequence is synthesized)
ctcactgaaatcgtttaagtattaatatagggcaatatttgcttaatacatcacccatatttattaaggtgcttttctaagtcctggaggtctgcctaatagagcttgcattctacttag

SEQ ID NO: 731177 - DNA, 120 bp, Artificial Sequence
  ENSG00000198718_72 (sequence is synthesized)
gaacgagaacagacattaaataaatacaagacatagtaagttatctggtgataaatgctatgaaggaaaacaaagcgaaagaaggccatattcaggaaagaatatttgaagcaaaccact

SEQ ID NO: 731178 - DNA, 120 bp, Artificial Sequence
  ENSG00000198718_73 (sequence is synthesized)
gtatatcaggagaagagaataaatagtttcaggaagagggaacagtcagcacaagtaactaagagagaagtgtgtggggaacatgtttgagaaataccaaagagaccagtatgtctggaa

SEQ ID NO: 731179 - DNA, 120 bp, Artificial Sequence
  ENSG00000198718_74 (sequence is synthesized)
tgaaataagagaggggaaaataagtagaaaattaaagacataataggggtgcttatttaaggcctagtggacttataagtgaactttactttttactctgaatgaggagcattttgaaga

SEQ ID NO: 731180 - DNA, 120 bp, Artificial Sequence
  ENSG00000198718_75 (sequence is synthesized)
tttgaagaaagaattgacatcacttgtttccaggctcattttggattttatttttaaaatagatgaaagtgtattagtctgttttcacactgccataaagacatacctgagactgggtaa

SEQ ID NO: 731181 - DNA, 120 bp, Artificial Sequence
  ENSG00000198718_76 (sequence is synthesized)
gaaaagaggtttaattggctcatggttctatgggctgcacaggcttctgcttctggggaaacctcaagaaatttacaatcatggcgtaaggcgaaggtgaaacaagcacgtcttacatgg

SEQ ID NO: 731182 - DNA, 120 bp, Artificial Sequence
  ENSG00000198718_77 (sequence is synthesized)
tgggagcaaggggaagagagtgaagaggaagtacaacacgcttttaacgatcagatcttgtgagaactctatcatgagaacagctccaaaaggagaaatctgccacatgatccagtcacc

SEQ ID NO: 731183 - DNA, 81 bp, Artificial Sequence
  ENSG00000198718_78 (sequence is synthesized)
tgtatcagagagcaaggtcaaaaacaggaagactgattaagaatctgttgtagtaatcgtggctagagttgatggaggctt

SEQ ID NO: 731184 - DNA, 120 bp, Artificial Sequence
  ENSG00000198718_79 (sequence is synthesized)
agactgattaagaatctgttgtagtaatcgtggctagagttgatggaggctttaaccaggatagcaagaatgtggtaagaagtgattggattctggcttggcgcggtggctcacgcctgt

SEQ ID NO: 731185 - DNA, 120 bp, Artificial Sequence
  ENSG00000198718_80 (sequence is synthesized)
gttaataaggagaatagacaatatgtgatgtgagtattgaacagcactaaatcttaatgtttattgaaattactttgtttcattgcaggtcagacatatttccaacatttgggtcaaaac

SEQ ID NO: 731186 - DNA, 120 bp, Artificial Sequence
  ENSG00000198719_0 (sequence is synthesized)
actgaccatttggcgatccattgagaggagggtttggaaaagtggctcctttgtgacagctctcgccagattggggggctgctgatttgcatctcattagccatgcgggcggccggctga

SEQ ID NO: 731187 - DNA, 120 bp, Artificial Sequence
  ENSG00000198719_1 (sequence is synthesized)
atataagggcggcaggcgccggcgagagccagatcctctgcgcgcacccgcggagacccgacccggccgagggcagagcgcaggggaacccgggcagccgcggcgcagagcctcctccca

SEQ ID NO: 731188 - DNA, 120 bp, Artificial Sequence
  ENSG00000198719_2 (sequence is synthesized)
cggcccggcccctccggtcctgcgcgtgtgtactggatggcattggctggattcatcggaaagacgcggatctttgctgtgacaccggagatcggagcccggagtgctcccggaacgacc

SEQ ID NO: 731189 - DNA, 120 bp, Artificial Sequence
  ENSG00000198719_3 (sequence is synthesized)
ccgccgagtgacaccgggccgcgatccgcaggggccgccgcgcacacccgccgccgccgaccgtcccctcagcgcgcgccgctggccccggattatcgccttgcccgtgggatttccaga

SEQ ID NO: 731190 - DNA, 120 bp, Artificial Sequence
  ENSG00000198719_4 (sequence is synthesized)
cagaccgcggctttctaatcggctcgggaggaagctctgcagctctcttgggaattaagctcaatctctggactctctctctttctctttctccccctccctctcctgcgaagaagctca

SEQ ID NO: 731191 - DNA, 120 bp, Artificial Sequence
  ENSG00000198719_5 (sequence is synthesized)
agacaaaaccaggaagccggcgaccctcacctcctcgggggctgggaggaaggaggaaaacgaaagtcgccgccgccgcgctgtcccccgagagctgcctttcctcgggcatccctgggg

SEQ ID NO: 731192 - DNA, 120 bp, Artificial Sequence
  ENSG00000198719_6 (sequence is synthesized)
ctgccgcgggacctcgcagggcggatataaagaaccgcggccttgggaagaggcggagaccggcttttaaagaaagaagtcctgggtcctgcggtctggggcgaggcaagggcgcttttc

SEQ ID NO: 731193 - DNA, 120 bp, Artificial Sequence
  ENSG00000198719_7 (sequence is synthesized)
tgcccacgctccccgtggcccatcgatcccccgcgcgtccgccgctgttctaaggagagaagtgggggccccccaggctcgcgcgtggagcgaagcagcatgggcagtcggtgcgcgctg

SEQ ID NO: 731194 - DNA, 120 bp, Artificial Sequence
  ENSG00000198719_8 (sequence is synthesized)
gccctggcggtgctctcggccttgctgtgtcaggtctggagctctggggtgttcgaactgaagctgcaggagttcgtcaacaagaaggggctgctggggaaccgcaactgctgccgcggg

SEQ ID NO: 731195 - DNA, 120 bp, Artificial Sequence
  ENSG00000198719_9 (sequence is synthesized)
ggcgcggggccaccgccgtgcgcctgccggaccttcttccgcgtgtgcctcaagcactaccaggccagcgtgtcccccgagccgccctgcacctacggcagcgccgtcacccccgtgctg

SEQ ID NO: 731196 - DNA, 120 bp, Artificial Sequence
  ENSG00000198719_10 (sequence is synthesized)
ggcgtcgactccttcagtctgcccgacggcgggggcgccgactccgcgttcagcaaccccatccgcttccccttcggcttcacctggccgggcaccttctctctgattattgaagctctc

SEQ ID NO: 731197 - DNA, 120 bp, Artificial Sequence
  ENSG00000198719_11 (sequence is synthesized)
cacacagattctcctgatgacctcgcaacagaaaacccagaaagactcatcagccgcctggccacccagaggcacctgacggtgggcgaggagtggtcccaggacctgcacagcagcggc

SEQ ID NO: 731198 - DNA, 120 bp, Artificial Sequence
  ENSG00000198719_12 (sequence is synthesized)
cgcacggacctcaagtactcctaccgcttcgtgtgtgacgaacactactacggagagggctgctccgttttctgccgtccccgggacgatgccttcggccacttcacctgtggggagcgt

SEQ ID NO: 731199 - DNA, 120 bp, Artificial Sequence
  ENSG00000198719_13 (sequence is synthesized)
ggggagaaagtgtgcaaccctggctggaaagggccctactgcacagagccgatctgcctgcctggatgtgatgagcagcatggattttgtgacaaaccaggggaatgcaagtgcagagtg

SEQ ID NO: 731200 - DNA, 120 bp, Artificial Sequence
  ENSG00000198719_14 (sequence is synthesized)
ggctggcagggccggtactgtgacgagtgtatccgctatccaggctgtctccatggcacctgccagcagccctggcagtgcaactgccaggaaggctgggggggccttttctgcaaccag

SEQ ID NO: 731201 - DNA, 120 bp, Artificial Sequence
  ENSG00000198719_15 (sequence is synthesized)
gggccaggggagctacacttgctcttgccggcctgggtacacaggtgccacctgcgagctggggattgacgagtgtgaccccagcccttgtaagaacggagggagctgcacggatctcga

SEQ ID NO: 731202 - DNA, 120 bp, Artificial Sequence
  ENSG00000198719_16 (sequence is synthesized)
gaacagctactcctgtacctgcccacccggcttctacggcaaaatctgtgaattgagtgccatgacctgtgcggacggcccttgctttaacgggggtcggtgctcagacagccccgatgg

SEQ ID NO: 731203 - DNA, 120 bp, Artificial Sequence
  ENSG00000198719_17 (sequence is synthesized)
agggtacagctgccgctgccccgtgggctactccggcttcaactgtgagaagaaaattgactactgcagctcttcaccctgttctaatggtgccaagtgtgtggacctcggtgatgccta

SEQ ID NO: 731204 - DNA, 120 bp, Artificial Sequence
  ENSG00000198719_18 (sequence is synthesized)
cctgtgccgctgccaggccggcttctcggggaggcactgtgacgacaacgtggacgactgcgcctcctccccgtgcgccaacgggggcacctgccgggatggcgtgaacgacttctcctg

SEQ ID NO: 731205 - DNA, 120 bp, Artificial Sequence
  ENSG00000198719_19 (sequence is synthesized)
cacctgcccgcctggctacacgggcaggaactgcagtgcccccgtcagcaggtgcgagcacgcaccctgccacaatggggccacctgccacgagaggggccaccgctatgtgtgcgagtg

SEQ ID NO: 731206 - DNA, 120 bp, Artificial Sequence
  ENSG00000198719_20 (sequence is synthesized)
tgcccgaggctacgggggtcccaactgccagttcctgctccccgagctgcccccgggcccagcggtggtggacctcactgagaagctagagggccagggcgggccattcccctgggtggc

SEQ ID NO: 731207 - DNA, 120 bp, Artificial Sequence
  ENSG00000198719_21 (sequence is synthesized)
cgtgtgcgccggggtcatccttgtcctcatgctgctgctgggctgtgccgctgtggtggtctgcgtccggctgaggctgcagaagcaccggcccccagccgacccctgccggggggagac

SEQ ID NO: 731208 - DNA, 120 bp, Artificial Sequence
  ENSG00000198719_22 (sequence is synthesized)
ggagaccatgaacaacctggccaactgccagcgtgagaaggacatctcagtcagcatcatcggggccacgcagatcaagaacaccaacaagaaggcggacttccacggggaccacagcgc

SEQ ID NO: 731209 - DNA, 120 bp, Artificial Sequence
  ENSG00000198719_23 (sequence is synthesized)
cgacaagaatggcttcaaggcccgctacccagcggtggactataacctcgtgcaggacctcaagggtgacgacaccgccgtcagggacgcgcacagcaagcgtgacaccaagtgccagcc

SEQ ID NO: 731210 - DNA, 120 bp, Artificial Sequence
  ENSG00000198719_24 (sequence is synthesized)
ccagggctcctcaggggaggagaaggggaccccgaccacactcaggggtggagaagcatctgaaagaaaaaggccggactcgggctgttcaacttcaaaagacaccaagtaccagtcggt

SEQ ID NO: 731211 - DNA, 120 bp, Artificial Sequence
  ENSG00000198719_25 (sequence is synthesized)
gtacgtcatatccgaggagaaggatgagtgcgtcatagcaactgaggtgtaaaatggaagtgagatggcaagactcccgtttctcttaaaataagtaaaattccaaggatatatgcccca

SEQ ID NO: 731212 - DNA, 120 bp, Artificial Sequence
  ENSG00000198719_26 (sequence is synthesized)
acgaatgctgctgaagaggagggaggcctcgtggactgctgctgagaaaccgagttcagaccgagcaggttctcctcctgaggtcctcgacgcctgccgacagcctgtcgcggcccggcc

SEQ ID NO: 731213 - DNA, 120 bp, Artificial Sequence
  ENSG00000198719_27 (sequence is synthesized)
gcctgcggcactgccttccgtgacgtcgccgttgcactatggacagttgctcttaagagaatatatatttaaatgggtgaactgaattacgcataagaagcatgcactgcctgagtgtat

SEQ ID NO: 731214 - DNA, 120 bp, Artificial Sequence
  ENSG00000198719_28 (sequence is synthesized)
attttggattcttatgagccagtcttttcttgaattagaaacacaaacactgcctttattgtcctttttgatacgaagatgtgctttttctagatggaaaagatgtgtgttattttttgg

SEQ ID NO: 731215 - DNA, 120 bp, Artificial Sequence
  ENSG00000198719_29 (sequence is synthesized)
atttgtaaaaatatttttcatgatatctgtaaagcttgagtattttgtgatgttcgttttttataatttaaattttggtaaatatgtacaaaggcacttcgggtctatgtgactatattt

SEQ ID NO: 731216 - DNA, 120 bp, Artificial Sequence
  ENSG00000198719_30 (sequence is synthesized)
gggtctatgtgactatatttttttgtatataaatgtatttatggaatattgtgcaaatgttatttgagttttttactgttttgttaatgaagaaattcctttttaaaatatttttccaaa

SEQ ID NO: 731217 - DNA, 120 bp, Artificial Sequence
  ENSG00000198720_0 (sequence is synthesized)
ctctctccccatcatccccacatccccgtatcccgcgccggccgctcgggctgagggccgggctatgcagctgtggggacccgggggctgcgggcgcgcgtccctgcggcggcgtccccg

SEQ ID NO: 731218 - DNA, 80 bp, Artificial Sequence
  ENSG00000198720_1 (sequence is synthesized)
ctgctccctccgccgagcggcgtctttgtgtgcgggggtgtgggaggcgagcgcgagtccgcgcagcgccgccgagtgcc

SEQ ID NO: 731219 - DNA, 80 bp, Artificial Sequence
  ENSG00000198720_2 (sequence is synthesized)
gcgccgtccctcctccccggccgggcgccgcggccccggcatgaggagcgggcgatgatccccgccaacgcctccgccag

SEQ ID NO: 731220 - DNA, 120 bp, Artificial Sequence
  ENSG00000198720_3 (sequence is synthesized)
ggagcgggcgatgatccccgccaacgcctccgccaggaaggggcccgagggcaagtatccgctgcactacctcgtgtggcacaaccgccaccgcgagctggagaaggaggtccgcgcggg

SEQ ID NO: 731221 - DNA, 120 bp, Artificial Sequence
  ENSG00000198720_4 (sequence is synthesized)
ccaggtggacatcgagcagctggatccccgcggccggactcccctgcacctggccaccacgctggggcaccttgagtgtgcccgtgtgctcctggcgcacggcgcagacgtgggcaggga

SEQ ID NO: 731222 - DNA, 120 bp, Artificial Sequence
  ENSG00000198720_5 (sequence is synthesized)
gaatcgcagcggctggacagtgctccaggaggctgtgagtacccgggacctggagctggtgcagctggtgcttcggtaccgggactaccagcgggtggtgaagcggctggcgggcatccc

SEQ ID NO: 731223 - DNA, 120 bp, Artificial Sequence
  ENSG00000198720_6 (sequence is synthesized)
cgtgctcctggagaagctgcgcaaggcccaggacttctacgtggagatgaaatgggagttcactagctgggtgcccctggtgtccaagatctgccctagtgacacctacaaagtgtggaa

SEQ ID NO: 731224 - DNA, 120 bp, Artificial Sequence
  ENSG00000198720_7 (sequence is synthesized)
gagcggccagaacctgagggtagacaccacactcctgggctttgaccacatgacctggcagcgagggaaccgcagctttgtcttcaggggccaagacacaagcgccgtggtcatggagat

SEQ ID NO: 731225 - DNA, 120 bp, Artificial Sequence
  ENSG00000198720_8 (sequence is synthesized)
tgaccacgaccgccgggtggtgtacacagagactctggcactggctgggcaggaccgggagctgctgctggctgctgctcagcccactgaggaacaggtgctgagccggcttaccgcgcc

SEQ ID NO: 731226 - DNA, 120 bp, Artificial Sequence
  ENSG00000198720_9 (sequence is synthesized)
cgtcgtcaccactcagcttgacaccaagaatatctcctttgagaggaacaagactggcatcctgggctggcgcagtgaaaagacggagatggtgaatgggtatgaagctaaggtgtatgg

SEQ ID NO: 731227 - DNA, 120 bp, Artificial Sequence
  ENSG00000198720_10 (sequence is synthesized)
ggcatctaacgtggagctcatcacccgcacacggacagaacatctttcagaacagcacaagggcaaggtcaaaggctgtaagacacctttgcagtccttcctgggaatcgctgagcagca

SEQ ID NO: 731228 - DNA, 120 bp, Artificial Sequence
  ENSG00000198720_11 (sequence is synthesized)
cgggggcccccaaaatgggaccctgatcactcagactctgagccaagccaaccccactgccatcactgcagaagaatacttcaaccccaactttgagctgggcaaccgtgatatgggccg

SEQ ID NO: 731229 - DNA, 120 bp, Artificial Sequence
  ENSG00000198720_12 (sequence is synthesized)
ccccatggaactgaccaccaagacacagaagttcaaggccaagctgtggctgtgtgaggagcatcccctgtccctgtgtgagcaggtggcccccatcattgacctcatggccgtcagcaa

SEQ ID NO: 731230 - DNA, 120 bp, Artificial Sequence
  ENSG00000198720_13 (sequence is synthesized)
atcccgatcttccacatcctcaacgcccgcatcaccttcgggaacctcaacggctgcgacgaaccggtgccatcggtgcgaggcagccccagcagcgagacgccttccccaggcagcgac

SEQ ID NO: 731231 - DNA, 120 bp, Artificial Sequence
  ENSG00000198720_14 (sequence is synthesized)
tcctccagcgtcagcagctccagctccacgacctcctgccgcggctgcgagatctccccagcgttgttcgaggccccgcgcggctacagcatgatgggcggccagcgggaggcggcgacc

SEQ ID NO: 731232 - DNA, 120 bp, Artificial Sequence
  ENSG00000198720_15 (sequence is synthesized)
cgggacgacgacgacgacctgctgcaattcgccatccagcagagcctgcttgaggcgggcagtgagtatgaccaggtcaccatctgggaggcgctaaccaacagcaagccaggcacccac

SEQ ID NO: 731233 - DNA, 120 bp, Artificial Sequence
  ENSG00000198720_16 (sequence is synthesized)
cccatgtcctacgagggtcgccgacaggacaggagcgccccgcccacgccgcagcgccagcctgcgcccccggcgtcagtgcccagccctcggcccagctcagggccaggttccggcggc

SEQ ID NO: 731234 - DNA, 120 bp, Artificial Sequence
  ENSG00000198720_17 (sequence is synthesized)
cacgtgttccggagctacgacgagcagctgcggctggcgatggaactgtcggcgcaggagcaggaggagaggcggcggcgcgcgcgccaggaggaggaggagctggagcgcatcctgagg

SEQ ID NO: 731235 - DNA, 120 bp, Artificial Sequence
  ENSG00000198720_18 (sequence is synthesized)
ctctcactgaccgagcagtagcgccccctgccgggaccctcgccagcgccacgcgcgccacgcccagggccaggagccagacaaaccccggcctgcgcgcctgcagagcggcggctggag

SEQ ID NO: 731236 - DNA, 120 bp, Artificial Sequence
  ENSG00000198720_19 (sequence is synthesized)
actggagccaccgcctcgcgggtgcagcagcacagcaggcacggttcggggagggattcggcatggccgcggggtaccttcccaggccagggccctggaggcaactggcacggcctggtc

SEQ ID NO: 731237 - DNA, 120 bp, Artificial Sequence
  ENSG00000198720_20 (sequence is synthesized)
cccctgctttgctgtattctgattccccaacccgctcccctgggctcagatctgtcctgtcctagggcggagccaggcggtcctgagggggagatgaatccttagaggagcgctgtccct

SEQ ID NO: 731238 - DNA, 120 bp, Artificial Sequence
  ENSG00000198720_21 (sequence is synthesized)
atcccttgctccttctggccggtccgcatttctgttcactaaccccactccaggacactgcccctgaagcctttgcatctctgctcttcactcctggggggcagctgagctccccgcgtg

SEQ ID NO: 731239 - DNA, 120 bp, Artificial Sequence
  ENSG00000198720_22 (sequence is synthesized)
ctgtgtcactgctttgttccagacacaaaccagcacgtctagggcccagcccctcccccaccccggcatttcagcgtcaagtgcacttagcggggtacccggctcccccagcccccacac

SEQ ID NO: 731240 - DNA, 120 bp, Artificial Sequence
  ENSG00000198720_23 (sequence is synthesized)
ccgtcctgggtctcagggtggttccagcttctccttgggcagccagaagttggagtcccatcccccaaggcacatttttttttttttttttttgtgatcagggagtgtgtccaacgtagc

SEQ ID NO: 731241 - DNA, 120 bp, Artificial Sequence
  ENSG00000198720_24 (sequence is synthesized)
cccctggcctgtgcaagccctgactccctcatggtgcctcggagagtggggagcatattgggctggggtaagcactagacccaagtagactggacacaaagggctcgcccagggccctgg

SEQ ID NO: 731242 - DNA, 120 bp, Artificial Sequence
  ENSG00000198720_25 (sequence is synthesized)
cgccacccccaccccttcccaccagctgctgctagcctctgtggttgtacatcccacttgcccccacacggagactgactctaaaacccttcatccaatggtgctaacccccggctctcc

SEQ ID NO: 731243 - DNA, 120 bp, Artificial Sequence
  ENSG00000198720_26 (sequence is synthesized)
cctgccccacctcacccacccagagaagcacagaccccgccaggggcaggggcccaccgcacacccttgtcccgggcctgtctgggactggccttcccggctcagccagtgaggctcaga

SEQ ID NO: 731244 - DNA, 120 bp, Artificial Sequence
  ENSG00000198720_27 (sequence is synthesized)
agggacacaaagagggatggaagaaaagaacaaagagaaactgttcctcccacccccttccctgatgccaggggcaccagactgattctgaggcacaaataaaagaggcttcataccgga

SEQ ID NO: 731245 - DNA, 120 bp, Artificial Sequence
  ENSG00000198720_28 (sequence is synthesized)
cccacagccggggcctccccagcatcatagacctatggttggctgaagggtcctgccctgtgaccttgcctcgccctcccccagtgctccaggaggctgcccaggacttctacgtggaga

SEQ ID NO: 731246 - DNA, 120 bp, Artificial Sequence
  ENSG00000198720_29 (sequence is synthesized)
cccgtcccgacctcaggttgctcttctgtgtgagtatggtctacactggccagggagggggttttggaggagaggctgctctctcttcagttccctcccctgttcctggccacacggatc

SEQ ID NO: 731247 - DNA, 120 bp, Artificial Sequence
  ENSG00000198720_30 (sequence is synthesized)
ccaaaccccatgccctgagctggtccaggccgtgtaggccagaccagtcaaagccacctccaacctccgcttccaccagtgcccctggtgtccaagatctgccctagtgacacctacaaa

SEQ ID NO: 731248 - DNA, 120 bp, Artificial Sequence
  ENSG00000198720_31 (sequence is synthesized)
gcttgacaccaagaatatctcctttgagaggtgggtggacatggccttggtcacccttgagccagcccggtggggtgcctgcctcacctggaccactctgcttccccaggaacaagactg

SEQ ID NO: 731249 - DNA, 120 bp, Artificial Sequence
  ENSG00000198720_32 (sequence is synthesized)
atgtcctacgagggtcgccgacaggacaggtcagtgcccgctgggccggagagaatcctccggagaggatcctgtctcccctaagccaggacacagccggagaacccgcggggccctcgg

SEQ ID NO: 731250 - DNA, 120 bp, Artificial Sequence
  ENSG00000198720_33 (sequence is synthesized)
cagggaccctcctggtatcgggatggcttctgccaccactcctgcctccgaggcggcaggcaggggtcagggatccaggcttcaccgcggagttcagactctccccaggcattgacgggg

SEQ ID NO: 731251 - DNA, 120 bp, Artificial Sequence
  ENSG00000198721_0 (sequence is synthesized)
acccccgagcccccgcagccctagagccgcccaagggatggcgatggcgtacttggcttggagactggcgcggcgttcgtgtccgaggtcactagtttcccggtagttcagctgcacatg

SEQ ID NO: 731252 - DNA, 120 bp, Artificial Sequence
  ENSG00000198721_1 (sequence is synthesized)
aatagaacagcaatgagagccagtcagaaggactttgaaaattcaatgaatcaagtgaaactcttgaaaaaggatccaggaaacgaagtgaagctaaaactctacgcgctatataagcag

SEQ ID NO: 731253 - DNA, 120 bp, Artificial Sequence
  ENSG00000198721_2 (sequence is synthesized)
gccactgaaggaccttgtaacatgcccaaaccaggtgtatttgacttgatcaacaaggccaaatgggacgcatggaatgcccttggcagcctgcccaaggaagctgccaggcagaactat

SEQ ID NO: 731254 - DNA, 120 bp, Artificial Sequence
  ENSG00000198721_3 (sequence is synthesized)
gtggatttggtgtccagtttgagtccttcattggaatcctctagtcaggtggagcctggaacagacaggaaatcaactgggtttgaaactctggtggtgacctccgaagatggcatcaca

SEQ ID NO: 731255 - DNA, 120 bp, Artificial Sequence
  ENSG00000198721_4 (sequence is synthesized)
aagatcatgttcaaccggcccaaaaagaaaaatgccataaacactgagatgtatcatgaaattatgcgtgcacttaaagctgccagcaaggatgactcaatcatcactgttttaacagga

SEQ ID NO: 731256 - DNA, 120 bp, Artificial Sequence
  ENSG00000198721_5 (sequence is synthesized)
ggagtagaggagaaagctaaaaataatgccgttttactgagggaatttgtgggctgttttatagattttcctaagcctctgattgcagtggtcaatggtccagctgtgggcatctccgtc

SEQ ID NO: 731257 - DNA, 120 bp, Artificial Sequence
  ENSG00000198721_6 (sequence is synthesized)
accctccttgggctattcgatgccgtgtatgcatctgacagggcaacatttcatacaccatttagtcacctaggccaaagtccggaaggatgctcctcttacacttttccgaagataatg

SEQ ID NO: 731258 - DNA, 120 bp, Artificial Sequence
  ENSG00000198721_7 (sequence is synthesized)
agcccagccaaggcaacagagatgcttatttttggaaagaagttaacagcgggagaggcatgtgctcaaggacttgttactgaagttttccctgatagcacttttcagaaagaagtctgg

SEQ ID NO: 731259 - DNA, 120 bp, Artificial Sequence
  ENSG00000198721_8 (sequence is synthesized)
accaggctgaaggcatttgcaaagcttcccccaaatgccttgagaatttcaaaagaggtaatcaggaaaagagagagagaaaaactacacgctgttaatgctgaagaatgcaatgtcctt

SEQ ID NO: 731260 - DNA, 120 bp, Artificial Sequence
  ENSG00000198721_9 (sequence is synthesized)
cagggaagatggctatcagatgaatgcacaaatgctgtggtgaacttcttatccagaaaatcaaaactgtgatgaccactacagcagagtaaagcatgtccaaggaaggatgtgctgtta

SEQ ID NO: 731261 - DNA, 120 bp, Artificial Sequence
  ENSG00000198721_10 (sequence is synthesized)
cctctgatttccagtactggaactaaataagcttcattgtgccttttgtagtgctagaatatcaattacaatgatgatatttcactacagctctgatgaataaaaagttttgtaaaacaa

SEQ ID NO: 731262 - DNA, 120 bp, Artificial Sequence
  ENSG00000198721_11 (sequence is synthesized)
ggataccgctgtccaggcgaaggtcgccgccgttggaagaccctccttccctattgtctaggtggcaacaggattttgctttgctggttttccggtgaggtcactagtttcccggtagtt

SEQ ID NO: 731263 - DNA, 120 bp, Artificial Sequence
  ENSG00000198721_12 (sequence is synthesized)
gcgatggcgtacttggcttggagactggcgcggcgttcgtgtccgaggtaagcttggagtcccggccgttcggcccatggtcgcccgcaggataccgctgtccaggcgaaggtcgccgcc

SEQ ID NO: 731264 - DNA, 120 bp, Artificial Sequence
  ENSG00000198721_13 (sequence is synthesized)
gttggaagaccctccttccctattgtctaggtggcaacaggattttgctttgctggttttccggtgaggtagtgctaaaaagtgacgacctcacgcgcgccctcctgcaccgctgggccc

SEQ ID NO: 731265 - DNA, 120 bp, Artificial Sequence
  ENSG00000198721_14 (sequence is synthesized)
acccccgagcccccgcagccctagagccgcccaagggatggcgatggcgtacttggcttggagactggcgcggcgttcgtgtccgagttctctgcaggtcactagtttcccggtagttca

SEQ ID NO: 731266 - DNA, 120 bp, Artificial Sequence
  ENSG00000198721_15 (sequence is synthesized)
tcccagagggcccgttcttagtcatcaaagtggtatttagttgagcaaaagtgcaatatctgcttctctgtgtcagtgcagttaattgtgactttggacaagcatatttctctaaactgc

SEQ ID NO: 731267 - DNA, 120 bp, Artificial Sequence
  ENSG00000198721_16 (sequence is synthesized)
ctccatccataggtgggcattcattctttctctttgacctctgttacctgttcatcctgctggtctcatgagatttgactggaaaacataaaagtgagctatagttgtaaacaaaattat

SEQ ID NO: 731268 - DNA, 120 bp, Artificial Sequence
  ENSG00000198721_17 (sequence is synthesized)
cttgcactgaggcagaggaatttagcaaattctcatccagccagaggaatgggagatttccatgaacgctgaaggtaggagactcggaggagtcttgtaaacacaggaggaggtcatgaa

SEQ ID NO: 731269 - DNA, 120 bp, Artificial Sequence
  ENSG00000198721_18 (sequence is synthesized)
ggcttttctctttattcctgccaaatctgtaattcccacttgttgtgatattgcagcatgtgctcagtcacccaacctaatctctaagactgcggctggtttacagccctgaactcactg

SEQ ID NO: 731270 - DNA, 120 bp, Artificial Sequence
  ENSG00000198721_19 (sequence is synthesized)
tccagaatacaagattcaaaccagggttgacccataggtctcactggttggtcttccatccactgccattcagacggatgccctggatgaatctggtgcggaagaccagggaagtggcag

SEQ ID NO: 731271 - DNA, 120 bp, Artificial Sequence
  ENSG00000198721_20 (sequence is synthesized)
gacaaggaggcactgctggtggtggctgtggaaacacccagcctgacagaaggctttatctcagagtcagactgtcttgcccatgctttagtcatgctgctttggcacatttaatgattt

SEQ ID NO: 731272 - DNA, 120 bp, Artificial Sequence
  ENSG00000198721_21 (sequence is synthesized)
gaatgtttaaatataaaattttatgagtcatctcaagaaagaaggaagagtaatctcatatactctcccttctttcccttggtaatatggacaaaagagaagctaatgatttgcttttca

SEQ ID NO: 731273 - DNA, 120 bp, Artificial Sequence
  ENSG00000198721_22 (sequence is synthesized)
actctttaagagttttaccaatggaggaatcaggctatgggaagtatctgctatgcaggaaaattagaaattctctctgcagttcccagaactgggatcctcctcttcagctggctgctt

SEQ ID NO: 731274 - DNA, 120 bp, Artificial Sequence
  ENSG00000198721_23 (sequence is synthesized)
cctcagccttgcagctgtgtggcattagtcacttgaaggaccagggctgtgccagcctcccttggtcccctgagtttggaggccactcggttcctttatggatgaccagtatctcctaag

SEQ ID NO: 731275 - DNA, 120 bp, Artificial Sequence
  ENSG00000198721_24 (sequence is synthesized)
gagagacatgatgacgtcttcactttcagagttacagtaagtaccaacagatgggaggttttgtgggggctcacggctgccagagccacccccaatcacagcagcccttccatcagcctg

SEQ ID NO: 731276 - DNA, 120 bp, Artificial Sequence
  ENSG00000198721_25 (sequence is synthesized)
ctcacgggtgtattctctcccaggctggttaagtggctgctcaggtctttcactgtgtttcctagttgcccacgccctgtggcatgactcgaaggggattgtgacaagaccagaagctga

SEQ ID NO: 731277 - DNA, 120 bp, Artificial Sequence
  ENSG00000198721_26 (sequence is synthesized)
gctataggaaaaggcttagcaaatattgctgcaagatctcaaagtggggcagtgggaattgagcttgttttcattgcctattaggattttgttaaaaacttatatatgtatgtttttact

SEQ ID NO: 731278 - DNA, 120 bp, Artificial Sequence
  ENSG00000198721_27 (sequence is synthesized)
tactctcattaggctatcacataccctgaattgaacttgggaagggggcagaactgactctacaagtcttagagcatttggctattagagcattccttggctgggtgcagtggctcacac

SEQ ID NO: 731279 - DNA, 120 bp, Artificial Sequence
  ENSG00000198721_28 (sequence is synthesized)
cagtgagactctgtctcaaaaaaaagaagagcattccttttctggaaaagaaattgcaaatggagagaggatatccacttaatgtcctcagttttttcggaagctaactataagtctttg

SEQ ID NO: 731280 - DNA, 120 bp, Artificial Sequence
  ENSG00000198721_29 (sequence is synthesized)
ctttcctttagtcaaatagaactaatttgagtaccaatgcaggtaaagaaaactctcagagccagatcactgggtagtttccagagaatggaattttgaaagtttctaaaggttgaccca

SEQ ID NO: 731281 - DNA, 120 bp, Artificial Sequence
  ENSG00000198721_30 (sequence is synthesized)
atgaccgtaatttttctctccttttttcctctgtaaaataatagtttatagtgtatcaaatggaaaatcatagctgctgtgggttatagaatcaagcatctgcttcagatcatttctgcc

SEQ ID NO: 731282 - DNA, 120 bp, Artificial Sequence
  ENSG00000198721_31 (sequence is synthesized)
ctggaccccctgatcttgcccctccaacaacgatacacagaagcagcagcccttatagaccttcccaggagcctgtctcagcacacagtttgcaaaccgttgcctattgaggtcatcagc

SEQ ID NO: 731283 - DNA, 120 bp, Artificial Sequence
  ENSG00000198721_32 (sequence is synthesized)
ttctcccttactgagaaataccagcaacctcaaaagaccatgagtacatctctctaagcctcctgaaagcagttaactgaagccttgttttattaagttagtatcttaaccttgcttctt

SEQ ID NO: 731284 - DNA, 120 bp, Artificial Sequence
  ENSG00000198721_33 (sequence is synthesized)
atgttcaaccggcccaaaaagaaaaatgccataaacactgaggaaggttggtaattgtggctacttcatacaacagagttgagcattcattgtttagagtttgtgaatttcagatgtatc

SEQ ID NO: 731285 - DNA, 120 bp, Artificial Sequence
  ENSG00000198721_34 (sequence is synthesized)
tggggccggactccgggcgggtgagccgccccagctgagcacccgggcctgcacttcccagccgggctgcttctggggtgcaaagcgtcgcttgctaaaagcgagttctctgcaggtcac

SEQ ID NO: 731286 - DNA, 120 bp, Artificial Sequence
  ENSG00000198722_0 (sequence is synthesized)
cccagcctgccggccggtactcaccgctacccggagttcgctcagacggtgagatttggggcgggtccgaggcagcggcgggacgctacctgcgaccgggaccatgaggagctgccagac

SEQ ID NO: 731287 - DNA, 120 bp, Artificial Sequence
  ENSG00000198722_1 (sequence is synthesized)
ccgtggggccggtaacgagagcagtcgcggcacctgctgagaggaaagagggagcggtccggcgcggctggggcgcggcagaggcttgcccgatcctcggccatgtcactgctctgcgtg

SEQ ID NO: 731288 - DNA, 120 bp, Artificial Sequence
  ENSG00000198722_2 (sequence is synthesized)
cgcgttaaaagggccaaattccagggttcaccagataaatttaacacatatgtgaccctgaaagtacagaatgtgaagagcacaactgtagcagttcgtggtgatcagccttcctgggaa

SEQ ID NO: 731289 - DNA, 120 bp, Artificial Sequence
  ENSG00000198722_3 (sequence is synthesized)
caggatttcatgtttgagattagtcgcctggacctgggtctaagtgtggaggtatggaacaaaggactgatctgggacaccatggtggggactgtgtggattgcgctgaagactattcgt

SEQ ID NO: 731290 - DNA, 120 bp, Artificial Sequence
  ENSG00000198722_4 (sequence is synthesized)
cagtcggatgaggaagggcctggggaatggtccacattagaggcagagacgttaatgaaagacgatgagatctgtggaactagaaacccaactcctcataaaattttgcttgatacaaga

SEQ ID NO: 731291 - DNA, 120 bp, Artificial Sequence
  ENSG00000198722_5 (sequence is synthesized)
tttgagttgccttttgatatcccagaggaggaagccagatattggacctacaaatgggagcaaatcaatgccttgggagctgacaatgagtattctagtcaagaagaaagccagaggaag

SEQ ID NO: 731292 - DNA, 120 bp, Artificial Sequence
  ENSG00000198722_6 (sequence is synthesized)
ccattgcccactgctgccgcccagtgttcttttgaagaccctgatagtgccgtcgatgaccgagatagtgactatcgcagtgagaccagcaacagcttcccacctccttaccatacagct

SEQ ID NO: 731293 - DNA, 120 bp, Artificial Sequence
  ENSG00000198722_7 (sequence is synthesized)
tcccagcccaacgcttctgtgcaccagttccctgtgccggtgcgatcgccacagcagctgctacttcaaggcagttcccgggactcttgtaatgactctatgcaaagttatgaccttgat

SEQ ID NO: 731294 - DNA, 120 bp, Artificial Sequence
  ENSG00000198722_8 (sequence is synthesized)
tatccagagcggcgggctatcagccccaccagcagcagtaggtatggctcctcctgtaatgtgagtcaaggaagctctcagctaagtgaactagaccagtatcacgaacaagatgacgac

SEQ ID NO: 731295 - DNA, 120 bp, Artificial Sequence
  ENSG00000198722_9 (sequence is synthesized)
catcgggagacggactcgattcattcttgccacagctctcacagcctgtccagagatggccaagcaggttttggagaacaagagaaacccttggaggtgacaggtcaagcagagaaggag

SEQ ID NO: 731296 - DNA, 120 bp, Artificial Sequence
  ENSG00000198722_10 (sequence is synthesized)
gcagcatgtgaacccaaggagatgaaagaagatgccacaacccaccctcccccagatctggtgctgcaaaaagaccacttcctaggtccccaggagagttttcctgaggagaatgcatct

SEQ ID NO: 731297 - DNA, 120 bp, Artificial Sequence
  ENSG00000198722_11 (sequence is synthesized)
tcaccatttacccaagccagagcacattggatccgagcagttaccaaggttcgactccagctgcaggagattccagatgatggtgacccctctctgcctcagtggctcccggaagggcca

SEQ ID NO: 731298 - DNA, 120 bp, Artificial Sequence
  ENSG00000198722_12 (sequence is synthesized)
gccggagggctctatggcattgacagcatgccagatttacgcagaaagaagccactgccacttgtcagtgatctgtcactggtccagtctcggaaggcaggaatcacttctgcaatggct

SEQ ID NO: 731299 - DNA, 120 bp, Artificial Sequence
  ENSG00000198722_13 (sequence is synthesized)
acacgcacttctcttaaggacgaagagctgaaatcccacgtgtataagaaaaccctgcaggccttaatctaccccatttcgtgcaccactcctcataactttgaggtctggacggccact

SEQ ID NO: 731300 - DNA, 120 bp, Artificial Sequence
  ENSG00000198722_14 (sequence is synthesized)
accccaacctactgctatgagtgtgaaggcctgctctggggcattgcccggcagggcatgcgctgcagcgaatgtggagtcaagtgccatgagaagtgccaggatctgctcaatgctgac

SEQ ID NO: 731301 - DNA, 120 bp, Artificial Sequence
  ENSG00000198722_15 (sequence is synthesized)
tgcctgcagcgggctgcagaaaagagctgtaaacatggagctgaggaccggacccagaacattatcatggccatgaaggaccgcatgaagatccgagagcgaaataagccagagatcttt

SEQ ID NO: 731302 - DNA, 120 bp, Artificial Sequence
  ENSG00000198722_16 (sequence is synthesized)
gaagttatccgggacgtcttcacagtgaacaaagctgcccatgtgcagcagatgaaaacagtgaagcagagtgtactggatggcacctccaaatggtcagccaagatcaccattactgtg

SEQ ID NO: 731303 - DNA, 120 bp, Artificial Sequence
  ENSG00000198722_17 (sequence is synthesized)
gtgtgtgcccagggcctacaagccaaggacaaaacaggatccagtgacccttacgtgactgtgcaagtcagcaaaactaagaagcgtaccaagaccatttttggaaacttgaatcctgtt

SEQ ID NO: 731304 - DNA, 120 bp, Artificial Sequence
  ENSG00000198722_18 (sequence is synthesized)
tgggaggagaagttccattttgagtgccacaactcctctgaccgcattaaggtgcgtgtatgggatgaggatgatgacatcaagtcaagagtaaagcaacgcctaaagcgagagtctgat

SEQ ID NO: 731305 - DNA, 120 bp, Artificial Sequence
  ENSG00000198722_19 (sequence is synthesized)
gatttccttggccaaaccatcattgaggttcggaccctaagtggcgagatggacgtctggtacaacttggagaagaggacagacaaatcagccgtctcaggggctatccgactacaaatc

SEQ ID NO: 731306 - DNA, 120 bp, Artificial Sequence
  ENSG00000198722_20 (sequence is synthesized)
agtgtggagatcaagggggaggagaaagtagccccataccacgtgcagtatacatgtctccatgagaatcttttccattacctcacagacattcagggcagtggaggagtccgcatccct

SEQ ID NO: 731307 - DNA, 120 bp, Artificial Sequence
  ENSG00000198722_21 (sequence is synthesized)
gaagctcgaggagacgatgcctggaaggtgtactttgatgagacagcccaagaaattgtggatgaatttgccatgcgttatggcattgagtccatatatcaggccatgacgcactttgca

SEQ ID NO: 731308 - DNA, 120 bp, Artificial Sequence
  ENSG00000198722_22 (sequence is synthesized)
tgtttatcatccaagtacatgtgtcctggtgtgccagcagtgatgagcaccttactggccaacatcaacgcctactatgcccacacaactgcctctaccaatgtctctgcatctgatcgc

SEQ ID NO: 731309 - DNA, 120 bp, Artificial Sequence
  ENSG00000198722_23 (sequence is synthesized)
tttgcagcctccaactttgggaaagagagatttgtaaaactgctggaccagctacacaactcactgaggatcgacctctctacatacaggaataatttccctgctgggagtcctgaacgg

SEQ ID NO: 731310 - DNA, 120 bp, Artificial Sequence
  ENSG00000198722_24 (sequence is synthesized)
cttcaggacttaaaatccacagtggatttgctgaccagcattactttcttcagaatgaaggtacaagaactgcaaagccctccaagagccagccaggtggtaaaggattgtgtgaaggcc

SEQ ID NO: 731311 - DNA, 120 bp, Artificial Sequence
  ENSG00000198722_25 (sequence is synthesized)
tgtttgaactccacatatgaatatatcttcaacaactgccacgacttatacagccgccagtaccagctgaagcaggagctacctccagaggaacaagggcccagcattcggaacctggat

SEQ ID NO: 731312 - DNA, 120 bp, Artificial Sequence
  ENSG00000198722_26 (sequence is synthesized)
cctgttctgaaccagtttcctcaggagttgaatgtgggaaaagtcagcgcagaagtgatgtggcatttgtttgcccaagacatgaaatatgcattggaggagcatgagaaagaccacctg

SEQ ID NO: 731313 - DNA, 120 bp, Artificial Sequence
  ENSG00000198722_27 (sequence is synthesized)
tgtaaaagtgctgactacatgaacctgcacttcaaggtgaagtggctccacaatgaatacgtgcgggatctgcctgtcctccaggggcaggtgcctgagtacccagcgtggtttgagcag

SEQ ID NO: 731314 - DNA, 120 bp, Artificial Sequence
  ENSG00000198722_28 (sequence is synthesized)
ttcgtgctacaatggctggatgagaatgaggatgtatccctggaattcctgcgtggggccctggaacgagataagaaggatggattccagcagacatcagagcatgcactcttttcctgc

SEQ ID NO: 731315 - DNA, 120 bp, Artificial Sequence
  ENSG00000198722_29 (sequence is synthesized)
tctgtggtggatgtcttcacacaactcaatcagagctttgagatcatccggaagctggaatgcccagaccccagcatccttgcccactacatgaggaggtttgctaagaccatcgggaag

SEQ ID NO: 731316 - DNA, 120 bp, Artificial Sequence
  ENSG00000198722_30 (sequence is synthesized)
gtgctgatgcagtatgcagacatcttgtcaaaggacttcccagcctattgcacaaaggagaaactgccctgcatcctgatgaacaacgtgcagcaactgagggtccagctggagaaaatg

SEQ ID NO: 731317 - DNA, 120 bp, Artificial Sequence
  ENSG00000198722_31 (sequence is synthesized)
tttgaggccatgggaggcaaggagctggaccttgaagctgcagacagtctgaaggagctgcaggtgaaactgaatacggttctggatgagctcagcatggtgtttggaaacagtttccag

SEQ ID NO: 731318 - DNA, 120 bp, Artificial Sequence
  ENSG00000198722_32 (sequence is synthesized)
gtacggattgatgagtgtgttcgacaaatggccgacatcctgggccaggttcggggcacagggaatgcatctccagacgccagggcctcagcggctcaggatgcagatagcgtactccgg

SEQ ID NO: 731319 - DNA, 120 bp, Artificial Sequence
  ENSG00000198722_33 (sequence is synthesized)
cctctcatggacttcctggatggcaacctcaccctctttgccactgtgtgtgagaagacggttctgaagcgtgtactgaaggagctctggcgcgtggtgatgaacacaatggagaggatg

SEQ ID NO: 731320 - DNA, 120 bp, Artificial Sequence
  ENSG00000198722_34 (sequence is synthesized)
attgttctgcccccactcactgaccagacgggcacccagctgatcttcactgctgccaaggagctgagccatctttccaaactcaaggatcacatggtacgagaggaaacacggaatctc

SEQ ID NO: 731321 - DNA, 120 bp, Artificial Sequence
  ENSG00000198722_35 (sequence is synthesized)
actccaaagcagtgtgcagtccttgacctcgccctggacaccatcaagcaatacttccatgcaggaggcaatgggctgaagaaaaccttcctggagaagagcccagatctgcagtctcta

SEQ ID NO: 731322 - DNA, 120 bp, Artificial Sequence
  ENSG00000198722_36 (sequence is synthesized)
cgctatgccctgtctctgtacacacagactactgacactctcatcaagacctttgtgcgctcgcagaccacccaagggtctggtgtggacgatcctgtgggagaagtctctattcaggtg

SEQ ID NO: 731323 - DNA, 120 bp, Artificial Sequence
  ENSG00000198722_37 (sequence is synthesized)
gacttgtttacacaccctggtactggggagcacaaggtcacagtgaaagtggtggctgccaatgacctcaagtggcagacagcgggtatgttccggcctttcgtggaggtgactatggtt

SEQ ID NO: 731324 - DNA, 120 bp, Artificial Sequence
  ENSG00000198722_38 (sequence is synthesized)
ggcccacaccaaagtgataagaagaggaagttcacaaccaaatccaaaagcaacaactgggcccccaagtacaatgagacattccacttcctcctgggaaatgaggaggggcccgagtcc

SEQ ID NO: 731325 - DNA, 120 bp, Artificial Sequence
  ENSG00000198722_39 (sequence is synthesized)
tatgagttgcagatatgcgtgaaggattactgctttgcccgggaagatcgcgtgctagggctggctgtgatgcctctgagggatgtcacagccaagggcagctgtgcctgctggtgcccc

SEQ ID NO: 731326 - DNA, 120 bp, Artificial Sequence
  ENSG00000198722_40 (sequence is synthesized)
ttgggccggaagatccatatggatgagacaggcctgaccattctccggattttatctcagaggagcaatgacgaggtggcccgagaatttgtgaaactcaaatcagagtctcgttccacg

SEQ ID NO: 731327 - DNA, 120 bp, Artificial Sequence
  ENSG00000198722_41 (sequence is synthesized)
gaggaggggagctgaacaccttcgactcctgtgccaatcaggcagcagcaatttcacaaatcagggccagtgggagttagctgtgtaaccggcttagggtctttgcagtcaagaggctga

SEQ ID NO: 731328 - DNA, 120 bp, Artificial Sequence
  ENSG00000198722_42 (sequence is synthesized)
ccccttcagttaaagatatttaaggaaaaatttggggtggtgataatatggcttttcacagaaagggtcatgaagccctggcccaacaggactgtggtactaggggctgggatgtggggt

SEQ ID NO: 731329 - DNA, 120 bp, Artificial Sequence
  ENSG00000198722_43 (sequence is synthesized)
taccacatggagagattttccattaagagagaaggacaaacatttctgagagtgtcagccattcttggtagacacctctccactcctcatcccacctctacccatctccatgccacacct

SEQ ID NO: 731330 - DNA, 120 bp, Artificial Sequence
  ENSG00000198722_44 (sequence is synthesized)
tatccagttagacacatacataccaatcattagaagaacaagtttagaaggtgtggaacttgtgcctggctggctgggtagtcagctgagcctgttgctgagcccggtggtctggattgg

SEQ ID NO: 731331 - DNA, 120 bp, Artificial Sequence
  ENSG00000198722_45 (sequence is synthesized)
agtatggccagggcaggagtacacagaatagaatttagactgtcccttgagtagaatccactgattttctgtggctccagtgagaacaaggctttgaaactgaacaagataacttctaga

SEQ ID NO: 731332 - DNA, 120 bp, Artificial Sequence
  ENSG00000198722_46 (sequence is synthesized)
aatgaactgtactaatccctttccccagattgtatcatgagtagaatcaggttcacgtggtgcttcaaagccctgagaagaatatttctttggaccccaggcactaggggccacctgcct

SEQ ID NO: 731333 - DNA, 120 bp, Artificial Sequence
  ENSG00000198722_47 (sequence is synthesized)
gggagtctccctgcctcactcctctaggcaggggagtgatgcttcaggacgtgacaggctgttctaacatgtgtctacctgagggctagttgaaggatccaggagtattttcttcttggg

SEQ ID NO: 731334 - DNA, 120 bp, Artificial Sequence
  ENSG00000198722_48 (sequence is synthesized)
tgggccctgaacaaagccaaaaattgtagaaaccagtctagaaaaagtcctgctcatctgtggccactgccttctagccgtcctccaccttgcagaaagaatctagcctttggtctctct

SEQ ID NO: 731335 - DNA, 120 bp, Artificial Sequence
  ENSG00000198722_49 (sequence is synthesized)
ctctctcatcggggtcatttgctattcccctctgatattcaaccctatagaaggagcctggactctgatccctctgtacaggctggatggaaggggccctccacacttcctgggaggtca

SEQ ID NO: 731336 - DNA, 120 bp, Artificial Sequence
  ENSG00000198722_50 (sequence is synthesized)
gagacaaactgtttcagagagtcagatggacttcccaagacttgttgagagatgtgacatggttcttggatttcctctgtagcagcctcctggacttcctgaggactcgacattgtccac

SEQ ID NO: 731337 - DNA, 120 bp, Artificial Sequence
  ENSG00000198722_51 (sequence is synthesized)
agatgtactggccattacatgaaacaagaaaccaagcatctttgctgttgttaattattatatgtgccattgttacaggagattataggctagtctgtaataaattatcttatagcagcc

SEQ ID NO: 731338 - DNA, 120 bp, Artificial Sequence
  ENSG00000198722_52 (sequence is synthesized)
tgtgcgctcgcagaccacccaagtgcatgatgggaaaggtattagatttactgctaatgaggacattcgtccggaaaaggggtctggtgtggacgatcctgtgggagaagtctctattca

SEQ ID NO: 731339 - DNA, 120 bp, Artificial Sequence
  ENSG00000198722_53 (sequence is synthesized)
ggcaggaagcagctggagaggaggaggagcagcagcaggagcaggagctgccctgctttctgcctcagtctcaaagcccagaatcgattgagttagaattccacatccagttgaagtttg

SEQ ID NO: 731340 - DNA, 120 bp, Artificial Sequence
  ENSG00000198722_54 (sequence is synthesized)
gctgctgttgccttcagcaggctgatctcagaatcccccttgccagagaggtgtggaccaggttagatttctacgtttgcagccagtgagactcctgccaagcccttcactgaggggttt

SEQ ID NO: 731341 - DNA, 120 bp, Artificial Sequence
  ENSG00000198722_55 (sequence is synthesized)
ttttgcagggcattgtttctgtcatcaactttgtgccgtggagccagccagctgggtgcaactgagaatattagctccttgggtctgtttgtcggttgggcaagcagtggtgctttggct

SEQ ID NO: 731342 - DNA, 120 bp, Artificial Sequence
  ENSG00000198722_56 (sequence is synthesized)
cagaaagttcgtcctgtggcttctctgtcaaaccaaggagtgctcctggatggatttcctcttaaagacagcatttgccttctaaaacttgagaattcatggttttaattttttttttta

SEQ ID NO: 731343 - DNA, 120 bp, Artificial Sequence
  ENSG00000198722_57 (sequence is synthesized)
atttccttaacccttattttggttgcagcagcaagctacaggataaatcaagccaggatccaggggcatgtgcgaggtttggaggccacacatggggccattccaggcagcactgtgggc

SEQ ID NO: 731344 - DNA, 120 bp, Artificial Sequence
  ENSG00000198722_58 (sequence is synthesized)
taagcccaaagcatcagccagcaataattgctagaaacaaactgaaaagagcaggacaggctgttgccttccaaggtaatctctattaagcatcctgaccagaaataagaggaagaagca

SEQ ID NO: 731345 - DNA, 120 bp, Artificial Sequence
  ENSG00000198722_59 (sequence is synthesized)
gagaacccctcaaaccctgagggagaaaatgaagcgattgttgcaagagtcagaggaagaaatcatggttaccttgggaccctcctccaggctttccccagataaggctaaggcagagac

SEQ ID NO: 731346 - DNA, 120 bp, Artificial Sequence
  ENSG00000198722_60 (sequence is synthesized)
catgtgtggcaccaagagcaaatcctctggccctgctggatccttaccagaggacaactccctgcccccttgctgtgggtcagcagccttagccattggtggagatagagatggggacct

SEQ ID NO: 731347 - DNA, 120 bp, Artificial Sequence
  ENSG00000198722_61 (sequence is synthesized)
ggcccagctttgcagctttgggcagcagaacaacagccagcttcctctgggctccactgcctatgtttcagggtctggttctcaggatccctcatctgtcagcattaccacaagctgtca

SEQ ID NO: 731348 - DNA, 120 bp, Artificial Sequence
  ENSG00000198722_62 (sequence is synthesized)
ggagccctcagagaggaaccaaaccaagacccttttgtccagaggccatggccaaggctgtagccgtgaacagcgggaacctttgggggatgtagtagaatacatcatcagagagctgca

SEQ ID NO: 731349 - DNA, 120 bp, Artificial Sequence
  ENSG00000198722_63 (sequence is synthesized)
aggcatcagccgtcttcagactgagattgctgagctgcagcagcacttgagccaagtccagggttccgtggatgaagtctctagctgtgtagactcagtactgagtgaaatagaaggctt

SEQ ID NO: 731350 - DNA, 120 bp, Artificial Sequence
  ENSG00000198722_64 (sequence is synthesized)
acaggtgagcacctgttccctggccaaggtgtgtgagggtgaaaaggcccaggaaccccacgtggacagacccagtgaggaagccattctgtatttgtacggacttcctgaacaagatgg

SEQ ID NO: 731351 - DNA, 120 bp, Artificial Sequence
  ENSG00000198722_65 (sequence is synthesized)
agaaaatactatggaactggtggaaagctttctagccaagcacctttgtgttaatggcatgcagtgcaacaggtacattaaaaaggcttacagggcaggcacatccccttcccctaggcc

SEQ ID NO: 731352 - DNA, 120 bp, Artificial Sequence
  ENSG00000198722_66 (sequence is synthesized)
cactgttgtgaagcttgcccatctagagcatagagacttcatcttgcagaaatccatcctcttgcagaatgtgggagtccgaattgccaccagagaagaaccaagctgcccacagggtaa

SEQ ID NO: 731353 - DNA, 120 bp, Artificial Sequence
  ENSG00000198722_67 (sequence is synthesized)
taagaatccccagaaggagtctatatcattttttcaacaacaacatcaggattatagtcagacttctttaaaccaggatgaaccagttcttcagatggaaacaggggacaggggacccat

SEQ ID NO: 731354 - DNA, 120 bp, Artificial Sequence
  ENSG00000198722_68 (sequence is synthesized)
aacaggaacatatcagatgaaggctcaggatcaacagagagagcaccaggcccctgagcagcaaggcccttgctttctactcaagaacaatttatcaaaggaaagtgatgtgcccaagct

SEQ ID NO: 731355 - DNA, 120 bp, Artificial Sequence
  ENSG00000198722_69 (sequence is synthesized)
aggggatgaaataaaaggagcatcaagaacatctcaagttatcagtggcagctgtgatgaactgtcagagaaaaaggcttctctgtctaccccccatcagtttgaggaacctgccctagt

SEQ ID NO: 731356 - DNA, 120 bp, Artificial Sequence
  ENSG00000198722_70 (sequence is synthesized)
attaatctcaaaagaggaggcttctgggaagtcccagtttttcaaacagtacagccaaaaacatgaagcatgtaaagtaggaaaaccagaaaatgactgccacgataaaagtgaggccag

SEQ ID NO: 731357 - DNA, 120 bp, Artificial Sequence
  ENSG00000198722_71 (sequence is synthesized)
cagctgcctgtcattgtctgggttactgaagacagagagaataaacgcagaggacaagctcctgggctgcgaagctgggctcgatattctgagctcaaaggaactagaggaccttttggc

SEQ ID NO: 731358 - DNA, 120 bp, Artificial Sequence
  ENSG00000198722_72 (sequence is synthesized)
agacaagtccagaaggcttgcagctctgagctgtgacagcatgatggaggaaattatcatagggcctgagactttcagtgacatggttcatattgacctgaatgaagaggaggaatgtgc

SEQ ID NO: 731359 - DNA, 120 bp, Artificial Sequence
  ENSG00000198722_73 (sequence is synthesized)
tgctcacgtcctcaaggatgtctttgacaagtcctcttgtgttctgggtggctctcaggaggatgaggatgtggaaatcaagttttatacaagtaaactgggccgagcaattcaccactt

SEQ ID NO: 731360 - DNA, 120 bp, Artificial Sequence
  ENSG00000198722_74 (sequence is synthesized)
tcgttctgctctgcagggtgtgtttcagaagctggagaacagtgggtccatcagtcctgaggacctggaaagcaatgagagtggttcccagtcagagaacagtgatcgacttcttgggac

SEQ ID NO: 731361 - DNA, 120 bp, Artificial Sequence
  ENSG00000198722_75 (sequence is synthesized)
agtgagttcagggggtgcccaggattgctcactggagagccctgggagtcaggggagtgaaagcttgctcagtgtggtctctggtggagttggcgtctccacacagggagagcaaacccc

SEQ ID NO: 731362 - DNA, 120 bp, Artificial Sequence
  ENSG00000198722_76 (sequence is synthesized)
tcaggatccaagcaccttctctcttgcttctaataactccttgccaagtgttgctctggctccatgtctgggaagtgagacttgttccaggcctggatctcccaagcagggcagactgag

SEQ ID NO: 731363 - DNA, 120 bp, Artificial Sequence
  ENSG00000198722_77 (sequence is synthesized)
cctagagcaagtgtgtacagagaccgtttacctcaacaagtgcatcaacaattttaagaatgttctaagagagaaaagactaaggcagaaaaaacttctgcatgagctagtacagaaggc

SEQ ID NO: 731364 - DNA, 120 bp, Artificial Sequence
  ENSG00000198722_78 (sequence is synthesized)
gatttttgcattggatatgagatcagattgacttttaaggtctcgtctgactctttgcctttcaagttttgatcagaagtctcagctttttttctccaggtttagatttaacaatctaaa

SEQ ID NO: 731365 - DNA, 120 bp, Artificial Sequence
  ENSG00000198722_79 (sequence is synthesized)
tatccagagcggcgggctatcaggtatgctcagaaatatgatacactagatagaagaagaaaaaagaaatccttatacaatcattttgaagacagtgaaagaaggcaatatggtgagaga

SEQ ID NO: 731366 - DNA, 120 bp, Artificial Sequence
  ENSG00000198722_80 (sequence is synthesized)
tctgaaactaagactaactacaaaagtacatattctaatactgaaaattgtaccctttgccatactgaaaagaaacaaaatatggggtacccagttttgtacccctacaaaaatggattt

SEQ ID NO: 731367 - DNA, 120 bp, Artificial Sequence
  ENSG00000198722_81 (sequence is synthesized)
gtggttaagagtggcatgcagcgcattaagttggaaagtcatgattatgatctgtccagttgtttaaggcactgtgaaaagtcatctggctcaaaccagcatgtcactaattttacctca

SEQ ID NO: 731368 - DNA, 120 bp, Artificial Sequence
  ENSG00000198722_82 (sequence is synthesized)
ttagatattcttgaagattctactagtagtacttctgatgaacttctgggttcccccatttctgataagcaggaaaatttacagtcaccaacatggcattcatccaatgtccaccatatt

SEQ ID NO: 731369 - DNA, 120 bp, Artificial Sequence
  ENSG00000198722_83 (sequence is synthesized)
ggagattttcctgaggaatattatgtagcaaattcagcattgccattacaaaggatgaattgtgatgcaaaaacacttggagatctgtctgagtgctctatagaagagataaccccttcc

SEQ ID NO: 731370 - DNA, 120 bp, Artificial Sequence
  ENSG00000198722_84 (sequence is synthesized)
tctattgaggagcccaaggaggaccgtattgatacaatggatgagcttcagtgtttggtagaaacggtgtcagaatatttagcagagaaggaagaggagattaatagatttggttcactt

SEQ ID NO: 731371 - DNA, 120 bp, Artificial Sequence
  ENSG00000198722_85 (sequence is synthesized)
tcaaaaactaaaaaatcacataaacaaaatagtactcttgatgcagaacagagaacgcctggggatcaaataccacctttaactattgtcaagaatgacaaggacacggccatctctttc

SEQ ID NO: 731372 - DNA, 120 bp, Artificial Sequence
  ENSG00000198722_86 (sequence is synthesized)
cctgagttgactggagtacaatgtgctgttggttctttgtttagttcactcacagaaaaagtgggttcaggcacaaagcatctaacaaactctgtggaaaagttggtttccttagttcca

SEQ ID NO: 731373 - DNA, 120 bp, Artificial Sequence
  ENSG00000198722_87 (sequence is synthesized)
gaaaaaacagaaactcttaatcaaatagaggcaattaatttgggatctaaacccagagccatggcagtattggggaaggatctttccatgcaatctccattatcctctcaaaaagatgat

SEQ ID NO: 731374 - DNA, 120 bp, Artificial Sequence
  ENSG00000198722_88 (sequence is synthesized)
aatgtgaatatagacagacatagaaaaacctctgaaaatgagcacatgggtaataaaactgggagtttatactttcagaatacaacagaaagtattgcaaaggacttggctccacagagt

SEQ ID NO: 731375 - DNA, 120 bp, Artificial Sequence
  ENSG00000198722_89 (sequence is synthesized)
cagagttcagttataaagtcggttttcagcaggttaaatccattgaagatcttttcagaaaaggaggaaacaaaaaaagatgatgaccagagtaagccaccaagaaaagaaagctttgtt

SEQ ID NO: 731376 - DNA, 120 bp, Artificial Sequence
  ENSG00000198722_90 (sequence is synthesized)
gagtgtggtttggagttaaataaaagggaaggcactcttgacaattacagtagtagcatcattgctttaaatgggagtgatgaagaaactacgggctggttccagatgcccacaagtgag

SEQ ID NO: 731377 - DNA, 120 bp, Artificial Sequence
  ENSG00000198722_91 (sequence is synthesized)
aatttgttgtcctcccaagtaaccagtgaaccttcaaacttagttagttctgcaagtaaaaatgatgagagtctattggaagaaaaactctgtatagatctgtctcttttaccagatcaa

SEQ ID NO: 731378 - DNA, 120 bp, Artificial Sequence
  ENSG00000198722_92 (sequence is synthesized)
caaaaaatatgtgccaaagatactccaggacatccttgtatagctggcagtagaactgcaaataaagaggtattttcaaagccattagaggaggacaaagttacaggtaatgatgatttc

SEQ ID NO: 731379 - DNA, 120 bp, Artificial Sequence
  ENSG00000198722_93 (sequence is synthesized)
cttgagccactcagaaaatcatttagccagtttttgctcacttcccctgagacttgttcaaaggaaagtttgtcagaacctgtgaaaattcgccaggtggaggaagatggtttagaaagg

SEQ ID NO: 731380 - DNA, 120 bp, Artificial Sequence
  ENSG00000198722_94 (sequence is synthesized)
ggctctaagaaagatggtcattccttttcctttagtggaaaactaaatcttccattttttagaagtcttggtcattctgaaaagcaacaggagttaaaagagaaaggaagcatttttcct

SEQ ID NO: 731381 - DNA, 120 bp, Artificial Sequence
  ENSG00000198722_95 (sequence is synthesized)
ttgtttaaattttctttcactgacagcaaggttactgttaatgaccagagtttacgtggctcagcagtaaccactgatgaggagagcaaaaaaaattgccatgaagataccaaacatagt

SEQ ID NO: 731382 - DNA, 120 bp, Artificial Sequence
  ENSG00000198722_96 (sequence is synthesized)
tcaataaaatctagttctgttccaaatattcatagtgatctaggaaaatttgacagtacagaggaatttaaaaagaatgaccagataaattgtcctgaagatgccaaacttaattcaata

SEQ ID NO: 731383 - DNA, 120 bp, Artificial Sequence
  ENSG00000198722_97 (sequence is synthesized)
aaatctagttcagttccaaatattcatgatgatctagagaagtttgacagtataaaggaatttaataagaatgaccaagtaaattgtcctgaagatgccaaacttagttcaataaaatct

SEQ ID NO: 731384 - DNA, 120 bp, Artificial Sequence
  ENSG00000198722_98 (sequence is synthesized)
ggttcagctccaaatactcaggataatctagggaaatttgacagtacagaggaatttaatcagaatgaccaaataaatagtcctgaagatgccaaatttaatataataaagtctgattca

SEQ ID NO: 731385 - DNA, 120 bp, Artificial Sequence
  ENSG00000198722_99 (sequence is synthesized)
gttacaaatattaataatgatctggggaaatttgggaatatagaggaattaaatccaagtgaccacacagcaggacagaattttgaaagggatggcttagccatccctggagttgtgccc

SEQ ID NO: 731386 - DNA, 120 bp, Artificial Sequence
  ENSG00000198722_100 (sequence is synthesized)
aaagaacatataacttcagatcctttaggagaagataagaatcttatacaagcagcatcttcagtagcatcagactcttcattagagtgtatttctaccacttccaaatccactttggtt

SEQ ID NO: 731387 - DNA, 120 bp, Artificial Sequence
  ENSG00000198722_101 (sequence is synthesized)
aatgaaattaatgaagatgaggttatagataagacttccaagaaaaatacccaaggaagcttcctttctggcctgtttaataggttttcttctgctgaaaatttgtctagtcaagaatta

SEQ ID NO: 731388 - DNA, 120 bp, Artificial Sequence
  ENSG00000198722_102 (sequence is synthesized)
aatttgaaaaatgatgactcccatcacaagaataataccccaggtttaatctctggaatatttaacctgctatcaaatagcggtatgattgatcataaaccagaggaagcaaagttcatg

SEQ ID NO: 731389 - DNA, 120 bp, Artificial Sequence
  ENSG00000198722_103 (sequence is synthesized)
tctttaggcaacatgaagagtttgaatggagataaccatttatccttggatgaggtccctgctacttcatgtgtgacttctgagaacccgaagaaccatgttgaaaaacatgaaacttct

SEQ ID NO: 731390 - DNA, 120 bp, Artificial Sequence
  ENSG00000198722_104 (sequence is synthesized)
agcttcatagaagcctccttattacctaaagaaaacataccattatctgatgctggggatgataatcattattgttcccctacagagaaaaaccagcaaagtgaaaagcatcacccctcc

SEQ ID NO: 731391 - DNA, 120 bp, Artificial Sequence
  ENSG00000198722_105 (sequence is synthesized)
tctgagaacattgtacttcactgtgctccaagtgctcagctaggttttttggagaaatctatggctaagaggcaaatgccaaaccatgttcttgaggcaaaactacatgaaaattcaaac

SEQ ID NO: 731392 - DNA, 120 bp, Artificial Sequence
  ENSG00000198722_106 (sequence is synthesized)
aagttaaattcacctgtactaaataccaacattctcaataaatcaaacaactatcaggcttttgaagagatgaacagtcctttctgttttgaatgggactctgacataaaagatttgtct

SEQ ID NO: 731393 - DNA, 120 bp, Artificial Sequence
  ENSG00000198722_107 (sequence is synthesized)
aaaaattccagaaaacttcagccagtttattatatgttaaatcaaaatagatttctatcagccgatgcttgcttgtggcttgactcagaaaactcagtgataaatttttgccaaaaagat

SEQ ID NO: 731394 - DNA, 120 bp, Artificial Sequence
  ENSG00000198722_108 (sequence is synthesized)
caaaatgcaaacatcttggagtggagaacaaatccaaacagtgtcatttggtgtgacttaccatatgaatcattcaatcagttagcatttaatgaagattacttattaagaggtgatgtg

SEQ ID NO: 731395 - DNA, 120 bp, Artificial Sequence
  ENSG00000198722_109 (sequence is synthesized)
tgggcagctaactcattatatggaaactctggtcctcttccaattaatgaggctaataattcactagaagaattacccattgacttaagttcttcatcagatcatgaaaagactacatgc

SEQ ID NO: 731396 - DNA, 120 bp, Artificial Sequence
  ENSG00000198722_110 (sequence is synthesized)
cccgtagttgatcaagaatcattaagaatggatgaaaactttgttttttcaagttttggttatgagtaccaggaatggttgtcatgtcttgaacatggagtgtggtggccatcagaggat

SEQ ID NO: 731397 - DNA, 120 bp, Artificial Sequence
  ENSG00000198722_111 (sequence is synthesized)
ggggattatggatattatatgtttcatgatggtcaatatatctattctcttctcactgattctactgggcagtatgcatatttatttatacctgattcttatcaagagtatttggattgt

SEQ ID NO: 731398 - DNA, 120 bp, Artificial Sequence
  ENSG00000198722_112 (sequence is synthesized)
gatttacagacaaatggtctatcaagtattacgttggatgacagcattatttctgcctgtagttttaaagtacttgataaggaagatgaaatattttggtatgttgaagaggaaccaatt

SEQ ID NO: 731399 - DNA, 120 bp, Artificial Sequence
  ENSG00000198722_113 (sequence is synthesized)
gatgaccctcttgatttatctttagctttgccaagaagtgaggaaccattgtatctaaatttagaaaccttttcacaagtacttaaagagtcaagttgtgaccaaagcgatcagccacta

SEQ ID NO: 731400 - DNA, 120 bp, Artificial Sequence
  ENSG00000198722_114 (sequence is synthesized)
gatttttcaggctataatcgtcaaaagtttaaaggagactttagatctttcaaagaaaggccgtgtggttctgaagacgctgaatgtacattagatctcagaaatcagccccaaactatt

SEQ ID NO: 731401 - DNA, 120 bp, Artificial Sequence
  ENSG00000198722_115 (sequence is synthesized)
agtaatcatgtctcaagcagagatcaaattatagagagagataaaaaccagcctctagctgaagattcatcagttcacctttccagtttccattggcttcagtcttctgttgaagaagtt

SEQ ID NO: 731402 - DNA, 120 bp, Artificial Sequence
  ENSG00000198722_116 (sequence is synthesized)
accactttggttcatcctgaaaatatgactaaaggctcacaacaagcagaagagacatcattagtgaacaaagtggcttcagtattttctgttttgggtgcctcagttggtagtactttg

SEQ ID NO: 731403 - DNA, 120 bp, Artificial Sequence
  ENSG00000198722_117 (sequence is synthesized)
aagtttgataagagtgaatccttagaggctttggccatgcagaaagtgaatcagcagtcagatttagcagagctcacaaatgatggctttcagtcattaatcatgagtaagcaattagag

SEQ ID NO: 731404 - DNA, 120 bp, Artificial Sequence
  ENSG00000198722_118 (sequence is synthesized)
ggtaactccccaaatgtggaaaaaagtcttcttaaggattcagaaagacagatagtatccaatgttcagcatccagaattgatcaaaaatataaggcaagaattctctttaaataaaaac

SEQ ID NO: 731405 - DNA, 120 bp, Artificial Sequence
  ENSG00000198722_119 (sequence is synthesized)
aaccatgtgaaaaagcaaagtttgttaaaatctggtttccaggtaagccaaacaactcctcaggctaaatcaggtgtaaaagatgatgaaatcattacaacagactctatttcagtttct

SEQ ID NO: 731406 - DNA, 120 bp, Artificial Sequence
  ENSG00000198722_120 (sequence is synthesized)
cctgcacctcagcatagtggggatgagcgtgagaattatgagcttccccagggccagtcatccaaagagtctgataaaacattatttaaaagttcattgaaactcttcagtcaagaagaa

SEQ ID NO: 731407 - DNA, 120 bp, Artificial Sequence
  ENSG00000198722_121 (sequence is synthesized)
tcgtcagttagtatgacagcaaatgaaaaacagtcatctggatttttgaatctttttaagactcaggtgaataaagaaggatcaccaaacttagaaaagattggtgatacaaatgtcaag

SEQ ID NO: 731408 - DNA, 120 bp, Artificial Sequence
  ENSG00000198722_122 (sequence is synthesized)
ataccacctcaagaaaagaaagaatcttctggtgtttcaaatttttggggtacccttggggatttctttaaagccaatgtatctcctatacagacaactgaaaatacgtctgtttcttca

SEQ ID NO: 731409 - DNA, 120 bp, Artificial Sequence
  ENSG00000198722_123 (sequence is synthesized)
atgactattaaggatgaggtcaggtcaagtcctactcctatggagctagctagccagggtgctgggaactttcctgctgcaccaatttcctctaaagggaaggctagagttagaagactg

SEQ ID NO: 731410 - DNA, 120 bp, Artificial Sequence
  ENSG00000198722_124 (sequence is synthesized)
aacaaacagactactatcgatgacagtaggttagaggaatcaactagagggatccagggtaatgatttgactgaaaaagaggtaccattcagagaccatctaatccagcagtcacctaat

SEQ ID NO: 731411 - DNA, 120 bp, Artificial Sequence
  ENSG00000198722_125 (sequence is synthesized)
tcatctttttcaacaagtagtctcaaagagtcttccagggagtcttcagtagaaactagtggtgtgactacagtgacagaagtttcaaaaagtaatgaaatatcctttgataccctgagc

SEQ ID NO: 731412 - DNA, 120 bp, Artificial Sequence
  ENSG00000198722_126 (sequence is synthesized)
aagagaaattcaaatgaacaagatcatttttctgacaaagactggagtttctctatggctgcaacatcttcatctcaaccagagttatcaaccaaaaagagtatattttcttttctcact

SEQ ID NO: 731413 - DNA, 120 bp, Artificial Sequence
  ENSG00000198722_127 (sequence is synthesized)
ggatctgaaaaatctgagaacagagcctctgctactctaccaagagccaaatctcaggcagaagggctattcacacttccttcatttttttccactgctagctcaagcattaagaaggat

SEQ ID NO: 731414 - DNA, 120 bp, Artificial Sequence
  ENSG00000198722_128 (sequence is synthesized)
gcctctcatagtagttctacttttagtttcttcagcttgtcctttttggatcaaaaaaaggagacctctggggaaaaacaaagcatttcaactgttgttccagtgacctcccagccctgt

SEQ ID NO: 731415 - DNA, 120 bp, Artificial Sequence
  ENSG00000198722_129 (sequence is synthesized)
aagaagacaaatgtttttgtagagagtggtagcacaatgaccagagaaagttccagtggtcatagagatagcatagcccaagaagtagttcatgaacagcaaatggcaccttgtatttcc

SEQ ID NO: 731416 - DNA, 120 bp, Artificial Sequence
  ENSG00000198722_130 (sequence is synthesized)
attaacaacaccattgaggttacctcccttgcagatgagctcagtgtagacaaggactgtcaggaaaaactgagttccaatattgtaccagggacatcagtggatttccagatgaatgaa

SEQ ID NO: 731417 - DNA, 120 bp, Artificial Sequence
  ENSG00000198722_131 (sequence is synthesized)
gaatttcaggcacaggctgaaacattcctcactggcccagagaaccttgggatagctccccatgaagaagaggctttcaaccacaaagccttccccagtgactcactgtccaactctttt

SEQ ID NO: 731418 - DNA, 120 bp, Artificial Sequence
  ENSG00000198722_132 (sequence is synthesized)
tcacatgctaaacagttaattgaaaaattcaatgatttagacacttgtactaactgccaccaaaatgagaaatttactactgacccagtgaacttgccattagaaaaggcccccgatgag

SEQ ID NO: 731419 - DNA, 120 bp, Artificial Sequence
  ENSG00000198722_133 (sequence is synthesized)
gtcttaccacagatcctagagccagcctcttcctctccagagccagggtgtgcagggaaccttcagaaccaagatgcagataaagaggaagacaaatttgcattaggctcttcagtagac

SEQ ID NO: 731420 - DNA, 120 bp, Artificial Sequence
  ENSG00000198722_134 (sequence is synthesized)
atgctttcagggtttgtgaccaaagtgaaatctttctctgggagcttaattgaacctcccaaaacactctctggacttttctcctctcctaaatctccaaagaaaaactcctttttctct

SEQ ID NO: 731421 - DNA, 120 bp, Artificial Sequence
  ENSG00000198722_135 (sequence is synthesized)
cttgcttctgatgtatcatctcagcccctcaaaggtgaattatttggaattttcaaaagtcccaagccagagccatacaaacaagaatcatctctcccagctacttcatggcttcaaaat

SEQ ID NO: 731422 - DNA, 120 bp, Artificial Sequence
  ENSG00000198722_136 (sequence is synthesized)
ggttgttccagagatgctgtaggatcagtacctccagaaaggagagaagctgcctttacagcactaagttcagaatctactctcagtgactgtagaatgactgtggttagtgcaaagcca

SEQ ID NO: 731423 - DNA, 120 bp, Artificial Sequence
  ENSG00000198722_137 (sequence is synthesized)
gaatcagatatcttgacagatgatcctaaactaacaaccaaaatggaagacaataatactcctgaaaatattctggaacctcaacgttctgaaacaattaatacatcttctttctcgggt

SEQ ID NO: 731424 - DNA, 120 bp, Artificial Sequence
  ENSG00000198722_138 (sequence is synthesized)
gatgatactgggcaaggagtattgtctctgagtgatgaaggagacatggggatattgcaagctacagacacggaggcatcgttagaagcagagaactttgcgctgccagcacagttgcat

SEQ ID NO: 731425 - DNA, 120 bp, Artificial Sequence
  ENSG00000198722_139 (sequence is synthesized)
ccagatcctacctgcattgccgaagagcttcctcctcccattcagccacctcttcctcttgagccagagccagctattcaaactgcctccacaaaccaagacttactggagctgcatcca

SEQ ID NO: 731426 - DNA, 120 bp, Artificial Sequence
  ENSG00000198722_140 (sequence is synthesized)
gccagttcactagaaactgatactatgctgttcaatgatgcaagtgtgagccagagcaccactctggaaaccgaagggcacttttctcatcctctgctggaggaccctgtgcttgctgcc

SEQ ID NO: 731427 - DNA, 120 bp, Artificial Sequence
  ENSG00000198722_141 (sequence is synthesized)
agagaaagttgtgagataattcatgcccagaaagatccacctgtagtaccccaggaaacagagcagtcaagaccacgttttgagatcccaaatgtgaccacttggccaaagcttcgtttg

SEQ ID NO: 731428 - DNA, 120 bp, Artificial Sequence
  ENSG00000198722_142 (sequence is synthesized)
ccatcctctgctactaaccatgggaaaccactgagctctttcttttcctcacctctcccctctggcaatagagcagcagagactggtttaatgtccagttttaagaagttgtcaactcta

SEQ ID NO: 731429 - DNA, 120 bp, Artificial Sequence
  ENSG00000198722_143 (sequence is synthesized)
tttgagggaagtagtgaggggaaagggagtgtattagcaagtgattcaaaactaggatttggaaaggtagatctttcatttccatggccaaaagagaacaaaggggtccctgaacaaatg

SEQ ID NO: 731430 - DNA, 120 bp, Artificial Sequence
  ENSG00000198722_144 (sequence is synthesized)
cctacagaatcctcccctccagttttagttactagcagtgatcaggaccttaactccagtgaggctaacaaagctttgaagtcttctcaaatatctggggccagtgctcagccaggtaaa

SEQ ID NO: 731431 - DNA, 120 bp, Artificial Sequence
  ENSG00000198722_145 (sequence is synthesized)
gtctacactcagccctctgggacctctgagcagctggtggccagtccagaggtctgtgctcaggggctttcagggtctggagaagggggaaaccagcaggaaatctcagcatctggagaa

SEQ ID NO: 731432 - DNA, 120 bp, Artificial Sequence
  ENSG00000198722_146 (sequence is synthesized)
cactgggataccaaagccaacctgtctagccccgcctgtccttcagggaaacatgaggaagaaccctccactgtctctgagatatttcaccagctagaaaaacaagaagaggaggcagta

SEQ ID NO: 731433 - DNA, 120 bp, Artificial Sequence
  ENSG00000198723_0 (sequence is synthesized)
ggaccacccttggatgcagcctgggaaggaacatgaggatcctctgagagaccagggacagagggagacccaaagatctggtctgtagctaagtgaattttctaaaactcattgattcac

SEQ ID NO: 731434 - DNA, 120 bp, Artificial Sequence
  ENSG00000198723_1 (sequence is synthesized)
acgccatcccttgaggtggctggtgtcccgcgatggccacaggcgccctcctgccgtgctcgcgcccgtgcccgatgtcccggctggacttcctcaaggcctcgcacttctcgctggggc

SEQ ID NO: 731435 - DNA, 120 bp, Artificial Sequence
  ENSG00000198723_2 (sequence is synthesized)
ctgacctgcggctgcacgagggcaccatgcgcaccacgtcgcaccgggactttgcctacccggctgccacccgggagccgccgagcctgcagccgccgcccgcgctgcttttcccaatgg

SEQ ID NO: 731436 - DNA, 120 bp, Artificial Sequence
  ENSG00000198723_3 (sequence is synthesized)
acccgcgctgggaccgggaagagcgcgtgtcggaggcgcaccgcgcgttcccgccgccatccacgccgccgtgggagctgctgcaagcgcaggcgcgggaacgcacgctcgccatgcagg

SEQ ID NO: 731437 - DNA, 120 bp, Artificial Sequence
  ENSG00000198723_4 (sequence is synthesized)
ccggcaacctgcacctgcacgaggacgcgcacgccgggatcggcctctccaacgcgcacgccgcctacggctggcccgagctgccggcgcgcacccgagagcggatccgcggcgcgcgcc

SEQ ID NO: 731438 - DNA, 120 bp, Artificial Sequence
  ENSG00000198723_5 (sequence is synthesized)
tcatcttcgaccgcgactccctgcctcctggcgaccgcgacaagttgcgcatcccgcccaccacgcaccaggcgctctttccaccccacgacgcgcgcccgcagcctcgcgcgcccagtt

SEQ ID NO: 731439 - DNA, 120 bp, Artificial Sequence
  ENSG00000198723_6 (sequence is synthesized)
gccacctcgggggccccaacaccctcaagtgggactacacgagacaagatgggacttcctaccaaagacagttccaggccctgccaggcccacctgccttgaggtgtaagagggcctcct

SEQ ID NO: 731440 - DNA, 120 bp, Artificial Sequence
  ENSG00000198723_7 (sequence is synthesized)
gctgggagactgcaagatcagctatggatcaacgtgttcggagcagaaacaggcctacaggccccaggatctgcctgaagataggtatgacaaggcccaggccacagcccacatccactg

SEQ ID NO: 731441 - DNA, 120 bp, Artificial Sequence
  ENSG00000198723_8 (sequence is synthesized)
tgtaaatatccgtcctggtgacggcctcttccgcgacaggaccaccaaggccgagcacttctatgccagggagccagagccttttgttcttcaccacgatcagactccggagtcgcacat

SEQ ID NO: 731442 - DNA, 120 bp, Artificial Sequence
  ENSG00000198723_9 (sequence is synthesized)
cctgaaaggaaattggtgccccggccccggcagtctggacaccttcatgcagtacttctacggccagccgccacccccgacccagccacccagccgccacgtgcctcatgagaaattgca

SEQ ID NO: 731443 - DNA, 120 bp, Artificial Sequence
  ENSG00000198723_10 (sequence is synthesized)
gagtcatgtgaccctaggggagccaaagctactcaaacgcttcttcaagaccaccatgggctcggactactgcccttcagagtggagacaggtgcagaaagcgcccaacctccacttgca

SEQ ID NO: 731444 - DNA, 120 bp, Artificial Sequence
  ENSG00000198723_11 (sequence is synthesized)
gcaaagctacctgccgcggggcacgggcgaattcgattttttaaccatgaaccagaagatgctgaagccacacagaacacctccggccccggtgactgaagagatgctacagcggtgcaa

SEQ ID NO: 731445 - DNA, 120 bp, Artificial Sequence
  ENSG00000198723_12 (sequence is synthesized)
gtacagccacatggagccccctctgggtggactgcgcttcttctcaacacaatacaaggacgagtttcctttcaagtaccagggcccagcagccctgagactgaaaaatcctcaggaggg

SEQ ID NO: 731446 - DNA, 120 bp, Artificial Sequence
  ENSG00000198723_13 (sequence is synthesized)
cttcgtgcccctgggcacgcctcaccagcgcggctgcagggagaagatagaccctctggtcccccagccccctatgtacctgtgccccagccagcaataaatgccatcttggcaacattc

SEQ ID NO: 731447 - DNA, 120 bp, Artificial Sequence
  ENSG00000198723_14 (sequence is synthesized)
cccgaaagccccgcccccatggagcccctccccatggagccccgcccccacggagccccgtcccgggaagcccagccctggaagcctcgcccttgccactgctctggccccgcccctaac

SEQ ID NO: 731448 - DNA, 120 bp, Artificial Sequence
  ENSG00000198723_15 (sequence is synthesized)
cagccctcccctcccccggcttcatcccctgaaaggctaaatcccacccccaattgaccagaaccccaactctgctcctggataatcccgccccttcatggccatgcctctccccttcat

SEQ ID NO: 731449 - DNA, 120 bp, Artificial Sequence
  ENSG00000198723_16 (sequence is synthesized)
aactccatccttctggacacggccctgccccttctccatcctctcttatccagtcttaactcctcttccattgtcagactctggctccgcccctgacccgctagcctgccctgcctggcc

SEQ ID NO: 731450 - DNA, 120 bp, Artificial Sequence
  ENSG00000198723_17 (sequence is synthesized)
ctgcccacagactcatctggcccggccccgcccctgaccttcttagccctatgccctagctctgggttcctcccctagctcctccgtcctcctccagctcctccctcttcccaagctcct

SEQ ID NO: 731451 - DNA, 60 bp, Artificial Sequence
  ENSG00000198723_18 (sequence is synthesized)
ccctgagcctcaatgtcttttgtgaagcagtggttaaaacctaccctgttgcttgagccc

SEQ ID NO: 731452 - DNA, 120 bp, Artificial Sequence
  ENSG00000198723_19 (sequence is synthesized)
gtttgagaccagcctgagcaacatagccagacccctgtctctaaaaaaaaaaatagaaagaattagccatgcatggtggtgcacacctatagtcccagatgctcagaagactgaggtggc

SEQ ID NO: 731453 - DNA, 120 bp, Artificial Sequence
  ENSG00000198723_20 (sequence is synthesized)
ctcctcccccacctcctccctcttccccagcgcctacctctttcccagctcctccctctttcccagctcctcccccttcctctggcttctccctccttctttggctcctccctcccccct

SEQ ID NO: 731454 - DNA, 120 bp, Artificial Sequence
  ENSG00000198723_21 (sequence is synthesized)
ctcctaatccatttttctcccctggtcaacttcagcgctggcctgggcttggctcttgaacccttcccttgaacttcaccacaccctcagccccgcctcggcccacagccctcactcagc

SEQ ID NO: 731455 - DNA, 120 bp, Artificial Sequence
  ENSG00000198727_0 (sequence is synthesized)
atgaccccaatacgcaaaactaaccccctaataaaattaattaaccactcattcatcgacctccccaccccatccaacatctccgcatgatgaaacttcggctcactccttggcgcctgc

SEQ ID NO: 731456 - DNA, 120 bp, Artificial Sequence
  ENSG00000198727_1 (sequence is synthesized)
ctgatcctccaaatcaccacaggactattcctagccatgcactactcaccagacgcctcaaccgccttttcatcaatcgcccacatcactcgagacgtaaattatggctgaatcatccgc

SEQ ID NO: 731457 - DNA, 120 bp, Artificial Sequence
  ENSG00000198727_2 (sequence is synthesized)
taccttcacgccaatggcgcctcaatattctttatctgcctcttcctacacatcgggcgaggcctatattacggatcatttctctactcagaaacctgaaacatcggcattatcctcctg

SEQ ID NO: 731458 - DNA, 120 bp, Artificial Sequence
  ENSG00000198727_3 (sequence is synthesized)
cttgcaactatagcaacagccttcataggctatgtcctcccgtgaggccaaatatcattctgaggggccacagtaattacaaacttactatccgccatcccatacattgggacagaccta

SEQ ID NO: 731459 - DNA, 120 bp, Artificial Sequence
  ENSG00000198727_4 (sequence is synthesized)
ttcacttcatcttgcccttcattattgcagccctagcaacactccacctcctattcttgcacgaaacgggatcaaacaaccccctaggaatcacctcccattccgataaaatcaccttcc

SEQ ID NO: 731460 - DNA, 120 bp, Artificial Sequence
  ENSG00000198727_5 (sequence is synthesized)
acccttactacacaatcaaagacgccctcggcttacttctcttccttctctccttaatgacattaacactattctcaccagacctcctaggcgacccagacaattataccctagccaacc

SEQ ID NO: 731461 - DNA, 120 bp, Artificial Sequence
  ENSG00000198727_6 (sequence is synthesized)
ccttaaacacccctccccacatcaagcccgaatgatatttcctattcgcctacacaattctccgatccgtccctaacaaactaggaggcgtccttgccctattactatccatcctcatcc

SEQ ID NO: 731462 - DNA, 120 bp, Artificial Sequence
  ENSG00000198727_7 (sequence is synthesized)
tagcaataatccccatcctccatatatccaaacaacaaagcataatatttcgcccactaagccaatcactttattgactcctagccgcagacctcctcattctaacctgaatcggaggac

SEQ ID NO: 731463 - DNA, 120 bp, Artificial Sequence
  ENSG00000198727_8 (sequence is synthesized)
aaccagtaagctacccttttaccatcattggacaagtagcatccgtactatacttcacaacaatcctaatcctaataccaactatctccctaattgaaaacaaaatactcaaatgggcct

SEQ ID NO: 731464 - DNA, 120 bp, Artificial Sequence
  ENSG00000198728_0 (sequence is synthesized)
gggagaaaggcaggcagccggcgggcgctgcgtgtgtgtttgagtgtgcgagtgtgagtgagtgtgagtgccgggtcctgcctctcctggtgcccccagcagaggggcccggtggcctgg

SEQ ID NO: 731465 - DNA, 120 bp, Artificial Sequence
  ENSG00000198728_1 (sequence is synthesized)
ggagggcgggcgggctgctcggaggcagaggcagcaagaggcggcggcggggagagccgagaaggaggaggaggagagaggaaagagcggagcagccattgttgagggaaaccttgcaaa

SEQ ID NO: 731466 - DNA, 120 bp, Artificial Sequence
  ENSG00000198728_2 (sequence is synthesized)
aaaccttgcaaacaaagaaggctccggactccccgcggccccccgccccccaggccggccccctggcccccggcccccggcccagtggccattgtaactttcccccgggacagcggccgc

SEQ ID NO: 731467 - DNA, 120 bp, Artificial Sequence
  ENSG00000198728_3 (sequence is synthesized)
cgaggcagtgcgtgcgagtctttgtgcggccggcggactggagctcccagtcgggcctgcccgtcccactcgggacatgagctgctgaagttgtccccccgtcagccctcacccctgcca

SEQ ID NO: 731468 - DNA, 120 bp, Artificial Sequence
  ENSG00000198728_4 (sequence is synthesized)
ggactcctctgggcttgcagtcgctcccccgtacctctcctggccccctcagttctcccaggttgttcctcaaagtcattcaagctgtactcgccgaaggagcccccgaacggcaacgcc

SEQ ID NO: 731469 - DNA, 120 bp, Artificial Sequence
  ENSG00000198728_5 (sequence is synthesized)
tttccccccttccatcccggcaccatgctggatagggatgtgggcccaactcccatgtatccgcctacatacctggagccagggattgggaggcacacaccatatggcaaccaaactgac

SEQ ID NO: 731470 - DNA, 120 bp, Artificial Sequence
  ENSG00000198728_6 (sequence is synthesized)
tacagaatatttgagcttaacaaacggcttcagaactggacagaggagtgtgacaatctctggtgggatgcattcacgactgagttctttgaggatgatgccatgttgaccatcactttc

SEQ ID NO: 731471 - DNA, 120 bp, Artificial Sequence
  ENSG00000198728_7 (sequence is synthesized)
tgcctggaggatggaccaaagagatataccattggccggaccctgatcccacgctacttccgcagcatctttgaggggggtgctacggagctgtactatgttcttaagcaccccaaggag

SEQ ID NO: 731472 - DNA, 120 bp, Artificial Sequence
  ENSG00000198728_8 (sequence is synthesized)
gcattccacagcaactttgtgtccctcgactgtgaccagggcagcatggtgacccagcatggcaagcccatgttcacccaggtgtgtgtggagggccggttgtacctggagttcatgttt

SEQ ID NO: 731473 - DNA, 120 bp, Artificial Sequence
  ENSG00000198728_9 (sequence is synthesized)
catgatgcggataaagacgtggcacttcagcatccggcagcaccgagagctcatcccccgcagcatccttgccatgcatgcccaagacccccagatgttggatcagctctccaaaaacat

SEQ ID NO: 731474 - DNA, 120 bp, Artificial Sequence
  ENSG00000198728_10 (sequence is synthesized)
cactcggtgtgggctgtccaattccactctcaactacctccgactctgtgtgatactcgagcccatgcaagagctcatgtcacgccacaagacctacagcctcagcccccgcgactgcct

SEQ ID NO: 731475 - DNA, 120 bp, Artificial Sequence
  ENSG00000198728_11 (sequence is synthesized)
caagacctgccttttccagaagtggcagcgcatggtagcaccccctgcggagcccacacgtcagcagcccagcaaacggcggaaacggaagatgtcagggggcagcaccatgagctctgg

SEQ ID NO: 731476 - DNA, 120 bp, Artificial Sequence
  ENSG00000198728_12 (sequence is synthesized)
tggtggcaacaccaacaacagcaacagcaagaagaagagcccagctagcaccttcgccctctccagccaggtacctgatgtgatggtggtgggggagcccaccctgatgggcggggagtt

SEQ ID NO: 731477 - DNA, 120 bp, Artificial Sequence
  ENSG00000198728_13 (sequence is synthesized)
cggggacgaggacgagaggctcatcacccggctggagaacacccagtttgacgcagccaacggcattgacgacgaggacagctttaacaactcccctgcactgggcgccaacagcccctg

SEQ ID NO: 731478 - DNA, 120 bp, Artificial Sequence
  ENSG00000198728_14 (sequence is synthesized)
gaacagcaagcctccgtccagccaagaaagcaaatcggagaaccccacgtcacaggcctcccagtaaaaggccctgctgtggccacccagtgctctgcctacctgccccacccctcacag

SEQ ID NO: 731479 - DNA, 120 bp, Artificial Sequence
  ENSG00000198728_15 (sequence is synthesized)
ccccagggagcagaagacagaatgaagagactgagcatctaaaatgggcagcctccatccacccgcttcagggaggaactggactctctgggggcaggtgccaagatttgcccccccagt

SEQ ID NO: 731480 - DNA, 120 bp, Artificial Sequence
  ENSG00000198728_16 (sequence is synthesized)
ggccctgggctgggcctggcctctacagagccttttagggggagggggtactcatgtggatgcctacttggaacctgggcctctgagacatgtcctgaccaccccccagggcatttgcct

SEQ ID NO: 731481 - DNA, 120 bp, Artificial Sequence
  ENSG00000198728_17 (sequence is synthesized)
ccatcttcaccccagattgtgggtttcccatccccctgactttacccctttcaagcctggggttgtctatacccacagcccttagggacttaaagttacggggcttcgttgaatgctcct

SEQ ID NO: 731482 - DNA, 120 bp, Artificial Sequence
  ENSG00000198728_18 (sequence is synthesized)
tcccctaggcagctggtaatagaggggtaaagctctgggcccctcctccctgctgccacttatcccagctccaagtttttttaaaaataatattattaaaaatgtaagttaaaaaaaaaa

SEQ ID NO: 731483 - DNA, 120 bp, Artificial Sequence
  ENSG00000198728_19 (sequence is synthesized)
cgagggcggagaggggggcgctcggcgacggcggcgggagcgcacagacacgcacacgcacacgcgcacacacgcacacacggacacacactccgcggactcacacccgcgcgcacacac

SEQ ID NO: 731484 - DNA, 120 bp, Artificial Sequence
  ENSG00000198728_20 (sequence is synthesized)
tcacacccgcgcgcacacacgcagaggccgctcgccttcctgcctggcttccttcctgtctgctccgcgcctgacaggcccctcgccgcagccaggggccgcccgcaccgggccgaggcc

SEQ ID NO: 731485 - DNA, 120 bp, Artificial Sequence
  ENSG00000198728_21 (sequence is synthesized)
ggccgcgggcggcggcggcggctcatgcccggcctgtccccgcgaggggcgggcaccgtgactcggctgggcccccagaggcgggcgatgtgaagatgtcagtgggctgtgcctgtcctg

SEQ ID NO: 731486 - DNA, 120 bp, Artificial Sequence
  ENSG00000198728_22 (sequence is synthesized)
atgtggaacaccatggcacctgggtttgattcccatcctctctcccagtgtatactcacagctgttccccagggaggcataatgtgaactggcaaaataagaagggcgggtaggcatgtt

SEQ ID NO: 731487 - DNA, 80 bp, Artificial Sequence
  ENSG00000198729_0 (sequence is synthesized)
cagccgggcggctgggcgcgcgcggcgcagagcaggtgccggggagcccttcgcatgcggctgccgggccggaggtggta

SEQ ID NO: 731488 - DNA, 120 bp, Artificial Sequence
  ENSG00000198729_1 (sequence is synthesized)
cactgaggctcgggcgcgcggggacatgtcggtggcgacgggcagcagcgagacggccggcggggccagcggcggcggcgcacgggttttcttccaaagcccccggggtggcgccggtgg

SEQ ID NO: 731489 - DNA, 120 bp, Artificial Sequence
  ENSG00000198729_2 (sequence is synthesized)
gtggcagccccggctccagcagcggctcaggctcctcccgggaggactcggcgcccgtggccacggcggccgctgcagggcaggttcagcagcaacagcagcggcgacaccagcagggaa

SEQ ID NO: 731490 - DNA, 120 bp, Artificial Sequence
  ENSG00000198729_3 (sequence is synthesized)
aagtgacagtgaaatacgatcgtaaggagcttcggaagcggctggtgctggaggaatggatcgtggagcagctgggtcagctctacggctgcgaggaagaagaaatgccagaggtagaaa

SEQ ID NO: 731491 - DNA, 120 bp, Artificial Sequence
  ENSG00000198729_4 (sequence is synthesized)
ttgacattgatgatcttcttgatgcagacagtgatgaagagagagcttcaaaattacaggaagctcttgtagactgctacaaaccaacagaggaatttatcaaagagctgctttctcgga

SEQ ID NO: 731492 - DNA, 120 bp, Artificial Sequence
  ENSG00000198729_5 (sequence is synthesized)
taagaggcatgaggaaactgagccctccgcagaagaagagtgtatgattctggaacagggtgaaactctcccagagacgaagaaagagtcctgggatttgtacttcatgaagacttttgt

SEQ ID NO: 731493 - DNA, 120 bp, Artificial Sequence
  ENSG00000198729_6 (sequence is synthesized)
tgtttttttttttttcttttttggtgtgaaggtgggggggtctattagacatttattcaagagcgttctttttttggttttaaaggtttttgttaatgtaatattttaatagcaaagata

SEQ ID NO: 731494 - DNA, 120 bp, Artificial Sequence
  ENSG00000198729_7 (sequence is synthesized)
tttgttaatgtaatattttaatagcaaagatatcatgactctagccacagcctaaccaaggattatcaaaggaggtggacactcaaggaagggccacgccaggctgcgtttcctgcaagg

SEQ ID NO: 731495 - DNA, 120 bp, Artificial Sequence
  ENSG00000198729_8 (sequence is synthesized)
actcagatgttcagtaccttatgatacagggaagatagttttcttacaagtagtttggtaatattttttttcttaagttgtacatttgactcagctgtcaaatttctcacacttgtatat

SEQ ID NO: 731496 - DNA, 120 bp, Artificial Sequence
  ENSG00000198729_9 (sequence is synthesized)
acttgtggttgtcctttaactggaggtcccagcacatgtgttttcaagaggccactaggcattcttcactgagtgctgctgacttcaacgttcactttatgcaccaaagtgaaagaattc

SEQ ID NO: 731497 - DNA, 120 bp, Artificial Sequence
  ENSG00000198729_10 (sequence is synthesized)
agtgtatccgttattttaatgcactacaccacagaaatgttaagttggtcaagggcttaatttatggaatttctattatttcattggttgggatgctttgccaggtcatgtgcttattgt

SEQ ID NO: 731498 - DNA, 120 bp, Artificial Sequence
  ENSG00000198729_11 (sequence is synthesized)
ctcattttgtagtcttttaaagttgtatgaacccttaatttgaagaactaacttgatttctagagaaatatccacactatctcagtggtattttgcattggaaaaaggaagcactgtgta

SEQ ID NO: 731499 - DNA, 120 bp, Artificial Sequence
  ENSG00000198729_12 (sequence is synthesized)
gcagtgaattgtctgctttccaccgagtactgtgtttattctctctccaggaaagcagatcaaaagaaagttagcagatcgagtgtcttcttccttagaaataggttctggtagcttctg

SEQ ID NO: 731500 - DNA, 120 bp, Artificial Sequence
  ENSG00000198729_13 (sequence is synthesized)
tgcctgggtagtatcagaccagtgggagtaaaccgagtgttaagtgtcaaggtgagaaagcctcacattctctcaagacagttgctctaggagctgagttgctggtttggaagtgtggag

SEQ ID NO: 731501 - DNA, 120 bp, Artificial Sequence
  ENSG00000198729_14 (sequence is synthesized)
attgcatttctggcttctctcaatggcttgtgttgaggactctgggtgctcctggccctaattgtgcaccctgatccccgtgcttggagctaggcctggtggcgtgctctagccctctca

SEQ ID NO: 731502 - DNA, 120 bp, Artificial Sequence
  ENSG00000198729_15 (sequence is synthesized)
gttaccagctctttggagaaggatcaaaattcagatggaatgtgggatgggtaataggtgagagtagaaacccttccctccaggaggcccccgctgactcccacagaaacccacctacca

SEQ ID NO: 731503 - DNA, 120 bp, Artificial Sequence
  ENSG00000198729_16 (sequence is synthesized)
taagatgtcttcaggtggccttgtccaaggatgggggtcaggcattttatatcaagggtgctctgaacatattttattttttaaaaaaactatgtttgtgaattttgcgtatactggcaa

SEQ ID NO: 731504 - DNA, 120 bp, Artificial Sequence
  ENSG00000198729_17 (sequence is synthesized)
gcttttgaaaatgtatttaattttgtattgtttaccaatgatttatttacaagatatttactcaaataaatggagctgcttacaagcctgttgacatgtgtggcttgcacaacacgttaa

SEQ ID NO: 731505 - DNA, 120 bp, Artificial Sequence
  ENSG00000198730_0 (sequence is synthesized)
gttgtttaagcggctgacgggaaggagaagccagagctccagcggcgccgcggggcggcagtcaagaccagagccggagccgtcactcacctctggattagcctgaagcggagactaccg

SEQ ID NO: 731506 - DNA, 120 bp, Artificial Sequence
  ENSG00000198730_1 (sequence is synthesized)
gctgcggagcggcggggcgagacacttgctcgccttttgaccccatcatgtcgcggggctccatcgagattcccctccgggacactgacgaggtcattgaacttgacttcgatcagttac

SEQ ID NO: 731507 - DNA, 120 bp, Artificial Sequence
  ENSG00000198730_2 (sequence is synthesized)
cggagggagatgaagttatcagtattctgaaacaggaacacacacaactgcacatatggattgctttggcgctggaatactacaagcaaggaaaaacagaagagtttgtaaaattgttgg

SEQ ID NO: 731508 - DNA, 120 bp, Artificial Sequence
  ENSG00000198730_3 (sequence is synthesized)
aagcagcacgtatagatggcaatttggactatagagaccatgaaaaagaccagatgacttgcttggatacattggcagcgtattatgtacaacaggctcggaaagaaaagaataaggaca

SEQ ID NO: 731509 - DNA, 120 bp, Artificial Sequence
  ENSG00000198730_4 (sequence is synthesized)
ataaaaaggatcttattacacaggccaccttgttgtatacaatggccgataaaattattatgtatgatcagaaccatttgttgggaagagcctgcttctgcctacttgagggtgacaaaa

SEQ ID NO: 731510 - DNA, 120 bp, Artificial Sequence
  ENSG00000198730_5 (sequence is synthesized)
tggatcaagctgatgcacagtttcattttgtactcaatcagtctccaaataatattccagcccttcttggtaaagcttgcatttccttcaacaagaaggattacagaggagctcttgctt

SEQ ID NO: 731511 - DNA, 120 bp, Artificial Sequence
  ENSG00000198730_6 (sequence is synthesized)
actataagaaagcattgcgtactaacccaggatgtccagcggaagttcgtttaggaatgggtcattgctttgtgaaacttaacaaactggaaaaagctcgtctggcattcagcagagccc

SEQ ID NO: 731512 - DNA, 120 bp, Artificial Sequence
  ENSG00000198730_7 (sequence is synthesized)
tggaactcaattccaaatgcgtgggagcattggttggactggctgttctagaactcaacaataaagaggctgattccattaaaaatggtgtccagcttctttccagagcctatactattg

SEQ ID NO: 731513 - DNA, 120 bp, Artificial Sequence
  ENSG00000198730_8 (sequence is synthesized)
atcctagcaaccctatggtattgaaccatttggcaaatcactttttcttcaaaaaggattatagtaaagtccagcatctggccctccatgcattccataatacagaagtggaagctatgc

SEQ ID NO: 731514 - DNA, 120 bp, Artificial Sequence
  ENSG00000198730_9 (sequence is synthesized)
aagcagagagctgctatcagctagctagatcattccatgttcaggaagattatgaccaagcttttcagtactattatcaagccacacagtttgcctcatcctcttttgtgctcccatttt

SEQ ID NO: 731515 - DNA, 120 bp, Artificial Sequence
  ENSG00000198730_10 (sequence is synthesized)
ttggtttgggacaaatgtatatttatcgaggtgacaaagaaaatgcatctcagtgctttgagaaggttttgaaagcttatcctaataattacgaaactatgaaaattctcggctctctct

SEQ ID NO: 731516 - DNA, 120 bp, Artificial Sequence
  ENSG00000198730_11 (sequence is synthesized)
atgctgcctcagaagatcaagaaaaacgagatattgccaagggccatttgaagaaggtcacagaacagtatcccgatgatgttgaagcttggattgaattggcacaaatcttagaacaga

SEQ ID NO: 731517 - DNA, 120 bp, Artificial Sequence
  ENSG00000198730_12 (sequence is synthesized)
ctgatatacagggtgccctttcagcctatggaacagcaacacgaatccttcaggagaaagtgcaggccgatgttcctccagagattctcaataatgtgggtgccctccattttagacttg

SEQ ID NO: 731518 - DNA, 120 bp, Artificial Sequence
  ENSG00000198730_13 (sequence is synthesized)
gaaacctaggggaggctaagaaatattttttggcgtcattggaccgtgcaaaagcagaagcggaacacgatgagcattactataacgccatttccgttaccacgtcatataatctcgcca

SEQ ID NO: 731519 - DNA, 120 bp, Artificial Sequence
  ENSG00000198730_14 (sequence is synthesized)
ggctatatgaggcgatgtgtgaattccatgaagcagaaaaactgtataaaaacatcttacgcgaacatcctaattatgttgactgctatttgcgcctaggagccatggctagagataagg

SEQ ID NO: 731520 - DNA, 120 bp, Artificial Sequence
  ENSG00000198730_15 (sequence is synthesized)
gaaacttttatgaggcttcagattggtttaaggaagctcttcagattaatcaggatcatccagatgcttggtctttgattggcaatcttcatttggcaaaacaagaatggggtcctgggc

SEQ ID NO: 731521 - DNA, 120 bp, Artificial Sequence
  ENSG00000198730_16 (sequence is synthesized)
agaagaagtttgagaggatattaaaacagccatccacacagagtgatacctattctatgctagcccttggcaacgtgtggctccaaactttacatcagcccacccgagatcgagaaaagg

SEQ ID NO: 731522 - DNA, 120 bp, Artificial Sequence
  ENSG00000198730_17 (sequence is synthesized)
aaaagcgtcatcaagatcgtgctctggccatctacaaacaagtactcagaaatgatgcaaagaatctgtatgctgccaatggcataggagctgttttggcccacaaaggatattttcgtg

SEQ ID NO: 731523 - DNA, 120 bp, Artificial Sequence
  ENSG00000198730_18 (sequence is synthesized)
tgtatttgcccaagtaagagaagcaacagcagatattagtgatgtgtggctgaacttagcacacatctatgtggagcaaaagcagtacatcagcgccgttcagatgtatgaaaactgcct

SEQ ID NO: 731524 - DNA, 120 bp, Artificial Sequence
  ENSG00000198730_19 (sequence is synthesized)
ccgaaagttctataagcaccaaaacactgaagttgtactctatttggcccgggccctcttcaagtgtggcaagttacaggaatgcaaacagactttgctgaaggctagacatgtggcacc

SEQ ID NO: 731525 - DNA, 120 bp, Artificial Sequence
  ENSG00000198730_20 (sequence is synthesized)
cagtgatacagttcttatgtttaatgtggccttggtcctgcaaagattagctacctctgtcctgaaagatgaaaaaagtaatctgaaggaagtacttaatgctgtgaaagaactggagct

SEQ ID NO: 731526 - DNA, 120 bp, Artificial Sequence
  ENSG00000198730_21 (sequence is synthesized)
tgcacatagatacttcagttatttgagtaaagtgggagataaaatgagatttgatttggcccttgctgctacagaagccaggcagtgttctgacttactgagccaggcccagtaccatgt

SEQ ID NO: 731527 - DNA, 120 bp, Artificial Sequence
  ENSG00000198730_22 (sequence is synthesized)
ggcccgggcacgcaaacaagatgaagaagagcgggagctgcgggccaagcaagagcaagaaaaggagctgttaaggcagaaacttcttaaagaacaggaagagaaacgtctcagagaaaa

SEQ ID NO: 731528 - DNA, 120 bp, Artificial Sequence
  ENSG00000198730_23 (sequence is synthesized)
ggaagagcaaaagaaacttttggaacagcgggcccagtatgtggagaagaccaaaaatattcttatgtttactggtgagactgaagcaacaaaagagaagaaaagaggtggtggtggtgg

SEQ ID NO: 731529 - DNA, 120 bp, Artificial Sequence
  ENSG00000198730_24 (sequence is synthesized)
acggcgttctaagaagggaggagagtttgatgaatttgtcaatgatgacactgatgatgacctacctatatccaaaaagaagaagagaagaaagggtagtggcagtgaacaagaaggtga

SEQ ID NO: 731530 - DNA, 120 bp, Artificial Sequence
  ENSG00000198730_25 (sequence is synthesized)
agatgaggagggtggtgagagaaagaagaaaaagaggagaagacatccaaagggagaagaaggatctgatgatgatgaaacagaaaatggccccaaaccaaaaaaacgacgtccaccaaa

SEQ ID NO: 731531 - DNA, 120 bp, Artificial Sequence
  ENSG00000198730_26 (sequence is synthesized)
agcagagaagaaaaaggctcccaagccagaacgtctgcctccatcaatgaagggaaaaataaaatccaaagccataatttcatcaagtgatgactcttcggatgaggataaacttaaaat

SEQ ID NO: 731532 - DNA, 120 bp, Artificial Sequence
  ENSG00000198730_27 (sequence is synthesized)
tgctgatgaaggacatcccaggaacagcaacagcaacagtgactcagacgaggacgaacaacgaaagaaatgtgcctcatcagagagtgattccgatgagaaccagaacaagtctggcag

SEQ ID NO: 731533 - DNA, 120 bp, Artificial Sequence
  ENSG00000198730_28 (sequence is synthesized)
cgaggccggcagtccccggaggccacgaagacagcggtcagatcaggactcagacagtgaccagccatccagaaagagaaggccctccggttctgagcagtctgacaatgaatctgtgca

SEQ ID NO: 731534 - DNA, 120 bp, Artificial Sequence
  ENSG00000198730_29 (sequence is synthesized)
gtcagggagaagccactcaggagtttctgagaacgactctcgcccagcttctccaagtgccgaatcagatcacgaatcggagagaggatctgataatgagggttctggccaaggctctgg

SEQ ID NO: 731535 - DNA, 120 bp, Artificial Sequence
  ENSG00000198730_30 (sequence is synthesized)
aaatgaatcggaaccagagggatccaacaatgaggcctcagatagaggctcagaacatgggtcagatgatagtgactaggttttatttcatcaataagcttcatctctggaggaaacttt

SEQ ID NO: 731536 - DNA, 120 bp, Artificial Sequence
  ENSG00000198730_31 (sequence is synthesized)
tttaatatatgaaagctgtgataaaaatgtttcagatgtttagtcaattgtgaaatttttcttaaggcaattttcttttctatcagtttgtatattactaagccccaagagacatttcct

SEQ ID NO: 731537 - DNA, 120 bp, Artificial Sequence
  ENSG00000198730_32 (sequence is synthesized)
gtgctagagtccaatatttgagtctctcgtgcaaatgagactattctttgtggtacaattccacctatcatatgtgaaaactgcagtaaaaataaacccagatgctaaatcattcctaca

SEQ ID NO: 731538 - DNA, 120 bp, Artificial Sequence
  ENSG00000198730_33 (sequence is synthesized)
aaggtttgactgaaactgtggcagatgtctcatcttctttatatgttaagcagcatactcttctgatttttattgcaatcttttaccaagtggtgcacaaacttggtattgatgtcttta

SEQ ID NO: 731539 - DNA, 120 bp, Artificial Sequence
  ENSG00000198730_34 (sequence is synthesized)
ttccattttgagtttagattgagaatatttttattttctgaaggcagagatatctactgtataattgcaccaaagtacatttgaaaggaaggttttcaatagtgtaatactgcagcgatg

SEQ ID NO: 731540 - DNA, 120 bp, Artificial Sequence
  ENSG00000198730_35 (sequence is synthesized)
tagataaaatcacaaatgtataatgtgttaggttgaataaggtgtggaaaatgcttttctgttagtagaatgcaaaaacctacctaagccacataataataaaattcttttaccaacttt

SEQ ID NO: 731541 - DNA, 120 bp, Artificial Sequence
  ENSG00000198730_36 (sequence is synthesized)
cccaagccagaacgtctgcctccatcaatgaagggaaaaataaaatccaaagccataatttcatcaagtgatgactcttcggatgaggataaacttaaaattgctgatgaaggacctcga

SEQ ID NO: 731542 - DNA, 120 bp, Artificial Sequence
  ENSG00000198730_37 (sequence is synthesized)
tccagtgggttccccagagtgttttccaggacatgctagttccaaaagatactccttaaaaaagagttcgatagtcaaaacgttgcttccagaagaagactgtctcattactgttacatc

SEQ ID NO: 731543 - DNA, 120 bp, Artificial Sequence
  ENSG00000198730_38 (sequence is synthesized)
ttccatacctagcgatgcggcccctcgaaacgcactggagagctgggcagaccaaggataatttcacagactttaggagacttgccctcatatctcataatcttcgctcacaggacgctg

SEQ ID NO: 731544 - DNA, 120 bp, Artificial Sequence
  ENSG00000198730_39 (sequence is synthesized)
gacattcaaagaaagaaaaagaagtatagaaaagagagaaaaacgtcaagaactccagcataaagtcctcttaataacgcgtctttttataatcatcgggcaataaatttctgaatggac

SEQ ID NO: 731545 - DNA, 120 bp, Artificial Sequence
  ENSG00000198730_40 (sequence is synthesized)
atttactatgcagataactaaagactaactaaatggattttacaacttactaatgggtatcaactcagtttgaaaaccactcatgtgggggtctacaacaagaagtgtatattttcaaac

SEQ ID NO: 731546 - DNA, 120 bp, Artificial Sequence
  ENSG00000198730_41 (sequence is synthesized)
aattttttaatgatttaacaatttttgtaaatcattttcaggcttctgcagctgtagattctcactgtgaatcccatgcttgctcatgcctaagggtatttgcaataccaaatatagttt

SEQ ID NO: 731547 - DNA, 120 bp, Artificial Sequence
  ENSG00000198730_42 (sequence is synthesized)
agtatttttgcctgttagtgatggttccacgtttgtaacgttttggttgagattttaaatggtggacaagtactgtggatgtgaatgtggggaactaattttaatcatatgtaattggtc

SEQ ID NO: 731548 - DNA, 120 bp, Artificial Sequence
  ENSG00000198730_43 (sequence is synthesized)
acaaggcctaatttgcagtaactattgctgttttatttaacagtgccttgttgctttgtatgcatttatgtctggatgtaaagattgtgtgtctatccaacagggagccacagtatttaa

SEQ ID NO: 731549 - DNA, 120 bp, Artificial Sequence
  ENSG00000198730_44 (sequence is synthesized)
ggccaaatgtaaactgaaagcattaattaaagtggtgcaattttgtataacttagctttagcattagtagttcgataaatttggattgccatgcaaaaaaaaaaagaaagaaagaaaaga

SEQ ID NO: 731550 - DNA, 120 bp, Artificial Sequence
  ENSG00000198730_45 (sequence is synthesized)
cctcttcagtaatcagctattgtgggaagatgattgatctctgtcaaactaaactgcagattttccttcttcatgtatgtatgtttcaggatcatccagatgcttggtctttgattggca

SEQ ID NO: 731551 - DNA, 120 bp, Artificial Sequence
  ENSG00000198730_46 (sequence is synthesized)
ctttaagtaacctcataaaagtggtgaaagaccttttaccttctgaatcttttgatgtttagaattgatgaacacttgatccaaacagtgaagctttttgtgcccccacttcctacttta

SEQ ID NO: 731552 - DNA, 120 bp, Artificial Sequence
  ENSG00000198732_0 (sequence is synthesized)
cctgctgccgcctgggccccgccgagcggagctagcgccgcgcgcagagcacacgctcgcgctccagctcccctcctgcgcggttcatgactgtgtcccctgaccgcagcctctgcgagc

SEQ ID NO: 731553 - DNA, 120 bp, Artificial Sequence
  ENSG00000198732_1 (sequence is synthesized)
gactgtgtcccctgaccgcagcctctgcgagcccccgccgcaggaccacggcccgctccccgccgccgcgagggccccgagcgaaggaaggaagggaggcgcgctgtgcgccccgcggag

SEQ ID NO: 731554 - DNA, 120 bp, Artificial Sequence
  ENSG00000198732_2 (sequence is synthesized)
cctggctggcaccatgctgcccgcgcgctgcgcccgcctgctcacgccccacttgctgctggtgttggtgcagctgtcccctgctcgcggccaccgcaccacaggccccaggtttctaat

SEQ ID NO: 731555 - DNA, 120 bp, Artificial Sequence
  ENSG00000198732_3 (sequence is synthesized)
aagtgaccgtgacccacagtgcaacctccactgctccaggactcaacccaaacccatctgtgcctctgatggcaggtcctacgagtccatgtgtgagtaccagcgagccaagtgccgaga

SEQ ID NO: 731556 - DNA, 120 bp, Artificial Sequence
  ENSG00000198732_4 (sequence is synthesized)
cccgaccctgggcgtggtgcatcgaggtagatgcaaagatgctggccagagcaagtgtcgcctggagcgggctcaagccctggagcaagccaagaagcctcaggaagctgtgtttgtccc

SEQ ID NO: 731557 - DNA, 120 bp, Artificial Sequence
  ENSG00000198732_5 (sequence is synthesized)
agagtgtggcgaggatggctcctttacccaggtgcagtgccatacttacactgggtactgctggtgtgtcaccccggatgggaagcccatcagtggctcttctgtgcagaataaaactcc

SEQ ID NO: 731558 - DNA, 120 bp, Artificial Sequence
  ENSG00000198732_6 (sequence is synthesized)
tgtatgttcaggttcagtcaccgacaagcccttgagccagggtaactcaggaaggaaagatgacgggtctaagccgacacccacgatggagacccagccggtgttcgatggagatgaaat

SEQ ID NO: 731559 - DNA, 120 bp, Artificial Sequence
  ENSG00000198732_7 (sequence is synthesized)
cacagccccaactctatggattaaacacttggtgatcaaggactccaaactgaacaacaccaacataagaaattcagagaaagtctattcgtgtgaccaggagaggcagagtgccctgga

SEQ ID NO: 731560 - DNA, 120 bp, Artificial Sequence
  ENSG00000198732_8 (sequence is synthesized)
agaggcccagcagaatccccgtgagggtattgtcatccctgaatgtgcccctgggggactctataagccagtgcaatgccaccagtccactggctactgctggtgtgtgctggtggacac

SEQ ID NO: 731561 - DNA, 120 bp, Artificial Sequence
  ENSG00000198732_9 (sequence is synthesized)
agggcgcccgctgcctgggacctccacacgctacgtgatgcccagttgtgagagcgacgccagggccaagactacagaggcggatgaccccttcaaggacagggagctaccaggctgtcc

SEQ ID NO: 731562 - DNA, 120 bp, Artificial Sequence
  ENSG00000198732_10 (sequence is synthesized)
agaagggaagaaaatggagtttatcaccagcctactggatgctctcaccactgacatggttcaggccattaactcagcagcgcccactggaggtgggaggttctcagagccagaccccag

SEQ ID NO: 731563 - DNA, 120 bp, Artificial Sequence
  ENSG00000198732_11 (sequence is synthesized)
ccacaccctggaggagcgggtagtgcactggtatttcagccagctggacagcaatagcagcaacgacattaacaagcgggagatgaagcccttcaagcgctacgtgaagaagaaagccaa

SEQ ID NO: 731564 - DNA, 120 bp, Artificial Sequence
  ENSG00000198732_12 (sequence is synthesized)
gcccaagaaatgtgcccggcgtttcaccgactactgtgacctgaacaaagacaaggtcatttcactgcctgagctgaagggctgcctgggtgttagcaaagaaggacgcctcgtctaagg

SEQ ID NO: 731565 - DNA, 120 bp, Artificial Sequence
  ENSG00000198732_13 (sequence is synthesized)
agcagaaaacccaagggcaggtggagagtccagggaggcaggatggatcaccagacacctaaccttcagcgttgcccatggccctgccacatcccgtgtaacataagtggtgcccaccat

SEQ ID NO: 731566 - DNA, 120 bp, Artificial Sequence
  ENSG00000198732_14 (sequence is synthesized)
gtttgcacttttaataactcttacttgcgtgttttgtttttggtttcattttaaaacaccaatatctaataccacagtgggaaaaggaaagggaagaaagactttattctctctcttatt

SEQ ID NO: 731567 - DNA, 120 bp, Artificial Sequence
  ENSG00000198732_15 (sequence is synthesized)
ggggctgagaagaaagagatttatatgctgtatataaatatatatgtaaattgtatagttcttttgtacaggcattggcattgctgtttgtttatttctctccctctgcctgctgtgggt

SEQ ID NO: 731568 - DNA, 120 bp, Artificial Sequence
  ENSG00000198732_16 (sequence is synthesized)
ggtgggcactctggacacatagtccagctttctaaaatccaggactctatcctgggcctactaaacttctgtttggagactgacccttgtgtataaagacgggagtcctgcaattgtact

SEQ ID NO: 731569 - DNA, 120 bp, Artificial Sequence
  ENSG00000198732_17 (sequence is synthesized)
gcggactccacgagttcttttctggtgggaggactatattgccccatgccattagttgtcaaaattgataagtcacttggctctcggccttgtccagggaggttgggctaaggagagatg

SEQ ID NO: 731570 - DNA, 120 bp, Artificial Sequence
  ENSG00000198732_18 (sequence is synthesized)
gaaactgccctgggagaggaagggagtccagatcccatgaatagcccacacaggtaccggctctcagagggtccgtgcattcctgctctccggacccccaaagggcccagcattggtggg

SEQ ID NO: 731571 - DNA, 120 bp, Artificial Sequence
  ENSG00000198732_19 (sequence is synthesized)
tgcaccagtatcttagtgaccctcggagcaaattatccacaaaggatttgcattacgtcactcgaaacgttttcatccatgcttagcatctactctgtataacgcatgagaggggaggca

SEQ ID NO: 731572 - DNA, 120 bp, Artificial Sequence
  ENSG00000198732_20 (sequence is synthesized)
aagaagaaaaagacacacagaagggcctttaaaaaagtagatatttaatatctaagcaggggaggggacaggacagaaagcctgcactgaggggtgcggtgccaacagggaaactcttca

SEQ ID NO: 731573 - DNA, 120 bp, Artificial Sequence
  ENSG00000198732_21 (sequence is synthesized)
cctccctgcaaacctaccagtgaggctcccagagacgcagctgtctcagtgccaggggcagattgggtgtgacctctccactcctccatctcctgctgttgtcctagtggctatcacagg

SEQ ID NO: 731574 - DNA, 120 bp, Artificial Sequence
  ENSG00000198732_22 (sequence is synthesized)
cctgggtgggtgggttgggggaggtgtcagtcaccttgttggtaacactaaagttgttttgttggttttttaaaaacccaatactgaggttcttcctgttccctcaagttttcttatggg

SEQ ID NO: 731575 - DNA, 120 bp, Artificial Sequence
  ENSG00000198732_23 (sequence is synthesized)
cttccaggctttaagctaattccagaagtaaaactgatcttgggtttcctattctgcctcccctagaagggcaggggtgataacccagctacagggaaatcccggcccagctttccacag

SEQ ID NO: 731576 - DNA, 120 bp, Artificial Sequence
  ENSG00000198732_24 (sequence is synthesized)
gcatcacaggcatcttccgcggattctagggtgggctgcccagccttctggtctgaggcgcagctccctctgcccaggtgctgtgcctattcaagtggccttcaggcagagcagcaagtg

SEQ ID NO: 731577 - DNA, 120 bp, Artificial Sequence
  ENSG00000198732_25 (sequence is synthesized)
gcccttagcgccccttcccataagcagctgtggtggcagtgagggaggttgggtagccctggactggtcccctcctcagatcacccttgcaaatctggcctcatcttgtattccaacccg

SEQ ID NO: 731578 - DNA, 120 bp, Artificial Sequence
  ENSG00000198732_26 (sequence is synthesized)
acatccctaaaagtacctccacccgttccgggtctggaaggcgttggcaccacaagcactgtccctgtgggaggagcacaaccttctcgggacaggatctgatggggtcttgggctaaag

SEQ ID NO: 731579 - DNA, 120 bp, Artificial Sequence
  ENSG00000198732_27 (sequence is synthesized)
gaggtccctgctgtcctggagaaagtcctagaggttatctcaggaatgactggtggccctgccccaacgtggaaaggtgggaaggaagccttctcccattagccccaatgagagaactca

SEQ ID NO: 731580 - DNA, 120 bp, Artificial Sequence
  ENSG00000198732_28 (sequence is synthesized)
acgtgccggagctgagtgggccttgcacgagacactggccccactttcaggcctggaggaagcatgcacacatggagacggcgcctgcctgtagatgtttggatcttcgagatctcccca

SEQ ID NO: 731581 - DNA, 120 bp, Artificial Sequence
  ENSG00000198732_29 (sequence is synthesized)
ggcatcttgtctcccacaggatcgtgtgtgtaggtggtgttgtgtggttttcctttgtgaaggagagagggaaactatttgtagcttgttttataaaaaataaaaaatgggtaaatcttg

SEQ ID NO: 731582 - DNA, 120 bp, Artificial Sequence
  ENSG00000198732_30 (sequence is synthesized)
agtggagttttatgctttatctaaatgtttgcttccaaaggtggtccaagcaggatttcttagatgagatagaaggagcctggggtgaaagcctaaggtgtcccgcagaacatcttctcc

SEQ ID NO: 731583 - DNA, 120 bp, Artificial Sequence
  ENSG00000198732_31 (sequence is synthesized)
agctaatgtctgatcggggggatggctgaggacctcaggttctggtgtccaggtgctctgagctcttaaaaaaggaaggaattacttcaatatgaaatcagatggttcccttccacgtgg

SEQ ID NO: 731584 - DNA, 120 bp, Artificial Sequence
  ENSG00000198732_32 (sequence is synthesized)
gtggtgtggtggaaagagcatagactttgaggcccacagactgtaactttaacataccgacttttcagagcgtcataaggataaatgcacttatatggagtctcactctgtcaccaggct

SEQ ID NO: 731585 - DNA, 120 bp, Artificial Sequence
  ENSG00000198732_33 (sequence is synthesized)
tgtgaggaagggaggggaactgggaggagtggatgtgggagagagctgaagcctcaatgcctcagactttgaaaaatgactattaagaagtctgaggttacacttccactcacatagtct

SEQ ID NO: 731586 - DNA, 120 bp, Artificial Sequence
  ENSG00000198734_0 (sequence is synthesized)
aggaaaagccccagaaaaagcggagggagtgagagccagaggctgctgctgccgtttgcaagaactgcaggggaggaggacgctgccacccacagcctctagagctcattgcagctggga

SEQ ID NO: 731587 - DNA, 120 bp, Artificial Sequence
  ENSG00000198734_1 (sequence is synthesized)
cagcccggagtgtggttagcagctcggcaagcgctgcccaggtcctggggtggtggcagccagcgggagcaggaaaggaagcatgttcccaggctgcccacgcctctgggtcctggtggt

SEQ ID NO: 731588 - DNA, 120 bp, Artificial Sequence
  ENSG00000198734_2 (sequence is synthesized)
cttgggcaccagctgggtaggctgggggagccaagggacagaagcggcacagctaaggcagttctacgtggctgctcagggcatcagttggagctaccgacctgagcccacaaactcaag

SEQ ID NO: 731589 - DNA, 120 bp, Artificial Sequence
  ENSG00000198734_3 (sequence is synthesized)
tttgaatctttctgtaacttcctttaagaaaattgtctacagagagtatgaaccatattttaagaaagaaaaaccacaatctaccatttcaggacttcttgggcctactttatatgctga

SEQ ID NO: 731590 - DNA, 120 bp, Artificial Sequence
  ENSG00000198734_4 (sequence is synthesized)
agtcggagacatcataaaagttcactttaaaaataaggcagataagcccttgagcatccatcctcaaggaattaggtacagtaaattatcagaaggtgcttcttaccttgaccacacatt

SEQ ID NO: 731591 - DNA, 120 bp, Artificial Sequence
  ENSG00000198734_5 (sequence is synthesized)
ccctgcggagaagatggacgacgctgtggctccaggccgagaatacacctatgaatggagtatcagtgaggacagtggacccacccatgatgaccctccatgcctcacacacatctatta

SEQ ID NO: 731592 - DNA, 120 bp, Artificial Sequence
  ENSG00000198734_6 (sequence is synthesized)
ctcccatgaaaatctgatcgaggatttcaactcggggctgattgggcccctgcttatctgtaaaaaagggaccctaactgagggtgggacacagaagacgtttgacaagcaaatcgtgct

SEQ ID NO: 731593 - DNA, 120 bp, Artificial Sequence
  ENSG00000198734_7 (sequence is synthesized)
actatttgctgtgtttgatgaaagcaagagctggagccagtcatcatccctaatgtacacagtcaatggatatgtgaatgggacaatgccagatataacagtttgtgcccatgaccacat

SEQ ID NO: 731594 - DNA, 120 bp, Artificial Sequence
  ENSG00000198734_8 (sequence is synthesized)
cagctggcatctgctgggaatgagctcggggccagaattattctccattcatttcaacggccaggtcctggagcagaaccatcataaggtctcagccatcacccttgtcagtgctacatc

SEQ ID NO: 731595 - DNA, 120 bp, Artificial Sequence
  ENSG00000198734_9 (sequence is synthesized)
cactaccgcaaatatgactgtgggcccagagggaaagtggatcatatcttctctcaccccaaaacatttgcaagctgggatgcaggcttacattgacattaaaaactgcccaaagaaaac

SEQ ID NO: 731596 - DNA, 120 bp, Artificial Sequence
  ENSG00000198734_10 (sequence is synthesized)
caggaatcttaagaaaataactcgtgagcagaggcggcacatgaagaggtgggaatacttcattgctgcagaggaagtcatttgggactatgcacctgtaataccagcgaatatggacaa

SEQ ID NO: 731597 - DNA, 120 bp, Artificial Sequence
  ENSG00000198734_11 (sequence is synthesized)
aaaatacaggtctcagcatttggataatttctcaaaccaaattggaaaacattataagaaagttatgtacacacagtacgaagatgagtccttcaccaaacatacagtgaatcccaatat

SEQ ID NO: 731598 - DNA, 120 bp, Artificial Sequence
  ENSG00000198734_12 (sequence is synthesized)
gaaagaagatgggattttgggtcctattatcagagcccaggtcagagacacactcaaaatcgtgttcaaaaatatggccagccgcccctatagcatttaccctcatggagtgaccttctc

SEQ ID NO: 731599 - DNA, 120 bp, Artificial Sequence
  ENSG00000198734_13 (sequence is synthesized)
gccttatgaagatgaagtcaactcttctttcacctcaggcaggaacaacaccatgatcagagcagttcaaccaggggaaacctatacttataagtggaacatcttagagtttgatgaacc

SEQ ID NO: 731600 - DNA, 120 bp, Artificial Sequence
  ENSG00000198734_14 (sequence is synthesized)
cacagaaaatgatgcccagtgcttaacaagaccatactacagtgacgtggacatcatgagagacatcgcctctgggctaataggactacttctaatctgtaagagcagatccctggacag

SEQ ID NO: 731601 - DNA, 120 bp, Artificial Sequence
  ENSG00000198734_15 (sequence is synthesized)
gcgaggaatacagagggcagcagacatcgaacagcaggctgtgtttgctgtgtttgatgagaacaaaagctggtaccttgaggacaacatcaacaagttttgtgaaaatcctgatgaggt

SEQ ID NO: 731602 - DNA, 120 bp, Artificial Sequence
  ENSG00000198734_16 (sequence is synthesized)
gaaacgtgatgaccccaagttttatgaatcaaacatcatgagcactatcaatggctatgtgcctgagagcataactactcttggattctgctttgatgacactgtccagtggcacttctg

SEQ ID NO: 731603 - DNA, 120 bp, Artificial Sequence
  ENSG00000198734_17 (sequence is synthesized)
tagtgtggggacccagaatgaaattttgaccatccacttcactgggcactcattcatctatggaaagaggcatgaggacaccttgaccctcttccccatgcgtggagaatctgtgacggt

SEQ ID NO: 731604 - DNA, 120 bp, Artificial Sequence
  ENSG00000198734_18 (sequence is synthesized)
cacaatggataatgttggaacttggatgttaacttccatgaattctagtccaagaagcaaaaagctgaggctgaaattcagggatgttaaatgtatcccagatgatgatgaagactcata

SEQ ID NO: 731605 - DNA, 120 bp, Artificial Sequence
  ENSG00000198734_19 (sequence is synthesized)
tgagatttttgaacctccagaatctacagtcatggctacacggaaaatgcatgatcgtttagaacctgaagatgaagagagtgatgctgactatgattaccagaacagactggctgcagc

SEQ ID NO: 731606 - DNA, 120 bp, Artificial Sequence
  ENSG00000198734_20 (sequence is synthesized)
attaggaatcaggtcattccgaaactcatcattgaatcaggaagaagaagagttcaatcttactgccctagctctggagaatggcactgaattcgtttcttcaaacacagatataattgt

SEQ ID NO: 731607 - DNA, 120 bp, Artificial Sequence
  ENSG00000198734_21 (sequence is synthesized)
tggttcaaattattcttccccaagtaatattagtaagttcactgtcaataaccttgcagaacctcagaaagccccttctcaccaacaagccaccacagctggttccccactgagacacct

SEQ ID NO: 731608 - DNA, 120 bp, Artificial Sequence
  ENSG00000198734_22 (sequence is synthesized)
cattggcaagaactcagttctcaattcttccacagcagagcattccagcccatattctgaagaccctatagaggatcctctacagccagatgtcacagggatacgtctactttcacttgg

SEQ ID NO: 731609 - DNA, 120 bp, Artificial Sequence
  ENSG00000198734_23 (sequence is synthesized)
tgctggagaattcaaaagtcaagaacatgctaagcataagggacccaaggtagaaagagatcaagcagcaaagcacaggttctcctggatgaaattactagcacataaagttgggagaca

SEQ ID NO: 731610 - DNA, 120 bp, Artificial Sequence
  ENSG00000198734_24 (sequence is synthesized)
cctaagccaagacactggttctccttccggaatgaggccctgggaggaccttcctagccaagacactggttctccttccagaatgaggccctggaaggaccctcctagtgatctgttact

SEQ ID NO: 731611 - DNA, 120 bp, Artificial Sequence
  ENSG00000198734_25 (sequence is synthesized)
cttaaaacaaagtaactcatctaagattttggttgggagatggcatttggcttctgagaaaggtagctatgaaataatccaagatactgatgaagacacagctgttaacaattggctgat

SEQ ID NO: 731612 - DNA, 120 bp, Artificial Sequence
  ENSG00000198734_26 (sequence is synthesized)
cagcccccagaatgcctcacgtgcttggggagaaagcacccctcttgccaacaagcctggaaagcagagtggccacccaaagtttcctagagttagacataaatctctacaagtaagaca

SEQ ID NO: 731613 - DNA, 120 bp, Artificial Sequence
  ENSG00000198734_27 (sequence is synthesized)
ggatggaggaaagagtagactgaagaaaagccagtttctcattaagacacgaaaaaagaaaaaagagaagcacacacaccatgctcctttatctccgaggacctttcaccctctaagaag

SEQ ID NO: 731614 - DNA, 120 bp, Artificial Sequence
  ENSG00000198734_28 (sequence is synthesized)
tgaagcctacaacacattttcagaaagaagacttaagcattcgttggtgcttcataaatccaatgaaacatctcttcccacagacctcaatcagacattgccctctatggattttggctg

SEQ ID NO: 731615 - DNA, 120 bp, Artificial Sequence
  ENSG00000198734_29 (sequence is synthesized)
gatagcctcacttcctgaccataatcagaattcctcaaatgacactggtcaggcaagctgtcctccaggtctttatcagacagtgcccccagaggaacactatcaaacattccccattca

SEQ ID NO: 731616 - DNA, 120 bp, Artificial Sequence
  ENSG00000198734_30 (sequence is synthesized)
agaccctgatcaaatgcactctacttcagaccccagtcacagatcctcttctccagagctcagtgaaatgcttgagtatgaccgaagtcacaagtccttccccacagatataagtcaaat

SEQ ID NO: 731617 - DNA, 120 bp, Artificial Sequence
  ENSG00000198734_31 (sequence is synthesized)
gtccccttcctcagaacatgaagtctggcagacagtcatctctccagacctcagccaggtgaccctctctccagaactcagccagacaaacctctctccagacctcagccacacgactct

SEQ ID NO: 731618 - DNA, 120 bp, Artificial Sequence
  ENSG00000198734_32 (sequence is synthesized)
ctctccagaactcattcagagaaacctttccccagccctcggtcagatgcccatttctccagacctcagccatacaaccctttctccagacctcagccatacaaccctttctttagacct

SEQ ID NO: 731619 - DNA, 120 bp, Artificial Sequence
  ENSG00000198734_33 (sequence is synthesized)
cagccagacaaacctctctccagaactcagtcagacaaacctttctccagccctcggtcagatgcccctttctccagacctcagccatacaaccctttctctagacttcagccagacaaa

SEQ ID NO: 731620 - DNA, 120 bp, Artificial Sequence
  ENSG00000198734_34 (sequence is synthesized)
cctctctccagaactcagccatatgactctctctccagaactcagtcagacaaacctttccccagccctcggtcagatgcccatttctccagacctcagccatacaaccctttctctaga

SEQ ID NO: 731621 - DNA, 120 bp, Artificial Sequence
  ENSG00000198734_35 (sequence is synthesized)
cttcagccagacaaacctctctccagaactcagtcaaacaaacctttccccagccctcggtcagatgcccctttctccagaccccagccatacaaccctttctctagacctcagccagac

SEQ ID NO: 731622 - DNA, 120 bp, Artificial Sequence
  ENSG00000198734_36 (sequence is synthesized)
aaacctctctccagaactcagtcagacaaacctttccccagacctcagtgagatgcccctctttgcagatctcagtcaaattccccttaccccagacctcgaccagatgacactttctcc

SEQ ID NO: 731623 - DNA, 120 bp, Artificial Sequence
  ENSG00000198734_37 (sequence is synthesized)
agaccttggtgagacagatctttccccaaactttggtcagatgtccctttccccagacctcagccaggtgactctctctccagacatcagtgacaccacccttctcccggatctcagcca

SEQ ID NO: 731624 - DNA, 120 bp, Artificial Sequence
  ENSG00000198734_38 (sequence is synthesized)
tccttcatctcctactctcaatgatacttttctatcaaaggaatttaatccactggttatagtgggcctcagtaaagatggtacagattacattgagatcattccaaaggaagaggtcca

SEQ ID NO: 731625 - DNA, 120 bp, Artificial Sequence
  ENSG00000198734_39 (sequence is synthesized)
gagcagtgaagatgactatgctgaaattgattatgtgccctatgatgacccctacaaaactgatgttaggacaaacatcaactcctccagagatcctgacaacattgcagcatggtacct

SEQ ID NO: 731626 - DNA, 120 bp, Artificial Sequence
  ENSG00000198734_40 (sequence is synthesized)
ccgcagcaacaatggaaacagaagaaattattacattgctgctgaagaaatatcctgggattattcagaatttgtacaaagggaaacagatattgaagactctgatgatattccagaaga

SEQ ID NO: 731627 - DNA, 120 bp, Artificial Sequence
  ENSG00000198734_41 (sequence is synthesized)
taccacatataagaaagtagtttttcgaaagtacctcgacagcacttttaccaaacgtgatcctcgaggggagtatgaagagcatctcggaattcttggtcctattatcagagctgaagt

SEQ ID NO: 731628 - DNA, 120 bp, Artificial Sequence
  ENSG00000198734_42 (sequence is synthesized)
ggatgatgttatccaagttcgttttaaaaatttagcatccagaccgtattctctacatgcccatggactttcctatgaaaaatcatcagagggaaagacttatgaagatgactctcctga

SEQ ID NO: 731629 - DNA, 120 bp, Artificial Sequence
  ENSG00000198734_43 (sequence is synthesized)
atggtttaaggaagataatgctgttcagccaaatagcagttatacctacgtatggcatgccactgagcgatcagggccagaaagtcctggctctgcctgtcgggcttgggcctactactc

SEQ ID NO: 731630 - DNA, 120 bp, Artificial Sequence
  ENSG00000198734_44 (sequence is synthesized)
agctgtgaacccagaaaaagatattcactcaggcttgataggtcccctcctaatctgccaaaaaggaatactacataaggacagcaacatgcctatggacatgagagaatttgtcttact

SEQ ID NO: 731631 - DNA, 120 bp, Artificial Sequence
  ENSG00000198734_45 (sequence is synthesized)
atttatgacctttgatgaaaagaagagctggtactatgaaaagaagtcccgaagttcttggagactcacatcctcagaaatgaaaaaatcccatgagtttcacgccattaatgggatgat

SEQ ID NO: 731632 - DNA, 120 bp, Artificial Sequence
  ENSG00000198734_46 (sequence is synthesized)
ctacagcttgcctggcctgaaaatgtatgagcaagagtgggtgaggttacacctgctgaacataggcggctcccaagacattcacgtggttcactttcacggccagaccttgctggaaaa

SEQ ID NO: 731633 - DNA, 120 bp, Artificial Sequence
  ENSG00000198734_47 (sequence is synthesized)
tggcaataaacagcaccagttaggggtctggccccttctgcctggttcatttaaaactcttgaaatgaaggcatcaaaacctggctggtggctcctaaacacagaggttggagaaaacca

SEQ ID NO: 731634 - DNA, 120 bp, Artificial Sequence
  ENSG00000198734_48 (sequence is synthesized)
gagagcagggatgcaaacgccatttcttatcatggacagagactgtaggatgccaatgggactaagcactggtatcatatctgattcacagatcaaggcttcagagtttctgggttactg

SEQ ID NO: 731635 - DNA, 120 bp, Artificial Sequence
  ENSG00000198734_49 (sequence is synthesized)
ggagcccagattagcaagattaaacaatggtggatcttataatgcttggagtgtagaaaaacttgcagcagaatttgcctctaaaccttggatccaggtggacatgcaaaaggaagtcat

SEQ ID NO: 731636 - DNA, 120 bp, Artificial Sequence
  ENSG00000198734_50 (sequence is synthesized)
aatcacagggatccagacccaaggtgccaaacactacctgaagtcctgctataccacagagttctatgtagcttacagttccaaccagatcaactggcagatcttcaaagggaacagcac

SEQ ID NO: 731637 - DNA, 120 bp, Artificial Sequence
  ENSG00000198734_51 (sequence is synthesized)
aaggaatgtgatgtattttaatggcaattcagatgcctctacaataaaagagaatcagtttgacccacctattgtggctagatatattaggatctctccaactcgagcctataacagacc

SEQ ID NO: 731638 - DNA, 120 bp, Artificial Sequence
  ENSG00000198734_52 (sequence is synthesized)
tacccttcgattggaactgcaaggttgtgaggtaaatggatgttccacacccctgggtatggaaaatggaaagatagaaaacaagcaaatcacagcttcttcgtttaagaaatcttggtg

SEQ ID NO: 731639 - DNA, 120 bp, Artificial Sequence
  ENSG00000198734_53 (sequence is synthesized)
gggagattactgggaacccttccgtgcccgtctgaatgcccagggacgtgtgaatgcctggcaagccaaggcaaacaacaataagcagtggctagaaattgatctactcaagatcaagaa

SEQ ID NO: 731640 - DNA, 120 bp, Artificial Sequence
  ENSG00000198734_54 (sequence is synthesized)
gataacggcaattataacacagggctgcaagtctctgtcctctgaaatgtatgtaaagagctataccatccactacagtgagcagggagtggaatggaaaccatacaggctgaaatcctc

SEQ ID NO: 731641 - DNA, 120 bp, Artificial Sequence
  ENSG00000198734_55 (sequence is synthesized)
catggtggacaagatttttgaaggaaatactaataccaaaggacatgtgaagaactttttcaaccccccaatcatttccaggtttatccgtgtcattcctaaaacatggaatcaaagtat

SEQ ID NO: 731642 - DNA, 120 bp, Artificial Sequence
  ENSG00000198734_56 (sequence is synthesized)
tgcacttcgcctggaactctttggctgtgatatttactagaattgaacattcaaaaacccctggaagagactctttaagacctcaaaccatttagaatgggcaatgtattttacgctgtg

SEQ ID NO: 731643 - DNA, 120 bp, Artificial Sequence
  ENSG00000198734_57 (sequence is synthesized)
ttaaatgttaacagttttccactatttctctttcttttctattagtgaataaaattttatacaagaagcttttataatgtaactccttgctaccagtaagtaagataatggctattactt

SEQ ID NO: 731644 - DNA, 120 bp, Artificial Sequence
  ENSG00000198734_58 (sequence is synthesized)
ctgcattaatttgaatacaggtaggaaaatatcaagaaccaacaagaaaagggcttatctttcttaatgattgaaaatgctatgaagtaatatttatgtagttaaaatgcttcattataa

SEQ ID NO: 731645 - DNA, 120 bp, Artificial Sequence
  ENSG00000198734_59 (sequence is synthesized)
ctcttttaaatcctttacacactagtaaaacagatattactttaaataataattgatagacctggataactttcacaaacacatgattttttaatggtttttcttgagtgaagagaaaaa

SEQ ID NO: 731646 - DNA, 120 bp, Artificial Sequence
  ENSG00000198734_60 (sequence is synthesized)
caatattatcaaatgaaataagtacttaaaatatcctgtctttcccatataacaatgatttttctgactttccatgagtaaaaaaacagccaagcatctttccagtagccccattgaaat

SEQ ID NO: 731647 - DNA, 120 bp, Artificial Sequence
  ENSG00000198734_61 (sequence is synthesized)
tgtgaatccgtcctggtctccctaaggactgcacacattgatattcaaggttggtggtcattagatatggaacagaactgaaataaccatggtagaactgaatgtgtaatgttggcttta

SEQ ID NO: 731648 - DNA, 120 bp, Artificial Sequence
  ENSG00000198734_62 (sequence is synthesized)
ttctagctggtactacatggcacacagtttcaaaacataatttcacctactggaaagctcagacctgtaaaacagagcatgggaactgctggtctaaatgcagttgttcctgctcaaaga

SEQ ID NO: 731649 - DNA, 120 bp, Artificial Sequence
  ENSG00000198734_63 (sequence is synthesized)
gacctctggccaaactggcaagcagttaaagttttctttcagggccttcctctctatggcctcaacttcctcctctctcttcttccagcaacttcccctttcatcattcctttccctggg

SEQ ID NO: 731650 - DNA, 120 bp, Artificial Sequence
  ENSG00000198734_64 (sequence is synthesized)
gacttggcattcagtgatcctgtagatattgcacaactggggaacctttagacatccttaaaatcacatgagatagacagtcatttggggtgtctgaaataaaccaccccaaaacttagt

SEQ ID NO: 731651 - DNA, 120 bp, Artificial Sequence
  ENSG00000198734_65 (sequence is synthesized)
gttaaaagagcaaccaaaaaaaatttatgtgagattatggatttgttacttagcttgatttaatcatcctgtaacgtgtacatatatcaaaatgttatgtataccataaatatataaaat

SEQ ID NO: 731652 - DNA, 120 bp, Artificial Sequence
  ENSG00000198734_66 (sequence is synthesized)
cataaatatataaaattttatcaacgaaattcataacaatctctcagaccacagagaaatcaaattagaactgaggactaagaaactcactcgaaaccacacaactacatggaaactgaa

SEQ ID NO: 731653 - DNA, 80 bp, Artificial Sequence
  ENSG00000198734_67 (sequence is synthesized)
agttccttaggagacagggctttgcttttgctgcattctattcgttgtgaacacaaattacaggccagtctcgattcagt

SEQ ID NO: 731654 - DNA, 120 bp, Artificial Sequence
  ENSG00000198734_68 (sequence is synthesized)
ttcgttgtgaacacaaattacaggccagtctcgattcagtgtagaagggaactgcataaggaccacataccaggaggcataattcactgggagcatctttagaaactaccagagttacct

SEQ ID NO: 731655 - DNA, 120 bp, Artificial Sequence
  ENSG00000198734_69 (sequence is synthesized)
gttgcccataccagtggggtaagccctatgaatgtatatgagagtttcaaacatccacaaaacattggctttctaatattcgtattcccactattcctttcttttcatgattcatgtcat

SEQ ID NO: 731656 - DNA, 120 bp, Artificial Sequence
  ENSG00000198734_70 (sequence is synthesized)
tgtcccatcaacatttctaagatttccattccgttaagagcaaaagagaatgttggaaggtgggggaaaacatttctttgttttctacagggccagcttcttggatgtgtgtgatctgtt

SEQ ID NO: 731657 - DNA, 120 bp, Artificial Sequence
  ENSG00000198734_71 (sequence is synthesized)
cagttgcaaagggtcacatgctcagaaggaccgcatgctaaatttaatgctttgcagttaccctcttgaaatcctttattttttaagaaggaattcgacatttccatttttcaatgagcc

SEQ ID NO: 731658 - DNA, 120 bp, Artificial Sequence
  ENSG00000198734_72 (sequence is synthesized)
ccacaaattacgcagctagtcctgggcttctctactctgaaattgggcaggatctctcttgatctagaatttactaaggcataataggggcaagaaaatcttatgaaataatggggggta

SEQ ID NO: 731659 - DNA, 120 bp, Artificial Sequence
  ENSG00000198734_73 (sequence is synthesized)
gggaagagatgggaatggagcatgagatccagcttcgttattctctacttgagaaaaataaggccccaaagattaaacaacttgcccaaggatattgcttgttagtgtcagaactgaaac

SEQ ID NO: 731660 - DNA, 120 bp, Artificial Sequence
  ENSG00000198734_74 (sequence is synthesized)
cagaaaccaaatgatcatatccctagacttttagtctgctttctcttccataaaatgaaacttataatgtttctaatccattgctcagacaggtagacatgaatattaattgataatgac

SEQ ID NO: 731661 - DNA, 120 bp, Artificial Sequence
  ENSG00000198734_75 (sequence is synthesized)
tattaattgatctggaaaatacttgtttggggatcaataatatgtttgggctattatctaatgctgtgtagaaatattaaaacccctgttattttgaaataaaaaagatacccacttttt

SEQ ID NO: 731662 - DNA, 120 bp, Artificial Sequence
  ENSG00000198734_76 (sequence is synthesized)
taagggataagatagaacaaaatccttttgagctctgtgcttttttgcataacttggtctaaaaaaaaagcaaaggttttaacatcttccttatctatgtgtttttgtcattttcatagg

SEQ ID NO: 731663 - DNA, 120 bp, Artificial Sequence
  ENSG00000198736_0 (sequence is synthesized)
cagccctgaggaggggcggggcctcccggaggcggaagccgggattcgccctccggggagcgattggtcctcgggaggggcggggaggtggacgcgggtaccggcggtcgtcgggtcggc

SEQ ID NO: 731664 - DNA, 120 bp, Artificial Sequence
  ENSG00000198736_1 (sequence is synthesized)
agcctttggtcagttggcagcggcaagcgcgctgcggttccggtggcgccatgtcgttctgcagcttcttcgggggcgaggttttccagaatcactttgaacctggcgtttacgtgtgtg

SEQ ID NO: 731665 - DNA, 120 bp, Artificial Sequence
  ENSG00000198736_2 (sequence is synthesized)
ccaagtgtggctatgagctgttctccagccgctcgaagtatgcacactcgtctccatggccggcgttcaccgagaccattcacgccgacagcgtggccaagcgtccggagcacaatagat

SEQ ID NO: 731666 - DNA, 120 bp, Artificial Sequence
  ENSG00000198736_3 (sequence is synthesized)
ctgaagccttgaaggtgtcctgtggcaagtgtggcaatgggttgggccacgagttcctgaacgacggccccaagccggggcagtcccgattctgaatattcagcagctcgctgaagtttg

SEQ ID NO: 731667 - DNA, 120 bp, Artificial Sequence
  ENSG00000198736_4 (sequence is synthesized)
tccctaaaggcaaagaaacttctgcctcccagggtcactaggcgggcagcccacacccaccccagacggccaccacactgaggccacacgttggccattccaccttggagttggaaccct

SEQ ID NO: 731668 - DNA, 120 bp, Artificial Sequence
  ENSG00000198736_5 (sequence is synthesized)
tttgctgatggttcatgccttctgctgggacaggcctgggctgtgcagccacactgtcggctgacttagccccctgctcactctaggtgcctccaggaggtgagccctgggtgcagctgg

SEQ ID NO: 731669 - DNA, 120 bp, Artificial Sequence
  ENSG00000198736_6 (sequence is synthesized)
tctctgaatgacgttacaccctcaccttcttttcctggccctgtctctggactctcccctgtgaggcccaattccaagacagactctcgtcctcaccgaagcttaggcccacatctccca

SEQ ID NO: 731670 - DNA, 120 bp, Artificial Sequence
  ENSG00000198736_7 (sequence is synthesized)
ggctgcttaggagacagaatggaaacggaggccgcccctgccagccgccctggccctggtcactgcatgatccgctctggtcaaacccttccaggccagccagagtggggatggtctgtg

SEQ ID NO: 731671 - DNA, 120 bp, Artificial Sequence
  ENSG00000198736_8 (sequence is synthesized)
acctgctgggaaggcaggctgatggggcacacccttggcctctcgtccacgaggggagaaacctaaaccctgtttcacaatctgtgcggaagtagcttgcctcacttctgcttaggaaag

SEQ ID NO: 731672 - DNA, 120 bp, Artificial Sequence
  ENSG00000198736_9 (sequence is synthesized)
cggctgttgctccataactctaaccagcacagggctgaggcctgcagtgcacacctgcagggaggcccttcccaaggtgtggtgactgtgccttactgtacatgctcggaggcctggcca

SEQ ID NO: 731673 - DNA, 120 bp, Artificial Sequence
  ENSG00000198736_10 (sequence is synthesized)
tataggagggtgggtgatgctgaaatcaccccccatcttaagtaattactttctggagtaatcaggtggaaatccatagacaaatgaaacattcagatgtactgtctttttttttgtttt

SEQ ID NO: 731674 - DNA, 120 bp, Artificial Sequence
  ENSG00000198736_11 (sequence is synthesized)
aaggtgagaggccacaggggtgggggagggacgggggcggccagggagagcagagagccagtcccaccttcctccctctgcttgccccacagctccaggggcttagaggcgtctattcca

SEQ ID NO: 731675 - DNA, 120 bp, Artificial Sequence
  ENSG00000198736_12 (sequence is synthesized)
tgcctctgccagggagctgccaccccaggctatcgggagagcctggccttctggtgcaaatgtgggaaacaggacaggtttcctgtacgggctccaggacaaaggtcaacctcttatgtc

SEQ ID NO: 731676 - DNA, 120 bp, Artificial Sequence
  ENSG00000198736_13 (sequence is synthesized)
ggcggtcagcttgggaaataggcgtgtgggaagaaacaccatctgccagccccagtaagggccttcactgtggctgtatcatggccagaagctcacccagctgccttgtgatctttccag

SEQ ID NO: 731677 - DNA, 120 bp, Artificial Sequence
  ENSG00000198736_14 (sequence is synthesized)
gtggcctggaggccttttctctgggactgttctcttcctgcctggagagcagagcagtgcctgggtatccagcttagggcctcgttgggcagcagggaggaccacttgagaaaggagagg

SEQ ID NO: 731678 - DNA, 120 bp, Artificial Sequence
  ENSG00000198736_15 (sequence is synthesized)
gaccaggtggttgggccacatcagggcccctgccctctatgttcctgggggaactaggggggcgagggggagctccgtgtcctcattggactacccaggttccttcacgctgcacacact

SEQ ID NO: 731679 - DNA, 120 bp, Artificial Sequence
  ENSG00000198739_0 (sequence is synthesized)
aacagtccgagcagctttcagaatgacagtctgcagaagtgagctgagcgtgtgcgcggtacggggctctcctgccttctgggctccaacgcagctctgtggctgaactgggtgctcatc

SEQ ID NO: 731680 - DNA, 120 bp, Artificial Sequence
  ENSG00000198739_1 (sequence is synthesized)
acgggaactgctggggtatggaatacagatgtggcagctcaggtagccccaaattgcctggaagaatacatcatgtttttcgataagaagaaattgtaggatccagttttttttttaacc

SEQ ID NO: 731681 - DNA, 120 bp, Artificial Sequence
  ENSG00000198739_2 (sequence is synthesized)
gccccctccccaccccccaaaaaactgtaaagatgcaaaaacgtaatatccatgaagatcctattacctaggaagattttgatgttttgctgcgaatgcggtgttgggatttatttgttc

SEQ ID NO: 731682 - DNA, 120 bp, Artificial Sequence
  ENSG00000198739_3 (sequence is synthesized)
ttggagtgttctgcgtggctggcaaagaataatgttccaaaatcggtccatctcccaaggggtccaatttttcttcctgggtgtcagcgagccctgactcactacagtgcagctgacagg

SEQ ID NO: 731683 - DNA, 120 bp, Artificial Sequence
  ENSG00000198739_4 (sequence is synthesized)
ggctgtcatgcaactggcccctaagccaaagcaaaagacctaaggacgacctttgaacaatacaaaggatgggtttcaatgtaattaggctactgagcggatcagctgtagcactggtta

SEQ ID NO: 731684 - DNA, 120 bp, Artificial Sequence
  ENSG00000198739_5 (sequence is synthesized)
tagcccccactgtcttactgacaatgctttcttctgccgaacgaggatgccctaagggctgtaggtgtgaaggcaaaatggtatattgtgaatctcagaaattacaggagataccctcaa

SEQ ID NO: 731685 - DNA, 120 bp, Artificial Sequence
  ENSG00000198739_6 (sequence is synthesized)
gtatatctgctggttgcttaggtttgtcccttcgctataacagccttcaaaaacttaagtataatcaatttaaagggctcaaccagctcacctggctataccttgaccataaccatatca

SEQ ID NO: 731686 - DNA, 120 bp, Artificial Sequence
  ENSG00000198739_7 (sequence is synthesized)
gcaatattgacgaaaatgcttttaatggaatacgcagactcaaagagctgattcttagttccaatagaatctcctattttcttaacaataccttcagacctgtgacaaatttacggaact

SEQ ID NO: 731687 - DNA, 120 bp, Artificial Sequence
  ENSG00000198739_8 (sequence is synthesized)
tggatctgtcctataatcagctgcattctctgggatctgaacagtttcggggcttgcggaagctgctgagtttacatttacggtctaactccctgagaaccatccctgtgcgaatattcc

SEQ ID NO: 731688 - DNA, 120 bp, Artificial Sequence
  ENSG00000198739_9 (sequence is synthesized)
aagactgccgcaacctggaacttttggacctgggatataaccggatccgaagtttagccaggaatgtctttgctggcatgatcagactcaaagaacttcacctggagcacaatcaatttt

SEQ ID NO: 731689 - DNA, 120 bp, Artificial Sequence
  ENSG00000198739_10 (sequence is synthesized)
ccaagctcaacctggccctttttccaaggttggtcagccttcagaacctttacttgcagtggaataaaatcagtgtcataggacagaccatgtcctggacctggagctccttacaaaggc

SEQ ID NO: 731690 - DNA, 120 bp, Artificial Sequence
  ENSG00000198739_11 (sequence is synthesized)
ttgatttatcaggcaatgagatcgaagctttcagtggacccagtgttttccagtgtgtcccgaatctgcagcgcctcaacctggattccaacaagctcacatttattggtcaagagattt

SEQ ID NO: 731691 - DNA, 120 bp, Artificial Sequence
  ENSG00000198739_12 (sequence is synthesized)
tggattcttggatatccctcaatgacatcagtcttgctgggaatatatgggaatgcagcagaaatatttgctcccttgtaaactggctgaaaagttttaaaggtctaagggagaatacaa

SEQ ID NO: 731692 - DNA, 120 bp, Artificial Sequence
  ENSG00000198739_13 (sequence is synthesized)
ttatctgtgccagtcccaaagagctgcaaggagtaaatgtgatcgatgcagtgaagaactacagcatctgtggcaaaagtactacagagaggtttgatctggccagggctctcccaaagc

SEQ ID NO: 731693 - DNA, 120 bp, Artificial Sequence
  ENSG00000198739_14 (sequence is synthesized)
cgacgtttaagcccaagctccccaggccgaagcatgagagcaaaccccctttgcccccgacggtgggagccacagagcccggcccagagaccgatgctgacgccgagcacatctctttcc

SEQ ID NO: 731694 - DNA, 120 bp, Artificial Sequence
  ENSG00000198739_15 (sequence is synthesized)
ataaaatcatcgcgggcagcgtggcgcttttcctgtccgtgctcgtcatcctgctggttatctacgtgtcatggaagcggtaccctgcgagcatgaagcagctgcagcagcgctccctca

SEQ ID NO: 731695 - DNA, 120 bp, Artificial Sequence
  ENSG00000198739_16 (sequence is synthesized)
tgcgaaggcacaggaaaaagaaaagacagtccctaaagcaaatgactcccagcacccaggaattttatgtagattataaacccaccaacacggagaccagcgagatgctgctgaatggga

SEQ ID NO: 731696 - DNA, 120 bp, Artificial Sequence
  ENSG00000198739_17 (sequence is synthesized)
cgggaccctgcacctataacaaatcgggctccagggagtgtgagatacctttatcaatgaatgtgtcaacctttctggcatacgaccagcccacaataagttactgtggggtgcatcatg

SEQ ID NO: 731697 - DNA, 120 bp, Artificial Sequence
  ENSG00000198739_18 (sequence is synthesized)
aacttctctcccataagtcctttgaaacgaatgcacaggaagatacgatggaaacacacctagagactgagctggacctgagcacaatcacaacagctggccgaatcagtgaccataaac

SEQ ID NO: 731698 - DNA, 120 bp, Artificial Sequence
  ENSG00000198739_19 (sequence is synthesized)
agcagctagcttaactgagatcattggtagccaggggttgctaccaaactttgtaacctcaaggacaaaatgaggaagatgtgttcattgtggactctaaaaacaaaacaaaacacaaaa

SEQ ID NO: 731699 - DNA, 120 bp, Artificial Sequence
  ENSG00000198739_20 (sequence is synthesized)
tcccctgttcaaataaacaaaaaatccaagattgattcatgaaataaagaagacatgaattgttttaagtctacactttgtaattagctaagttgtgcagtattttttgacttaaacaga

SEQ ID NO: 731700 - DNA, 120 bp, Artificial Sequence
  ENSG00000198739_21 (sequence is synthesized)
gtatgaccctgaaaaataaaagaatctttttttttcaaaactcatcctacctacctgtaaaaactgtacaaagctaatgtatttttcatattgtaaagtttcaattgtagaaacaactgg

SEQ ID NO: 731701 - DNA, 120 bp, Artificial Sequence
  ENSG00000198739_22 (sequence is synthesized)
ctggtatgtacagtaccataatttaattacattttactttaaaaactttacacatttcagtttctaaaattttaaattaacaaaaattatttcttgtgttattcagagttactcagtttt

SEQ ID NO: 731702 - DNA, 120 bp, Artificial Sequence
  ENSG00000198739_23 (sequence is synthesized)
ggactgttttgttactgcttttgtgcccagaaaccttgactctaaaattctgtgctgtgcgaaacatgcacgatttttattatgcttactgcgtagaattttatctacttgttccagaaa

SEQ ID NO: 731703 - DNA, 120 bp, Artificial Sequence
  ENSG00000198739_24 (sequence is synthesized)
taatacattaaccaaaaaggatttaattgttcagacttgtaagaggttcttcaattacataggcaggtttttcttaaaaatgaaaaaaaaatcaaagatttttttaacagttctcagact

SEQ ID NO: 731704 - DNA, 120 bp, Artificial Sequence
  ENSG00000198739_25 (sequence is synthesized)
gataaagagggatattttaacatatttccgaatgaatgactcattatttcattcttttgagtaaccattgttaagggttgggggaaagcatggacaaaacatcactggaaacaaaggctg

SEQ ID NO: 731705 - DNA, 120 bp, Artificial Sequence
  ENSG00000198739_26 (sequence is synthesized)
taaccacagcaacagactttgtgatacagttaaaaggtgcagctgccagtgacaaataaaaacttttgttacatctcattattttcaggccaaggtgggagtatagtgcataataattgt

SEQ ID NO: 731706 - DNA, 120 bp, Artificial Sequence
  ENSG00000198739_27 (sequence is synthesized)
acagtagcaatttttatcctaattaacccatagcggtttacctaaaagtaaccatcagtcagtgcaaaatgtgcctggttcttaagacaactttttatttagaactgtgagaccggtatt

SEQ ID NO: 731707 - DNA, 120 bp, Artificial Sequence
  ENSG00000198739_28 (sequence is synthesized)
ttggaaacatttcaaaggaaacatatgaatttgttttgcgttgtgcactacatcatttctctcctgaggaagaattttaaacatgtacagctcattcaatatagatatgagccatggtgg

SEQ ID NO: 731708 - DNA, 120 bp, Artificial Sequence
  ENSG00000198739_29 (sequence is synthesized)
agaactttatcactcaagtagacggtaaacatccttaatatgttctaaattgtttatattgctatccataatgggattcacctccaaattatcaaagaaataactcagagtaatttgaca

SEQ ID NO: 731709 - DNA, 120 bp, Artificial Sequence
  ENSG00000198739_30 (sequence is synthesized)
ccagcccagatcatatattgattatacaattgtattataaagttcattcaaatcaaattaagaaaacctgagtctttagaagctgaaataatcaacttgtttgtgctgtttgcttgacat

SEQ ID NO: 731710 - DNA, 120 bp, Artificial Sequence
  ENSG00000198739_31 (sequence is synthesized)
aggttattgtttgaaaatattgttactttatcaatagtaatcatgcattcttgtgtttttttttaatggaaaactgcaagtttcaattactgttgcactagaagtgctttttatgttgtc

SEQ ID NO: 731711 - DNA, 120 bp, Artificial Sequence
  ENSG00000198739_32 (sequence is synthesized)
attttatattcatgccatcaaaagtagattgacaatacatcaatctaacaggggccaatcaaaacaatgaagaaaagaataactgaaaacaatgtcaaacttttaaatttttatctcttc

SEQ ID NO: 731712 - DNA, 120 bp, Artificial Sequence
  ENSG00000198739_33 (sequence is synthesized)
caaagaagttatatctataaaatctagttttatgcaggtttgtcacagcaaatgtaaaagcggattcaagaagaatgaacttaaaaactgtggagcaaatttttgttgaaaatatataaa

SEQ ID NO: 731713 - DNA, 120 bp, Artificial Sequence
  ENSG00000198739_34 (sequence is synthesized)
gtcagaaagaaaaaagatgtaaatgttggaagaagcaaattctattactaattcaaatgaaactaaatgtcaaacacagtacttgtgtcaactatttagcatcccagattttgtaacata

SEQ ID NO: 731714 - DNA, 120 bp, Artificial Sequence
  ENSG00000198739_35 (sequence is synthesized)
ttttgcataaattatttgctcttcaaaaatttttgtcattttaaatctaattttaatctttatgttttccattttctaatttccttgcaatgtattattcttattcttaattctctacat

SEQ ID NO: 731715 - DNA, 120 bp, Artificial Sequence
  ENSG00000198739_36 (sequence is synthesized)
tgaaatttggctttacgtcgttagcaaatttataaagggttataaagctatgattcgtgagtctaaaatcaaatgcaaaattttatttattatgtaaaccaaaatgtcatttgcaagttt

SEQ ID NO: 731716 - DNA, 120 bp, Artificial Sequence
  ENSG00000198739_37 (sequence is synthesized)
tctcattagaagttatccttgcaaagatagaaaaagaagaattaatttgtgtaaacaagcacaaattaacatatttgttaataaataggtttatctactaataaacctatttctagacac

SEQ ID NO: 731717 - DNA, 120 bp, Artificial Sequence
  ENSG00000198739_38 (sequence is synthesized)
attcaaattgataatgatttttagaaatgttaaggttccaaggagtcttacaagtgtatgcccttgatttcctgaaggaaaccactttctttcttaaatattttaaattcatctaaagtg

SEQ ID NO: 731718 - DNA, 120 bp, Artificial Sequence
  ENSG00000198739_39 (sequence is synthesized)
aacgactataaatagaagcaatcaccttggaaccacagctctgtgcaaccaaggccctaagctacaccaaatacgccaggaattttgagacttctcatctttaaattcaaccaaaagggt

SEQ ID NO: 731719 - DNA, 120 bp, Artificial Sequence
  ENSG00000198739_40 (sequence is synthesized)
ctttagcaagaaaaaaaatgctggatgatgattattattatttttgcttaatttttattttgccatgtccaggttaagggtgagggtggtgacaatctgaaagactgtgtctggaatctt

SEQ ID NO: 731720 - DNA, 120 bp, Artificial Sequence
  ENSG00000198739_41 (sequence is synthesized)
tatcacatatttccaatttatttcagtttttgtctaaaacttgcatttctaacctatcttttccagcatttgataatctcccatttcctccttctaacccccattcctatgtctcccttc

SEQ ID NO: 731721 - DNA, 120 bp, Artificial Sequence
  ENSG00000198739_42 (sequence is synthesized)
ctgtctattcctcaccgatttaaacaactgaaatgtttacttatgtttggagctgaaaaatggaaagtttcacccagcatggttacaataacagccagcagctgcagcaaaccataaagt

SEQ ID NO: 731722 - DNA, 120 bp, Artificial Sequence
  ENSG00000198739_43 (sequence is synthesized)
tatgcagtgttttgaagttcacaaaccacattttacataaattatctcattttgtcttcataacaaccctatgaagacacattaatctcaaagaaattgagctcttaccccaaaacacag

SEQ ID NO: 731723 - DNA, 120 bp, Artificial Sequence
  ENSG00000198739_44 (sequence is synthesized)
ggccaataattggtgcagttgaattattctcaaaatttacaggctgttagtctttccactgtactaaaagatttctttctctgatcagagcaagagaacttccagagataatggatagaa

SEQ ID NO: 731724 - DNA, 120 bp, Artificial Sequence
  ENSG00000198739_45 (sequence is synthesized)
tgaaagaatatatatctatatatatttgacatgttgtttagtaatccctattttaattcaattctccatctgtaaaatattagctaactgaattatttctgtgttctactctgggctctc

SEQ ID NO: 731725 - DNA, 120 bp, Artificial Sequence
  ENSG00000198739_46 (sequence is synthesized)
acattaaaactctgttcaaaaagtttaacaagtcacatatttcttaacatacaagttcgtttgtgaatgtgcagaacagatgctcccaagatgtggatgcatgtaggccccgaggtacag

SEQ ID NO: 731726 - DNA, 120 bp, Artificial Sequence
  ENSG00000198739_47 (sequence is synthesized)
acataaaatcaaggaagcacaaggaaagaaaccccaaggaaaaaaccaaagaccttctaaattgagactgcataattataaaagagatccatagtacagggttgaacacatgttcaacac

SEQ ID NO: 731727 - DNA, 120 bp, Artificial Sequence
  ENSG00000198739_48 (sequence is synthesized)
tttgtcaactgaacacatgttcaattcggagctaattgggaagacttacataaaattctttttctttttttcttttggcaagatttcttcttaaaccatgaaattttttttacttgtaat

SEQ ID NO: 731728 - DNA, 120 bp, Artificial Sequence
  ENSG00000198739_49 (sequence is synthesized)
aatagagaacaattttctccattttcttataagaaaaataaaatataatttatccaaattgatgtatagaacctaaaacatatgctaacttgcaaataatatattttactgatcaactca

SEQ ID NO: 731729 - DNA, 120 bp, Artificial Sequence
  ENSG00000198739_50 (sequence is synthesized)
cctcggtgccagatctcctagatgcccacctacaggtaaggcatcttaccagttcttatgcactgcaatggccactagatagatttgatgctaaccatcttaaatcagagttcctccatt

SEQ ID NO: 731730 - DNA, 120 bp, Artificial Sequence
  ENSG00000198739_51 (sequence is synthesized)
catgtatgtgcatgcacatgagtttaaagaagagctccagggttctatattgtctaagttttgtttcagaatgtctttctcttgatactatatttgactgaaaataaaacttgagtcata

SEQ ID NO: 731731 - DNA, 120 bp, Artificial Sequence
  ENSG00000198739_52 (sequence is synthesized)
aaacccagagaaaatagaaatgccaccacctcggtgccagatctcctagatgcccacctacaggtaaggcatcttaccagttcttatgcactgcaatggccactagatacctttatcaat

SEQ ID NO: 731732 - DNA, 120 bp, Artificial Sequence
  ENSG00000198740_0 (sequence is synthesized)
gcggggagccggcggttatctgggcggcggagcgctcacaatgtggcaggagacagaaaagataagatgctcccaagtcccttgcagctctcttcagaagaaaaatcactagtgctctgc

SEQ ID NO: 731733 - DNA, 120 bp, Artificial Sequence
  ENSG00000198740_1 (sequence is synthesized)
tcttgccataataccaaacctttttgactcatgctttggtgctgcaacactggaagaattgcacacagtttccaggaatatctttttttcatttgagtgattctttgtggatgagaaaag

SEQ ID NO: 731734 - DNA, 120 bp, Artificial Sequence
  ENSG00000198740_2 (sequence is synthesized)
atttgagtcttaataattaccttgttttaaagctatttctttatagtctgaactgtttaataaattgggccacttaccaatgagccacacagccagttcttgtcaggagctggttgaaaa

SEQ ID NO: 731735 - DNA, 120 bp, Artificial Sequence
  ENSG00000198740_3 (sequence is synthesized)
ctgtgctgtgcatgtagcaggaatggcacaagaagatagccgtcgtggtcaagtgccatcttccttttatcatggtgccaaccaagaacttgacctgtccaccaaagtgtacaaaaggga

SEQ ID NO: 731736 - DNA, 120 bp, Artificial Sequence
  ENSG00000198740_4 (sequence is synthesized)
atcaggaagtccttattctgtgttagtggacaccaagatgagcaaaccgcatctccatgaaacagaagaacagccatatttcagggagacaagagcagtgtctgacgtgcatgctgttaa

SEQ ID NO: 731737 - DNA, 120 bp, Artificial Sequence
  ENSG00000198740_5 (sequence is synthesized)
ggaagaccgggagaattctgatgacacagaggaggaagaggaagaagtctcttacaaaagggagcagatcatagtggaggtaaaccttaataatcaaacattaaatgtatctaaagggga

SEQ ID NO: 731738 - DNA, 120 bp, Artificial Sequence
  ENSG00000198740_6 (sequence is synthesized)
aaagggtgtctcttctcagtccaaagagactcctgttcttaagacaagcagtgaggaggaagaggaagagagtgaggaagaggccacagatgacagcaatgactatggagagaatgaaaa

SEQ ID NO: 731739 - DNA, 120 bp, Artificial Sequence
  ENSG00000198740_7 (sequence is synthesized)
gcagaagaaaaaggagaagatagtagagaaagtcagcgttacacaaaggagaaccaggagagctgcctctgttgccgcagctaccacttcccctactcccagaactacaagaggtcgtag

SEQ ID NO: 731740 - DNA, 120 bp, Artificial Sequence
  ENSG00000198740_8 (sequence is synthesized)
gaagagtgtagagccacctaagcgtaagaagcgggccacaaaggagcccaaagcaccagtccagaaagctaagtgtgaagagaaagagactctgacctgtgagaagtgccccagggtatt

SEQ ID NO: 731741 - DNA, 120 bp, Artificial Sequence
  ENSG00000198740_9 (sequence is synthesized)
taacactcgctggtacctggagaagcacatgaacgttactcataggcgcatgcagatttgtgataaatgtggcaagaagtttgtcctggaaagtgagctgtcccttcaccagcaaacaga

SEQ ID NO: 731742 - DNA, 120 bp, Artificial Sequence
  ENSG00000198740_10 (sequence is synthesized)
ctgtgaaaaaaacattcagtgtgtttcctgtaacaaatcgttcaagaaactctggtcccttcatgaacatatcaagatcgtccatggatatgcagaaaagaaattttcctgtgaaatttg

SEQ ID NO: 731743 - DNA, 120 bp, Artificial Sequence
  ENSG00000198740_11 (sequence is synthesized)
tgagaagaaattctataccatggctcatgtgcggaaacacatggttgcacacacaaaagacatgccatttacatgcgaaacctgtggaaaatcattcaaacgcagtatgtcactcaaggt

SEQ ID NO: 731744 - DNA, 120 bp, Artificial Sequence
  ENSG00000198740_12 (sequence is synthesized)
gcactccttgcagcattctggagagaagccctttagatgcgagaactgtgacgaaaggtttcagtacaagtaccagctacgctcccacatgagcattcatattgggcacaaacagttcat

SEQ ID NO: 731745 - DNA, 120 bp, Artificial Sequence
  ENSG00000198740_13 (sequence is synthesized)
gtgccagtggtgtggcaaggatttcaacatgaagcagtacttcgacgaacacatgaaaacacacactggagagaaaccctttatctgtgaaatctgtggcaaaagcttcaccagccgccc

SEQ ID NO: 731746 - DNA, 120 bp, Artificial Sequence
  ENSG00000198740_14 (sequence is synthesized)
caacatgaagagacaccgcagaactcacacaggcgagaagccctatccatgtgatgtgtgtggccagcggttccgcttctcgaacatgcttaaggcccacaaggagaagtgctttcgggt

SEQ ID NO: 731747 - DNA, 120 bp, Artificial Sequence
  ENSG00000198740_15 (sequence is synthesized)
gaccagccccgtgaatgtgccacctgctgtccagatcccacttacaacttccccagccaccccagttccttctgtggtgaacacagccacaaccccaacccctccaatcaatatgaatcc

SEQ ID NO: 731748 - DNA, 120 bp, Artificial Sequence
  ENSG00000198740_16 (sequence is synthesized)
tgtaagcactcttccccctcggcccatcccccaccccttctcacacctgcacatccacccacaccctcaccacccacaccaccttcccatccctccagtccctcacctcccgccacctcc

SEQ ID NO: 731749 - DNA, 120 bp, Artificial Sequence
  ENSG00000198740_17 (sequence is synthesized)
agctctctttaagagtgagcctttaaatcatagaggccagagtgaggacaactttctgcggcacctggcagagaagaacagttcagcacagcatcattaacatccgtctccttagtgtgt

SEQ ID NO: 731750 - DNA, 120 bp, Artificial Sequence
  ENSG00000198740_18 (sequence is synthesized)
tctccaggagacacgtccccatgtgtgagcgtgcacagagggagtcggtgagcatttccttagttctcagactctcctccgcctctaccaagagcttcgccagtgtcactgaatcaacag

SEQ ID NO: 731751 - DNA, 120 bp, Artificial Sequence
  ENSG00000198740_19 (sequence is synthesized)
atccaagggaatgaacaagaagactaccttgagctcacagagggactgtcatctaaaccaggggaaccactgaactaaagcccaatttgcttgcattttctgatgacttttataagtttc

SEQ ID NO: 731752 - DNA, 120 bp, Artificial Sequence
  ENSG00000198740_20 (sequence is synthesized)
aaatactcagacttgtggaattttataatttcatatcagctgatgaggtatgcttgcttttatatcccagacttctcctcaaagaggggataggcctggtttcctttgtactaatcggga

SEQ ID NO: 731753 - DNA, 120 bp, Artificial Sequence
  ENSG00000198740_21 (sequence is synthesized)
aggctgtgagattaatccagagcattaattgtatcactgtgtatggtaaggaattcttttcagcttttggtgccagctacagagttgagctggccatgtttcacagtatatcaagcatta

SEQ ID NO: 731754 - DNA, 120 bp, Artificial Sequence
  ENSG00000198740_22 (sequence is synthesized)
tagagaaagacagaaattttcttctttgtgtagctctcctaacgcactctttattttactacagaaattattttagagtttttgtatagacttctttggtagtctgtttctaaaatgaaa

SEQ ID NO: 731755 - DNA, 120 bp, Artificial Sequence
  ENSG00000198740_23 (sequence is synthesized)
tgtatttcaataagcagtgtaattttttcagtgtagctgaacctatgttgtaaaatagaaaaaaatttttataatcatcaaaatgtgattcttaaagatgcatataacttctataattca

SEQ ID NO: 731756 - DNA, 120 bp, Artificial Sequence
  ENSG00000198740_24 (sequence is synthesized)
tggcgtaaatacttggtagttttgacatctctgcttaacactcaagagaggctccctaatgtgctcctgtcctccatgttctgcttggcttcgttagtgcattacatgaaatgatttgca

SEQ ID NO: 731757 - DNA, 120 bp, Artificial Sequence
  ENSG00000198740_25 (sequence is synthesized)
ggggatggggccttttccagggaagtcacctaaagcttgcatgttttgaaaatttgaataaggctgtttgctgacaggaggaggaagtagtggagatcatttcatctcagtcacgtctgt

SEQ ID NO: 731758 - DNA, 120 bp, Artificial Sequence
  ENSG00000198740_26 (sequence is synthesized)
ttctcacttcccttaggaattgtgttgatgtttaacttttatgggatgacaaattgaaatcgctcattttgaggttgctttatttttctagaattgttataagaagctaaaatagtaaac

SEQ ID NO: 731759 - DNA, 120 bp, Artificial Sequence
  ENSG00000198740_27 (sequence is synthesized)
ttaaaatcacaaacatgacattgctgatagtggctgagaaattcagatgagaagacaaattggttatgaattttgaaatatctattatatgtaaaatgtggatatgttcacaaccttgag

SEQ ID NO: 731760 - DNA, 120 bp, Artificial Sequence
  ENSG00000198740_28 (sequence is synthesized)
ctattttaacacagtttaaatatagtgagggaaaactcctaagttttactgccctgtcctctgcaaattatgtaataccagcattcttaggcgataaagagagcagcacctctagtacct

SEQ ID NO: 731761 - DNA, 120 bp, Artificial Sequence
  ENSG00000198740_29 (sequence is synthesized)
ttaggcagattactttttcaagtttggggaacttcaaaagaccataatcaaccaggagcttattataggaaaggctgaacagaagggctagtgtattgattacacttaacagatcatatt

SEQ ID NO: 731762 - DNA, 120 bp, Artificial Sequence
  ENSG00000198740_30 (sequence is synthesized)
tatccagactcagtatagcttaaaattttgtatttctttatctgagagaactgagttcccaggctaaatcacttacctcccaccccctctccaattttttttttaagagacaaggtcttg

SEQ ID NO: 731763 - DNA, 120 bp, Artificial Sequence
  ENSG00000198740_31 (sequence is synthesized)
ctatgttgcccaggctagagtgcagtggctattcacaggtgcagttatagcacactacagcctccaactcttgggttcaagcaaccctgcctcagctaaccaagtagctgggactacagg

SEQ ID NO: 731764 - DNA, 120 bp, Artificial Sequence
  ENSG00000198740_32 (sequence is synthesized)
tgcatgctaccatgcccagtccattttttaatcttgaaatttcttcatttttctttcttcggtttcttaaaatctttgcctgaatcagaacgctggcttttatttatttttttattttta

SEQ ID NO: 731765 - DNA, 120 bp, Artificial Sequence
  ENSG00000198740_33 (sequence is synthesized)
atattaaatgtgcagatatgcttcgagcacttttctaactaatgagctctgtggtaagaaaaaatgaactctttcaattgagattaagtccatatttttcaaacatcacgttctctattg

SEQ ID NO: 731766 - DNA, 120 bp, Artificial Sequence
  ENSG00000198740_34 (sequence is synthesized)
gctttttggtttagtgtttctaaattttctccttctgattttgcctgtcttatataatgagcataggaaaattttggaatgaggcagaaaagtatatcaagacatacttcctggttttgg

SEQ ID NO: 731767 - DNA, 120 bp, Artificial Sequence
  ENSG00000198740_35 (sequence is synthesized)
atgtaagttttaaagaatggtatttttaatatttgtacacattctttgagcacccaggtacccaagccaataaggaaagttaattccttgcatatgactgttatatctttagtggttgtc

SEQ ID NO: 731768 - DNA, 120 bp, Artificial Sequence
  ENSG00000198740_36 (sequence is synthesized)
tccctctccctccacagtctccttggcattccatgacaagtttgtcaacctacacttttatatagacatatcattatttcatggtcaagcctgtagtattaaaatgatttttttaaaaga

SEQ ID NO: 731769 - DNA, 64 bp, Artificial Sequence
  ENSG00000198740_37 (sequence is synthesized)
atggtcaagcctgtagtattaaaatgatttttttaaaagatgtaaactgtgcttagttaattgg

SEQ ID NO: 731770 - DNA, 120 bp, Artificial Sequence
  ENSG00000198740_38 (sequence is synthesized)
ctgaataaatttacagtattgggcagcaattctggattctagacttgagaccacagaatcaaccatttcatgaggttgtactgtaattatacactggaatattcaggtagtcatctttga

SEQ ID NO: 731771 - DNA, 120 bp, Artificial Sequence
  ENSG00000198740_39 (sequence is synthesized)
tttttcattcaagtaaatatagccataagaaaatatctgctatacaggaaaaccagtattaagcaaataccaccatccttaacagaaacaaaaatatatatatatattatttttaaaaat

SEQ ID NO: 731772 - DNA, 120 bp, Artificial Sequence
  ENSG00000198740_40 (sequence is synthesized)
tagcattgtcatacagtacaattcttagtgaagtgtattgtggaacaatttagaaacttcctttttttcccctagattaaggatactttccttgacttgagacttgtggtcttcaggaaa

SEQ ID NO: 731773 - DNA, 120 bp, Artificial Sequence
  ENSG00000198740_41 (sequence is synthesized)
tgtggtcttcaggaaaactactcagaatataatgactcctcatcagtatcatattgtatataaataatgaaatgcattaagaatattcacaacattgaacccaggaggcggagcttgcag

SEQ ID NO: 731774 - DNA, 120 bp, Artificial Sequence
  ENSG00000198740_42 (sequence is synthesized)
atctcaaaaaaaaaaaaaaaaagaatattcacaacattaatgcttctgaatagaagaactgcaggattaagccttaaacatatatgtgcaacacgtttaacatgcttaagactcaaactc

SEQ ID NO: 731775 - DNA, 120 bp, Artificial Sequence
  ENSG00000198740_43 (sequence is synthesized)
tgtgcaacacgtttaacatgcttaagactcaaactcagggttgaaaatttggttggggtcctctttgtaagataaaagttgcattatgtggtatgttctcttccatatatgctacagcac

SEQ ID NO: 731776 - DNA, 120 bp, Artificial Sequence
  ENSG00000198740_44 (sequence is synthesized)
cccatgaattcttcaaaactttttacctacttgttatctgtttatgaaaaaaagaattatggagaagtttgagttctcagcccttatctgtacatgtctgttaaagacaacaaaggctgc

SEQ ID NO: 731777 - DNA, 120 bp, Artificial Sequence
  ENSG00000198740_45 (sequence is synthesized)
atttaagcattatatagataacaaattgaggctgtctctcgttacttagttttactgtcttcaaaggcttgtatcattgctagggttaagacttatttgaggatgagttggcattgtatt

SEQ ID NO: 731778 - DNA, 120 bp, Artificial Sequence
  ENSG00000198740_46 (sequence is synthesized)
ttttgtgtgtgtgggttggtttgtatttgtttcgtttttatttttctattttctctcatagatttatcagtaaaatataaactcttccttagccttaataaaggctgctgctttctcaaa

SEQ ID NO: 731779 - DNA, 120 bp, Artificial Sequence
  ENSG00000198740_47 (sequence is synthesized)
cggcggccacgtagcgctgcggcggcagcggcagcggccgaggccgggtctgaggagcggccctgaggacagacgttgggcagggggggaggggctggcccagccggcggttgtgactcg

SEQ ID NO: 731780 - DNA, 120 bp, Artificial Sequence
  ENSG00000198740_48 (sequence is synthesized)
agcgccgcggctgcaggcccccgccgcagggatggaccgccgaggcggcggccggggcggcggaggcggaggcggccggcccggataagatgctcccaagtcccttgcagctctcttcag

SEQ ID NO: 731781 - DNA, 120 bp, Artificial Sequence
  ENSG00000198740_49 (sequence is synthesized)
cggctgcaggcccccgccgcagggatggaccgccgaggcggcggccggggcggcggaggcggaggcggccggcccggtggtctggagccgaaccggcaatatctctgaggtgtgactgtt

SEQ ID NO: 731782 - DNA, 120 bp, Artificial Sequence
  ENSG00000198740_50 (sequence is synthesized)
tgactgttctctcagcttcatcaaatataaagtggaaagagttttgttcatgaagccactgaatgaaccattgcttgccttaaaggaagataagatgctcccaagtcccttgcagctctc

SEQ ID NO: 731783 - DNA, 120 bp, Artificial Sequence
  ENSG00000198740_51 (sequence is synthesized)
atatcagctgatgagggtcccaggccataaaacaacggagagctgtacttgcttgtcacttggaggaaccacatccttgagacagcctgctgtcttgtatgtcttcagtaggaaacttct

SEQ ID NO: 731784 - DNA, 120 bp, Artificial Sequence
  ENSG00000198740_52 (sequence is synthesized)
atgttacatattacttgaaaatgatttcataggaagtgaggatggggcaagaaaggaggtagaagctgaattttgcttaacttcagaaggaaatctgatacttgccttggctagttctga

SEQ ID NO: 731785 - DNA, 120 bp, Artificial Sequence
  ENSG00000198740_53 (sequence is synthesized)
tcaactaaagagcctgtgtctgtactggatgtgccaaagagtcaagttgtttctggaatatccagctcctctgaatgaacacagcttcctccctacctgtcttttatgggtgaaaaggga

SEQ ID NO: 731786 - DNA, 120 bp, Artificial Sequence
  ENSG00000198740_54 (sequence is synthesized)
ccgtctgatgagcatgatagacatcctgtacaggactcaagactgtttcattgcatttgaaagttggtgggaagtattttattctgctagagctcctaaccctcctagaaatatcttttc

SEQ ID NO: 731787 - DNA, 120 bp, Artificial Sequence
  ENSG00000198740_55 (sequence is synthesized)
atgctctattaattcaattcattagtttaaaaagaaacagtgtgacataattttggtgtttacttcttaagttgtctccccaagggcatatatgtagcctctgaaaatgggatgatttct

SEQ ID NO: 731788 - DNA, 120 bp, Artificial Sequence
  ENSG00000198740_56 (sequence is synthesized)
tctcaatcttccataaatttgaatatgcattttattcatttcttgacatgggctgtgtgactgttttccatcagcagttctggctttgtccacaagggagcaataaagtacgttagcttt

SEQ ID NO: 731789 - DNA, 120 bp, Artificial Sequence
  ENSG00000198740_57 (sequence is synthesized)
attctcaaccttctaaagaaagatcccacttttaaatctcttctggaatagcctcttagctcaaagcttattcatgtattttgattatttaagaaattttcccttattacaaagtccagt

SEQ ID NO: 731790 - DNA, 120 bp, Artificial Sequence
  ENSG00000198740_58 (sequence is synthesized)
cgtcgttcatccctcatgatgccaagcaatgattgatgtgtgggtgtggagtccttgtgggtcaggcatcttaattaattagactttttacatattgatgatccccagattgaaagccag

SEQ ID NO: 731791 - DNA, 120 bp, Artificial Sequence
  ENSG00000198740_59 (sequence is synthesized)
gaccttcccataggggcgcctttgtgtgctaaaggcagagcaggcaggcttctccactcctatctcctccgcaggccaccaccatcacatctataggaggaacaagagcactgggggaac

SEQ ID NO: 731792 - DNA, 120 bp, Artificial Sequence
  ENSG00000198740_60 (sequence is synthesized)
tctggagtatgagtaaggaaatgcttctcaccttctctgctccaaagagatatctgttacatcagggaacaagtcctctaggtcaggcacttcctcctgaccagtgcaacgggcactcca

SEQ ID NO: 731793 - DNA, 120 bp, Artificial Sequence
  ENSG00000198740_61 (sequence is synthesized)
ggttagaaactgtgtgtgctccctctctgtcagttacttgtctaagggctcctatccgtggtcatcagctctctggccatgagttctgtttgtgcttattgcagcagcatcttcacaaca

SEQ ID NO: 731794 - DNA, 120 bp, Artificial Sequence
  ENSG00000198740_62 (sequence is synthesized)
aacaggtcagtaatcaacctgggaagggaaaagacgacagtaaatattaccccctgtagagccgggaggcatttacacctggaatggccttcttaactgatttctgcctggccacctcac

SEQ ID NO: 731795 - DNA, 120 bp, Artificial Sequence
  ENSG00000198740_63 (sequence is synthesized)
ccccagccaagtctgaacctgagcaataccaggcacagagaggtgtctacttgtaactccaacacttgacaaaaaacaaaactgaagctgtgattggtttaggcagcaagtggccaggtg

SEQ ID NO: 731796 - DNA, 120 bp, Artificial Sequence
  ENSG00000198740_64 (sequence is synthesized)
caacttgtttgtttttatttttgttttccccaacagtactgagatcacttgcacttttcctcatttcttaagaaaatccagtttgcttgccatgacttgtttagcgttaggtttacaaag

SEQ ID NO: 731797 - DNA, 120 bp, Artificial Sequence
  ENSG00000198740_65 (sequence is synthesized)
cttgttgttgaatgttgaatatttgtccaaaggagtttgacaaaatagaagctgcttggtccctgttctgcctgctaggtcataaggatgaaggccatgtggctggggtacttatgtcaa

SEQ ID NO: 731798 - DNA, 120 bp, Artificial Sequence
  ENSG00000198740_66 (sequence is synthesized)
gtccagaatggggcagtgtccctctcctacctctctgcggagacgcaattgaaggtcaagtagactcagtgtagggcaggcagctgtcatgctgcaaagaagtttagaggagtctttggg

SEQ ID NO: 731799 - DNA, 120 bp, Artificial Sequence
  ENSG00000198740_67 (sequence is synthesized)
ttggggaggtgacaggtaggtaggacaggatctcttaagatgggaaagatactggggagaggagggctgcttggccccagggaactgcagtgaggtggaactgagctccgctcctgaatc

SEQ ID NO: 731800 - DNA, 120 bp, Artificial Sequence
  ENSG00000198740_68 (sequence is synthesized)
tccaaaggagcccatgctgcccggcttccctgagtcattttttccagcatcctgtcagatccctcaatgtactgatttcccccttgtgttaactataccgatattatttttttagcaatt

SEQ ID NO: 731801 - DNA, 120 bp, Artificial Sequence
  ENSG00000198740_69 (sequence is synthesized)
gaaatgcacttttttatttcaactcaatcatgattttaagtataaaaaatttatagattgttaaaactacttttttgtgtatttttaaccactcaatgtagcattgtatattttattctt

SEQ ID NO: 731802 - DNA, 120 bp, Artificial Sequence
  ENSG00000198740_70 (sequence is synthesized)
gtgagactctggtacaggtgtgccgcctaatgatttttctgagatgctgggcctttggatgtgtacggtaaccaacttaatgctaatgttcaaagtaaaaaaaaaaaaaaaaagcagcca

SEQ ID NO: 731803 - DNA, 120 bp, Artificial Sequence
  ENSG00000198742_0 (sequence is synthesized)
ggcgggcgtccggctctgaggtggtggaggcggcggaggcggcggcggaggcggcggcggctcgggactgggctcggctggaagcagcgagggtcagagcgccgcagcaagcgccgatct

SEQ ID NO: 731804 - DNA, 120 bp, Artificial Sequence
  ENSG00000198742_1 (sequence is synthesized)
gagcgccgcagcaagcgccgatctcccggctcgaccatccgcctgccgcccggacgcctgggccgcggagtttgtgtcccggctcggaccccggcgcccagcccggagccgtaaccttga

SEQ ID NO: 731805 - DNA, 120 bp, Artificial Sequence
  ENSG00000198742_2 (sequence is synthesized)
gcggcggcggggccgggccgggccgggctggggggcggtggcgctggatccgcggctgcccgatcgttggcgggagatgtcgaaccccgggacacgcaggaacggctccagcatcaagat

SEQ ID NO: 731806 - DNA, 120 bp, Artificial Sequence
  ENSG00000198742_3 (sequence is synthesized)
agatccgtctgacagtgttatgtgccaagaaccttgcaaagaaagacttcttcaggctccctgacccttttgcaaagattgtcgtggatgggtctgggcagtgccactcaaccgacactg

SEQ ID NO: 731807 - DNA, 120 bp, Artificial Sequence
  ENSG00000198742_4 (sequence is synthesized)
tgaaaaacacattggacccaaagtggaaccagcactatgatctatatgttgggaaaacggattcgataaccattagcgtgtggaaccataagaaaattcacaagaaacagggagctggct

SEQ ID NO: 731808 - DNA, 120 bp, Artificial Sequence
  ENSG00000198742_5 (sequence is synthesized)
tcctgggctgtgtgcggctgctctccaatgccatcagcagattaaaagataccggataccagcgtttggatctatgcaaactaaacccctcagatactgatgcagttcgtggccagatag

SEQ ID NO: 731809 - DNA, 120 bp, Artificial Sequence
  ENSG00000198742_6 (sequence is synthesized)
tggtcagtttacagacacgagacagaataggaaccggcggctcggtggtggactgcagaggactgttagaaaatgaaggaacggtgtatgaagactccgggcctgggaggccgctcagct

SEQ ID NO: 731810 - DNA, 120 bp, Artificial Sequence
  ENSG00000198742_7 (sequence is synthesized)
gcttcatggaggaaccagccccttacacagatagcaccggtgctgctgctggaggagggaattgcaggttcgtggagtccccaagtcaagatcaaagacttcaggcacagcggcttcgaa

SEQ ID NO: 731811 - DNA, 120 bp, Artificial Sequence
  ENSG00000198742_8 (sequence is synthesized)
accctgatgtgcgaggttcactacagacgccccagaaccgaccacacggccaccagtccccggaactgcccgaaggctacgaacaaagaacaacagtccagggccaagtttactttttgc

SEQ ID NO: 731812 - DNA, 120 bp, Artificial Sequence
  ENSG00000198742_9 (sequence is synthesized)
atacacagactggagttagcacgtggcacgaccccaggataccaagtccctcggggaccattcctgggggagatgcagcttttctatacgaattccttctacaaggccatacatctgagc

SEQ ID NO: 731813 - DNA, 120 bp, Artificial Sequence
  ENSG00000198742_10 (sequence is synthesized)
ccagagaccttaacagtgtgaactgtgatgaacttggaccactgccgccaggctgggaagtcagaagtacagtttctgggaggatatattttgtagatcataataaccgaacaacccagt

SEQ ID NO: 731814 - DNA, 120 bp, Artificial Sequence
  ENSG00000198742_11 (sequence is synthesized)
ttacagacccaaggttacaccacatcatgaatcaccagtgccaactcaaggagcccagccagccgctgccactgcccagtgagggctctctggaggacgaggagcttcctgcccagagat

SEQ ID NO: 731815 - DNA, 120 bp, Artificial Sequence
  ENSG00000198742_12 (sequence is synthesized)
acgaaagagatctagtccagaagctgaaagtcctcagacacgaactgtcgcttcagcagccccaagctggtcattgccgcatcgaagtgtccagagaagaaatctttgaggagtcttacc

SEQ ID NO: 731816 - DNA, 120 bp, Artificial Sequence
  ENSG00000198742_13 (sequence is synthesized)
gccagataatgaagatgcgaccgaaagacttgaaaaaacggctgatggtgaaattccgtggggaagaaggtttggattacggtggtgtggccagggagtggctttacttgctgtgccatg

SEQ ID NO: 731817 - DNA, 120 bp, Artificial Sequence
  ENSG00000198742_14 (sequence is synthesized)
aaatgctgaatccttattacgggctcttccagtattctacggacaatatttacatgttgcaaataaatccggattcttcaatcaaccccgaccacttgtcttatttccactttgtggggc

SEQ ID NO: 731818 - DNA, 120 bp, Artificial Sequence
  ENSG00000198742_15 (sequence is synthesized)
ggatcatggggctggctgtgttccatggacactacatcaacgggggcttcacagtgcccttctacaagcagctgctggggaagcccatccagctctcagatctggaatctgtggacccag

SEQ ID NO: 731819 - DNA, 120 bp, Artificial Sequence
  ENSG00000198742_16 (sequence is synthesized)
agctgcataagagcttggtgtggatcctagagaacgacatcacgcctgtactggaccacaccttctgcgtggaacacaacgccttcgggcggatcctgcagcatgaactgaaacccaatg

SEQ ID NO: 731820 - DNA, 120 bp, Artificial Sequence
  ENSG00000198742_17 (sequence is synthesized)
gcagaaatgtgccagtcacagaggagaataagaaagaatacgtccggttgtatgtaaactggaggtttatgagaggaatcgaagcccagttcttagctctgcagaaggggttcaatgagc

SEQ ID NO: 731821 - DNA, 120 bp, Artificial Sequence
  ENSG00000198742_18 (sequence is synthesized)
tcatccctcaacatctgctgaagccttttgaccagaaggaactggagctgatcataggcggcctggataaaatagacttgaacgactggaagtcgaacacgcggctgaagcactgtgtgg

SEQ ID NO: 731822 - DNA, 120 bp, Artificial Sequence
  ENSG00000198742_19 (sequence is synthesized)
ccgacagcaacatcgtgcggtggttctggcaagcggtggagacgttcgatgaagaaaggagggccaggctcctgcagtttgtgactgggtccacgcgagtcccgctccaaggcttcaagg

SEQ ID NO: 731823 - DNA, 120 bp, Artificial Sequence
  ENSG00000198742_20 (sequence is synthesized)
ctttgcaaggttctacaggcgcggcagggccccggctgttcaccatccacctgatagacgcgaacacagacaaccttccgaaggcccatacctgctttaaccggatcgacattccaccat

SEQ ID NO: 731824 - DNA, 120 bp, Artificial Sequence
  ENSG00000198742_21 (sequence is synthesized)
atgagtcctatgagaagctctacgagaagctgctgacagccgtggaggagacctgcgggtttgctgtggagtgaaaagcaaccaaaggcaacagagtctagctcatggccaccagaccaa

SEQ ID NO: 731825 - DNA, 120 bp, Artificial Sequence
  ENSG00000198742_22 (sequence is synthesized)
aagcatccagcttctgtgcacctcctgcaaagctggcagaggccctggaattccagatcacctgaggggaaagggttgtctctctcctttctgttgggggagggggatgggggacttttg

SEQ ID NO: 731826 - DNA, 120 bp, Artificial Sequence
  ENSG00000198742_23 (sequence is synthesized)
ttggtcacacaggatattctgctgtgttgcaacccatgtggtgataaggctcacagccctgagctctttacgggagcatcaactcacagttaggggactgggcgtggctgattgagggtt

SEQ ID NO: 731827 - DNA, 120 bp, Artificial Sequence
  ENSG00000198742_24 (sequence is synthesized)
tggaactggtggctatgccagctattccatctcaaaacagccttgaggccccttttcaatttgagcagctgctagatatcttatcagagctcagattccagatttcacatcccagcagcc

SEQ ID NO: 731828 - DNA, 120 bp, Artificial Sequence
  ENSG00000198742_25 (sequence is synthesized)
ggttctgggtagcagatcaatttccaactggaaaataactatataatgtatgcttattggaattctgccacagcaggaagcttgagtcaaaatgtgtttcccctttgaaaggagaaggaa

SEQ ID NO: 731829 - DNA, 120 bp, Artificial Sequence
  ENSG00000198742_26 (sequence is synthesized)
ttggagcagcttttcctggaggcccaggatatttcttttctgggtatcttggctgaaaattttgttttacatagagaaaaacgatcttttaagggtcccttttgctgcattatctgtcca

SEQ ID NO: 731830 - DNA, 120 bp, Artificial Sequence
  ENSG00000198742_27 (sequence is synthesized)
gtttgacttttttttcagtgaaaacaccatgtcatggagtgtaggaaagagcagaccaaaatcagccctagagccaaccagtcagtcccaaagctgtgacctctgtgccactgttgtcca

SEQ ID NO: 731831 - DNA, 120 bp, Artificial Sequence
  ENSG00000198742_28 (sequence is synthesized)
tagaagagcatcgactgtgtcacttaaaatattagtaaaccatgatgcagcaactgctaagagctaaactaacaaaattgtgtcatcatagctgctggcttggtgtgaactcgcttaaaa

SEQ ID NO: 731832 - DNA, 120 bp, Artificial Sequence
  ENSG00000198742_29 (sequence is synthesized)
gcaatggtgaaaggataacctcgatgatgtaaatccacccaaagatactgttctacaaaaagtagggtgtggacgcaaacctgtgacagcagagggggacgacttcacactcactgcctc

SEQ ID NO: 731833 - DNA, 120 bp, Artificial Sequence
  ENSG00000198742_30 (sequence is synthesized)
atgtggcccctttcccagtggcagctggtgacactaacgattgctactcggttcacttgcccagatgtcttcatatgatgagcaaggccagaagcaaggctagattcgaagtttctgaca

SEQ ID NO: 731834 - DNA, 120 bp, Artificial Sequence
  ENSG00000198742_31 (sequence is synthesized)
ccatttccagtttgcacaaaagtcagtattttatcttaaagtggcttgatttccaatagctgaacttgggcagaaaacagcaggccaatgttcctatgtggtttctttgttgttgttttt

SEQ ID NO: 731835 - DNA, 120 bp, Artificial Sequence
  ENSG00000198742_32 (sequence is synthesized)
gtttggggtgggggcaagtacagggtaattcatgagcaagacatttcactgctgtcgaagtctctgggatcccgctgtgggtctgagatggcctgggaaggaccttgtggacaatggttt

SEQ ID NO: 731836 - DNA, 120 bp, Artificial Sequence
  ENSG00000198742_33 (sequence is synthesized)
tatctgttctttttgtcactgttaatttctgggctgctgaggttctagaatagaagggctgccaaatgaggtttgctgcaggaggaaagtttaatcccccattccaaaagtccaggccaa

SEQ ID NO: 731837 - DNA, 120 bp, Artificial Sequence
  ENSG00000198742_34 (sequence is synthesized)
atggtgggcttagcctctttgaaaagttctgccttgcccccacaggtgggcacatcctgtgtctcattcaccatgatgcttcctgagggtgttctagaagcccgttccccagtggctgta

SEQ ID NO: 731838 - DNA, 120 bp, Artificial Sequence
  ENSG00000198742_35 (sequence is synthesized)
tccagcctttccttgcatcatcttcctcttgaaggtgaggaagtgaaaactacagacctcccccggacagcccactctctatcacgagcctaacccgcgggaggcggaagagacatccat

SEQ ID NO: 731839 - DNA, 120 bp, Artificial Sequence
  ENSG00000198742_36 (sequence is synthesized)
tcgagaactgaagcggcctccgggatgaggtcagaggccccacctgattttcctggtggtggtatccaaaatcttcagtaactaggaaggaaaccagggtctcatggtttaaaagacttt

SEQ ID NO: 731840 - DNA, 120 bp, Artificial Sequence
  ENSG00000198742_37 (sequence is synthesized)
gaagcaggaatgttgcatttgacgcctttaaaactacctttttgctgttgggaggagtcgggggcgagccttagcagctgcaccgccatccccatgctggttggtgctgccctgcctctc

SEQ ID NO: 731841 - DNA, 120 bp, Artificial Sequence
  ENSG00000198742_38 (sequence is synthesized)
gtgccgggtgttgcttcagcccagagccagagggctgggtcccgggtcctccacaggtgaccccggtggacacacgcgttcccatcctggcctccgtctctgcttttccacttctacctg

SEQ ID NO: 731842 - DNA, 120 bp, Artificial Sequence
  ENSG00000198742_39 (sequence is synthesized)
cgtgtgggtttgccgccttgtcatcggttgtgtgagtgtcgcagacctttccagagctccggttcactctttccaaacaggcctccctgtcggtggcactgcactcctagaaccttcagt

SEQ ID NO: 731843 - DNA, 120 bp, Artificial Sequence
  ENSG00000198742_40 (sequence is synthesized)
ttctacgatggtttgtttggtccttttgaaccaccccaaagaactcaacatggcaaagcaaatggtaaaagcttcccgactgttctactttgggtccgcgcgaagcccactcacgtgtga

SEQ ID NO: 731844 - DNA, 120 bp, Artificial Sequence
  ENSG00000198742_41 (sequence is synthesized)
tctgtgttgcccctctcggtggtcccaggcgatccagccatgccccctgcccctctgcccagatgcttcaggggcccggcttttcaggcttgccctcaccagcggccgtcagccgacact

SEQ ID NO: 731845 - DNA, 120 bp, Artificial Sequence
  ENSG00000198742_42 (sequence is synthesized)
cagggatgtagctaacaccactccgccagtgctttcagtaggaagagctgaggctgcctgggaggcccggggcgaccggaaaagggctctctcaagttctgaaaagagaatctgccacca

SEQ ID NO: 731846 - DNA, 120 bp, Artificial Sequence
  ENSG00000198742_43 (sequence is synthesized)
gatcgaatttcgacccctgagcttgttcggacgtatggtccaaattcagattaaggtggtcacccaacccgagatgtcaggaaaggccttctgcagagaaaatgtccccccacccgccat

SEQ ID NO: 731847 - DNA, 120 bp, Artificial Sequence
  ENSG00000198742_44 (sequence is synthesized)
ctgcagccaggtgtgtgccacacggcagccttcccgaaacatagtatggattttaaaaatgtgtttatttttgtttctcaaccactttataacgtattttttaatttattttgtaatgtc

SEQ ID NO: 731848 - DNA, 120 bp, Artificial Sequence
  ENSG00000198742_45 (sequence is synthesized)
ttgttttgaagtattgctgctatccttgttatccttcccactgtttttatcactgatttattttgtgaaagttgtacactaatgttctatgtcaaaatcaaaagtatttaatgaaatact

SEQ ID NO: 731849 - DNA, 120 bp, Artificial Sequence
  ENSG00000198742_46 (sequence is synthesized)
agttctatttaatgtggttatggaaccagctggaaacacaaaacaaacagtgattgtacagcaggctgggcccaggaggtcaggttcattttgttacatatgcaataaactcacgacttt

SEQ ID NO: 731850 - DNA, 120 bp, Artificial Sequence
  ENSG00000198742_47 (sequence is synthesized)
tgacatccccgcttcagcctcccaaggagctgaaactaacagatgtgtgtcaccatgcccagctaacttaaaacagtatttttggtaaagatggaatcttgctatgttgcctgggctggt

SEQ ID NO: 731851 - DNA, 120 bp, Artificial Sequence
  ENSG00000198742_48 (sequence is synthesized)
ctcaaactcttggcttcaagcgatattcctgcctcggtctcccagactgctgcgattatagacatgaaccactgtacctgacccaagatttatttttaattaagaagcaatgtatacatg

SEQ ID NO: 731852 - DNA, 120 bp, Artificial Sequence
  ENSG00000198742_49 (sequence is synthesized)
cattctctttgtggaaagacaaaaatgctaggctaaaggcctcctcgtccacctcttccaagcctgggatcctccctgcgccatccttctccactcccggacccctgccccagtgttatg

SEQ ID NO: 731853 - DNA, 120 bp, Artificial Sequence
  ENSG00000198743_0 (sequence is synthesized)
gctttcgccgcctgggagccgtccggcgcagcagtttctaggtccccactgtccccgccgtcccgccccttcgcgtcccgggaaccggctggcttccgagccgcactcgccgatcctcca

SEQ ID NO: 731854 - DNA, 120 bp, Artificial Sequence
  ENSG00000198743_1 (sequence is synthesized)
ggcatgccccgctacgagctggctttaatcctgaaagccatgcagcggggttggtacagtaggcttcactagacttagctgcaactcagaatttctcctccagcacctgagtaaatgctg

SEQ ID NO: 731855 - DNA, 120 bp, Artificial Sequence
  ENSG00000198743_2 (sequence is synthesized)
atggtcttgtggagagtggattaagagtacgagctaagttctcaatcccaattaagaagcggaaaatttaaactgtcttcttcaaagtttatcacaaccaccaccatcaagacagcaaac

SEQ ID NO: 731856 - DNA, 120 bp, Artificial Sequence
  ENSG00000198743_3 (sequence is synthesized)
caaaggacaaagactttgaccctgctgtgttgctctgtgtagtccagttcacgtatggtttacagacttggctggggttactaaaaataaataaaaagttggacacttctgtcattggag

SEQ ID NO: 731857 - DNA, 120 bp, Artificial Sequence
  ENSG00000198743_4 (sequence is synthesized)
cgctattattcacaagttaccagaatgagagctgtactggacacagcagacattgccatagtggccctgtattttatcctggtcatgtgcattggtttttttgccatgtggaaatctaat

SEQ ID NO: 731858 - DNA, 120 bp, Artificial Sequence
  ENSG00000198743_5 (sequence is synthesized)
agaagcaccgtgagtggatacttcctggcggggcgctctatgacctgggtagcaattggtgcctctctgtttgtgagcaatattgggagtgagcacttcattgggctggcaggatctgga

SEQ ID NO: 731859 - DNA, 120 bp, Artificial Sequence
  ENSG00000198743_6 (sequence is synthesized)
gctgcaagtggatttgcagtgggcgcatgggaattcaatgccttactgcttttacaacttctgggatgggttttcatcccaatttacatccggtcaggggtatataccatgcctgaatac

SEQ ID NO: 731860 - DNA, 120 bp, Artificial Sequence
  ENSG00000198743_7 (sequence is synthesized)
ttgtccaagcgatttggtggccataggattcaggtctattttgcagccttgtctctgattctctatattttcaccaagctctcggtggatctgtattcgggtgccctttttatccaggag

SEQ ID NO: 731861 - DNA, 120 bp, Artificial Sequence
  ENSG00000198743_8 (sequence is synthesized)
tctttgggttggaatctttatgtgtctgtcatcctgctcattggcatgactgctttgctgactgtcaccggaggccttgttgcagtgatctacacagacactctgcaggctctgctcatg

SEQ ID NO: 731862 - DNA, 120 bp, Artificial Sequence
  ENSG00000198743_9 (sequence is synthesized)
atcattggggcacttacacttatgattattagcataatggagattggcgggtttgaggaagttaagagaaggtacatgttggcctcacccgatgtcacttccatcttattgacatacaac

SEQ ID NO: 731863 - DNA, 120 bp, Artificial Sequence
  ENSG00000198743_10 (sequence is synthesized)
ctttccaacacaaattcttgtaatgtctcccctaagaaagaagccctgaaaatgctgcggaatccaacagatgaagatgttccttggcctggattcattcttgggcagaccccagcttca

SEQ ID NO: 731864 - DNA, 120 bp, Artificial Sequence
  ENSG00000198743_11 (sequence is synthesized)
gtatggtactggtgtgctgaccaagtcatcgtgcagagggtccttgcagccaaaaacattgctcatgccaaaggctctactcttatggctggcttcttaaagctcctgccaatgtttatc

SEQ ID NO: 731865 - DNA, 120 bp, Artificial Sequence
  ENSG00000198743_12 (sequence is synthesized)
atagttgtcccaggaatgatttccaggatactgtttactgatgatatagcttgcatcaacccagagcactgcatgctggtgtgtggaagcagagctggttgctccaatattgcttaccca

SEQ ID NO: 731866 - DNA, 120 bp, Artificial Sequence
  ENSG00000198743_13 (sequence is synthesized)
cgcctggtgatgaagctggttcctgtgggccttcggggtttaatgatggcagtgatgattgcagctctgatgagtgacttagactctatctttaacagtgccagtaccatattcaccctc

SEQ ID NO: 731867 - DNA, 120 bp, Artificial Sequence
  ENSG00000198743_14 (sequence is synthesized)
gatgtgtacaaacttatccgcaagagcgcaagctcccgggagttaatgattgtggggaggatatttgtggcatttatggtggtgatcagcatagcatgggtgccaatcatcgtggagatg

SEQ ID NO: 731868 - DNA, 120 bp, Artificial Sequence
  ENSG00000198743_15 (sequence is synthesized)
caaggaggccagatgtacctttacattcaggaggtagcagattacctgacacccccagtggcagccttgttcctgctggcaattttctggaagcgctgcaatgaacaaggggctttctat

SEQ ID NO: 731869 - DNA, 120 bp, Artificial Sequence
  ENSG00000198743_16 (sequence is synthesized)
ggtggaatggctggctttgttcttggagcagtccgtttgatactggcctttgcctaccgtgccccagaatgtgaccaacctgataataggccgggcttcatcaaagacatccattatatg

SEQ ID NO: 731870 - DNA, 120 bp, Artificial Sequence
  ENSG00000198743_17 (sequence is synthesized)
tatgtggccacaggattgttttgggtcacgggactcattactgtaattgtgagccttctcacaccacctcccacaaaggaacagattcgaaccaccaccttttggtctaagaagaacctg

SEQ ID NO: 731871 - DNA, 120 bp, Artificial Sequence
  ENSG00000198743_18 (sequence is synthesized)
gtggtgaaggagaactgctccccaaaagaggaaccatacaaaatgcaagaaaagagcattctgagatgcagtgagaataatgagaccatcaaccacatcattcccaacgggaaatctgaa

SEQ ID NO: 731872 - DNA, 120 bp, Artificial Sequence
  ENSG00000198743_19 (sequence is synthesized)
gacagcattaagggccttcagcctgaagatgttaatctgttggtaacctgcagagaggagggcaacccagtggcatccttaggtcattcagaggcagaaacaccagttgacgcttactcc

SEQ ID NO: 731873 - DNA, 120 bp, Artificial Sequence
  ENSG00000198743_20 (sequence is synthesized)
aatgggcaagcagctctcatgggtgagaaagagagaaagaaagaaacggatgatggaggtcggtactggaagttcatagactggttttgtggctttaaaagtaagagcctcagcaagagg

SEQ ID NO: 731874 - DNA, 120 bp, Artificial Sequence
  ENSG00000198743_21 (sequence is synthesized)
agtctcagagacctgatggaagaggaggctgtttgtttacagatgctagaagagactcggcaagttaaagtaatactaaatattggactttttgctgtgtgttcacttggaattttcatg

SEQ ID NO: 731875 - DNA, 120 bp, Artificial Sequence
  ENSG00000198743_22 (sequence is synthesized)
tttgtttatttctccttatgaacttaaggatatggtgagacactaacttaagacaatactgactggtctttggggaaaaaagttatgtaactgtgcatctctcaggcattgtttacgctg

SEQ ID NO: 731876 - DNA, 120 bp, Artificial Sequence
  ENSG00000198743_23 (sequence is synthesized)
taggttttagccaaattttacttagcagaaaatcatctaattacaagactttattttcccagagatggattaaagtaaatcttcaacttaagtgaagccaaacctaacagactgaattgt

SEQ ID NO: 731877 - DNA, 120 bp, Artificial Sequence
  ENSG00000198743_24 (sequence is synthesized)
gcaaatgtggttttaaattttgcataccaaagtaagaagagaccaattattctcacagagcacttagagcagaatatatgttaagttaccatgaattaaggtatactgtctgcactgcca

SEQ ID NO: 731878 - DNA, 120 bp, Artificial Sequence
  ENSG00000198743_25 (sequence is synthesized)
agtcttggcagaccttaccctgaagtagaagatttgctcatttctaaatttttttttctgtctctgtaatccctcctaccattaagaaaaacttatttcttagacattgtacaatcagtt

SEQ ID NO: 731879 - DNA, 120 bp, Artificial Sequence
  ENSG00000198743_26 (sequence is synthesized)
atgtactgaaaatcgaatgtgcttgtgtgatacttgtttcaggacaagttcatttgccaggttcattttgttagcatgagcctacggattctgatttcccaaagaaagaatgttttcctg

SEQ ID NO: 731880 - DNA, 120 bp, Artificial Sequence
  ENSG00000198743_27 (sequence is synthesized)
taggtatttttgtaccaccagtatatggaatgttagggaaaaactttgttccagttcctttttttttttctttctactttcaagtttaagtgaaccatactgaaatgaccaacaagtctg

SEQ ID NO: 731881 - DNA, 120 bp, Artificial Sequence
  ENSG00000198743_28 (sequence is synthesized)
cctgtaaagttacatgtcatgattgtgttgttaaatgattatgggggagaaaatgaagtaaatgttgctgatgatccccatatttattgatcatattaaggttgtttatatagtttggaa

SEQ ID NO: 731882 - DNA, 120 bp, Artificial Sequence
  ENSG00000198743_29 (sequence is synthesized)
atgaccagccccctaagcagtgtttgattaacttatgctaatcagatgattactcatatattctgctaattttctagctttattcttgttatttggaaaaattattagccaaatgccttc

SEQ ID NO: 731883 - DNA, 120 bp, Artificial Sequence
  ENSG00000198743_30 (sequence is synthesized)
ctaggtggatccagttggaagatatgtccagaaacctgaagaaaaattgacgctgcctttgtgtgctggattgctctacttgattagatcatgatatatcaaggttgaatttttagaggg

SEQ ID NO: 731884 - DNA, 120 bp, Artificial Sequence
  ENSG00000198743_31 (sequence is synthesized)
aaaatttaattctgatatcttattgcatccttgataagtttttccctgattttttttttcctcaaaagactttccatctgtacacagcctctacatttttgttgtagtgacttagagcat

SEQ ID NO: 731885 - DNA, 120 bp, Artificial Sequence
  ENSG00000198743_32 (sequence is synthesized)
aaggatgtttcagtgcaaactggccgtcggtaacagaaaactcagtgcatactttgctgttgttaggttgtcaatatagtctttctgtaggatggatagcatgtttgagaggtgccaaac

SEQ ID NO: 731886 - DNA, 120 bp, Artificial Sequence
  ENSG00000198743_33 (sequence is synthesized)
aagaacttttggggttagtagtgtgtcttgtggagggtattacaggactgtgtaattataggactctaacttgacatggcttggcacccacttgcagctagtgggtacagggtacaaaag

SEQ ID NO: 731887 - DNA, 120 bp, Artificial Sequence
  ENSG00000198743_34 (sequence is synthesized)
atgttagagaaaagctctacagattacgtacttctgtgtcttcgtatgctcaacactgtcctttgtcctccatgaaagatgaaggaagcaaattatgtatgtactttctttgaccttctt

SEQ ID NO: 731888 - DNA, 120 bp, Artificial Sequence
  ENSG00000198743_35 (sequence is synthesized)
taatctctgatactttttagattgcatgattttactaggcttgtatttagggaaattactttcataaatacttttgtagattttgaatcaaaactcagtctttttaatttttttgtagtc

SEQ ID NO: 731889 - DNA, 120 bp, Artificial Sequence
  ENSG00000198743_36 (sequence is synthesized)
tataaactagtttcattatgatggacttgattagtccaaagttaattttagaaattgtcaggtagcatagtgtcttcccatgatcaggaggctttctgaaggactgagtctgtaaatgaa

SEQ ID NO: 731890 - DNA, 120 bp, Artificial Sequence
  ENSG00000198743_37 (sequence is synthesized)
aaaataatttatgtatgaatagcatgtatttctgaagagcttagagtgccttgtagaatttttttctcaattttattcttgaggtttataatttgggggccaaatagatagagctcatca

SEQ ID NO: 731891 - DNA, 120 bp, Artificial Sequence
  ENSG00000198743_38 (sequence is synthesized)
ttttcttgtttggaagttgaggctgcgacatgtccaaggttatgaagtctcttttgggaagaacagaaaccaggtctccaaatctggactcatggtttgttcagatgtgtctggacaaat

SEQ ID NO: 731892 - DNA, 120 bp, Artificial Sequence
  ENSG00000198743_39 (sequence is synthesized)
ggttgtcaatgttttgtcctgttttttcaaaggaactgttcttcctttgggacaaccttttggtgtttgggaaagtaataagatcttggatttttcaaattaacattaagttgtaagaac

SEQ ID NO: 731893 - DNA, 120 bp, Artificial Sequence
  ENSG00000198743_40 (sequence is synthesized)
taaaattttctttgaaccacattactgtgtaattcactgataattgacatattggctgggcagcctatctcttccatatccagcgtaaatgaataggaggtgtttgtgattttttttttc

SEQ ID NO: 731894 - DNA, 120 bp, Artificial Sequence
  ENSG00000198743_41 (sequence is synthesized)
tccctttatttaacattgagtcctagtagtttggagaattagggtccctctaccttctttctgctcttgtcttagtaagatacataaggtacatcatcttgtgtctgtgtgtatatagca

SEQ ID NO: 731895 - DNA, 120 bp, Artificial Sequence
  ENSG00000198743_42 (sequence is synthesized)
gtaggtcaagtttagagtactaaagtctgtaaataaggaatgactattagcatattcattagaattgtttattcttgccagtataaacatcattttatttagactaaagtccctgaagct

SEQ ID NO: 731896 - DNA, 120 bp, Artificial Sequence
  ENSG00000198743_43 (sequence is synthesized)
tgtctttcttattgcttcccagtaatagataatgtgctcgagtaagtttgtgaattgctgattgcaacttaattcagggaccagtcttcaatctatatttcattagaatgattgttcctg

SEQ ID NO: 731897 - DNA, 120 bp, Artificial Sequence
  ENSG00000198743_44 (sequence is synthesized)
gaatgatcatacatggactgtcttaagctagcaaaatgttcatactttacactgactaaatgggtcctaaatgatgacattggtctttagacattaacatgtgtatatttttatattagc

SEQ ID NO: 731898 - DNA, 120 bp, Artificial Sequence
  ENSG00000198743_45 (sequence is synthesized)
tcaagctaaggttcagaattgaagcttgatattgactagaatagctaaaagtcaaaatgaggtgaggacactggtcttggaaggtagagaaaaataaatgtcttaccaggtgttaatggt

SEQ ID NO: 731899 - DNA, 120 bp, Artificial Sequence
  ENSG00000198743_46 (sequence is synthesized)
atccccagttcttagacttttgtcttctcaggcaattttcatctcaagatctgatgagaagggcatattacattggtatgcaggatgattattgcatattttgtgggacctctaatttcc

SEQ ID NO: 731900 - DNA, 120 bp, Artificial Sequence
  ENSG00000198743_47 (sequence is synthesized)
ctggtcatctttcagaatattctgttctgccacccccagagagtaaacacttgagccgatttcttcttccccagctattctttcctgggggtaattatgctttgtctttagattagagaa

SEQ ID NO: 731901 - DNA, 120 bp, Artificial Sequence
  ENSG00000198743_48 (sequence is synthesized)
tagatctcatctcctagggcttccttttcacttggctcaaaggatccattgtattttggcacaaagagcctggccagggtcatgtagccatagctcttagggatgatacctcaagaaatt

SEQ ID NO: 731902 - DNA, 120 bp, Artificial Sequence
  ENSG00000198743_49 (sequence is synthesized)
agctgggacccatcactctgtgaaacttcacattttaagaactgagttgagggggttgttatgcacttctgtaacttgaggctaagcaaggggttaactcttgtgagagccaatagagtg

SEQ ID NO: 731903 - DNA, 120 bp, Artificial Sequence
  ENSG00000198743_50 (sequence is synthesized)
tgtctgtattcgcagtccatggctcattttctttatagtaggcatatggatcttcccctctgactttgaatatcatttggtgtggcctgtgggttattttcattctttaccaccaaataa

SEQ ID NO: 731904 - DNA, 120 bp, Artificial Sequence
  ENSG00000198743_51 (sequence is synthesized)
agcggcttattagctactcagttacttgctactcaaaggttaggtcttccctgttcctgcttggcagtgttaaagcttacagggttaacttatgatgattctcctggctcattttcatca

SEQ ID NO: 731905 - DNA, 120 bp, Artificial Sequence
  ENSG00000198743_52 (sequence is synthesized)
gaggcatgatgactggaaagggatcacatgggtcgttggtggtgacacctcactgtttcctaggtttggatagagagatgtatacaagacctttcctgttaaattacgtgactacagaga

SEQ ID NO: 731906 - DNA, 120 bp, Artificial Sequence
  ENSG00000198743_53 (sequence is synthesized)
cttgccaggacaaaattttcctaagaaatcagaaaaatgattaagtgagataagtacctgggtgacacagatattagcccgttggtaaaagacaacaaatattagcttaaaatctgcata

SEQ ID NO: 731907 - DNA, 120 bp, Artificial Sequence
  ENSG00000198743_54 (sequence is synthesized)
tgtagaatcattttcattagatttagagcttgaagcaccttggctctcagctactttaaactcctccccatataaatcagggcaccaataaataagtttcagctttttaaaccctggttt

SEQ ID NO: 731908 - DNA, 120 bp, Artificial Sequence
  ENSG00000198743_55 (sequence is synthesized)
gatgttaagcattataaagtacgaagtttgttaccacagtagagataatttagtagaaaaatgctttgaggcttcagtatttgtaagattttgcattagccagatgctaggttgttgaag

SEQ ID NO: 731909 - DNA, 120 bp, Artificial Sequence
  ENSG00000198743_56 (sequence is synthesized)
gcatttcagtgttgataatagcctgagcagacttctttacaaatgggatctgtttctatatgtgtatatgcccacttaccattcagagagactggtctttctctttgtcttccttcacat

SEQ ID NO: 731910 - DNA, 120 bp, Artificial Sequence
  ENSG00000198743_57 (sequence is synthesized)
tgctgtgtcagttctacacctagtcttttcagcacttagcaaattcaaattttgatttttttgtcagcttagttcactttaaggcatattggcatggtgtgtgaaagtgatgttttgccc

SEQ ID NO: 731911 - DNA, 120 bp, Artificial Sequence
  ENSG00000198743_58 (sequence is synthesized)
cagtattgaggacttttagatccaaataatgactcattaaatataattatgttttaagtatactgaatttctgttagcttaaaatgttaattctcaggaatgattttctcacactttgtg

SEQ ID NO: 731912 - DNA, 120 bp, Artificial Sequence
  ENSG00000198743_59 (sequence is synthesized)
ttggctaataataaaagcactgttttattctcaaaactcctttttcaaaaattagggagagagcagtagtgatcatttatgtgagcccctttgaaatgatggtgtcagagtgcagagaaa

SEQ ID NO: 731913 - DNA, 120 bp, Artificial Sequence
  ENSG00000198743_60 (sequence is synthesized)
caatggagttttgatgccaaaaaggtttttttgcagtaaaagtaaaaatttggaattagttggcatatagaggaacccttttgtactggaacgtatgaggctggattgtgaaaaggtaat

SEQ ID NO: 731914 - DNA, 120 bp, Artificial Sequence
  ENSG00000198743_61 (sequence is synthesized)
ctttcgattgctagacttggttaacttagggctgcaaatctttttcttctgtcaaggtcacttaatatggaatgtttttgtcagactgtcctttgttggaatactttagctgttcagcta

SEQ ID NO: 731915 - DNA, 120 bp, Artificial Sequence
  ENSG00000198743_62 (sequence is synthesized)
ctttgactcctaggagagaatttagttaaggttcaaagtaattaactggctttgccagtggtgagtcccacaccattattcacttagtagtcatataaatgtttttatttaaacttctct

SEQ ID NO: 731916 - DNA, 120 bp, Artificial Sequence
  ENSG00000198743_63 (sequence is synthesized)
ctcttcaatgctgagaataaggctttaaattactgattcacctttaaaggaatgttgtgagaattgatgtaatttctgtttctgtttccatctaaacttctttataaaaagagggattag

SEQ ID NO: 731917 - DNA, 120 bp, Artificial Sequence
  ENSG00000198743_64 (sequence is synthesized)
tttttttgttttggggtaagcacctaatttatccagtaaccaacaaccctaaccattggcatatatagtctttcactcagaaataaacaaaaactgtttggtatatctgtatcattgcta

SEQ ID NO: 731918 - DNA, 120 bp, Artificial Sequence
  ENSG00000198743_65 (sequence is synthesized)
atcttgtgcactttactttttgggcagtaccatacatagtctgaggctattgacttaaaccaataactgtactttatgtaatgactcttaaatttggttacctgggttcacagcttgctt

SEQ ID NO: 731919 - DNA, 120 bp, Artificial Sequence
  ENSG00000198743_66 (sequence is synthesized)
gaagagaaaggatgctagaataaagtaagcagctgaagagcgagcaaatcaagacaaaacacagtggtctcagatttttcgtagtgtgggaacagtggttttgctctataccactgaaaa

SEQ ID NO: 731920 - DNA, 120 bp, Artificial Sequence
  ENSG00000198743_67 (sequence is synthesized)
gcactataacataattgttgtccatgatactgaagcttttcccctcacttctaggttgtttacattcagagctctatcaataagaggaatacatattacagtgaattcgacaaccgcaca

SEQ ID NO: 731921 - DNA, 120 bp, Artificial Sequence
  ENSG00000198743_68 (sequence is synthesized)
agttggcagtaggtatccccaacctaatttatcttggtaaattcaccctgtttcctagtgctgctggataaaagagtgtttactttttattgctcttagacagagtagtctagataagtt

SEQ ID NO: 731922 - DNA, 120 bp, Artificial Sequence
  ENSG00000198743_69 (sequence is synthesized)
ttcaatttatcaacatagcctagacttctgtaagtggaatgttcattagtaactcatctttttgttgttataattggaaacagaaacgaggcttattgctattgcagaaatcccaaactg

SEQ ID NO: 731923 - DNA, 120 bp, Artificial Sequence
  ENSG00000198743_70 (sequence is synthesized)
gcaaaggccagtatatatggtattccataatataaccagcttttgaaatttatgtgtttggattagtgccttctggttaccagtattgactctgctagtttgcacctttccgttcttaac

SEQ ID NO: 731924 - DNA, 120 bp, Artificial Sequence
  ENSG00000198743_71 (sequence is synthesized)
agaaaatttgtatttgttattcctcttaaattttgtcgtaactagtgaaggaagtaaaaaaaaaaaaaaaacatgcattacattgacatactttatgtgcagcctttatttaggttcagt

SEQ ID NO: 731925 - DNA, 120 bp, Artificial Sequence
  ENSG00000198743_72 (sequence is synthesized)
gaaaccaggtagttctgtatttgtgttgtagcctaaatgttgtttcttttatatccattaaaaacttaaagttacttatgttctgtgatcttaattttgttgtgtttccattgtaggttg

SEQ ID NO: 731926 - DNA, 120 bp, Artificial Sequence
  ENSG00000198743_73 (sequence is synthesized)
ataggtatatcgagaacaggtacgtgacaacagtttatattccatgatagaaagctaaagtccatagaaagcacaaaatcgtgttcacacattagtgtacccacacatagaaagcacaag

SEQ ID NO: 731927 - DNA, 120 bp, Artificial Sequence
  ENSG00000198743_74 (sequence is synthesized)
actaatagtattctctgtatcccacaagtgccagtcataaaggccaccaggtatttgtctcagagttgctatgagcactacagtattgataagcccaagacaatgcggtatctaaactgg

SEQ ID NO: 731928 - DNA, 120 bp, Artificial Sequence
  ENSG00000198743_75 (sequence is synthesized)
tcctaatggtaagggacccaaaggaataatctcaataagtttgtaccacattgatggagggagagaatataaatgtcaagaatgccaaaattatatttgggggttactagctaaaatggg

SEQ ID NO: 731929 - DNA, 120 bp, Artificial Sequence
  ENSG00000198743_76 (sequence is synthesized)
gtttgagggctttttactgcaacttgaaactggagaaatagggacagatgtctaggtttttggtgggtggaacaggtgacatatttctgttttaagctgtagtgtgattggggttttttg

SEQ ID NO: 731930 - DNA, 120 bp, Artificial Sequence
  ENSG00000198743_77 (sequence is synthesized)
taaaaaatcttaaatcttttaggaaatattacctcttaacagtgcccccccaaacatgcagaaagtcatactttaacagggcaaatactacttgtctttgattttttttgtgtacgtttg

SEQ ID NO: 731931 - DNA, 120 bp, Artificial Sequence
  ENSG00000198743_78 (sequence is synthesized)
tatgtgagagatgaagttacctttatttttttcctatacttgactgtgcttcattttaataaaggataatttgatctgagtgttctgagcatcagactaattctgaagcatatttgctag

SEQ ID NO: 731932 - DNA, 120 bp, Artificial Sequence
  ENSG00000198743_79 (sequence is synthesized)
aggagctactttgcttttcacaatggggtggagaggattctttcacttgtcccattaaccctcttctagtctagatgagatgaaatctgttaatgtgtgtgtagaagaaaacgtatgttc

SEQ ID NO: 731933 - DNA, 120 bp, Artificial Sequence
  ENSG00000198743_80 (sequence is synthesized)
ttctactcagcattgcccttttccacctcctcacttcacctccgagtagcttgtttatcaagaatgaatgaatgtctttgtcttaaattttgcccatgtgttaaaagatgtaattctcag

SEQ ID NO: 731934 - DNA, 120 bp, Artificial Sequence
  ENSG00000198743_81 (sequence is synthesized)
aatgggagagaaatgactacctttgttcctactcttttatataattatccttttagggaaagacttggtcaactctaatatatctagaaggaagactatatctggtgtagactaatatga

SEQ ID NO: 731935 - DNA, 120 bp, Artificial Sequence
  ENSG00000198743_82 (sequence is synthesized)
gatgttttagaagagttaacctgaacactttgagggagagattattcttgccagcaaaaagctagccaggaatgagcctaccacattatttgagaatatcaaacctcaggcctgggggga

SEQ ID NO: 731936 - DNA, 120 bp, Artificial Sequence
  ENSG00000198743_83 (sequence is synthesized)
tgaggggaagaagattaccagaagtgcaggaaagagaagtttgaggaacacccttggcttagcaacatgtgataatgcaaagctgttataacctgttaatcctacgtactatgtgttctg

SEQ ID NO: 731937 - DNA, 120 bp, Artificial Sequence
  ENSG00000198743_84 (sequence is synthesized)
tacctttacatgtttttaaatttaagatagtttgtaagaactgtacaaaaaaatgcttctggagatttctttggcagaaatgcctttcatctataatttcatggagaactgctttaatta

SEQ ID NO: 731938 - DNA, 120 bp, Artificial Sequence
  ENSG00000198743_85 (sequence is synthesized)
gcctaggtgaaaagtagtcctagcagtgtaaatatgtataattagagttttctaatttcactgtgagatctctaacttttgagtggcaaacagatcaagtcttttgctcatagacttttc

SEQ ID NO: 731939 - DNA, 120 bp, Artificial Sequence
  ENSG00000198743_86 (sequence is synthesized)
tgtggggttattaaaatgcaaaagctttattttttttaataatgccatactccattagtgtcagatgatggtatggaatttgttcccttgctttcccccactgttactgcttcagtttat

SEQ ID NO: 731940 - DNA, 120 bp, Artificial Sequence
  ENSG00000198743_87 (sequence is synthesized)
agattgccagcagagttcagaaatagagcagggatttacccgttctttgcttggacatcccattttcttttgtccagacccatgttggcaatcatgtatgaactgtgttatacttctcag

SEQ ID NO: 731941 - DNA, 120 bp, Artificial Sequence
  ENSG00000198743_88 (sequence is synthesized)
tgctttcttttttctttttgataagatggatatcaaaaatagttgctgtgcaaaagttagtagtcttcttcaagaagaaaaccaattctttttctaataatatcctgtgaaattgcttca

SEQ ID NO: 731942 - DNA, 120 bp, Artificial Sequence
  ENSG00000198743_89 (sequence is synthesized)
ttcattcatttatttttaagccaaatgtcagcagagtgctgctgcttttatctagtaattttgatatgtaagtattaatgcatttttaaaagatgtctacattgaaacatgttcttccca

SEQ ID NO: 731943 - DNA, 120 bp, Artificial Sequence
  ENSG00000198743_90 (sequence is synthesized)
gtgtcctgcttatgatgctttgttcagattttttgtaagagaccagttagtacactgggggtgtatattgtgtacatgtgtcattttagttaggcattgtaggccaaatgtgattataaa

SEQ ID NO: 731944 - DNA, 120 bp, Artificial Sequence
  ENSG00000198743_91 (sequence is synthesized)
tgaagttgatgaacattaattttgttattagtgagttttttgaattgtaaatggatttccagtttaccttctgttgtctacagcttttttaattttaaggtttgactaattgtatccatc

SEQ ID NO: 731945 - DNA, 120 bp, Artificial Sequence
  ENSG00000198743_92 (sequence is synthesized)
tcattgtacagtgttttagttgcaagcagaaagtagaatttggtataaagcaggttatttctatattgaaaggagtacagttgaaattgtagatttaagattgttaaaatcatgacaatt

SEQ ID NO: 731946 - DNA, 120 bp, Artificial Sequence
  ENSG00000198743_93 (sequence is synthesized)
ctaacttgtctattctaacctattgtgtacaatctgattttttaaaattgtaaacatgtatgatcttggtttcatgtgtttttgaaagtgttattgtttaaaaaatgaaaaaagcatatc

SEQ ID NO: 731947 - DNA, 120 bp, Artificial Sequence
  ENSG00000198743_94 (sequence is synthesized)
tgctaaagagctgtcagttttcattactgactctgtaaaatacactgttctttgtgtactgtgtgttattttgccagctgctgcattagccttcaaaagtatttggaaacttaagatgaa

SEQ ID NO: 731948 - DNA, 120 bp, Artificial Sequence
  ENSG00000198743_95 (sequence is synthesized)
ctacatttcttgcaaagtacattcctttctgtggtattttgtcctgtaactgaagtatagtaattattttatggaaatgttagcaattctgtaccaactttgaataaaatgaaaaattta

SEQ ID NO: 731949 - DNA, 120 bp, Artificial Sequence
  ENSG00000198746_0 (sequence is synthesized)
ctagctgatcatgtgacaatccaagatggcggtgcccggcgaggcggaggaggaggcgacagtttacctggtagtgagcggtatcccctccgtgttgcgctcggcccatttacggagcta

SEQ ID NO: 731950 - DNA, 120 bp, Artificial Sequence
  ENSG00000198746_1 (sequence is synthesized)
ttttagccagttccgagaagagcgcggcggtggcttcctctgtttccactaccggcatcggcctgagcgggcccctccgcaggccgctcctaactctgccctaattcctaccgacccagc

SEQ ID NO: 731951 - DNA, 120 bp, Artificial Sequence
  ENSG00000198746_2 (sequence is synthesized)
cgctgagggccagcttctctctcagacttcggccaccgatgtccggcctctctccactcgagactctactccaatccagacccgcacctgctgctgcgtcatctcggtaagggggttggc

SEQ ID NO: 731952 - DNA, 120 bp, Artificial Sequence
  ENSG00000198746_3 (sequence is synthesized)
tcaagctcagaggcttattcgcatgtactcgggccgccggtggctggattctcacgggacttggctaccgggtcgctgtctcatccgcagacttcggctacctacggaggcatcaggtct

SEQ ID NO: 731953 - DNA, 120 bp, Artificial Sequence
  ENSG00000198746_4 (sequence is synthesized)
gggctcctttcccttcaagacccggaaggaactgcagagttggaaggcagagaatgaagccttcaccctggctgacctgaagcaactgccggagctgaacccaccagtgctgatgcccag

SEQ ID NO: 731954 - DNA, 120 bp, Artificial Sequence
  ENSG00000198746_5 (sequence is synthesized)
agggaatgtggggactcccctgcgggtctttttggagttgatccgggcctgccgcctaccccctcggatcatcacccagctgcagctccagttccccaagacaggttcctcccggcgcta

SEQ ID NO: 731955 - DNA, 120 bp, Artificial Sequence
  ENSG00000198746_6 (sequence is synthesized)
cggcaatgtgccttttgagtatgaggactcagagactgtggagcaggaagagcttgtgtatacagcagagggtgaagaaataccccaaggaacctacctggcagatataccagccagccc

SEQ ID NO: 731956 - DNA, 120 bp, Artificial Sequence
  ENSG00000198746_7 (sequence is synthesized)
ctgtggagagcctgaggaagaagtggggaaggaagaggaagaagagtctcactcagatgaggacgatgaccggggtgaggaatgggaacggcatgaagcgctgcatgaggacgtgaccgg

SEQ ID NO: 731957 - DNA, 120 bp, Artificial Sequence
  ENSG00000198746_8 (sequence is synthesized)
gatgcccagttctggcaggaggaagaaggagattttgatgaacagacagccgatgactgggatgtggacatgagtgtgtactatgacagagatggtggagacaaggatgcccgagactct

SEQ ID NO: 731958 - DNA, 120 bp, Artificial Sequence
  ENSG00000198746_9 (sequence is synthesized)
gtccaaatgcgtctggaacagagactccgagatggacaggaagatggctctgtgatcgaacgccaggtgggcacctttgagcgccacaccaagggcattgggcggaaggtgatggagcgg

SEQ ID NO: 731959 - DNA, 120 bp, Artificial Sequence
  ENSG00000198746_10 (sequence is synthesized)
cagggctgggctgagggccagggcctgggctgcaggtgctcaggggtgcctgaggccctggatagtgatggccaacaccccagatgcaagcgtggattggggtaccatggagagaagcta

SEQ ID NO: 731960 - DNA, 120 bp, Artificial Sequence
  ENSG00000198746_11 (sequence is synthesized)
cagccatttgggcaactgaagaggccccgtagaaatggcttggggctcatctccaccatctatgatgagcctctaccccaagaccagacggagtcactgctccgccgccagccacccacc

SEQ ID NO: 731961 - DNA, 120 bp, Artificial Sequence
  ENSG00000198746_12 (sequence is synthesized)
agcatgaagtttcggacagacatggcctttgtgaggggttccagttgtgcttcagacagcccctcattgcctgactgaccgggttgggggcttcctttcatagctacatgatgaaaaccc

SEQ ID NO: 731962 - DNA, 120 bp, Artificial Sequence
  ENSG00000198746_13 (sequence is synthesized)
tctgccctggcctcatctaccactgaagcagaaaggagtctgggagcagcagtcttcgtggctggttcagggtgttttgttccgagcctgcctgcctgccggttctatacctcaggggca

SEQ ID NO: 731963 - DNA, 120 bp, Artificial Sequence
  ENSG00000198746_14 (sequence is synthesized)
tttttacaaaaagccccctcccgtcccctccccttggatattaggggtaacgaccgcttgtctttggtctctaaccctaatctctgggcttgccctttgcctcctgcagaactttgaaaa

SEQ ID NO: 731964 - DNA, 120 bp, Artificial Sequence
  ENSG00000198746_15 (sequence is synthesized)
gctgggttgagtgaggctatcagcacagccttccttggggactctgaaggtgtccccacgaaggccagaaagggggaaagggacctgggcgaggagaggatttgtggtgcttggaagagc

SEQ ID NO: 731965 - DNA, 120 bp, Artificial Sequence
  ENSG00000198746_16 (sequence is synthesized)
cggccttgggtgggccctccaccgcctctaccctcactgggtgggactgccagcggagagtccgcgggaggtggcttgggtgtgcgacgtcacggaagaataaagacgtttactactgga

SEQ ID NO: 731966 - DNA, 120 bp, Artificial Sequence
  ENSG00000198746_17 (sequence is synthesized)
attaaaatgaataagtcaatcttacgagggggtcctagaaacctgattcttcccccttctttgagagggacgcttccataaactgagctctgtttcctcagatggtggagacaaggatgc

SEQ ID NO: 731967 - DNA, 80 bp, Artificial Sequence
  ENSG00000198752_0 (sequence is synthesized)
gggctcgggcgccggccgggcttgcgcagcgctaggctcctcgccgctcctagtctgcggcggcggcggcggggagggcg

SEQ ID NO: 731968 - DNA, 120 bp, Artificial Sequence
  ENSG00000198752_1 (sequence is synthesized)
gaggagagcggcccatggacccgcggggcccggcgccccagactctgcgccgtcgggacggagcccaagatgtcggcctaggccggggcgcgacgacgcggacggggcggcgaggaggcg

SEQ ID NO: 731969 - DNA, 80 bp, Artificial Sequence
  ENSG00000198752_2 (sequence is synthesized)
gggctcgcagccgccgagcccccgagggcgcgccctgacggactggccgagccggcggtgagaggccggcgcgtcgggag

SEQ ID NO: 731970 - DNA, 120 bp, Artificial Sequence
  ENSG00000198752_3 (sequence is synthesized)
cgggccgcgcggcaccatgtcggccaaggtgcggctcaagaagctggagcagctgctcctggacgggccctggcgcaacgagagcgccctgagcgtggaaacgctgctcgacgtgctcgt

SEQ ID NO: 731971 - DNA, 120 bp, Artificial Sequence
  ENSG00000198752_4 (sequence is synthesized)
ctgcctgtacaccgagtgcagccactcggccctgcgccgcgacaagtacgtggccgagttcctcgagtgggctaaaccatttacacagctggtgaaagaaatgcagcttcatcgagaaga

SEQ ID NO: 731972 - DNA, 120 bp, Artificial Sequence
  ENSG00000198752_5 (sequence is synthesized)
ctttgaaataattaaagtaattggaagaggtgcttttggtgaggttgctgttgtcaaaatgaagaatactgaacgaatttatgcaatgaaaatcctcaacaagtgggagatgctgaaaag

SEQ ID NO: 731973 - DNA, 120 bp, Artificial Sequence
  ENSG00000198752_6 (sequence is synthesized)
agcagagaccgcgtgcttccgagaggagcgcgatgtgctggtgaacggcgactgccagtggatcaccgcgctgcactacgcctttcaggacgagaaccacctgtacttagtcatggatta

SEQ ID NO: 731974 - DNA, 120 bp, Artificial Sequence
  ENSG00000198752_7 (sequence is synthesized)
ctatgtgggtggtgatttactgaccctgctcagcaaatttgaagacaagcttccggaagatatggcgaggttctacattggtgaaatggtgctggccattgactccatccatcagcttca

SEQ ID NO: 731975 - DNA, 120 bp, Artificial Sequence
  ENSG00000198752_8 (sequence is synthesized)
ttacgtgcacagagacattaaacctgacaatgtccttttggacgtgaatggtcatatccgcctggctgactttggatcatgtttgaagatgaatgatgatggcactgtgcagtcctccgt

SEQ ID NO: 731976 - DNA, 120 bp, Artificial Sequence
  ENSG00000198752_9 (sequence is synthesized)
ggccgtgggcacacctgactacatctcgccggagatcctgcaggcgatggaggacggcatgggcaaatacgggcctgagtgtgactggtggtctctgggtgtctgcatgtatgagatgct

SEQ ID NO: 731977 - DNA, 120 bp, Artificial Sequence
  ENSG00000198752_10 (sequence is synthesized)
ctatggagaaacgccgttttatgcggagtcactcgtggagacctatgggaagatcatgaaccatgaagagcgattccagttcccatcccatgtcacggatgtatctgaagaagcgaagga

SEQ ID NO: 731978 - DNA, 120 bp, Artificial Sequence
  ENSG00000198752_11 (sequence is synthesized)
cctcatccagagactgatctgcagtagagaacgccggctggggcagaatggaatagaggatttcaaaaagcatgcgttttttgaaggtctaaattgggaaaatatacgaaacctagaagc

SEQ ID NO: 731979 - DNA, 120 bp, Artificial Sequence
  ENSG00000198752_12 (sequence is synthesized)
accttatattcctgatgtgagcagtccctctgacacatccaacttcgacgtggatgacgacgtgctgagaaacacggaaatattacctcctggttctcacacaggcttttctggattaca

SEQ ID NO: 731980 - DNA, 120 bp, Artificial Sequence
  ENSG00000198752_13 (sequence is synthesized)
tttgccattcattggttttacattcacaacggaaagctgtttttctgatcgaggctctctgaagagcataatgcagtccaacacattaaccaaagatgaggatgtgcagcgggacctgga

SEQ ID NO: 731981 - DNA, 120 bp, Artificial Sequence
  ENSG00000198752_14 (sequence is synthesized)
gcacagcctgcagatggaagcttacgagaggaggattcggaggctggaacaggagaagctggagctgagcaggaagctgcaagagtccacccagaccgtgcagtccctccacggctcatc

SEQ ID NO: 731982 - DNA, 120 bp, Artificial Sequence
  ENSG00000198752_15 (sequence is synthesized)
tcgggccctcagcaattcaaaccgagataaagaaatcaaaaagctaaatgaagaaatcgaacgcttgaagaataaaatagcagattcaaacaggctcgagcgacagcttgaggacacagt

SEQ ID NO: 731983 - DNA, 120 bp, Artificial Sequence
  ENSG00000198752_16 (sequence is synthesized)
ggcgcttcgccaagagcgtgaggactccacgcagcggctgcgggggctggagaagcagcaccgcgtggtccggcaggagaaggaggagctgcacaagcaactggttgaagcctcagagcg

SEQ ID NO: 731984 - DNA, 120 bp, Artificial Sequence
  ENSG00000198752_17 (sequence is synthesized)
gttgaaatcccaggccaaggaactcaaagatgcccatcagcagcgaaagctggccctgcaggagttctcggagctgaacgagcgcatggcagagctccgtgcccagaagcagaaggtgtc

SEQ ID NO: 731985 - DNA, 120 bp, Artificial Sequence
  ENSG00000198752_18 (sequence is synthesized)
ccggcagctgcgagacaaggaggaggagatggaggtggccacgcagaaggtggacgccatgcggcaggaaatgcggagagctgagaagctcaggaaagagctggaagctcagcttgatga

SEQ ID NO: 731986 - DNA, 120 bp, Artificial Sequence
  ENSG00000198752_19 (sequence is synthesized)
tgctgttgctgaggcctccaaggagcgcaagcttcgtgagcacagcgagaacttctgcaagcaaatggaaagcgagctggaggccctcaaggtgaagcaaggaggccggggagcgggtgc

SEQ ID NO: 731987 - DNA, 120 bp, Artificial Sequence
  ENSG00000198752_20 (sequence is synthesized)
caccttagagcaccagcaagagatttccaaaatcaaatccgagctggagaagaaagtcttattttatgaagaggaattggtcagacgtgaggcctcccatgtgctagaagtgaaaaatgt

SEQ ID NO: 731988 - DNA, 120 bp, Artificial Sequence
  ENSG00000198752_21 (sequence is synthesized)
gaagaaggaggtgcatgattcagaaagccaccagctggccctgcagaaagaaatcttgatgttaaaagataagttagaaaagtcaaagcgagaacggcataacgagatggaggaggcagt

SEQ ID NO: 731989 - DNA, 120 bp, Artificial Sequence
  ENSG00000198752_22 (sequence is synthesized)
aggtacaataaaagataaatacgaacgagaaagagcgatgctgtttgatgaaaacaagaagctaactgctgaaaatgaaaagctctgttcctttgtggataaactcacagctcaaaatag

SEQ ID NO: 731990 - DNA, 120 bp, Artificial Sequence
  ENSG00000198752_23 (sequence is synthesized)
acagctggaggatgagctgcaggatctggcagccaagaaggagtcagtggcccactgggaagctcagattgcggaaatcattcagtgggtcagtgacgagaaagatgcccggggttacct

SEQ ID NO: 731991 - DNA, 120 bp, Artificial Sequence
  ENSG00000198752_24 (sequence is synthesized)
tcaagctcttgcttccaagatgaccgaagagctcgaggctttgaggagttctagtctggggtcaagaacactggacccgctgtggaaggtgcgccgcagccagaagctggacatgtccgc

SEQ ID NO: 731992 - DNA, 120 bp, Artificial Sequence
  ENSG00000198752_25 (sequence is synthesized)
gcggctggagctgcagtcggccctggaggcggagatccgggccaagcagcttgtccaggaggagctcaggaaggtcaaggacgccaacctcaccttggaaagcaaactaaaggattccga

SEQ ID NO: 731993 - DNA, 120 bp, Artificial Sequence
  ENSG00000198752_26 (sequence is synthesized)
agccaaaaacagagaattattagaagaaatggaaattttgaagaaaaagatggaagaaaaattcagagcagatactgggctcaaacttccagattttcaggattccatttttgagtattt

SEQ ID NO: 731994 - DNA, 120 bp, Artificial Sequence
  ENSG00000198752_27 (sequence is synthesized)
caacactgctcctcttgcacatgacctgacatttagaaccagctcagctagtgagcaagaaacacaagctccgaagccagaagcgtccccgtcgatgtctgtggctgcatcagagcagca

SEQ ID NO: 731995 - DNA, 120 bp, Artificial Sequence
  ENSG00000198752_28 (sequence is synthesized)
gacatggctcggcccccgcagaggccatccgctgtgccgttgcccaccacgcaggccctggctctggctggaccgaagccaaaagctcaccagttcagcatcaagtccttctccagccct

SEQ ID NO: 731996 - DNA, 120 bp, Artificial Sequence
  ENSG00000198752_29 (sequence is synthesized)
actcagtgcagccactgcacctccctgatggttgggctgatccggcagggctacgcctgcgaggtgtgttcctttgcttgccacgtgtcctgcaaagacggtgccccccaggtgtgccca

SEQ ID NO: 731997 - DNA, 120 bp, Artificial Sequence
  ENSG00000198752_30 (sequence is synthesized)
atacctcccgagcagtccaagaggcctctgggcgtggacgtgcagcgaggcatcggaacagcctacaaaggccatgtcaaggtcccaaagcccacgggggtgaagaagggatggcagcgc

SEQ ID NO: 731998 - DNA, 120 bp, Artificial Sequence
  ENSG00000198752_31 (sequence is synthesized)
gcatatgcagtcgtctgtgactgcaagctcttcctgtatgatctgcctgaaggaaaatccacccagcctggtgtcattgcgagccaagtcttggatctcagagatgacgagttttccgtg

SEQ ID NO: 731999 - DNA, 120 bp, Artificial Sequence
  ENSG00000198752_32 (sequence is synthesized)
agctcagtcctggcctcagatgtcattcatgctacacgccgagatattccatgtatattcagggtgacggcctctctcttaggtgcaccttctaagaccagctcgctgctcattctgaca

SEQ ID NO: 732000 - DNA, 120 bp, Artificial Sequence
  ENSG00000198752_33 (sequence is synthesized)
gaaaatgagaatgaaaagaggaagtgggttgggattctagaaggactccagtccatccttcataaaaaccggctgaggaatcaggtcgtgcatgttcccttggaagcctacgacagctcg

SEQ ID NO: 732001 - DNA, 120 bp, Artificial Sequence
  ENSG00000198752_34 (sequence is synthesized)
ctgcctctcatcaaggccatcctgacagctgccatcgtggatgcagacaggattgcagtcggcctagaagaagggctctatgtcatagaggtcacccgagatgtgatcgtccgtgccgct

SEQ ID NO: 732002 - DNA, 120 bp, Artificial Sequence
  ENSG00000198752_35 (sequence is synthesized)
gactgtaagaaggtacaccagatcgagcttgctcccagggagaagatcgtaatcctcctctgtggccggaaccaccatgtgcacctctatccgtggtcgtcccttgatggagcggaaggc

SEQ ID NO: 732003 - DNA, 120 bp, Artificial Sequence
  ENSG00000198752_36 (sequence is synthesized)
agctttgacatcaagcttccggaaaccaaaggctgccagctcatggccacggccacactcaagaggaactctggcacctgcctgtttgtggccgtgaaacggctgatcctttgctatgag

SEQ ID NO: 732004 - DNA, 120 bp, Artificial Sequence
  ENSG00000198752_37 (sequence is synthesized)
atccagagaacgaagccattccacagaaagttcaatgagattgtggctcccggcagcgtgcagtgcctggcggtgctcagggacaggctctgtgtgggctacccttctgggttctgcctg

SEQ ID NO: 732005 - DNA, 120 bp, Artificial Sequence
  ENSG00000198752_38 (sequence is synthesized)
ctgagcatccagggggacgggcagcctctaaacctggtaaatcccaatgacccctcgcttgcgttcctctcacaacagtcttttgatgccctttgtgctgtggagctcgaaagcgaggag

SEQ ID NO: 732006 - DNA, 120 bp, Artificial Sequence
  ENSG00000198752_39 (sequence is synthesized)
tacctgctttgcttcagccacatgggactgtacgtggacccgcaaggccggagggcacgcgcgcaggagctcatgtggcctgcggctcctgtcgcctgtagttgcagccccacccacgtc

SEQ ID NO: 732007 - DNA, 120 bp, Artificial Sequence
  ENSG00000198752_40 (sequence is synthesized)
acggtgtacagcgagtatggcgtggacgtctttgatgtgcgcaccatggagtgggtgcagaccatcggcctgcggaggataaggcccctgaactctgaaggcaccctcaacctcctcaac

SEQ ID NO: 732008 - DNA, 120 bp, Artificial Sequence
  ENSG00000198752_41 (sequence is synthesized)
tgcgagcctccacgcttgatctacttcaagagcaagttctcgggagcggttctcaacgtgccggacacctccgacaacagcaagaagcagatgctgcgcaccaggagcaaaaggcggttc

SEQ ID NO: 732009 - DNA, 120 bp, Artificial Sequence
  ENSG00000198752_42 (sequence is synthesized)
gtcttcaaggtcccagaggaagagagactgcagcagaggcgagagatgcttagagacccagaattgagatccaaaatgatatccaacccaaccaacttcaaccacgtggcccacatgggc

SEQ ID NO: 732010 - DNA, 120 bp, Artificial Sequence
  ENSG00000198752_43 (sequence is synthesized)
ccaggcgacggcatgcaggtgctcatggacctgcctctgagtgctgtgcccccctcccaggaggaaaggccgggccccgctcccaccaacctggctcgccagcctccatccaggaacaag

SEQ ID NO: 732011 - DNA, 120 bp, Artificial Sequence
  ENSG00000198752_44 (sequence is synthesized)
ccctacatctcgtggccctcatcaggtggatcggagcctagcgtgactgtgcctctgagaagtatgtctgatccagaccaggactttgacaaagagcctgattcggactccaccaaacac

SEQ ID NO: 732012 - DNA, 120 bp, Artificial Sequence
  ENSG00000198752_45 (sequence is synthesized)
tcaactccatcgaatagctccaaccccagcggcccaccgagccccaactccccccacaggagccagctccccctcgaaggcctggagcagccggcctgtgacacctgaagccgccagctc

SEQ ID NO: 732013 - DNA, 120 bp, Artificial Sequence
  ENSG00000198752_46 (sequence is synthesized)
gccacaggggccagggagctggagatggcctccagcgtcagtgccaagactgagcgggccctccagtgttgtccaaggaaatgtagaatcactttgtagatatggagatgaagaagacaa

SEQ ID NO: 732014 - DNA, 120 bp, Artificial Sequence
  ENSG00000198752_47 (sequence is synthesized)
atctttattataatattgatcagttttatgccgcattgttcgtggcagtagaccacatctgttcgtctgcacagctgtgaggcgatgctgttccatctgcacatgaaggacccccataca

SEQ ID NO: 732015 - DNA, 120 bp, Artificial Sequence
  ENSG00000198752_48 (sequence is synthesized)
gcctgtctcccacccctgacaacccgagagggcatatggggccctgccaacaccacttcctcagcagaaacccgtcatgacgcggctgcttcggaagcagacatctggggacacagcctc

SEQ ID NO: 732016 - DNA, 120 bp, Artificial Sequence
  ENSG00000198752_49 (sequence is synthesized)
agtacccagtcttttccctagttcctgaaactttcctaggaccttaagagaatagtaggaggtcctatagcattcccagtgtcactagaattttgaagacaggaaagtggaggttagtct

SEQ ID NO: 732017 - DNA, 120 bp, Artificial Sequence
  ENSG00000198752_50 (sequence is synthesized)
gtggcctttttttcatttagccattgcacagtcagctgcagaagtcctgctgaccacctagtcatggacaaaggcccaggaccagtgacaccctgcgtccctgtgtgcattaagttcatt

SEQ ID NO: 732018 - DNA, 120 bp, Artificial Sequence
  ENSG00000198752_51 (sequence is synthesized)
ctgggtcgcagccatgaagtgtcaccagtatctactactgtgaagtcagctgtgctgttttccattcgcttccacggcttctgcctcctgccataaaaccagcgagtgtcgtggtgcagg

SEQ ID NO: 732019 - DNA, 120 bp, Artificial Sequence
  ENSG00000198752_52 (sequence is synthesized)
agcgagtgtcgtggtgcaggcaggccctgtggcctgctgggctgagggaagtcagagccccagggcgccacgaagcagccactgggataccccaccccgccccgccctgcccgccccccc

SEQ ID NO: 732020 - DNA, 120 bp, Artificial Sequence
  ENSG00000198752_53 (sequence is synthesized)
catggagcccccgtgattagtagcccgtatgatcacgtagacccacccaacacactcctgcacactggccccggcccacggcacagcaatcccctgcgcgtggatttcacctcacccttt

SEQ ID NO: 732021 - DNA, 120 bp, Artificial Sequence
  ENSG00000198752_54 (sequence is synthesized)
gtaccagatgttgagtgaccagctctgtggccctgtgtcgtcagaggcttgtgattaactgtggcggcagacacagcttgtccacagcttgggccaggcttcccctgtcctcccaccggt

SEQ ID NO: 732022 - DNA, 120 bp, Artificial Sequence
  ENSG00000198752_55 (sequence is synthesized)
cggctgcttggcaaggctgttcaggacgtgcacttccccaagtcggcactgagtggcccagcaccgcctagccctgccaccccactgccctcctgggccttctgctggatgggcacctgg

SEQ ID NO: 732023 - DNA, 120 bp, Artificial Sequence
  ENSG00000198752_56 (sequence is synthesized)
ggggttctggtttttacttttttaatgtaagtctcagtctttgtaattaattattgaattgtgagaacatttttgaacaatttacctgtcaataaagcagaagacggcagttttaaagtt

SEQ ID NO: 732024 - DNA, 120 bp, Artificial Sequence
  ENSG00000198752_57 (sequence is synthesized)
cacagaaatggtgcccgtgggacagcagggtgcaagtgcctcctcagcagcccttggcacttgcacggggcttgggagaggaagggatgagggatggctcagcctcagcagcctcggggt

SEQ ID NO: 732025 - DNA, 120 bp, Artificial Sequence
  ENSG00000198752_58 (sequence is synthesized)
ggtgcacgaggaggagcccggaaggcagggacaccgtggctggagccactgtcccaggagggaccccgagaccggcagtacgctctctggcctgcttcccagtgaacacagactgacacc

SEQ ID NO: 732026 - DNA, 120 bp, Artificial Sequence
  ENSG00000198752_59 (sequence is synthesized)
cttcagtcttcccagcgaggaagggcaaaggtatcctggcatgcacccgctccacagccctgggtctaggagcagaaacgtcaggagactggaactggccatgggcagggggcaggggcc

SEQ ID NO: 732027 - DNA, 120 bp, Artificial Sequence
  ENSG00000198752_60 (sequence is synthesized)
ctggaaaccggacttgccatctcctacggaagaattagcctcaccatactgaacagtcggcccctacctgaatttccaaagtgttgagcctgaattagtagctttcaggataatcacatc

SEQ ID NO: 732028 - DNA, 120 bp, Artificial Sequence
  ENSG00000198752_61 (sequence is synthesized)
tcatgagagctaaatgaaaaaccagactttttaaaagtcaccttcaacatctgtactgtagtattcaaaatattagttacggaagtgattgtggagcatttaaacattggattgtgtttg

SEQ ID NO: 732029 - DNA, 120 bp, Artificial Sequence
  ENSG00000198752_62 (sequence is synthesized)
ctttggtgacgtgaaccagctgagggcagtgctgccgcctctgcacttgttcaagtgccaaggcttggcctccggcccgagggcaggtgagttcctgagccactgtggctcaccccgccc

SEQ ID NO: 732030 - DNA, 120 bp, Artificial Sequence
  ENSG00000198752_63 (sequence is synthesized)
atttgaggtacaattaagaaaccaagtatattaattcagaaaatgaatccattttggagatagttgaaattttctgtttggggagttttgtttcccaaataaaaattaagttggaaagca

SEQ ID NO: 732031 - DNA, 120 bp, Artificial Sequence
  ENSG00000198752_64 (sequence is synthesized)
tgggtgcagaccatcggcctgcggagggtaaggcggcctcggtgccctcctgtgcgggcgggcttctcccggtgcagtctgtgcgtggccgcgcttactgtccctccctggtttccaatc

SEQ ID NO: 732032 - DNA, 120 bp, Artificial Sequence
  ENSG00000198752_65 (sequence is synthesized)
cagataaggcccctgaactctgaaggcaccctcaacctcctcaactgcgagcctccacgcttgatctacttcaagagcaagttctcgggagcggttctcaacgtgccggacacctccgac

SEQ ID NO: 732033 - DNA, 120 bp, Artificial Sequence
  ENSG00000198753_0 (sequence is synthesized)
gagacgtgctcctggcaccgccagctgctacttggccctcgccggtggcccaccaggacaatgcccccccgcagccatctcatgcccatcgccactgccctggggcagctgaactgagcg

SEQ ID NO: 732034 - DNA, 120 bp, Artificial Sequence
  ENSG00000198753_1 (sequence is synthesized)
tatgtgccacgccgcccaggagacccctctgctgcaccacttcatggcccccgtgatggctcgctggcctcccttcggcctctgcctcctcctgctgctgctgtccccaccgccactgcc

SEQ ID NO: 732035 - DNA, 120 bp, Artificial Sequence
  ENSG00000198753_2 (sequence is synthesized)
cttgacaggggcccatcgcttctccgcacctaataccactctcaaccacttggcactggcacctggccgaggcacactctatgtcggcgcagtgaaccgcctcttccagctcagccccga

SEQ ID NO: 732036 - DNA, 120 bp, Artificial Sequence
  ENSG00000198753_3 (sequence is synthesized)
gctgcagctcgaggccgtggctgtcactggccctgtaatcgacagccctgactgcgtgcccttccgtgacccagccgagtgcccacaggcccagctcactgacaatgccaaccagctgct

SEQ ID NO: 732037 - DNA, 120 bp, Artificial Sequence
  ENSG00000198753_4 (sequence is synthesized)
gctggtgagcagccgcgcccaggagctggtggcctgcgggcaggtgcggcagggcgtgtgtgagacacggcgccttggggatgtggccgaggtgctgtaccaggctgaggaccctggtga

SEQ ID NO: 732038 - DNA, 120 bp, Artificial Sequence
  ENSG00000198753_5 (sequence is synthesized)
cgggcagtttgtggctgccaataccccgggagtggcaacggtggggctggtggtgcccttgcccggccgggacctcctgcttgtggccagaggcctggcgggcaagctgtcggcaggggt

SEQ ID NO: 732039 - DNA, 120 bp, Artificial Sequence
  ENSG00000198753_6 (sequence is synthesized)
gccacccctggccatccgccagctggccgggtctcagcccttctccagcgagggcctgggccgcctggtggtgggcgacttctccgactacaacaacagctacgtcggggcctttgccga

SEQ ID NO: 732040 - DNA, 120 bp, Artificial Sequence
  ENSG00000198753_7 (sequence is synthesized)
cgcccgctccgcctacttcgtgttccgccgccgcggggcccgggcccaggctgagtaccgctcctacgtggcccgcgtctgcctgggggacaccaacctgtactcctacgtggaggtccc

SEQ ID NO: 732041 - DNA, 120 bp, Artificial Sequence
  ENSG00000198753_8 (sequence is synthesized)
cctcgcctgccagggccagggcctcatccaggccgccttccttgccccgggcaccttgctaggggtgtttgccgcgggcccaaggggcacccaggcggcgctctgtgccttccccatggt

SEQ ID NO: 732042 - DNA, 120 bp, Artificial Sequence
  ENSG00000198753_9 (sequence is synthesized)
ggagctgggtgccagcatggagcaggcccggagactctgctacacggcgggcggccggggccccagcggcgcagaggaagccaccgtggagtacggcgtcacgtcgcgctgcgtcaccct

SEQ ID NO: 732043 - DNA, 120 bp, Artificial Sequence
  ENSG00000198753_10 (sequence is synthesized)
gccccttgattcccccgagtcgtacccctgtggcgacgagcacacccccagccccattgctggccgccagcccctggaggtccagcctctgctgaagctcgggcagccggtcagcgccgt

SEQ ID NO: 732044 - DNA, 120 bp, Artificial Sequence
  ENSG00000198753_11 (sequence is synthesized)
ggcagctctccaggcagatgggcacatgatagccttcctgggggacacccagggccagctgtacaaggtctttctccacggctcccagggccaggtttaccactcccagcaagtggggcc

SEQ ID NO: 732045 - DNA, 120 bp, Artificial Sequence
  ENSG00000198753_12 (sequence is synthesized)
tccaggctcagccatcagcccagacctgctgctggacagcagtggcagtcacctctatgtcctgactgcccaccaggtggaccggatacctgtggcagcctgcccccagttccctgactg

SEQ ID NO: 732046 - DNA, 120 bp, Artificial Sequence
  ENSG00000198753_13 (sequence is synthesized)
tgccagctgcctccaggcccaggacccgctgtgtggctggtgtgtcctccagggcaggtgtacccggaagggccagtgcgggcgggcaggccagctgaaccagtggctgtggagttatga

SEQ ID NO: 732047 - DNA, 120 bp, Artificial Sequence
  ENSG00000198753_14 (sequence is synthesized)
ggaggacagccactgcctgcacatccagagcctgctgccgggccaccacccccgccaggagcagggccaggtcactttgtctgtcccccggctgcccatcctggatgcagatgaatactt

SEQ ID NO: 732048 - DNA, 120 bp, Artificial Sequence
  ENSG00000198753_15 (sequence is synthesized)
ccattgtgcgttcggggactatgacagcttggctcatgtggaagggccccacgtggcctgtgtcacccctccccaagaccaggtgccacttaaccctccaggcacagaccacgtcactgt

SEQ ID NO: 732049 - DNA, 120 bp, Artificial Sequence
  ENSG00000198753_16 (sequence is synthesized)
gcccctggccctgatgttcgaggacgtgactgtggctgccaccaacttctccttttatgactgcagtgccgtccaggccttggaggcggctgccccgtgtcgcgcttgcgtgggcagcat

SEQ ID NO: 732050 - DNA, 120 bp, Artificial Sequence
  ENSG00000198753_17 (sequence is synthesized)
ctggcggtgtcactggtgcccgcagagtagccactgcgtgtacggagagcactgcccagagggcgagaggaccatctacagcgcccaggaggtggacatccaggtgcgtggcccaggggc

SEQ ID NO: 732051 - DNA, 120 bp, Artificial Sequence
  ENSG00000198753_18 (sequence is synthesized)
ttgcccacaggtcgaaggcctggcaggtccccacctggtgcctgtgggctgggagagccatttggccctacgcgtgcggaaccttcaacatttccgaggcctgcctgcctccttccactg

SEQ ID NO: 732052 - DNA, 120 bp, Artificial Sequence
  ENSG00000198753_19 (sequence is synthesized)
ctggctggagctgcctggagaacttcggggactgccggccaccctggaggagacagcaggggattcaggcctcatccactgccaggcccaccagttttatccctccatgtcccagcggga

SEQ ID NO: 732053 - DNA, 120 bp, Artificial Sequence
  ENSG00000198753_20 (sequence is synthesized)
gctcccagtgcccatctacgtcacccagggtgaagcccagaggctggacaacacccatgctctttatgtgatcctgtacgactgcgccatgggccacccggactgcagccactgccaagc

SEQ ID NO: 732054 - DNA, 120 bp, Artificial Sequence
  ENSG00000198753_21 (sequence is synthesized)
ggccaacaggagcctgggctgcctgtggtgtgctgacggccagcctgcctgtcgctatgggcccttgtgcccgccgggggctgtggagctgctgtgtcctgcgcccagcattgatgcagt

SEQ ID NO: 732055 - DNA, 120 bp, Artificial Sequence
  ENSG00000198753_22 (sequence is synthesized)
cgagcccctgaccggtccccctgagggaggcttggccctcaccatcctgggctccaacctgggccgggccttcgccgatgtgcagtacgccgtgagcgtggccagccggccctgcaaccc

SEQ ID NO: 732056 - DNA, 120 bp, Artificial Sequence
  ENSG00000198753_23 (sequence is synthesized)
tgagccctctctctaccgcacgtcggcccggattgtgtgtgtgacatctcctgcccccaatggcaccactgggcccgtccgggtggccattaagagccagccaccaggcatctcaagcca

SEQ ID NO: 732057 - DNA, 120 bp, Artificial Sequence
  ENSG00000198753_24 (sequence is synthesized)
gcacttcacctaccaggaccctgtcctgctgagcctgagtcctcgctggggcccccaggcagggggcacccagctcaccatccgaggtcagcacctccagacaggtggcaacaccagtgc

SEQ ID NO: 732058 - DNA, 120 bp, Artificial Sequence
  ENSG00000198753_25 (sequence is synthesized)
gccagtgtgtccggaggccatcgtgtgccgtaccaggccccaggctgccccaggagaagcagcggtccttgtggtctttggccatgcccagcgcacactgctcgccagccccttccgcta

SEQ ID NO: 732059 - DNA, 120 bp, Artificial Sequence
  ENSG00000198753_26 (sequence is synthesized)
caccgccaacccccagcttgtagcggcggagcccagtgccagcttccgggggggtgggcgactgatccgtgtcaggggcaccggcctagacgtggtgcagcggcccctactgtctgtgtg

SEQ ID NO: 732060 - DNA, 120 bp, Artificial Sequence
  ENSG00000198753_27 (sequence is synthesized)
gctggaggctgacgcagaggtgcaggcttccagggcccagccccaggacccacagccaaggaggagctgtggagcccctgctgcggacccccaggcttgtatccagctcggtggggggct

SEQ ID NO: 732061 - DNA, 120 bp, Artificial Sequence
  ENSG00000198753_28 (sequence is synthesized)
gctgcagtgctccaccgtctgctccgtcaactcgtccagcctcctcctgtgccggagccctgctgtaccagacagagcccacccgcagcgggtcttcttcaccctagacaacgtgcaagt

SEQ ID NO: 732062 - DNA, 120 bp, Artificial Sequence
  ENSG00000198753_29 (sequence is synthesized)
ggacttcgccagtgccagtgggggccagggcttcctgtaccagcccaacccccgcctggcacccctcagccgcgaggggcctgcccgcccctaccgcctcaagccaggccatgtcctgga

SEQ ID NO: 732063 - DNA, 120 bp, Artificial Sequence
  ENSG00000198753_30 (sequence is synthesized)
tgtggagggcgagggcctcaacctgggcatcagcaaggaggaggtgcgcgtgcacatcggccgcggcgagtgcctggtgaagacgctcacgcgcacccacctgtactgcgagccgcctgc

SEQ ID NO: 732064 - DNA, 120 bp, Artificial Sequence
  ENSG00000198753_31 (sequence is synthesized)
gcacgccccgcagcctgccaatggctccggcctgccacagttcgtggtgcagatgggcaatgtgcagctggccctgggccctgtgcagtacgaggctgaacccccgctgtctgcctttcc

SEQ ID NO: 732065 - DNA, 120 bp, Artificial Sequence
  ENSG00000198753_32 (sequence is synthesized)
cgtggaggcccaggcaggcgtgggcatgggtgctgcagtgctgattgccgccgtgctcctcctcaccctcatgtacaggcacaagagcaagcaggccctgcgggactaccagaaggtgct

SEQ ID NO: 732066 - DNA, 120 bp, Artificial Sequence
  ENSG00000198753_33 (sequence is synthesized)
agtgcagctggagagcctggagaccggcgtgggagaccagtgccgcaaggagttcacagacctcatgacggagatgaccgacctcagcagcgacctggagggcagcgggatccccttcct

SEQ ID NO: 732067 - DNA, 120 bp, Artificial Sequence
  ENSG00000198753_34 (sequence is synthesized)
ggactaccgcacctacgccgagcgcgccttcttccctggccatggcggttgcccgctgcagcccaagcctgaggggccaggggaggacggccactgtgccactgtgcgccagggcctcac

SEQ ID NO: 732068 - DNA, 120 bp, Artificial Sequence
  ENSG00000198753_35 (sequence is synthesized)
gcagctctccaacctgctcaacagcaagctcttcctcctcacgctcatccacaccctggaggagcagcccagcttttcccagagggatcgctgccatgtggcttcgctgctgtcgctagc

SEQ ID NO: 732069 - DNA, 120 bp, Artificial Sequence
  ENSG00000198753_36 (sequence is synthesized)
gctacacggcaagctggagtacctgacggacatcatgaggaccctgctgggtgacctggcggcccattacgtgcacaggaaccccaagctcatgctacgcaggacagagaccatggtgga

SEQ ID NO: 732070 - DNA, 120 bp, Artificial Sequence
  ENSG00000198753_37 (sequence is synthesized)
gaaactgctcaccaactggctgtccatctgcctgtacgccttcctgagggaggtggctggtgaaccactgtacatgctcttccgggccatccagtaccaggtggacaaaggccccgtgga

SEQ ID NO: 732071 - DNA, 120 bp, Artificial Sequence
  ENSG00000198753_38 (sequence is synthesized)
cgccgtgacaggcaaggccaaacggaccctgaatgatagccgcttgctgcgggaggacgtggagttccagcccctgacgctgatggtgctggtggggcccggggctggcggggccgcagg

SEQ ID NO: 732072 - DNA, 120 bp, Artificial Sequence
  ENSG00000198753_39 (sequence is synthesized)
cagcagcgagatgcagcgcgtgccagcccgggtgctcgacacggacaccatcacccaggtcaaggagaaggtgttggaccaagtctacaagggcacccccttctcccagaggccctcagt

SEQ ID NO: 732073 - DNA, 120 bp, Artificial Sequence
  ENSG00000198753_40 (sequence is synthesized)
gcatgccctagaccttgagtggcgctcaggcctggctggtcacctgaccctatcggacgaagacttgacctccgtgacccaaaaccactggaagagactcaacaccttgcaacactacaa

SEQ ID NO: 732074 - DNA, 120 bp, Artificial Sequence
  ENSG00000198753_41 (sequence is synthesized)
ggtcccagatggagcaacagtggggctcgtccctcagctgcaccgtggcagcaccatctcccagagcctggcccagaggtgccccttgggagagaacatacccacgctggaggatggcga

SEQ ID NO: 732075 - DNA, 120 bp, Artificial Sequence
  ENSG00000198753_42 (sequence is synthesized)
ggaggggggggtgtgcctctggcacctggtgaaagccaccgaggagccagaaggggccaaggtgcggtgcagcagcctgcgggagcgcgagccagcaagggccaaggccattccggaaat

SEQ ID NO: 732076 - DNA, 120 bp, Artificial Sequence
  ENSG00000198753_43 (sequence is synthesized)
ctacctcacccgtctgctgtccatgaagggcacgctgcagaagtttgtggacgacaccttccaggccattctcagcgtgaaccggcccatccccatcgccgtcaagtacctgtttgacct

SEQ ID NO: 732077 - DNA, 120 bp, Artificial Sequence
  ENSG00000198753_44 (sequence is synthesized)
tctggatgagctagcagagaagcacggcatcgaggacccagggaccctgcacatctggaagaccaacagtctgctgctgcggttctgggtgaatgccttgaagaacccacagctcatctt

SEQ ID NO: 732078 - DNA, 120 bp, Artificial Sequence
  ENSG00000198753_45 (sequence is synthesized)
tgatgtacgggtgtcggacaatgtggacgccatccttgctgtcatcgcccagaccttcattgactcctgtaccacctcggagcataaagtgggccgggattccccagtgaacaaactgct

SEQ ID NO: 732079 - DNA, 120 bp, Artificial Sequence
  ENSG00000198753_46 (sequence is synthesized)
ctacgcccgggagatcccacgctacaagcagatggtggagaggtactatgcggacattcgccagagctctccggcgagctaccaggagatgaactctgctttggctgagctctccgggaa

SEQ ID NO: 732080 - DNA, 120 bp, Artificial Sequence
  ENSG00000198753_47 (sequence is synthesized)
ctacacttctgctccccactgtctggaggctctgcaagaactctacaaccacatccacaggtactatgatcagattatcagtgccctggaggaggaccctgtgggccagaagctgcagct

SEQ ID NO: 732081 - DNA, 120 bp, Artificial Sequence
  ENSG00000198753_48 (sequence is synthesized)
ggcctgccgcctgcagcaggtcgccgccctggtggaaaacaaagtgactgacctgtgagctctggctcagacagcagcaagccggatccaccaacaccgcagcgccttatgaccccggaa

SEQ ID NO: 732082 - DNA, 120 bp, Artificial Sequence
  ENSG00000198753_49 (sequence is synthesized)
ccgagccagccactgaggggagctggcagagcctgggggcacagggtgcaaagccaggcactgtgcccagcagtgggctccctgcctgccacctcccctgccagcccacccaccttcccc

SEQ ID NO: 732083 - DNA, 120 bp, Artificial Sequence
  ENSG00000198753_50 (sequence is synthesized)
ccacctgagattgtttctaatttataaggatccccctccttccccctctccccattgtatttatttgcctgctggaaaatcacatccggaaataaaatagaaatatgtctttttatttta

SEQ ID NO: 732084 - DNA, 120 bp, Artificial Sequence
  ENSG00000198753_51 (sequence is synthesized)
gtgcttcctcgccctggagctgggcgccagcatggagctcacccctgcctcttcgctgacttgctccttgctcagcccgcggctgcctggctctttcccccagctgcggagggttcctcc

SEQ ID NO: 732085 - DNA, 120 bp, Artificial Sequence
  ENSG00000198753_52 (sequence is synthesized)
ctgggtgggcagtggcagcatcatgggggcaccttcacctccgagctcatgcctagcgcctcccctccctccggagcaggattccccagtgaacaaactgctctacgcccgggagatccc

SEQ ID NO: 732086 - DNA, 120 bp, Artificial Sequence
  ENSG00000198753_53 (sequence is synthesized)
gatctagggcccaggtcacctaggccaccaggccagcttccagcggcccctggctccgagtgtgttgccagtaggctggagtacatggggcggagatcacgatggcaggccagggcctca

SEQ ID NO: 732087 - DNA, 120 bp, Artificial Sequence
  ENSG00000198753_54 (sequence is synthesized)
gtctgctcctccaggtactatgcggacattcgccagagctctccggcgagctaccaggagatgaactctgctttggctgagctctccggggtgaggcatggcccggggggtgcgcctgtc

SEQ ID NO: 732088 - DNA, 120 bp, Artificial Sequence
  ENSG00000198754_0 (sequence is synthesized)
cagggcgcgggcgcccgccctgctctgtgacgcgcggcccgaggcgcacgcagggctcacaccacctgtcctggcctccgacccgggccgactatggcggcgctgcggctcctggcgtca

SEQ ID NO: 732089 - DNA, 120 bp, Artificial Sequence
  ENSG00000198754_1 (sequence is synthesized)
gtgctcgggcgcggggtccccgccggcggctcagggctcgcgctgtcccagggctgcgcccgctgctttgccaccagtccccggctccgtgccaagttctacgcggacccggtggagatg

SEQ ID NO: 732090 - DNA, 120 bp, Artificial Sequence
  ENSG00000198754_2 (sequence is synthesized)
gtgaaggacatctctgacggggcgaccgtcatgatcgggggcttcgggctctgcgggatccccgagaacctgatcgccgcgctgctcaggacccgcgtgaaagacctgcaggtggtcagc

SEQ ID NO: 732091 - DNA, 120 bp, Artificial Sequence
  ENSG00000198754_3 (sequence is synthesized)
agcaacgtgggcgtggaggacttcggcctgggcctcctgctggccgccaggcaggtccgtcgcatcgtctgttcctacgtgggcgagaacaccctgtgcgagagccagtacctggcagga

SEQ ID NO: 732092 - DNA, 120 bp, Artificial Sequence
  ENSG00000198754_4 (sequence is synthesized)
gagctggagctggagctcacgccccagggcaccctggccgagcgcatccgcgcggggggcgccggggtgcccgccttctacacccccacgggctacgggaccctggtccaggaagggggc

SEQ ID NO: 732093 - DNA, 120 bp, Artificial Sequence
  ENSG00000198754_5 (sequence is synthesized)
gcccccatccgctacaccccggacggccacctggcgctcatgagccagccccgagaggtgagggagttcaacggcgaccacttccttttggagcgcgccatccgggcagacttcgccctg

SEQ ID NO: 732094 - DNA, 120 bp, Artificial Sequence
  ENSG00000198754_6 (sequence is synthesized)
gtgaaagggtggaaggccgaccgggcaggaaacgtggtcttcaggagaagcgcccgcaatttcaacgtgcccatgtgcaaagctgcagacgtcacggcggtggaggtggaagagatcgtg

SEQ ID NO: 732095 - DNA, 120 bp, Artificial Sequence
  ENSG00000198754_7 (sequence is synthesized)
catccacgttcctaacatttatgtagatcgcgtgataaaggggcagaaatacgagaaacgaattgagcgcttaacgatcctgaaagaggaagatggagacgctggaaaggaagaggacgc

SEQ ID NO: 732096 - DNA, 120 bp, Artificial Sequence
  ENSG00000198754_8 (sequence is synthesized)
caggacgcgcatcatcagacgcgcagctctggaatttgaggacggcatgtacgccaatctgggcataggcatccccctgctggccagcaacttcatcagtcccagcatgactgtccatct

SEQ ID NO: 732097 - DNA, 120 bp, Artificial Sequence
  ENSG00000198754_9 (sequence is synthesized)
tcacagtgagaacgggatcctgggcctgggcccgtttcccacggaagatgaggtggatgccgacctcatcaatgcaggcaagcagacggtcacggtgcttcccgggggctgcttcttcgc

SEQ ID NO: 732098 - DNA, 120 bp, Artificial Sequence
  ENSG00000198754_10 (sequence is synthesized)
cagcgacgactccttcgccatgatccgagggggacacatccaactaaccatgcttggagccatgcaggtttccaaatacggcgacctggcgaactggatgatccctggcaagaaggtgaa

SEQ ID NO: 732099 - DNA, 120 bp, Artificial Sequence
  ENSG00000198754_11 (sequence is synthesized)
aggcatgggcggtgccatggacttggtgtccagtcagaagaccagagtggtggtcaccatgcagcactgcacaaaggacaacacccccaagatcatggagaaatgcaccatgccgctgac

SEQ ID NO: 732100 - DNA, 120 bp, Artificial Sequence
  ENSG00000198754_12 (sequence is synthesized)
cgggaagcggtgcgtggaccgcatcatcaccgagaaggccgtgtttgacgtgcacaggaagaaagagctgacgctgagggagctctgggagggcctgacggtggacgacatcaaaaagag

SEQ ID NO: 732101 - DNA, 120 bp, Artificial Sequence
  ENSG00000198754_13 (sequence is synthesized)
cacggggtgtgcctttgctgtgtccccgaacctcaggcccatgcagcaggtggcaccctgacgggacctggatctgggcggggtggtgcgctcctcagggcgggtgccaccgggttcccc

SEQ ID NO: 732102 - DNA, 120 bp, Artificial Sequence
  ENSG00000198754_14 (sequence is synthesized)
aggggaatacatgtccccagctctgggaggggtttgctactggcctcctactttcctccctaggtggacagtgctcctctagagagctgcgactttaattaaaaacaacaggaaaacaga

SEQ ID NO: 732103 - DNA, 120 bp, Artificial Sequence
  ENSG00000198755_0 (sequence is synthesized)
agtctcttttccggttagcgcggcgtgagaagccatgagcagcaaagtctctcgcgacaccctgtacgaggcggtgcgggaagtcctgcacgggaaccagcgcaagcgccgcaagttcct

SEQ ID NO: 732104 - DNA, 120 bp, Artificial Sequence
  ENSG00000198755_1 (sequence is synthesized)
ggagacggtggagttgcagatcagcttgaagaactatgatccccagaaggacaagcgcttctcgggcaccgtcaggcttaagtccactccccgccctaagttctctgtgtgtgtcctggg

SEQ ID NO: 732105 - DNA, 120 bp, Artificial Sequence
  ENSG00000198755_2 (sequence is synthesized)
gcgtttttggcctcagagtctctgatcaagcagattccacgaatcctcggcccaggtttaaataaggcaggaaagttcccttccctgctcacacacaacgaaaacatggtggccaaagtg

SEQ ID NO: 732106 - DNA, 120 bp, Artificial Sequence
  ENSG00000198755_3 (sequence is synthesized)
gatgaggtgaagtccacaatcaagttccaaatgaagaaggtgttatgtctggctgtagctgttggtcacgtgaagatgacagacgatgagcttgtgtataacattcacctggctgtcaac

SEQ ID NO: 732107 - DNA, 120 bp, Artificial Sequence
  ENSG00000198755_4 (sequence is synthesized)
ttcttggtgtcattgctcaagaaaaactggcagaatgtccgggccttatatatcaagagcaccatgggcaagccccagcgcctatattaaggcacatttgaataaattctattaccagtt

SEQ ID NO: 732108 - DNA, 120 bp, Artificial Sequence
  ENSG00000198755_5 (sequence is synthesized)
gcggcgtgagaagccatgagcagcaaagtctctcgcgacaccctgtacgaggcggtgcgggaagtcctgcacgggaaccagcgcaagcgccgcaagtgagtgccgaccctggggcacggc

SEQ ID NO: 732109 - DNA, 120 bp, Artificial Sequence
  ENSG00000198755_6 (sequence is synthesized)
cccctgcaggctcccgctgagccggaggcgggcacgtcggtactgatgtgctagggtagttcagaccccctgctccgggcaggcgcggctggacggacccccaccctgggtcttaaaaca

SEQ ID NO: 732110 - DNA, 120 bp, Artificial Sequence
  ENSG00000198755_7 (sequence is synthesized)
tgaggggaggcgtgggtaggcctcggccgagcccgccggccagcctgagaagccaggctggctgctggtgaatgtgaacgctccgggtaaggctcggtggctgctgcggtcccagaccct

SEQ ID NO: 732111 - DNA, 120 bp, Artificial Sequence
  ENSG00000198755_8 (sequence is synthesized)
gcggcgtgagaagccatgaggtgagttggtcctgaaagccctatccgcgttcatccgcgccttcaggtgccccgccgagggttcggatcctgtaggccgcgccgcggacccttgcgccac

SEQ ID NO: 732112 - DNA, 120 bp, Artificial Sequence
  ENSG00000198755_9 (sequence is synthesized)
ctgcgccgcggggcatttctcaaggcgggtcggcctgcgggtcgcccttcctaccaggtccgatcactgagagcctccctcttccaccggggcttgggtctgggtctgagctcccgtcgc

SEQ ID NO: 732113 - DNA, 120 bp, Artificial Sequence
  ENSG00000198755_10 (sequence is synthesized)
tctacttggtgtccggaatctacgggggagtccgccgtgggccgcccgcccgtctcgaagcctagacctcggaggcttccaggcagtccgagcgtgtggactccgcggccctgagcgccc

SEQ ID NO: 732114 - DNA, 120 bp, Artificial Sequence
  ENSG00000198756_0 (sequence is synthesized)
acaactcgcggctctagggaaggccacagacctcagctgtacgagcggaacctggactagaggaactttcctcaggactcagggcacacagcccctcggccactactgtctgcgagcccg

SEQ ID NO: 732115 - DNA, 120 bp, Artificial Sequence
  ENSG00000198756_1 (sequence is synthesized)
cccgaggcgcaggggagcgccagcggctgcaggtacgctgcgcacccgcactggggcctgggcggtgcagcggcggcgggagggtcctgggaaccgcagccgccgaggccagtgtgtgag

SEQ ID NO: 732116 - DNA, 80 bp, Artificial Sequence
  ENSG00000198756_2 (sequence is synthesized)
cctcgcagccccttgctccccggcagccgccgccgccctcaggcagcccagccgggcgctcgcgccaggacttccccgcc

SEQ ID NO: 732117 - DNA, 120 bp, Artificial Sequence
  ENSG00000198756_3 (sequence is synthesized)
cggcccggaacatggctgcgcgccctgctgccaccctcgcctggtcgctactgctcctctcctcagccctgctccgcgaaggctgccgagcgcgcttcgtcgccgagcgggactcggagg

SEQ ID NO: 732118 - DNA, 120 bp, Artificial Sequence
  ENSG00000198756_4 (sequence is synthesized)
acgacggagaggagccggtggttttcccggagtcgcccctgcagagccccacggtgctcgtggcggtcctcgcccgcaacgcggcgcacacgctgccgcacttcctcggctgcctggagc

SEQ ID NO: 732119 - DNA, 120 bp, Artificial Sequence
  ENSG00000198756_5 (sequence is synthesized)
ggctggactaccccaagagcaggatggccatctgggcagccactgatcacaatgtggataatacaacagaaatattcagggagtggttgaaaaatgtacagagactctatcactatgtgg

SEQ ID NO: 732120 - DNA, 120 bp, Artificial Sequence
  ENSG00000198756_6 (sequence is synthesized)
agtggaggcctatggatgaaccagagtcttaccctgatgaaattggaccaaagcactggccaacctcccggtttgcccatgtgatgaaactacgacaggcagcccttcgaactgcgaggg

SEQ ID NO: 732121 - DNA, 120 bp, Artificial Sequence
  ENSG00000198756_7 (sequence is synthesized)
aaaaatggtcagactacattctgttcatagatgttgacaatttcctgactaatccacagaccctcaatctactgattgcagaaaacaaaactattgtggcccccatgctggagtctcggg

SEQ ID NO: 732122 - DNA, 120 bp, Artificial Sequence
  ENSG00000198756_8 (sequence is synthesized)
gcctgtattctaatttctggtgcggaatcacccctaagggcttctataagaggaccccagactacgttcagattcgagaatggaagaggacaggctgcttccccgtccccatggtccact

SEQ ID NO: 732123 - DNA, 120 bp, Artificial Sequence
  ENSG00000198756_9 (sequence is synthesized)
ccaccttcctaattgacctcaggaaggaggcctcggacaagctgactttctaccccccacaccaggactacacctggacctttgatgacatcattgtctttgccttctccagcaggcaag

SEQ ID NO: 732124 - DNA, 120 bp, Artificial Sequence
  ENSG00000198756_10 (sequence is synthesized)
caggcatccagatgtacctctgcaacagagagcactatggctacctgcccatccccctgaagccccatcagacactgcaggaagacatcgagaacctcatccatgtgcagattgaagcaa

SEQ ID NO: 732125 - DNA, 120 bp, Artificial Sequence
  ENSG00000198756_11 (sequence is synthesized)
tgattgaccgtcctccaatggaaccctcccagtatgtctcagttgtccctaaatatccagacaagatgggatttgatgagattttcatgataaacctcaaacgcagaaaggacaggcggg

SEQ ID NO: 732126 - DNA, 120 bp, Artificial Sequence
  ENSG00000198756_12 (sequence is synthesized)
accggatgctgcgcacactgtatgaacaggagattgaggtcaagattgtcgaggctgtggatggaaaggcactcaacacaagccagctgaaggcactgaatattgaaatgctgcctggct

SEQ ID NO: 732127 - DNA, 120 bp, Artificial Sequence
  ENSG00000198756_13 (sequence is synthesized)
atcgagatccctattcctccaggcctctaacaaggggtgaaatcggctgctttctcagccactactcagtctggaaagaggtaattgatcgagagctagagaagactcttgtaattgaag

SEQ ID NO: 732128 - DNA, 120 bp, Artificial Sequence
  ENSG00000198756_14 (sequence is synthesized)
acgatgtgcgttttgagcatcagtttaagaagaagctgatgaagctgatggataacattgaccaggctcagctggactgggaactgatttatattggtaggaagaggatgcaagtaaagg

SEQ ID NO: 732129 - DNA, 120 bp, Artificial Sequence
  ENSG00000198756_15 (sequence is synthesized)
agccagagaaagcagtgcccaatgtggcaaacctggtcgaagccgactattcctactggaccctgggctacgtcatctctctggaaggagcacagaagctggttggagccaatccttttg

SEQ ID NO: 732130 - DNA, 120 bp, Artificial Sequence
  ENSG00000198756_16 (sequence is synthesized)
ggaagatgctgccagtggatgagtttctgccagtcatgtacaacaagcatcccgtagccgagtacaaggagtattatgaatccagggacctgaaagccttctctgcagaacccttgctca

SEQ ID NO: 732131 - DNA, 120 bp, Artificial Sequence
  ENSG00000198756_17 (sequence is synthesized)
tctaccctacgcactacacaggccagccggggtacctgagtgacacggagacctccaccatctgggacaatgagacagtggccaccgactgggataggacacatgcctggaagtcccgga

SEQ ID NO: 732132 - DNA, 120 bp, Artificial Sequence
  ENSG00000198756_18 (sequence is synthesized)
agcaaagccgcatctacagcaatgccaagaacacagaggccctgccaccgccaacctccctggacactgtgccttcaagggatgagctatgaaggctccctgggagtgtggcccacatca

SEQ ID NO: 732133 - DNA, 120 bp, Artificial Sequence
  ENSG00000198756_19 (sequence is synthesized)
gttcaacatcctctggtttttctaaagggctattcatctgtttgctccagttttctgttttgttttgttcttagtggtcacagtcatctaaccaaagtgatctagtgtgatagatcgaaa

SEQ ID NO: 732134 - DNA, 120 bp, Artificial Sequence
  ENSG00000198756_20 (sequence is synthesized)
ttaacatatttttgaccatggaaggaaataaggaaattcaacccaaatttcccaagacggctgaaagacaggttttttggaaactgttaagataaactgtaatccagacacctaattctt

SEQ ID NO: 732135 - DNA, 120 bp, Artificial Sequence
  ENSG00000198756_21 (sequence is synthesized)
tactgattcccacattaaggttgaacaacatggctcagagtcttgttcaagagaaagtgatcaccgagctgtcacatcagcaaatatgtagtcaaggcagccaggccaactagaccacac

SEQ ID NO: 732136 - DNA, 120 bp, Artificial Sequence
  ENSG00000198756_22 (sequence is synthesized)
ttattggtctagtttgtccgttttatatgacattgaaaacttgtgtgtgcaacttttgggggacaggaatcacttaaaatcatatttatttggctttttatttaaaggattctgtcacaa

SEQ ID NO: 732137 - DNA, 120 bp, Artificial Sequence
  ENSG00000198756_23 (sequence is synthesized)
gtcttattgaaaagtagattttttaaaaaaaaaaaatcttagtccctgttatccagtaggggtgggtatttgggtccgactgagacttggcctgtgaccatcatggcagttggagttctc

SEQ ID NO: 732138 - DNA, 120 bp, Artificial Sequence
  ENSG00000198756_24 (sequence is synthesized)
atatagaggtgaccagtttgccatgtggatataatttagtagatatttgacagtttgtgtaggtatttgagggaaaaaactcaatgtttggcttttttattatggccactcgagtcagga

SEQ ID NO: 732139 - DNA, 120 bp, Artificial Sequence
  ENSG00000198756_25 (sequence is synthesized)
tgctctatttataaagataaatgtaatatataaagggtgaggactggctgtgcatcctgccctgtcccgggtttgcgcgctgctacagagcttcacgctctccgctccaccccttagcct

SEQ ID NO: 732140 - DNA, 120 bp, Artificial Sequence
  ENSG00000198756_26 (sequence is synthesized)
gggaacccaccgcaggtgtgagttctgtgagtcactgctaagagacagagcacattttcaggccagcaactatccttgccagagttttttcattatattttgaattatttattttacaaa

SEQ ID NO: 732141 - DNA, 120 bp, Artificial Sequence
  ENSG00000198756_27 (sequence is synthesized)
atgggcgaagatattgtctttaggataaggcagagaaacagatgttgcagacttccacggcacccgggggagtggtgggtgtggacacattggttcggcaatctgattctcctgaatttc

SEQ ID NO: 732142 - DNA, 120 bp, Artificial Sequence
  ENSG00000198756_28 (sequence is synthesized)
ccagccaggctcttgtggggaggcctgtggatggggggatttgaactatttggaaacaaatgattctctatctcaggtgagaaacctggtcagaaacaaagggctggtcacctgatttag

SEQ ID NO: 732143 - DNA, 120 bp, Artificial Sequence
  ENSG00000198756_29 (sequence is synthesized)
gccagcaaccagggaagctcttagaatcccaggcggacaccctttctcaaaagatatcccctaagagtcctttctgctttcttcacagattgattttatgtaaaatgcagagttggacta

SEQ ID NO: 732144 - DNA, 120 bp, Artificial Sequence
  ENSG00000198756_30 (sequence is synthesized)
cacgatttcttcccactccacaatctgtcatcctagtatagatcatggtggtttccctcaagtttatgttctcatgccctcaatctgtaaatttttgtctccagaaaaaccctcccaggc

SEQ ID NO: 732145 - DNA, 120 bp, Artificial Sequence
  ENSG00000198756_31 (sequence is synthesized)
atcccataccagcaccgttcctcatcactgtccatgcaccatgcagccatatggggggccgtgcacaccccaaaccctgagcttcacacttaaactcatggggagggcccttcagagcag

SEQ ID NO: 732146 - DNA, 120 bp, Artificial Sequence
  ENSG00000198756_32 (sequence is synthesized)
agtccacaggcgggtggtgctacatacacaagcttagtgtacgagtgtaagatacactttaagccagacacctaattcttcagttcactgcccatgtgatactgattgccacattaaggt

SEQ ID NO: 732147 - DNA, 120 bp, Artificial Sequence
  ENSG00000198756_33 (sequence is synthesized)
tgaacagcatggctcagagtctagagaaagtgatcaccaagctgtctcatcaccaaataggtagtcaaggcagcctcatctccccaggtgaggggcgggtccccactttaggacaagagg

SEQ ID NO: 732148 - DNA, 120 bp, Artificial Sequence
  ENSG00000198756_34 (sequence is synthesized)
cagcttgccttccaccagacgccagcctcggccttccttcccgactcactgtgggtacccttctacactgaccagcaagctaggccgctggaggaaagggaactcacccaactctaaatt

SEQ ID NO: 732149 - DNA, 120 bp, Artificial Sequence
  ENSG00000198756_35 (sequence is synthesized)
gtgccgcttagacttagctgtcagtgtgacttcctttcccacccacccccagaaaaacagaaagagcatctggggagcgagtgaaaattccttaggtgattcctaagatttccttgggta

SEQ ID NO: 732150 - DNA, 120 bp, Artificial Sequence
  ENSG00000198756_36 (sequence is synthesized)
tctggtttttgttttcatatttgagtgtgtgcatgtgtgcatgactttaatgacttttttaatggggtgggaggtggctggggtgctggggttgaaggaagtttgggttgatttttgtgg

SEQ ID NO: 732151 - DNA, 120 bp, Artificial Sequence
  ENSG00000198756_37 (sequence is synthesized)
tgttttgtttaatagagaattttttttttcctgttcccctgtcagctggtctgacagatttaagaactctcattcttaaaagactttggacttaaattctagcattttagactaggactg

SEQ ID NO: 732152 - DNA, 120 bp, Artificial Sequence
  ENSG00000198756_38 (sequence is synthesized)
ttctactgtgaagaaagttctgtctcctttagcccggtttgtttctccctgctcaggtctagaatcccaagcagtgttcttttctggtgaacactgtgagccgcagatgtgacttttttt

SEQ ID NO: 732153 - DNA, 120 bp, Artificial Sequence
  ENSG00000198756_39 (sequence is synthesized)
ttaaagtcatctcttcagcaatccagaggttccttgacctcattatttgtcctatctctcccttatagtcctaagccaagacatttgacctttgacatttgacctttgcagtgtcatgtg

SEQ ID NO: 732154 - DNA, 120 bp, Artificial Sequence
  ENSG00000198756_40 (sequence is synthesized)
agggcgtcagtatagaggcctttgcatctgggcctggcacccgctctctgcctctggaggctaaaccctgtctggatttctcttgggatctaacgtgggatcttctggacagacaaccgt

SEQ ID NO: 732155 - DNA, 120 bp, Artificial Sequence
  ENSG00000198756_41 (sequence is synthesized)
gacatcagcagtgctggtgctgctgtgtgtggactgaacacctgcactttgcagaggacacgctgcatgggccccgcttgcggttcattcaggcctgctgcaggagctctgagaacaaga

SEQ ID NO: 732156 - DNA, 120 bp, Artificial Sequence
  ENSG00000198756_42 (sequence is synthesized)
aagagtggacacccgttcccctgcatcatctgtcttgcgtgctatttcagagtggggaagtgataaactatttgccttctggagctctttgtgaaaaattaaaaaaaaacttagctcaaa

SEQ ID NO: 732157 - DNA, 120 bp, Artificial Sequence
  ENSG00000198756_43 (sequence is synthesized)
ccagtggatgagtttctgccagtcatgtacaacaagcatcccgtcctcctctcaagtcctcactgccatctcttccaaacactttctgatgactgccaacggtgaacaaacccgtgcacc

SEQ ID NO: 732158 - DNA, 120 bp, Artificial Sequence
  ENSG00000198756_44 (sequence is synthesized)
ctaggagaaggcattacccctctgtggcagaggtggtcgtgttcatcaactcctccaggtttctcctgcatttcccacctcccctgtactcacatcgggcccggggactggttgatgggc

SEQ ID NO: 732159 - DNA, 120 bp, Artificial Sequence
  ENSG00000198756_45 (sequence is synthesized)
tgtgaacagaagtgacaggtgtcgctttggtctaaggcagttgggaacagtttgtgagttctctttactctctttatcatcactgtgactggaagggaaacaccgagatggcgaagttgc

SEQ ID NO: 732160 - DNA, 120 bp, Artificial Sequence
  ENSG00000198756_46 (sequence is synthesized)
aagatggaagctgcctggatctgtgagctgctgttagagaaaagctactaaggagtttcctggcttgcattacactgtcccgtgaaagaaaaaataaacctcggtcttaagctgttgaaa

SEQ ID NO: 732161 - DNA, 120 bp, Artificial Sequence
  ENSG00000198756_47 (sequence is synthesized)
ttttcgtttttttgttctatgtatgcctagatttagctttaataatctgtcagcgttacagaattttcctgtttgctttcatatcaaatgtggatttcattcctcattttcttgttattt

SEQ ID NO: 732162 - DNA, 120 bp, Artificial Sequence
  ENSG00000198756_48 (sequence is synthesized)
cctgtaggtggattacagtgttccattctgctctccagaatgggaattccttgcctcccttttgatcctttcatgccttttttgttcattccaggccatgagtttgctttttcttcagag

SEQ ID NO: 732163 - DNA, 120 bp, Artificial Sequence
  ENSG00000198756_49 (sequence is synthesized)
ggaaaaaatcaatttcctctgggctgaagaatagccgagtgtttttattagtccccaatgctgtgttttacttttttaataaaggagcattttttaggtctatagacatacctgaaacaa

SEQ ID NO: 732164 - DNA, 120 bp, Artificial Sequence
  ENSG00000198756_50 (sequence is synthesized)
ttttctattcttttactttcaacctatttttgtcttttaatctaaaggctgcctcttatagataccacatggttgtattaatttttaaaacttactatgccaaattcttccttcattgca

SEQ ID NO: 732165 - DNA, 120 bp, Artificial Sequence
  ENSG00000198756_51 (sequence is synthesized)
gtgttttattcatttgccttcactacatttttttccagatccttaaggtcagccagaggtgagagactagggacttctcaagtttttcctgggcgtgtggacagccctgaatatgcctgg

SEQ ID NO: 732166 - DNA, 120 bp, Artificial Sequence
  ENSG00000198756_52 (sequence is synthesized)
ggccttctagattctcagggatattttggagcaaatcaaactccctatggacctcttattccttggtttttccttttaagttttttggtgggcttcttgttagcatcagctgataatgct

SEQ ID NO: 732167 - DNA, 120 bp, Artificial Sequence
  ENSG00000198756_53 (sequence is synthesized)
tctcaaacagctgtaatgttaaacagttgttgctcatgggttttgacaaatgacctgcagatagtgctgttcacagaaaatgaactctgagtcaggtcaaatcaagacaagctctgagaa

SEQ ID NO: 732168 - DNA, 120 bp, Artificial Sequence
  ENSG00000198756_54 (sequence is synthesized)
tgtagcttttcaaggagctactagacaggttgaatagagattattttctgggggcaggtctttaagggagtctcagtccattttgtccctgccagtggcttctgggttggtggggtttgc

SEQ ID NO: 732169 - DNA, 120 bp, Artificial Sequence
  ENSG00000198756_55 (sequence is synthesized)
cgctctcttagttgtgaggctactggttttcaaggcttttgtagggctggggtgaacaggttaggattagggcagctgtgaacttcacaaagctcactgtgttaacagagattcagcagt

SEQ ID NO: 732170 - DNA, 120 bp, Artificial Sequence
  ENSG00000198756_56 (sequence is synthesized)
aggtcttgatcaaacactccttggattattgcagtactttaactaatttccataggagtgtacttattaaatcttgtcaaaaaactgatgatgcttagaactatgttgggcactatgagg

SEQ ID NO: 732171 - DNA, 120 bp, Artificial Sequence
  ENSG00000198756_57 (sequence is synthesized)
gatacacaaaaatatgataccctcttgtcttcccagacctcataatactagtgtgacacattagcctggaggaacttctaaggaataaagggaagcctctctgtctttgtctgtgtgggg

SEQ ID NO: 732172 - DNA, 120 bp, Artificial Sequence
  ENSG00000198756_58 (sequence is synthesized)
gaggggtgtttgcagaactaactctctctttctctggcctttgtggtggggacctttgacttgttaatctccagacgtgttttatgtgatgcagggcactcaacacaagccagctgaagg

SEQ ID NO: 732173 - DNA, 120 bp, Artificial Sequence
  ENSG00000198756_59 (sequence is synthesized)
aaccatcactgctgtgtgatccccatggcaaatgaggggagggtggttgctgcccttactgtgcagtgagggttgttttaaactgatgggtactgttatgtaagctgaaaaggattccaa

SEQ ID NO: 732174 - DNA, 120 bp, Artificial Sequence
  ENSG00000198756_60 (sequence is synthesized)
ggtacagaaagatggaagagagcccccactgggagggagtggaggtgtccatcttgcattttgtgctacaggtcagcctatccgttcatcaaaagatactgagatactgtgataccagtc

SEQ ID NO: 732175 - DNA, 120 bp, Artificial Sequence
  ENSG00000198756_61 (sequence is synthesized)
caaggccaaagagctttttcctggggaaaaataacagcagcaacaaaaagaaaatccttgttgatctcagtgactgcttgaatttttagatcaagcttacccctaatctcaaaaaccagg

SEQ ID NO: 732176 - DNA, 120 bp, Artificial Sequence
  ENSG00000198756_62 (sequence is synthesized)
ctgtgaacactgccttgctgcaggctttgtgctgggcactgagatgctcagagaagtaggtaaggtccctactgctgtgtggggcccgcagtccaatggaggagcaacataaagcaggtg

SEQ ID NO: 732177 - DNA, 120 bp, Artificial Sequence
  ENSG00000198756_63 (sequence is synthesized)
gctgccaaacaggatggttttatttcagagatgaacaaaatgggcagaggaggactgtcagggcagctctgctgagaagcctcctctcaagtcctcactgccatctcttccaaacacttt

SEQ ID NO: 732178 - DNA, 120 bp, Artificial Sequence
  ENSG00000198758_0 (sequence is synthesized)
gttgagcggttagtgaccaggaagcctccccacccaccagagtccaaagagcacaggcgtggctgcctctgtaacctcatcaaaggcaggctctgcctgtggccactagcagagaagctg

SEQ ID NO: 732179 - DNA, 120 bp, Artificial Sequence
  ENSG00000198758_1 (sequence is synthesized)
ctgtccttccaccaccagcaccggaccacctgctccaagaccagcctcctggggggaccaggcacccggccttcactggcacccagggagccgtcctcagcagcgtcaacatgtcaaggc

SEQ ID NO: 732180 - DNA, 120 bp, Artificial Sequence
  ENSG00000198758_2 (sequence is synthesized)
ccagcagcagagccatttacttgcaccggaaggagtactcccagaacctcacctcagagcccaccctcctgcagcacagggtggagcacttgatgacatgcaagcaggggagtcagagag

SEQ ID NO: 732181 - DNA, 120 bp, Artificial Sequence
  ENSG00000198758_3 (sequence is synthesized)
tccaggggcccgaggatgccttgcagaagctgttcgagatggatgcacagggccgggtgtggagccaagacttgatcctgcaggtcagggacggctggctgcagctgctggacattgaga

SEQ ID NO: 732182 - DNA, 120 bp, Artificial Sequence
  ENSG00000198758_4 (sequence is synthesized)
ccaaggaggagctggactcttaccgcctagacagcatccaggccatgaatgtggcgctcaacacatgttcctacaactccatcctgtccatcaccgtgcaggagccgggcctgccaggca

SEQ ID NO: 732183 - DNA, 120 bp, Artificial Sequence
  ENSG00000198758_5 (sequence is synthesized)
ctagcactctgctcttccagtgccaggaagtgggggcagagcgactgaagaccagcctgcagaaggctctggaggaagagctggagcaaagcagacctcgacttggaggccttcagccag

SEQ ID NO: 732184 - DNA, 120 bp, Artificial Sequence
  ENSG00000198758_6 (sequence is synthesized)
gccaggacagatggagggggcctgctatggaaaggccgctccctatggagcaggcacgctatctggagccggggatccctccagaacagccccaccagaggaccctagagcacagcctcc

SEQ ID NO: 732185 - DNA, 120 bp, Artificial Sequence
  ENSG00000198758_7 (sequence is synthesized)
caccatccccaaggcccctgccacgccacaccagtgcccgagaaccaagtgcctttactctgcctcctccaaggcggtcctcttcccccgaggacccagagagggacgaggaagtgctga

SEQ ID NO: 732186 - DNA, 120 bp, Artificial Sequence
  ENSG00000198758_8 (sequence is synthesized)
accatgtcctaagggacattgagctgttcatgggaaagctggagaaggcccaggcaaagaccagcaggaagaagaaatttgggaaaaaaaacaaggaccagggaggtctcacccaggcac

SEQ ID NO: 732187 - DNA, 120 bp, Artificial Sequence
  ENSG00000198758_9 (sequence is synthesized)
tgggaaggctggccacctggctgaaggagacaagtgcccctgagctcgtacacatcctcttcaagtccctgaacttcatcctggccaggtgccctgaggctggcctagcagcccaagtga

SEQ ID NO: 732188 - DNA, 120 bp, Artificial Sequence
  ENSG00000198758_10 (sequence is synthesized)
tctcacccctcctcacccctaaagctatcaacctgctacagtcctgtctaagcccacctgagagtaacctttggatggggttgggcccagcctggaccactagccgggccgactggacag

SEQ ID NO: 732189 - DNA, 120 bp, Artificial Sequence
  ENSG00000198758_11 (sequence is synthesized)
gcgatgagcccctgccctaccaacccacattctcagatgactggcaacttccagagccctccagccaagcacccttaggataccaggaccctgtttcccttcggcggggaagtcataggt

SEQ ID NO: 732190 - DNA, 120 bp, Artificial Sequence
  ENSG00000198758_12 (sequence is synthesized)
tagggagcacctcacactttcctcaggagaagacacacaaccatgaccctcagcctggggaccccaactccaggccctccagccccaaacctgcccagccagccctgaaaatgcaagtct

SEQ ID NO: 732191 - DNA, 120 bp, Artificial Sequence
  ENSG00000198758_13 (sequence is synthesized)
tgtacgagtttgaagctaggaacccacgggaactgactgtggtccagggagagaagctggaggttctggaccacagcaagcggtggtggctggtgaagaatgaggcgggacggagcggct

SEQ ID NO: 732192 - DNA, 120 bp, Artificial Sequence
  ENSG00000198758_14 (sequence is synthesized)
acattccaagcaacatcctggagcccctacagccggggacccctgggacccagggccagtcaccctctcgggttccaatgcttcgacttagctcgaggcctgaagaggtcacagactggc

SEQ ID NO: 732193 - DNA, 120 bp, Artificial Sequence
  ENSG00000198758_15 (sequence is synthesized)
tgcaggcagagaacttctccactgccacggtgaggacacttgggtccctgacggggagccagctacttcgcataagacctggggagctacagatgctatgtccacaggaggccccacgaa

SEQ ID NO: 732194 - DNA, 120 bp, Artificial Sequence
  ENSG00000198758_16 (sequence is synthesized)
tcctgtcccggctggaggctgtcagaaggatgctggggataagcccttaggcaccagcttagacacctccaagaaccaggccccgctgatgcaagatggcagatctgatacccattagag

SEQ ID NO: 732195 - DNA, 120 bp, Artificial Sequence
  ENSG00000198758_17 (sequence is synthesized)
ccccgagaattcctcttctggatcccagtttgcagcaaaccccacaccccagctcacacagcaaaaacaatggacaggcccagaggctgaagcaaacagtgtcccttctggctgtgttgg

SEQ ID NO: 732196 - DNA, 120 bp, Artificial Sequence
  ENSG00000198758_18 (sequence is synthesized)
agcctccccagtaaccacctatttattttacctctttcccaaacctggagcatttatgcctaggcttgtcaagaatctgttcagtccctctccttctcaataaaagcatcttcaagcttg

SEQ ID NO: 732197 - DNA, 120 bp, Artificial Sequence
  ENSG00000198758_19 (sequence is synthesized)
tattattgcatgcttagtgtgccaactttatcatggggccagagcagagaacaagaccagctccctgccagaccagaaagccacagagtaagagaagtgatttgatgggaacctggagaa

SEQ ID NO: 732198 - DNA, 120 bp, Artificial Sequence
  ENSG00000198758_20 (sequence is synthesized)
caactaaacccaagtgttcccatgtgcccaccgccctgccagaacatggacacttcacacaagtccctgccccagaagccaacagcctgtcccaaccatgtcgcatggactcagatccaa

SEQ ID NO: 732199 - DNA, 120 bp, Artificial Sequence
  ENSG00000198758_21 (sequence is synthesized)
caagcctgccagagcatctgctcagtgtcagggacggggaggggtggtcagattgaacagagcaggcctggctggaggttgagcgggtgagtgtcctgtccccagacaggaagaagtagc

SEQ ID NO: 732200 - DNA, 120 bp, Artificial Sequence
  ENSG00000198758_22 (sequence is synthesized)
caaactctaaagaaacccaaaagtcaccatcagactgcaggccggagatacctgaggggaatctcagggctgggacataggcttaatttctgaggccccattctccagccatcctgactc

SEQ ID NO: 732201 - DNA, 120 bp, Artificial Sequence
  ENSG00000198758_23 (sequence is synthesized)
aaagggcagccactctccccacatacaacacacacccaagcctaggaagagacaggggacagaggctggggacagaggcacaagagtcaggtagatgacacctcagccctaggccaccaa

SEQ ID NO: 732202 - DNA, 120 bp, Artificial Sequence
  ENSG00000198758_24 (sequence is synthesized)
gcagccaagggtggatggtccagggatggagctgccaaggtgggtggcctagagagggagaaggagggtaggaaagagctggagggagaaagccttgtgtggggagggaaggctggctgg

SEQ ID NO: 732203 - DNA, 120 bp, Artificial Sequence
  ENSG00000198759_0 (sequence is synthesized)
gctcaccccgtccagcttcatccgcagaggagcctcggccaggcttgccagggcgcccccagcccctccccaggccgcgagcgcccctgccgcggtgcctggcctcccctcccagactgc

SEQ ID NO: 732204 - DNA, 120 bp, Artificial Sequence
  ENSG00000198759_1 (sequence is synthesized)
agggacagcacccggtaactgcgagtggagcggaggacccgagcggctgaggagagaggaggcggcggcttagctgctacggggtccggccggcgccctcccgaggggggctcaggagga

SEQ ID NO: 732205 - DNA, 120 bp, Artificial Sequence
  ENSG00000198759_2 (sequence is synthesized)
ggaaggaggacccgtgcgagaatgcctctgccctggagccttgcgctcccgctgctgctctcctgggtggcaggtggtttcgggaacgcggccagtgcaaggcatcacgggttgttagca

SEQ ID NO: 732206 - DNA, 120 bp, Artificial Sequence
  ENSG00000198759_3 (sequence is synthesized)
tcggcacgtcagcctggggtctgtcactatggaactaaactggcctgctgctacggctggagaagaaacagcaagggagtctgtgaagctacatgcgaacctggatgtaagtttggtgag

SEQ ID NO: 732207 - DNA, 120 bp, Artificial Sequence
  ENSG00000198759_4 (sequence is synthesized)
tgcgtgggaccaaacaaatgcagatgctttccaggatacaccgggaaaacctgcagtcaagatgtgaatgagtgtggaatgaaaccccggccatgccaacacagatgtgtgaatacacac

SEQ ID NO: 732208 - DNA, 120 bp, Artificial Sequence
  ENSG00000198759_5 (sequence is synthesized)
ggaagctacaagtgcttttgcctcagtggccacatgctcatgccagatgctacgtgtgtgaactctaggacatgtgccatgataaactgtcagtacagctgtgaagacacagaagaaggg

SEQ ID NO: 732209 - DNA, 120 bp, Artificial Sequence
  ENSG00000198759_6 (sequence is synthesized)
ccacagtgcctgtgtccatcctcaggactccgcctggccccaaatggaagagactgtctagatattgatgaatgtgcctctggtaaagtcatctgtccctacaatcgaagatgtgtgaac

SEQ ID NO: 732210 - DNA, 120 bp, Artificial Sequence
  ENSG00000198759_7 (sequence is synthesized)
acatttggaagctactactgcaaatgtcacattggtttcgaactgcaatatatcagtggacgatatgactgtatagatataaatgaatgtactatggatagccatacgtgcagccaccat

SEQ ID NO: 732211 - DNA, 120 bp, Artificial Sequence
  ENSG00000198759_8 (sequence is synthesized)
gccaattgcttcaatacccaagggtccttcaagtgtaaatgcaagcagggatataaaggcaatggacttcggtgttctgctatccctgaaaattctgtgaaggaagtcctcagagcacct

SEQ ID NO: 732212 - DNA, 120 bp, Artificial Sequence
  ENSG00000198759_9 (sequence is synthesized)
ggtaccatcaaagacagaatcaagaagttgcttgctcacaaaaacagcatgaaaaagaaggcaaaaattaaaaatgttaccccagaacccaccaggactcctacccctaaggtgaacttg

SEQ ID NO: 732213 - DNA, 120 bp, Artificial Sequence
  ENSG00000198759_10 (sequence is synthesized)
cccttcaactatgaagagatagtttccagaggcgggaactctcatggaggtaaaaaagggaatgaagagaaaatgaaagaggggcttgaggatgagaaaagagaagagaaagccctgaag

SEQ ID NO: 732214 - DNA, 120 bp, Artificial Sequence
  ENSG00000198759_11 (sequence is synthesized)
aatgacatagaggagcgaagcctgcgaggagatgtgtttttccctaaggtgaatgaagcaggtgaattcggcctgattctggtccaaaggaaagcgctaacttccaaactggaacataaa

SEQ ID NO: 732215 - DNA, 120 bp, Artificial Sequence
  ENSG00000198759_12 (sequence is synthesized)
gatttaaatatctcggttgactgcagcttcaatcatgggatctgtgactggaaacaggatagagaagatgattttgactggaatcctgctgatcgagataatgctattggcttctatatg

SEQ ID NO: 732216 - DNA, 120 bp, Artificial Sequence
  ENSG00000198759_13 (sequence is synthesized)
gcagttccggccttggcaggtcacaagaaagacattggccgattgaaacttctcctacctgacctgcaaccccaaagcaacttctgtttgctctttgattaccggctggccggagacaaa

SEQ ID NO: 732217 - DNA, 120 bp, Artificial Sequence
  ENSG00000198759_14 (sequence is synthesized)
gtcgggaaacttcgagtgtttgtgaaaaacagtaacaatgccctggcatgggagaagaccacgagtgaggatgaaaagtggaagacagggaaaattcagttgtatcaaggaactgatgct

SEQ ID NO: 732218 - DNA, 120 bp, Artificial Sequence
  ENSG00000198759_15 (sequence is synthesized)
accaaaagcatcatttttgaagcagaacgtggcaagggcaaaaccggcgaaatcgcagtggatggcgtcttgcttgtttcaggcttatgtccagatagccttttatctgtggatgactga

SEQ ID NO: 732219 - DNA, 120 bp, Artificial Sequence
  ENSG00000198759_16 (sequence is synthesized)
atgttactatctttatatttgactttgtatgtcagttccctggtttttttgatattgcatcataggacctctggcattttagaattactagctgaaaaattgtaatgtaccaacagaaat

SEQ ID NO: 732220 - DNA, 120 bp, Artificial Sequence
  ENSG00000198759_17 (sequence is synthesized)
attattgtaagatgcctttcttgtataagatatgccaatatttgctttaaatatcatatcactgtatcttctcagtcatttctgaatctttccacattatattataaaatatggaaatgt

SEQ ID NO: 732221 - DNA, 120 bp, Artificial Sequence
  ENSG00000198759_18 (sequence is synthesized)
cagtttatctcccctcctcagtatatctgatttgtataagtaagttgatgagcttctctctacaacatttctagaaaatagaaaaaaaagcacagagaaatgtttaactgtttgactctt

SEQ ID NO: 732222 - DNA, 120 bp, Artificial Sequence
  ENSG00000198759_19 (sequence is synthesized)
atgatacttcttggaaactatgacatcaaagatagacttttgcctaagtggcttagctgggtctttcatagccaaacttgtatatttaaattctttgtaataataatatccaaatcatca

SEQ ID NO: 732223 - DNA, 120 bp, Artificial Sequence
  ENSG00000198759_20 (sequence is synthesized)
agcagatttaaatatctcggttgactgcagcttcaatcatgggatctgtgactggaaacaggatagagaagatgattttgactggaatcctgctgatcgagataatgagctatatcatat

SEQ ID NO: 732224 - DNA, 120 bp, Artificial Sequence
  ENSG00000198759_21 (sequence is synthesized)
agcccataggttattccaggacctccacagctgatataaggttatgttaagtcttaagttgagtcttctgtccaagggaagttccctatttacaaacactcaattcacaaataaccccag

SEQ ID NO: 732225 - DNA, 120 bp, Artificial Sequence
  ENSG00000198759_22 (sequence is synthesized)
ggttctcagcttctgcatcattcaaatcatacccctgctcctcctgcacctccattggatttctagctattggcttctatatggcagttccggccttggcaggtcacaagaaagacattg

SEQ ID NO: 732226 - DNA, 120 bp, Artificial Sequence
  ENSG00000198763_0 (sequence is synthesized)
attaatcccctggcccaacccgtcatctactctaccatctttgcaggcacactcatcacagcgctaagctcgcactgattttttacctgagtaggcctagaaataaacatgctagctttt

SEQ ID NO: 732227 - DNA, 120 bp, Artificial Sequence
  ENSG00000198763_1 (sequence is synthesized)
attccagttctaaccaaaaaaataaaccctcgttccacagaagctgccatcaagtatttcctcacgcaagcaaccgcatccataatccttctaatagctatcctcttcaacaatatactc

SEQ ID NO: 732228 - DNA, 120 bp, Artificial Sequence
  ENSG00000198763_2 (sequence is synthesized)
tccggacaatgaaccataaccaatactaccaatcaatactcatcattaataatcataatagctatagcaataaaactaggaatagccccctttcacttctgagtcccagaggttacccaa

SEQ ID NO: 732229 - DNA, 120 bp, Artificial Sequence
  ENSG00000198763_3 (sequence is synthesized)
ggcacccctctgacatccggcctgcttcttctcacatgacaaaaactagcccccatctcaatcatataccaaatctctccctcactaaacgtaagccttctcctcactctctcaatctta

SEQ ID NO: 732230 - DNA, 120 bp, Artificial Sequence
  ENSG00000198763_4 (sequence is synthesized)
gatgaataatagcagttctaccgtacaaccctaacataaccattcttaatttaactatttatattatcctaactactaccgcattcctactactcaacttaaactccagcaccacgaccc

SEQ ID NO: 732231 - DNA, 120 bp, Artificial Sequence
  ENSG00000198763_5 (sequence is synthesized)
tactactatctcgcacctgaaacaagctaacatgactaacacccttaattccatccaccctcctctccctaggaggcctgcccccgctaaccggctttttgcccaaatgggccattatcg

SEQ ID NO: 732232 - DNA, 120 bp, Artificial Sequence
  ENSG00000198763_6 (sequence is synthesized)
aagaattcacaaaaaacaatagcctcatcatccccaccatcatagccaccatcaccctccttaacctctacttctacctacgcctaatctactccacctcaatcacactactccccatat

SEQ ID NO: 732233 - DNA, 120 bp, Artificial Sequence
  ENSG00000198763_7 (sequence is synthesized)
ctaacaacgtaaaaataaaatgacagtttgaacatacaaaacccaccccattcctccccacactcatcgcccttaccacgctactcctacctatctccccttttatactaataatcttat

SEQ ID NO: 732234 - DNA, 120 bp, Artificial Sequence
  ENSG00000198765_0 (sequence is synthesized)
caggaacttaagacagttcctcctggcgatgtgatggaatttaatgggacaggagaagggaacgggctttcttttcaggccagcgtggcagcgggcggtagggcgaaagggagaaggaaa

SEQ ID NO: 732235 - DNA, 120 bp, Artificial Sequence
  ENSG00000198765_1 (sequence is synthesized)
cgagggtttattccgttgcccactccgcgatatttacaaccgtaacagagaaaatggaaaagcaaaagccctttgcattgttcgtaccaccgagatcaagcagcagtcaggtgtctgcgg

SEQ ID NO: 732236 - DNA, 120 bp, Artificial Sequence
  ENSG00000198765_2 (sequence is synthesized)
tgaaacctcagaccctgggaggcgattccactttcttcaagagtttcaacaaatgtactgaagatgattttgagtttccatttgcaaagactaatctctccaaaaatggggaaaacattg

SEQ ID NO: 732237 - DNA, 120 bp, Artificial Sequence
  ENSG00000198765_3 (sequence is synthesized)
attcagatcctgctttacaaaaagttaatttcttgcccgtgcttgagcaggttggtaattctgactgtcactatcaggaaggactaaaagactctgatttggagaattcagagggattga

SEQ ID NO: 732238 - DNA, 120 bp, Artificial Sequence
  ENSG00000198765_4 (sequence is synthesized)
gcagagtgtattcaaaactgtataaggaggctgaaaagataaaaaaatggaaagtaagtacagaagctgaactgagacagaaagaaagtaagttgcaagaaaacagaaagataattgaag

SEQ ID NO: 732239 - DNA, 120 bp, Artificial Sequence
  ENSG00000198765_5 (sequence is synthesized)
cacagcgaaaagccattcaggaactgcaatttggaaatgaaaaagtaagtttgaaattagaagaaggaatacaagaaaataaagatttaataaaagagaataatgccacaaggcatttat

SEQ ID NO: 732240 - DNA, 120 bp, Artificial Sequence
  ENSG00000198765_6 (sequence is synthesized)
gtaatctactcaaagaaacctgtgctagatctgcagaaaagacaaagaaatatgaatatgaacgggaagaaaccaggcaagtttatatggatctaaataataacattgagaaaatgataa

SEQ ID NO: 732241 - DNA, 120 bp, Artificial Sequence
  ENSG00000198765_7 (sequence is synthesized)
cagcttttgaggaacttcgtgtgcaagctgagaattccagactggaaatgcattttaagttaaaggaagattatgaaaaaatccaacaccttgaacaagaatacaagaaggaaataaatg

SEQ ID NO: 732242 - DNA, 120 bp, Artificial Sequence
  ENSG00000198765_8 (sequence is synthesized)
acaaggaaaagcaggtatcactactattgatccaaatcactgagaaagaaaataaaatgaaagatttaacatttctgctagaggaatccagagataaagttaatcaattagaggaaaaga

SEQ ID NO: 732243 - DNA, 120 bp, Artificial Sequence
  ENSG00000198765_9 (sequence is synthesized)
caaaattacagagtgaaaacttaaaacaatcaattgagaaacagcatcatttgactaaagaactagaagatattaaagtgtcattacaaagaagtgtgagtactcaaaaggctttagagg

SEQ ID NO: 732244 - DNA, 120 bp, Artificial Sequence
  ENSG00000198765_10 (sequence is synthesized)
aagatttacagatagcaacaaaaacaatttgtcagctaactgaagaaaaagaaactcaaatggaagaatctaataaagctagagctgctcattcgtttgtggttactgaatttgaaacta

SEQ ID NO: 732245 - DNA, 120 bp, Artificial Sequence
  ENSG00000198765_11 (sequence is synthesized)
ctgtctgcagcttggaagaattattgagaacagaacagcaaagattggaaaaaaatgaagatcaattgaaaatacttaccatggagcttcaaaagaaatcaagtgagctggaagagatga

SEQ ID NO: 732246 - DNA, 120 bp, Artificial Sequence
  ENSG00000198765_12 (sequence is synthesized)
ctaagcttacaaataacaaagaagtagaacttgaagaattgaaaaaagtcttgggagaaaaggaaacacttttatatgaaaataaacaatttgagaagattgctgaagaattaaaaggaa

SEQ ID NO: 732247 - DNA, 120 bp, Artificial Sequence
  ENSG00000198765_13 (sequence is synthesized)
cagaacaagaactaattggtcttctccaagccagagagaaagaagtacatgatttggaaatacagttaactgccattaccacaagtgaacagtattattcaaaagaggttaaagatctaa

SEQ ID NO: 732248 - DNA, 120 bp, Artificial Sequence
  ENSG00000198765_14 (sequence is synthesized)
acaagtgatatgaccctagaactcaagaatcagcaagaagatattaataataacaaaaagcaagaagaaaggatgttgaaacaaatagaaaatcttcaagaaacagaaacccaattaaga

SEQ ID NO: 732249 - DNA, 120 bp, Artificial Sequence
  ENSG00000198765_15 (sequence is synthesized)
aatgaactagaatatgtgagagaagagctaaaacagaaaagagatgaagttaaatgtaaattggacaagagtgaagaaaattgtaacaatttaaggaaacaagttgaaaataaaaacaag

SEQ ID NO: 732250 - DNA, 120 bp, Artificial Sequence
  ENSG00000198765_16 (sequence is synthesized)
tatattgaagaacttcagcaggagaataaggccttgaaaaaaaaaggtacagcagaaagcaagcaactgaatgtttatgagataaaggtcaataaattagagttagaactagaaagtgcc

SEQ ID NO: 732251 - DNA, 120 bp, Artificial Sequence
  ENSG00000198765_17 (sequence is synthesized)
aaacagaaatttggagaaatcacagacacctatcagaaagaaattgaggacaaaaagatatcagaagaaaatcttttggaagaggttgagaaagcaaaagtaatagctgatgaagcagta

SEQ ID NO: 732252 - DNA, 120 bp, Artificial Sequence
  ENSG00000198765_18 (sequence is synthesized)
aaattacagaaagaaattgataagcgatgtcaacataaaatagctgaaatggtagcacttatggaaaaacataagcaccaatatgataagatcattgaagaaagagactcagaattagga

SEQ ID NO: 732253 - DNA, 120 bp, Artificial Sequence
  ENSG00000198765_19 (sequence is synthesized)
ctttataagagcaaagaacaagaacagtcatcactgagagcatctttggagattgaactatccaatctcaaagctgaacttttgtctgttaagaagcaacttgaaatagaaagagaagag

SEQ ID NO: 732254 - DNA, 120 bp, Artificial Sequence
  ENSG00000198765_20 (sequence is synthesized)
aaggaaaaactcaaaagagaggcaaaagaaaacacagctactcttaaagaaaaaaaagacaagaaaacacaaacatttttattggaaacacctgaaatttattggaaattggattctaaa

SEQ ID NO: 732255 - DNA, 120 bp, Artificial Sequence
  ENSG00000198765_21 (sequence is synthesized)
gcagttccttcacaaactgtatctcgaaatttcacatcagttgatcatggcatatccaaagataaaagagactatctgtggacatctgccaaaaatactttatctacaccattgccaaag

SEQ ID NO: 732256 - DNA, 120 bp, Artificial Sequence
  ENSG00000198765_22 (sequence is synthesized)
gcatatacagtgaagacaccaacaaaaccaaaactacagcaaagagaaaacttgaatatacccattgaagaaagtaaaaaaaagagaaaaatggcctttgaatttgatattaattcagat

SEQ ID NO: 732257 - DNA, 120 bp, Artificial Sequence
  ENSG00000198765_23 (sequence is synthesized)
agttcagaaactactgatcttttgagcatggtttcagaagaagagacattgaaaacactgtataggaacaataatccaccagcttctcatctttgtgtcaaaacaccaaaaaaggcccct

SEQ ID NO: 732258 - DNA, 120 bp, Artificial Sequence
  ENSG00000198765_24 (sequence is synthesized)
tcatctctaacaacccctggatctacactgaagtttggagctataagaaaaatgcgggaggaccgttgggctgtaattgctaaaatggatagaaaaaaaaaactaaaagaagctgaaaag

SEQ ID NO: 732259 - DNA, 120 bp, Artificial Sequence
  ENSG00000198765_25 (sequence is synthesized)
ttatttgtttaatttcagagaatcagtgtagttaaggagcctaataacgtgaaacttatagttaatattttgttcttatttgccagagccaaattttatctggaagttgagacttaaaaa

SEQ ID NO: 732260 - DNA, 120 bp, Artificial Sequence
  ENSG00000198765_26 (sequence is synthesized)
atacttgcatgaatgatttgtgtttctttatatttttagcctaaatgttaactacatattgtctggaaacctgtcattgtattcagataattagatgattatatattgttgttacttttt

SEQ ID NO: 732261 - DNA, 120 bp, Artificial Sequence
  ENSG00000198765_27 (sequence is synthesized)
cttgtattcatgaaaactgtttttactaagttttcaaatttgtaaagttagcctttgaatgctaagaatgcattattgagggtcattctttattctttactattaaaatattttggatgc

SEQ ID NO: 732262 - DNA, 120 bp, Artificial Sequence
  ENSG00000198765_28 (sequence is synthesized)
ggggcccacgcgctccgggccgctcaggctgagcgatttcccgccttttctgaggttctgaggcgggagccattggttctttctgttgccctcatagaccgtatgtagcagttcgcgtgg

SEQ ID NO: 732263 - DNA, 120 bp, Artificial Sequence
  ENSG00000198765_29 (sequence is synthesized)
caaagaaacctgtgctagatctgcagaaaagacaaagaaattgcctgctatgtcatgaaatcttctagatgctgatgaaaaacagcagtgaacaaagtctctactcttacaagagtgtat

SEQ ID NO: 732264 - DNA, 120 bp, Artificial Sequence
  ENSG00000198765_30 (sequence is synthesized)
gttccagggctgtgtctactgaattgtctgtcatcatgtttagtctttgaatttacttaatattgactaattttctctttttaaagaattttagccagggggaagctcatagttctttcc

SEQ ID NO: 732265 - DNA, 120 bp, Artificial Sequence
  ENSG00000198765_31 (sequence is synthesized)
acagctccatttgggcagtttgattactttcactatgtgtatggtttggcattcctgatttgttaatgtttataaatagggagaaaaggaaacacttttatatgaaaataaacaatttga

SEQ ID NO: 732266 - DNA, 120 bp, Artificial Sequence
  ENSG00000198765_32 (sequence is synthesized)
caagagtgaagaaaatgtatgttatatttaataatggatcgtatcacaaaatttcaaattataaaagcaacaccatatgtctaaactaaaataaagggaagtatactgttgtataaataa

SEQ ID NO: 732267 - DNA, 120 bp, Artificial Sequence
  ENSG00000198768_0 (sequence is synthesized)
acactttgcctagatgcgtttgggtgtggtggggagcgggtgacggcctcatttacagacagaggccggggctggcttctaggcgaccgggttggccactttcactgcgcttctgggttt

SEQ ID NO: 732268 - DNA, 120 bp, Artificial Sequence
  ENSG00000198768_1 (sequence is synthesized)
gctgggatccaagttgacgcgacttttccaggagtagctggaagacctgaatagaaacttcaggggtcccaggactggcggggcttagaggaactccccgccccgcttgcccttccaggg

SEQ ID NO: 732269 - DNA, 120 bp, Artificial Sequence
  ENSG00000198768_2 (sequence is synthesized)
aacggcctggctaggggtgcgctttgacgcaaggagcgcatcgctctgccttggccgggaccagagcttgggggaggcctccttgcccactgcgaagactttggggaaggcgacggccag

SEQ ID NO: 732270 - DNA, 120 bp, Artificial Sequence
  ENSG00000198768_3 (sequence is synthesized)
gggacggacatctgggggagggctgggggtctgaatggcaggagctgcaccagggggctgtgcgcgctgcgcgggtgtgcgcgcctcgccgggggctgtctccacctcttctggcaagtt

SEQ ID NO: 732271 - DNA, 120 bp, Artificial Sequence
  ENSG00000198768_4 (sequence is synthesized)
ggacctatgagtgcgcagctccgcttacaactatcaacagccgggaaggctgagcgcgtgtgagcgccgaggggggcgcaggaccctcgcaacttcttcgcaggactccagcctggccgc

SEQ ID NO: 732272 - DNA, 120 bp, Artificial Sequence
  ENSG00000198768_5 (sequence is synthesized)
gcagccgtccgagagccctgcgcccgcgcctccccttgcgcaccgtggcagcgcccggcgggcggtcctgccagccccgacgggatgcccgcagccatgctcccctacgcttgcgtcctg

SEQ ID NO: 732273 - DNA, 120 bp, Artificial Sequence
  ENSG00000198768_6 (sequence is synthesized)
gcgtcctggtgcttttgggagcccacactgcaccggcggctggggaggccgggggcagctgcctgcgctgggaaccccactgccagcagcccttgccagatagagtgcccagcactgcga

SEQ ID NO: 732274 - DNA, 120 bp, Artificial Sequence
  ENSG00000198768_7 (sequence is synthesized)
tcctgcctccacgccttaatggaccttggatctccacaggctgcgaggtgcgcccaggaccggagttcctgacccgcgcctacaccttctaccccagccggctctttcgagcccaccagt

SEQ ID NO: 732275 - DNA, 120 bp, Artificial Sequence
  ENSG00000198768_8 (sequence is synthesized)
tctactacgaggaccccttctgcggggaacctgcccactcgctgctcgtcaagggcaaagtccgcctgcgccgggcctcctgggtcacccggggagccaccgaggccgactaccacctgc

SEQ ID NO: 732276 - DNA, 120 bp, Artificial Sequence
  ENSG00000198768_9 (sequence is synthesized)
ctgcacaaggtgggcatcgtcttccacagccgccgggccctggtcgacgtcaccgggcgcctcaaccagacccgcgccggccgggactgcgcgcggcggctgcctccggcccgggcctgg

SEQ ID NO: 732277 - DNA, 120 bp, Artificial Sequence
  ENSG00000198768_10 (sequence is synthesized)
ctggggcgctgtacgagctgcggagcgcccgggctcagggggactgcctggaggcgctgggcctcaccatgcacgagctcagcctggtccgcgtgcagcgccgcctgcagccgcagcccc

SEQ ID NO: 732278 - DNA, 120 bp, Artificial Sequence
  ENSG00000198768_11 (sequence is synthesized)
gggcgtcgccccggctggtggaggagctgtacctgggggacatccacaccgacccggcggagaggcggcactaccggcccacgggctaccagcgcccgctgcagagcgcactgcaccacg

SEQ ID NO: 732279 - DNA, 120 bp, Artificial Sequence
  ENSG00000198768_12 (sequence is synthesized)
tgcagccgtgcccagcctgtggcctcattgcccgctccgatgtgcaccacccgcccgtgctgccgccccctctggccctgcccctgcacctgggcggctggtgggtcagctcggggtgcg

SEQ ID NO: 732280 - DNA, 120 bp, Artificial Sequence
  ENSG00000198768_13 (sequence is synthesized)
aggtgcgcccagcagtcctgttcctcacccggctcttcactttccacgggcacagccgctcctgggaagggtattaccaccacttctcagacccagcctgccggcagcccaccttcaccg

SEQ ID NO: 732281 - DNA, 120 bp, Artificial Sequence
  ENSG00000198768_14 (sequence is synthesized)
tgtatgccgccggccgctacaccaggggcacgccatccaccagggtccgcggcggcaccgagctggtgtttgaggtcacacgggcccatgtgacccccatggaccaggtcaccacggcca

SEQ ID NO: 732282 - DNA, 120 bp, Artificial Sequence
  ENSG00000198768_15 (sequence is synthesized)
tgctcaacttctctgagccaagcagctgtgggggtgcgggggcctggtccatgggcactgagcgggatgtcacagccaccaacggctgcctaccgctgggcatccggctcccgcatgtgg

SEQ ID NO: 732283 - DNA, 120 bp, Artificial Sequence
  ENSG00000198768_16 (sequence is synthesized)
ctcttcatcggacaaaggcccaccgatggctcaagtcccgataccccagagaaacgtcccacctcctaccaagcacccctggtgctctgtcatggggaggcccccgacttctccaggcca

SEQ ID NO: 732284 - DNA, 120 bp, Artificial Sequence
  ENSG00000198768_17 (sequence is synthesized)
ccgcagcacaggccatcgctgcagaagcaccccagcacagggggtcttcacatagcccccttcccacttctgcccctagttctagggctggccttcctccactggctatgacattggact

SEQ ID NO: 732285 - DNA, 120 bp, Artificial Sequence
  ENSG00000198768_18 (sequence is synthesized)
tgacatcaggatggcggctctggacacccattcaacccttcagactccctcctggcagctgtagggaaggaaccattctcctctgctctgtcatggatggatgcacagccccactgcttc

SEQ ID NO: 732286 - DNA, 120 bp, Artificial Sequence
  ENSG00000198768_19 (sequence is synthesized)
caaactctgcctgtgtcccatgtggctcaggacatgagcttaacccctgcaaagcctataccacatcccacagcccgggtccccagtcaagcacttggatgcggcagtgatgttcatcgc

SEQ ID NO: 732287 - DNA, 120 bp, Artificial Sequence
  ENSG00000198768_20 (sequence is synthesized)
tacgtgagtttctaaagatcactcccaatttttctactttcctcatccttggcagctcgccaacaggtgcagtcagggggccacacggaacacccccatcccatgttccccccagttctt

SEQ ID NO: 732288 - DNA, 120 bp, Artificial Sequence
  ENSG00000198768_21 (sequence is synthesized)
cccatcctgacccttgggattccaagatgggagcaagaggagatcctgaggctctgcctagggacgaggcctacagttctgccatgtctgtaggttgttgtttaaagattattaattcga

SEQ ID NO: 732289 - DNA, 120 bp, Artificial Sequence
  ENSG00000198768_22 (sequence is synthesized)
atttagcaatacgatctctaagtggtgccatgaattaaagatgccacttcgggctttcagtgcttctcagcttttgggcaaagggcttgtgtcttcaggggcagctcagctttcctgagt

SEQ ID NO: 732290 - DNA, 120 bp, Artificial Sequence
  ENSG00000198768_23 (sequence is synthesized)
cctgactgctggcattcgtctgcatttgcctgtgcttctgcgagtcggacctcaagctgccaacactgcatgtggataaatccagttttcccgggccagcatgcaaaatgaagaggactc

SEQ ID NO: 732291 - DNA, 120 bp, Artificial Sequence
  ENSG00000198768_24 (sequence is synthesized)
catctaagctgagaagcatggcctccccagagcagcctgcggcctccaagccttcctggcccaggcaaatgccagtgtgcaccaggctggctgctgggggcaggtctttggaggggagca

SEQ ID NO: 732292 - DNA, 120 bp, Artificial Sequence
  ENSG00000198768_25 (sequence is synthesized)
gcatttccagccttctgaacatagttaatagtaatgacagccgtaacactaacgcgctctgcaattcgccctgcccagccatcctcggttgccaagattgcctgtgcctgcctgacaaag

SEQ ID NO: 732293 - DNA, 120 bp, Artificial Sequence
  ENSG00000198768_26 (sequence is synthesized)
gaagagaatctccgaatgtgtatctttgggcccaccctagggagaggtcggggtcaccaggctacatggcgacatctaggcagctccgccttgcccagcctccttgccataatcctaata

SEQ ID NO: 732294 - DNA, 120 bp, Artificial Sequence
  ENSG00000198768_27 (sequence is synthesized)
tattggtgtcctctgctcagaggggactgtcatcatggtgggaacaggctgtgcctccccagggactctgcccatgttcccagggcctcatctgtacactgtgaaattaactggcatcct

SEQ ID NO: 732295 - DNA, 120 bp, Artificial Sequence
  ENSG00000198768_28 (sequence is synthesized)
ggtgggcccaagggttttcaggactgggggccaatgactcaccccctccttcctcctcctgatccctatctctagctcttatcacagattttgaacaattgtctgtgaggttaatgatgg

SEQ ID NO: 732296 - DNA, 120 bp, Artificial Sequence
  ENSG00000198768_29 (sequence is synthesized)
tttcagagggaagcccttttcctccctgagactgtgtggggttcagtcagcctgctgaaattgcttccacttattacccatccttcctcttaaaaaaaaaaaaagcccaccaagttagta

SEQ ID NO: 732297 - DNA, 120 bp, Artificial Sequence
  ENSG00000198768_30 (sequence is synthesized)
ttctctgtagctctcagacagctacaagtgttcctggcatatttaccaaagtacaagaaatcattacattatttacggtctcagactacatcagggttgggggagctcctggtggggatg

SEQ ID NO: 732298 - DNA, 120 bp, Artificial Sequence
  ENSG00000198768_31 (sequence is synthesized)
gcagtgggtgtcgatgatatgtccacggctgagcaggtcttgtatccgaagcttgaagtaaccatgccaccatttatcatcaaatttgaaccttttaataaaattaaacagcctgaaaaa

SEQ ID NO: 732299 - DNA, 120 bp, Artificial Sequence
  ENSG00000198768_32 (sequence is synthesized)
attccagtttgatgaggggtgaggggtagagagaggagagtctcagggggtggaatgaggaagataaaagagggtggtgtgacagccctgaggcccaccttacatggggcattcgggaaa

SEQ ID NO: 732300 - DNA, 80 bp, Artificial Sequence
  ENSG00000198771_0 (sequence is synthesized)
cgagcgcagccgggcgcgcgccaccgcccactcgccctgtgcccgccgcagcccgaaactggccacggccgggagcggag

SEQ ID NO: 732301 - DNA, 120 bp, Artificial Sequence
  ENSG00000198771_1 (sequence is synthesized)
gggacagcggggatcgtgagctccggcccgggcgagcgggtgcgtctgccgcagagtcggcacctgaaggacatggaggaaagaccggcagagaccaatgccaatgtggacaactcggcg

SEQ ID NO: 732302 - DNA, 120 bp, Artificial Sequence
  ENSG00000198771_2 (sequence is synthesized)
tccccctcggtggcccagctggccgggcggtttagggagcaggcggctgcagccaaggagacaccagccagtaaaccaacccgaaggaaaccgccctgttccctccccctgttccccccc

SEQ ID NO: 732303 - DNA, 120 bp, Artificial Sequence
  ENSG00000198771_3 (sequence is synthesized)
aaggtagacctgggccagaatggtgaggagaaatcaccacccaatgcgagccaccctcctaaattcaaggtcaagagctcgcctctgattgagaagcttcaggccaatttaacctttgac

SEQ ID NO: 732304 - DNA, 120 bp, Artificial Sequence
  ENSG00000198771_4 (sequence is synthesized)
ccagctgctctactgcctggggcctcacccaagagtcctggactcaaggctatggtgtcgccatttcacagcccaccttctacccccagcagccctggtgtgcgatctaggcccagcgag

SEQ ID NO: 732305 - DNA, 120 bp, Artificial Sequence
  ENSG00000198771_5 (sequence is synthesized)
gcagaggaggtgcctgtcagcttcgaccagccccctgaaggcagtcatctgccctgttacaacaaggtgcggacgaggggctcaataaaaaggcgccctccctccaggcgattccgaagg

SEQ ID NO: 732306 - DNA, 120 bp, Artificial Sequence
  ENSG00000198771_6 (sequence is synthesized)
tcacagtcagactgtggagaacttggagatttcagggcggtggagtcatctcagcagaacggtgctaaggaagaggatggggatgaagtgttgccatccaagagcaaggccccaggatcc

SEQ ID NO: 732307 - DNA, 120 bp, Artificial Sequence
  ENSG00000198771_7 (sequence is synthesized)
cctttgtccagtgagggagcagcgggagagggagtgagaaccctgggacctgctgaaaagcctcctctgaggaggtcacccagcaggacagagaagcaggaggaggacagggccacagag

SEQ ID NO: 732308 - DNA, 120 bp, Artificial Sequence
  ENSG00000198771_8 (sequence is synthesized)
gaagccaagaacggtgaaaaggccaggcggagttcagaggaggtggacggccagcacccggcccaagaggaggtcccggaatcgccccagacctctggcccagaggcagaaaataggtgt

SEQ ID NO: 732309 - DNA, 120 bp, Artificial Sequence
  ENSG00000198771_9 (sequence is synthesized)
gggagccccagggaggaaaagccagctggagaggaagcagagatggaaaaggctacagaggtgaagggggagagggtgcaaaatgaagaggtgggacctgaacatgacagccaagaaaca

SEQ ID NO: 732310 - DNA, 120 bp, Artificial Sequence
  ENSG00000198771_10 (sequence is synthesized)
aagaagctggaggagggagctgcagtgaaggagaccccccacagtccccctggaggagtgaagggcggagatgtccccaagcaggaaaaaggcaaggaaaaacaacaggagggggcagtg

SEQ ID NO: 732311 - DNA, 120 bp, Artificial Sequence
  ENSG00000198771_11 (sequence is synthesized)
ctcgagccaggctgcagcccccagaccggccctgcccagctggagaccagcagtgaggtccagagcgagccagcagtccccaagccggaggatgacactcctgtccaggacactaaaatg

SEQ ID NO: 732312 - DNA, 120 bp, Artificial Sequence
  ENSG00000198771_12 (sequence is synthesized)
tgaagaacagctcattgtgccccagtgatgaagttgctggacacatctctttgcaggtagcagcaacagttgtagcagcagcagacgaagccattgcagaggcagaatatgctgagtgtc

SEQ ID NO: 732313 - DNA, 120 bp, Artificial Sequence
  ENSG00000198771_13 (sequence is synthesized)
tggagtcagcctgaagacacagggtggattatttcctggcctccacaccaaacgttcccttgcagatggagactgaatctgagggcagcagacttttatcagcttgagtttatgtcattt

SEQ ID NO: 732314 - DNA, 120 bp, Artificial Sequence
  ENSG00000198771_14 (sequence is synthesized)
gatggacttggttcaacaacaagaacttacttaaaacaatgtactgtggtgatgagtcccaggggcactggtcagcctgtggagccctggatgctatccacacccacctatccctgcagc

SEQ ID NO: 732315 - DNA, 120 bp, Artificial Sequence
  ENSG00000198771_15 (sequence is synthesized)
taatttagctgatctctaatttaactgagctctaatttagctgatcagattttgcttgggtaaagttcctttttaatgttctaaagtgtttacggttctcaaatatcagttaaaaactaa

SEQ ID NO: 732316 - DNA, 120 bp, Artificial Sequence
  ENSG00000198771_16 (sequence is synthesized)
ttttaggtggccataaacataaaatagaaaccctgtaagttacagaagaccctaaattgtatcaaaaccctagagacaacttttcaatttgatccaaatttgaactggccaaccagtctt

SEQ ID NO: 732317 - DNA, 120 bp, Artificial Sequence
  ENSG00000198771_17 (sequence is synthesized)
taaaacactggactagaagagataatgattgaaacatttaaaaaaaaaaagtgctccattcgcaggagcttttcctgtcctgtggttttccagttggtgaccaccatgggaggtcgctgg

SEQ ID NO: 732318 - DNA, 120 bp, Artificial Sequence
  ENSG00000198771_18 (sequence is synthesized)
ctcggctcactcccttctcccacccttgagaatgtggagaactcccatggagaggcagaatggcaggaggtttcatgtcccgcgttgcatctcctcctgaaagaaaagcagtgatacctg

SEQ ID NO: 732319 - DNA, 120 bp, Artificial Sequence
  ENSG00000198771_19 (sequence is synthesized)
aataatgctggctctccgattgatcctgtgaggatgaatttgcatttccagaatccttgagcatggattagatgtttcctgggaggtgccttgagtaccattatgtgcaagctacataat

SEQ ID NO: 732320 - DNA, 120 bp, Artificial Sequence
  ENSG00000198771_20 (sequence is synthesized)
taaaacatttttcttagtttccctgggaagcttttcttgactcacagcccaggttcttctgcccaacacaaaaggagtgagttggggtctttagtctcttcttattgggtagctcttgct

SEQ ID NO: 732321 - DNA, 120 bp, Artificial Sequence
  ENSG00000198771_21 (sequence is synthesized)
ttaatattctgtttggtgagtgtaagggattctgcaagggacagggggcctgactacccagtctttgacttgtatcctctcccctcttcatacactcctgctgaaaaatgttaatccaaa

SEQ ID NO: 732322 - DNA, 120 bp, Artificial Sequence
  ENSG00000198771_22 (sequence is synthesized)
ttttaatgtctcagtgtgctgatttggtagttggaagaattattcttctggaggtctgttagactacatcctacactgacttcagaaaacagtctgtcagacaaaaaggccttatgtcac

SEQ ID NO: 732323 - DNA, 120 bp, Artificial Sequence
  ENSG00000198771_23 (sequence is synthesized)
cactggtacctcagtttcctcatcccatttacagtttttctaactccagggtagtgtttagtgttaatatttgggatatattttttttcaaaactgtttttaagtagtttgtaatttgta

SEQ ID NO: 732324 - DNA, 120 bp, Artificial Sequence
  ENSG00000198771_24 (sequence is synthesized)
acaaacttgtaacctggttgggactgatattgtcatagctatgataaactttggatattagcagaatttgggagatgtgtgtgtcaattattttgagatctataaacttgtctgtctatc

SEQ ID NO: 732325 - DNA, 120 bp, Artificial Sequence
  ENSG00000198771_25 (sequence is synthesized)
tatctagctggctagcttgctatcaatctagctaccatccatttattgacagagaagtctacccctaaacaatacttggttttatttatatatgtctttgggttgtttatacacatgcac

SEQ ID NO: 732326 - DNA, 120 bp, Artificial Sequence
  ENSG00000198771_26 (sequence is synthesized)
tatctgggcaagtactttgtgaatatgtgcatgattgtgaatgtgtgatgaaaagggccactttacttgaggaaggcatggaacagaaagtatggggtttagatatgaaaaatgaaactg

SEQ ID NO: 732327 - DNA, 120 bp, Artificial Sequence
  ENSG00000198771_27 (sequence is synthesized)
catttttcttctggagggtctaaacatagtagcagacgagagaggggcagtaaaaatgacaagaatgtgacattgcggcaccatgcttgtgggcatcagaatacctttctatcccccaag

SEQ ID NO: 732328 - DNA, 120 bp, Artificial Sequence
  ENSG00000198771_28 (sequence is synthesized)
tctcctgttagtcacattatttggtgtattttgtgaaaaaaatagaggccccattcccagggcttgttcattaataaagggggctcttggcagggaactcatgaagtacagggactgatt

SEQ ID NO: 732329 - DNA, 120 bp, Artificial Sequence
  ENSG00000198771_29 (sequence is synthesized)
tttgttggtgctgcagccccactgcttaaaactctcctttctcaaagcaaccatgatcaggtgttttatttgcatggttgatactggaacttctaaatttgggattaaagaaattcatct

SEQ ID NO: 732330 - DNA, 120 bp, Artificial Sequence
  ENSG00000198771_30 (sequence is synthesized)
gtgtcttaggtagcacaaagttattaacaggccaggaagaccttgtttctttcaggcttccataatgggtttgaaagaaaacacggattcttctacagcaacagagttaaagaaatagtc

SEQ ID NO: 732331 - DNA, 120 bp, Artificial Sequence
  ENSG00000198771_31 (sequence is synthesized)
atagtcattcttccacgatctttgtagtctagcttgaatttcaaactgtgtccttccttactccagagagggagcaagaaaaaaaacctggatgctttgaagggatctgccactatttaa

SEQ ID NO: 732332 - DNA, 120 bp, Artificial Sequence
  ENSG00000198771_32 (sequence is synthesized)
aaggggattaggattctgtttcagctgcatgtggaactaggtaagcttcagtggcctcagaactccaggcccctcacggagatcaccctgaacaatgcccagtttttcatgcaggttttg

SEQ ID NO: 732333 - DNA, 120 bp, Artificial Sequence
  ENSG00000198771_33 (sequence is synthesized)
tcctatgaccagttaactacatgttcaataaataaatgtcaaagaaataaatgcgtgaaaaggcaaccagttcatcatcttatgattaggttttcttgattagggatgtgtttagtacag

SEQ ID NO: 732334 - DNA, 120 bp, Artificial Sequence
  ENSG00000198771_34 (sequence is synthesized)
ctgaatgaacaagttcacccagctgctggtgacagaaacccaactcaaactagctgatgaaaaacagaactatacagatcaatgaatctctccccctttttcagcctcatagaactgaaa

SEQ ID NO: 732335 - DNA, 120 bp, Artificial Sequence
  ENSG00000198771_35 (sequence is synthesized)
aaaacaaacctaaatacagtcacccaagtgatgtcaggaatctctcatggtattggtctctgctttccctcgtattggccatattcttttttttttcttttttaaaaacttatttaatta

SEQ ID NO: 732336 - DNA, 120 bp, Artificial Sequence
  ENSG00000198771_36 (sequence is synthesized)
tttaattagttttccttaatagttgcagccaaggctgtctcttttttctcttcttttctcttctttttttttgaatgagacagagtctcgcgctgtcactcaggctggagtgcagtggca

SEQ ID NO: 732337 - DNA, 86 bp, Artificial Sequence
  ENSG00000198771_37 (sequence is synthesized)
caacctctgcctcctgcactgcagttacttttgcaccaacctaatagctcggattacaagtatgcaccaccatgcccagctaattt

SEQ ID NO: 732338 - DNA, 79 bp, Artificial Sequence
  ENSG00000198771_38 (sequence is synthesized)
tgcctgcctcggtctcccaaagtgggattacaggcatgaaccaccacgtccagccagtcattttcttaagtaggttctt

SEQ ID NO: 732339 - DNA, 120 bp, Artificial Sequence
  ENSG00000198771_39 (sequence is synthesized)
accaccacgtccagccagtcattttcttaagtaggttcttcccagcctgcaaacccagtgaaagggcttattctttcaccattactgtggggaaaaagtcctgtagaggctttccatagg

SEQ ID NO: 732340 - DNA, 120 bp, Artificial Sequence
  ENSG00000198771_40 (sequence is synthesized)
ccctgtgtgactcacgtgtctatacctgaatcaactgttacaaccaagcagatgcagagactgcgtgccctctcctggagctaggagctaggtgagtcaatcctgcactttctctacaag

SEQ ID NO: 732341 - DNA, 120 bp, Artificial Sequence
  ENSG00000198771_41 (sequence is synthesized)
gcttgcaaaggtgagcaagaagattccccaaagtgaaatcagggtgctgttaccaaaagaagctatgctggcaggcaaaaaacaacagctgtttcccatagggcaaaacctgaaacaccc

SEQ ID NO: 732342 - DNA, 120 bp, Artificial Sequence
  ENSG00000198771_42 (sequence is synthesized)
aattactatcccattgtttgcttcaaaattaaattttgtttgaccccaactagttctagtcaagtttttgctcgatggaccacgtgaaaaaaggataaacaatgtctctatataatgcat

SEQ ID NO: 732343 - DNA, 120 bp, Artificial Sequence
  ENSG00000198771_43 (sequence is synthesized)
gatcaggtggtttatgaagatgtcaagagcactgaacaaaatccaaatgctcacataaaatgggattaggtttcataagccacccaagaaaatcagtctcattattttatgtaataatgt

SEQ ID NO: 732344 - DNA, 120 bp, Artificial Sequence
  ENSG00000198771_44 (sequence is synthesized)
attactgtgcccagagctaacctgtagctctaggggagtacaatgtgtttgtattattcttcattgtacacagtgcctcagacatagtaggtattcaataaatatttgttaaatcatgaa

SEQ ID NO: 732345 - DNA, 120 bp, Artificial Sequence
  ENSG00000198771_45 (sequence is synthesized)
ttgagtcctgccctgggagggacagtatctgtttagatttgcgtctaaatttaaaccctgatcgtcggcctccctccccgctccccaccctcccctcccctccccttcctccctccctcc

SEQ ID NO: 732346 - DNA, 120 bp, Artificial Sequence
  ENSG00000198771_46 (sequence is synthesized)
ggtgttgaggcagctggcagcagtgatgtagccgggatgatacagcaaaaatgccacttcatggagtgagcaagggaaccaggaaaggatgctgaggctttgagatgcttaaatgatgtg

SEQ ID NO: 732347 - DNA, 120 bp, Artificial Sequence
  ENSG00000198771_47 (sequence is synthesized)
caatcatggctcactgcagcctcaaccttccagggcttaagtgatcctctcacctcatcctcctgagtagctggactataggcgtgcaccaccacacccagagatgcaccaagacgctac

SEQ ID NO: 732348 - DNA, 120 bp, Artificial Sequence
  ENSG00000198771_48 (sequence is synthesized)
gagtagctggactataggcgtgcaccaccacacccagagatgcaccaagacgctaccaaatgcaaattaataagaccaatcctggctgggtgcaatggctcactcctgtaatctcagcac

SEQ ID NO: 732349 - DNA, 87 bp, Artificial Sequence
  ENSG00000198771_49 (sequence is synthesized)
cagcctggtgaataagacacaatccttgccctcaagattcatacagtctgaaggtaaagaggggacataaatgaaagaagtgattac

SEQ ID NO: 732350 - DNA, 120 bp, Artificial Sequence
  ENSG00000198771_50 (sequence is synthesized)
ctgaaggtaaagaggggacataaatgaaagaagtgattacaaaacagtgtgattggttctgaaaaggcagtgagtaaacagtcctgttgcataaataacaggacaggctagtgttgctgt

SEQ ID NO: 732351 - DNA, 120 bp, Artificial Sequence
  ENSG00000198771_51 (sequence is synthesized)
aaccatgccacaatcttagtggctgaaaacaacaaaggtttacttttcacccctgctgcaagtccattgagggttggctgggggctctgctctggctcatttcttgtcctccctctgaga

SEQ ID NO: 732352 - DNA, 120 bp, Artificial Sequence
  ENSG00000198771_52 (sequence is synthesized)
cagaatcacactccagcttgctcttgtggttccaaagactcccatttgtaaattcctccgacatgaagatgcaatgccagcccatctgctctgccaacctattctgcaagatgggaatga

SEQ ID NO: 732353 - DNA, 120 bp, Artificial Sequence
  ENSG00000198771_53 (sequence is synthesized)
aaatgacttggcaacagcagatccctgccacccccttagaattcttcagggccaaactggcaacagcctggtatctctacgaagagtgcaagggagcccacattttgactaacacctact

SEQ ID NO: 732354 - DNA, 120 bp, Artificial Sequence
  ENSG00000198771_54 (sequence is synthesized)
gtgtgccagttggtatcttaggtgacaacaacaatagctaaaatgaggggagagcttattatgtgccaggcactgtgctggggctttatatgcaatatctcatttgggctttatcacaat

SEQ ID NO: 732355 - DNA, 120 bp, Artificial Sequence
  ENSG00000198771_55 (sequence is synthesized)
tctaaaaaataagtgctattataaatgtttattttacaagtggggaaactaaggctcaataaggtcaagtgtcttgcctaagatcacacatctagtaaaaggcaaggtctggatgtgaac

SEQ ID NO: 732356 - DNA, 120 bp, Artificial Sequence
  ENSG00000198771_56 (sequence is synthesized)
ccaaactgtctaatcaaacaccatctcctagtatccccatgaccttgtagggggtgttattatcctcattttacagatgagagtctgaacagttaagtcaattgcctaggatcccacaac

SEQ ID NO: 732357 - DNA, 120 bp, Artificial Sequence
  ENSG00000198771_57 (sequence is synthesized)
agctccaaattctgtgctgtctccactatcttgctgcatgagtcctggcagctgccctgggctggacaggagtggctggatgtggcctactcccagcagctaccagaggctgccagcctc

SEQ ID NO: 732358 - DNA, 120 bp, Artificial Sequence
  ENSG00000198771_58 (sequence is synthesized)
ctgcagccacagcgcattcctgctcacgccctgaggcacacagagctggcatcctgagaccaagccaggttcctagccctagggcaaatgaaagacctcctgcagcctgagtgcacctca

SEQ ID NO: 732359 - DNA, 120 bp, Artificial Sequence
  ENSG00000198771_59 (sequence is synthesized)
acttttgtatttgaactatcatgagcactttaaaatgttttaatcacctttttgaggtaaaatatatctacaataaaattcaccccttttaagtgtatacattgatgagtgttgacaaat

SEQ ID NO: 732360 - DNA, 120 bp, Artificial Sequence
  ENSG00000198771_60 (sequence is synthesized)
gtatacagtcatatagccaccaccacgagatgtagaccatgatcaaggtatagagcatttctggctggctgttatggctcacgcctgtaatccttgtgctttgggaggctgaggctggca

SEQ ID NO: 732361 - DNA, 72 bp, Artificial Sequence
  ENSG00000198771_61 (sequence is synthesized)
tgcagtggctcgcgcctaagagttcaagaccagccggaccaacctggagaaaccttgtctctactaaaaata

SEQ ID NO: 732362 - DNA, 69 bp, Artificial Sequence
  ENSG00000198771_62 (sequence is synthesized)
ccaggcgtggtggcgcatgcctgtaatccgagctactcagaagactgaggcacgagaatctcttgaact

SEQ ID NO: 732363 - DNA, 120 bp, Artificial Sequence
  ENSG00000198774_0 (sequence is synthesized)
acaacaatcccgcagttcaaagttaagcagcagttgcacaacttccagcaactttctcagccggctactaatgagctgaaagccaggaacatccgaggagaagagaaagcttccagccct

SEQ ID NO: 732364 - DNA, 120 bp, Artificial Sequence
  ENSG00000198774_1 (sequence is synthesized)
cctcccttcaccctggaaatccagacacccccacccccaccctcagatcactttaagataatttctttattcgtttgcccgacagaccatggctccctttggaagaaacttgctaaagac

SEQ ID NO: 732365 - DNA, 120 bp, Artificial Sequence
  ENSG00000198774_2 (sequence is synthesized)
tcggcataaaaacagatctccaactaaagacatggattcagaagagaaggaaattgtggtttgggtttgccaagaagagaagcttgtctgtgggctgactaaacgcaccacctctgctga

SEQ ID NO: 732366 - DNA, 120 bp, Artificial Sequence
  ENSG00000198774_3 (sequence is synthesized)
tgtcatccaggctttgcttgaggaacatgaggctacgtttggagagaaacgatttcttctggggaagcccagtgattactgcatcatagagaagtggagaggctccgaaagggttcttcc

SEQ ID NO: 732367 - DNA, 120 bp, Artificial Sequence
  ENSG00000198774_4 (sequence is synthesized)
tccactaactagaatcctgaagctttggaaagcgtggggagatgagcagcccaatatgcaatttgttttggttaaagcagatgcttttcttccagttcctttgtggcggacagctgaagc

SEQ ID NO: 732368 - DNA, 120 bp, Artificial Sequence
  ENSG00000198774_5 (sequence is synthesized)
caaattagtgcaaaacacagaaaaattgtgggagctcagcccagcaaactacatgaagactttaccaccagataaacaaaaaagaatagtcaggaaaactttccggaaactggctaaaat

SEQ ID NO: 732369 - DNA, 120 bp, Artificial Sequence
  ENSG00000198774_6 (sequence is synthesized)
taagcaggacacagtttctcatgatcgagataatatggagacattagttcatctgatcatttcccaggaccatactattcatcagcaagtcaagagaatgaaagagctggatctggaaat

SEQ ID NO: 732370 - DNA, 120 bp, Artificial Sequence
  ENSG00000198774_7 (sequence is synthesized)
tgaaaagtgtgaagctaagttccatcttgatcgagtagaaaatgatggagaaaactatgttcaggatgcatatttaatgcccagtttcagtgaagttgagcaaaatctagacttgcagta

SEQ ID NO: 732371 - DNA, 120 bp, Artificial Sequence
  ENSG00000198774_8 (sequence is synthesized)
tgaggaaaaccagactctggaggacctgagcgaaagtgatggaattgaacagctggaagaacgactgaaatattaccgaatactcattgataagctctctgctgaaatagaaaaagaggt

SEQ ID NO: 732372 - DNA, 120 bp, Artificial Sequence
  ENSG00000198774_9 (sequence is synthesized)
aaaaagtgtttgcattgatataaatgaagatgcggaaggggaagctgcaagtgaactggaaagctctaatttagagagtgttaagtgtgatttggagaaaagcatgaaagctggtttgaa

SEQ ID NO: 732373 - DNA, 120 bp, Artificial Sequence
  ENSG00000198774_10 (sequence is synthesized)
aattcactctcatttgagtggcatccagaaagagattaaatacagtgactcattgcttcagatgaaagcaaaagaatatgaactcctggccaaggaattcaattcacttcacattagcaa

SEQ ID NO: 732374 - DNA, 120 bp, Artificial Sequence
  ENSG00000198774_11 (sequence is synthesized)
caaagatgggtgccagttaaaggaaaacagagcgaaggaatctgaggttcccagtagcaatggggagattcctccctttactcaaagagtatttagcaattacacaaatgacacagactc

SEQ ID NO: 732375 - DNA, 120 bp, Artificial Sequence
  ENSG00000198774_12 (sequence is synthesized)
ggacactggtatcagttctaaccacagtcaggactccgaaacaacagtaggagatgtggtgctgttgtcaacatagttccaatggctcctttctgacctgctttcatgttttaatgtttg

SEQ ID NO: 732376 - DNA, 120 bp, Artificial Sequence
  ENSG00000198774_13 (sequence is synthesized)
tttaatttaataggaaacctcattttaaatataacactcaaaaaaatgtaaatcatattgtagtattcaatagttaataaaaactcgagaaatgtgttgtttctgatgtgaaatttccaa

SEQ ID NO: 732377 - DNA, 120 bp, Artificial Sequence
  ENSG00000198774_14 (sequence is synthesized)
aggaactttaattattgcaagttcaagcaatgaactatttatcacgaatgcagcacaaatagcttgtcgttgtagaacacagaaataatttgatgggaatcatatgataatcttccttag

SEQ ID NO: 732378 - DNA, 120 bp, Artificial Sequence
  ENSG00000198774_15 (sequence is synthesized)
cgtctgtggaaaacgatttacataaactttaaaagcaatcctcaatattagacagtccaaatattcaaacatgaagaagtagaattaaaatgtgctgtaatatatatttttccaacactg

SEQ ID NO: 732379 - DNA, 120 bp, Artificial Sequence
  ENSG00000198774_16 (sequence is synthesized)
tataattggaatttttaaatctgtaaagtatatgggagctactgtgttgtaactgcattaattcaaagtttggttcttttaattgatccttgataatacaacgtatcatgtatatcactt

SEQ ID NO: 732380 - DNA, 120 bp, Artificial Sequence
  ENSG00000198774_17 (sequence is synthesized)
cctgaacccttctacctgttgaggcctatgaaacaggctgctgttgggacatgtataaatactggcagggaatcagacacgtatagggtacagatgaggcagggccaagtgctgcataca

SEQ ID NO: 732381 - DNA, 120 bp, Artificial Sequence
  ENSG00000198774_18 (sequence is synthesized)
aacagcaatttttataaagaagcctcaatttattaagagctatgtgtggatgtttgctatctggcaattcagatctcctgaccaaacccatgttcattcactgagtgaggtatagtgtgg

SEQ ID NO: 732382 - DNA, 120 bp, Artificial Sequence
  ENSG00000198774_19 (sequence is synthesized)
gttacagagaaaatcagtcatagtgttatttgtttatgtcctatctacaaaagttgcaatgatggaatttggaacccttctgtggataaaatagaatctgctataattattagcattttg

SEQ ID NO: 732383 - DNA, 120 bp, Artificial Sequence
  ENSG00000198774_20 (sequence is synthesized)
tctctgaacctacagagaggagaccacatggacaaaagacttattctgctatgctataactcagattgtcttatttcttcatctaaagtgcttaaaagagacttagttcctaaaaaagta

SEQ ID NO: 732384 - DNA, 120 bp, Artificial Sequence
  ENSG00000198774_21 (sequence is synthesized)
ccagcaaaatccccaacacactagtaagaattcaagaaattgaagggattatttaggtcttatcttgactgacaatcattattatggcctactatgcttgtgttttaattagaaatgtgc

SEQ ID NO: 732385 - DNA, 120 bp, Artificial Sequence
  ENSG00000198774_22 (sequence is synthesized)
ttccttcctgccaatgaacacatgatgcaatcataatgaaataattattttttattgtactgttaactgagtactgctgcagtttatttttatttagctgatatctttcctgtgtgtcac

SEQ ID NO: 732386 - DNA, 120 bp, Artificial Sequence
  ENSG00000198774_23 (sequence is synthesized)
tgcacatgtaagtagaaatattattttacttagttttaatatgtggacattggttaagggtcccaatccttctcatttcttctcttttattcttttgcatacttttagtgcaggttttaa

SEQ ID NO: 732387 - DNA, 120 bp, Artificial Sequence
  ENSG00000198774_24 (sequence is synthesized)
tcttattgttttactttcaaaatttgaaaagtatttaattttttaaagcaactttattgttaactcatttaaaaaaatatattgctccttaaatcttcttaacatatttgttcctgcctt

SEQ ID NO: 732388 - DNA, 120 bp, Artificial Sequence
  ENSG00000198774_25 (sequence is synthesized)
cctgccttctcctgtcttttaactcatctttgggaagacatttagaattttctgattgtttcagtttcgtgagcatttatactatcatttcttgtaccaaaatagatattttcaggtctt

SEQ ID NO: 732389 - DNA, 120 bp, Artificial Sequence
  ENSG00000198774_26 (sequence is synthesized)
atttcaagttggctggtaagaaaaatagaaatttccattctatggaaaaatacagtgataaagagtaataattctggcatcggttacatttttttaaaaaagataaaattgaatagtcat

SEQ ID NO: 732390 - DNA, 120 bp, Artificial Sequence
  ENSG00000198774_27 (sequence is synthesized)
ctgtgaaaggaaagttcacctgactaagagtccataaaattattcaacaatataagccactgacatattcattgttcactaatggggatcaaattcagaagatcatcgtaaatgataaac

SEQ ID NO: 732391 - DNA, 120 bp, Artificial Sequence
  ENSG00000198774_28 (sequence is synthesized)
ccattgtatcattttcctacagtggaagtcatctctttgaattattcttatctttagtgagaaaatactgaaagaacatgcttatctatttgactaattatctgaattcaagaggttctg

SEQ ID NO: 732392 - DNA, 120 bp, Artificial Sequence
  ENSG00000198774_29 (sequence is synthesized)
ataagaagtaggcctggagagataatttcatcttagaaactttgaattaacttctgcttttatacagttaagcacagtaatgcatttaaggctcaattcttctacattttacagtaaata

SEQ ID NO: 732393 - DNA, 120 bp, Artificial Sequence
  ENSG00000198774_30 (sequence is synthesized)
atgtttgtaagtctcagaaagcagtaccattgctttttaaattcatttcagaatttccatttgctcattagttatacaaatgtatttgtgcgtttgatcactacaatcattaagttttaa

SEQ ID NO: 732394 - DNA, 120 bp, Artificial Sequence
  ENSG00000198774_31 (sequence is synthesized)
tccttcatcagctaccatggtgaacctcttaatttacagttacatgttaatatattaacacaaatagaagtactgaaatacaatgccctcatgtctggatactgaactatttgttattaa

SEQ ID NO: 732395 - DNA, 120 bp, Artificial Sequence
  ENSG00000198774_32 (sequence is synthesized)
attaagtgagaattggaattataagtatagaacttgatagaaagtgtaatgttattatctatagaaatgttaaagtataaattcttgagtaatctgacaggttaactatgaaattgctat

SEQ ID NO: 732396 - DNA, 120 bp, Artificial Sequence
  ENSG00000198774_33 (sequence is synthesized)
atgcagctagaagaaacaaaccaaagctgactattcttaatttctgtaacaggacctagattcatccttggtcatccttccacttggaattctcctttttatccttctgcaatgctctga

SEQ ID NO: 732397 - DNA, 120 bp, Artificial Sequence
  ENSG00000198774_34 (sequence is synthesized)
aatcttaccctttccacagtctttttaatgtgctagctcttctatgatatacgtttgttccattcaattagttggaatctcatctctgaacccagaaatattttagaggtacttctcata

SEQ ID NO: 732398 - DNA, 120 bp, Artificial Sequence
  ENSG00000198774_35 (sequence is synthesized)
ttctcataagaagcatttttattctggcttacgctatatatatttatgcacttacctaattcccctccttcaatgaattctattttttttttccttgagacggagtctcactctgtcgcc

SEQ ID NO: 732399 - DNA, 120 bp, Artificial Sequence
  ENSG00000198774_36 (sequence is synthesized)
ccgtgcccgaccaatgaattcttattaaattactttatcatctgtcttgttagccttactctttcctattaacttctttgccccctgctccctttttgaattgagtggctaaattttaga

SEQ ID NO: 732400 - DNA, 120 bp, Artificial Sequence
  ENSG00000198774_37 (sequence is synthesized)
ggtttgtagcttttgtgtgtgtgtgtgtgtgttttatagatggtaaatgatgcttgtacattttgtacatgaatgaatacgtattttagcagacttaaaacattaacagtaattgacctt

SEQ ID NO: 732401 - DNA, 120 bp, Artificial Sequence
  ENSG00000198774_38 (sequence is synthesized)
atacattttgggaaagaaaaattaaatcttcatgctactacgatttttttaaatgtggcatcaatgtttatttttaataatagtattactgacttaataaaccccaaatgtctctttaag

SEQ ID NO: 732402 - DNA, 120 bp, Artificial Sequence
  ENSG00000198774_39 (sequence is synthesized)
ctgatttaatggttatattatagaattttttatttcattgtgtgcttatgagaaaaaacatattttagagttgggttttaaatggtagacacagaaagtaactttaaaatatcctaaaca

SEQ ID NO: 732403 - DNA, 120 bp, Artificial Sequence
  ENSG00000198774_40 (sequence is synthesized)
ttcttaagtaaaataacaacacctcattagtgtgtagaagctattctaatccattaaaattttatttttatatttatttaaatatctactgtacatgacaaaatatatttctgtggctgc

SEQ ID NO: 732404 - DNA, 120 bp, Artificial Sequence
  ENSG00000198774_41 (sequence is synthesized)
gacaaaatatatttctgtggctgccttttataattattttccaagtagacataatctatttaaaacatatttttctagtgacaaagaaatacattttatcctgatatatagtttttaaat

SEQ ID NO: 732405 - DNA, 120 bp, Artificial Sequence
  ENSG00000198774_42 (sequence is synthesized)
ggctatttcttttcatactgcctgattggtttaataaacatgatgtgacaaatattaagtatatatcattttatcatgttgtaactgatccaaaataataaaagaaataattataccttt

SEQ ID NO: 732406 - DNA, 120 bp, Artificial Sequence
  ENSG00000198780_0 (sequence is synthesized)
agactgtgaaagcagcccacgattctaacttgcatgcacctaagtggcagtaggtttaggatgaaagtggtggggcggaggccggcggtcctcgcccgtgccctctgcacccctgtcccg

SEQ ID NO: 732407 - DNA, 120 bp, Artificial Sequence
  ENSG00000198780_1 (sequence is synthesized)
aggccgggatggccgcgcccactctgggtaaatttcaggagggcctacgcggggctggagaactccaccgggctatgcgaacagaatcctgcgaagaggatggcattccctgtggatatg

SEQ ID NO: 732408 - DNA, 120 bp, Artificial Sequence
  ENSG00000198780_2 (sequence is synthesized)
ctggaaaattgcagccatgaggaattggaaaattctgctgaagattacatgtcagatttaaggtgtggggaccctgaaaatccagagtgtttttctcttctcaatattacgattcctatt

SEQ ID NO: 732409 - DNA, 120 bp, Artificial Sequence
  ENSG00000198780_3 (sequence is synthesized)
agcctgtcaaatgtaggctttgtacctctttatggtggagatcagacccagaaaattcttgctctctttgcacctgaagattcactgacagctgtggcactttaccttgctgatcagtgg

SEQ ID NO: 732410 - DNA, 120 bp, Artificial Sequence
  ENSG00000198780_4 (sequence is synthesized)
tgggctattgatgatattgtgaaaacatctgttccttcaagagaggggcttaagcaggtgagcactcttggggagagagtggttctgtatgttctgaatcgaattatttatagaaaacag

SEQ ID NO: 732411 - DNA, 120 bp, Artificial Sequence
  ENSG00000198780_5 (sequence is synthesized)
gaaatggagagaaatgagatcccattcctgtgtcatagcagtactgattatgctaagattctgtggaagaaaggagaggccattgggttttattcagttaagcctacaggaagcatatgt

SEQ ID NO: 732412 - DNA, 120 bp, Artificial Sequence
  ENSG00000198780_6 (sequence is synthesized)
gcctcttttcttacccaaagttaccaattgccagttcttgatacaatgtttctaagaaagaaatacagaggtaaagattttgggcttcacatgctggaggactttgttgattcctttaca

SEQ ID NO: 732413 - DNA, 120 bp, Artificial Sequence
  ENSG00000198780_7 (sequence is synthesized)
gaagatgcgcttggcttgcggtatccactgtcttctctcatgtatacagcttgcaagcaatactttgagaagtatccaggagaccatgaactcctttgggaagttgaaggtgttggacac

SEQ ID NO: 732414 - DNA, 120 bp, Artificial Sequence
  ENSG00000198780_8 (sequence is synthesized)
tggtaccagcgaataccagtcaccagagcattacaaagagaagcacttaaaattctagcactttctcaaaatgaacctaaaagacctatgtctggagaatatggtcctgcatctgttcca

SEQ ID NO: 732415 - DNA, 120 bp, Artificial Sequence
  ENSG00000198780_9 (sequence is synthesized)
gaatacgaagcaagaactgaagacaatcagtctagtgagatgcagctaactattgattctctaaaagatgcctttgcaagcacttccgaaggtcatgataaaacatctgtttccactcat

SEQ ID NO: 732416 - DNA, 120 bp, Artificial Sequence
  ENSG00000198780_10 (sequence is synthesized)
actcgaagtggtaatctaaagcggccaaagattggaaagcggtttcaggattctgaatttagcagttctcaaggtgaagatgaaaagacctcccagacttcacttacagcttcaataaac

SEQ ID NO: 732417 - DNA, 120 bp, Artificial Sequence
  ENSG00000198780_11 (sequence is synthesized)
aaattggagtctactgcacgcccatcagagagctcagaagaattcctggaagaagaacctgaacagagagggattgaatttgaggatgaaagcagtgatagagatgcacggccagcactg

SEQ ID NO: 732418 - DNA, 120 bp, Artificial Sequence
  ENSG00000198780_12 (sequence is synthesized)
gaaacccagccacagcaagagaagcaagatggtgaaaaggaatctgaattagagcctatgaatggtgagataatggacgattctcttaagacctcacttataacagaagaggaagactcc

SEQ ID NO: 732419 - DNA, 120 bp, Artificial Sequence
  ENSG00000198780_13 (sequence is synthesized)
actagtgaagttttagatgaagaattaaaattgcagccttttaattccagtgaagactctacaaatcttgttccactggtggtagaatcttcaaaaccccctgaggtagatgcaccagat

SEQ ID NO: 732420 - DNA, 120 bp, Artificial Sequence
  ENSG00000198780_14 (sequence is synthesized)
aagaccccacgtatacctgactcagaaatgttgatggatgaaggcacatctgatgaaaaggggcacatggaagagaaattgtccctacttccaagaaagaaagcacatcttgggagttca

SEQ ID NO: 732421 - DNA, 120 bp, Artificial Sequence
  ENSG00000198780_15 (sequence is synthesized)
gacaatgttgctactatgtcaaatgaagaacgatctgatggtggttttccaaactctgtgatagctgaattttccgaagaaccggtctctgagaatttgtctcctaatactacttcctca

SEQ ID NO: 732422 - DNA, 120 bp, Artificial Sequence
  ENSG00000198780_16 (sequence is synthesized)
ttggaagaccagggtgaggagggggtatctgagccccaggaaacatctactgctcttcctcagagttctttgatagaggttgaacttgaagacgtgccattttcacagaatgcaggacag

SEQ ID NO: 732423 - DNA, 120 bp, Artificial Sequence
  ENSG00000198780_17 (sequence is synthesized)
aagaatcagtcagaggagcagtctgaagcatcttccgagcaactggatcagtttacacaatcggcagaaaaagctgtggatagcagctcagaggaaatagaagtggaagtgcctgtggta

SEQ ID NO: 732424 - DNA, 120 bp, Artificial Sequence
  ENSG00000198780_18 (sequence is synthesized)
gacaggcggaatttaagaagaaaggccaaagggcataaaggacctgctaagaagaaagctaagctgacctgaaggaagaagaaagtggatgataaatcctcttctttgtaacatagttgt

SEQ ID NO: 732425 - DNA, 120 bp, Artificial Sequence
  ENSG00000198780_19 (sequence is synthesized)
tgtttttaaaatatggtaattaataaacagcatggggcacaggacaaaaatttccaaaatttcaatttgaacttacttactatgcagttttttgcttccctttagaacgtagaattcacc

SEQ ID NO: 732426 - DNA, 120 bp, Artificial Sequence
  ENSG00000198780_20 (sequence is synthesized)
attgtttttaattttccaggctatttttggtaaatgcaattttttatttttattaaccatgtttcaattttgggaaaccagatcatattatattttctttatcaggtggtacatctgacc

SEQ ID NO: 732427 - DNA, 120 bp, Artificial Sequence
  ENSG00000198780_21 (sequence is synthesized)
attatttcaaaaatataattaaaaagctgtgaaagtagtaggatttccattacttataaggatcacagaaatcttttatactaagggttttaatagtaaaacttggtgagggttctagaa

SEQ ID NO: 732428 - DNA, 120 bp, Artificial Sequence
  ENSG00000198780_22 (sequence is synthesized)
gttttaaatttcaaaactaatcaccaattttttaaaatgtaggcatgcctaaacaaaaataagtgtcaataaattagaaaaaatataacttcaagtaaatgagagcacaaaaacagaaac

SEQ ID NO: 732429 - DNA, 120 bp, Artificial Sequence
  ENSG00000198780_23 (sequence is synthesized)
ttacggtcaaaggttcatgaagatattttggttttggcctcttaatcctagatatagatgcagttttttcctttgacttcactatctatggaaaggtacacataaaatctgtttctgatt

SEQ ID NO: 732430 - DNA, 120 bp, Artificial Sequence
  ENSG00000198780_24 (sequence is synthesized)
cattctatcatctgatgttaacagtactgtcagggatttaactgtggcatgtggggactaattatttaaaatttcatttgaagtattagtttgctgtaattttttttgtctgcatatgtg

SEQ ID NO: 732431 - DNA, 120 bp, Artificial Sequence
  ENSG00000198780_25 (sequence is synthesized)
ttttacttttatcccaacccagttaacatctatatttcagaagtatgaggctccttcctaaggcatctccttaaatcttgccacctccctaattctacagtcttatttatattcccccac

SEQ ID NO: 732432 - DNA, 120 bp, Artificial Sequence
  ENSG00000198780_26 (sequence is synthesized)
agctttcatctacttctgtaactcatggagtgattctccaatcaacagatcttcctgcctgccggcttatgcccttgatgtccatttttgggtaggtttggaggtgcaccccacaatgtt

SEQ ID NO: 732433 - DNA, 120 bp, Artificial Sequence
  ENSG00000198780_27 (sequence is synthesized)
agacctatatggcaggagtaaaactgcccccagtgttagacctatatggcaggggtaaactgcctttgggggagctgtggttacaagggcttcaatcatattggaggcttcaatcatcct

SEQ ID NO: 732434 - DNA, 120 bp, Artificial Sequence
  ENSG00000198780_28 (sequence is synthesized)
ttgatttgtactgagtactggttgcaagctggcctgttaagtatatattgtgttgccataacaaaggcctaggaaaatttgaagaaaaaaaacactgaactgttattttttgtaatttat

SEQ ID NO: 732435 - DNA, 120 bp, Artificial Sequence
  ENSG00000198780_29 (sequence is synthesized)
ttaaaaatggacaaaatggttattagaatccaaagataatctaaaaacagttctactctttggaaatattatgtgtactcaaatttgcacttaagttggagaatgttttgagaccattta

SEQ ID NO: 732436 - DNA, 120 bp, Artificial Sequence
  ENSG00000198780_30 (sequence is synthesized)
aattgttttaaaaatagcttgatcttgatccttatgcaaaagaaactaagactttgtgtcattatttgaggtagctaaggactgatgttgaaagtgtattcagtctatagtaagctgatg

SEQ ID NO: 732437 - DNA, 120 bp, Artificial Sequence
  ENSG00000198780_31 (sequence is synthesized)
tcaggtcagtaaattttgtttggggatgttggtattttcgatcaagttaaaatcttaaagcagacaaaaatagtaaacgctcctatttgtgttagattttgaacaattgtattaccctat

SEQ ID NO: 732438 - DNA, 120 bp, Artificial Sequence
  ENSG00000198780_32 (sequence is synthesized)
attttctttaattagtcaaaggtaagccagattatttcattctaaatgaaaattaaagcactttggccatttattttttcaacaaatgctaatactaagtaaaaaaaaaaaagtatgact

SEQ ID NO: 732439 - DNA, 120 bp, Artificial Sequence
  ENSG00000198780_33 (sequence is synthesized)
actattagtgaatctaccaaacatttatgctgttttatacattttatgagaaacttctgtcaatatcacaaagggaaatactctgttaagattcagtaaattcttaatctttacatgttt

SEQ ID NO: 732440 - DNA, 120 bp, Artificial Sequence
  ENSG00000198780_34 (sequence is synthesized)
catttcttagatttgaaaacacttgtagatattttatttttacttggatttgtttaaaatactttcttttcaaattattttaaacatggaaacgcttcatgaatttgtgtcatccttgca

SEQ ID NO: 732441 - DNA, 120 bp, Artificial Sequence
  ENSG00000198780_35 (sequence is synthesized)
caggggccatgctaattttccctgtattgttctaattttagtatatgtgctgccgaagtgagcactaaaagactttctttagacaagtgtagttttttaaagattgagctcactggctca

SEQ ID NO: 732442 - DNA, 120 bp, Artificial Sequence
  ENSG00000198780_36 (sequence is synthesized)
actcttgatgtgtgaatatagttgagtttacaaaaaatgtttattaatcatatatgaccattgggggctaacagtataaacttattcttgttaaacttgtttgggttaaatagtaagtga

SEQ ID NO: 732443 - DNA, 120 bp, Artificial Sequence
  ENSG00000198780_37 (sequence is synthesized)
attgtaaacaatttagaagttttttgttcagcacacaagaacacttctgttacagattctctctgacagaaattgttattttggggtttatagattatagagggaaaagttagatcactt

SEQ ID NO: 732444 - DNA, 120 bp, Artificial Sequence
  ENSG00000198780_38 (sequence is synthesized)
ggaaaaacctaactctcatgttcagtaacttgagtatagaatttataccacaatttatcttcaataaggaacctacatgaacttaatcagttatctgtagtttttgcaaggcattagaaa

SEQ ID NO: 732445 - DNA, 120 bp, Artificial Sequence
  ENSG00000198780_39 (sequence is synthesized)
aaatttcacaattacagaggactgaaaatgtgatttcaaccggctagtctagttgttgaatgtccagtcacattacacatagtcctttgtgaacttatttgtgaagggagttcacttttt

SEQ ID NO: 732446 - DNA, 120 bp, Artificial Sequence
  ENSG00000198780_40 (sequence is synthesized)
atgtacatacgtgtatatttccttgtgtaatataaagcagatggttattagtattttagttctttcaagtttaaattattcaattgctagacatcacagaaattagtatatttaagaatt

SEQ ID NO: 732447 - DNA, 120 bp, Artificial Sequence
  ENSG00000198780_41 (sequence is synthesized)
tattataaagctcctctacaacttttaaaggtgagagggtctattatgatttttttataaaatcaaacagcatgatttagaacgtcagtcttctacttaaaatgtgtctatattcatggt

SEQ ID NO: 732448 - DNA, 120 bp, Artificial Sequence
  ENSG00000198780_42 (sequence is synthesized)
atttccattcagtgtagatggtaaggaaaacatctagtcattaaagatttacttatagcagactccagaacactacctacaatggggtttcagtgactagaaatcttgaaggtttatgat

SEQ ID NO: 732449 - DNA, 120 bp, Artificial Sequence
  ENSG00000198780_43 (sequence is synthesized)
tgcatcaaattgagcctgtactaatatctaaatatctgctcttatgttctgctttatcccttgggattaccttctaaggtttggtcacaccagcaaactgaaacagatcttaatgtacat

SEQ ID NO: 732450 - DNA, 120 bp, Artificial Sequence
  ENSG00000198780_44 (sequence is synthesized)
aaaaaatttatactaatattactcatctgtgttacagtattttgaaaaatgtttcaggtgtcatctagtcgtctttcatgggtgtgattagttacaaatgttatgcttatgttttcatac

SEQ ID NO: 732451 - DNA, 120 bp, Artificial Sequence
  ENSG00000198780_45 (sequence is synthesized)
ttaatatcaagctttctttgtaccttacaagatagtatttttggttctaaaaaaaacaagcaaacttcatttttgtagtatccagaaattacctggagtcagtatttttattcgccttct

SEQ ID NO: 732452 - DNA, 120 bp, Artificial Sequence
  ENSG00000198780_46 (sequence is synthesized)
agaacttgtgatccacacatcacccatttatattagtggtaaaattatctgctaaaatctaattgtaagaaaggcttaccttctgtcatcaagtgattgtatcatcctggatcgtcattt

SEQ ID NO: 732453 - DNA, 120 bp, Artificial Sequence
  ENSG00000198780_47 (sequence is synthesized)
ccaaggaactagcctttcttttcctaagcgtctgtatgtgttctaaaacttccagtatatatttatagaacttagaaaaaatgttacattattcagagtagcaagtcttactggagtacc

SEQ ID NO: 732454 - DNA, 120 bp, Artificial Sequence
  ENSG00000198780_48 (sequence is synthesized)
tatgtttgttttcttggtttttatttttttttaagtttaaaagtagtaattaaacctatattttgtgattgtttcctggtctgtgtttttaaattcctttccttcagttttcctcatgaa

SEQ ID NO: 732455 - DNA, 120 bp, Artificial Sequence
  ENSG00000198780_49 (sequence is synthesized)
gatgtttcagatactgaatttgtttagacattgaatgactttgttaaaggcacaattaatcacattggttgtactctgaagacagacttctttaaaaaaaaaataaacaatttaaaacaa

SEQ ID NO: 732456 - DNA, 120 bp, Artificial Sequence
  ENSG00000198780_50 (sequence is synthesized)
attctccctcctctggaatgctggtcgttgcagttttgtcctaattgtgttctcagctctccattatgccatttttcaagaggcctgtgcctcaggaggtgaagccttgaaccctgggtg

SEQ ID NO: 732457 - DNA, 120 bp, Artificial Sequence
  ENSG00000198780_51 (sequence is synthesized)
gtttatggctcgggggtctggattacactgactcccatgactgtccttggggagaaaggatgaagcatctcactggcttttcagcgtctgggaagcggcgtgggtatcgtatcgggtgga

SEQ ID NO: 732458 - DNA, 120 bp, Artificial Sequence
  ENSG00000198780_52 (sequence is synthesized)
acgaggagccgggcgtccggggcgagcgggaggcagccgcactcgccctggcagccgcgagctgtgcggcctgggaccggccggaggtcgccagcgagcagccgccggctccattcattc

SEQ ID NO: 732459 - DNA, 120 bp, Artificial Sequence
  ENSG00000198780_53 (sequence is synthesized)
tagcaacctatatttctctctggaactttaccacccttccgctgcctctctaaactatagtagcagaaccactgttaggcttgcaatttacatagtcttaaattaaccaagactcaaaaa

SEQ ID NO: 732460 - DNA, 120 bp, Artificial Sequence
  ENSG00000198780_54 (sequence is synthesized)
caaacaaaaaaaacaattccaagcatttagaggtgaaaaggtctttaggattatcctgtccagttgcatcacgttaccaatgagagtacagaagcctaaagaggaggatggcattccctg

SEQ ID NO: 732461 - DNA, 120 bp, Artificial Sequence
  ENSG00000198783_0 (sequence is synthesized)
agaatcgttttgggtctggtcgccaagatggcgtcctccgcctccgcccggactccggcagggaagcgagtgataaatcaggaagaattgcggcggttaatgaaggagaagcagcgtctg

SEQ ID NO: 732462 - DNA, 120 bp, Artificial Sequence
  ENSG00000198783_1 (sequence is synthesized)
agcaccagtcggaaacggatagaatctccattcgcgaagtacaaccgtttggggcagctgagttgtgccctgtgtaacactccggttaagagcgagctcctgtggcagactcacgtcctg

SEQ ID NO: 732463 - DNA, 120 bp, Artificial Sequence
  ENSG00000198783_2 (sequence is synthesized)
ggaaagcagcaccgagagaaagtggccgagctgaaaggcgcgaaggaagccagccagggttcgtccgccagttcagcgcctcattccgtcaagaggaaagcgccggacgcagacgaccaa

SEQ ID NO: 732464 - DNA, 120 bp, Artificial Sequence
  ENSG00000198783_3 (sequence is synthesized)
gatgtcaagagagcgaaggccaccttggtgcctcaggtacagccctccacatctgcgtggaccaccaactttgacaaaataggaaaggagttcattagagcgactcccagtaagccttca

SEQ ID NO: 732465 - DNA, 120 bp, Artificial Sequence
  ENSG00000198783_4 (sequence is synthesized)
ggactcagtttactccccgattatgaagatgaggaggaggaggaagaggaggaggaaggagatggagaaagaaaaaggggggacgccagcaagccgctctccgacgcacagggcaaggag

SEQ ID NO: 732466 - DNA, 120 bp, Artificial Sequence
  ENSG00000198783_5 (sequence is synthesized)
cactcagtttcctcttcacgggaggtaacaagtagtgtgctgccaaacgatttctttagtactaatcctcccaaggcccccataattcctcattcagggtcaattgagaaagcagaaata

SEQ ID NO: 732467 - DNA, 120 bp, Artificial Sequence
  ENSG00000198783_6 (sequence is synthesized)
catgaaaaagtggtggaaaggagagaaaacaccgcggaagcgttaccggaaggtttttttgacgaccctgaggtagatgcaagagtacgaaaggttgatgctccaaaagatcagatggac

SEQ ID NO: 732468 - DNA, 120 bp, Artificial Sequence
  ENSG00000198783_7 (sequence is synthesized)
aaagagtgggacgaattccaaaaagccatgaggcaggtcaacactatttccgaagccatagttgccgaagaggatgaggagggacggttggaccgccagattggggagatcgatgagcag

SEQ ID NO: 732469 - DNA, 120 bp, Artificial Sequence
  ENSG00000198783_8 (sequence is synthesized)
atagagtgttaccgacgggtggaaaagctacggaatcgccaggatgaaataaaaaataaacttaaagaaatcctgaccataaaagaactgcagaaaaaggaagaagagaatgctgacagc

SEQ ID NO: 732470 - DNA, 120 bp, Artificial Sequence
  ENSG00000198783_9 (sequence is synthesized)
ccaaggtttctaacagcctctgctgttgtataaaaagtgctgtctctcagtagtatagcggttacttcatgcctcaagatttgggtacctggattgctaaactggattgttgagataaaa

SEQ ID NO: 732471 - DNA, 120 bp, Artificial Sequence
  ENSG00000198783_10 (sequence is synthesized)
tgagccagtgagctacagcactttggaaaatttgtgtaacatgtttttgaggtaaagttgtttttgaaatttctgaagtgttatataccaaaatgccaacatttccacgacagacttaac

SEQ ID NO: 732472 - DNA, 120 bp, Artificial Sequence
  ENSG00000198783_11 (sequence is synthesized)
tgtataatttcgttgtaaaatctgtaagttgtaaatattgtacatagttaaatctgtattctgttttgaatttttttaattaatagaaagaccaaccggcaaactttcagatgaatgctt

SEQ ID NO: 732473 - DNA, 120 bp, Artificial Sequence
  ENSG00000198783_12 (sequence is synthesized)
actgtggtatttggaatgtatgtatcttctgaaccctacatcaagttgaaaaggtttgttttcttgtttctttggtttttgtatggttttttagaacacttcataaacacataagtcatt

SEQ ID NO: 732474 - DNA, 120 bp, Artificial Sequence
  ENSG00000198783_13 (sequence is synthesized)
gtaggttaatcagttctcttagtgtgctttattttaaaaacataagaaaactatatgccaaacatgaccaaaccaatgatggtcagatgtggttgcacatgagagtcacctatgaagcat

SEQ ID NO: 732475 - DNA, 120 bp, Artificial Sequence
  ENSG00000198783_14 (sequence is synthesized)
taaaataattaaagtgtctgaggccttccccttcaataaatctgggattgggcccaggcaactgtgttttttaagcacccaggttattctaatatatgccagggttagagagtaactgcc

SEQ ID NO: 732476 - DNA, 120 bp, Artificial Sequence
  ENSG00000198783_15 (sequence is synthesized)
ctaaatccagaacccatttatgtttttcaggttttttctttttctttaaataacacattccataaatttgctgtttcttgaatgaaggaaaaaatattatcttttatttatttcatccag

SEQ ID NO: 732477 - DNA, 120 bp, Artificial Sequence
  ENSG00000198783_16 (sequence is synthesized)
ccttaaattttgttatttggtggtaaattagggttccttgtttgcaggtcctatctattgtagaaagaatatttaagttgtctttccagcagtaacaattggctcttgctggtcattgat

SEQ ID NO: 732478 - DNA, 120 bp, Artificial Sequence
  ENSG00000198783_17 (sequence is synthesized)
agtttaaatcactccttcctttagagattgaggtactcaaataggaaaagggaattagcagtgttctggagttgaaatgcatacagcatattcaaataaaagtgagcaataataataata

SEQ ID NO: 732479 - DNA, 120 bp, Artificial Sequence
  ENSG00000198785_0 (sequence is synthesized)
cagagaggaagtagcgagagaagagagaaaatgaagtcggcgctgggggagcctgcaggagggtggccaacagtggaggaaggtggatttggcttcttttccgcaccccgggcgtgaaag

SEQ ID NO: 732480 - DNA, 120 bp, Artificial Sequence
  ENSG00000198785_1 (sequence is synthesized)
ccctctccaacgcgaccccaggaaataagtgggtctcgcctgggcagaaaaggaaaagaatccaggcgagagcgcgtcgctcctctgtcactgctgcccccgaggaactccggctgcttc

SEQ ID NO: 732481 - DNA, 120 bp, Artificial Sequence
  ENSG00000198785_2 (sequence is synthesized)
gaactccggctgcttctcatcccggccgcctcgcggggccggacgcagtgcccgaggcgccctgcagatggggcgggcagggaacgggcgctccagctgcgggtgacaggcgccggcccg

SEQ ID NO: 732482 - DNA, 120 bp, Artificial Sequence
  ENSG00000198785_3 (sequence is synthesized)
gcgcagtgaccgggcgggcagaggatgccaggcggagggacctgggagcgggatctgagactgccggaggcgcgctacgctccaacttgcatggcctagagaccgctccagctcctggga

SEQ ID NO: 732483 - DNA, 120 bp, Artificial Sequence
  ENSG00000198785_4 (sequence is synthesized)
ccgcttcaccgagtggagtgaagctgcgcgcgggacctggaggcggagacctcaggcagcggctgcagaggggcgagccgggcgcaggagggggcgcgctttctccctgcgggtctcagt

SEQ ID NO: 732484 - DNA, 120 bp, Artificial Sequence
  ENSG00000198785_5 (sequence is synthesized)
aatgaggagactgagtttgtggtggctgctgagcagggtctgtctgctgttgccgccgccctgcgcactggtgctggccggggtgcccagctcctcctcgcacccgcagccctgccagat

SEQ ID NO: 732485 - DNA, 120 bp, Artificial Sequence
  ENSG00000198785_6 (sequence is synthesized)
cctcaagcgcatcgggcacgcggtgagggtgggcgcggtgcacttgcagccctggaccaccgccccccgcgcggccagccgcgctccggacgacagccgagcaggagcccagagggatga

SEQ ID NO: 732486 - DNA, 120 bp, Artificial Sequence
  ENSG00000198785_7 (sequence is synthesized)
gcaggagcccagagggatgagccggagccagggactaggcggtccccggcgccctcgccgggcgcacgctggttggggagcaccctgcatggccgggggccgccgggctcccgtaagccc

SEQ ID NO: 732487 - DNA, 120 bp, Artificial Sequence
  ENSG00000198785_8 (sequence is synthesized)
ggccctgtggccacgggacgccctcctatttgccgtggacaacctgaaccgcgtggaagggctgctaccctacaacctgtctttggaagtagtgatggccatcgaggcaggcctgggcga

SEQ ID NO: 732488 - DNA, 120 bp, Artificial Sequence
  ENSG00000198785_9 (sequence is synthesized)
tctgccacttttgcccttctcctcccctagttcgccatggagcagtgaccctttctccttcctgcaaagtgtgtgccataccgtggtggtgcaaggggtgtcggcgctgctcgccttccc

SEQ ID NO: 732489 - DNA, 120 bp, Artificial Sequence
  ENSG00000198785_10 (sequence is synthesized)
ccagagccagggcgaaatgatggagctcgacttggtcagcttagtcctgcacattccagtgatcagcatcgtgcgccacgagtttccacgggagagtcagaatccccttcacctacaact

SEQ ID NO: 732490 - DNA, 120 bp, Artificial Sequence
  ENSG00000198785_11 (sequence is synthesized)
gagtttagaaaattcattaagttctgatgctgatgtcactgtctcaatcctgaccatgaacaactggtacaattttagcttgttgctgtgccaggaagactggaacatcaccgacttcct

SEQ ID NO: 732491 - DNA, 120 bp, Artificial Sequence
  ENSG00000198785_12 (sequence is synthesized)
cctccttacccagaataattccaagttccaccttggttctatcatcaacatcaccgctaacctcccctccacccaggacctcttgagcttcctacagatccagcttgagagtattaagaa

SEQ ID NO: 732492 - DNA, 120 bp, Artificial Sequence
  ENSG00000198785_13 (sequence is synthesized)
cagcacacccacagtggtgatgtttggctgcgacatggaaagtatccggcggattttcgaaattacaacccagtttggggtcatgccccctgaacttcgttgggtgctgggagattccca

SEQ ID NO: 732493 - DNA, 120 bp, Artificial Sequence
  ENSG00000198785_14 (sequence is synthesized)
gaatgtggaggaactgaggacagagggtctgcccttagggctcattgctcatggaaaaacaacacagtctgtctttgagcactacgtacaagatgctatggagctggtcgcaagagctgt

SEQ ID NO: 732494 - DNA, 120 bp, Artificial Sequence
  ENSG00000198785_15 (sequence is synthesized)
agccacagccaccatgatccaaccagaacttgctctcattcccagcacgatgaactgcatggaggtggaaactacaaatctcacttcaggacaatatttatcaaggtttctagccaatac

SEQ ID NO: 732495 - DNA, 120 bp, Artificial Sequence
  ENSG00000198785_16 (sequence is synthesized)
cactttcagaggcctcagtggttccatcagagtaaaaggttccaccatcgtcagctcagaaaacaactttttcatctggaatcttcaacatgaccccatgggaaagccaatgtggacccg

SEQ ID NO: 732496 - DNA, 120 bp, Artificial Sequence
  ENSG00000198785_17 (sequence is synthesized)
cttgggcagctggcaggggggaaagattgtcatggactatggaatatggccagagcaggcccagagacacaaaacccacttccaacatccaagtaagctacacttgagagtggttaccct

SEQ ID NO: 732497 - DNA, 120 bp, Artificial Sequence
  ENSG00000198785_18 (sequence is synthesized)
gattgagcatccttttgtcttcacaagggaggtagatgatgaaggcttgtgccctgctggccaactctgtctagaccccatgactaatgactcttccacattggacagcctttttagcag

SEQ ID NO: 732498 - DNA, 120 bp, Artificial Sequence
  ENSG00000198785_19 (sequence is synthesized)
cctccatagcagtaatgatacagtgcccattaaattcaagaagtgctgctatggatattgcattgatctgctggaaaagatagcagaagacatgaactttgacttcgacctctatattgt

SEQ ID NO: 732499 - DNA, 120 bp, Artificial Sequence
  ENSG00000198785_20 (sequence is synthesized)
aggggatggaaagtatggagcatggaaaaatgggcactggactgggctagtgggtgatctcctgagagggactgcccacatggcagtcacttcctttagcatcaatactgcacggagcca

SEQ ID NO: 732500 - DNA, 120 bp, Artificial Sequence
  ENSG00000198785_21 (sequence is synthesized)
ggtgatagatttcaccagccctttcttctccaccagcttgggcatcttagtgaggacccgagatacagcagctcccattggagccttcatgtggccactccactggacaatgtggctggg

SEQ ID NO: 732501 - DNA, 120 bp, Artificial Sequence
  ENSG00000198785_22 (sequence is synthesized)
gatttttgtggctctgcacatcactgccgtcttcctcactctgtatgaatggaagagtccatttggtttgactcccaaggggcgaaatagaagtaaagtcttctccttttcttcagcctt

SEQ ID NO: 732502 - DNA, 120 bp, Artificial Sequence
  ENSG00000198785_23 (sequence is synthesized)
gaacatctgttatgccctcttgtttggcagaacagtggccatcaaacctccaaaatgttggactggaaggtttctaatgaacctttgggccattttctgtatgttttgcctttccacata

SEQ ID NO: 732503 - DNA, 120 bp, Artificial Sequence
  ENSG00000198785_24 (sequence is synthesized)
cacggcaaacttggctgctgtcatggtaggtgagaagatctatgaagagctttctggaatacatgaccccaagttacatcatccttcccaaggattccgctttggaactgtccgagaaag

SEQ ID NO: 732504 - DNA, 120 bp, Artificial Sequence
  ENSG00000198785_25 (sequence is synthesized)
cagtgctgaagattatgtgagacaaagtttcccagagatgcatgaatatatgagaaggtacaatgttccagccacccctgatggagtggagtatctgaagaatgatccagagaaactaga

SEQ ID NO: 732505 - DNA, 120 bp, Artificial Sequence
  ENSG00000198785_26 (sequence is synthesized)
cgccttcatcatggacaaagcccttctggattatgaagtgtcaatagatgctgactgcaaacttctcactgtggggaagccatttgccatagaaggatacggcattggcctcccacccaa

SEQ ID NO: 732506 - DNA, 120 bp, Artificial Sequence
  ENSG00000198785_27 (sequence is synthesized)
ctctccattgaccgccaacatatccgagctaatcagtcaatacaagtcacatgggtttatggatatgctccatgacaagtggtacagggtggttccctgtggcaagagaagttttgctgt

SEQ ID NO: 732507 - DNA, 120 bp, Artificial Sequence
  ENSG00000198785_28 (sequence is synthesized)
cacggagactttgcaaatgggcatcaaacacttctctgggctctttgtgctgctgtgcattggatttggtctgtccattttgaccaccattggtgagcacatagtatacaggctgctgct

SEQ ID NO: 732508 - DNA, 120 bp, Artificial Sequence
  ENSG00000198785_29 (sequence is synthesized)
accacgaatcaaaaacaaatccaagctgcaatactggctccacaccagccagagattacacagagcaataaatacatcatttatagaggaaaagcagcagcatttcaagaccaaacgtgt

SEQ ID NO: 732509 - DNA, 120 bp, Artificial Sequence
  ENSG00000198785_30 (sequence is synthesized)
ggaaaagaggtctaatgtgggaccccgtcagcttaccgtatggaatacttccaatctgagtcatgacaaccgacggaaatacatctttagtgatgaggaaggacaaaaccagctgggcat

SEQ ID NO: 732510 - DNA, 120 bp, Artificial Sequence
  ENSG00000198785_31 (sequence is synthesized)
ccggatccaccaggacatccccctccctccaaggagaagagagctccctgccttgcggaccaccaatgggaaagcagactccctaaatgtatctcggaactcagtgatgcaggaactctc

SEQ ID NO: 732511 - DNA, 120 bp, Artificial Sequence
  ENSG00000198785_32 (sequence is synthesized)
tcggacttgtgagtcctaggtgaccacactgcttccctttctcagttcctgaccttcctctgagcccttgagacactttgtaatgctcttttgtaactatcgacaaaggtgtggggaagc

SEQ ID NO: 732512 - DNA, 120 bp, Artificial Sequence
  ENSG00000198785_33 (sequence is synthesized)
tgaggtctaggtcttcttaaaggtcaagtctgctctccctcgcctaaagtgcagcagcagctcctctcaagctcactctctaggtctccagggtaggagtgtttttctagcaagaatctt

SEQ ID NO: 732513 - DNA, 120 bp, Artificial Sequence
  ENSG00000198785_34 (sequence is synthesized)
agtcaggagtaagctctgtgcgagagatctgtgaataaccagataaccccagctgccgttaaccttttcaccaggtgccacagtaatatttctggtttttagccctttctctgcactacc

SEQ ID NO: 732514 - DNA, 120 bp, Artificial Sequence
  ENSG00000198785_35 (sequence is synthesized)
aacaagagataaaattgttactcacacttatgtcttactgggttgctggttttcatcgtaacacagaacgaggttatctagggttgtagcttttgatacaactccccgatctagatttat

SEQ ID NO: 732515 - DNA, 120 bp, Artificial Sequence
  ENSG00000198785_36 (sequence is synthesized)
tcctacattctgaatggggagcaggtaagagcagagcacctcccactgggggtggggtatttaaaaattaactcattagtatcataaacgtcaaggattgattggaccaggcaagagcca

SEQ ID NO: 732516 - DNA, 120 bp, Artificial Sequence
  ENSG00000198785_37 (sequence is synthesized)
tgtttttgagaaggttctggatctctgactccatcctgactgtttagtaagagcatgcttacaccctactgtgaaaaggggaggggatgtggtaagcggaaacagaagacaggcagcaga

SEQ ID NO: 732517 - DNA, 120 bp, Artificial Sequence
  ENSG00000198785_38 (sequence is synthesized)
ggcattaaaaatgcataccatgctttcagaacaaaagctctgggccagaaaggcaatttggctaaaaaatgaataagactacttctaatgtaactaagcatctccactatggtgtgtgcc

SEQ ID NO: 732518 - DNA, 120 bp, Artificial Sequence
  ENSG00000198785_39 (sequence is synthesized)
ttttataaaggaaaagagagaaaaaggcaaagcaaggttgtggccttaggttggacctggaatatcccttattgcctataatggaatatgtgacactgtgggtgaaatgttctacacacc

SEQ ID NO: 732519 - DNA, 120 bp, Artificial Sequence
  ENSG00000198785_40 (sequence is synthesized)
acacactaggccattttcagatcagcagtcacccatcgcttagcatagaaatcccaaaacctccagcccgggaacactataagcttcgaccattcaggaatctgccctgcactttgcata

SEQ ID NO: 732520 - DNA, 120 bp, Artificial Sequence
  ENSG00000198785_41 (sequence is synthesized)
tctgtatagaaaatcaagtcaatcccccatcctcacacccactcatctctgaggagctatgaactggttttggtccctctaatgatcctccagcctcatctaatgccccccaaagactga

SEQ ID NO: 732521 - DNA, 120 bp, Artificial Sequence
  ENSG00000198785_42 (sequence is synthesized)
tacaagtaacctcccctctgcttaggtgtcactttctcagcatatcaagtttaggcagcaagggaaaggaatatgggtcagttctcaaatgtcaatgtagataagagtcatctagtagag

SEQ ID NO: 732522 - DNA, 120 bp, Artificial Sequence
  ENSG00000198785_43 (sequence is synthesized)
aactcatcagagtgcggattgccaagacccttctccagagattatggggttgggggtggaggtctagaggtgagctcagaaacctactgttaaccaacacccccaagtgactgacacagg

SEQ ID NO: 732523 - DNA, 120 bp, Artificial Sequence
  ENSG00000198785_44 (sequence is synthesized)
tggtctaaaaattacttttctagaaacaccattctggaagtttggctgcccacaggcaggaggagaagcatgaagagaaaacctgtttgagaagttttgttttgttttgttttgcttttt

SEQ ID NO: 732524 - DNA, 120 bp, Artificial Sequence
  ENSG00000198785_45 (sequence is synthesized)
aataattttagcacacatctgctgactctccttcaacatcctcacccccacccctgggcaccatttaggacaagacttccttatttatcaattacttgatttatcttctcaggactcatt

SEQ ID NO: 732525 - DNA, 120 bp, Artificial Sequence
  ENSG00000198785_46 (sequence is synthesized)
gttccacccccaaccaatttgaatgcctacaataagttcaggagctgtgccaagcactttcctcttttacagctggagatcactggaaaggtgtctcagtcacaaaacttctccctctac

SEQ ID NO: 732526 - DNA, 120 bp, Artificial Sequence
  ENSG00000198785_47 (sequence is synthesized)
tactggatgaaatgtctgcatttccaccaaaatctacccagtcacccagggaataacaacttaagctgtagttagataacacctagtgattaattggctgagaaaaccctggagtggagg

SEQ ID NO: 732527 - DNA, 120 bp, Artificial Sequence
  ENSG00000198785_48 (sequence is synthesized)
gaggctcagagatactgatatggatgtgggagggctctaaagttagaggtcaccaactccacagatgaaacagttcaataatgaggaaacaggtgagccctgaaaacacaaaaggacagt

SEQ ID NO: 732528 - DNA, 120 bp, Artificial Sequence
  ENSG00000198785_49 (sequence is synthesized)
tctgtgttgaaacaccccatcccctcacgttctcaccccaggcccagaagtaggttgcaactgcctttggaagattttgccccttagccatccccacccacttgtaccagctaagaatgc

SEQ ID NO: 732529 - DNA, 120 bp, Artificial Sequence
  ENSG00000198785_50 (sequence is synthesized)
tggagactctgccaccatgctctgcgtgcccctgaacctctgtgcagcccggaaggctgatgtacaggtgtacctcaatccacattacagccatgctcctaatgtacatggacatttttg

SEQ ID NO: 732530 - DNA, 120 bp, Artificial Sequence
  ENSG00000198785_51 (sequence is synthesized)
taactcagctcatattctgactgtatttgagaagctggctgtttaagggaacccagaagtgaattcttttgtaaagtaaagcacccttttgtaatgcaattaattatcccttaatgtatc

SEQ ID NO: 732531 - DNA, 120 bp, Artificial Sequence
  ENSG00000198785_52 (sequence is synthesized)
tgttttgtaagtctgcatttttgtatatcggatttaccttaagcttctctagtgaggcattctgagcagtggtgatcacatgccagatcgccctgcctatccacaaagtagatgaccaat

SEQ ID NO: 732532 - DNA, 120 bp, Artificial Sequence
  ENSG00000198785_53 (sequence is synthesized)
gcacgctcctcaaacatctttggaggaactacctggccaaaacactggccaggatgcagcaagcagcagcaggggctgacagcaggcttactgccatcaacattgcttgaaatgcctcta

SEQ ID NO: 732533 - DNA, 120 bp, Artificial Sequence
  ENSG00000198785_54 (sequence is synthesized)
tgttctgaataaagaaaaaccataattgcttgtggtgaaacgaagcagtcttcatgttaagtagcaatggttatttttattggtagtaactgaacagtgttttgcaatttgtgaaacagt

SEQ ID NO: 732534 - DNA, 120 bp, Artificial Sequence
  ENSG00000198785_55 (sequence is synthesized)
gtattgtgttttgtaaaatgatgtcatgaaatggtgggtccttggaaacctcctttccgttcagctctgcctctgttctttcaactcctttgaggctcaaaaaaaacacaaagatcagaa

SEQ ID NO: 732535 - DNA, 120 bp, Artificial Sequence
  ENSG00000198785_56 (sequence is synthesized)
gccttcagatagagggtggtattctggtaaagaagaaagagataagggacgctaccttgcttttctggcacaggaagcacatgataaagcatgctcagatgagctggaacagatatagct

SEQ ID NO: 732536 - DNA, 120 bp, Artificial Sequence
  ENSG00000198785_57 (sequence is synthesized)
acctggttcgtgtaaataagaataatcaaggccccagagtgtgtatgcttccaggtggaggagaaaggggaatctcccaaaatttaaaaacaaattggaagaataaccaggacagccaag

SEQ ID NO: 732537 - DNA, 120 bp, Artificial Sequence
  ENSG00000198785_58 (sequence is synthesized)
tgaagcagccacagggacccaagcagtcgaggtctttaatgtgcctggagatgactctctgctattcatgaatcttgctattgcacaaaccctatcaagagctgctgcttcccttccagc

SEQ ID NO: 732538 - DNA, 120 bp, Artificial Sequence
  ENSG00000198785_59 (sequence is synthesized)
cagaaaagtggtaagcggagcaagtgccaagcagaacagaccttatcatctgggtaacagacttctcagtgttggtgctgtgtctgttagagccttagagcaagttaagcacttccttgg

SEQ ID NO: 732539 - DNA, 120 bp, Artificial Sequence
  ENSG00000198785_60 (sequence is synthesized)
tgtgggtaaagaataaaggggaaagaaactactttagagcctctttttctcccaactcatatttttgataggaaaaacagaaaacccatccagttcttcagaaattgctttctaggcatt

SEQ ID NO: 732540 - DNA, 120 bp, Artificial Sequence
  ENSG00000198785_61 (sequence is synthesized)
aatactactttactatctatactgtttagttattcctttctttacccacctaaactatccatctaatccaggattccctcactctttttttttagttactaatcattttatgaaaataat

SEQ ID NO: 732541 - DNA, 120 bp, Artificial Sequence
  ENSG00000198785_62 (sequence is synthesized)
gtatttataagtattttcttaaggtttgtgaagagtatttgcattgtgtcttcattttaatgtgtttgcaatcgctccgctccaggaagaacggaaatgctgtcttgtgagcatgaagtg

SEQ ID NO: 732542 - DNA, 120 bp, Artificial Sequence
  ENSG00000198785_63 (sequence is synthesized)
aacgggctgttttgctccagccacttttcttgtacaaccacatggatggattagatgtcctcaggtcttttccatcttcagtttctatgactgtggaataaatgttcagatagaaacttc

SEQ ID NO: 732543 - DNA, 120 bp, Artificial Sequence
  ENSG00000198785_64 (sequence is synthesized)
agtcttcctctattgttcccagcaagaagtaatttctcaattctctgagttcttatagttcttttcccttacctctctgatgacatgttttgttgtccatcttgtattattaattataat

SEQ ID NO: 732544 - DNA, 120 bp, Artificial Sequence
  ENSG00000198785_65 (sequence is synthesized)
tctttaatgcctcaattcactcactgatcagcaagctttctgagcaaagaccatctctgaatgtcccaatgctttacatgttaaaacatgattgaataaatgatgccctataaagaataa

SEQ ID NO: 732545 - DNA, 120 bp, Artificial Sequence
  ENSG00000198786_0 (sequence is synthesized)
ataaccatgcacactactataaccaccctaaccctgacttccctaattccccccatccttaccaccctcgttaaccctaacaaaaaaaactcatacccccattatgtaaaatccattgtc

SEQ ID NO: 732546 - DNA, 120 bp, Artificial Sequence
  ENSG00000198786_1 (sequence is synthesized)
gcatccacctttattatcagtctcttccccacaacaatattcatgtgcctagaccaagaagttattatctcgaactgacactgagccacaacccaaacaacccagctctccctaagcttc

SEQ ID NO: 732547 - DNA, 120 bp, Artificial Sequence
  ENSG00000198786_2 (sequence is synthesized)
aaactagactacttctccataatattcatccctgtagcattgttcgttacatggtccatcatagaattctcactgtgatatataaactcagacccaaacattaatcagttcttcaaatat

SEQ ID NO: 732548 - DNA, 120 bp, Artificial Sequence
  ENSG00000198786_3 (sequence is synthesized)
ctactcatcttcctaattaccatactaatcttagttaccgctaacaacctattccaactgttcatcggctgagagggcgtaggaattatatccttcttgctcatcagttgatgatacgcc

SEQ ID NO: 732549 - DNA, 120 bp, Artificial Sequence
  ENSG00000198786_4 (sequence is synthesized)
cgagcagatgccaacacagcagccattcaagcaatcctatacaaccgtatcggcgatatcggtttcatcctcgccttagcatgatttatcctacactccaactcatgagacccacaacaa

SEQ ID NO: 732550 - DNA, 120 bp, Artificial Sequence
  ENSG00000198786_5 (sequence is synthesized)
atagcccttctaaacgctaatccaagcctcaccccactactaggcctcctcctagcagcagcaggcaaatcagcccaattaggtctccacccctgactcccctcagccatagaaggcccc

SEQ ID NO: 732551 - DNA, 120 bp, Artificial Sequence
  ENSG00000198786_6 (sequence is synthesized)
accccagtctcagccctactccactcaagcactatagttgtagcaggaatcttcttactcatccgcttccaccccctagcagaaaatagcccactaatccaaactctaacactatgctta

SEQ ID NO: 732552 - DNA, 120 bp, Artificial Sequence
  ENSG00000198786_7 (sequence is synthesized)
actctgttcgcagcagtctgcgcccttacacaaaatgacatcaaaaaaatcgtagccttctccacttcaagtcaactaggactcataatagttacaatcggcatcaaccaaccacaccta

SEQ ID NO: 732553 - DNA, 120 bp, Artificial Sequence
  ENSG00000198786_8 (sequence is synthesized)
gcattcctgcacatctgtacccacgccttcttcaaagccatactatttatgtgctccgggtccatcatccacaaccttaacaatgaacaagatattcgaaaaataggaggactactcaaa

SEQ ID NO: 732554 - DNA, 120 bp, Artificial Sequence
  ENSG00000198786_9 (sequence is synthesized)
accatacctctcacttcaacctccctcaccattggcagcctagcattagcaggaatacctttcctcacaggtttctactccaaagaccacatcatcgaaaccgcaaacatatcatacaca

SEQ ID NO: 732555 - DNA, 120 bp, Artificial Sequence
  ENSG00000198786_10 (sequence is synthesized)
aacgcctgagccctatctattactctcatcgctacctccctgacaagcgcctatagcactcgaataattcttctcaccctaacaggtcaacctcgcttccccacccttactaacattaac

SEQ ID NO: 732556 - DNA, 120 bp, Artificial Sequence
  ENSG00000198786_11 (sequence is synthesized)
gaaaataaccccaccctactaaaccccattaaacgcctggcagccggaagcctattcgcaggatttctcattactaacaacatttcccccgcatcccccttccaaacaacaatccccctc

SEQ ID NO: 732557 - DNA, 120 bp, Artificial Sequence
  ENSG00000198786_12 (sequence is synthesized)
tacctaaaactcacagccctcgctgtcactttcctaggacttctaacagccctagacctcaactacctaaccaacaaacttaaaataaaatccccactatgcacattttatttctccaac

SEQ ID NO: 732558 - DNA, 120 bp, Artificial Sequence
  ENSG00000198786_13 (sequence is synthesized)
atactcggattctaccctagcatcacacaccgcacaatcccctatctaggccttcttacgagccaaaacctgcccctactcctcctagacctaacctgactagaaaagctattacctaaa

SEQ ID NO: 732559 - DNA, 120 bp, Artificial Sequence
  ENSG00000198786_14 (sequence is synthesized)
acaatttcacagcaccaaatctccacctccatcatcacctcaacccaaaaaggcataattaaactttacttcctctctttcttcttcccactcatcctaaccctactcctaatcacataa

SEQ ID NO: 732560 - DNA, 120 bp, Artificial Sequence
  ENSG00000198788_0 (sequence is synthesized)
ttcgacggactctactacagctaccagggcaactgcacctacgtgctggtggaggagatcagcccctccgtggacaacttcggagtttacatcgacaactaccactgcgatcccaacgac

SEQ ID NO: 732561 - DNA, 120 bp, Artificial Sequence
  ENSG00000198788_1 (sequence is synthesized)
cacgagacccaggaggtgctgatcaagaccgtgcatatgatgcccatgcaggtgcaggtgcaggtgaacaggcaggcggtggcactgccctacaagaagtacgggctggaggtgtaccag

SEQ ID NO: 732562 - DNA, 120 bp, Artificial Sequence
  ENSG00000198788_2 (sequence is synthesized)
tctggcatcaactacgtggtggacatccccgagctgggtgtcctcgtctcctacaatggcctgtccttctccgtcaggctgccctaccaccggtttggcaacaacaccaagggccagtgt

SEQ ID NO: 732563 - DNA, 120 bp, Artificial Sequence
  ENSG00000198788_3 (sequence is synthesized)
caacccacaccgcccctgccagccaccatggggctgccactagcccgcctggcggctgtgtgcctggccctgtctttggcagggggctcggagctccagacagagggcagaacccgaaac

SEQ ID NO: 732564 - DNA, 120 bp, Artificial Sequence
  ENSG00000198788_4 (sequence is synthesized)
cacggccacaacgtctgcagcacctggggcaacttccactacaagaccttcgacggggacgtcttccgcttccccggcccctgcgactacaacttcgcctccgactgccgaggctcctac

SEQ ID NO: 732565 - DNA, 120 bp, Artificial Sequence
  ENSG00000198788_5 (sequence is synthesized)
aaggaatttgctgtgcacctgaagcggggtccgggccaggctgaggcccccgccggggtggagtccatcctgctgaccatcaaggatgacaccatctacctcacccgccacctggctgtg

SEQ ID NO: 732566 - DNA, 120 bp, Artificial Sequence
  ENSG00000198788_6 (sequence is synthesized)
cttaacggggccgtggtcagcaccccgcactacagccccgggctgctcattgagaagagcgatgcctacaccaaagtctactcccgcgccggcctcaccctcatgtggaaccgggaggat

SEQ ID NO: 732567 - DNA, 120 bp, Artificial Sequence
  ENSG00000198788_7 (sequence is synthesized)
gcactcatgctggagctggacactaagttccggaaccacacctgtggcctctgcggggactacaacggcctgcagagctattcagaattcctctctgacggcgtgctcttcagtcccctg

SEQ ID NO: 732568 - DNA, 120 bp, Artificial Sequence
  ENSG00000198788_8 (sequence is synthesized)
gagtttgggaacatgcagaagatcaaccagcccgatgtggtgtgtgaggatcccgaggaggaggtggcccccgcatcctgctccgagcaccgcgccgagtgtgagaggctgctgaccgcc

SEQ ID NO: 732569 - DNA, 120 bp, Artificial Sequence
  ENSG00000198788_9 (sequence is synthesized)
gaggccttcgcggactgtcaggacctggtgccgctggagccgtatctgcgcgcctgccagcaggaccgctgccggtgcccgggcggtgacacctgcgtctgcagcaccgtggccgagttc

SEQ ID NO: 732570 - DNA, 120 bp, Artificial Sequence
  ENSG00000198788_10 (sequence is synthesized)
tcccgccagtgctcccacgccggcggccggcccgggaactggaggaccgccacgctctgccccaagacctgccccgggaacctggtgtacctggagagcggctcgccctgcatggacacc

SEQ ID NO: 732571 - DNA, 120 bp, Artificial Sequence
  ENSG00000198788_11 (sequence is synthesized)
tgctcacacctggaggtgagcagcctgtgcgaggagcaccgcatggacggctgtttctgcccagaaggcaccgtatatgacgacatcggggacagtggctgcgttcctgtgagccagtgc

SEQ ID NO: 732572 - DNA, 120 bp, Artificial Sequence
  ENSG00000198788_12 (sequence is synthesized)
cactgcaggctgcacggacacctgtacacaccgggccaggagatcaccaatgactgcgagcagtgtgtctgtaacgctggccgctgggtgtgcaaagacctgccctgccccggcacctgt

SEQ ID NO: 732573 - DNA, 120 bp, Artificial Sequence
  ENSG00000198788_13 (sequence is synthesized)
gccctggaaggcggctcccacatcaccaccttcgatgggaagacgtacaccttccacggggactgctactatgtcctggccaagggtgaccacaacgattcctacgctctcctgggcgag

SEQ ID NO: 732574 - DNA, 120 bp, Artificial Sequence
  ENSG00000198788_14 (sequence is synthesized)
ctggccccctgtggctccacagacaagcagacctgcctgaagacggtggtgctgctggctgacaagaagaagaatgtggtggtcttcaagtccgatggcagtgtactgctcaacgagctg

SEQ ID NO: 732575 - DNA, 120 bp, Artificial Sequence
  ENSG00000198788_15 (sequence is synthesized)
caggtgaacctgccccacgtgaccgcgagcttctctgtcttccgcccgtcttcctaccacatcatggtgagcatggccattggcgtccggctgcaggtgcagctggccccagtcatgcaa

SEQ ID NO: 732576 - DNA, 120 bp, Artificial Sequence
  ENSG00000198788_16 (sequence is synthesized)
ctctttgtgacactggaccaggcctcccaggggcaggtgcagggcctctgcgggaacttcaacggcctggaaggtgacgacttcaagacggccagcgggctggtggaggccacgggggcc

SEQ ID NO: 732577 - DNA, 120 bp, Artificial Sequence
  ENSG00000198788_17 (sequence is synthesized)
ggctttgccaacacctggaaggcacagtcaacctgccatgacaagctggactggttggacgatccctgctccctgaacatcgagagcgccaactacgccgagcactggtgctccctcctg

SEQ ID NO: 732578 - DNA, 120 bp, Artificial Sequence
  ENSG00000198788_18 (sequence is synthesized)
aagaagacagagaccccctttggcaggtgccactcggctgtggaccctgctgagtattacaagaggtgcaaatatgacacgtgtaactgtcagaacaatgaggactgcctgtgcgccgcc

SEQ ID NO: 732579 - DNA, 120 bp, Artificial Sequence
  ENSG00000198788_19 (sequence is synthesized)
ctgtcctcctacgcgcgcgcctgcaccgccaagggcgtcatgctgtggggctggcgggagcatgtctgcaacaaggatgtgggctcctgccccaactcgcaggtcttcctgtacaacctg

SEQ ID NO: 732580 - DNA, 120 bp, Artificial Sequence
  ENSG00000198788_20 (sequence is synthesized)
accacctgccagcagacctgccgctccctctccgaggccgacagccactgtctcgagggctttgcgcctgtggacggctgcggctgccctgaccacaccttcctggacgagaagggccgc

SEQ ID NO: 732581 - DNA, 120 bp, Artificial Sequence
  ENSG00000198788_21 (sequence is synthesized)
tgcgtacccctggccaagtgctcctgttaccaccgcggtctctacctggaggcgggggacgtggtcgtcaggcaggaagaacgatgtgtgtgccgggatgggcggctgcactgtaggcag

SEQ ID NO: 732582 - DNA, 120 bp, Artificial Sequence
  ENSG00000198788_22 (sequence is synthesized)
atccggctgatcggccagagctgcacggccccaaagatccacatggactgcagcaacctgactgcactggccacctcgaagccccgagccctcagctgccagacgctggccgccggctat

SEQ ID NO: 732583 - DNA, 120 bp, Artificial Sequence
  ENSG00000198788_23 (sequence is synthesized)
taccacacagagtgtgtcagtggctgtgtgtgccccgacgggctgatggatgacggccggggtggctgcgtggtggagaaggaatgcccttgcgtccataacaacgacctgtattcttcc

SEQ ID NO: 732584 - DNA, 120 bp, Artificial Sequence
  ENSG00000198788_24 (sequence is synthesized)
ggcgccaagatcaaggtggactgcaatacctgcacctgcaagagaggacgctgggtgtgcacccaggctgtgtgccatggcacctgctccatttacgggagtggccactacatcaccttt

SEQ ID NO: 732585 - DNA, 120 bp, Artificial Sequence
  ENSG00000198788_25 (sequence is synthesized)
gacgggaagtactacgactttgacggacactgctcctacgtggctgttcaggactactgcggccagaactcctcactgggctcattcagcatcatcaccgagaacgtcccctgtggcact

SEQ ID NO: 732586 - DNA, 120 bp, Artificial Sequence
  ENSG00000198788_26 (sequence is synthesized)
acgggcgtcacctgctccaaggccatcaagatcttcatggggaggacggagctgaagttggaagacaagcaccgtgtggtgatccagcgtgatgagggtcaccacgtggcctacaccacg

SEQ ID NO: 732587 - DNA, 120 bp, Artificial Sequence
  ENSG00000198788_27 (sequence is synthesized)
cgggaggtgggccagtacctggtggtggagtccagcacgggcatcatcgtcatctgggacaagaggaccaccgtgttcatcaagctggctccctcctacaagggcaccgtgtgtggcctg

SEQ ID NO: 732588 - DNA, 120 bp, Artificial Sequence
  ENSG00000198788_28 (sequence is synthesized)
tgtgggaactttgaccaccgctccaacaacgacttcaccacgcgggaccacatggtggtgagcagcgagctggacttcgggaacagctggaaggaggcccccacctgcccagatgtgagc

SEQ ID NO: 732589 - DNA, 120 bp, Artificial Sequence
  ENSG00000198788_29 (sequence is synthesized)
accaaccccgagccctgcagcctgaacccgcaccgccgctcctgggccgagaagcagtgcagcatcctcaaaagcagcgtgttcagcatctgccacagcaaggtggaccccaagcccttc

SEQ ID NO: 732590 - DNA, 120 bp, Artificial Sequence
  ENSG00000198788_30 (sequence is synthesized)
tacgaggcctgtgtgcacgactcgtgctcctgtgacacgggtggggactgtgagtgcttctgctctgccgtggcctcctacgcccaggagtgtaccaaagagggggcctgcgtgttctgg

SEQ ID NO: 732591 - DNA, 120 bp, Artificial Sequence
  ENSG00000198788_31 (sequence is synthesized)
aggacgccggacctgtgccccatattctgcgactactacaaccctccgcatgagtgtgagtggcactatgagccatgtgggaaccggagcttcgagacctgcaggaccatcaatggcatc

SEQ ID NO: 732592 - DNA, 120 bp, Artificial Sequence
  ENSG00000198788_32 (sequence is synthesized)
cactccaacatctccgtgtcctacctggagggctgctacccccggtgccccaaggacaggcccatctatgaggaggatctgaagaagtgtgtcactgcagacaagtgtggctgctatgtc

SEQ ID NO: 732593 - DNA, 120 bp, Artificial Sequence
  ENSG00000198788_33 (sequence is synthesized)
gaggacacccactacccacctggagcatcggttcccaccgaggagacctgcaagtcctgcgtgtgtaccaactcctcccaagtcgtctgcaggccggaggaaggaaagattcttaaccag

SEQ ID NO: 732594 - DNA, 120 bp, Artificial Sequence
  ENSG00000198788_34 (sequence is synthesized)
acccaggatggcgccttctgctactgggagatctgtggccccaacgggacggtggagaagcacttcaacatctgttccattacgacacgcccgtccaccctgaccaccttcaccaccatc

SEQ ID NO: 732595 - DNA, 120 bp, Artificial Sequence
  ENSG00000198788_35 (sequence is synthesized)
accctccccaccacccccaccaccttcaccactaccaccaccaccaccaccccgacctccagcacagttttatcaacaactccgaagctgtgctgcctctggtctgactggatcaatgag

SEQ ID NO: 732596 - DNA, 120 bp, Artificial Sequence
  ENSG00000198788_36 (sequence is synthesized)
gaccaccccagcagtggcagcgacgacggtgaccgagaaacatttgatggggtctgcggggcccctgaggacatcgagtgcaggtcggtcaaggatccccacctcagcttggagcagcta

SEQ ID NO: 732597 - DNA, 120 bp, Artificial Sequence
  ENSG00000198788_37 (sequence is synthesized)
ggccagaaggtgcagtgtgatgtctctgttgggttcatttgcaagaatgaagaccagtttggaaatggaccatttggactgtgttacgactacaagatacgtgtcaattgttgctggccc

SEQ ID NO: 732598 - DNA, 120 bp, Artificial Sequence
  ENSG00000198788_38 (sequence is synthesized)
atggataagtgtatcaccactcccagccctccaactaccactcccagccctccaccaaccagcacgaccacccttccaccaaccaccacccccagccctccaaccaccaccacaaccacc

SEQ ID NO: 732599 - DNA, 120 bp, Artificial Sequence
  ENSG00000198788_39 (sequence is synthesized)
cctccaccaaccaccacccccagccctccaataaccaccacgaccacccctccaccaaccaccactcccagccctccaataagcaccacaaccacccctccaccaaccaccactcccagc

SEQ ID NO: 732600 - DNA, 120 bp, Artificial Sequence
  ENSG00000198788_40 (sequence is synthesized)
cctccaaccaccactcccagccctccaaccaccactcccagccctccaacaaccaccacaaccacccctccaccaaccaccactcccagccctccaacgactacgcccatcactccacca

SEQ ID NO: 732601 - DNA, 120 bp, Artificial Sequence
  ENSG00000198788_41 (sequence is synthesized)
gccagcactaccacccttccaccaaccaccactcccagccctccaacaaccaccacaaccacccctccaccaaccaccactcccagtcctccaacgactacgcccatcactccaccaacc

SEQ ID NO: 732602 - DNA, 120 bp, Artificial Sequence
  ENSG00000198788_42 (sequence is synthesized)
agcactactacccttccaccaaccaccactcccagccctccaccaaccaccacaaccacccctccaccaaccaccactcccagccctccaacaaccaccactcccagtcctccaacaatc

SEQ ID NO: 732603 - DNA, 120 bp, Artificial Sequence
  ENSG00000198788_43 (sequence is synthesized)
accacaaccacccctccaccaaccaccactcccagccctccaacaaccaccacgaccacccttccaccaaccaccacttccagccctctaacaactactcctctacctccatcaataact

SEQ ID NO: 732604 - DNA, 120 bp, Artificial Sequence
  ENSG00000198788_44 (sequence is synthesized)
cctcctacattttcaccattctcaacgacaacccctactaccccatgcgtgcctctctgcaattggactggctggctggattctggaaaacccaactttcacaaaccaggtggagacaca

SEQ ID NO: 732605 - DNA, 120 bp, Artificial Sequence
  ENSG00000198788_45 (sequence is synthesized)
gaattgattggagacgtctgtggaccaggctgggcagctaacatctcttgcagagccaccatgtatcctgatgttcccattggacagcttggacaaacagtggtgtgtgatgtctctgtg

SEQ ID NO: 732606 - DNA, 120 bp, Artificial Sequence
  ENSG00000198788_46 (sequence is synthesized)
gggctgatatgcaaaaatgaagaccaaaagccaggtggggtcatccctatggccttctgcctcaactacgagatcaacgttcagtgctgtgagtgtgtcacccaacccaccaccatgaca

SEQ ID NO: 732607 - DNA, 84 bp, Artificial Sequence
  ENSG00000198788_47 (sequence is synthesized)
gcacacagagtacaacaccaacacccatcaccaccaccaatacggtaaccccaaccccaacccccactggcacacagaccccaa

SEQ ID NO: 732608 - DNA, 81 bp, Artificial Sequence
  ENSG00000198788_48 (sequence is synthesized)
acagagtacaacaccaacacccatcaccaccaccaatacggtaaccccaaccccaacccccactaccactatggtgacccc

SEQ ID NO: 732609 - DNA, 60 bp, Artificial Sequence
  ENSG00000198788_49 (sequence is synthesized)
accaccatggtgaccccaaccccaacacccactggaacacagacccaaaccccaccaaca

SEQ ID NO: 732610 - DNA, 80 bp, Artificial Sequence
  ENSG00000198788_50 (sequence is synthesized)
acatcgacacccatcaccaccaacactacggtgaccccaaccccaacaccaaccggcacaccgagtacaaccctgacacc

SEQ ID NO: 732611 - DNA, 87 bp, Artificial Sequence
  ENSG00000198788_51 (sequence is synthesized)
caccctccaccaccactacggtgaccccaaccccgacacccatctccaccaccactacagtgaccccaaccccaacacccaccggca

SEQ ID NO: 732612 - DNA, 120 bp, Artificial Sequence
  ENSG00000198788_52 (sequence is synthesized)
ccacggtgaacaccaacccccaacacccaccggcacacaaaaccccaacatcaacacccatcaccacccaccactacggttgaccccaacccccaaaacccaccggcacacagaccccaa

SEQ ID NO: 732613 - DNA, 79 bp, Artificial Sequence
  ENSG00000198788_53 (sequence is synthesized)
tgaccccaacccccaaaacccaccggcacacagaccccaaccccaacacccattctccaccaccaataacgaccatgac

SEQ ID NO: 732614 - DNA, 70 bp, Artificial Sequence
  ENSG00000198788_54 (sequence is synthesized)
caaccaggcacacaggccccaaccccaacagccatcaccaccaccagtacggtgaccccaaccccaacac

SEQ ID NO: 732615 - DNA, 77 bp, Artificial Sequence
  ENSG00000198788_55 (sequence is synthesized)
ccacacggtgacaccaaccccaacacccaccggcacacagtccccaaccccaacagccatcaccaccaccactacgg

SEQ ID NO: 732616 - DNA, 79 bp, Artificial Sequence
  ENSG00000198788_56 (sequence is synthesized)
ccaccaccaccacggtgaccccaaccccgacacccaccggcacacagaccccaaccacggtactccagcacaaagagta

SEQ ID NO: 732617 - DNA, 83 bp, Artificial Sequence
  ENSG00000198788_57 (sequence is synthesized)
cccaaccccaacacccaccagcacaaagagtacaaccgtgacacccatcaccaccacaactacggtgaccggatacccatcag

SEQ ID NO: 732618 - DNA, 120 bp, Artificial Sequence
  ENSG00000198788_58 (sequence is synthesized)
ggaagcacggggccccccacccacacaagcacagcaccgattgctgagttgaccacatccaatcctccgcctgagtcctcaacccctcagacctctcggtccacctcttcccctctcacg

SEQ ID NO: 732619 - DNA, 120 bp, Artificial Sequence
  ENSG00000198788_59 (sequence is synthesized)
gagtcaaccacccttctgagtaccctaccacctgccattgagatgaccagcacggccccaccctccacacccacggcacccacgaccacgagcggaggccacacactgtctccaccgccc

SEQ ID NO: 732620 - DNA, 120 bp, Artificial Sequence
  ENSG00000198788_60 (sequence is synthesized)
agcaccaccacgtcccctccaggcacccccactcgcggtaccacgactgggtcatcttcagcccccacccccagcactgtgcagacgaccaccaccagtgcctggacccccacgccgacc

SEQ ID NO: 732621 - DNA, 120 bp, Artificial Sequence
  ENSG00000198788_61 (sequence is synthesized)
ccactctccacacccagcatcatcaggaccacaggcctgaggccctacccttcctctgtgcttatctgctgtgtcctgaacgacacctactacgcaccaggtgaggaggtgtacaacggc

SEQ ID NO: 732622 - DNA, 120 bp, Artificial Sequence
  ENSG00000198788_62 (sequence is synthesized)
acatacggagacacctgttatttcgtcaactgctcactgagctgtacgttggagttctataactggtcctgcccatccacgccctccccaacacccacgccctccaagtcgacgcccacg

SEQ ID NO: 732623 - DNA, 120 bp, Artificial Sequence
  ENSG00000198788_63 (sequence is synthesized)
ccttccaagccatcgtccacgccctccaagccgacgcccggcaccaagccccccgagtgcccagactttgatcctcccagacaggagaacgagacttggtggctgtgcgactgcttcatg

SEQ ID NO: 732624 - DNA, 120 bp, Artificial Sequence
  ENSG00000198788_64 (sequence is synthesized)
gccacgtgcaagtacaacaacacggtggagatcgtgaaggtggagtgtgagccgccgcccatgcccacctgctccaacggcctccaacccgtgcgcgtcgaggaccccgacggctgctgc

SEQ ID NO: 732625 - DNA, 120 bp, Artificial Sequence
  ENSG00000198788_65 (sequence is synthesized)
tgcattctgcccagcggggagatcgtctccaactgtgaggctgcggctgaccagtggctggtgaacgacccctccaagccacactgcccccacagcagctccacgaccaagcgcccggcc

SEQ ID NO: 732626 - DNA, 120 bp, Artificial Sequence
  ENSG00000198788_66 (sequence is synthesized)
gtcactgtgcccgggggcggtaaaacgaccccacacaaggactgcaccccatctcccctctgccagctcatcaaggacagcctgtttgcccagtgccacgcactggtgcccccgcagcac

SEQ ID NO: 732627 - DNA, 120 bp, Artificial Sequence
  ENSG00000198788_67 (sequence is synthesized)
tactacgatgcctgcgtgttcgacagctgcttcatgccgggctcgagcctggagtgcgccagtctgcaggcctacgcagccctctgtgcccagcagaacatctgcctcgactggcggaac

SEQ ID NO: 732628 - DNA, 120 bp, Artificial Sequence
  ENSG00000198788_68 (sequence is synthesized)
cacacgcatggggcctgcttggtggagtgcccatctcacagggagtaccaggcctgtggccctgcagaagagcccacgtgcaaatccagctcctcccagcagaacaacacagtcctggtg

SEQ ID NO: 732629 - DNA, 120 bp, Artificial Sequence
  ENSG00000198788_69 (sequence is synthesized)
gaaggctgcttctgtcctgagggcaccatgaactacgctcctggctttgatgtctgcgtgaagacctgcggctgtgtgggacctgacaatgtgcccagagagtttggggagcacttcgag

SEQ ID NO: 732630 - DNA, 120 bp, Artificial Sequence
  ENSG00000198788_70 (sequence is synthesized)
ttcgactgcaagaactgtgtctgcctggagggtggaagtggcatcatctgccaacccaagaggtgcagccagaagcccgttacccactgcgtggaagacggcacctacctcgccacggag

SEQ ID NO: 732631 - DNA, 120 bp, Artificial Sequence
  ENSG00000198788_71 (sequence is synthesized)
gtcaaccctgccgacacctgctgcaacattaccgtctgcaagtgcaacaccagcctgtgcaaagagaagccctccgtgtgcccgctgggattcgaagtgaagagcaagatggtgcctgga

SEQ ID NO: 732632 - DNA, 120 bp, Artificial Sequence
  ENSG00000198788_72 (sequence is synthesized)
aggtgctgtcctttctactggtgtgagtccaagggggtgtgtgttcacgggaatgctgagtaccagcccggttctccagtttattcctccaagtgccaggactgcgtgtgcacggacaag

SEQ ID NO: 732633 - DNA, 120 bp, Artificial Sequence
  ENSG00000198788_73 (sequence is synthesized)
gtggacaacaacaccctgctcaacgtcatcgcctgcacccacgtgccctgcaacacctcctgcagccctggcttcgaactcatggaggcccccggggagtgctgtaagaagtgtgaacag

SEQ ID NO: 732634 - DNA, 120 bp, Artificial Sequence
  ENSG00000198788_74 (sequence is synthesized)
acgcactgtatcatcaaacggcccgacaaccagcacgtcatcctgaagcccggggacttcaagagcgacccgaagaacaactgcacattcttcagctgcgtgaagatccacaaccagctc

SEQ ID NO: 732635 - DNA, 120 bp, Artificial Sequence
  ENSG00000198788_75 (sequence is synthesized)
atctcgtccgtctccaacatcacctgccccaactttgatgccagcatttgcatcccgggctccatcacattcatgcccaatggatgctgcaagacctgcacccctcgcaatgagaccagg

SEQ ID NO: 732636 - DNA, 120 bp, Artificial Sequence
  ENSG00000198788_76 (sequence is synthesized)
gtgccctgctccaccgtccccgtcaccacggaggtttcgtacgccggctgcaccaagaccgtcctcatgaatcattgctccgggtcctgcgggacatttgtcatgtactcggccaaggcc

SEQ ID NO: 732637 - DNA, 120 bp, Artificial Sequence
  ENSG00000198788_77 (sequence is synthesized)
caggccctggaccacagctgctcctgctgcaaagaggagaaaaccagccagcgtgaggtggtcctgagctgccccaatggcggctcgctgacacacacctacacccacatcgagagctgc

SEQ ID NO: 732638 - DNA, 120 bp, Artificial Sequence
  ENSG00000198788_78 (sequence is synthesized)
cagtgccaggacaccgtctgcgggctccccaccggcacctcccgccgggcccggcgctcccctaggcatctggggagcgggtgagcggggtgggcacagcccccttcactgccctcgaca

SEQ ID NO: 732639 - DNA, 120 bp, Artificial Sequence
  ENSG00000198788_79 (sequence is synthesized)
gctttacctcccccggaccctctgagcctcctaagctcggcttcctctcttcagatatttattgtctgagtctttgttcagtccttgctttccaataataaactcagggggacatgctgt

SEQ ID NO: 732640 - DNA, 120 bp, Artificial Sequence
  ENSG00000198788_80 (sequence is synthesized)
accaacccccaacacccaccggcacacaaaaccccaacatcaacacccatcaccaccactacggttgaccccaacccccccaccggcacacagaccccaaccccaacacccattaccacc

SEQ ID NO: 732641 - DNA, 120 bp, Artificial Sequence
  ENSG00000198791_0 (sequence is synthesized)
gtgcgaaaagcgacggcgcagcacggtgcggcgcagctcctgctcgcctttcccttcgctgggcgagaggtgtctatggggcacccgctgccgccgccgctaccgccaccgccaccgcca

SEQ ID NO: 732642 - DNA, 120 bp, Artificial Sequence
  ENSG00000198791_1 (sequence is synthesized)
ccgccgccgagtgctgtctctatggcgaggaggaggaggaggagcgcgagctcagcgacacaagtacataaataaaggataaaatattttatgaaacaaatcttcaatcaagtataacat

SEQ ID NO: 732643 - DNA, 120 bp, Artificial Sequence
  ENSG00000198791_2 (sequence is synthesized)
tttgatgcttggcatctagactcccttgtgccctcactatgccagcggcaactgtagatcatagccaaagaatttgtgaagtttgggcttgcaacttggatgaagagatgaagaaaattc

SEQ ID NO: 732644 - DNA, 120 bp, Artificial Sequence
  ENSG00000198791_3 (sequence is synthesized)
gtcaagttatccgaaaatataattacgttgctatggacaccgagtttccaggtgtggttgcaagacccattggagaattcaggagcaatgctgactatcaataccaactattgcggtgta

SEQ ID NO: 732645 - DNA, 120 bp, Artificial Sequence
  ENSG00000198791_4 (sequence is synthesized)
atgtagacttgttaaagataattcagctaggactgacatttatgaatgagcaaggagaataccctccaggaacttcaacttggcagtttaattttaaatttaatttgacggaggacatgt

SEQ ID NO: 732646 - DNA, 120 bp, Artificial Sequence
  ENSG00000198791_5 (sequence is synthesized)
atgcccaggactctatagagctactaacaacatctggtatccagtttaaaaaacatgaggaggaaggaattgaaacccagtactttgcagaacttcttatgacttctggagtggtcctct

SEQ ID NO: 732647 - DNA, 120 bp, Artificial Sequence
  ENSG00000198791_6 (sequence is synthesized)
gtgaaggggtcaaatggttgtcatttcatagcggttacgactttggctacttaatcaaaatcctaaccaactctaacttgcctgaagaagaacttgacttctttgagatccttcgattgt

SEQ ID NO: 732648 - DNA, 120 bp, Artificial Sequence
  ENSG00000198791_7 (sequence is synthesized)
tttttcctgtcatttatgatgtgaagtacctcatgaagagctgcaaaaatctcaaaggtggattacaggaggtggcagaacagttagagctggaacggataggaccacaacatcaggcag

SEQ ID NO: 732649 - DNA, 120 bp, Artificial Sequence
  ENSG00000198791_8 (sequence is synthesized)
gatctgattcattgctcacaggaatggcctttttcaaaatgagagaaatgttctttgaagatcatattgatgatgccaaatattgtggtcatttgtatggccttggttctggttcatcct

SEQ ID NO: 732650 - DNA, 120 bp, Artificial Sequence
  ENSG00000198791_9 (sequence is synthesized)
atgtacagaatggcacagggaatgcatatgaagaggaagccaacaagcagtcatgacatgaaatagtccttttatttttatttcgagctacacacatgcttgtatataggttttatctct

SEQ ID NO: 732651 - DNA, 120 bp, Artificial Sequence
  ENSG00000198791_10 (sequence is synthesized)
ggttgaatccctcgaacaatagacagtacctttcccccccctttcatggcccattttattgtctgcctttcagtactaagtatgaccgttcctatctcagatcttaataaaaagaaaaaa

SEQ ID NO: 732652 - DNA, 120 bp, Artificial Sequence
  ENSG00000198791_11 (sequence is synthesized)
aaaaacgcattcaggttaaatttggccttaatttaatatacttgttagcaagcgtgtgtgacagagagtggggaaagctacatcattgaatattttgataaactttaccgacttgagttt

SEQ ID NO: 732653 - DNA, 120 bp, Artificial Sequence
  ENSG00000198791_12 (sequence is synthesized)
ggtttatttttcccttttcctaaattaactagcactgactgtaatttatttccctgtttcacgtctctcccttccattctgcaggagttttagctatttgagatcgtggaccatcagttt

SEQ ID NO: 732654 - DNA, 120 bp, Artificial Sequence
  ENSG00000198791_13 (sequence is synthesized)
tgcactttagagagtgtttctgactctaaacctgttttatcagaaaatttgttttttcttgatcttagctggaaaaatctgccaactttacacagtatttacttggttttgacccacaga

SEQ ID NO: 732655 - DNA, 120 bp, Artificial Sequence
  ENSG00000198791_14 (sequence is synthesized)
atatagcacgttgtgcaaactgtcgattcagcgaaacttaaaaaagacaagaaactactgaggagcttagtaactgctgtttctgtacgtagtgtttaatcttccaagcacatctagtgt

SEQ ID NO: 732656 - DNA, 120 bp, Artificial Sequence
  ENSG00000198791_15 (sequence is synthesized)
ctgtcagtttctaattggcatgtgtaggctgctctgtgactgaagaattttcaaaccagctttacacccttcaggaaaaatcccttgtgattggatgtttactatctgccaggaaactgg

SEQ ID NO: 732657 - DNA, 120 bp, Artificial Sequence
  ENSG00000198791_16 (sequence is synthesized)
tactcaagatgttgaagctacagttattttatgatagcacacttcccttgatctgcttatttttattccatcaccatttaccctttttttttttttaaattttgtagccattcttatgat

SEQ ID NO: 732658 - DNA, 120 bp, Artificial Sequence
  ENSG00000198791_17 (sequence is synthesized)
gctcttgatttgttggttacacaaatcaattttattaaaaatccaaagataagtctttaggtatattttgtaccaaattaaattagaagacaaaaattgtgctttcatagttgctacaaa

SEQ ID NO: 732659 - DNA, 120 bp, Artificial Sequence
  ENSG00000198791_18 (sequence is synthesized)
ggtaaataatggagagatttggtacaaaacaacaaaatatatatatattctcatatatatatatatagctgataaaattacctgaggagtgtaatgcttatttttttgtgtatatctttg

SEQ ID NO: 732660 - DNA, 120 bp, Artificial Sequence
  ENSG00000198791_19 (sequence is synthesized)
caatctattttatatatattgacaaaagagactgtgaaatacttagccatgcagaatatgtgaccagaccagagcatgtgtaggaagactttacggtaatcattaactctaccccgaaat

SEQ ID NO: 732661 - DNA, 120 bp, Artificial Sequence
  ENSG00000198791_20 (sequence is synthesized)
gatggactacaagttataatgtgtgttacctacacttcaatcagtaatattagcaaatctccaaatgttagtcacattggtttgtctcccttgtacattctttattcatgatattacagt

SEQ ID NO: 732662 - DNA, 120 bp, Artificial Sequence
  ENSG00000198791_21 (sequence is synthesized)
gctgtaactgggtggtcctttttaaacaaaacattatttgcaaaacagagggtattatttgtttttaaagcttttgtaaataaaggcttcaaaatgttttcttataaatgttgatgactg

SEQ ID NO: 732663 - DNA, 120 bp, Artificial Sequence
  ENSG00000198791_22 (sequence is synthesized)
gtgattttcttttggaaatacttatttgggggatattgttcatttttatttgggcaactcaacagaattcagtaacttccttcattaaccctagatgattattagtccattaattgaaaa

SEQ ID NO: 732664 - DNA, 120 bp, Artificial Sequence
  ENSG00000198791_23 (sequence is synthesized)
atcagtctgagttttctgcatttcaagtgttggcttattcttgttctttatgagtacctcaactagctaattaaggactgacttctgtttctcctttccaggaatgcatttattccgaag

SEQ ID NO: 732665 - DNA, 120 bp, Artificial Sequence
  ENSG00000198791_24 (sequence is synthesized)
gatatacttcacaaagtaaatacatttggtataactgtggctttttaaaaaatctaacacaatgtagtaagtttctaactggcttcttttgtcttcgttaaaaaggaagtgaagcttctt

SEQ ID NO: 732666 - DNA, 120 bp, Artificial Sequence
  ENSG00000198791_25 (sequence is synthesized)
ttcgcttgtgatttgttagctgagaaaactaatatttaaattctgttcaactatttgagaaatcaatgctggatttcaaataggaatgataaagattgcctttttattagccacatagtt

SEQ ID NO: 732667 - DNA, 120 bp, Artificial Sequence
  ENSG00000198791_26 (sequence is synthesized)
gctcaatctcataacttgtatcatttctggcttctgtccctaaaaagtatagataatccctaacttactttcgacttaatgatttttcaactttacagtgggtgtattgagaggtaaccc

SEQ ID NO: 732668 - DNA, 120 bp, Artificial Sequence
  ENSG00000198791_27 (sequence is synthesized)
catcaaaagtttaggagcgccttaggaccaaagatggggttatagtttctactgaatgtgtattgcttttgcaccattgcaaagtcaaaatttataacttgaaccatcgtaaattggggg

SEQ ID NO: 732669 - DNA, 120 bp, Artificial Sequence
  ENSG00000198791_28 (sequence is synthesized)
aacctcattgtaggttgagcaaccgtatagtgtaacttttgtagaggaacattttgacttttactgggtctaagttttacttttttattttgttccagacagtctcaatgtttgtaaagt

SEQ ID NO: 732670 - DNA, 120 bp, Artificial Sequence
  ENSG00000198791_29 (sequence is synthesized)
ctaggttccagatgtaagatatttggctgatattttagtgttactgagccattaattaattacaggctcatatattctgttaaatctactagagcaagggttgtcaaactatggcccgta

SEQ ID NO: 732671 - DNA, 120 bp, Artificial Sequence
  ENSG00000198791_30 (sequence is synthesized)
gccagaatcagcttgctgcctgtttttgtgtggcccatgaactgaaaatggcttttaaatggttgggaaaaataatcaaaagattatttcctgacatctgaaaattacatgaaattcaaa

SEQ ID NO: 732672 - DNA, 120 bp, Artificial Sequence
  ENSG00000198791_31 (sequence is synthesized)
ttttagtgtctataagtttttattggaatgcagccacactaatttacatattatctatggatacttttttgctataatgggaaagttgagtagctgctacagaacctgtgtatgtgtgtc

SEQ ID NO: 732673 - DNA, 120 bp, Artificial Sequence
  ENSG00000198791_32 (sequence is synthesized)
ttgtttcacattgccgcttggcaagctacagaatcatggtgatgcagatattacctgaaagcatttggaatgccctgtgtattgctagatttattactttttctgctaccagttcatgcc

SEQ ID NO: 732674 - DNA, 120 bp, Artificial Sequence
  ENSG00000198791_33 (sequence is synthesized)
ctgtatctcagaacaagaaaagtacctttgaatgttacactttcaaggcacattggaatatggactattttattatatgctggtacattgtgtttataatgcagtgtcaccataactggt

SEQ ID NO: 732675 - DNA, 120 bp, Artificial Sequence
  ENSG00000198791_34 (sequence is synthesized)
aaaagaatagactgacagtatcagactaacatcacaatattcccaactggtgggaaagcaacagtcagaagaattagaaaatttaaatgaaacatcacagcaaaatttcacaaaagtaat

SEQ ID NO: 732676 - DNA, 120 bp, Artificial Sequence
  ENSG00000198791_35 (sequence is synthesized)
aaaaatgaggctgcaaccaaaatgtttacaagtagcctatttgttagccaagcaaagaaaaccatttactaatgctgaattacatcgtgcttgaagatagtaaccaacccaaagacatgt

SEQ ID NO: 732677 - DNA, 120 bp, Artificial Sequence
  ENSG00000198791_36 (sequence is synthesized)
gtccagagaaaattaagacatcagccctttgatgagaacagtagtttgaagaatgaggattttggacacaacatcaaatgacactgttaattctttgcctcttactagtcagtactgcct

SEQ ID NO: 732678 - DNA, 120 bp, Artificial Sequence
  ENSG00000198791_37 (sequence is synthesized)
agctttattttttgagaaaccattgctggatttgaagtgatcgaagaatttgtatggaactacaagtgggaatattttcaaaaaagttgataaacagtacaacctgaagtggaatctact

SEQ ID NO: 732679 - DNA, 120 bp, Artificial Sequence
  ENSG00000198791_38 (sequence is synthesized)
aagatgtgatgcaaccgatgctgggaaaaatgcatgaagcagaaaaaaagtttatttggtcaaattttaaggcttgtgaaaacgtaagttgtttaaagcctgtagttactcacttgatta

SEQ ID NO: 732680 - DNA, 120 bp, Artificial Sequence
  ENSG00000198791_39 (sequence is synthesized)
ttcatcagcaggtacttcacaggaaatattggtgttactgaactggtcaacagttaacttcatttgctcttgtggacttaaccatcttcagttccatgatttttttttttttgtgagaaa

SEQ ID NO: 732681 - DNA, 120 bp, Artificial Sequence
  ENSG00000198791_40 (sequence is synthesized)
cagaagctgaatatcctgatttgatttgccacacaggcgttcaatggcttagcagtgctaaagatttatttttatttttttgggctctgggctgacattgaaatttttctgaatgagaaa

SEQ ID NO: 732682 - DNA, 120 bp, Artificial Sequence
  ENSG00000198791_41 (sequence is synthesized)
aaccatcctcaaccactgttttttaacactgagtaactttggaaattaacttttgccacagacttgaaaatgtttcttaatgaatttgacctgaaattacaaggtacaacaacataatat

SEQ ID NO: 732683 - DNA, 120 bp, Artificial Sequence
  ENSG00000198791_42 (sequence is synthesized)
ggtaaattcatttcaataaaaactaaaacttaagattgtcaagctgctttatatactttctgtgctatgagaagtcaaaacagcgctgtattgccaaatccatttttagtggatatattt

SEQ ID NO: 732684 - DNA, 120 bp, Artificial Sequence
  ENSG00000198791_43 (sequence is synthesized)
tcctgtagcagttttttggaccttgatgcagtgcaaagaaaatttttaaattttaaaagcatttaactgcaattaaatgcttttaaagtttcctcttaatcttctgttggaaatgaatca

SEQ ID NO: 732685 - DNA, 120 bp, Artificial Sequence
  ENSG00000198791_44 (sequence is synthesized)
tcttgaatgaatgacatgctaaagggcaaataccaaaaagatgaatcctacaaatgccttacaagtgatgaatatgcttaactaaaatcacatgctcatgggtggatgtgtcagtattta

SEQ ID NO: 732686 - DNA, 120 bp, Artificial Sequence
  ENSG00000198791_45 (sequence is synthesized)
gcagtaccttgacctgtttgtgtgaaaagacattttcaaagatgaaatacgtgaaatcccattacacatcagcattaacagattaacattttctatttattccaatgaggggataccaac

SEQ ID NO: 732687 - DNA, 120 bp, Artificial Sequence
  ENSG00000198791_46 (sequence is synthesized)
tttcagcccaaattgagcaaaatgttacctcccgtcccctgccaaaaaatcccattattcccattagtagaactctattactaaaaaaagaaaaaaaaattgtactcaatattttgagtt

SEQ ID NO: 732688 - DNA, 120 bp, Artificial Sequence
  ENSG00000198791_47 (sequence is synthesized)
ttcaatttttagaataaaaatttggtgaaaagtttccttgagtacctaaataatgtccttcattttgtcttagcttgcaaagcctctaatatttgctacctgcccttttcaaaaaaaaaa

SEQ ID NO: 732689 - DNA, 120 bp, Artificial Sequence
  ENSG00000198791_48 (sequence is synthesized)
aaaaaaaaaaaaaaaaggcttgtccacctctctactagaagaaactcaagggtctatgtctgtcctgtttgctatttcatctgcattgccaaatgcagtggctcctctgggtaggcaacc

SEQ ID NO: 732690 - DNA, 120 bp, Artificial Sequence
  ENSG00000198791_49 (sequence is synthesized)
tgaggtggaatcaaattatgaatgcatatgttatctcatgtctataaaataaatgtgttagaatttataaataaagggataggaaaaatgctgattattctgtgtgtcggtgctttgtag

SEQ ID NO: 732691 - DNA, 120 bp, Artificial Sequence
  ENSG00000198791_50 (sequence is synthesized)
tgaaggccagttcacacatgccatttgctatgttggtgtaatttatatgagagtttcttttataacaacgttacctgtcatttatttttctattaagacattatagaaacgtaggactgt

SEQ ID NO: 732692 - DNA, 120 bp, Artificial Sequence
  ENSG00000198791_51 (sequence is synthesized)
acacatccaaatcctgcagaattttcatttcaggttttgaaagttaaaaaaatgtcaccatagaatgaaaattccaagaaaacaagattcatgtacattatcactagacaatttccattt

SEQ ID NO: 732693 - DNA, 120 bp, Artificial Sequence
  ENSG00000198791_52 (sequence is synthesized)
gttttaaacagttttctacagcattagttacatttaacgtttagtataaaagcaattgagcaatttctctttagaagtccatttcattgctttgtagccatagtctgtaggtgaatgaac

SEQ ID NO: 732694 - DNA, 120 bp, Artificial Sequence
  ENSG00000198791_53 (sequence is synthesized)
aagctacatttctccagaattactcattttctttttaaagataaactggtcaatactctccttcctggtatggaggaattttttgtatatgagaagcattcatgaatataatctgccctc

SEQ ID NO: 732695 - DNA, 120 bp, Artificial Sequence
  ENSG00000198791_54 (sequence is synthesized)
ttgctttattgtcataggaggggaaattcactgctttcacacccttctgttttggctctttctcccaaaagataagaatctttatttagtatcataccaagaaattggagttcctttagc

SEQ ID NO: 732696 - DNA, 120 bp, Artificial Sequence
  ENSG00000198791_55 (sequence is synthesized)
ttcagactatcatcatggcttccaaattgttaggaaatacaagtttgcaagaccccaaggggacttaatattttacatcttactagccatgtcataggttttaagtgcttttaatgggga

SEQ ID NO: 732697 - DNA, 120 bp, Artificial Sequence
  ENSG00000198791_56 (sequence is synthesized)
actgtttcactcatgccatatacctgttttgtttttctaaaaaattaatactgtaagttgtgagcaggtgtcttgtatcactgcgaaacccatgcataataaaaacttgttcttgagcta

SEQ ID NO: 732698 - DNA, 120 bp, Artificial Sequence
  ENSG00000198791_57 (sequence is synthesized)
gtcaagttatccgaaaatataattacgttgctatgttcttcaagaaacttggttttagcattggaatactgtgagcatcatttcatgtatcctttgggagacaggaatttatgattttcc

SEQ ID NO: 732699 - DNA, 120 bp, Artificial Sequence
  ENSG00000198791_58 (sequence is synthesized)
ggcctttttcaaaatgagagaagtatgaagacatcactgcctttttctcagttggttgttaggttgagaacattaaaaatcttgtggccaaagattttgggcaacaagtacctactaagt

SEQ ID NO: 732700 - DNA, 120 bp, Artificial Sequence
  ENSG00000198791_59 (sequence is synthesized)
ccgaaaatataattacgttgctatgacatgattacagagtggccttatttgaggttgaacttttgtgaaattgtgttcaacaggagaacattagggcgtggctatgagtgccaggtctgc

SEQ ID NO: 732701 - DNA, 120 bp, Artificial Sequence
  ENSG00000198791_60 (sequence is synthesized)
tcctagcaacaccaaagcctagctggtagtaccacatgagctcccagaagctagggtgctctttctcaaacaaaaaaatcagatgtgccagtgaaacgttgttggtctgcaatttgtttt

SEQ ID NO: 732702 - DNA, 120 bp, Artificial Sequence
  ENSG00000198791_61 (sequence is synthesized)
gggacgatgaacctgagagggtgcgcgatggcgccagctggagtgcggctggcggaggaaggagcctggcggcgggttgggggctggaaggatttgaaatttccctgcccaagaatcaac

SEQ ID NO: 732703 - DNA, 120 bp, Artificial Sequence
  ENSG00000198791_62 (sequence is synthesized)
tttggactctctgaatgattttttattcgaaacacttttctgaaataatgacctttgtatttaaattgcatttttcttgcatatatataaagcattgaaacaggtggactcaagccattc

SEQ ID NO: 732704 - DNA, 120 bp, Artificial Sequence
  ENSG00000198791_63 (sequence is synthesized)
taaagtcttgaattcaacccttttggttgatatttttagggattaatttcaccatgaaaagtaaaatttgtcactgccctccagccaaaatccatcaggaatacacctgtgatttgacag

SEQ ID NO: 732705 - DNA, 120 bp, Artificial Sequence
  ENSG00000198791_64 (sequence is synthesized)
gttgggtttatccctcattgcagtgagggaaaacgcactggaattcatgggaaccatgggccgtttgaataagagttaggaaggatttgggctcgtgtcaggtggtcttaggggaaggta

SEQ ID NO: 732706 - DNA, 120 bp, Artificial Sequence
  ENSG00000198791_65 (sequence is synthesized)
acacttaaaagtattcaaaaataagtcatcttgaaatgtagttcagaaggaactgggagaacatgttcatcatagaaccaacaattttaaaacataaactacctgagaagtcatgtaggt

SEQ ID NO: 732707 - DNA, 120 bp, Artificial Sequence
  ENSG00000198791_66 (sequence is synthesized)
ccaaccatattatttctcaggtgagaaaacaggctaataacttccatgattaaacacattactagtgggagaactccagagttcttttctgactcccattggtgctcctcctacaaggca

SEQ ID NO: 732708 - DNA, 120 bp, Artificial Sequence
  ENSG00000198791_67 (sequence is synthesized)
aggaatctttatattaggtttattctagcatgaccccttttaaggtttaaactggtgataaatatattatttgctcatgtcattcttcagtgctttgaagattttatagagaagaactca

SEQ ID NO: 732709 - DNA, 120 bp, Artificial Sequence
  ENSG00000198791_68 (sequence is synthesized)
ggctcttttactgcattgagtcttaaaaggggggttgaattccgaagggatcaaataaatccaacgtagtagttgcatcagaaaccatattaggaaaaccctccttaaacggcaaaaggc

SEQ ID NO: 732710 - DNA, 120 bp, Artificial Sequence
  ENSG00000198791_69 (sequence is synthesized)
agagatcagttccttgagtataaagtgttagggatggaagaatgaaactaaatgaacccattatctactcctaagtaattaagtgatgtgcacagatacacctagctataggtaaacagg

SEQ ID NO: 732711 - DNA, 120 bp, Artificial Sequence
  ENSG00000198791_70 (sequence is synthesized)
aaaattggttgtgcaaaaaacaagtgaggtttttcttgactataagttttcccttttggaaaaattcgctgtggatttgagtatattttctcttagacattaaattgagactgagaattt

SEQ ID NO: 732712 - DNA, 120 bp, Artificial Sequence
  ENSG00000198791_71 (sequence is synthesized)
cttttttttttttttctttaatcttaggaattgattttcctcaagtatggtgacatgctaggtgaatttggtgtagttatcctggaaatatataaaacgtaacatttcaaaagcgtggtt

SEQ ID NO: 732713 - DNA, 120 bp, Artificial Sequence
  ENSG00000198791_72 (sequence is synthesized)
ttcttttttactatgggaccaaaaaaaatactttgatgttaaagatgttatatttaaaatatgactgcagctttttttgtatttggaagactgggtattgaaagtacttctgatagaaaa

SEQ ID NO: 732714 - DNA, 120 bp, Artificial Sequence
  ENSG00000198791_73 (sequence is synthesized)
aataatcctacattagttttactttcaaaaattttgtgtgcaatttgaaatatagccttttataatatttatccttcttgtgaagatttttgttgcattcatattccagtttatgagtag

SEQ ID NO: 732715 - DNA, 120 bp, Artificial Sequence
  ENSG00000198791_74 (sequence is synthesized)
attacatgtcaaatgcagtaagacgttttctggaaccttgggtacgttttcctttcaagtcagtattatcattaggttgccacttcagcccacaaaagctctcttaatttacatatagga

SEQ ID NO: 732716 - DNA, 120 bp, Artificial Sequence
  ENSG00000198791_75 (sequence is synthesized)
gaagtagtagtatccttgaacctggtgtttatcatatgtcagaatcttcattctaactcaagccctgggtcttcacccagtttccttagttataatatttctgtattattaatagaagta

SEQ ID NO: 732717 - DNA, 120 bp, Artificial Sequence
  ENSG00000198791_76 (sequence is synthesized)
gacattttcttcaacattgtttcatggtaaccttcataaaaaataaaattgattcctgacccgggccactacctgagtggagtgtgcacgttctcgtgtatatgtggattttctcccggg

SEQ ID NO: 732718 - DNA, 120 bp, Artificial Sequence
  ENSG00000198791_77 (sequence is synthesized)
tcctctgatttcctcccacatcccaaggctgtgcacgttaggtgaaatggtgtggctaagttgtcccagtgtgagtgagtaggtgtatctgtgtgagtgcactgtgccacggaacgacat

SEQ ID NO: 732719 - DNA, 120 bp, Artificial Sequence
  ENSG00000198791_78 (sequence is synthesized)
gctgaccagggttggttcccacattgtgccctgagctgccagaataggctctggctttcttcacccctcaactgaataatggagcaaataattatcttgtttttattaattgttcttaaa

SEQ ID NO: 732720 - DNA, 120 bp, Artificial Sequence
  ENSG00000198791_79 (sequence is synthesized)
tttacatatagctcacatttatttcattgtttaatattagaagtattttggtctttatctagaagtttgatgatttttttgtgaccagaaatatgccgtaggaacttaactcttgttttt

SEQ ID NO: 732721 - DNA, 120 bp, Artificial Sequence
  ENSG00000198791_80 (sequence is synthesized)
atcaattagcctgtggtaaaaattggtttcgttatccatcttttggcttaaagttgcaatttccaagaacttattgataacgttgagtgagtacttaactgtatgttgcaatattgcatt

SEQ ID NO: 732722 - DNA, 120 bp, Artificial Sequence
  ENSG00000198791_81 (sequence is synthesized)
gttcttctgtttgacatcctacatttgtgtcatacatcctaatatctggtaggtaaaatagtgaaagaaactgtaggcaattaatggtagtgccaatgtatgaattctttcttcctgttc

SEQ ID NO: 732723 - DNA, 120 bp, Artificial Sequence
  ENSG00000198791_82 (sequence is synthesized)
tttgtcagataaacaaagatatttagtatacacaattttacgaaagtagggcttaggaaaagcagagtaatgatgcctgtggtatagtagtgtggcttgtaattacactgtgtttagcct

SEQ ID NO: 732724 - DNA, 120 bp, Artificial Sequence
  ENSG00000198791_83 (sequence is synthesized)
ggtatagtagtgtggcttgtaattacactgtgtttagcctgactctccatttcactcttttgggtttaataatatactctccatttggagaccaaggcaggaggattgcttgaggccagg

SEQ ID NO: 732725 - DNA, 120 bp, Artificial Sequence
  ENSG00000198791_84 (sequence is synthesized)
agtgggacggaaattgggagtggagggcggtggcctagatcctcacctcttcgtattgtttcacgcggcagtgcttgggagtcagtgtagctccagtcagtgttatcagcaccttcgcac

SEQ ID NO: 732726 - DNA, 120 bp, Artificial Sequence
  ENSG00000198791_85 (sequence is synthesized)
tggcgctttgccagggaagagagttatctatggcttgaatacctcggtgccgtcctctcgtttctctgggaaactgcagtacggagatgctttctccagtaatgagaaggcctttggtgt

SEQ ID NO: 732727 - DNA, 120 bp, Artificial Sequence
  ENSG00000198791_86 (sequence is synthesized)
aggcttcggatggcattatctacagcagcacactgttcagaccaagtgactgtcatgcgagcctaggctgggatgttgttttaaaccatattttaaagtattacagtgaatgcaattata

SEQ ID NO: 732728 - DNA, 120 bp, Artificial Sequence
  ENSG00000198792_0 (sequence is synthesized)
gggtgtgcccgctccctttccacgccaacgtggcgggggcagctcctggagtgtaatcggacctgtccggggggcggccccgggagagggaggcggatggaccaaggcgctttgcaagag

SEQ ID NO: 732729 - DNA, 120 bp, Artificial Sequence
  ENSG00000198792_1 (sequence is synthesized)
ggattgtgtgctcccgggtgggtgtgctggcgactggcacggccgagctagcttgtcactttctgcaaaggtttccctcagggagcctcctgctgccaggcaccatgacagtgagggggg

SEQ ID NO: 732730 - DNA, 120 bp, Artificial Sequence
  ENSG00000198792_2 (sequence is synthesized)
atgtgctggccccggatccagcgtcgcccacgaccgcagcagcctcgcccagcgtctccgtgatccccgagggcagccccactgccatggagcagcctgtgttcctgatgacaactgccg

SEQ ID NO: 732731 - DNA, 120 bp, Artificial Sequence
  ENSG00000198792_3 (sequence is synthesized)
ctcaggccatctctggcttcttcgtgtggacggccctgctcatcacatgccaccagatctacatgcacctgcgctgctacagctgccccaacgagcagcgctacatcgtgcgcatcctct

SEQ ID NO: 732732 - DNA, 120 bp, Artificial Sequence
  ENSG00000198792_4 (sequence is synthesized)
tcatcgtgcccatctacgcctttgactcctggctcagcctcctcttcttcaccaacgaccagtactacgtgtacttcggcaccgtccgcgactgctatgaggccttggtcatctataatt

SEQ ID NO: 732733 - DNA, 120 bp, Artificial Sequence
  ENSG00000198792_5 (sequence is synthesized)
tcctgagcctgtgctatgagtacctaggaggagaaagttccatcatgtcggagatcagaggaaaacccattgagtccagctgtatgtatggcacctgctgcctctggggaaagacttatt

SEQ ID NO: 732734 - DNA, 120 bp, Artificial Sequence
  ENSG00000198792_6 (sequence is synthesized)
ccatcggatttctgaggttctgcaaacaggccaccctgcagttctgtgtggtgaagccactcatggcggtcagcactgtggtcctccaggccttcggcaagtaccgggatggggactttg

SEQ ID NO: 732735 - DNA, 120 bp, Artificial Sequence
  ENSG00000198792_7 (sequence is synthesized)
acgtcaccagtggctacctctacgtgaccatcatctacaacatctccgtcagcctggccctctacgccctcttcctcttctacttcgccacccgggagctgctcagcccctacagccccg

SEQ ID NO: 732736 - DNA, 120 bp, Artificial Sequence
  ENSG00000198792_8 (sequence is synthesized)
tcctcaagttcttcatggtcaagtccgtcatctttctttccttctggcaaggcatgctcctggccatcctggagaagtgtggggccatccccaaaatccactcggcccgcgtgtcggtgg

SEQ ID NO: 732737 - DNA, 120 bp, Artificial Sequence
  ENSG00000198792_9 (sequence is synthesized)
gcgagggcaccgtggctgccggctaccaggacttcatcatctgtgtggagatgttctttgcagccctggccctgcggcacgccttcacctacaaggtctatgctgacaagaggctggacg

SEQ ID NO: 732738 - DNA, 120 bp, Artificial Sequence
  ENSG00000198792_10 (sequence is synthesized)
cacaaggccgctgtgcccccatgaagagcatctccagcagcctcaaggagaccatgaacccgcacgacatcgtgcaggacgccatccacaacttctcacctgcctaccagcagtacacgc

SEQ ID NO: 732739 - DNA, 120 bp, Artificial Sequence
  ENSG00000198792_11 (sequence is synthesized)
agcagtccaccctggagcctgggcccacctggcgtggtggcgcccacggcctctcccgctcccacagcctcagtggcgcccgcgacaacgagaagactctcctgctcagctctgatgatg

SEQ ID NO: 732740 - DNA, 120 bp, Artificial Sequence
  ENSG00000198792_12 (sequence is synthesized)
aattctaggtgcgggctgcagtggcggaagtgctggcgccatagccacggtcaggctgtgccccacctccagcctcaccaccaggccaggaggcagctggcacagtgctcacgccgcctt

SEQ ID NO: 732741 - DNA, 120 bp, Artificial Sequence
  ENSG00000198792_13 (sequence is synthesized)
tatttattggaccagaaacactcacatgtcacttccagaggaacgggggacagccaggctcgcccatgggccttcaggaatatttatacatggcccagcctgcactgcccgggcgagggc

SEQ ID NO: 732742 - DNA, 120 bp, Artificial Sequence
  ENSG00000198792_14 (sequence is synthesized)
ttctagcccctcctccccgcgagactctcaggctgaggtcggcaagccgtggctcccccacacaccgtgcaataccctgtctgacctgggctcttcccgcctgcatccctcccctgtcca

SEQ ID NO: 732743 - DNA, 120 bp, Artificial Sequence
  ENSG00000198792_15 (sequence is synthesized)
cctttgtccagtgctagattcacctcaccccgggcaggagtggggatgtgggcgctctgtggtcctcccctcctgacccaggcctctgtggcatgctgcaaggatcagagccagacacca

SEQ ID NO: 732744 - DNA, 120 bp, Artificial Sequence
  ENSG00000198792_16 (sequence is synthesized)
ggagtcacaggccccacccaggaagggcattcagggcccctgggcaccgcttctgttgaagcaggggcttctgggcccctgggtatccccacctgtcgtggccacacctctgcctgcctc

SEQ ID NO: 732745 - DNA, 120 bp, Artificial Sequence
  ENSG00000198792_17 (sequence is synthesized)
atgccccttccccctggcctaccaaggacagcccacagcccgcactgccggctcacttgggtccttcctcgatagctttgggcagagcccttgcttcctggctgcttcagggctcagggg

SEQ ID NO: 732746 - DNA, 120 bp, Artificial Sequence
  ENSG00000198792_18 (sequence is synthesized)
ctcccagccctccttcccaggctgatgctgggtcctctctctctttggggcttctccctcccgtttcaggggaaaggtctgagtctccacgtttcagaccagcttctgggggaaggcagt

SEQ ID NO: 732747 - DNA, 120 bp, Artificial Sequence
  ENSG00000198792_19 (sequence is synthesized)
ccggcagggagaccgggaggggtggccacacagtggggagctgggaggtggggggaatggtcccagactcctctcggggcccctatccacacagggcctggtgttctaccccatctggcc

SEQ ID NO: 732748 - DNA, 120 bp, Artificial Sequence
  ENSG00000198792_20 (sequence is synthesized)
cctggcccatctcttctgtgccttagtcacatatgaaagcgcccctccctggctccccatctgtcccacacgctccctggggctcttagttcagctgctggcactcgcaggatcctgcag

SEQ ID NO: 732749 - DNA, 120 bp, Artificial Sequence
  ENSG00000198792_21 (sequence is synthesized)
tgctgggcccagagcccttggacaggcctcaggagtggtcaggaccaccaagcccctcctctccccctccacacctctagacctggggcctccggaacccccagcaggctgggcttatac

SEQ ID NO: 732750 - DNA, 120 bp, Artificial Sequence
  ENSG00000198792_22 (sequence is synthesized)
tagctcctgacttaggaagagcctcgtgtcacaacacgtgtccctacaggcaaagtgtcctggcatttaaaacccagattatccctgggtttgggctgcagtcacctggagaagctggta

SEQ ID NO: 732751 - DNA, 120 bp, Artificial Sequence
  ENSG00000198792_23 (sequence is synthesized)
gggtaagggagagggaccctgccggtgttcactggggattctttcttttggtccttcctggaatgaacaggttccctccctgccacctgtgaggagagttggggcccagccgtcttcctg

SEQ ID NO: 732752 - DNA, 120 bp, Artificial Sequence
  ENSG00000198792_24 (sequence is synthesized)
gcctccttcctttcctcgtggcagaggcctgcatgtgggtgccagaggccagctctccccctccatcttgggggggcggagcagttgggcccaagctgcccgggagggtgggtgcagaca

SEQ ID NO: 732753 - DNA, 120 bp, Artificial Sequence
  ENSG00000198792_25 (sequence is synthesized)
caggctgaggaccagccctggccctgccccgccatctgctttcaccaagctgtctctccaccgtggcttcccttctccctccaggccaaagtgctgctgattcccactcccttggttttc

SEQ ID NO: 732754 - DNA, 120 bp, Artificial Sequence
  ENSG00000198792_26 (sequence is synthesized)
gcctgcccagcgttgctgtttgcgtggagggtggggggagctcagtggcagggaatcagcggtccgtggggtcgtggggacgggaacatgtgcccgaccgctccatcccctcctcctcct

SEQ ID NO: 732755 - DNA, 120 bp, Artificial Sequence
  ENSG00000198792_27 (sequence is synthesized)
taggatgcataacctaccttgtcttttttttttttaattttctttccaggtagagtagctctttgtacataaagaatacttgaaaaattaattgtatgatgtatgagaagacagagtctc

SEQ ID NO: 732756 - DNA, 120 bp, Artificial Sequence
  ENSG00000198792_28 (sequence is synthesized)
ctagttttgtatcttgttgtatgactgccatgagttccaccagaaagccactctattttggtctctgtgacattttaaatgcgtgacagaagtgagcaaataaagtgaggaagaaatcta

SEQ ID NO: 732757 - DNA, 120 bp, Artificial Sequence
  ENSG00000198792_29 (sequence is synthesized)
ggcggcggcggagactccggggctgcggcgccgcccgccccgcccgcagagtccggctgccgcgcatcgtccgcagacgccgccaccgccatgggctcctgaggctagcttgtcactttc

SEQ ID NO: 732758 - DNA, 120 bp, Artificial Sequence
  ENSG00000198792_30 (sequence is synthesized)
cttctgagaaacagactcggatggtaataggttttaacagctttcttttacacctgcgaatcttcctccttgctagaacagtggtaagtagccccagttgtactggaaaatgccctggag

SEQ ID NO: 732759 - DNA, 120 bp, Artificial Sequence
  ENSG00000198792_31 (sequence is synthesized)
agcttttggaagtgctgatacccagccccaccctcggagatcccgctgtaatgggtccgggctggcaggctgggtgtgctgtgagagttctgtgctttaagcactcccagggtgatgtga

SEQ ID NO: 732760 - DNA, 120 bp, Artificial Sequence
  ENSG00000198792_32 (sequence is synthesized)
aagtgctgctgcccgggacgctccactgggctggaagggctgcctctggccactgggcagaagggggttgtccttggaggatggggaagaggaggctgggaatgcctgagactgattgag

SEQ ID NO: 732761 - DNA, 120 bp, Artificial Sequence
  ENSG00000198792_33 (sequence is synthesized)
ccagtaaaggggcaggagggactggggagaggggagcctccttctctgacacatccacccaggagcctggctgctgccagctgtctgcccgagtggctggaggcaagaaacccacttccc

SEQ ID NO: 732762 - DNA, 120 bp, Artificial Sequence
  ENSG00000198792_34 (sequence is synthesized)
cagggcctacctgcaggccccacacaggctccgtggtgggtggtgtggactgtagaaatgtctgcctgcagcggggctccgcggcccacttcccgccccccttcctctgtgccttccctg

SEQ ID NO: 732763 - DNA, 120 bp, Artificial Sequence
  ENSG00000198792_35 (sequence is synthesized)
gtgggggaagacctactctgtgcccaaagagcaggtgcacaaaggccaggggttgccacctggtggcccagttggaaggatctagcaaacacacacccagcattgagggcagtgtccctt

SEQ ID NO: 732764 - DNA, 120 bp, Artificial Sequence
  ENSG00000198792_36 (sequence is synthesized)
ggacctggtgtggtataccctgtgcccgtgggaacatcatccttgggcctggggcctggggccaccccaaggagcaagggggcccatggcagagaaccattcctgcaccactggggctca

SEQ ID NO: 732765 - DNA, 120 bp, Artificial Sequence
  ENSG00000198792_37 (sequence is synthesized)
gcagaggggctctgctgcctggcctgagctgtccctctagacatacccacgcccggccggggaagctgcttgccctcttctgcctccccactggtcctgagccccctgctaccctctaac

SEQ ID NO: 732766 - DNA, 120 bp, Artificial Sequence
  ENSG00000198792_38 (sequence is synthesized)
ccaggcccagaccctcagccctcaggataggcttaggtgcagagctggctcagctgtgcgattgtaacccctccctctgagcctccatgtcctggtctgggaagtgttgtgaggtttgta

SEQ ID NO: 732767 - DNA, 120 bp, Artificial Sequence
  ENSG00000198792_39 (sequence is synthesized)
aaatgtgaggtgtggatgtggccccaggctagccggggaagaagtggggatgggacgtcctgacctagacgtggaggcggaactcagtcgccagacggatgtttcctgttggcgtgaaca

SEQ ID NO: 732768 - DNA, 120 bp, Artificial Sequence
  ENSG00000198792_40 (sequence is synthesized)
ccaggggaggagtcatccctaggtggatatcccccctgccaggccccaggaggcacctggagcttcctgggtgccctgtggggcctgggggggtggggacagggtgtgtggtgtgtcgtg

SEQ ID NO: 732769 - DNA, 120 bp, Artificial Sequence
  ENSG00000198792_41 (sequence is synthesized)
ctggtgggcctcggtggtgggcacacattgttcactcagctgtctcttgtcttctctatttctttggcttctctccccgccccccttgccctgcttttgcccggggtttggccgcgggca

SEQ ID NO: 732770 - DNA, 120 bp, Artificial Sequence
  ENSG00000198792_42 (sequence is synthesized)
gtgccaacatacggcccttacggtaggtcccgctcttggtctgcatgtctgtcctgcatgtcagttctggtcactgtcactggcatgcgtctctctgtagctcttctccgtgtcctcatc

SEQ ID NO: 732771 - DNA, 120 bp, Artificial Sequence
  ENSG00000198792_43 (sequence is synthesized)
tcctccccaccggcaccccctgggtgggagcgcccagagcacctgtcaagggccaccctctgtagagcttgcctgcttccgtcctcgtttctcgttctggaatatgccccgccttcttct

SEQ ID NO: 732772 - DNA, 120 bp, Artificial Sequence
  ENSG00000198792_44 (sequence is synthesized)
gggggcacagtgctgttcatgggatatcggggcatttcacgatgtttccaagagttcacaagctgagtcaggaatcctgggttccaggggtgggctcgtcccttacatccaggtgtcctg

SEQ ID NO: 732773 - DNA, 120 bp, Artificial Sequence
  ENSG00000198792_45 (sequence is synthesized)
ggccacctttctgctctgagcccctgaggatggggacagttgattagagagatgaggaggaagccctcttagagggagccagtgagtcgcatctgctcccctgggggtgcaggccagcct

SEQ ID NO: 732774 - DNA, 120 bp, Artificial Sequence
  ENSG00000198792_46 (sequence is synthesized)
ggtcctgatctccagagtagagggagcacagcacttcccccggtggtgggggacgcgcctggcacctgtggaaccgggcacccctggcttccaggccctctggccccacatgccccaact

SEQ ID NO: 732775 - DNA, 120 bp, Artificial Sequence
  ENSG00000198792_47 (sequence is synthesized)
tcagtcagtgctgagcctgctctggcctctctggggcattctaggctcactgcccatagcttgccagtctccaccctgggtcccttccctgcagccagcccagctcccagtgggggttta

SEQ ID NO: 732776 - DNA, 120 bp, Artificial Sequence
  ENSG00000198792_48 (sequence is synthesized)
tgtctgctcctcttcacagtccagcctccccttggggctccccagccaaagaagtccattttttcctgccccttctcatatcctggaccccattctctgtcccagaagggatggttgaag

SEQ ID NO: 732777 - DNA, 120 bp, Artificial Sequence
  ENSG00000198792_49 (sequence is synthesized)
ggctgggccaagtgtgatgtcatgagagctgggacgagacacccaggggctgcctggactgaggactgtgatctacatgcacctgcgctgctacagctgccccaacgagcagcgctacat

SEQ ID NO: 732778 - DNA, 120 bp, Artificial Sequence
  ENSG00000198792_50 (sequence is synthesized)
agcctcctccctgttgccacacacagctgtggctctttcacctccattgctgtttagaatcccagcatctgcggacccattctgctgatttgactggtttctcctggacactctcttcgc

SEQ ID NO: 732779 - DNA, 120 bp, Artificial Sequence
  ENSG00000198792_51 (sequence is synthesized)
gctcagggaagggggcagccagagtggccgcacagccatgaccttcctgggtgtctggtgctcacaacccccctgaagtctgagcccagcagtggacacccttgcagttggccccgctgc

SEQ ID NO: 732780 - DNA, 120 bp, Artificial Sequence
  ENSG00000198792_52 (sequence is synthesized)
aggcagggagcgagagggtcagagccccaagaggtcggctcaagtccacagatacaaagcccgtgctgtgtaaattgtccacacccatttcattctgggcttagtgaaagtgaccccgtg

SEQ ID NO: 732781 - DNA, 120 bp, Artificial Sequence
  ENSG00000198792_53 (sequence is synthesized)
acccaggggctgcctggactgaggactgtggtagagcagctcttggcatttgtgtgtagcttttacttttttcctctgcttcctaaaagtagcattcattctcctaacttcctggtgagg

SEQ ID NO: 732782 - DNA, 120 bp, Artificial Sequence
  ENSG00000198792_54 (sequence is synthesized)
attctcctaacttcctggtgaggtagctgcctaactaaacagagcagcagtggtgctgcctctgtttaccagatgggaggaggaggcacaacctgaggacatccctgcagccactcggcc

SEQ ID NO: 732783 - DNA, 120 bp, Artificial Sequence
  ENSG00000198793_0 (sequence is synthesized)
gctcccggcttagaggacagcggggaaggcgggcggtggggcagggggcctgaagcggcggtaccggtgctggcggcggcagctgaggccttggccgaagccgcgcgaacctcagggcaa

SEQ ID NO: 732784 - DNA, 120 bp, Artificial Sequence
  ENSG00000198793_1 (sequence is synthesized)
gatgcttggaaccggacctgccgccgccaccaccgctgccaccacatctagcaatgtgagcgtcctgcagcagtttgccagtggcctaaagagccggaatgaggaaaccagggccaaagc

SEQ ID NO: 732785 - DNA, 120 bp, Artificial Sequence
  ENSG00000198793_2 (sequence is synthesized)
cgccaaggagctccagcactatgtcaccatggaactccgagagatgagtcaagaggagtctactcgcttctatgaccaactgaaccatcacatttttgaattggtttccagctcagatgc

SEQ ID NO: 732786 - DNA, 120 bp, Artificial Sequence
  ENSG00000198793_3 (sequence is synthesized)
caatgagaggaaaggtggcatcttggccatagctagcctcataggagtggaaggtgggaatgccacccgaattggcagatttgccaactatcttcggaacctcctcccctccaatgaccc

SEQ ID NO: 732787 - DNA, 120 bp, Artificial Sequence
  ENSG00000198793_4 (sequence is synthesized)
agttgtcatggaaatggcatccaaggccattggccgtcttgccatggcaggggacacttttaccgctgagtacgtggaatttgaggtgaagcgagccctggaatggctgggtgctgaccg

SEQ ID NO: 732788 - DNA, 120 bp, Artificial Sequence
  ENSG00000198793_5 (sequence is synthesized)
caatgagggccggagacatgcagctgtcctggttctccgtgagctggccatcagcgtccctaccttcttcttccagcaagtgcaacccttctttgacaacatttttgtggccgtgtggga

SEQ ID NO: 732789 - DNA, 120 bp, Artificial Sequence
  ENSG00000198793_6 (sequence is synthesized)
ccccaaacaggccatccgtgagggagctgtagccgcccttcgtgcctgtctgattctcacaacccagcgtgagccgaaggagatgcagaagcctcagtggtacaggcacacatttgaaga

SEQ ID NO: 732790 - DNA, 120 bp, Artificial Sequence
  ENSG00000198793_7 (sequence is synthesized)
agcagagaagggatttgatgagaccttggccaaagagaagggcatgaatcgggatgatcggatccatggagccttgttgatccttaacgagctggtccgaatcagcagcatggagggaga

SEQ ID NO: 732791 - DNA, 120 bp, Artificial Sequence
  ENSG00000198793_8 (sequence is synthesized)
gcgtctgagagaagaaatggaagaaatcacacagcagcagctggtacacgacaagtactgcaaagatctcatgggcttcggaacaaaacctcgtcacattacccccttcaccagtttcca

SEQ ID NO: 732792 - DNA, 120 bp, Artificial Sequence
  ENSG00000198793_9 (sequence is synthesized)
ggctgtacagccccagcagtcaaatgccttggtggggctgctggggtacagctctcaccaaggcctcatgggatttgggacctcccccagtccagctaagtccaccctggtggagagccg

SEQ ID NO: 732793 - DNA, 120 bp, Artificial Sequence
  ENSG00000198793_10 (sequence is synthesized)
gtgttgcagagacttgatggaggagaaatttgatcaggtgtgccagtgggtgctgaaatgcaggaatagcaagaactcgctgatccaaatgacaatccttaatttgttgccccgcttggc

SEQ ID NO: 732794 - DNA, 120 bp, Artificial Sequence
  ENSG00000198793_11 (sequence is synthesized)
tgcattccgaccttctgccttcacagatacccagtatctccaagataccatgaaccatgtcctaagctgtgtcaagaaggagaaggaacgtacagcggccttccaagccctggggctact

SEQ ID NO: 732795 - DNA, 120 bp, Artificial Sequence
  ENSG00000198793_12 (sequence is synthesized)
ttctgtggctgtgaggtctgagtttaaggtctatttgcctcgcgtgctggacatcatccgagcggccctgcccccaaaggacttcgcccataagaggcagaaggcaatgcaggtggatgc

SEQ ID NO: 732796 - DNA, 120 bp, Artificial Sequence
  ENSG00000198793_13 (sequence is synthesized)
cacagtcttcacttgcatcagcatgctggctcgagcaatggggccaggcatccagcaggatatcaaggagctgctggagcccatgctggcagtgggactaagccctgccctcactgcagt

SEQ ID NO: 732797 - DNA, 120 bp, Artificial Sequence
  ENSG00000198793_14 (sequence is synthesized)
gctctacgacctgagccgtcagattccacagctaaagaaggacattcaagatgggctactgaaaatgctgtccctggtccttatgcacaaaccccttcgccacccaggcatgcccaaggg

SEQ ID NO: 732798 - DNA, 120 bp, Artificial Sequence
  ENSG00000198793_15 (sequence is synthesized)
cctggcccatcagctggcctctcctggcctcacgaccctccctgaggccagcgatgtgggcagcatcactcttgccctccgaacgcttggcagctttgaatttgaaggccactctctgac

SEQ ID NO: 732799 - DNA, 120 bp, Artificial Sequence
  ENSG00000198793_16 (sequence is synthesized)
ccaatttgttcgccactgtgcggatcatttcctgaacagtgagcacaaggagatccgcatggaggctgcccgcacctgctcccgcctgctcacaccctccatccacctcatcagtggcca

SEQ ID NO: 732800 - DNA, 120 bp, Artificial Sequence
  ENSG00000198793_17 (sequence is synthesized)
tgctcatgtggttagccagaccgcagtgcaagtggtggcagatgtgcttagcaaactgctcgtagttgggataacagatcctgaccctgacattcgctactgtgtcttggcgtccctgga

SEQ ID NO: 732801 - DNA, 120 bp, Artificial Sequence
  ENSG00000198793_18 (sequence is synthesized)
cgagcgctttgatgcacacctggcccaggcggagaacttgcaggccttgtttgtggctctgaatgaccaggtgtttgagatccgggagctggccatctgcactgtgggccgactcagtag

SEQ ID NO: 732802 - DNA, 120 bp, Artificial Sequence
  ENSG00000198793_19 (sequence is synthesized)
catgaaccctgcctttgtcatgcctttcctgcgcaagatgctcatccagattttgacagagttggagcacagtgggattggaagaatcaaagagcagagtgcccgcatgctggggcacct

SEQ ID NO: 732803 - DNA, 120 bp, Artificial Sequence
  ENSG00000198793_20 (sequence is synthesized)
ggtctccaatgccccccgactcatccgcccctacatggagcctattctgaaggcattaattttgaaactgaaagatccagaccctgatccaaacccaggtgtgatcaataatgtcctggc

SEQ ID NO: 732804 - DNA, 120 bp, Artificial Sequence
  ENSG00000198793_21 (sequence is synthesized)
aacaataggagaattggcacaggttagtggcctggaaatgaggaaatgggttgatgaactttttattatcatcatggacatgctccaggattcctctttgttggccaaaaggcaggtggc

SEQ ID NO: 732805 - DNA, 120 bp, Artificial Sequence
  ENSG00000198793_22 (sequence is synthesized)
tctgtggaccctgggacagttggtggccagcactggctatgtagtagagccctacaggaagtaccctactttgcttgaggtgctactgaattttctgaagactgagcagaaccagggtac

SEQ ID NO: 732806 - DNA, 120 bp, Artificial Sequence
  ENSG00000198793_23 (sequence is synthesized)
acgcagagaggccatccgtgtgttagggcttttaggggctttggatccttacaagcacaaagtgaacattggcatgatagaccagtcccgggatgcctctgctgtcagcctgtcagaatc

SEQ ID NO: 732807 - DNA, 120 bp, Artificial Sequence
  ENSG00000198793_24 (sequence is synthesized)
caagtcaagtcaggattcctctgactatagcactagtgaaatgctggtcaacatgggaaacttgcctctggatgagttctacccagctgtgtccatggtggccctgatgcggatcttccg

SEQ ID NO: 732808 - DNA, 120 bp, Artificial Sequence
  ENSG00000198793_25 (sequence is synthesized)
agaccagtcactctctcatcatcacaccatggttgtccaggccatcaccttcatcttcaagtccctgggactcaaatgtgtgcagttcctgccccaggtcatgcccacgttccttaacgt

SEQ ID NO: 732809 - DNA, 120 bp, Artificial Sequence
  ENSG00000198793_26 (sequence is synthesized)
cattcgagtctgtgatggggccatccgggaatttttgttccagcagctgggaatgttggtgtcctttgtgaagagccacatcagaccttatatggatgaaatagtcaccctcatgagaga

SEQ ID NO: 732810 - DNA, 120 bp, Artificial Sequence
  ENSG00000198793_27 (sequence is synthesized)
attctgggtcatgaacacctcaattcagagcacgatcattcttctcattgagcaaattgtggtagctcttgggggtgaatttaagctctacctgccccagctgatcccacacatgctgcg

SEQ ID NO: 732811 - DNA, 120 bp, Artificial Sequence
  ENSG00000198793_28 (sequence is synthesized)
tgtcttcatgcatgacaacagcccaggccgcattgtctctatcaagttactggctgcaatccagctgtttggcgccaacctggatgactacctgcatttactgctgcctcctattgttaa

SEQ ID NO: 732812 - DNA, 120 bp, Artificial Sequence
  ENSG00000198793_29 (sequence is synthesized)
gttgtttgatgcccctgaagctccactgccatctcgaaaggcagcgctagagactgtggaccgcctgacggagtccctggatttcactgactatgcctcccggatcattcaccctattgt

SEQ ID NO: 732813 - DNA, 120 bp, Artificial Sequence
  ENSG00000198793_30 (sequence is synthesized)
tcgaacactggaccagagcccagaactgcgctccacagccatggacacgctgtcttcacttgtttttcagctggggaagaagtaccaaattttcattccaatggtgaataaagttctggt

SEQ ID NO: 732814 - DNA, 120 bp, Artificial Sequence
  ENSG00000198793_31 (sequence is synthesized)
gcgacaccgaatcaatcatcagcgctatgatgtgctcatctgcagaattgtcaagggatacacacttgctgatgaagaggaggatcctttgatttaccagcatcggatgcttaggagtgg

SEQ ID NO: 732815 - DNA, 120 bp, Artificial Sequence
  ENSG00000198793_32 (sequence is synthesized)
ccaaggggatgcattggctagtggaccagtggaaacaggacccatgaagaaactgcacgtcagcaccatcaacctccaaaaggcctggggcgctgccaggagggtctccaaagatgactg

SEQ ID NO: 732816 - DNA, 120 bp, Artificial Sequence
  ENSG00000198793_33 (sequence is synthesized)
gctggaatggctgagacggctgagcctggagctgctgaaggactcatcatcgccctccctgcgctcctgctgggccctggcacaggcctacaacccgatggccagggatctcttcaatgc

SEQ ID NO: 732817 - DNA, 120 bp, Artificial Sequence
  ENSG00000198793_34 (sequence is synthesized)
tgcatttgtgtcctgctggtctgaactgaatgaagatcaacaggatgagctcatcagaagcatcgagttggccctcacctcacaagacatcgctgaagtcacacagaccctcttaaactt

SEQ ID NO: 732818 - DNA, 120 bp, Artificial Sequence
  ENSG00000198793_35 (sequence is synthesized)
ggctgaattcatggaacacagtgacaagggccccctgccactgagagatgacaatggcattgttctgctgggtgagagagctgccaagtgccgagcatatgccaaagcactacactacaa

SEQ ID NO: 732819 - DNA, 120 bp, Artificial Sequence
  ENSG00000198793_36 (sequence is synthesized)
ggcagcggccggagtgttagaatatgccatgaaacactttggagagctggagatccaggctacctggtatgagaaactgcacgagtgggaggatgcccttgtggcctatgacaagaaaat

SEQ ID NO: 732820 - DNA, 120 bp, Artificial Sequence
  ENSG00000198793_37 (sequence is synthesized)
ggacaccaacaaggacgacccagagctgatgctgggccgcatgcgctgcctcgaggccttgggggaatggggtcaactccaccagcagtgctgtgaaaagtggaccctggttaatgatga

SEQ ID NO: 732821 - DNA, 120 bp, Artificial Sequence
  ENSG00000198793_38 (sequence is synthesized)
gacccaagccaagatggcccggatggctgctgcagctgcatggggtttaggtcagtgggacagcatggaagaatacacctgtatgatccctcgggacacccatgatggggcattttatag

SEQ ID NO: 732822 - DNA, 120 bp, Artificial Sequence
  ENSG00000198793_39 (sequence is synthesized)
agctgtgctggcactgcatcaggacctcttctccttggcacaacagtgcattgacaaggccagggacctgctggatgctgaattaactgcgatggcaggagagagttacagtcgggcata

SEQ ID NO: 732823 - DNA, 120 bp, Artificial Sequence
  ENSG00000198793_40 (sequence is synthesized)
tggggccatggtttcttgccacatgctgtccgagctggaggaggttatccagtacaaacttgtccccgagcgacgagagatcatccgccagatctggtgggagagactgcagggctgcca

SEQ ID NO: 732824 - DNA, 120 bp, Artificial Sequence
  ENSG00000198793_41 (sequence is synthesized)
gcgtatcgtagaggactggcagaaaatccttatggtgcggtcccttgtggtcagccctcatgaagacatgagaacctggctcaagtatgcaagcctgtgcggcaagagtggcaggctggc

SEQ ID NO: 732825 - DNA, 120 bp, Artificial Sequence
  ENSG00000198793_42 (sequence is synthesized)
tcttgctcataaaactttagtgttgctcctgggagttgatccgtctcggcaacttgaccatcctctgccaacagttcaccctcaggtgacctatgcctacatgaaaaacatgtggaagag

SEQ ID NO: 732826 - DNA, 120 bp, Artificial Sequence
  ENSG00000198793_43 (sequence is synthesized)
tgcccgcaagatcgatgccttccagcacatgcagcattttgtccagaccatgcagcaacaggcccagcatgccatcgctactgaggaccagcagcataagcaggaactgcacaagctcat

SEQ ID NO: 732827 - DNA, 120 bp, Artificial Sequence
  ENSG00000198793_44 (sequence is synthesized)
ggcccgatgcttcctgaaacttggagagtggcagctgaatctacagggcatcaatgagagcacaatccccaaagtgctgcagtactacagcgccgccacagagcacgaccgcagctggta

SEQ ID NO: 732828 - DNA, 120 bp, Artificial Sequence
  ENSG00000198793_45 (sequence is synthesized)
caaggcctggcatgcgtgggcagtgatgaacttcgaagctgtgctacactacaaacatcagaaccaagcccgcgatgagaagaagaaactgcgtcatgccagcggggccaacatcaccaa

SEQ ID NO: 732829 - DNA, 120 bp, Artificial Sequence
  ENSG00000198793_46 (sequence is synthesized)
cgccaccactgccgccaccacggccgccactgccaccaccactgccagcaccgagggcagcaacagtgagagcgaggccgagagcaccgagaacagccccaccccatcgccgctgcagaa

SEQ ID NO: 732830 - DNA, 120 bp, Artificial Sequence
  ENSG00000198793_47 (sequence is synthesized)
gaaggtcactgaggatctgtccaaaaccctcctgatgtacacggtgcctgccgtccagggcttcttccgttccatctccttgtcacgaggcaacaacctccaggatacactcagagttct

SEQ ID NO: 732831 - DNA, 120 bp, Artificial Sequence
  ENSG00000198793_48 (sequence is synthesized)
caccttatggtttgattatggtcactggccagatgtcaatgaggccttagtggagggggtgaaagccatccagattgatacctggctacaggttatacctcagctcattgcaagaattga

SEQ ID NO: 732832 - DNA, 120 bp, Artificial Sequence
  ENSG00000198793_49 (sequence is synthesized)
tacgcccagacccttggtgggacgtctcattcaccagcttctcacagacattggtcggtaccacccccaggccctcatctacccactgacagtggcttctaagtctaccacgacagcccg

SEQ ID NO: 732833 - DNA, 120 bp, Artificial Sequence
  ENSG00000198793_50 (sequence is synthesized)
gcacaatgcagccaacaagattctgaagaacatgtgtgagcacagcaacaccctggtccagcaggccatgatggtgagcgaggagctgatccgagtggccatcctctggcatgagatgtg

SEQ ID NO: 732834 - DNA, 120 bp, Artificial Sequence
  ENSG00000198793_51 (sequence is synthesized)
gcatgaaggcctggaagaggcatctcgtttgtactttggggaaaggaacgtgaaaggcatgtttgaggtgctggagcccttgcatgctatgatggaacggggcccccagactctgaagga

SEQ ID NO: 732835 - DNA, 120 bp, Artificial Sequence
  ENSG00000198793_52 (sequence is synthesized)
aacatcctttaatcaggcctatggtcgagatttaatggaggcccaagagtggtgcaggaagtacatgaaatcagggaatgtcaaggacctcacccaagcctgggacctctattatcatgt

SEQ ID NO: 732836 - DNA, 120 bp, Artificial Sequence
  ENSG00000198793_53 (sequence is synthesized)
gttccgacgaatctcaaagcagctgcctcagctcacatccttagagctgcaatatgtttccccaaaacttctgatgtgccgggaccttgaattggctgtgccaggaacatatgaccccaa

SEQ ID NO: 732837 - DNA, 120 bp, Artificial Sequence
  ENSG00000198793_54 (sequence is synthesized)
ccagccaatcattcgcattcagtccatagcaccgtctttgcaagtcatcacatccaagcagaggccccggaaattgacacttatgggcagcaacggacatgagtttgttttccttctaaa

SEQ ID NO: 732838 - DNA, 120 bp, Artificial Sequence
  ENSG00000198793_55 (sequence is synthesized)
aggccatgaagatctgcgccaggatgagcgtgtgatgcagctcttcggcctggttaacacccttctggccaatgacccaacatctcttcggaaaaacctcagcatccagagatacgctgt

SEQ ID NO: 732839 - DNA, 120 bp, Artificial Sequence
  ENSG00000198793_56 (sequence is synthesized)
catccctttatcgaccaactcgggcctcattggctgggttccccactgtgacacactgcacgccctcatccgggactacagggagaagaagaagatccttctcaacatcgagcatcgcat

SEQ ID NO: 732840 - DNA, 120 bp, Artificial Sequence
  ENSG00000198793_57 (sequence is synthesized)
catgttgcggatggctccggactatgaccacttgactctgatgcagaaggtggaggtgtttgagcatgccgtcaataatacagctggggacgacctggccaagctgctgtggctgaaaag

SEQ ID NO: 732841 - DNA, 120 bp, Artificial Sequence
  ENSG00000198793_58 (sequence is synthesized)
ccccagctccgaggtgtggtttgaccgaagaaccaattatacccgttctttagcggtcatgtcaatggttgggtatattttaggcctgggagatagacacccatccaacctgatgctgga

SEQ ID NO: 732842 - DNA, 120 bp, Artificial Sequence
  ENSG00000198793_59 (sequence is synthesized)
ccgtctgagtgggaagatcctgcacattgactttggggactgctttgaggttgctatgacccgagagaagtttccagagaagattccatttagactaacaagaatgttgaccaatgctat

SEQ ID NO: 732843 - DNA, 120 bp, Artificial Sequence
  ENSG00000198793_60 (sequence is synthesized)
ggaggttacaggcctggatggcaactacagaatcacatgccacacagtgatggaggtgctgcgagagcacaaggacagtgtcatggccgtgctggaagcctttgtctatgaccccttgct

SEQ ID NO: 732844 - DNA, 120 bp, Artificial Sequence
  ENSG00000198793_61 (sequence is synthesized)
gaactggaggctgatggacacaaataccaaaggcaacaagcgatcccgaacgaggacggattcctactctgctggccagtcagtcgaaattttggacggtgtggaacttggagagccagc

SEQ ID NO: 732845 - DNA, 120 bp, Artificial Sequence
  ENSG00000198793_62 (sequence is synthesized)
ccataagaaaacggggaccacagtgccagaatctattcattctttcattggagacggtttggtgaaaccagaggccctaaataagaaagctatccagattattaacagggttcgagataa

SEQ ID NO: 732846 - DNA, 120 bp, Artificial Sequence
  ENSG00000198793_63 (sequence is synthesized)
gctcactggtcgggacttctctcatgatgacactttggatgttccaacgcaagttgagctgctcatcaaacaagcgacatcccatgaaaacctctgccagtgctatattggctggtgccc

SEQ ID NO: 732847 - DNA, 120 bp, Artificial Sequence
  ENSG00000198793_64 (sequence is synthesized)
tttctggtaactggaggcccagatgtgcccatcacgttttttctgaggcttttgtactttagtaaatgcttccactaaactgaaaccatggtgagaaagtttgactttgttaaatatttt

SEQ ID NO: 732848 - DNA, 120 bp, Artificial Sequence
  ENSG00000198793_65 (sequence is synthesized)
gaaatgtaaatgaaaagaactactgtatattaaaagttggtttgaaccaactttctagctgctgttgaagaatatattgtcagaaacacaaggcttgatttggttcccaggacagtgaaa

SEQ ID NO: 732849 - DNA, 120 bp, Artificial Sequence
  ENSG00000198793_66 (sequence is synthesized)
catagtaataccacgtaaatcaagccattcattttggggaacagaagatccataactttagaaatacgggttttgacttaactcacaagagaactcatcataagtacttgctgatggaag

SEQ ID NO: 732850 - DNA, 120 bp, Artificial Sequence
  ENSG00000198793_67 (sequence is synthesized)
aatgacctagttgctcctctcaacatgggtacagcaaactcagcacagccaagaagcctcaggtcgtggagaacatggattaggatcctagactgtaaagacacagaagatgctgacctc

SEQ ID NO: 732851 - DNA, 120 bp, Artificial Sequence
  ENSG00000198793_68 (sequence is synthesized)
acccctgccacctatcccaagacctcactggtctgtggacagcagcagaaatgtttgcaagataggccaaaatgagtacaaaaggtctgtcttccatcagacccagtgatgctgcgactc

SEQ ID NO: 732852 - DNA, 120 bp, Artificial Sequence
  ENSG00000198793_69 (sequence is synthesized)
acacgcttcaattcaagacctgaccgctagtagggaggtttattcagatcgctggcagcctcggctgagcagatgcacagaggggatcactgtgcagtgggaccaccctcactggccttc

SEQ ID NO: 732853 - DNA, 120 bp, Artificial Sequence
  ENSG00000198793_70 (sequence is synthesized)
tgcagcagggttctgggatgttttcagtggtcaaaatactctgtttagagcaagggctcagaaaacagaaatactgtcatggaggtgctgaacacagggaaggtctggtacatattggaa

SEQ ID NO: 732854 - DNA, 120 bp, Artificial Sequence
  ENSG00000198793_71 (sequence is synthesized)
attatgagcagaacaaatactcaactaaatgcacaaagtataaagtgtagccatgtctagacaccatgttgtatcagaataatttttgtgccaataaatgacatcagaattttaaacata

SEQ ID NO: 732855 - DNA, 120 bp, Artificial Sequence
  ENSG00000198793_72 (sequence is synthesized)
gacctggtttcctgtggatcacagtcctgccctgattccttctcctaagacattctcaccctgatacgtcaacatggcctgtgtctgcttcctaagtgagggtaacagaccccctcggct

SEQ ID NO: 732856 - DNA, 120 bp, Artificial Sequence
  ENSG00000198793_73 (sequence is synthesized)
tgcccgcaaggtctgtatcccaatgcatccagaacagaccaccttctccagaatgctcgcctaatctgcttcgctctgcctctttaaggccagaaaagaaacagtgtttaaaccacctac

SEQ ID NO: 732857 - DNA, 120 bp, Artificial Sequence
  ENSG00000198793_74 (sequence is synthesized)
tcacaatgtcagggagtctcttcctgttacaaagctatttggcctgatttcatagagtgaatcatagttgaggagatggtgtgtataccattgatcaaaccaatgaatgtgatcacagtt

SEQ ID NO: 732858 - DNA, 120 bp, Artificial Sequence
  ENSG00000198793_75 (sequence is synthesized)
atatgtatttgtatctagaaagtgctgggacatagaaagggcacactttctacccctaagagaagatggactgtttggtacaaaaaagagcagatttgtaaatacacagactagaacttt

SEQ ID NO: 732859 - DNA, 120 bp, Artificial Sequence
  ENSG00000198793_76 (sequence is synthesized)
cctggaacagtacttaaacaagggagcgtgctgtgtgttccagtaaaactggacttgcagaagtggaggtggaggggctggattggctgagggctatcgtttgccaactcctagcttaca

SEQ ID NO: 732860 - DNA, 120 bp, Artificial Sequence
  ENSG00000198793_77 (sequence is synthesized)
cctgctggatgctgaattaactgcgatggcaggagagagttacagtcgggcatatggggtaagtgtcaactattctgcacattgtcatttttgaggcttatttccatacttttttcagaa

SEQ ID NO: 732861 - DNA, 120 bp, Artificial Sequence
  ENSG00000198793_78 (sequence is synthesized)
tgggctattgagaacttacaggctgctggaaacatgcctgttttctctgatcggcagataccctgacaccagaaggaatgatttaaattaatcctgtcttttggattgttcgtgcagtaa

SEQ ID NO: 732862 - DNA, 120 bp, Artificial Sequence
  ENSG00000198793_79 (sequence is synthesized)
gctaggctgatgctgtgaacttactccttgagtccctggagcctatctataagaggcccagggagcctgcatttccccctacaagtttaattaatacagaaagattattggagaaatact

SEQ ID NO: 732863 - DNA, 120 bp, Artificial Sequence
  ENSG00000198793_80 (sequence is synthesized)
ggagcatctggacacatggttaatctctggagtgacatcttcccttaggtcatctgttcttgttcagcgtttttctgatttgcatccttgcctgctcctcagctaagaacttaactttct

SEQ ID NO: 732864 - DNA, 120 bp, Artificial Sequence
  ENSG00000198793_81 (sequence is synthesized)
ttgtttttattggaaagatccaagtaacatcctgttatgttacaggaaacttttgaaagagataaacagaattagaaaatatataaaagatgtgattgatggaggggtgatttttggaag

SEQ ID NO: 732865 - DNA, 120 bp, Artificial Sequence
  ENSG00000198793_82 (sequence is synthesized)
tgtatatctttggtgagaatatactttcttatttctttttgagaggctttctggtaactacttggtgtggcagatgtcattgacatctttccagtatttccttggcttgccaatactttg

SEQ ID NO: 732866 - DNA, 120 bp, Artificial Sequence
  ENSG00000198793_83 (sequence is synthesized)
tgaattaatctctctgaaatctaaacttgtatctgaggactgcagaagcacttataatacagatcttacctttgtttaggcatgcttcattctggtttgaaaaatgtccattttgtcata

SEQ ID NO: 732867 - DNA, 120 bp, Artificial Sequence
  ENSG00000198793_84 (sequence is synthesized)
agagtaatactctctctaggacagcttgcatgtccaaagctggaaaatacatccggtaaacactattaactggaagcttattaatcagagttgtattctaaccagagttactttcattca

SEQ ID NO: 732868 - DNA, 120 bp, Artificial Sequence
  ENSG00000198793_85 (sequence is synthesized)
ttaagcttttaggaagtaagcaaatcacaagaaaaaagttggtttcaggaactttagttttagtttttaaaagcttttcctaatgtgggtcccttttgttttatgatgtattctaccatc

SEQ ID NO: 732869 - DNA, 120 bp, Artificial Sequence
  ENSG00000198793_86 (sequence is synthesized)
aacgtcatggccctgtatgcatgccaggactgtttgtcttgttcaccttgaccccaggtcattgccaggcacatagcagatacacaagagatattcagtgaataaatgaaggtatgggaa

SEQ ID NO: 732870 - DNA, 120 bp, Artificial Sequence
  ENSG00000198793_87 (sequence is synthesized)
aactgaaacctgggtcattgtagaattcttactcatcaagtaaaggttagttgtgatcaatctattctccttagttgagaaaacggatacacctgtgttcaaggtttttggcaaggcata

SEQ ID NO: 732871 - DNA, 120 bp, Artificial Sequence
  ENSG00000198793_88 (sequence is synthesized)
caaacgaatttcccaattattcagaaagttcagctattaatgggtcacgtagtgtcctactatcactgcaaagttaccatgcctggaagcaaactctgcctcacactcgctaaaccaagt

SEQ ID NO: 732872 - DNA, 120 bp, Artificial Sequence
  ENSG00000198793_89 (sequence is synthesized)
ggtggtacgctgtagagtcattgccgctcagaaccccagagagagtagtattcctttatccaaataagcaccagcggttcttccttcaagcattgagcactggttctctgtcaggccgtg

SEQ ID NO: 732873 - DNA, 120 bp, Artificial Sequence
  ENSG00000198793_90 (sequence is synthesized)
ctttctctgtcaggctcctatgctcttcatgtcttcctttgtccactatctggtgacctgtcaaaactttgctcccttgaaatattgtgatgactgctgcttgcccccacttctgcttgc

SEQ ID NO: 732874 - DNA, 120 bp, Artificial Sequence
  ENSG00000198793_91 (sequence is synthesized)
catttctgctctcccctaaatgtacactttatacccagtgcagctctgctttctgggtgaaagtgccagccctgtgcctgctccaggcgtgctttgctggcctcgctctcactcctcgcc

SEQ ID NO: 732875 - DNA, 120 bp, Artificial Sequence
  ENSG00000198793_92 (sequence is synthesized)
tgcatgtatcccctgcacggtcacattcatgggcttgtttcccgtgaaccaatctgcacatctctggccttattcttcccccttgccaagtagtccccaccgctgccttcttgtttccct

SEQ ID NO: 732876 - DNA, 120 bp, Artificial Sequence
  ENSG00000198793_93 (sequence is synthesized)
ccttgcccttctgcagctctcttccagacctaccccaaatccctcttcttgacaaagctttccaaatgcctgtccttgctactcccattgtgccttgcagagtacctaggtcttcaggtt

SEQ ID NO: 732877 - DNA, 120 bp, Artificial Sequence
  ENSG00000198793_94 (sequence is synthesized)
tgtgcgtgagctcccctaggaggccgggagatcccttgaggcaagagctctctcctgctcctcttgctgtgcccttctcgcagtgcactcatagtacgttatatagttagtgctccacaa

SEQ ID NO: 732878 - DNA, 120 bp, Artificial Sequence
  ENSG00000198793_95 (sequence is synthesized)
agtgagtggatcatgttgaatttagtaaaacagccatttctgagtgtctccttgaagtgtttgctttatggacacacagaacaggcaggagcagctgttcctcagcatcgaccttgcgct

SEQ ID NO: 732879 - DNA, 120 bp, Artificial Sequence
  ENSG00000198793_96 (sequence is synthesized)
ctctgccgtggagcctgcgggtgctttcgtgtggagtagggctgtggagattcagaaaaggggacttcactgtgaaccgtagctgcgaagagagcacttgggttggtggcatctaaccat

SEQ ID NO: 732880 - DNA, 120 bp, Artificial Sequence
  ENSG00000198794_0 (sequence is synthesized)
tccgcgccgcatcgctcgggtgcagcgcagctcagcgcagcgctgcggcctttcggcagccgaacggccgcggcagcatttcctttacaggctgcacttccttccctgctgccagccagg

SEQ ID NO: 732881 - DNA, 120 bp, Artificial Sequence
  ENSG00000198794_1 (sequence is synthesized)
agtttcggaaggtttcctggaggaagtgtgatacagcagttcaggacaaagaggtgtgggcaggccactgggccagctggtaacatcatggcagagaaagtgaacaacttcccaccattg

SEQ ID NO: 732882 - DNA, 120 bp, Artificial Sequence
  ENSG00000198794_2 (sequence is synthesized)
cccaaattcatcccgctgaagccatgtttctaccaagacttcgaggcagatattcctccccagcatgtcagcatgaccaagcgcctctactacctctggatgttgaacagcgtcacgctg

SEQ ID NO: 732883 - DNA, 120 bp, Artificial Sequence
  ENSG00000198794_3 (sequence is synthesized)
gccgtgaacctggtgggctgtctcgcgtggctgatcggaggcgggggagccaccaactttggcctcgcctttctctggctcatcctcttcacaccctgctcctacgtctgctggtttcgg

SEQ ID NO: 732884 - DNA, 120 bp, Artificial Sequence
  ENSG00000198794_4 (sequence is synthesized)
cccatttacaaggccttcaagactgacagctccttcagtttcatggcattcttctttaccttcatggctcagttggtcatcagcatcatccaggccgtgggcatcccaggctggggcgtc

SEQ ID NO: 732885 - DNA, 120 bp, Artificial Sequence
  ENSG00000198794_5 (sequence is synthesized)
tgcggctggattgctaccatctccttcttcggaacgaacattggctcggcggtggtgatgctaattcccactgtcatgttcacagtgatggccgtcttttccttcatcgccctcagcatg

SEQ ID NO: 732886 - DNA, 120 bp, Artificial Sequence
  ENSG00000198794_6 (sequence is synthesized)
gttcataaattttaccggggaagtggggggagtttcagcaaagctcaggaggagtggaccacaggggcctggaagaatccacatgtgcagcaggcagcccagaacgcagccatgggggca

SEQ ID NO: 732887 - DNA, 120 bp, Artificial Sequence
  ENSG00000198794_7 (sequence is synthesized)
gcccagggtgccatgaatcagcctcagactcagtattccgccacccccaattacacgtactccaatgagatgtgaaccagccacgcctaccaggtggcagagctggggccattgggacag

SEQ ID NO: 732888 - DNA, 120 bp, Artificial Sequence
  ENSG00000198794_8 (sequence is synthesized)
ggggctcaagccacatcgtcatttgtggttaccaagcagggttcccccttcccttttctccttccctactttgtacaaaggaccagagttatatatatatatatatgtatatgtctgtac

SEQ ID NO: 732889 - DNA, 120 bp, Artificial Sequence
  ENSG00000198794_9 (sequence is synthesized)
cccagcccccacctttcagattctgctcttggcactcagctgtgggctgcacgtggagctgtcccgtgcggtagtagctgtgtctgtgtcccctcgtgaaatagtgtgcagtggaggtct

SEQ ID NO: 732890 - DNA, 120 bp, Artificial Sequence
  ENSG00000198794_10 (sequence is synthesized)
cttgtggtgctagatgtgtgtttagagctaaaccagcccccacccccaccctccacctgcccctcttgcctctggcccctctgaccctggcccagggacccctcacggggccaggggagg

SEQ ID NO: 732891 - DNA, 120 bp, Artificial Sequence
  ENSG00000198794_11 (sequence is synthesized)
catagcagaaagactggccccttcctagggttatgagctggaactgtttctactttcagtcttcctgggaagtaacagtacttagcactcttggtggtgggtgggagggtgggtacaggc

SEQ ID NO: 732892 - DNA, 120 bp, Artificial Sequence
  ENSG00000198794_12 (sequence is synthesized)
cagggatattcccttgctcttttgatccctccaggcctcgcctccttcagcctcctcctccctcatctgttccctgatgtcacattccctgtgcaatcttcccttgcccatggtctgtct

SEQ ID NO: 732893 - DNA, 120 bp, Artificial Sequence
  ENSG00000198794_13 (sequence is synthesized)
atctctttcctatgtggcttttctttgtcttccccaaggctgagtgtcccagttttatctgctcctgagactgagcccagatccccaaatctaatctgatttacagttcaaggaagctga

SEQ ID NO: 732894 - DNA, 120 bp, Artificial Sequence
  ENSG00000198794_14 (sequence is synthesized)
acctgacccccaggggatgaaaatgcaaggatgagtctgcttgggcctgagagtttgatctgcaggggcaggctcatcttttctctcccctgccttctcctccttctctccccagagccc

SEQ ID NO: 732895 - DNA, 120 bp, Artificial Sequence
  ENSG00000198794_15 (sequence is synthesized)
ccttgagcccctctgcctatgtccctctgcctcctccccatgcccccagttgctgtggcttgattctgctaccctgaccccaccatgtgccaggtggcatctgccttactgccttccctg

SEQ ID NO: 732896 - DNA, 120 bp, Artificial Sequence
  ENSG00000198794_16 (sequence is synthesized)
aggagctgggacatgctgggcagttgtcagatgtaaaggcacagctggagcagagggcatgtcagtaatgattggtccctggggaaggtctggctggctccagcacagtgaggcatttag

SEQ ID NO: 732897 - DNA, 120 bp, Artificial Sequence
  ENSG00000198794_17 (sequence is synthesized)
gtatctctcggtgaccgttggattcctggaagcagtagctgttctgtttggatctggtaggacagggctcagagggctaggcacggagggaaggtcagaggagaaggcaggcagggccca

SEQ ID NO: 732898 - DNA, 120 bp, Artificial Sequence
  ENSG00000198794_18 (sequence is synthesized)
gtgagaggggagcatgccttcccccaccctggcttgctcttggtcacagggcggttctgggcacttgaactcagggcccaagcagaagcacaggcccagtcctggctgcaagcacaatag

SEQ ID NO: 732899 - DNA, 120 bp, Artificial Sequence
  ENSG00000198794_19 (sequence is synthesized)
cctgaatgggatttcaggttaggcagggtgggaggggaggctctctggctttagttttgttttgttttccaaatcaaggtaacttgctcccttctgcctacaggccttggtcttggcttg

SEQ ID NO: 732900 - DNA, 120 bp, Artificial Sequence
  ENSG00000198794_20 (sequence is synthesized)
tcctcacccagtcggaactccctaccactttcaggagagtggttttaggcccgtggggctgttctgttccaagcagtgtgagaacatggctggtagaggctctagctgtgtgcggggcct

SEQ ID NO: 732901 - DNA, 120 bp, Artificial Sequence
  ENSG00000198794_21 (sequence is synthesized)
gaaggggagtgggttctcgcccaaagagcatctgcccatttcccaccttcccttctcccaccagaagcttgcctgagctgtttggacaaaaatccaaaccccacttggctactctggcct

SEQ ID NO: 732902 - DNA, 120 bp, Artificial Sequence
  ENSG00000198794_22 (sequence is synthesized)
ggcttcagcttggaacccaatacctaggcttacaggccatcctgagccaggggcctctggaaattctcttcctgatggtcctttaggtttgggcacaaaatataattgcctctcccctct

SEQ ID NO: 732903 - DNA, 120 bp, Artificial Sequence
  ENSG00000198794_23 (sequence is synthesized)
cccattttctctcttgggagcaatggtcacagtccctggtacctgaaaaggtacctaggtctaggcccttcttccctttcccttcctctcccctaccccagaactttggctccctttccc

SEQ ID NO: 732904 - DNA, 120 bp, Artificial Sequence
  ENSG00000198794_24 (sequence is synthesized)
ttctctctctggtagctccaggaggcctgtgatccagctccctgcctagcatccatgacctgttggatgttacctccaatcagtttcctgtcctacctgcctctttggcttggacctata

SEQ ID NO: 732905 - DNA, 120 bp, Artificial Sequence
  ENSG00000198794_25 (sequence is synthesized)
tggccatgctctggctctacccttgggaagcctgatcccggtgtgtggcccagcttgttcaggccctgggatgctgcatctccaggcaactatgcactttcccggggagagaaccagtat

SEQ ID NO: 732906 - DNA, 120 bp, Artificial Sequence
  ENSG00000198794_26 (sequence is synthesized)
gagaagtgggggcagggcacacattcatctttgtaggaaggtctggcctggggtcgggtgaaggagggcccaggtcagttctggggtcccagtgacctgctttgccattctcctggtgcc

SEQ ID NO: 732907 - DNA, 120 bp, Artificial Sequence
  ENSG00000198794_27 (sequence is synthesized)
gctgctgctccctgtttctggagctggatgttccccagctggcagttgagctgcctgagccaatgtgtctgtctttggtaactgagtgaaccataataaaggggaacatttggccctgtg

SEQ ID NO: 732908 - DNA, 120 bp, Artificial Sequence
  ENSG00000198794_28 (sequence is synthesized)
gcccccagccccggagcggctcgcggccggctccgcgccgcatcgctcgggtgcagcgcagctcagcgcagcgctgcggcctttcggcagccgaacggccgcggcagttcaggacaaaga

SEQ ID NO: 732909 - DNA, 120 bp, Artificial Sequence
  ENSG00000198794_29 (sequence is synthesized)
ggaaaccggccttctggagatggcgtgcgcagccggggatgggggcgactggaagggggtgcccgtggcttcctttgggcctttccttccaactagcgcctgcaggtggacccgggttga

SEQ ID NO: 732910 - DNA, 120 bp, Artificial Sequence
  ENSG00000198794_30 (sequence is synthesized)
cttccctcacctccctcgggcggccgacctttggatggcggacctcagccgccccagggttgcgaggcgacgggcgcgctggcccaggccaccaggcgggctccatcagggctttgggtg

SEQ ID NO: 732911 - DNA, 120 bp, Artificial Sequence
  ENSG00000198794_31 (sequence is synthesized)
tgcccacaggcctgactgtccttcagtcccacttgtggcatatgcatggaccataagtcttcccctgccaggctcccagaggcttcttccatgggccacctccccgactgggcctcagtt

SEQ ID NO: 732912 - DNA, 120 bp, Artificial Sequence
  ENSG00000198794_32 (sequence is synthesized)
tccctcaacctcccccatctaggcctctcttcccttccttcccctccaccctcctttcacagagcatctggacaggggtccctctctgcagtgtaatccctgtcttcttgcttccccttt

SEQ ID NO: 732913 - DNA, 89 bp, Artificial Sequence
  ENSG00000198794_33 (sequence is synthesized)
tcctttacaggctgcacttccttccctgctgccagccaggagtttcggaaggtttcctggaggaagtgtgatacagcaggttcaatcaa

SEQ ID NO: 732914 - DNA, 120 bp, Artificial Sequence
  ENSG00000198794_34 (sequence is synthesized)
tccgcgccgcatcgctcgggtgcagcgcagctcagcgcagcgctgcggcctttcggcagccgaacggccgcggcagaaccccgaccaagaacagatgccgggcccccagtcgctgcccca

SEQ ID NO: 732915 - DNA, 120 bp, Artificial Sequence
  ENSG00000198794_35 (sequence is synthesized)
cccccagccccggagcggctcgcggccggctccgcgccgcatcgctcgggtgcagcgcagctcagcgcagcgctgcggcctttcggcagccgaacggccgcggcagacggagtcttgctc

SEQ ID NO: 732916 - DNA, 120 bp, Artificial Sequence
  ENSG00000198794_36 (sequence is synthesized)
gctagtgcgcggtcagcagagtgcgggaggagctggctgcggctccactccgcgcctccccgcgggcgattacgtcgcggcgtggtcctcgcggggcgcggaagacccagacttcagcct

SEQ ID NO: 732917 - DNA, 120 bp, Artificial Sequence
  ENSG00000198794_37 (sequence is synthesized)
cgccacgcctgcccggagctcgaggctcccggacccccgtccacccctgggacgtgaggagtgaggctttgggccaggctgttccccgaggcgcgtggggaagcgggcgtgacctcttct

SEQ ID NO: 732918 - DNA, 120 bp, Artificial Sequence
  ENSG00000198794_38 (sequence is synthesized)
agccccggagcggctcgcggccggctccgcgccgcatcgctcgggtgcagcgcagctcagcgcagcgctgcggcctttcggcagccgaacggccgcggcaggttcaatcaattctcctgc

SEQ ID NO: 732919 - DNA, 120 bp, Artificial Sequence
  ENSG00000198794_39 (sequence is synthesized)
ggaaatccctccctgtgtaatgttgcaacacacaggtctaccacgtggaaacttgcaaagatgtatgggtagaactaaccccttctgacctctcaattaaggcctttaaatgtcttctgt

SEQ ID NO: 732920 - DNA, 120 bp, Artificial Sequence
  ENSG00000198795_0 (sequence is synthesized)
gcaggcaggctgacaatgatttcctcagtgattacgtacagagcgagtccctgcgggttaggggccccctctggagccatcctgatggctttgggggccttgcttccattttccattatt

SEQ ID NO: 732921 - DNA, 120 bp, Artificial Sequence
  ENSG00000198795_1 (sequence is synthesized)
atgtggactaccggagcgacagcgcagtccaagaccttgcaggatgtctcgccgcaagcaagcgaaaccgagatccctcaaagaccccaactgtaaacttgaagacaagactgaagatgg

SEQ ID NO: 732922 - DNA, 120 bp, Artificial Sequence
  ENSG00000198795_2 (sequence is synthesized)
agaggcactagattgtaagaagaggccggaagacggggaggagttggaagacgaagctgtgcacagctgtgacagctgcctccaggtgtttgaatcgctgagcgatatcacagaacacaa

SEQ ID NO: 732923 - DNA, 120 bp, Artificial Sequence
  ENSG00000198795_3 (sequence is synthesized)
gattaatcaatgtcaactgacagatggagtggatgttgaagatgatccgacttgctcttggccagcttcctcaccttctagcaaggatcagacttcccctagccatggagaaggttgcga

SEQ ID NO: 732924 - DNA, 120 bp, Artificial Sequence
  ENSG00000198795_4 (sequence is synthesized)
ttttggagaggaagaaggtggccctgggcttccatacccgtgtcaattctgtgacaagtcgtttagccgcctcagctacctaaagcaccatgagcagagtcacagtgacaaactgccttt

SEQ ID NO: 732925 - DNA, 120 bp, Artificial Sequence
  ENSG00000198795_5 (sequence is synthesized)
caaatgcacctactgcagtaggctgttcaaacacaagcgcagccgagatcgccacataaaactccacaccggggacaagaagtaccactgcagtgaatgtgatgctgcgttttccagaag

SEQ ID NO: 732926 - DNA, 120 bp, Artificial Sequence
  ENSG00000198795_6 (sequence is synthesized)
tgatcacttgaagatccacttaaagactcacacgtccaacaagccatataaatgtgccatttgtcgccgtgggtttctgtcctctagttccttacacggacacatgcaggttcatgagag

SEQ ID NO: 732927 - DNA, 120 bp, Artificial Sequence
  ENSG00000198795_7 (sequence is synthesized)
gaacaaggacggctctcagtccggttccaggatggaggactggaagatgaaggacactcagaagtgcagtcagtgtgaggaaggctttgacttcccggaagacctccaaaaacacattgc

SEQ ID NO: 732928 - DNA, 120 bp, Artificial Sequence
  ENSG00000198795_8 (sequence is synthesized)
agagtgccaccccgaatgctccccaaatgaggaccgagcggccctccagtgtgtctactgccacgagctcttcgtagaggagacctccctcatgaaccacatggagcaggtgcatagcgg

SEQ ID NO: 732929 - DNA, 120 bp, Artificial Sequence
  ENSG00000198795_9 (sequence is synthesized)
ggagaagaagaactcatgcagcatttgttctgagagtttccacacagttgaggaactgtacagccacatggacagtcaccagcaaccggagtcatgcaatcacagcaacagcccttccct

SEQ ID NO: 732930 - DNA, 120 bp, Artificial Sequence
  ENSG00000198795_10 (sequence is synthesized)
ggtcacggtgggctatacctccgtgtccagtacgactccagattccaacctctcagtggacagctcaaccatggtggaagctgccccgccaatcccaaagagtcgagggaggaagagggc

SEQ ID NO: 732931 - DNA, 120 bp, Artificial Sequence
  ENSG00000198795_11 (sequence is synthesized)
cgctcaacaaacccctgacatgactggtccctcgagtaaacaagcaaaagttacctacagctgtatttactgcaacaaacaattattttcaagtcttgcagttctgcagattcacctgaa

SEQ ID NO: 732932 - DNA, 120 bp, Artificial Sequence
  ENSG00000198795_12 (sequence is synthesized)
aactatgcacttagataagccagaacaggcccatatttgtcagtattgcttggaggtcctgccctcactctataacctaaatgaacatcttaagcaagtgcatgaagctcaggacccagg

SEQ ID NO: 732933 - DNA, 120 bp, Artificial Sequence
  ENSG00000198795_13 (sequence is synthesized)
tctgattgtttctgccatgcctgccattgtctaccagtgtaacttctgttccgaagttgtcaacgacctcaacactcttcaggaacacatccgatgttctcatggatttgcaaaccctgc

SEQ ID NO: 732934 - DNA, 120 bp, Artificial Sequence
  ENSG00000198795_14 (sequence is synthesized)
agctaaagatagtaatgcattcttttgtccccattgctatatggggtttctcactgactcttccctggaagagcatattagacaggttcattgtgacctcagtggctcccgatttgggtc

SEQ ID NO: 732935 - DNA, 120 bp, Artificial Sequence
  ENSG00000198795_15 (sequence is synthesized)
tccagtgcttgggactcccaaagaaccagtagtagaagtctattcttgttcctattgtacaaattcgccaatattcaacagcgttcttaaactgaacaagcatatcaaagagaatcataa

SEQ ID NO: 732936 - DNA, 120 bp, Artificial Sequence
  ENSG00000198795_16 (sequence is synthesized)
aaacattcccttggccctgaattatatccacaatgggaagaaatccagggccttaagccccctatctcctgtggccatagagcagacatctcttaagatgatgcaggcagtaggaggtgc

SEQ ID NO: 732937 - DNA, 120 bp, Artificial Sequence
  ENSG00000198795_17 (sequence is synthesized)
acctgcacgtcccactggagaatatatctgtaatcaatgtggtgctaagtacacatccctagacagctttcagactcacctaaaaactcatctcgacactgtgcttccaaaattgacctg

SEQ ID NO: 732938 - DNA, 120 bp, Artificial Sequence
  ENSG00000198795_18 (sequence is synthesized)
tcctcagtgcaacaaggaattccccaaccaagaatccttgctgaagcatgttaccattcactttatgatcacttcaacgtattacatctgtgagagttgtgacaagcaattcacatcagt

SEQ ID NO: 732939 - DNA, 120 bp, Artificial Sequence
  ENSG00000198795_19 (sequence is synthesized)
ggatgaccttcagaaacacctgctggacatgcacacctttgtcttctttcgctgcaccctctgccaggaagtttttgactcaaaagtctccattcagctccacttggctgtgaagcacag

SEQ ID NO: 732940 - DNA, 120 bp, Artificial Sequence
  ENSG00000198795_20 (sequence is synthesized)
cctggaaaaccaagggaaagtgcataagtgcattttctgcggtgagtcctttggcaccgaggtggagctgcaatgccacatcaccactcacagtaagaagtacaactgcaagttctgtag

SEQ ID NO: 732941 - DNA, 120 bp, Artificial Sequence
  ENSG00000198795_21 (sequence is synthesized)
caaagccttccatgcgatcattttgttagaaaaacacttgcgagaaaaacactgtgtattcgaaaccaagacacccaactgtggaacaaatggagcttccgagcaagtgcagaaagagga

SEQ ID NO: 732942 - DNA, 120 bp, Artificial Sequence
  ENSG00000198795_22 (sequence is synthesized)
agtggagctgcagactttgctgaccaacagccaggagtcccacaacagtcacgatgggagcgaagaagacgttgacacctctgagcctatgtacggctgcgacatttgtggggcagccta

SEQ ID NO: 732943 - DNA, 120 bp, Artificial Sequence
  ENSG00000198795_23 (sequence is synthesized)
cactatggaaactttgctgcagaatcaccagctccgagaccacaacatcagacctggagaaagtgccatcgtgaaaaagaaagctgagctcattaaagggaattacaagtgcaacgtgtg

SEQ ID NO: 732944 - DNA, 120 bp, Artificial Sequence
  ENSG00000198795_24 (sequence is synthesized)
ctctcgaaccttcttctccgaaaatggcctccgggaacatatgcagacccacctaggccctgtcaaacactacatgtgccctatttgcggagagcggtttccctcccttttaactcttac

SEQ ID NO: 732945 - DNA, 120 bp, Artificial Sequence
  ENSG00000198795_25 (sequence is synthesized)
tgaacacaaagtcacgcatagtaagagtcttgatactggaaactgccggatttgcaagatgcctctccagagtgaagaggagtttttagagcattgccaaatgcaccctgacttgaggaa

SEQ ID NO: 732946 - DNA, 120 bp, Artificial Sequence
  ENSG00000198795_26 (sequence is synthesized)
ttccctgacaggctttcgctgcgtggtgtgcatgcagacagtgacctccaccttggaactcaaaatccatgggacgttccacatgcaaaagacagggaatgggtctgcagttcagaccac

SEQ ID NO: 732947 - DNA, 120 bp, Artificial Sequence
  ENSG00000198795_27 (sequence is synthesized)
agggcggggccagcacgtccaaaaactgtataagtgcgcatcttgcctcaaagaattccgttccaagcaagatctggtgaaacttgatatcaatggcctgccatatggtctgtgtgccgg

SEQ ID NO: 732948 - DNA, 120 bp, Artificial Sequence
  ENSG00000198795_28 (sequence is synthesized)
ctgcgtgaatctcagtaagagcgccagcccaggcattaacgtccctcccggcacgaatagaccaggcttgggccagaatgagaatctgagtgccattgaggggaaaggcaaggtgggggg

SEQ ID NO: 732949 - DNA, 120 bp, Artificial Sequence
  ENSG00000198795_29 (sequence is synthesized)
actgaagacacgctgctctagctgcaacgttaagtttgagtctgaaagtgaactccagaaccacatccaaaccatccaccgagagctcgtgccagacagcaacagcacacagttgaaaac

SEQ ID NO: 732950 - DNA, 120 bp, Artificial Sequence
  ENSG00000198795_30 (sequence is synthesized)
gccccaagtatcaccaatgcccagaatcagtccctcccagtcggatgagaagaagacctatcaatgcatcaagtgtcagatggttttctacaatgaatgggatattcaggttcatgttgc

SEQ ID NO: 732951 - DNA, 120 bp, Artificial Sequence
  ENSG00000198795_31 (sequence is synthesized)
aaatcacatgattgatgaaggactgaaccatgaatgcaaactctgcagccagacctttgactctcctgccaaactccagtgccacctgatagagcacagcttcgaagggatgggaggcac

SEQ ID NO: 732952 - DNA, 120 bp, Artificial Sequence
  ENSG00000198795_32 (sequence is synthesized)
cttcaagtgtccagtctgctttacagtatttgttcaagcaaacaagttgcagcagcatattttctctgcccatggacaagaagacaagatctatgactgtacacaatgtccacagaagtt

SEQ ID NO: 732953 - DNA, 120 bp, Artificial Sequence
  ENSG00000198795_33 (sequence is synthesized)
tttcttccaaacagagctgcagaatcatacaatgacccaacacagcagttagtgcaagtacagtctctcaaggagaattgattttgtggcacaaaaagggaacatgttttactctttgca

SEQ ID NO: 732954 - DNA, 120 bp, Artificial Sequence
  ENSG00000198795_34 (sequence is synthesized)
cgaaactttcattgttaatgtatattattcagaaacattgtattgtaccataaaacttgtattatcaaactgttggatgttcatgtgtttgaacttttgcgcaccggatagaccccttgt

SEQ ID NO: 732955 - DNA, 120 bp, Artificial Sequence
  ENSG00000198795_35 (sequence is synthesized)
atataaagtgttgcacatgtattatgtcgtctgatactaaaatggtcttataaagacaagtggacttgggccctattcaggcaagattaaaaaaaaaaaaagactatgaccaaaatggct

SEQ ID NO: 732956 - DNA, 120 bp, Artificial Sequence
  ENSG00000198795_36 (sequence is synthesized)
taagataaagtatttttaaggaagaaagattaaaaacaactgttatacatgagactatggttggacttccttttctttacacttaagcctagaatttctctttaggtatatcagcgctta

SEQ ID NO: 732957 - DNA, 120 bp, Artificial Sequence
  ENSG00000198795_37 (sequence is synthesized)
aatccaagactattttttattgctgaagattcttgcaaaccatgaagagatgttctcacagaacagaaccccacagctggataaggcccgtatatatatatttgtaagccttgcaatgtg

SEQ ID NO: 732958 - DNA, 120 bp, Artificial Sequence
  ENSG00000198795_38 (sequence is synthesized)
acaggtagcatcactatatatgcaatagttgttatgtagactgtcaaagaatttttttttccctggatacatttgaagctttgagtgttcaaggttttccttaatgatttcacgcagcca

SEQ ID NO: 732959 - DNA, 120 bp, Artificial Sequence
  ENSG00000198795_39 (sequence is synthesized)
aattcttgaatcagttgaactaacctgtatgttactgttattaatgtttactctgcagtctgaacctggagattactggaattgttttccaagaggaaataaattcagtttaccattagg

SEQ ID NO: 732960 - DNA, 120 bp, Artificial Sequence
  ENSG00000198795_40 (sequence is synthesized)
gttcgcatctgcctcggatggtgggagatttttctttccaagaccttttcatcgccttgcagggtcgatttccccccctcgtccccccaactacaaaagagcacgactcgctttgatgtc

SEQ ID NO: 732961 - DNA, 120 bp, Artificial Sequence
  ENSG00000198795_41 (sequence is synthesized)
gattctcctgtaataaaatctgcaatgaagccctcctattgcaacttcaaggaaaatggtgtttctgtttttggtagcaagaagattaaatgttactttaaaagaacctgtctttaaacc

SEQ ID NO: 732962 - DNA, 80 bp, Artificial Sequence
  ENSG00000198795_42 (sequence is synthesized)
gggaaagtttggtgcagcagccgccgccgccgccgccgccgtcgtgcagagcgcggagctcgggcagccgcgagccccgc

SEQ ID NO: 732963 - DNA, 120 bp, Artificial Sequence
  ENSG00000198795_43 (sequence is synthesized)
ctcccagtcggatgaggatattgtcttctctatgactgaagagaccagcgctcatgccaacactactgagatctggaatctcagcatagcttcaccaagaagacctatcaatgcatcaag

SEQ ID NO: 732964 - DNA, 120 bp, Artificial Sequence
  ENSG00000198795_44 (sequence is synthesized)
attgtcacttagtgatttactggctctgtcatgatttagacattgaacttctgactccaagtccagtgttggtttgctacaattgtttcatcaagatgggaaagctatggaccagaaaag

SEQ ID NO: 732965 - DNA, 120 bp, Artificial Sequence
  ENSG00000198795_45 (sequence is synthesized)
tgccttgatgaaaacctattcactccgtatcaaaagtcttgaaactgagccaaggccaaacgaagcctttggagatgaaggtcaaatacagaagaacaagatgatcaattctagacccag

SEQ ID NO: 732966 - DNA, 120 bp, Artificial Sequence
  ENSG00000198795_46 (sequence is synthesized)
atttgaaagtcagctataagattatgtgccaggtaaaataatgattagctgtccacgtggactgaaattttagacagtggatcctgcagggataaagaaaatgcgagctcacacacacct

SEQ ID NO: 732967 - DNA, 120 bp, Artificial Sequence
  ENSG00000198796_0 (sequence is synthesized)
agaaacagccctcaagtttcatcacagggatgctaaaatatattctccagcttcagcaatgacctagttcactgaagggcggggaaaaaatgctcttcttccagaacttccccgggcatg

SEQ ID NO: 732968 - DNA, 120 bp, Artificial Sequence
  ENSG00000198796_1 (sequence is synthesized)
gaatttcccctcttaggaagagatgaactttctggaagcagacccatctatgctttgacctgatcatggaagaccctgagccctataaactcctttgaatccctgtcccgggaacaggga

SEQ ID NO: 732969 - DNA, 120 bp, Artificial Sequence
  ENSG00000198796_2 (sequence is synthesized)
cacccaatcaatgcctcacacacagcctggggaatccacagctgagccagccctcctacaacatttcttggacaaagagtactgaaaaatttggtgcggcatgaaaggatgaaagactcc

SEQ ID NO: 732970 - DNA, 120 bp, Artificial Sequence
  ENSG00000198796_3 (sequence is synthesized)
gaagggccccagaggcccccgctgtgttttttatctacattgctttcccagaaggttcctgagaagtcagacgctgtgcttcgctgcataatatctggtcagcccaagccagaggtaact

SEQ ID NO: 732971 - DNA, 120 bp, Artificial Sequence
  ENSG00000198796_4 (sequence is synthesized)
tggtataagaatggtcaggccatcgatgggagtggcattatttccaactatgaattctttgagaatcagtatattcatgtgttacatctctcttgctgtaccaaaaatgatgctgctgtc

SEQ ID NO: 732972 - DNA, 120 bp, Artificial Sequence
  ENSG00000198796_5 (sequence is synthesized)
tatcaaatctcggctaaaaactcttttggaatgatctgttgttctgcttccgttgaggttgagtgctcatcagagaacccacaattgtctcctaacctggaagatgacagggacaggggt

SEQ ID NO: 732973 - DNA, 120 bp, Artificial Sequence
  ENSG00000198796_6 (sequence is synthesized)
tggaaacatgaaacagggacacatgaagaagaaagggcaaatcagattgatgagaaggaacatccttataaggaagaagaaagcatctccccgggcactcccaggtcagctgactcctcc

SEQ ID NO: 732974 - DNA, 120 bp, Artificial Sequence
  ENSG00000198796_7 (sequence is synthesized)
ccctccaaatccaaccattcactctccctccagtcattgggcaatcttgacattagtgtgtccagttctgaaaatcctttgggtgttaaaggaacaaggcacactggagaggcttatgat

SEQ ID NO: 732975 - DNA, 120 bp, Artificial Sequence
  ENSG00000198796_8 (sequence is synthesized)
ccaagtaacacagaagaaattgcaaatgggttgctttttcttaattcaagtcatatttatgaaaaacaagacagatgttgccacaagacagtgcattccatggcatcaaagttcacggat

SEQ ID NO: 732976 - DNA, 120 bp, Artificial Sequence
  ENSG00000198796_9 (sequence is synthesized)
ggtgacctgaacaatgatggtcctcatgatgaaggcttacgctctagtcagcaaaatcccaaagtacagaaatacattagcttcagcctcccgctatctgaggcaactgcacacatttac

SEQ ID NO: 732977 - DNA, 120 bp, Artificial Sequence
  ENSG00000198796_10 (sequence is synthesized)
ccaggtgacagtgccgtggccaacaaacaacccagcccacagctttccagtgaagactctgacagtgactatgaactttgcccagagataaccctaacctacaccgaggagttttcagat

SEQ ID NO: 732978 - DNA, 120 bp, Artificial Sequence
  ENSG00000198796_11 (sequence is synthesized)
gatgacctggagtatctggaatgttctgatgttatgacggattactctaatgcagtttggcaaaggaacctgctggggactgagcatgtttttttattagaaagcgatgacgaagagatg

SEQ ID NO: 732979 - DNA, 120 bp, Artificial Sequence
  ENSG00000198796_12 (sequence is synthesized)
gaattcggtgagcattgcctgggtgggtgtgagcatttcctcagtggaatgggttgtgggtctcgggtgtcgggtgacgctgggcctatggttgccactgctggcttctgtggtcatcac

SEQ ID NO: 732980 - DNA, 120 bp, Artificial Sequence
  ENSG00000198796_13 (sequence is synthesized)
tcacaaccccaagaagttggggtgaggagcagcagagtctccaagcacggtccctcatccccacaaacagggatgactctcattttgggacctcaccaggatggaacgtcttcagtgaca

SEQ ID NO: 732981 - DNA, 120 bp, Artificial Sequence
  ENSG00000198796_14 (sequence is synthesized)
gaacaggggagatataaactccccactgctcccgaggctgctgaaaatgattatccaggaattcaaggagaaaccagagacagccaccaagcaagagaggaatttgccagtgacaatctg

SEQ ID NO: 732982 - DNA, 120 bp, Artificial Sequence
  ENSG00000198796_15 (sequence is synthesized)
ctcaacatggatgaatcagtaagagagacagagatgaagctcttgtctggtgagtcagaaaactcagggatgagccagtgttgggagacggcagctgacaagagagtggggggaaaggac

SEQ ID NO: 732983 - DNA, 120 bp, Artificial Sequence
  ENSG00000198796_16 (sequence is synthesized)
ttatggagcaagaggggttcaaggaaatctgccagggtgaggcagccgggaatgaagggaaatcccaagaagccgaatgccaacctgagagaaagtacaacagaaggtacccttcatctc

SEQ ID NO: 732984 - DNA, 120 bp, Artificial Sequence
  ENSG00000198796_17 (sequence is synthesized)
tgctctgccaaagaatctgctgagcccccactaacccagagtgataaaagagagacttctcacaccacagcagcagcgactggtcggagttcccatgctgatgcaagagaatgtgctatt

SEQ ID NO: 732985 - DNA, 120 bp, Artificial Sequence
  ENSG00000198796_18 (sequence is synthesized)
tcaacccaggcagagcaagaagcaaaaacccttcaaacttcaacagactcagtctccaaagaaggcaacacaaattgcaagggagaaggcatgcaagttaatactctatttgaaacaagc

SEQ ID NO: 732986 - DNA, 120 bp, Artificial Sequence
  ENSG00000198796_19 (sequence is synthesized)
caggttccagactggagtgatcctcctcaggtacaagttcaggaaacagtcagagagacaatctcttgcagccagatgccagctttctcagagcctgctggggaggagtccccattcact

SEQ ID NO: 732987 - DNA, 120 bp, Artificial Sequence
  ENSG00000198796_20 (sequence is synthesized)
gggaccacaacaatttccttctcaaacttaggaggggtccacaaggaaaatgcatcattagctcaacactcggaggtcaaaccctgtacctgtggtccacagcatgaagaaaaacaagac

SEQ ID NO: 732988 - DNA, 120 bp, Artificial Sequence
  ENSG00000198796_21 (sequence is synthesized)
agagatggcaacatacctgacaatttcagggaagacctaaaatatgagcagagcatctcagaagccaatgatgagactatgtccccaggtgtgttctcaaggcatctccccaaggatgct

SEQ ID NO: 732989 - DNA, 120 bp, Artificial Sequence
  ENSG00000198796_22 (sequence is synthesized)
cgtgctgacttcagggagcctgtggctgtctctgttgcttcccctgaacccacagatactgccctcaccctggaaaatgtgtgtgatgagccaagggacagagaagcagtgtgtgcaatg

SEQ ID NO: 732990 - DNA, 120 bp, Artificial Sequence
  ENSG00000198796_23 (sequence is synthesized)
gagtgttttgaggctggtgaccaaggaacgtgttttgataccatagattctcttgttgggagaccagttgataaatattcgcctcaagaaatttgctctgtagatacggaactggcagaa

SEQ ID NO: 732991 - DNA, 120 bp, Artificial Sequence
  ENSG00000198796_24 (sequence is synthesized)
ggtcaaaacaaagtatctgatttatgttcttctaatgacaagacactggaagtcttttttcagacacaagtgtctgagacttcagtgtctacgtgcaaaagcagcaaggacggcaactca

SEQ ID NO: 732992 - DNA, 120 bp, Artificial Sequence
  ENSG00000198796_25 (sequence is synthesized)
gtcatgtcccctctttttaccagtactttcaccttgaacatttcacacacagctagtgaaggtgccacaggagaaaatctagccaaggtggagaattccacctacccactggcctccaca

SEQ ID NO: 732993 - DNA, 120 bp, Artificial Sequence
  ENSG00000198796_26 (sequence is synthesized)
gtacatgctggccaggagcagccaagccccagcaactcaggagggcttgatgaaacacagctcctttcttctgagaacaatcctttagtgcaatttaaagaaggaggtgacaagagcccc

SEQ ID NO: 732994 - DNA, 120 bp, Artificial Sequence
  ENSG00000198796_27 (sequence is synthesized)
agtcctagtgccgcagacaccacagccacaccagccagttatagttcaattgtgagttttccttgggagaagccaacaacattaactgctaataatgagtgctttcaagcgaccagggag

SEQ ID NO: 732995 - DNA, 120 bp, Artificial Sequence
  ENSG00000198796_28 (sequence is synthesized)
actgaggacacatcaactgttaccattgccaccgaagtccacccagccaaataccttgctgtgtcaattcctgaggacaagcatgcaggtggcactgaggagaggttccctcgtgcatcc

SEQ ID NO: 732996 - DNA, 120 bp, Artificial Sequence
  ENSG00000198796_29 (sequence is synthesized)
catgaaaaggtttcccaatttccttcccaagtgcagttggatcatattttaagtggtgctaccatcaaatctacaaaagagctactttgcagggcacccagtgtgccaggagtcccacac

SEQ ID NO: 732997 - DNA, 120 bp, Artificial Sequence
  ENSG00000198796_30 (sequence is synthesized)
gagaatttccaagaaagaggaagtgaaacaaagcagggggtccagcagcagagcctgtcccagcagggttctctttctgcacctgatttccaacaaagtttgcctacgacatctgctgca

SEQ ID NO: 732998 - DNA, 120 bp, Artificial Sequence
  ENSG00000198796_31 (sequence is synthesized)
caagaggaaagaaacttggtgcccacggcccactcacccgcaagctctagggaaggagcagggcagcgctcaggttgggggacgagggtctccgtggtggctgaaactgctggggaagaa

SEQ ID NO: 732999 - DNA, 120 bp, Artificial Sequence
  ENSG00000198796_32 (sequence is synthesized)
gacagtcaggctctgagcaacgttccatctctctctgatatccttttggaagagtctaaagaatatagacctggaaattgggaggcaggcaacaagctgaagattataactctagaggct

SEQ ID NO: 733000 - DNA, 120 bp, Artificial Sequence
  ENSG00000198796_33 (sequence is synthesized)
tccgcttctgaaatctggccaccacgacaactgacaaattctgagagcaaggcatcagacggtggtctcataattcctgacaaggtctgggctgtacctgatagtctaaaggcagatgct

SEQ ID NO: 733001 - DNA, 120 bp, Artificial Sequence
  ENSG00000198796_34 (sequence is synthesized)
gttgtgcctgaattggccccctctgaaatagcagcattggctcacagtccagaggatgctgagtcagcccttgctgatagcagagaaagccataaaggcgaagagcccaccatcagtgta

SEQ ID NO: 733002 - DNA, 120 bp, Artificial Sequence
  ENSG00000198796_35 (sequence is synthesized)
cattggagaagtctttcttcccggggtttcagccaacccagactcctggagtcatccgtggaccctgtagatgaaaaggagttatctgtcacagattcactgtcagcggcttctgaaact

SEQ ID NO: 733003 - DNA, 120 bp, Artificial Sequence
  ENSG00000198796_36 (sequence is synthesized)
ggagggaaggaaaatgttaacaatgtgagtcaagaccaggaggaaaaacaactcaagatggatcacactgccttctttaaaaagtttctgacctgccctaaaatcctagagtcctctgta

SEQ ID NO: 733004 - DNA, 120 bp, Artificial Sequence
  ENSG00000198796_37 (sequence is synthesized)
gatcccattgatgagataagtgtgatagagtacaccagggctggaaaaccagagccctctgaaaccacaccacagggcgccagagaagggggtcaatcaaatgacggaaacatgggccac

SEQ ID NO: 733005 - DNA, 120 bp, Artificial Sequence
  ENSG00000198796_38 (sequence is synthesized)
gaagcggaaatccagccggccattttgcaagttccatgtctccagggaaccattctgagtgaaaatagaatcagcagaagccaagaaggcagtatgaagcaggaggctgaacaaattcaa

SEQ ID NO: 733006 - DNA, 120 bp, Artificial Sequence
  ENSG00000198796_39 (sequence is synthesized)
cctgaggaggcaaaaactgccatttggcaagtcctgcaacccagcgaaggcggtgaaagaattccaagtggatgtagcataggccaaatacaagaaagcagtgatgggagcttaggggag

SEQ ID NO: 733007 - DNA, 120 bp, Artificial Sequence
  ENSG00000198796_40 (sequence is synthesized)
gctgagcaaagcaaaaaggacaaagcagaattgatttcccccacttcacctctttctagttgtcttccaataatgactcacgcttctcttggggttgacacgcacaactccacaggccaa

SEQ ID NO: 733008 - DNA, 120 bp, Artificial Sequence
  ENSG00000198796_41 (sequence is synthesized)
attcatgacgtccctgaaaatgacatagttgagcccagaaagcgtcagtatgtgtttcctgtttcacagaaaaggggaactattgagaatgagcgtgggaaacctttgccctcttctcct

SEQ ID NO: 733009 - DNA, 120 bp, Artificial Sequence
  ENSG00000198796_42 (sequence is synthesized)
gatcttaccaggttcccttgtacttcatctcctgaaggaaatgtcacagactttttgataagccacaaaatggaggaacctaaaatagaggtgcttcaaattggggaaaccaaaccccca

SEQ ID NO: 733010 - DNA, 120 bp, Artificial Sequence
  ENSG00000198796_43 (sequence is synthesized)
agctcatctagctcctcagcgaagaccttggcatttatttcaggagaacgtgagttagagaaagcccctaaattactgcaggatccatgtcaaaagggcaccctgggctgtgcgaaaaag

SEQ ID NO: 733011 - DNA, 120 bp, Artificial Sequence
  ENSG00000198796_44 (sequence is synthesized)
tccagggagagagagaagtccctggaagcccgagcaggcaaatcgccagggaccctcacagcagtgacggggtcagaggaggtcaagaggaagccagaagccccaggcagtggacattta

SEQ ID NO: 733012 - DNA, 120 bp, Artificial Sequence
  ENSG00000198796_45 (sequence is synthesized)
gctgagggagtaaagaagaaaattttgtccagggtggcagcactgaggctgaaactggaagaaaaggaaaatatcagaaagaactcagcctttcttaaaaagatgcccaaactcgaaaca

SEQ ID NO: 733013 - DNA, 120 bp, Artificial Sequence
  ENSG00000198796_46 (sequence is synthesized)
tcattatcacacacagaagagaaacaagacccaaaaaagccatcttgcaaaagagaaggaagagctccagtattactgaaaaagatccaagctgagatgttccctgaacactctggaaat

SEQ ID NO: 733014 - DNA, 120 bp, Artificial Sequence
  ENSG00000198796_47 (sequence is synthesized)
gtaaaattaagctgccaatttgcagaaattcatgaagattctactatctgctggacaaaagattcaaagtccatagcccaagtgcagagaagtgcaggggacaactccactgtttccttt

SEQ ID NO: 733015 - DNA, 120 bp, Artificial Sequence
  ENSG00000198796_48 (sequence is synthesized)
gccatcgtgcaagccagtccgaaggaccagggactctattactgctgcatcaagaacagctacggaaaagtgactgctgaatttaacctcacagctgaagttctcaaacagctgtcaagt

SEQ ID NO: 733016 - DNA, 120 bp, Artificial Sequence
  ENSG00000198796_49 (sequence is synthesized)
cgccaggatactaaaggatgtgaagagattgaattcagccaactcatcttcaaagaagacttcctccatgacagctactttgggggccgcctgcgtggtcagatcgccacggaggagctg

SEQ ID NO: 733017 - DNA, 120 bp, Artificial Sequence
  ENSG00000198796_50 (sequence is synthesized)
cactttggagaaggggttcaccgcaaagccttccgcagcacagtgatgcacggcctcatgcctgtcttcaaacctggccatgcctgtgtgcttaaggtgcacaatgccattgcctatggg

SEQ ID NO: 733018 - DNA, 120 bp, Artificial Sequence
  ENSG00000198796_51 (sequence is synthesized)
accagaaataatgatgagctcatccaaaggaactacaaactcgctgcccaggaatgctatgttcaaaatactgccaggtattatgccaagatctacgctgctgaagcacagcctctggaa

SEQ ID NO: 733019 - DNA, 120 bp, Artificial Sequence
  ENSG00000198796_52 (sequence is synthesized)
ggctttggagaagtacctgagatcattcctatttttcttatccatcggcctgagaacaatatcccgtatgctacagtggaggaggagctgattggagaatttgtgaagtattccatcagg

SEQ ID NO: 733020 - DNA, 120 bp, Artificial Sequence
  ENSG00000198796_53 (sequence is synthesized)
gatgggaaagaaataaacttcttgagaagagaatcagaagctggtcagaaatgttgcaccttccagcactgggtgtaccagaaaacaagtggctgcctcctggtgacggacatgcaaggt

SEQ ID NO: 733021 - DNA, 120 bp, Artificial Sequence
  ENSG00000198796_54 (sequence is synthesized)
gtaggaatgaagctaactgacgttggcatagcaacgctggctaaagggtacaagggatttaaaggcaactgttccatgaccttcattgatcagtttaaagcactacaccagtgtaacaag

SEQ ID NO: 733022 - DNA, 120 bp, Artificial Sequence
  ENSG00000198796_55 (sequence is synthesized)
tattgcaaaatgctgggactgaaatcccttcaaaacaacaaccagaaacagaagcagccgagcattgggaaaagcaaagttcaaacaaactctatgacaataaagaaggcagggcctgag

SEQ ID NO: 733023 - DNA, 120 bp, Artificial Sequence
  ENSG00000198796_56 (sequence is synthesized)
accccaggcgaaaagaaaacctaacgtccctgggtaacctaatggccactggctagcagcacacaatctcgccagggaaaatctgaggccacacaggagagaatatacagcctgcagaga

SEQ ID NO: 733024 - DNA, 120 bp, Artificial Sequence
  ENSG00000198796_57 (sequence is synthesized)
gtgcgtggcaatccttactcccagccgactgtgcgccaagatgcttctaaacccatcacctgctgtcttcactcaaatgatttcagaacaggatttgcgaccaggtttatggggagattg

SEQ ID NO: 733025 - DNA, 120 bp, Artificial Sequence
  ENSG00000198796_58 (sequence is synthesized)
aatcaacgattggtctcaaagacagtccattctttatatacatgtttagcatttttaccaacctcacatcatgtgtatatttgtgtatttgcacatggttgtgctgtcgaggacctggtg

SEQ ID NO: 733026 - DNA, 120 bp, Artificial Sequence
  ENSG00000198796_59 (sequence is synthesized)
ctgagaagagtctgttcacagccaaaattcttcccactgtcattcctaacctgggatttctagacacatcctgctgtgatgtaaacagaaatcacgaattcgctcactggatcaagttgt

SEQ ID NO: 733027 - DNA, 120 bp, Artificial Sequence
  ENSG00000198796_60 (sequence is synthesized)
tccactggtgtctaatacgctattgttgccggaggtgggttctgtgacgtgaagccatttcccatcattcaacagccagttacaattttctgtttaattaaattcatatttaaacaaaaa

SEQ ID NO: 733028 - DNA, 120 bp, Artificial Sequence
  ENSG00000198796_61 (sequence is synthesized)
attttcatgccccaggactggaagatgagagctgcagcaccaggcattacatcctgattgaaggaagaaggaggggataggcaaggaattttatcgttgaaatggaagaggatgatacag

SEQ ID NO: 733029 - DNA, 120 bp, Artificial Sequence
  ENSG00000198796_62 (sequence is synthesized)
tggtgaccttccacactctgtcctggagcagcgttgtacaagttcaggaaacagtcagagagacaatctcttgcagccagatgccagctttctcagagcctgctggggaggagtccccat

SEQ ID NO: 733030 - DNA, 120 bp, Artificial Sequence
  ENSG00000198796_63 (sequence is synthesized)
gtgtgtgtgtgtgtgtgtgtgtctcttcctttacttcacattcacaattgctataccataatgtaaatcaaaataagtttcccaacaccatcagggtacttgtgcatgacagctgctgct

SEQ ID NO: 733031 - DNA, 120 bp, Artificial Sequence
  ENSG00000198796_64 (sequence is synthesized)
agggtacttgtgcatgacagctgctgctgctcggaaggaaatctggttttgaaaaaaaggcccagataaaccctaagccatcctaattatagcaaaagactgatagaagttaagaggcac

SEQ ID NO: 733032 - DNA, 120 bp, Artificial Sequence
  ENSG00000198796_65 (sequence is synthesized)
taatgggattctggacagctggaaaaagaaatctgatattttgtctgctgcatgtgttttaccaggcaatgccactattcagaaagtttctcaagcaaatgttttgggtgtagcctttaa

SEQ ID NO: 733033 - DNA, 120 bp, Artificial Sequence
  ENSG00000198796_66 (sequence is synthesized)
aggaagaagggggaaaaaaacattgtttttagtcatttgcagggaagtgctttgaaaatgataggtcttggctttaatcagaatttgtggtatgaatgaaagacttcagtgtgtctgaaa

SEQ ID NO: 733034 - DNA, 120 bp, Artificial Sequence
  ENSG00000198796_67 (sequence is synthesized)
gacttgtagacttcactttttttgtgatgctagggaaagcaggcagattaactgttgcctcactggtgggatgtttttgattggatgtttgtcttattttgtttaaaacagagtataaaa

SEQ ID NO: 733035 - DNA, 120 bp, Artificial Sequence
  ENSG00000198796_68 (sequence is synthesized)
gaggctaagagaaaaaaagctgccaagaaataaatttgttttcccttattactgatttgggagtgtaaagagatggaattaaatttataggaataatcaatgcacaaaagatgttgtgct

SEQ ID NO: 733036 - DNA, 120 bp, Artificial Sequence
  ENSG00000198796_69 (sequence is synthesized)
tgatacataacttatatttttaatgatattttcagtttcaaagggtcccaaatgagctttggacttacgctgtaatatgggcaagatttgagttttgtaaataaatacctaagaaaactt

SEQ ID NO: 733037 - DNA, 120 bp, Artificial Sequence
  ENSG00000198796_70 (sequence is synthesized)
atttttatgattgtttcttgatgatatgctaaataaggggtggaattattcatgagttttccaagaaaggggtgggcaattcttggaactgagggtttctccccctcttagaccatataa

SEQ ID NO: 733038 - DNA, 120 bp, Artificial Sequence
  ENSG00000198796_71 (sequence is synthesized)
atggcatttgtaaactgtcatggtgcaatcctcagcattttccatttgaggcagcgttgaggaaagtttcaagggaggatgctgattgcctaggattctcagcactaggggcaccggagc

SEQ ID NO: 733039 - DNA, 120 bp, Artificial Sequence
  ENSG00000198796_72 (sequence is synthesized)
catagcccaagtgcagagaaggtgcgatgtttttccctggttacttttcacagttgttgcttgtttatttcacaacatggttgtaaaaaagaaaaaagaataaattataggacgtgaaaa

SEQ ID NO: 733040 - DNA, 120 bp, Artificial Sequence
  ENSG00000198796_73 (sequence is synthesized)
ggaaaattgaagcagagattccacatccacaatattaaaaaagactaaatatcggaagacaagtgtctggatggggaaaatgatggaggattcttgcccaggttttgccagaattgagtt

SEQ ID NO: 733041 - DNA, 120 bp, Artificial Sequence
  ENSG00000198796_74 (sequence is synthesized)
ctggggttttgggaagtcacacaacctttcactacattttttaaatcaggggaaggaacatgtcaaatgatattctagtctgaggttctgtggtcctaagattaaagagctctcatctgt

SEQ ID NO: 733042 - DNA, 120 bp, Artificial Sequence
  ENSG00000198796_75 (sequence is synthesized)
acttggctattagcacaacttgtcaagaattgttatctatgtacatcttgttttccatgtacatcttgtctcttcaactggattataagctatttgaggagagggatcttatctcataca

SEQ ID NO: 733043 - DNA, 120 bp, Artificial Sequence
  ENSG00000198796_76 (sequence is synthesized)
accttctattgttagtgactcaaattagtgtcatgcacttggctggcatgaaagacactcattaatgatgaaaagcataaccttgaacatcctggggtgcacaaagaggaaacacacctt

SEQ ID NO: 733044 - DNA, 120 bp, Artificial Sequence
  ENSG00000198796_77 (sequence is synthesized)
tccattaaatccatggcagacattcctaggaggcagaactttggaaaggccaataagtgaaaataatatgtttgtggaatcagaggcatgttgaatggggtttcaattgaaaaatgctat

SEQ ID NO: 733045 - DNA, 120 bp, Artificial Sequence
  ENSG00000198797_0 (sequence is synthesized)
gagtctgcaggtgacactgcttaggtacggagcgcggagtcggagcggggacgcgccgggctgcagctctgggatgcaatccgcctgcctcgcaagctgctcgccgctgcgctggcagcg

SEQ ID NO: 733046 - DNA, 120 bp, Artificial Sequence
  ENSG00000198797_1 (sequence is synthesized)
cttacgctgagctcggaggatcccattaggacttgcccggggatgtgcacctgccgtgcgctccgaggtcagtggcaggtctgcaggcagccgagggagcggtgaagccggaagacctgt

SEQ ID NO: 733047 - DNA, 120 bp, Artificial Sequence
  ENSG00000198797_2 (sequence is synthesized)
ctctgcccatgtgcaaggcagtgatttcgggtgagagagcgggtgggtgagtctctttagagttggaaagaaggcaaaatcttgggtttctcctcggcggagggacaggggactccccca

SEQ ID NO: 733048 - DNA, 120 bp, Artificial Sequence
  ENSG00000198797_3 (sequence is synthesized)
gttgggtcttgcacttcccttacctctcccaccccgcgtgcgccccggcccagtgccgaagccccacttcaaagatgctctgggagaccgggatcctggctgctcagcgggaaggcagca

SEQ ID NO: 733049 - DNA, 120 bp, Artificial Sequence
  ENSG00000198797_4 (sequence is synthesized)
ggcaagtggtctaacgttggcggcggtggcggtggcggcggcggcggcaccgacagtaaagcggggagcaagagaatttgaaaagagacatccgctccctctcacacgctgagggggagg

SEQ ID NO: 733050 - DNA, 120 bp, Artificial Sequence
  ENSG00000198797_5 (sequence is synthesized)
cattcgcgtttccccaaatgagaaagaaccacaagaaatcatgaagtaaaaactttggaaagctgccactggagatgttgcacaaaaacctggaatcttttaggagtctcctcccagtcg

SEQ ID NO: 733051 - DNA, 120 bp, Artificial Sequence
  ENSG00000198797_6 (sequence is synthesized)
ttgaaggtttggggagcagctgatacagcaaggagggctcttgcaaggattcaagctccgagccctggaggagcagcacggagcgggagagcgtggcgagagaatgaagaaaccaatcgc

SEQ ID NO: 733052 - DNA, 120 bp, Artificial Sequence
  ENSG00000198797_7 (sequence is synthesized)
ccgggagaagcatgaggtggcagtgtggcactcggtttagagggcttcggccggcggtggccccatggacagccctgctggcactgggcctgcctggctgggtgttggctgtctcagcca

SEQ ID NO: 733053 - DNA, 120 bp, Artificial Sequence
  ENSG00000198797_8 (sequence is synthesized)
cggcggctgctgtggtccccgagcagcatgcctccgtagctggccagcatcccctggactggctgctcacagaccggggccccttccaccgcgctcaggagtatgctgacttcatggagc

SEQ ID NO: 733054 - DNA, 120 bp, Artificial Sequence
  ENSG00000198797_9 (sequence is synthesized)
ggtaccgccagggtttcaccaccaggtacaggatttatagggagtttgcccgttggaaggtgaacaacttggctctggaaaggaaggacttcttcagtttgccattgcctcttgccccag

SEQ ID NO: 733055 - DNA, 120 bp, Artificial Sequence
  ENSG00000198797_10 (sequence is synthesized)
agtttatccggaacattcgcctccttggaaggagacccaatctgcaacaggttacagaaaatctgattaaaaagtacggcactcatttcttactttctgccacccttggaggagaagagt

SEQ ID NO: 733056 - DNA, 120 bp, Artificial Sequence
  ENSG00000198797_11 (sequence is synthesized)
ccctgaccatttttgtggacaagcagaaactgggaagaaagacagagacaacaggaggtgcctctataatcgggggcagtgggaacagcacagctgtgtccctggagaccctgcaccagc

SEQ ID NO: 733057 - DNA, 120 bp, Artificial Sequence
  ENSG00000198797_12 (sequence is synthesized)
tggccgcctcctacttcatcgacagagagagcacgctgcgacggctgcaccatatccagatagccacgggggccatcaaggtcaccgagaccaggaccggtcctctgggctgcagcaact

SEQ ID NO: 733058 - DNA, 120 bp, Artificial Sequence
  ENSG00000198797_13 (sequence is synthesized)
atgacaatctggactcagtcagttctgtcttggtacagagtccagagaacaaagtacagttacttggccttcaggtgctgctgcctgagtatctgcgtgagcgctttgtagctgcagcac

SEQ ID NO: 733059 - DNA, 120 bp, Artificial Sequence
  ENSG00000198797_14 (sequence is synthesized)
tcagctacatcacatgcagctctgagggtgagctcgtctgcaaggagaatgactgctggtgcaagtgcagccccaccttccctgaatgcaactgccctgatgctgacatccaggccatgg

SEQ ID NO: 733060 - DNA, 120 bp, Artificial Sequence
  ENSG00000198797_15 (sequence is synthesized)
aggacagcctgctgcagatccaggactcctgggccactcacaaccggcagtttgaagagtcagaagagttccaggccctgctgaaaaggctgcccgatgaccggttcctgaactccacag

SEQ ID NO: 733061 - DNA, 120 bp, Artificial Sequence
  ENSG00000198797_16 (sequence is synthesized)
ctatctcccagttctgggccatggacaccagccttcagcaccgctaccagcagctgggagctggcttgaaagtgctgttcaaaaagacccatcggatcctacgccggctcttcaacctct

SEQ ID NO: 733062 - DNA, 120 bp, Artificial Sequence
  ENSG00000198797_17 (sequence is synthesized)
cagcctcgcttccgcctgcccaaggagaggtccttgtcctactggtggaaccgaatccagtccctcctctactgtggggaaagcacctttcctggcactttcctggaacagagccacagc

SEQ ID NO: 733063 - DNA, 120 bp, Artificial Sequence
  ENSG00000198797_18 (sequence is synthesized)
tgcacctgcccctatgaccaatcttcctgccagggccccatcccatgtgccttgggcgaagggcccgcgtgtgcccactgtgctccagacaatagcacacgctgtgggagctgcaacccg

SEQ ID NO: 733064 - DNA, 120 bp, Artificial Sequence
  ENSG00000198797_19 (sequence is synthesized)
ggctatgtgctggcccaggggctgtgccggccagaggtggccgagtccctggaaaactttcttgggctggagacagacttgcaggacctggagctaaagtacctgctgcagaagcaggat

SEQ ID NO: 733065 - DNA, 120 bp, Artificial Sequence
  ENSG00000198797_20 (sequence is synthesized)
agccgcattgaggtacactccatcttcatcagcaatgacatgcggctgggcagctggtttgacccttcctggaggaagcgcatgctgctcaccctgaagagcaacaagtacaagcctggg

SEQ ID NO: 733066 - DNA, 120 bp, Artificial Sequence
  ENSG00000198797_21 (sequence is synthesized)
ctggtgcacgtgatgttggccttgtccttgcagatctgtctcaccaagaacagcaccctggagcctgtcatggccatctacgtcaacccctttgggggcagccactctgagagctggttc

SEQ ID NO: 733067 - DNA, 120 bp, Artificial Sequence
  ENSG00000198797_22 (sequence is synthesized)
atgcctgtgaatgagggcagctttcctgactgggaaaggactaacgtggatgcagctgcccagtgccaaaactggactatcaccttggggaataggtggaagactttctttgagacagtt

SEQ ID NO: 733068 - DNA, 120 bp, Artificial Sequence
  ENSG00000198797_23 (sequence is synthesized)
catgtttacctacggagccgaatcaagtccctggatgacagctccaatgagacaatctactatgagcccctggagatgactgatccctctaagaatttgggttacatgaaaattaacacc

SEQ ID NO: 733069 - DNA, 120 bp, Artificial Sequence
  ENSG00000198797_24 (sequence is synthesized)
ttgcaggtctttggctacagcctgccctttgacccagatgctatccgggacttaattctccagttggactacccatatactcaaggttcccaggactctgcactcttgcagctcattgag

SEQ ID NO: 733070 - DNA, 120 bp, Artificial Sequence
  ENSG00000198797_25 (sequence is synthesized)
ctcagggaccgggtgaaccagctttctccacctggcaaagtccgacttgaccttttctcctgcttgctccggcatcggcttaagctggccaacaatgaggtgggcaggatccagtcctcc

SEQ ID NO: 733071 - DNA, 120 bp, Artificial Sequence
  ENSG00000198797_26 (sequence is synthesized)
ctgagggctttcaattctaagctgccaaaccctgtggaatatgagaccggcaaactctgtagctaatgggcggcccacttcagcactgggcaaggaggggatccatgaatctggggtaca

SEQ ID NO: 733072 - DNA, 120 bp, Artificial Sequence
  ENSG00000198797_27 (sequence is synthesized)
aagataatctaagccctcaccttagtgccaacagggtgtgctcccacgagactttcagcatccagtagatgggacctcgaggctcgagctgaagcaggcgagagagaaacagctactgcg

SEQ ID NO: 733073 - DNA, 120 bp, Artificial Sequence
  ENSG00000198797_28 (sequence is synthesized)
tgcgtgcgcgcacgcatacacacacacacacacacactggcacagggaggctacaactaagcagcctcagatctgtaaagttgattggtgctttctaaaatgaatgcaattgaaagaaag

SEQ ID NO: 733074 - DNA, 120 bp, Artificial Sequence
  ENSG00000198797_29 (sequence is synthesized)
gagccaaggaagagattaagaaaaagaaccagctgaaccatgaaacaaacaaaaatcctaaaagtgattcttgtcattcaagaaagcaagaggggacaacaatgggaggggtcggagctc

SEQ ID NO: 733075 - DNA, 120 bp, Artificial Sequence
  ENSG00000198797_30 (sequence is synthesized)
ttccttcccctctgtggagtcacttttgtattctttttaaccagatttcttaaaatgttgttgttttgtgaatcctgacattggttcttacttttgtatgctgcctcctctgtgccctcc

SEQ ID NO: 733076 - DNA, 120 bp, Artificial Sequence
  ENSG00000198797_31 (sequence is synthesized)
cagacgctgactgggaaacacaagaagtacaaccaacaggaaccagcgccaagggcaggcagcggcctccttgctcccctcccttactcctccctctgctgcctcctccccccaccaagt

SEQ ID NO: 733077 - DNA, 120 bp, Artificial Sequence
  ENSG00000198797_32 (sequence is synthesized)
ttcagggccctggattgttcccagttcccattgtggtcccttcagagctcctttccaacagcatctctctgtcgaagaaagaagctctgtcaagttagagagagacaatgtgtaggaaat

SEQ ID NO: 733078 - DNA, 120 bp, Artificial Sequence
  ENSG00000198797_33 (sequence is synthesized)
gttcttttttaaaaaaaaataacaaaaacaaaacaaaactatttattttgtgattgttttccttgttaatctgctccaaccacctgaacatctaagtaaacatttatctggtttaatata

SEQ ID NO: 733079 - DNA, 120 bp, Artificial Sequence
  ENSG00000198797_34 (sequence is synthesized)
acttgagagagagaattgtgtctcccctatgaagatggattgcttgagacagagttcaatagaagatgttaaacagataagctgagggcagggggactgagctttggaagagggcctttc

SEQ ID NO: 733080 - DNA, 120 bp, Artificial Sequence
  ENSG00000198797_35 (sequence is synthesized)
aggcagcgaggccgctggcctgtggctccctctgatgagcttcttctaaagatggtaagggctgggggaagagcttggcagcaggggctgcactctctctcagctgtgtctatcttggcc

SEQ ID NO: 733081 - DNA, 120 bp, Artificial Sequence
  ENSG00000198798_0 (sequence is synthesized)
ataacggggcaatctacccaaacctcttctcagcctagaatgccccaggcagtgcagtcagactgagcatcctctcttttacccttcagagttctcagtgaagtgagagttttgacctaa

SEQ ID NO: 733082 - DNA, 120 bp, Artificial Sequence
  ENSG00000198798_1 (sequence is synthesized)
ggtgacctcagttaactagagggaggatccagggtctggcagatatcagggaggaccttgaatgaagaacaggaggagccagaacagtgatgtcccatagaaacccgactccgctgtctg

SEQ ID NO: 733083 - DNA, 120 bp, Artificial Sequence
  ENSG00000198798_2 (sequence is synthesized)
ccctcacaggacccaaacatccctggcctaatgtggctcatcaaaacttcagcctagatctcggaggaccttgatctgagcaggattcatggcatggaatgtggagtcccaggactggcc

SEQ ID NO: 733084 - DNA, 120 bp, Artificial Sequence
  ENSG00000198798_3 (sequence is synthesized)
agcagcgaagtgaggttcttgagcagggctctggctcacgcttgtaatcccaacattttgggaggacgaagccagcctcatcgcttaagcacaggagttcgaggactgggaggtggaggt

SEQ ID NO: 733085 - DNA, 120 bp, Artificial Sequence
  ENSG00000198798_4 (sequence is synthesized)
tgtggcagggctgtggctcacgcttgtaatcccaacattttgggcggaggaagccagcctcatcgcttaagcacaggagttcgcggactgggaggcagggctctggctcacgcttgtaat

SEQ ID NO: 733086 - DNA, 120 bp, Artificial Sequence
  ENSG00000198798_5 (sequence is synthesized)
cccaacattttgggaggacgaagccagcctcatcgcttaagcacaggagttcgaggactgggaggtggaggttgtggtgcctgtatcacctgcccttctgctgacactcctgcctgctgt

SEQ ID NO: 733087 - DNA, 120 bp, Artificial Sequence
  ENSG00000198798_6 (sequence is synthesized)
tcctgactacagccatcatgcctcggggtcagaagagtacgctccatgcacgtgagaaacgccagcagacccggggtcagacccaggatcaccagggtgctcagatcactgcaactaaca

SEQ ID NO: 733088 - DNA, 120 bp, Artificial Sequence
  ENSG00000198798_7 (sequence is synthesized)
agaaaaaagtatccttttcatcccctcttattttgggggctactatccagaaaaagtctgctggtaggtcacgtagtgctctcaagaagcctcagagagcactatccaccactacatctg

SEQ ID NO: 733089 - DNA, 120 bp, Artificial Sequence
  ENSG00000198798_8 (sequence is synthesized)
tagatgtttcttacaaaaagtcatacaagggagccaacagcaaaattgagaaaaagcaaagcttctctcagggtctatcctccactgtgcagtctcgcacagaccctctaatcatgaaga

SEQ ID NO: 733090 - DNA, 120 bp, Artificial Sequence
  ENSG00000198798_9 (sequence is synthesized)
ggaaatgtacaagatgaaaaagcccattatgaaagcagatatgctaaaaattgtccaaaaaagccataagaattgcttccctgagatccttaaaaaagcttctttcaacatggaggtggt

SEQ ID NO: 733091 - DNA, 120 bp, Artificial Sequence
  ENSG00000198798_10 (sequence is synthesized)
atttggtgttgatttaaagaaagttgattctaccaaggactcctatgtccttgtcagcaaaatggatctccccaacaatgggacagtgactcgtgggaggggatttcccaagacaggtct

SEQ ID NO: 733092 - DNA, 120 bp, Artificial Sequence
  ENSG00000198798_11 (sequence is synthesized)
cctgctgaatctcctgggcgtgatcttcatgaagggcaactgtgccactgaggagaagatctgggaattcctgaataagatgagaatatatgatgggaagaaacacttcatatttgggga

SEQ ID NO: 733093 - DNA, 120 bp, Artificial Sequence
  ENSG00000198798_12 (sequence is synthesized)
gcccagaaagctcatcacccaagatttggtgaagcttaaatacctggagtaccgacaagtgcccaacagtaatcctgcacgctatgaattcctgtggggtccaagagcccatgctgaaac

SEQ ID NO: 733094 - DNA, 120 bp, Artificial Sequence
  ENSG00000198798_13 (sequence is synthesized)
cagcaagatgaaggtcctggagttttgggccaaggtcaataaaactgtccccagtgcgttccagttctggtatgaagaggctttgagagatgaggaagaaagagtccaagctgcagctat

SEQ ID NO: 733095 - DNA, 120 bp, Artificial Sequence
  ENSG00000198798_14 (sequence is synthesized)
gctcaatgatggcagtagtgccatgggcagaaagtgttccaaggccaaggctagcagctcttcccacgcctagtgaagttgaagcaaattttgcattttgtggttaaagagggcagtcac

SEQ ID NO: 733096 - DNA, 120 bp, Artificial Sequence
  ENSG00000198798_15 (sequence is synthesized)
tgttccaaggagtgaaggactgggtgttactggagggaacacactgtataataccttttgtttctgttctaaatggataatttgaagttttatctgtattttggggcatatttttcaaat

SEQ ID NO: 733097 - DNA, 120 bp, Artificial Sequence
  ENSG00000198798_16 (sequence is synthesized)
gttccttttatttaacattgtaatctaagtttaggattgatactggtcacatttgttgtttaagagtaaaaattttgctgttttgtaaaacagattgagaaaaattcgatcttatttagt

SEQ ID NO: 733098 - DNA, 120 bp, Artificial Sequence
  ENSG00000198798_17 (sequence is synthesized)
gatctgttgcaagataacttggaattagaataagcatttccttgaaaatgtttaaaaaaaaaaagtcagcagtaaaatgtatggcattaagaaatagagaaagagtgtaagatggtcaat

SEQ ID NO: 733099 - DNA, 120 bp, Artificial Sequence
  ENSG00000198798_18 (sequence is synthesized)
atttggtttcctaaatgcttttactctgtgctttaagaaaatgaaagataaataaccatatatgtctggcttacttaagaatgtagaattaaatcataataaattagacctcatgctgac

SEQ ID NO: 733100 - DNA, 120 bp, Artificial Sequence
  ENSG00000198799_0 (sequence is synthesized)
ggacgagaggtgtccgtcaggccgtgtgtcccaggccgtcgaccccgctgtcgcgctgcgtctgctccttgcatgcctttagatggtacagccttcagccggggcttcgggagacagtgc

SEQ ID NO: 733101 - DNA, 120 bp, Artificial Sequence
  ENSG00000198799_1 (sequence is synthesized)
agccaccgagcatctctgctgagcttctccgccgatcctccttttctagcaggcagctcttctaggccacgtccaggtcgagggggaaaatggcgccggcgcccctaggcgtcccggagg

SEQ ID NO: 733102 - DNA, 120 bp, Artificial Sequence
  ENSG00000198799_2 (sequence is synthesized)
agcagttgctggggtgtcgatctagagtgctttctcggttactcttcattgcccagaccgctctcctcctgttgcccgccgccggagcaggtctctgccccgcgccctgctcctgccgca

SEQ ID NO: 733103 - DNA, 120 bp, Artificial Sequence
  ENSG00000198799_3 (sequence is synthesized)
ttcctctcctggactgcagtcgcaggaaattgcccgcaccgagctggagggcgctgtcgggcttgctgccccccgacaccgctatcctggatttcagtcataatcggttgtctaactgga

SEQ ID NO: 733104 - DNA, 120 bp, Artificial Sequence
  ENSG00000198799_4 (sequence is synthesized)
acatcagcttggaatcacaaacattacaggaagtgaaaatgaattacaatgaactaacagaaatcccgtattttggagaacctacatctaatattactctactttcattagtccataata

SEQ ID NO: 733105 - DNA, 120 bp, Artificial Sequence
  ENSG00000198799_5 (sequence is synthesized)
taatcccagaaataaatgcacaggcactccagttttaccctgctctggagagtttagacctcagctcaaatataatatcagaaatcaagacatcttcatttcctcgcatgcagcttaaat

SEQ ID NO: 733106 - DNA, 120 bp, Artificial Sequence
  ENSG00000198799_6 (sequence is synthesized)
acctgaatttaagtaataacagaataaccaccttggaggctggttgcttcgataatttatcaagttccttattagtggtaaagttaaaccgtaaccgaatgagcatgattccacctaaga

SEQ ID NO: 733107 - DNA, 120 bp, Artificial Sequence
  ENSG00000198799_7 (sequence is synthesized)
tcttcaagctgcctcacctccaattcttggaacttaaaagaaacagaattaaaattgtggaaggtcttacattccaagggcttgactccttaagatctttgaaaatgcagcggaatggaa

SEQ ID NO: 733108 - DNA, 120 bp, Artificial Sequence
  ENSG00000198799_8 (sequence is synthesized)
ttagcaaacttaaggatggagcattttttggcttgaataacatggaagaactagaactggaacacaacaaccttacacgagtaaacaaggggtggttgtatggcttgcgaatgttacagc

SEQ ID NO: 733109 - DNA, 120 bp, Artificial Sequence
  ENSG00000198799_9 (sequence is synthesized)
agctctatgtgagccagaatgctattgaaagaatcagccctgatgcatgggagttctgccaaagactatccgaacttgatttgtcctataaccagctgacccgcctggatgaatctgcct

SEQ ID NO: 733110 - DNA, 120 bp, Artificial Sequence
  ENSG00000198799_10 (sequence is synthesized)
ttgtgggtctgagcttattggagagattgaatttaggagacaacagagtcactcatattgctgatggtgtatttagatttctttccaatcttcagacattagacttaagaaacaatgaaa

SEQ ID NO: 733111 - DNA, 120 bp, Artificial Sequence
  ENSG00000198799_11 (sequence is synthesized)
tttcatgggccatagaagatgctagtgaagcctttgctggactcacaagtctcactaaactaatcttacaaggaaaccagattaagtcaattacaaagaaagcattcattggtcttgaat

SEQ ID NO: 733112 - DNA, 120 bp, Artificial Sequence
  ENSG00000198799_12 (sequence is synthesized)
cccttgagcatctagatttgaacaataatgctataatgtctatccaagaaaatgctttttctcagactcatttaaaagaactgattctgaacacaagcagtttgctctgtgactgccatt

SEQ ID NO: 733113 - DNA, 120 bp, Artificial Sequence
  ENSG00000198799_13 (sequence is synthesized)
tgaagtggctacttcaatggttggttgataataactttcaacattctgtgaatgtaagctgtgcacaccctgaatggctagcagggcaaagcatcctgaatgtggatctgaaagattttg

SEQ ID NO: 733114 - DNA, 120 bp, Artificial Sequence
  ENSG00000198799_14 (sequence is synthesized)
tctgtgatgattttctcaagccacagataaggacacatcctgaaaccataattgctctaagaggcatgaatgtgactctgacgtgcactgcagtgagcagcagtgattcacccatgtcca

SEQ ID NO: 733115 - DNA, 120 bp, Artificial Sequence
  ENSG00000198799_15 (sequence is synthesized)
ctgtgtggcgcaaagacagtgaaatcctgtatgacgtggatactgagaattttgttcgttattggcagcaagctggagaagctctggaatatactagtatcttacatcttttcaatgtga

SEQ ID NO: 733116 - DNA, 120 bp, Artificial Sequence
  ENSG00000198799_16 (sequence is synthesized)
atttcacagatgaaggaaaatatcagtgtattgttactaatcactttggttctaattattctcagaaagccaaactgactgtaaatgagatgccatcttttctgaaaacgccaatggatc

SEQ ID NO: 733117 - DNA, 120 bp, Artificial Sequence
  ENSG00000198799_17 (sequence is synthesized)
tgactattcgcactggtgccatggccagattagaatgtgctgcagagggacaccctgcacctcagatttcctggcagaaagatggtggtactgactttcctgcggctcgagaaagacgca

SEQ ID NO: 733118 - DNA, 120 bp, Artificial Sequence
  ENSG00000198799_18 (sequence is synthesized)
tgcacgtcatgcccgaggatgacgtcttctttattgccaatgtgaaaatagaagatatgggaatctatagctgcatggcacaaaatacagcaggaggtctctcagcaaatgcttccctaa

SEQ ID NO: 733119 - DNA, 120 bp, Artificial Sequence
  ENSG00000198799_19 (sequence is synthesized)
cagtgttagagacaccctcatttattagacccctggaggataagacagtaacacgaggtgaaactgcggtgttacagtgcatagctggagggagtcctgcccctcgtctcaactggacta

SEQ ID NO: 733120 - DNA, 120 bp, Artificial Sequence
  ENSG00000198799_20 (sequence is synthesized)
aagatgatgggcctttgctggtgacagaacgacatttctttgctgcagccaatcagcttctcatcattgtagatgccgggctagaagatgctgggaaatatacctgcattatgtctaaca

SEQ ID NO: 733121 - DNA, 120 bp, Artificial Sequence
  ENSG00000198799_21 (sequence is synthesized)
cccttgggacagaacgtggccacatttacctaaatgtcatttcatcccccaattgtgactcttcccagagtagcattgggcatgaagatgatggctggaccacagttggcattgtcatca

SEQ ID NO: 733122 - DNA, 120 bp, Artificial Sequence
  ENSG00000198799_22 (sequence is synthesized)
ttgttgtggtctgctgtgttgttggcacttctttgatctgggtcattgttatttaccacatgagaaggaaaaatgaagactatagtatcacaaacacagaggagctcaatctgcctgcag

SEQ ID NO: 733123 - DNA, 120 bp, Artificial Sequence
  ENSG00000198799_23 (sequence is synthesized)
acattcccagctacttgtcttcccaaggaacgctgtctgagccacaggaaggctacagcaactctgaggcaggcagtcatcagcaacttatgcctcctgccaatggatatatacacaaag

SEQ ID NO: 733124 - DNA, 120 bp, Artificial Sequence
  ENSG00000198799_24 (sequence is synthesized)
gcactgacggtggcactggtacccgggtgatttgctcagattgttatgacaatgccaacatctactccaggacccgagaatactgtccatacacctatattgctgaggaggacgttcttg

SEQ ID NO: 733125 - DNA, 120 bp, Artificial Sequence
  ENSG00000198799_25 (sequence is synthesized)
atcagacactgtccagcctcatggtccaaatgcctaaagagacatatttagtacatcctccccaggatactactgccctagagagcctgataccgtcagccaacagagagccatctgcct

SEQ ID NO: 733126 - DNA, 120 bp, Artificial Sequence
  ENSG00000198799_26 (sequence is synthesized)
ttcccaccaaccatgagaggataagtgagaagaaacttccctccacacagatgagcggtgaaacattgcagcggcccgtgtggaacataaacagagaactaggcctgcctcatcctcctt

SEQ ID NO: 733127 - DNA, 120 bp, Artificial Sequence
  ENSG00000198799_27 (sequence is synthesized)
tttcccagcagccagtccatgagtcaccacaacttcatcaaaatgagggcctggcagggagagagccagactgttctgcttcttccatgtcctgccacaggttacaggatcatgcttttg

SEQ ID NO: 733128 - DNA, 120 bp, Artificial Sequence
  ENSG00000198799_28 (sequence is synthesized)
attttagtaggactcggaacattcaagatggtagtgagggcacatgaaactcacttcaggatgaaatctgggcagagacttattaattaattttgcatttactacctcagagctcagaag

SEQ ID NO: 733129 - DNA, 120 bp, Artificial Sequence
  ENSG00000198799_29 (sequence is synthesized)
aaactccgaagtcagcatttgctttactctttctttatgattgcatctgaccgcaccaaggtgggccatgcgttgtttggtcttatacctgatgaagaaatggcaacagctgacagaaat

SEQ ID NO: 733130 - DNA, 120 bp, Artificial Sequence
  ENSG00000198799_30 (sequence is synthesized)
gggtacagctcatcaaaaatgtgcagcaccggcagagggaagatacggggcaaatgtgcttcctgatgcttccatggggatgtgccctggtgtgcatctgcttgtcaggaagagtcacat

SEQ ID NO: 733131 - DNA, 120 bp, Artificial Sequence
  ENSG00000198799_31 (sequence is synthesized)
tgctgcttaacatgctggattgccctagtcttcagaatggtcctgagaaaacatcactacttcgatgttctactttgctttccaaggagcaaaaataactttggagccttctgggaagtg

SEQ ID NO: 733132 - DNA, 120 bp, Artificial Sequence
  ENSG00000198799_32 (sequence is synthesized)
tgcctgggattcttcagtggtttcaggcagatagttgagactggggctttgatattcaaggtctttggcaagaatcccaggcttgaccaactggtaccaggtcaaagatttttgtattct

SEQ ID NO: 733133 - DNA, 120 bp, Artificial Sequence
  ENSG00000198799_33 (sequence is synthesized)
tgtgaatttttttttttgtccctattgcccagggatgtcattgtaaatatatgtgcatttataaataatttttgtattcattgaccatatgtgttggctgcaatgtaaatatttttgata

SEQ ID NO: 733134 - DNA, 120 bp, Artificial Sequence
  ENSG00000198799_34 (sequence is synthesized)
tgccaaaattatatgtaatatccagttataatattgacaagtagcttctcagatcacagattttaaataactcaatttagtgagatctaaaaattttatttaaagtataaaaactgtggc

SEQ ID NO: 733135 - DNA, 88 bp, Artificial Sequence
  ENSG00000198799_35 (sequence is synthesized)
gctgggcaacatggtgagaccctgtgtctgcaaaaaaataaattaaaaaaataggtggacattgtggcatgctgctgtagtcctagct

SEQ ID NO: 733136 - DNA, 120 bp, Artificial Sequence
  ENSG00000198799_36 (sequence is synthesized)
acttgggaggctgaggtgggagggtcacttgagcccgggaaatcaaggctgcagtgagctgtgtgaagccactgcatcccagcctgggtgacagagtgaggccctggctcaaaagtaaaa

SEQ ID NO: 733137 - DNA, 120 bp, Artificial Sequence
  ENSG00000198799_37 (sequence is synthesized)
agcctgggtgacagagtgaggccctggctcaaaagtaaaataaataaataaaaagttttaaaaacttacttgttaagaagtgtatctatagaggcagctacttagtgattgtatacacat

SEQ ID NO: 733138 - DNA, 120 bp, Artificial Sequence
  ENSG00000198799_38 (sequence is synthesized)
aaacacagtcttggtgtaattaaccgccttcttcatgcctagaggttcatacttctggtcatttgccatctgtttaaaagtgctaggtgatactccctttctaacataaaaagcttgttc

SEQ ID NO: 733139 - DNA, 120 bp, Artificial Sequence
  ENSG00000198799_39 (sequence is synthesized)
tttcagagcctggcagtcctgtcacagctgtatgcacctagaggaaaacttgtttggaaattcctttcatttcctccccctctccctccttccctctttttttttactgaaacagaaatt

SEQ ID NO: 733140 - DNA, 120 bp, Artificial Sequence
  ENSG00000198799_40 (sequence is synthesized)
gattgaggaaggttcagtcattccttcaggaaccaatgagttagatcgggttgttactttatgtataatgaacgcttcaaaaactggaggctgatttaaagattgcagaacttgagtcag

SEQ ID NO: 733141 - DNA, 120 bp, Artificial Sequence
  ENSG00000198799_41 (sequence is synthesized)
actcataagcagtactgtgacatgaattggagccagaacagttgctgatatcagaaccatctctttcattctgtgactttgctcttgccatgttctgactggggtgagccgctaggatac

SEQ ID NO: 733142 - DNA, 120 bp, Artificial Sequence
  ENSG00000198799_42 (sequence is synthesized)
aaatcactatcactgtccatatttgagtctgcaaatcttgtcattgtctgctttaatgctctttgagttgcaacaggtgtattatttaaatgagtatttgaaattctgtgaacaggaatt

SEQ ID NO: 733143 - DNA, 120 bp, Artificial Sequence
  ENSG00000198799_43 (sequence is synthesized)
cttttggtagtgaaataggtgctcacacctgcttgctcagaatgtgaaaatattatttctgagttctctttgttcactttctaaagtgactgttgtttggtgttggagatgttaactggg

SEQ ID NO: 733144 - DNA, 120 bp, Artificial Sequence
  ENSG00000198799_44 (sequence is synthesized)
ttctattaggtgtgctatatcttggcaaatattccccatgatgaactcttcctactatcacaatcaggactatgactggatttctcagtctcagtgccccagattcaccatttctgattg

SEQ ID NO: 733145 - DNA, 120 bp, Artificial Sequence
  ENSG00000198799_45 (sequence is synthesized)
tgtctggagaacgttttcctggaaaggcattccatgttccaaaagctacaaaaacatgccactttgcaactatgggtcagttatttgctctctcaatgtctcatgttgctgagttctaga

SEQ ID NO: 733146 - DNA, 120 bp, Artificial Sequence
  ENSG00000198799_46 (sequence is synthesized)
aaatctctgtctcatttaccaggggtcattcaaaagtctgagatgtatattatcatgaaatatttgtgaaatttctcaccatgaatttggagggaacctacttttatttctcgctctggt

SEQ ID NO: 733147 - DNA, 120 bp, Artificial Sequence
  ENSG00000198799_47 (sequence is synthesized)
tctccattggtctgggctcctgcttctcagtcttctctgacctctggtaagtggaactttcattaatacttctgtcgcactttgtacctgacctaggtggccttgcaaatgttgactcag

SEQ ID NO: 733148 - DNA, 120 bp, Artificial Sequence
  ENSG00000198799_48 (sequence is synthesized)
ggaaatcttgcagatgatgcatattcattttctgtattcagccttccattattaaggataaaattgatccctacattgaatctgaaattaccactatatggattactctggctcactgct

SEQ ID NO: 733149 - DNA, 120 bp, Artificial Sequence
  ENSG00000198799_49 (sequence is synthesized)
gtccaagcttggttttctctttgcttacttcctgtcatattttcagtttgcccaaaagaggtaagccactttattacagacccattactagtgctagacgtcatccacctctgttttcac

SEQ ID NO: 733150 - DNA, 120 bp, Artificial Sequence
  ENSG00000198799_50 (sequence is synthesized)
ctgattcttgtggggaatcctctttaatttgttgtaaccttctcagcaactcttctgtacttcacctatagtgcctagcaaattgttatcactcataagcctgtaatcttcatcactcag

SEQ ID NO: 733151 - DNA, 120 bp, Artificial Sequence
  ENSG00000198799_51 (sequence is synthesized)
gttatttgcaagtagaaagcttctggaaccatttgtccatccgacttctgcactgggccacatccatcttcttcattgtcagaatctgagttttctgtcttgaagaacagctggaaagtt

SEQ ID NO: 733152 - DNA, 120 bp, Artificial Sequence
  ENSG00000198799_52 (sequence is synthesized)
gtctggctgttatgacacagtattgaaataccagactgagtttcagttgtttctagttgtgttcactttgtgctttctctgaatgggaatatcttctttcagcaaagttcttcattgacc

SEQ ID NO: 733153 - DNA, 120 bp, Artificial Sequence
  ENSG00000198799_53 (sequence is synthesized)
aggaaaccaaagattgcttcttttccaagtttgttttgtttttaatcttttaccaatgtgcagtatatcttaagaagggaagagtgctcttgggagtagaagaacatgcaaacattcttt

SEQ ID NO: 733154 - DNA, 83 bp, Artificial Sequence
  ENSG00000198799_54 (sequence is synthesized)
agagtgctcttgggagtagaagaacatgcaaacattcttttttctttattattatttgagatggagtccctctcgtactgcaa

SEQ ID NO: 733155 - DNA, 70 bp, Artificial Sequence
  ENSG00000198799_55 (sequence is synthesized)
gctgggattacaggcatgagccacttgcctggccccaaaattcttatactgtaaagccttgtagtggtcc

SEQ ID NO: 733156 - DNA, 120 bp, Artificial Sequence
  ENSG00000198799_56 (sequence is synthesized)
tacaggcgtgagccaccgagcccggccggtccttattttatacaagtgattaagccaaaaattttcttgaatttctgataccaaagagctttaggtaaataacttcacactctaatgcaa

SEQ ID NO: 733157 - DNA, 120 bp, Artificial Sequence
  ENSG00000198799_57 (sequence is synthesized)
aacttcacactctaatgcaatgtaattctttctttgtgctttcagatttccttacacttcctgtccagttctctcttctaaatccaatattactcactagataatttcagccacttaaat

SEQ ID NO: 733158 - DNA, 120 bp, Artificial Sequence
  ENSG00000198799_58 (sequence is synthesized)
aaaaatatctatttttaagtcctggttcaagggttccaaactcacataatttctcaactttttgccagaaagttgagcatttattcatacttattttcaatcctaagtgttctcccatgg

SEQ ID NO: 733159 - DNA, 120 bp, Artificial Sequence
  ENSG00000198799_59 (sequence is synthesized)
gcagcagcacttcttgagctgtttagtactgccacacctttttatgtctttactatgtcagcctctgatcattttcactttgaacttcctaaagatcacaatttcctatcccttcaatct

SEQ ID NO: 733160 - DNA, 120 bp, Artificial Sequence
  ENSG00000198799_60 (sequence is synthesized)
gcgatccctcttcttcctttcttactagattatggtgtagtttgtactagactgactcattaagaccttgtacgcttcctgagtctgcttattactggctttgtaatcaagggtgagtct

SEQ ID NO: 733161 - DNA, 120 bp, Artificial Sequence
  ENSG00000198799_61 (sequence is synthesized)
ttttacttctctaggctagattttctcatttatgaaatgaggacatttttctagatgctgtaaagccctttccagctgtaacattctatgaatctgtaattccctcgaggagctaaggag

SEQ ID NO: 733162 - DNA, 120 bp, Artificial Sequence
  ENSG00000198799_62 (sequence is synthesized)
gattatgctactttaataaaaagctgctttggtgacatttgttcgagtagaacaagagtgatgctgctcattctgacttgagccagatgtatttcctttatagcaggagtaatggtctaa

SEQ ID NO: 733163 - DNA, 120 bp, Artificial Sequence
  ENSG00000198799_63 (sequence is synthesized)
gaaatactcattaggagaaaaaaattctgcttctaaacagtattagtaaacaaagaatcttgactcagttgaaaaaccacccattgctctctagagcagaatgtctgaatgctggtttta

SEQ ID NO: 733164 - DNA, 120 bp, Artificial Sequence
  ENSG00000198799_64 (sequence is synthesized)
tagcacactagaatatcagaatgagttgacaggtataccacaactaatttgtaactagtttgtgactcacctttctaatgtattcgaagttatccctataattatattactctcgctcaa

SEQ ID NO: 733165 - DNA, 120 bp, Artificial Sequence
  ENSG00000198799_65 (sequence is synthesized)
attctgatagatttcctgaatggaataggtggaattagggctaggctgccagagactgtgccaatgagcatcacccgtcatgtgtgagagagcagaagatagcctgtgagccagtgctct

SEQ ID NO: 733166 - DNA, 62 bp, Artificial Sequence
  ENSG00000198799_66 (sequence is synthesized)
gagaccatcctggccaacatggtgaaattagctgctcgggaggctaaggcaggagaatcact

SEQ ID NO: 733167 - DNA, 90 bp, Artificial Sequence
  ENSG00000198799_67 (sequence is synthesized)
cgtgtaggagtactgcctctctgctctagcagtggtccttctactgacagtgctgtcagagtctggtctcctaaagagccaggtcatttt

SEQ ID NO: 733168 - DNA, 120 bp, Artificial Sequence
  ENSG00000198799_68 (sequence is synthesized)
tgctgtcagagtctggtctcctaaagagccaggtcattttccattgtgtcaactcagatggttgagatgtccttagatattcctagcttgcctaaataactagtcagcaatctatttaaa

SEQ ID NO: 733169 - DNA, 120 bp, Artificial Sequence
  ENSG00000198799_69 (sequence is synthesized)
tgtgaagagcctatctctggtctttaaataaacacacacacacacacacacccctaggaaaaggaattcctgaaacttttcattattgcatatgtttctgatcaagcaatatgttaaccc

SEQ ID NO: 733170 - DNA, 120 bp, Artificial Sequence
  ENSG00000198799_70 (sequence is synthesized)
tctaagtaggattagtgtcccatgagtatttcttccagcagaatcatgtctgcctaatgctaatcaggaatgttgcaaactgaaatgctcctttccccactgccccctaatgaccacttt

SEQ ID NO: 733171 - DNA, 120 bp, Artificial Sequence
  ENSG00000198799_71 (sequence is synthesized)
caggaggaatacatacattctcttgatttgtttgtcccctttcaggctgattctccacttccacctggaagaaaagacagtattccttgaactccatgacctactggtacaggatctaca

SEQ ID NO: 733172 - DNA, 120 bp, Artificial Sequence
  ENSG00000198799_72 (sequence is synthesized)
cttatgccattggctttctgtcactccgcaacttgtacttttttttttgagacagggtttcaccctgtcagccaggctggagtgcaatggtgtgaacgtggctcactgtcgtcactgcag

SEQ ID NO: 733173 - DNA, 90 bp, Artificial Sequence
  ENSG00000198799_73 (sequence is synthesized)
agtgcaatggtgtgaacgtggctcactgtcgtcactgcagccttgatatctcaagcccaagtgatcctcccacctcaaccacctgagtag

SEQ ID NO: 733174 - DNA, 86 bp, Artificial Sequence
  ENSG00000198799_74 (sequence is synthesized)
cgcaccccgcagtactttccctcgtatacaagctactctcctgaaaaaaatagcaggaacccattccaatgtccaagctcccctaa

SEQ ID NO: 733175 - DNA, 120 bp, Artificial Sequence
  ENSG00000198799_75 (sequence is synthesized)
aaaatagcaggaacccattccaatgtccaagctcccctaaagtgccaactcagaataactttcatgtttaaaaacagctgtcttcacattgcccattgtgaggttgtaaaaggaagttaa

SEQ ID NO: 733176 - DNA, 120 bp, Artificial Sequence
  ENSG00000198799_76 (sequence is synthesized)
gatgtcaagcaatttagattctgttacccatttccctatgaaaagagatgtgttaaaagtctttaactacttaaagggtcatcatgaaaaataagaattctattccagaagacagagtta

SEQ ID NO: 733177 - DNA, 120 bp, Artificial Sequence
  ENSG00000198799_77 (sequence is synthesized)
tacacagggaggtgtattatatacttgctaataaatttttgtgtaggctctttagtaaatttatctgataatggaataatcagcctttttggtggaaaggtacatacagaagctaaatca

SEQ ID NO: 733178 - DNA, 120 bp, Artificial Sequence
  ENSG00000198799_78 (sequence is synthesized)
tcatctgttaatagtgtttaagagatttcttcattgagatggaatatgggcaagatgacctttaaggtctttttcacttttatcattggaaatccccagaagcaatctgatagtcttaaa

SEQ ID NO: 733179 - DNA, 120 bp, Artificial Sequence
  ENSG00000198799_79 (sequence is synthesized)
actttgtcctttctaagtcctttgtattcattttagagctcttcaggaaactagagaattttggactttggttgacaaaagcggtctgacctgtgttcgtagctgggaacatgaaacaca

SEQ ID NO: 733180 - DNA, 120 bp, Artificial Sequence
  ENSG00000198799_80 (sequence is synthesized)
aaattctgggtttaatcttctgaagaaatctataagtagttactggcataaatggtattactatactaacaaatttaaaagcctataatgtattaaaactcttttttactcgattacttt

SEQ ID NO: 733181 - DNA, 120 bp, Artificial Sequence
  ENSG00000198799_81 (sequence is synthesized)
gcctataatgtattaaaactcttttttactcgattacttttatttttttaagacacagtctcgcttattgccccggctggagtgcagtggcacggtctcagctcactgcaatctccgcct

SEQ ID NO: 733182 - DNA, 120 bp, Artificial Sequence
  ENSG00000198799_82 (sequence is synthesized)
acaggcatgagccactgtgcccagccctcttgataatttttattcttgtttcttcttatctgtgggactccaattagaatggggttgagattgtggcattcagttttataccaatatttt

SEQ ID NO: 733183 - DNA, 120 bp, Artificial Sequence
  ENSG00000198799_83 (sequence is synthesized)
gtggcattcagttttataccaatattttacccaagtgtgtcatggccttttttaatcattttaatatccccagaaatgctagaagtgtaaaggaataacagaggtaaatttgctgtcatt

SEQ ID NO: 733184 - DNA, 120 bp, Artificial Sequence
  ENSG00000198799_84 (sequence is synthesized)
ttatgccacatcctcttttcttactttgcttcttgatacagattatagaggtaattgtgaagacagttgaaccttagaagattgagctaagattctttttttggcaacctgcaagtaatg

SEQ ID NO: 733185 - DNA, 120 bp, Artificial Sequence
  ENSG00000198799_85 (sequence is synthesized)
tttcatttttctattacgtgatctctttgcccatacagttggcagatgttttttccccctttttctaccttaaacttttttgtttggagtacagtctaaaccaacatcagttagccttga

SEQ ID NO: 733186 - DNA, 120 bp, Artificial Sequence
  ENSG00000198799_86 (sequence is synthesized)
ttttctttcttttttggacaattgtctggttcattgacaaaagtaacaagtttggaactaagagatatgttacaagctgcacttaacaccacctgaaaacccaagaatcatctgaaggtt

SEQ ID NO: 733187 - DNA, 120 bp, Artificial Sequence
  ENSG00000198799_87 (sequence is synthesized)
tgtgtgtgtgtgtgtgtgtgtgtgaagatggaatagggtgaaggtgaagaaacagcttgacttgtgcctgttttcagataaaggagtaaagtgatctacaaactgtaactatcttgaaag

SEQ ID NO: 733188 - DNA, 120 bp, Artificial Sequence
  ENSG00000198799_88 (sequence is synthesized)
aaggagtaaagtgatctacaaactgtaactatcttgaaagagaaattgatcatcagatggtcgagtactcttggaatgtctctttgctgtttactgtggcctctttacaatggtgagact

SEQ ID NO: 733189 - DNA, 120 bp, Artificial Sequence
  ENSG00000198799_89 (sequence is synthesized)
tatttctaccctctactttccactattatttttttcccctattggataatactagtctgagcagccctaatactagatgtacctaaacagagatacaagccaagtcattgttcagtgtag

SEQ ID NO: 733190 - DNA, 120 bp, Artificial Sequence
  ENSG00000198799_90 (sequence is synthesized)
tcatttcttagtatctgtttatattttgtcacacatcagaatgtatattttatagagcatgtgtttgtctacttgtttgtctactataatatgtctttaataaagctaaaaacattctga

SEQ ID NO: 733191 - DNA, 120 bp, Artificial Sequence
  ENSG00000198799_91 (sequence is synthesized)
ctcatttaaaagaactgtaagtaacttgtctttttaaaatcaccagttggatcattgttcctgcttgttgtgcttaaagtgtgatgggagtgacccaagttatttccaaaagcacacagt

SEQ ID NO: 733192 - DNA, 120 bp, Artificial Sequence
  ENSG00000198799_92 (sequence is synthesized)
tcaggcaggaaaaaagaaagtattaatactcagttatttaagcggctagaggtaattttaaaatagccaacattgaaaagcccagagtgtgtggcaccaagaccttctgttttgcctgtt

SEQ ID NO: 733193 - DNA, 120 bp, Artificial Sequence
  ENSG00000198799_93 (sequence is synthesized)
ttctcctaggcctagctgtgtaaaatccaattttagcacaaaccctgtaaaaccagtttagcaagaactcttcctcattgtagaccattcccaggtgatgtctgatcaccctggcctgtc

SEQ ID NO: 733194 - DNA, 120 bp, Artificial Sequence
  ENSG00000198799_94 (sequence is synthesized)
ttcagcaagaatcctgttagggtttagccagagtcttccttactctggatgttattttttagtaatttcacatccactgagtgggatgaaagcaaacccaccttgctccttggctatact

SEQ ID NO: 733195 - DNA, 120 bp, Artificial Sequence
  ENSG00000198799_95 (sequence is synthesized)
tgcccttgctgtttccctactgtctctccctcactgagtcgaacccagtctctctccccagctgcaacatcacattgccgtggtccctatatctattgagatgatcctgaataacgtcta

SEQ ID NO: 733196 - DNA, 120 bp, Artificial Sequence
  ENSG00000198799_96 (sequence is synthesized)
ccttaccatgctttaacaagtatcactgagtaattttttatttaacagttacggtgctgtgactccgataggatcagattcatcattggacccccagacctctcacccaggaccccaagt

SEQ ID NO: 733197 - DNA, 120 bp, Artificial Sequence
  ENSG00000198799_97 (sequence is synthesized)
gtgcacctttgaagccattgtcttcactcctgactgatagatcggggatccaatggtgagtcagactaacgaaccattgctccggacaaacatctgttgaagctggattctgaacacaag

SEQ ID NO: 733198 - DNA, 120 bp, Artificial Sequence
  ENSG00000198804_0 (sequence is synthesized)
atgttcgccgaccgttgactattctctacaaaccacaaagacattggaacactatacctattattcggcgcatgagctggagtcctaggcacagctctaagcctccttattcgagccgag

SEQ ID NO: 733199 - DNA, 120 bp, Artificial Sequence
  ENSG00000198804_1 (sequence is synthesized)
ctgggccagccaggcaaccttctaggtaacgaccacatctacaacgttatcgtcacagcccatgcatttgtaataatcttcttcatagtaatacccatcataatcggaggctttggcaac

SEQ ID NO: 733200 - DNA, 120 bp, Artificial Sequence
  ENSG00000198804_2 (sequence is synthesized)
tgactagttcccctaataatcggtgcccccgatatggcgtttccccgcataaacaacataagcttctgactcttacctccctctctcctactcctgctcgcatctgctatagtggaggcc

SEQ ID NO: 733201 - DNA, 120 bp, Artificial Sequence
  ENSG00000198804_3 (sequence is synthesized)
ggagcaggaacaggttgaacagtctaccctcccttagcagggaactactcccaccctggagcctccgtagacctaaccatcttctccttacacctagcaggtgtctcctctatcttaggg

SEQ ID NO: 733202 - DNA, 120 bp, Artificial Sequence
  ENSG00000198804_4 (sequence is synthesized)
gccatcaatttcatcacaacaattatcaatataaaaccccctgccataacccaataccaaacgcccctcttcgtctgatccgtcctaatcacagcagtcctacttctcctatctctccca

SEQ ID NO: 733203 - DNA, 120 bp, Artificial Sequence
  ENSG00000198804_5 (sequence is synthesized)
gtcctagctgctggcatcactatactactaacagaccgcaacctcaacaccaccttcttcgaccccgccggaggaggagaccccattctataccaacacctattctgatttttcggtcac

SEQ ID NO: 733204 - DNA, 120 bp, Artificial Sequence
  ENSG00000198804_6 (sequence is synthesized)
tgagctatgatatcaattggcttcctagggtttatcgtgtgagcacaccatatatttacagtaggaatagacgtagacacacgagcatatttcacctccgctaccataatcatcgctatc

SEQ ID NO: 733205 - DNA, 120 bp, Artificial Sequence
  ENSG00000198804_7 (sequence is synthesized)
cccaccggcgtcaaagtatttagctgactcgccacactccacggaagcaatatgaaatgatctgctgcagtgctctgagccctaggattcatctttcttttcaccgtaggtggcctgact

SEQ ID NO: 733206 - DNA, 120 bp, Artificial Sequence
  ENSG00000198804_8 (sequence is synthesized)
ggcattgtattagcaaactcatcactagacatcgtactacacgacacgtactacgttgtagcccacttccactatgtcctatcaataggagctgtatttgccatcataggaggcttcatt

SEQ ID NO: 733207 - DNA, 120 bp, Artificial Sequence
  ENSG00000198804_9 (sequence is synthesized)
cactgatttcccctattctcaggctacaccctagaccaaacctacgccaaaatccatttcactatcatattcatcggcgtaaatctaactttcttcccacaacactttctcggcctatcc

SEQ ID NO: 733208 - DNA, 120 bp, Artificial Sequence
  ENSG00000198804_10 (sequence is synthesized)
ggaatgccccgacgttactcggactaccccgatgcatacaccacatgaaacatcctatcatctgtaggctcattcatttctctaacagcagtaatattaataattttcatgatttgagaa

SEQ ID NO: 733209 - DNA, 120 bp, Artificial Sequence
  ENSG00000198804_11 (sequence is synthesized)
gccttcgcttcgaagcgaaaagtcctaatagtagaagaaccctccataaacctggagtgactatatggatgccccccaccctaccacacattcgaagaacccgtatacataaaatctaga

SEQ ID NO: 733210 - DNA, 120 bp, Artificial Sequence
  ENSG00000198805_0 (sequence is synthesized)
ataagccagagcctagaccagtgagccaactgtgcgaaccagacccggcagccttgctcagttcagcatagcggagcggatccgatcggatcggagcggatcggagcacaccggagcagg

SEQ ID NO: 733211 - DNA, 120 bp, Artificial Sequence
  ENSG00000198805_1 (sequence is synthesized)
ctcatcgagaaggcgtctgcgagaccatggagaacggatacacctatgaagattataagaacactgcagaatggcttctgtctcacactaagcaccgacctcaagttgcaataatctgtg

SEQ ID NO: 733212 - DNA, 120 bp, Artificial Sequence
  ENSG00000198805_2 (sequence is synthesized)
gttctggattaggaggtctgactgataaattaactcaggcccagatctttgactacggtgaaatccccaactttccccgaagtacagtgccaggtcatgctggccgactggtgtttgggt

SEQ ID NO: 733213 - DNA, 120 bp, Artificial Sequence
  ENSG00000198805_3 (sequence is synthesized)
tcctgaatggcagggcctgtgtgatgatgcagggcaggttccacatgtatgaagggtacccactctggaaggtgacattcccagtgagggttttccaccttctgggtgtggacaccctgg

SEQ ID NO: 733214 - DNA, 120 bp, Artificial Sequence
  ENSG00000198805_4 (sequence is synthesized)
tagtcaccaatgcagcaggagggctgaaccccaagtttgaggttggagatatcatgctgatccgtgaccatatcaacctacctggtttcagtggtcagaaccctctcagagggcccaatg

SEQ ID NO: 733215 - DNA, 120 bp, Artificial Sequence
  ENSG00000198805_5 (sequence is synthesized)
atgaaaggtttggagatcgtttccctgccatgtctgatgcctacgaccggactatgaggcagagggctctcagtacctggaaacaaatgggggagcaacgtgagctacaggaaggcacct

SEQ ID NO: 733216 - DNA, 120 bp, Artificial Sequence
  ENSG00000198805_6 (sequence is synthesized)
acgctgttggcatgagtacagtaccagaagttatcgttgcacggcactgtggacttcgagtctttggcttctcactcatcactaacaaggtcatcatggattatgaaagcctggagaagg

SEQ ID NO: 733217 - DNA, 120 bp, Artificial Sequence
  ENSG00000198805_7 (sequence is synthesized)
ccaaccatgaagaagtcttagcagctggcaaacaagctgcacagaaattggaacagtttgtctccattcttatggccagcattccactccctgacaaagccagttgacctgccttggagt

SEQ ID NO: 733218 - DNA, 120 bp, Artificial Sequence
  ENSG00000198805_8 (sequence is synthesized)
cgtctggcatctcccacacaagacccaagtagctgctaccttctttggccccttgctggagtcatgtgcctctgtccttaggttgtagcagaaaggaaaagattcctgtccttcaccttt

SEQ ID NO: 733219 - DNA, 120 bp, Artificial Sequence
  ENSG00000198805_9 (sequence is synthesized)
cccactttcttctaccagacccttctggtgccagatcctcttctcaaagctgggattacaggtgtgagcatagtgagaccttggcgctacaaaataaagctgttctcattcctgttcttt

SEQ ID NO: 733220 - DNA, 120 bp, Artificial Sequence
  ENSG00000198805_10 (sequence is synthesized)
cttacacaagagctggagcccgtgccctaccacacatctgtggagatgcccaggatttgactcgggccttagaactttgcatagcagctgctactagctctttgagataatacattccga

SEQ ID NO: 733221 - DNA, 120 bp, Artificial Sequence
  ENSG00000198805_11 (sequence is synthesized)
ggggctcagttctgccttatctaaatcaccagagaccaaacaaggactaatccaatacctcttggattttatttaatgtcataatgttgtcagaataaagagaaagatgaaataatttca

SEQ ID NO: 733222 - DNA, 120 bp, Artificial Sequence
  ENSG00000198805_12 (sequence is synthesized)
caaccaaggaggccaatgtttctactccttgacctagcatttcactgaagacaaatgttgtaagagaggagaaaagcccaccatgagtcagagtgactttaggagatgcctctagcagac

SEQ ID NO: 733223 - DNA, 120 bp, Artificial Sequence
  ENSG00000198805_13 (sequence is synthesized)
ggtgacaggggccaagtaaagggcaagggttgtttatttggtttacgtaatttctcaaataactaacttctgttggtttatttattaatttttaagatttctatcttcttttccctggag

SEQ ID NO: 733224 - DNA, 120 bp, Artificial Sequence
  ENSG00000198805_14 (sequence is synthesized)
agttaagaatttttttttaagacctgtcagcaggaaaagacctttaatagctatttttttaaactctttaacacaagactggaagagcagagggagaaggtgagggaaatattaacagag

SEQ ID NO: 733225 - DNA, 120 bp, Artificial Sequence
  ENSG00000198805_15 (sequence is synthesized)
ggtgtgtgaagggcatacttctctaagggagatagtagtgacgctggctccactggccactcctacccccagtgagaagggcactgcattaaatgataagtgggttagtttttttaagct

SEQ ID NO: 733226 - DNA, 120 bp, Artificial Sequence
  ENSG00000198805_16 (sequence is synthesized)
tatcaacatgtttattttttatactccacttgggtttcctttgtcaactttattactgtttttgttttgtttttttgcataagctcctctatctttgagaatttctcagctcttcctctt

SEQ ID NO: 733227 - DNA, 120 bp, Artificial Sequence
  ENSG00000198805_17 (sequence is synthesized)
cttgcatgcgttcaaattctttcccccttgttcagtagcctcttctttaagaagccagagtaagtatactatgagcttgcttgctggactgaggaggcaggtaattaagttagggcaata

SEQ ID NO: 733228 - DNA, 120 bp, Artificial Sequence
  ENSG00000198805_18 (sequence is synthesized)
ttaagttagggcaatagataagaatacatgttttgagaactttgaaaaatttgaagaggtctataattactgcattcactgtactcactttattttgaaacagagtctcgctctgtcacc

SEQ ID NO: 733229 - DNA, 120 bp, Artificial Sequence
  ENSG00000198805_19 (sequence is synthesized)
gccagggtggtcttgaactcctggcctgttgatccgcctgtcttgggctcccgaagtgctgggactacaggtgtgagacaccgcacctggcctatttttaattttaatttttatagattt

SEQ ID NO: 733230 - DNA, 120 bp, Artificial Sequence
  ENSG00000198805_20 (sequence is synthesized)
tatttttaattttaatttttatagatttacaggggtacaatgcagttttgttatatggatatactgcgtggtggtgacgtctgtgctttagtgtaaccatcacctgagcagtgaacattg

SEQ ID NO: 733231 - DNA, 120 bp, Artificial Sequence
  ENSG00000198805_21 (sequence is synthesized)
tacttattaggtaatttctcatccctcatccccatcccactttctcacctttccgagtccccagtgtctattatttcactctgtaggtccatatgtacacatttggttcccacttataag

SEQ ID NO: 733232 - DNA, 120 bp, Artificial Sequence
  ENSG00000198805_22 (sequence is synthesized)
tgagaacatgtagtatttaatcttccatttctgagtatctactttttttgctcactttttactctctggcagtatggcttgtattatcttgaaatttctttaaaaagcccttccttcttt

SEQ ID NO: 733233 - DNA, 120 bp, Artificial Sequence
  ENSG00000198805_23 (sequence is synthesized)
gtgtgttcatgctgaacatgctgaacgcaccccatatctctaatcttgggttgtatttgtataattattagtaatgcctggctctctcaccagacttaaactttctgaaagcagagataa

SEQ ID NO: 733234 - DNA, 120 bp, Artificial Sequence
  ENSG00000198805_24 (sequence is synthesized)
taatgagtcttttacttaattacaacctaacattttgagcagagcgagtaactcacagtaggtgcttaatggatatgtgttgcatgaaaatataatcccattcatttctctttctgtttt

SEQ ID NO: 733235 - DNA, 120 bp, Artificial Sequence
  ENSG00000198805_25 (sequence is synthesized)
tttcactacctagctatctgggctaggtggatttttggtcctctccttccttttctttcacgatgtatgtcatgcatttcagtgtagctgaattaatgaaattttgtaaatttttttcgg

SEQ ID NO: 733236 - DNA, 120 bp, Artificial Sequence
  ENSG00000198805_26 (sequence is synthesized)
ttggttagttgtgttcagctctgtcacacctcattgccacctctgaaagcaacgtttggtcttcccagatggatgtgagagaactggacttggaactgggagaaaagtaacacgggttga

SEQ ID NO: 733237 - DNA, 120 bp, Artificial Sequence
  ENSG00000198805_27 (sequence is synthesized)
cgacccagcttcccttgtccagggagcaactcagacacagtctcgcttcatttttattctggggttgtacaatctaagggccggcccgcgtgctcgcttgccattggctggggactccag

SEQ ID NO: 733238 - DNA, 120 bp, Artificial Sequence
  ENSG00000198805_28 (sequence is synthesized)
gagggcaccaggcccgcaggacccttggggaggggcaggtgctgtgacccgggaacctggcacactgggcccagagggagctggcggagggagcgagcgcccaggggatgcagagaggcc

SEQ ID NO: 733239 - DNA, 120 bp, Artificial Sequence
  ENSG00000198805_29 (sequence is synthesized)
tggcactgagcctagtgtcgggagcaaggcggcagagtcatgcggcagccagcgcgggcagggacgcacgcgggaatcgagctggggtggcgccaccggagcaggaaggggacagataca

SEQ ID NO: 733240 - DNA, 120 bp, Artificial Sequence
  ENSG00000198807_0 (sequence is synthesized)
agcccacgttgctgcttagattgaaatgcagaactcaagcctctttcatcggggcacagacttccttttacttcttccttttgccctctcgcctcctcctcctgggaagaagcggaggcg

SEQ ID NO: 733241 - DNA, 120 bp, Artificial Sequence
  ENSG00000198807_1 (sequence is synthesized)
ccggcggtcggccgggatagcaacaggccgggccactgaggcggtgcggaaagtttctgtctgggagtgcggaactggggccgggttggtgtactgctcggagcaatggagccagccttc

SEQ ID NO: 733242 - DNA, 120 bp, Artificial Sequence
  ENSG00000198807_2 (sequence is synthesized)
ggggaggtgaaccagctgggaggagtgttcgtgaacgggaggccgctgcccaacgccatccggcttcgcatcgtggaactggcccaactgggcatccgaccgtgtgacatcagccgccag

SEQ ID NO: 733243 - DNA, 120 bp, Artificial Sequence
  ENSG00000198807_3 (sequence is synthesized)
ctacgggtctcgcacggctgcgtcagcaagatcctggcgcgatacaacgagacgggctcgatcttgccaggagccatcgggggcagcaagccccgggtcactacccccaccgtggtgaaa

SEQ ID NO: 733244 - DNA, 120 bp, Artificial Sequence
  ENSG00000198807_4 (sequence is synthesized)
cacatccggacctacaagcagagagaccccggcatcttcgcctgggagatccgggaccgcctgctggcggacggcgtgtgcgacaagtacaatgtgccctccgtgagctccatcagccgc

SEQ ID NO: 733245 - DNA, 120 bp, Artificial Sequence
  ENSG00000198807_5 (sequence is synthesized)
attctgcgcaacaagatcggcaacttggcccagcagggtcattacgactcatacaagcagcaccagccgacgccgcagccagcgctgccctacaaccacatctactcgtaccccagccct

SEQ ID NO: 733246 - DNA, 120 bp, Artificial Sequence
  ENSG00000198807_6 (sequence is synthesized)
atcacggcggcggccgccaaggtgcccacgccacccggggtgcctgccatccccggttcggtggccatgccgcgcacctggccctcctcgcactccgtcaccgacatcctgggcatccgc

SEQ ID NO: 733247 - DNA, 120 bp, Artificial Sequence
  ENSG00000198807_7 (sequence is synthesized)
tccatcaccgaccaagtgagcgacagctccccctaccacagccccaaggtggaggagtggagcagcctgggccgcaacaacttccccgccgccgccccgcacgcggtgaacgggttggag

SEQ ID NO: 733248 - DNA, 120 bp, Artificial Sequence
  ENSG00000198807_8 (sequence is synthesized)
aagggagccctggagcaggaagccaagtacggtcaggcaccaaatggtctcccagctgtgggcagttttgtgtcagcatccagcatggctccttaccctaccccagcccaagtgtcgcct

SEQ ID NO: 733249 - DNA, 120 bp, Artificial Sequence
  ENSG00000198807_9 (sequence is synthesized)
tacatgacctacagtgctgctccttctggttatgttgctggacatgggtggcaacatgctgggggcacctcattgtctccccacaactgtgacattccggcatcgctggcgttcaaggga

SEQ ID NO: 733250 - DNA, 120 bp, Artificial Sequence
  ENSG00000198807_10 (sequence is synthesized)
atgcaggcagccagagaaggtagtcattctgtcacggcttccgcgctctgatgggaaattccgtctccagcagcttcacccgggtctccctgtctcagcacctcctcccccaattcccag

SEQ ID NO: 733251 - DNA, 120 bp, Artificial Sequence
  ENSG00000198807_11 (sequence is synthesized)
gtctcacatcccacccctcctgccctccaacccttctgccttgaaagctggctgtacggactcacatcctttgtgctaatgacacttacatatttcttgccataacttttctcttgcaga

SEQ ID NO: 733252 - DNA, 120 bp, Artificial Sequence
  ENSG00000198807_12 (sequence is synthesized)
aaaactgacatgactttaggatttaaaaacaagagcaacaataagcattgaatgagacatttgtgttgcccacatactgtcttaacataacaaagaaacctacacccctcaaagggttta

SEQ ID NO: 733253 - DNA, 120 bp, Artificial Sequence
  ENSG00000198807_13 (sequence is synthesized)
aggaactttacaaactagtctttggtaaaaccacatgtgtatatttattctaaatcaacctgaacttttgaaatgtgcaattgttgagattttgcaaaatcaataaaggaaaatacttat

SEQ ID NO: 733254 - DNA, 120 bp, Artificial Sequence
  ENSG00000198807_14 (sequence is synthesized)
agaaaaaattatgctacaccctctaatcaaatatggtaaccaagtaagctttaattcatcattaggaaacaaatcaataagtgacttgtttgagtgatcctttgtttaagacatgaccta

SEQ ID NO: 733255 - DNA, 120 bp, Artificial Sequence
  ENSG00000198807_15 (sequence is synthesized)
ttttgttgaaaaatatatgtagaacccaagcaatatctgaatctagctctccctggtgttttgacttggttccaaatacaataatgtttatattttctattagtttgtaaatacggactc

SEQ ID NO: 733256 - DNA, 120 bp, Artificial Sequence
  ENSG00000198807_16 (sequence is synthesized)
tggatggtgcatttgtgtcttcattccataagatattcccctcccctcagccccaccccctctctatttttttctttcttttttgcaaaggtgactttctggcaacgtctttgtctctgt

SEQ ID NO: 733257 - DNA, 120 bp, Artificial Sequence
  ENSG00000198807_17 (sequence is synthesized)
ttggtggtgggctgctcgggctcctggacctggacttgcccccaaattttgtgtatgcagtgaaggcttcaacatctcatgaaggacactttatttctacagcagaggacacgaaaaaca

SEQ ID NO: 733258 - DNA, 120 bp, Artificial Sequence
  ENSG00000198807_18 (sequence is synthesized)
ggaaaatatctgaacaagaaggctctaaaggaagtcacttagaaacttaagtttaatgtgaaatgttttgcaaagatgcttaaaatgaactttgtgttaagaaaaccactgtgaaactaa

SEQ ID NO: 733259 - DNA, 120 bp, Artificial Sequence
  ENSG00000198807_19 (sequence is synthesized)
attgtcctattattgttggcttacctgtgtgttcagcaatctcagccccaaataatgttgtaatttaaagaaaatggaaaattctgctctaatgaatgtaacaatggcttgctgtgaagt

SEQ ID NO: 733260 - DNA, 120 bp, Artificial Sequence
  ENSG00000198807_20 (sequence is synthesized)
ttacattgttgtacagaagcatgtttcgcatgtaggtaaactggtggtggtactagaaatacaatgttatttaattttaacaaattccctttattcatttctgaaattacaggacacagt

SEQ ID NO: 733261 - DNA, 120 bp, Artificial Sequence
  ENSG00000198807_21 (sequence is synthesized)
ttaactcataaacctttctagaccaatttatttttcactttaatgttaataacagttgtggagtatatgtgtgtgtgagcatgtgagtatgtgttgtattttaaaacaattgattttctg

SEQ ID NO: 733262 - DNA, 120 bp, Artificial Sequence
  ENSG00000198807_22 (sequence is synthesized)
gggcaaaattctacagtttttaatcccttctgtttaggaagttcttcctgtttggcaatataggcttaaaaatatgtttttaggacattggtacaattcagctgttggaaaattaatata

SEQ ID NO: 733263 - DNA, 120 bp, Artificial Sequence
  ENSG00000198807_23 (sequence is synthesized)
ttgagggttttttggtactaattctgtgcaataactaaaagagcacctcactggatatggatgttgaagatggattccctaggtgattttaatttcttccggtctgtgctgtgcacagtc

SEQ ID NO: 733264 - DNA, 120 bp, Artificial Sequence
  ENSG00000198807_24 (sequence is synthesized)
tacatggcaatgcggttccaccacatcggtttcgtggcttcgtttaaaactcagatggctagattagttaggttttcaaatcactaggatgtaaacagtaagcagatttctgacacacaa

SEQ ID NO: 733265 - DNA, 120 bp, Artificial Sequence
  ENSG00000198807_25 (sequence is synthesized)
attatgttagagtgactgcttttttcagacagcagatatcttatagagagctttgaactgcatttatttctaaagcaaccgaaattcagtgctacaaatagaggattataacttcaggag

SEQ ID NO: 733266 - DNA, 120 bp, Artificial Sequence
  ENSG00000198807_26 (sequence is synthesized)
aagaataagcagaaggagcagatgaactctcagggccatagtcttcctttgatcttgtaaaacttccattgacatctggagttcccagtctggtgagaaaatagactataaactgaatgg

SEQ ID NO: 733267 - DNA, 120 bp, Artificial Sequence
  ENSG00000198807_27 (sequence is synthesized)
aacaaagatccaatccaatattttggtggagacttctttaaaaccataccatacagggactctcctgtcatctgaaaaactgatgtaaggtacagaactattctttatcaaatgttttta

SEQ ID NO: 733268 - DNA, 120 bp, Artificial Sequence
  ENSG00000198807_28 (sequence is synthesized)
ggtggctgttagggggctttaaaaaatattacttgcttgtgtggaaatgcaaataatgttattttctttatctaaattaagaaatctcttgttattgtgctatttataatttttttctgg

SEQ ID NO: 733269 - DNA, 120 bp, Artificial Sequence
  ENSG00000198807_29 (sequence is synthesized)
ttcttgtattttaaaaaatctaatattaatggtattgaagtttccttttctccctctaggtcttaacagtgaattcacatggagtaatttttaaaagatatcagatacaatttgctattc

SEQ ID NO: 733270 - DNA, 120 bp, Artificial Sequence
  ENSG00000198807_30 (sequence is synthesized)
aaagaaaattatgatttaaagccactttttaaaatacgagaaggaaaataggatggattaaagggttaacttttaaagattattattggttaatgttgacatatttcctctatctcatag

SEQ ID NO: 733271 - DNA, 120 bp, Artificial Sequence
  ENSG00000198807_31 (sequence is synthesized)
atggtaaaagtgttgcttttaaactggcaaatgcactcttcagaaatccttttctatctgatccacatggagaggttaaaggttcaatttcatgacctctatgcaggcagcgctctcatt

SEQ ID NO: 733272 - DNA, 120 bp, Artificial Sequence
  ENSG00000198807_32 (sequence is synthesized)
ggatgtaagaatattacctgcaaggatagaatgcagttgtgcaacagagacacattcttatttcttttttttcacaattttgttttgtttttaatgacccttttattgaatattggactg

SEQ ID NO: 733273 - DNA, 120 bp, Artificial Sequence
  ENSG00000198807_33 (sequence is synthesized)
aaatataaattttaaaaaacacgttggaaaggatgtacaacagaaggctatgtatgtatatacagtatgtcaaaagccttttatttttatacttcaaatgctctaaattaataaaaagta

SEQ ID NO: 733274 - DNA, 120 bp, Artificial Sequence
  ENSG00000198807_34 (sequence is synthesized)
ataattaccatgttatcttttactttttattttcaaaatgctttagtgaaatagccccgtagtagaaatagcccacggtagtaacttaggacaggtgtcatatggactttcagttattct

SEQ ID NO: 733275 - DNA, 120 bp, Artificial Sequence
  ENSG00000198807_35 (sequence is synthesized)
tgttgactttactgaatcagcatcatctctggatgcagatataaaatcaagtttggttacatcaagaccaaggagatatttttgttgatacatgttagtatagtaatccttagaaatgct

SEQ ID NO: 733276 - DNA, 120 bp, Artificial Sequence
  ENSG00000198807_36 (sequence is synthesized)
aagtgtatttctttttcagaacatttccccttcatcatacatattttaatactgcagacagctgacttcccacctgaagttgtcgtttaaaactaataacctgaaaatgcagttctgttc

SEQ ID NO: 733277 - DNA, 120 bp, Artificial Sequence
  ENSG00000198807_37 (sequence is synthesized)
ccctcccctgctctcgcaaggagaaagcgggcgacgagcgctcgcagcccgtggggctgatcccacctcccgcagggctccggtcgtgtcgctgtcggaccgcagaacgccgggacgcat

SEQ ID NO: 733278 - DNA, 120 bp, Artificial Sequence
  ENSG00000198807_38 (sequence is synthesized)
ttccgagctcgggcccgacccaacccgctgccattctagctacctagtggagccgcggagagactcttgaaccgtgaggctccttgatgagaaggtggagaggctgccgggctattctcc

SEQ ID NO: 733279 - DNA, 120 bp, Artificial Sequence
  ENSG00000198807_39 (sequence is synthesized)
gagcatcttccggccgagctctgctcctctccgtgcgcttgcggcttctccttgggctagcgcgtccgcagtccctccaagtccaggccgcagtcacccaggtggggagctagcctgaaa

SEQ ID NO: 733280 - DNA, 120 bp, Artificial Sequence
  ENSG00000198807_40 (sequence is synthesized)
gagacagcggaaggagtttcctggactgcgctgtcgctcaccgacccgcaccaatcaccatgcagcttgccctcggacccgccccttttagggcgtgtccccagtgagtgatagacggag

SEQ ID NO: 733281 - DNA, 120 bp, Artificial Sequence
  ENSG00000198807_41 (sequence is synthesized)
accagtgcaggcacccttaggtcagacgctcctctctttcttttcagccagccccactgccaaattgttgtcaacccccagtcggccttgggttaagaatgaggaggtggagaacggcac

SEQ ID NO: 733282 - DNA, 120 bp, Artificial Sequence
  ENSG00000198807_42 (sequence is synthesized)
gtgcagccttaagggttccttctccgatttaggtttcttccactcctttgccctgggagagcaaaggggcgaagggaaatcaaaaaccggttgaaaaagaaaaaagtgtcttccctcagg

SEQ ID NO: 733283 - DNA, 120 bp, Artificial Sequence
  ENSG00000198807_43 (sequence is synthesized)
cgtgggtcagagaatttggaaaggcctactctgaggggagtaaaacttcaccaggccctgggctggaagcacaggaggtcgcggctgggcccagcgccctcgggaggccaagggcaggga

SEQ ID NO: 733284 - DNA, 120 bp, Artificial Sequence
  ENSG00000198807_44 (sequence is synthesized)
gccgacccaaggtctaagccctccagctctccgtcgcgggtttgggtcccgtctcaagagtggggcgcgcgggctgggcctccggcctgacaccctctcttctctccatcagtgagcgac

SEQ ID NO: 733285 - DNA, 120 bp, Artificial Sequence
  ENSG00000198807_45 (sequence is synthesized)
gatatcgaggttgaaattctaggtgaagcacatctctatttgtggctaaatctactttattataaagccaaggtagaagatagtttgctatagagagcacccttgcacagttctttcagg

SEQ ID NO: 733286 - DNA, 120 bp, Artificial Sequence
  ENSG00000198807_46 (sequence is synthesized)
aggagcacgttcaggcgtcaagaccgatttctccccctgcttcgggagacttttgaacgctcggagaggcccggcatctcaccactttacttggccgtaggggcctccggcacggcagga

SEQ ID NO: 733287 - DNA, 120 bp, Artificial Sequence
  ENSG00000198807_47 (sequence is synthesized)
atgagggagggggtccgattggacagtgacggtttggggccgttcggctatgttcagggaccatatggtttggggacagccccagtagttagtaggggacgggtgcgttcgcccagtccc

SEQ ID NO: 733288 - DNA, 120 bp, Artificial Sequence
  ENSG00000198812_0 (sequence is synthesized)
agcagtcagctgagccagccccgctcagtgagtctgtcctctggggctcgccatgcccccagcctccgcatggggaacaccatcagggccctcgtggccttcatccctgctgaccgttgc

SEQ ID NO: 733289 - DNA, 120 bp, Artificial Sequence
  ENSG00000198812_1 (sequence is synthesized)
cagaactatgtggtcagggacctccgtgagatgccgctggacaagatggtggatctgagtgggagccagttacgccgcttccccctgcacgtgtgctccttcagggagctggtcaagctc

SEQ ID NO: 733290 - DNA, 120 bp, Artificial Sequence
  ENSG00000198812_2 (sequence is synthesized)
tacctgagcgacaaccacctcaatagcctgcctccggagctggggcagctacagaacctgcagattctggccttggatttcaacaacttcaaggctctgccccaggtggtgtgcaccttg

SEQ ID NO: 733291 - DNA, 120 bp, Artificial Sequence
  ENSG00000198812_3 (sequence is synthesized)
aaacagctctgcatcctctacctgggcaacaacaaactctgcgacctccccagtgagctgagcctgctccagaacctcaggaccctgtggatcgaggccaactgcctcacccagctgccg

SEQ ID NO: 733292 - DNA, 120 bp, Artificial Sequence
  ENSG00000198812_4 (sequence is synthesized)
gatgtggtctgtgagctgagtctccttaagactctgcatgccggctccaacgccctgcgtttgctgccaggccagctccggcgcctccaggagctgaggaccatctggctctcgggcaac

SEQ ID NO: 733293 - DNA, 120 bp, Artificial Sequence
  ENSG00000198812_5 (sequence is synthesized)
cggctaactgactttcccactgtgctgcttcacatgcccttcctggaggtgattgatgtggactggaacagcatccgttacttccccagcctggcgcacctgtcaagtctgaagctggtc

SEQ ID NO: 733294 - DNA, 120 bp, Artificial Sequence
  ENSG00000198812_6 (sequence is synthesized)
atctatgaccacaatccttgcaggaacgcacccaaggtggccaaaggtgtgcgccgtgtggggagatgggcagaggagacgccagagcccgaccctagaaaagccaggcgctatgcgttg

SEQ ID NO: 733295 - DNA, 120 bp, Artificial Sequence
  ENSG00000198812_7 (sequence is synthesized)
gtcagagaggaaagccaggagctacaggcaccagtccctctacttcctcctaccaactcctgaggagcttcagttgcaagtcaatgccaaggacccaactgcagcatgttctggaagcct

SEQ ID NO: 733296 - DNA, 120 bp, Artificial Sequence
  ENSG00000198812_8 (sequence is synthesized)
ctccattggagtggaaaggatggctctgggtcatttgggagtggctctgctagtagagactgatggagagagccaggtggaatgccataaatcacactgagaaaatatttctggcaaaca

SEQ ID NO: 733297 - DNA, 120 bp, Artificial Sequence
  ENSG00000198812_9 (sequence is synthesized)
ttgcaagaaaacagcttctccacacatgtattttgaaacactgaagagcaaaaggggctgggacactctgaactcctgcactctccagaagtgactggtcatgaagctcatgagctcctc

SEQ ID NO: 733298 - DNA, 120 bp, Artificial Sequence
  ENSG00000198812_10 (sequence is synthesized)
aaataaggtatttgccatagaactaaatattctggtggtctgtctctttgcaggacatattttctttactgtaaatgaccataaacagtatcaatgtatcactgaggccaccgaaaagga

SEQ ID NO: 733299 - DNA, 120 bp, Artificial Sequence
  ENSG00000198812_11 (sequence is synthesized)
catttctacctaggcaatcagtcagattcacagaaaaaagttgtttgttgttgtaaaggctcaagatgaaactctttccccagcagtttagtgcctgctgaaaagatccctgatggacaa

SEQ ID NO: 733300 - DNA, 120 bp, Artificial Sequence
  ENSG00000198812_12 (sequence is synthesized)
tagtgcctgctgaaaagatccctgatggacaatacttcttggtggactccagctgccccttttattattattagagacaaggtctcactctgttgctaggctggagtgcagtggcacaat

SEQ ID NO: 733301 - DNA, 120 bp, Artificial Sequence
  ENSG00000198812_13 (sequence is synthesized)
caagccttcctcccgcctcagcctgcccagtaactggtactacagatgtgcacacctggctaagtctttaattttttcgtagagatgaggtcttgctatgttgcccaagctagtttcaaa

SEQ ID NO: 733302 - DNA, 81 bp, Artificial Sequence
  ENSG00000198812_14 (sequence is synthesized)
cagctgtcaccttaaacttgacagtggctcatgctgatttagttcattttccctaaaaggtttgtcccaagatctgctccc

SEQ ID NO: 733303 - DNA, 120 bp, Artificial Sequence
  ENSG00000198812_15 (sequence is synthesized)
gttcattttccctaaaaggtttgtcccaagatctgctcccaacagttgactgtcactgacaatgttggaagtcatctggaaaagagaacctctgtggtaatgtggtctcattaaagtcaa

SEQ ID NO: 733304 - DNA, 120 bp, Artificial Sequence
  ENSG00000198812_16 (sequence is synthesized)
gccttgttgtgattcctgtctacctccctgaagcaaagcccttctgtttattcacactaatgagccagagctgagctaaattgaatccctgtccttggaggaaaaccacatttccagaag

SEQ ID NO: 733305 - DNA, 120 bp, Artificial Sequence
  ENSG00000198812_17 (sequence is synthesized)
catgttagtttaaaggtagtaggtgagaaatgtgttctcttgaaacaagcactttgaaatttgaataggaagttgtagtgtatataggaagtctctgcctctttcgcctagtatctctgc

SEQ ID NO: 733306 - DNA, 120 bp, Artificial Sequence
  ENSG00000198812_18 (sequence is synthesized)
ctttgtttcaatttgttttgatttttacagactgttttgacaatgtataaaccaaggtattttgttttttggaagtatgtaaattgtgaccttcccacaaatatataaactttaaagaaa

SEQ ID NO: 733307 - DNA, 120 bp, Artificial Sequence
  ENSG00000198814_0 (sequence is synthesized)
gggccggaggggcggggtgagaaggctgcgcgcgggtaaaggggccgcctcgagcgcggtccgagcgttcagcggacgcgcgcggcctcgatctctggactcgtcacctgcccctccccc

SEQ ID NO: 733308 - DNA, 120 bp, Artificial Sequence
  ENSG00000198814_1 (sequence is synthesized)
tcccgccgccgtcacccaggaaaccggccgcaatcgccggccgacctgaagctggtttcatggcagcctcaaagaaggcagttttggggccattggtgggggcggtggaccagggcacca

SEQ ID NO: 733309 - DNA, 120 bp, Artificial Sequence
  ENSG00000198814_2 (sequence is synthesized)
gttcgacgcgctttttggttttcaattcaaaaacagctgaactacttagtcatcatcaagtagaaataaaacaagagttcccaagagaaggatgggtggaacaggaccctaaggaaattc

SEQ ID NO: 733310 - DNA, 120 bp, Artificial Sequence
  ENSG00000198814_3 (sequence is synthesized)
tacattctgtctatgagtgtatagagaaaacatgtgagaaacttggacagctcaatattgatatttccaacataaaagctattggtgtcagcaaccagagggaaaccactgtagtctggg

SEQ ID NO: 733311 - DNA, 120 bp, Artificial Sequence
  ENSG00000198814_4 (sequence is synthesized)
acaagataactggagagcctctctacaatgctgtggtgtggcttgatctaagaacccagtctaccgttgagagtcttagtaaaagaattccaggaaataataactttgtcaagtccaaga

SEQ ID NO: 733312 - DNA, 120 bp, Artificial Sequence
  ENSG00000198814_5 (sequence is synthesized)
caggccttccacttagcacttacttcagtgcagtgaaacttcgttggctccttgacaatgtgagaaaagttcaaaaggccgttgaagaaaaacgagctctttttgggactattgattcat

SEQ ID NO: 733313 - DNA, 120 bp, Artificial Sequence
  ENSG00000198814_6 (sequence is synthesized)
ggcttatttggagtttgacaggaggagtcaatggaggtgtccactgtacagatgtaacaaatgcaagtaggactatgcttttcaacattcattctttggaatgggataaacaactctgcg

SEQ ID NO: 733314 - DNA, 120 bp, Artificial Sequence
  ENSG00000198814_7 (sequence is synthesized)
aattttttggaattccaatggaaattcttccaaatgtccggagttcttctgagatctatggcctaatgaaagctggggccttggaaggtgtgccaatatctgggtgtttaggggaccagt

SEQ ID NO: 733315 - DNA, 120 bp, Artificial Sequence
  ENSG00000198814_8 (sequence is synthesized)
ctgctgcattggtgggacaaatgtgcttccagattggacaagccaaaaatacgtatggaacaggatgtttcttactatgtaatacaggccataagtgtgtattttctgatcatggccttc

SEQ ID NO: 733316 - DNA, 120 bp, Artificial Sequence
  ENSG00000198814_9 (sequence is synthesized)
tcaccacagtggcttacaaacttggcagagacaaaccagtatattatgctttggaaggttctgtagctatagctggtgctgttattcgctggctaagagacaatcttggaattataaaga

SEQ ID NO: 733317 - DNA, 120 bp, Artificial Sequence
  ENSG00000198814_10 (sequence is synthesized)
cctcagaagaaattgaaaaacttgctaaagaagtaggtacttcttatggctgctacttcgtcccagcattttcggggttatatgcaccttattgggagcccagcgcaagagggataatct

SEQ ID NO: 733318 - DNA, 120 bp, Artificial Sequence
  ENSG00000198814_11 (sequence is synthesized)
gtggactcactcagttcaccaataaatgccatattgcttttgctgcattagaagctgtttgtttccaaactcgagagattttggatgccatgaatcgagactgtggaattccactcagtc

SEQ ID NO: 733319 - DNA, 120 bp, Artificial Sequence
  ENSG00000198814_12 (sequence is synthesized)
atttgcaggtagatggaggaatgaccagcaacaaaattcttatgcagctacaagcagacattctgtatataccagtagtgaagccctcaatgcccgaaaccactgcactgggtgcggcta

SEQ ID NO: 733320 - DNA, 120 bp, Artificial Sequence
  ENSG00000198814_13 (sequence is synthesized)
tggcggcaggggctgcagaaggagtcggcgtatggagtctcgaacccgaggatttgtctgccgtcacgatggagcggtttgaacctcagattaatgcggaggaaagtgaaattcgttatt

SEQ ID NO: 733321 - DNA, 120 bp, Artificial Sequence
  ENSG00000198814_14 (sequence is synthesized)
ctacatggaagaaagctgtgatgaagtcaatgggttgggttacaactcaatctccagaaagtggtgaccctagtatcttctgtagtctgcccttgggcttttttatagtgagtagcatgg

SEQ ID NO: 733322 - DNA, 120 bp, Artificial Sequence
  ENSG00000198814_15 (sequence is synthesized)
tctcttaatgcaatgacactattcatagactttgattttatttataagccacttgctgcatgaccctccaagtagacctgtggcttaaaataaagaaaatgcagcaaaaagaatgctata

SEQ ID NO: 733323 - DNA, 120 bp, Artificial Sequence
  ENSG00000198814_16 (sequence is synthesized)
gaaatatttggtggttttttttttttttaaacatccacagttaaggttgggccagctacctttggggctgaccccctccattgccataacatcctgctccattccctctaagatgtagga

SEQ ID NO: 733324 - DNA, 120 bp, Artificial Sequence
  ENSG00000198814_17 (sequence is synthesized)
agaattcggatccttaccattggaatcttccatcgaacatactcaaacacttttggaccaggatttgagtctctgcatgacatatacttgattaaaaggttattactaacctgttaaaaa

SEQ ID NO: 733325 - DNA, 120 bp, Artificial Sequence
  ENSG00000198814_18 (sequence is synthesized)
tcagcagctctttgcttttaacagacaccctaaaagtcttcttttctacatagttgaagacagcaacatcttcactgaatgtttgaatagaaacctctactaaattattaaaatagacat

SEQ ID NO: 733326 - DNA, 120 bp, Artificial Sequence
  ENSG00000198814_19 (sequence is synthesized)
ttagtgttctcacagcttggatatttttctgaaaagttatttgccaaaactgaaatccttcagatgttttccatggtcccactaattataatgactttctgtctggatcttataggaaaa

SEQ ID NO: 733327 - DNA, 120 bp, Artificial Sequence
  ENSG00000198814_20 (sequence is synthesized)
gatactttcttttttcttccatctttcctttttatattttttactttgtatgtataacatacatgcctatatattttatacactgagggtagcccatttataaattaagagcacattata

SEQ ID NO: 733328 - DNA, 120 bp, Artificial Sequence
  ENSG00000198814_21 (sequence is synthesized)
ttcagaaggttctaacagggctggtcttaagtgaaccactgtgtatataaatatgttggaaaacagctgtatacatttttgggcaacggttatgcataatatttaccaggagaatttttt

SEQ ID NO: 733329 - DNA, 120 bp, Artificial Sequence
  ENSG00000198814_22 (sequence is synthesized)
tcttaacaagccaacatttaaaatttatgttttatgtcaataaaagaaaatatactttattgtgacttcaactatatttcttatcccttacatttttatttaattgtcttagcttaaaaa

SEQ ID NO: 733330 - DNA, 120 bp, Artificial Sequence
  ENSG00000198814_23 (sequence is synthesized)
aagaagaaactgtggaatactacagtaaatattgttttcaaacacaagcaataattcaaatagttatttttcttttgaattaattttagacatattttggatcctattgaggggataaga

SEQ ID NO: 733331 - DNA, 120 bp, Artificial Sequence
  ENSG00000198814_24 (sequence is synthesized)
ggatgtcaaaaaagttaaatacctaagtagaaaaaaatatagaaataaagccaagaatctctttcagttcaaatgttatcaattgttaataagaaattgctatctgggatgacagaatta

SEQ ID NO: 733332 - DNA, 120 bp, Artificial Sequence
  ENSG00000198814_25 (sequence is synthesized)
cctctgcttagtatctcattataactgaaagaaggtttatcattacaaataccttccaatgaaaccaagaatttctcaaaatatttaatgtcacatattataagaagttacctaatcctg

SEQ ID NO: 733333 - DNA, 120 bp, Artificial Sequence
  ENSG00000198814_26 (sequence is synthesized)
cttcttaacatcaatttttaaaaatatcttaaaattactttgttttgtagtaaacagtgaagaaaagattgcctcctaattatttttttcaatgagtgctgaatgggaaaacatttatat

SEQ ID NO: 733334 - DNA, 120 bp, Artificial Sequence
  ENSG00000198814_27 (sequence is synthesized)
cttactataaaaggttctgttttgtttggaatcaatggtagctttattgactgttctgattgtgctgtttctaatttattgaatctgctaggttttattgatgcagccaccacttaagtg

SEQ ID NO: 733335 - DNA, 120 bp, Artificial Sequence
  ENSG00000198814_28 (sequence is synthesized)
acataaatattatagaaaggtactgtgaaatgatcactttgtggcaggggtacttttaaacataaatgtttctacaaaagtaggttgagttcattgtaaataattgtgaaagccactgtt

SEQ ID NO: 733336 - DNA, 120 bp, Artificial Sequence
  ENSG00000198814_29 (sequence is synthesized)
ccactgttcaaataattttaagattacattaatttttctataaattggaagatttataaatgtttgaaattgtacacattgatatttaatgacaaatttacttaaaataaattgacccct

SEQ ID NO: 733337 - DNA, 120 bp, Artificial Sequence
  ENSG00000198814_30 (sequence is synthesized)
tttacttaaaataaattgaccccttgttcttacttgcatttctcatttacagactagaacttagttgaaagttaaattaagaaagatgtttcagaggccgggcacggtggctgacgcctg

SEQ ID NO: 733338 - DNA, 120 bp, Artificial Sequence
  ENSG00000198814_31 (sequence is synthesized)
tgaggtcaggagttcgggactagcctaaccgacatggagaaaccctatctctactaaaaaaaaaaaaagatgtttcaggacatgtgaaacttggctgttagcgcttgatagggcacactc

SEQ ID NO: 733339 - DNA, 120 bp, Artificial Sequence
  ENSG00000198814_32 (sequence is synthesized)
tgaagagttaaccaacagccaaagaagtaatttctgtaatgatgaacactttaatcattctattagaagaaactacactgtcccatctcagcatttgcaaaaaataatgttggtaaggtc

SEQ ID NO: 733340 - DNA, 120 bp, Artificial Sequence
  ENSG00000198814_33 (sequence is synthesized)
agcagccattatcaacagggccttgcatggctaactttgaccaccatttttctctcaacctgataggcaacacctcaatcctttgttctccaactaatcagtaaaataagtaatgcatct

SEQ ID NO: 733341 - DNA, 120 bp, Artificial Sequence
  ENSG00000198814_34 (sequence is synthesized)
ctgcttctgtaatgatatcttagaatttttagtatgtttcttttgaagtgcccaaagcccaattctttgggatatcttttgggtatctggtatcatgtgggagtgaagaaagaaagtttt

SEQ ID NO: 733342 - DNA, 120 bp, Artificial Sequence
  ENSG00000198814_35 (sequence is synthesized)
tggagaaaccaacaaatgaaagctgtgatagcacagaagctaatggcattgacagtggagtaggtagtatttaatctgtagtgtttacaacatagtagatagaagtacaaaaattttttt

SEQ ID NO: 733343 - DNA, 120 bp, Artificial Sequence
  ENSG00000198814_36 (sequence is synthesized)
aactataactctttaatagcttgttttatctagtaatatttaaataatgaagtttccttgatcctttgcttttgcaacctaacaactttaataataagttcacacaataaacaaattagt

SEQ ID NO: 733344 - DNA, 120 bp, Artificial Sequence
  ENSG00000198814_37 (sequence is synthesized)
aaccggccgcaatcgccggccgacctgaagctggtttcatggcagcctcaaagaaggcagttttggggccattggtgggggcggtggaccagggcaccagttcgacgcgctttttgctat

SEQ ID NO: 733345 - DNA, 120 bp, Artificial Sequence
  ENSG00000198814_38 (sequence is synthesized)
aatgctccagctgctccagtttctcctggcccttcagttccagttgccgttgttccctctggctcttcagttccagctcctggtacttcctcagtgtggcttgatctaagaacccagtct

SEQ ID NO: 733346 - DNA, 120 bp, Artificial Sequence
  ENSG00000198814_39 (sequence is synthesized)
agtgcaagggtagctaagttcaggtgctgtttgattccagactcagacagtatcacctgcatccccctcaagcctgccttttctgggatggctcctgatgtggcatattcaactcccact

SEQ ID NO: 733347 - DNA, 120 bp, Artificial Sequence
  ENSG00000198814_40 (sequence is synthesized)
cctcaccttcctgttgctgtgcttaatatctggatctcctgccaactttccttcatcacaagggcagcaatagccttctgccccacttggagctcctccctccacttgtgctgctattgg

SEQ ID NO: 733348 - DNA, 120 bp, Artificial Sequence
  ENSG00000198814_41 (sequence is synthesized)
ttgtcttacaaatgagtgaatgtttgccaaattgttttataacccctgctgtttgtgacatctaaaagagatcttacctccttaccctcaaaaaattaaaattacgtgtgttcacagtca

SEQ ID NO: 733349 - DNA, 120 bp, Artificial Sequence
  ENSG00000198814_42 (sequence is synthesized)
tagttaaaagttaaggaaccaagtaaaatagtaaatgttatcattgcagattcggctgccaagcatattgggctttactgaataaatgtgaatgagagaaatcgttgcttatcaaaagaa

SEQ ID NO: 733350 - DNA, 120 bp, Artificial Sequence
  ENSG00000198815_0 (sequence is synthesized)
agtagttccgggtgcgcggccccggatgttggctgctcttgctgccgccgccgctctcggggctgctcggggcctcgaccgctcgcagtaggcaccgttgggacctttcccgggggggcg

SEQ ID NO: 733351 - DNA, 120 bp, Artificial Sequence
  ENSG00000198815_1 (sequence is synthesized)
gagacgcacggagcggccgggggctcggccgggccgtcccggcctgcgcagcctgagattctctttgtggccagatgggtttgtatggacaggcttgtccatctgtaacttcattaagga

SEQ ID NO: 733352 - DNA, 120 bp, Artificial Sequence
  ENSG00000198815_2 (sequence is synthesized)
tgacatctgaactggagagcagcctaacgtctatggactggttaccacagctcaccatgagagcagccatccaaaaatctgatgctacacaaaatgcacatggaacaggaatttctaaga

SEQ ID NO: 733353 - DNA, 120 bp, Artificial Sequence
  ENSG00000198815_3 (sequence is synthesized)
agaatgcactccttgacccaaatacaactctggaccaggaagaagtccaacagcacaaagatgggaaacctccatacagttatgccagcctcattacatttgcaattaatagctcaccca

SEQ ID NO: 733354 - DNA, 120 bp, Artificial Sequence
  ENSG00000198815_4 (sequence is synthesized)
aaaagaaaatgactttaagtgaaatttatcagtggatttgtgataacttcccatattatagagaggctggcagtggttggaagaattccatacgacataatctgtcattgaacaaatgtt

SEQ ID NO: 733355 - DNA, 120 bp, Artificial Sequence
  ENSG00000198815_5 (sequence is synthesized)
tccttaaagtgcctcgatctaaggatgaccctggaaaggggtcctactgggcaatagacaccaatccgaaggaagatgtgctgcctactcggccaaagaagagggcacgatctgtagaac

SEQ ID NO: 733356 - DNA, 120 bp, Artificial Sequence
  ENSG00000198815_6 (sequence is synthesized)
gggcctcaactccatatagcatagattcagattctttgggaatggagtgtattatttcgggaagtgcctctccaactctggcaatcaacactgtgactaacaaagtaacattgtataaca

SEQ ID NO: 733357 - DNA, 120 bp, Artificial Sequence
  ENSG00000198815_7 (sequence is synthesized)
ctgatcaggatggtagtgatagcccacgcagtagccttaacaacagtctctcagaccagagtttggcatctgttaatttgaacagtgttggaagtgtgcatagttatacaccggtgacaa

SEQ ID NO: 733358 - DNA, 120 bp, Artificial Sequence
  ENSG00000198815_8 (sequence is synthesized)
gccatccagaatcagtctctcaatcattaactcctcagcagcaaccacagtacaaccttccagaaagagacaagcaactacttttctcagaatataattttgaagatcttagtgcctcat

SEQ ID NO: 733359 - DNA, 120 bp, Artificial Sequence
  ENSG00000198815_9 (sequence is synthesized)
ttcggagcctttataagtcagtttttgagcagtcacttagtcaacaaggtttgatgaacatcccttctgaatcttcccagcagtcccacacttcatgtacctatcagcactctcccagca

SEQ ID NO: 733360 - DNA, 120 bp, Artificial Sequence
  ENSG00000198815_10 (sequence is synthesized)
gtacagtgagcactcacccacacagcaaccaaagcagcctgtccaacagtcatggcagtggcctcaacaccacaggcagtaattcggttgcacaggtctcactgtctcacccccagatgc

SEQ ID NO: 733361 - DNA, 120 bp, Artificial Sequence
  ENSG00000198815_11 (sequence is synthesized)
acacacagccatctccacatcctccccatcgaccgcatggtttaccgcagcatccgcagcgttccccacacccagcaccacacccacagcaacacagccagctccagtcccctcaccccc

SEQ ID NO: 733362 - DNA, 120 bp, Artificial Sequence
  ENSG00000198815_12 (sequence is synthesized)
agcatccctctccacatcaacacatacagcaccatccgaaccatcagcatcagacgttaacacatcaggcacccccacccccacaacaggtatcctgtaattctggtgtttcaaatgatt

SEQ ID NO: 733363 - DNA, 120 bp, Artificial Sequence
  ENSG00000198815_13 (sequence is synthesized)
ggtatgcgacacttgatatgctaaaagaaagctgtcgaattgccagcagtgttaattggtcagatgtagacctttcacagtttcaaggtctgatggagagtatgagacaggcagatctca

SEQ ID NO: 733364 - DNA, 120 bp, Artificial Sequence
  ENSG00000198815_14 (sequence is synthesized)
agaactggtctttagaccaggttcagtttgccgatctttgttcttctcttaatcagttctttacacaaactggccttatacattcacagagtaatgttcaacaaaatgtttgtcatggtg

SEQ ID NO: 733365 - DNA, 120 bp, Artificial Sequence
  ENSG00000198815_15 (sequence is synthesized)
ccatgcatccaacaaaaccttcccaacacattggaacaggaaatttgtacatagattctaggcaaaatctccctccttcagtgatgccaccccctggttatcctcatatcccacaggcac

SEQ ID NO: 733366 - DNA, 120 bp, Artificial Sequence
  ENSG00000198815_16 (sequence is synthesized)
tcagcactccaggaacaacgatggcaggccatcacagagccatgaaccagcagcacatgatgccttcccaagccttccagatgcggcgttccctgcctccagatgacatccaggatgact

SEQ ID NO: 733367 - DNA, 120 bp, Artificial Sequence
  ENSG00000198815_17 (sequence is synthesized)
ttgattgggattcaattgtgtagggcttgtttctgcaagacaccagaccctaacgttacctttctgtgcagtgaagggaaaggtttaagagaatccagttgagaaaacaaacttgctaat

SEQ ID NO: 733368 - DNA, 120 bp, Artificial Sequence
  ENSG00000198815_18 (sequence is synthesized)
cactttaccaatgttatcaaaattacttttgaagacaatcagaaggattttagctggataacttactgcttttatctgacccaagcaagtactacatgtttgtctccctgccagctgccc

SEQ ID NO: 733369 - DNA, 120 bp, Artificial Sequence
  ENSG00000198815_19 (sequence is synthesized)
tatgtagctcctaactgttgtgtgatttggacggctttttgcatatttgtgtcagtttgatgttaaccacaagtgccagactgatttttcagacggagcctattttgctgcaagcagttt

SEQ ID NO: 733370 - DNA, 120 bp, Artificial Sequence
  ENSG00000198815_20 (sequence is synthesized)
atataaagatacatatgtgtaaatatatgtacaaaaattactgaaaggcttcagttttttctaattggattattatgtcttgaaagttattgtcagtttttattccttgttaggctattt

SEQ ID NO: 733371 - DNA, 120 bp, Artificial Sequence
  ENSG00000198815_21 (sequence is synthesized)
ccccttatttaatcttttttagaaatgtgggtaatgaattctatctaataagtcaaggaaaccagaatttgacacactccaacaatccgaaggggcatgttgctcctgagcagcatgaag

SEQ ID NO: 733372 - DNA, 120 bp, Artificial Sequence
  ENSG00000198815_22 (sequence is synthesized)
aactgaccaaattggttttgatgcttgggggatcatagagtatttatgtctgcttttctaaatctgcattataatagctctaaaatttgttgattggtaagaaattgggcattgcttggc

SEQ ID NO: 733373 - DNA, 120 bp, Artificial Sequence
  ENSG00000198815_23 (sequence is synthesized)
tctttaaacacatcagtgcttccacattcacctatgtatttattattcaaaagtgtcattttaatatttattgctaccttctgtgaatgcttagctcctgtcgggttcattaaggagaaa

SEQ ID NO: 733374 - DNA, 68 bp, Artificial Sequence
  ENSG00000198815_24 (sequence is synthesized)
ctgtgaatgcttagctcctgtcgggttcattaaggagaaatgtgtctgaaagcacagaactattatta

SEQ ID NO: 733375 - DNA, 77 bp, Artificial Sequence
  ENSG00000198815_25 (sequence is synthesized)
tgcctcagcctcccgagtagctgggagtgcaggtgcacaccgccatgcctggcttgggctggttgcaaactcttgag

SEQ ID NO: 733376 - DNA, 81 bp, Artificial Sequence
  ENSG00000198815_26 (sequence is synthesized)
tagtagagatggggtttcaccatgttgcctgggctggttgcaaactcttgagctcaggcagtctgcctgcctcagcctcct

SEQ ID NO: 733377 - DNA, 120 bp, Artificial Sequence
  ENSG00000198815_27 (sequence is synthesized)
gacactcagagagacattgtgtcattctctatcatcactccttttaccatgtgaatagatttctctgtcttggcattcttgctgattcagacttattagttaaatcggatttttctggaa

SEQ ID NO: 733378 - DNA, 120 bp, Artificial Sequence
  ENSG00000198815_28 (sequence is synthesized)
tttgaatcagatttcatttgggcaacaacagcagggcagggtttctaaagcaggtttccccactcatctaggttgtcttgaaaggaggatagagccacttacagttttatttgcttcagt

SEQ ID NO: 733379 - DNA, 120 bp, Artificial Sequence
  ENSG00000198815_29 (sequence is synthesized)
gtttaatgtagatattatgtggcctgctgtttctgttgtcttgtatgtctgtgtatgcatgacatttggtccctttctttgaaatgcagcccctcttacgggttttttagtggtggtggt

SEQ ID NO: 733380 - DNA, 120 bp, Artificial Sequence
  ENSG00000198815_30 (sequence is synthesized)
ttgttttgtttcatatcatatcacagtttgcatggactgattatcttagttttatgataaaactagaagaaatgagggtttttttttaatgaatagattttgaattgattctttagaccc

SEQ ID NO: 733381 - DNA, 120 bp, Artificial Sequence
  ENSG00000198815_31 (sequence is synthesized)
cccaaaaagtgtcagttctaatggggaaatatattccatcaagtcaaagagtaataactgctcactagttgctttttagcatctctggtcttatcagccatgctaaatcactttaattag

SEQ ID NO: 733382 - DNA, 120 bp, Artificial Sequence
  ENSG00000198815_32 (sequence is synthesized)
ccttagtgattctatggttgagtaatctctacttgaactaaacaaacatcttttgtttctgtgtgtgtgtgctgtgtgtgagagtgtgcgcgcgcgtgtgtgtgtgtgtgttttaatgga

SEQ ID NO: 733383 - DNA, 120 bp, Artificial Sequence
  ENSG00000198815_33 (sequence is synthesized)
gtgttgccttgaatgaatcactgggaagccagccatggtaagggctggtgaggttggggagaaaggaagagctttatgtttctctgttgtttggaccctacttggcatgaaaaaggaagc

SEQ ID NO: 733384 - DNA, 120 bp, Artificial Sequence
  ENSG00000198815_34 (sequence is synthesized)
tcagttccagccccttggatcaacgaaaatcagaggattctggaaaggcagccaacttgcgcctcttagaaggatcagaggcaagatgagatggcagcctgcagagtaaatgcttgaaaa

SEQ ID NO: 733385 - DNA, 120 bp, Artificial Sequence
  ENSG00000198815_35 (sequence is synthesized)
aagaggggtgattttcaatggtttgcttaagtcactgttttctagacaccaaaatagctgttttgaaactgttttaattgcttgggtagcaatgtgcactttaaacaatttggatattgg

SEQ ID NO: 733386 - DNA, 120 bp, Artificial Sequence
  ENSG00000198815_36 (sequence is synthesized)
aatgcagtctcatactgagtgatttgagtagaaccactgatgatgattttataaattgtgtgaagcgaatttcccatttggcaatcatttactgatttgcagtgatgaatatttttatga

SEQ ID NO: 733387 - DNA, 120 bp, Artificial Sequence
  ENSG00000198815_37 (sequence is synthesized)
gaatttaaacttagcaagaatggccatggaggcaaagccttcacccagacccatcccactctcctgtgatccaggtggtccaggagcccaggacaggccttttctgtgggccctggccag

SEQ ID NO: 733388 - DNA, 120 bp, Artificial Sequence
  ENSG00000198815_38 (sequence is synthesized)
acagggttacctggtgaggtgcagagagtccctctagtggccattttgtatggtagttgctaatgcagaacaagttctgtcttgggcttaaattgactgaagactttagggggaaagaat

SEQ ID NO: 733389 - DNA, 120 bp, Artificial Sequence
  ENSG00000198815_39 (sequence is synthesized)
agtaaatgcatgtaaacaaatggggacactctgttcaggagaataatccgactggcatttgtggcagtttttgaaatgtaaatgtattcatgtgtgttcttgtaaatacgtgtcgctcag

SEQ ID NO: 733390 - DNA, 120 bp, Artificial Sequence
  ENSG00000198815_40 (sequence is synthesized)
atgtcctttgaagtgggagggaatcaatccggggataatttcaaatggaatagagtattttgatattgttcattcagagggtgatgtgtacatatctatattgtatatatgtgatgaaaa

SEQ ID NO: 733391 - DNA, 120 bp, Artificial Sequence
  ENSG00000198815_41 (sequence is synthesized)
tgcattggctttttgtgcagatacaacctgctctctgtactgctgttggacagtcagtgttttaatgtttctacagttttgctattgcacgatttcatattttgcctctatgatgaacgg

SEQ ID NO: 733392 - DNA, 120 bp, Artificial Sequence
  ENSG00000198815_42 (sequence is synthesized)
caaccattatttgtaactgtttagtgctgtaaagaaatattccaagtgtcattaggattgttgctgccagaactgatatgcatgaatggcacttaaaataaatatattatgttaactcta

SEQ ID NO: 733393 - DNA, 120 bp, Artificial Sequence
  ENSG00000198815_43 (sequence is synthesized)
gcgagacgccctctctcttccagccgcagccgcgttgcgggttcttccctgtggaacagtagagacctagtctgccttctttcacaagataatccttcaattatttgaaggtgattattc

SEQ ID NO: 733394 - DNA, 120 bp, Artificial Sequence
  ENSG00000198815_44 (sequence is synthesized)
agcatatatctcttgagtacctgtgcatgcaagacactgtcctggatattgtgagagatccaaagtttagtatgagatcattttcccttgcctgagttttgagctgattgagaaataaga

SEQ ID NO: 733395 - DNA, 120 bp, Artificial Sequence
  ENSG00000198815_45 (sequence is synthesized)
ataacctgggtagctaccttgagaattagaagggcctttagaggtccaactcctttaagaaagaaagaaagaccaggcacgggaaaggcctccgcagacatgagtctagcacctgggact

SEQ ID NO: 733396 - DNA, 120 bp, Artificial Sequence
  ENSG00000198815_46 (sequence is synthesized)
catgaagttctgaaaagaggggtgtcctgaaggtccaaggcgcctttgttgggggtcccggaatccgcggtgtgccaggtcggaaaaggcgtccgctttcctggagaggaggctaaggtg

SEQ ID NO: 733397 - DNA, 120 bp, Artificial Sequence
  ENSG00000198815_47 (sequence is synthesized)
tagaagagatttcactagtgatttaaattcattttcagaaacaaagcacaaaactggatgttcaagaatttgatgagatcccttcaaactgtgttaaagttgctggatatatgagctaat

SEQ ID NO: 733398 - DNA, 120 bp, Artificial Sequence
  ENSG00000198815_48 (sequence is synthesized)
aacttttccagttcattgaataggaacctctgcaaaatagtaagtcctcccccaccctgctctaaagcttgttagagagttttaagctgtgggaacctaactagtgtatagctgttgcac

SEQ ID NO: 733399 - DNA, 120 bp, Artificial Sequence
  ENSG00000198815_49 (sequence is synthesized)
gggaaaatacagatttgtgtggcatttcctatctgttcatttattggtactgtaatgtaaagagcagtatcaagtttgatattactaggtgatgtggcaatttggaaactgctagactgg

SEQ ID NO: 733400 - DNA, 120 bp, Artificial Sequence
  ENSG00000198815_50 (sequence is synthesized)
aggttagaagacctgggttcaagtcttagattcatcatgataaccttgctaagttatgtcacttctctggttcagtttcttttatttgtaaaatggagagaaataatacctttctgcctg

SEQ ID NO: 733401 - DNA, 120 bp, Artificial Sequence
  ENSG00000198815_51 (sequence is synthesized)
tctcacagagcagattgcccaacacgtgatataatgggtacaaatccccttgtaagacgggacaagaatcagccaatttcaggaataagggcagctcatcgttttcccttaccacacttc

SEQ ID NO: 733402 - DNA, 120 bp, Artificial Sequence
  ENSG00000198815_52 (sequence is synthesized)
accctttcaccatccaggaattacactgttgtcaatattttataggtgtttcaaatgattggtatgcgacacttgatatgctaaaagaaagctgtcgaattgccagcagtgttaattggt

SEQ ID NO: 733403 - DNA, 120 bp, Artificial Sequence
  ENSG00000198815_53 (sequence is synthesized)
cagatgtagacctttcacagtttcaaggtgagtgttggttctttttgacatataaccaaatacacatgatcctgtttctctgctagattataactttctttgtagtagaaataaacatca

SEQ ID NO: 733404 - DNA, 120 bp, Artificial Sequence
  ENSG00000198815_54 (sequence is synthesized)
tcttatatagcatttcttttgcagttggtaaaattcataataattttggccacttggtatagcagagggtcacagacaagttctgaaagaaatttgaccacatttaaaataattgggctt

SEQ ID NO: 733405 - DNA, 120 bp, Artificial Sequence
  ENSG00000198815_55 (sequence is synthesized)
tgaataatttaaaaaggtcattcttcattgcgtggataaatcactaccataaagtggagtgagtggaaattttgagagctgaaaaaaattatgtcttgctattttccttgcaatgtttat

SEQ ID NO: 733406 - DNA, 120 bp, Artificial Sequence
  ENSG00000198816_0 (sequence is synthesized)
gggccgggcaggggcgaggggcgccgggtcttgccccagaagctgcgggcacatccacgcctgaaatgcggcgctcagtcctggtcaggaacccaggccacaaaggcctgagacccgttt

SEQ ID NO: 733407 - DNA, 120 bp, Artificial Sequence
  ENSG00000198816_1 (sequence is synthesized)
atgaagagctcgactctgactccgaggacctagaccccaatcctgaagatctggacccggtttctgaagacccagagcctgatcctgaagacctcaacactgtcccggaagacgtggacc

SEQ ID NO: 733408 - DNA, 120 bp, Artificial Sequence
  ENSG00000198816_2 (sequence is synthesized)
ccagctatgaagatctggagcccgtctcggaggatctggaccccgacgccgaagctccgggctcggaaccccaagatcccgaccccatgtcttcgagtttcgacctcgatccagatgtga

SEQ ID NO: 733409 - DNA, 120 bp, Artificial Sequence
  ENSG00000198816_3 (sequence is synthesized)
ttggccccgtacccctgattctcgatcctaacagcgacaccctcagccccggcgatccaaaagtggaccccatctcctctggcctcactgccaccccccaggtcttggccaccagccccg

SEQ ID NO: 733410 - DNA, 120 bp, Artificial Sequence
  ENSG00000198816_4 (sequence is synthesized)
gctccccgcccccgccagcccgccccggcccttctcctgcccggattgcgggcgagccttccgccgcagctccgggctgagccagcatcgccgcacgcacagcggcgagaagccgtaccg

SEQ ID NO: 733411 - DNA, 120 bp, Artificial Sequence
  ENSG00000198816_5 (sequence is synthesized)
accgctgccccgactgcgggaagtccttcagccacggtgccaccctggctcagcaccgtggcatccacactggggcgcggccgtaccagtgcgcggcctgcggcaaggccttcggctggc

SEQ ID NO: 733412 - DNA, 120 bp, Artificial Sequence
  ENSG00000198816_6 (sequence is synthesized)
gctccacgctgctgaaacatcgcagcagccacagcggggagaagccgcaccactgcccggtgtgtggcaaggccttcgggcacggctcgctcctggcacagcacctgcgcacgcacggcg

SEQ ID NO: 733413 - DNA, 120 bp, Artificial Sequence
  ENSG00000198816_7 (sequence is synthesized)
gctctgcgctgctcaaacacctgcgcacgcacacgggcgagcggccctacccgtgtccgcagtgcggcaaggccttcgggcagagctcggcgctgctgcagcaccagcgcacacacacgg

SEQ ID NO: 733414 - DNA, 120 bp, Artificial Sequence
  ENSG00000198816_8 (sequence is synthesized)
ccgagcgcccctaccgctgcccccactgcggcaaagccttcgggcagagctccaacttgcaacaccacctgcgcatccacacgggcgagcggccctacgcctgcccgcactgctccaagg

SEQ ID NO: 733415 - DNA, 120 bp, Artificial Sequence
  ENSG00000198816_9 (sequence is synthesized)
ccttcggccagagctcagcgctgctccagcacctgcacgtgcattcgggcgagcgtccctatcgctgtcagctctgcgggaaggccttcggccaggcctccagcctcaccaagcacaaac

SEQ ID NO: 733416 - DNA, 120 bp, Artificial Sequence
  ENSG00000198816_10 (sequence is synthesized)
gggtgcatgagggtgcagccgctgctgcagctgccgcggccgctgcagctgcagcagcggccgccggcctgggcctcgggcctggcctaagccctgcatccatgatgaggccggggcagg

SEQ ID NO: 733417 - DNA, 120 bp, Artificial Sequence
  ENSG00000198816_11 (sequence is synthesized)
tctccctcctgggtcctgatgctgtttctgtgctcggctctggcttgggcctcagccctggcaccagctctggccgcaaccctgaccctggctctgggccgggcactctgccggatccca

SEQ ID NO: 733418 - DNA, 120 bp, Artificial Sequence
  ENSG00000198816_12 (sequence is synthesized)
gctccaaacccctccccggctccagatccacccccagccctactcctgtggaatcttctgacccaaaggctgggcacgacgctggtcccgaccttgtgcccagcccagaccttgatcctg

SEQ ID NO: 733419 - DNA, 120 bp, Artificial Sequence
  ENSG00000198816_13 (sequence is synthesized)
tgcccagcccagaccctgatcctgtgcccagccctgatcccaaccctgtgtcctgccctgacccctgttctcccactcgtggcactgtcagcccagccctccctaccggcgagagtccag

SEQ ID NO: 733420 - DNA, 120 bp, Artificial Sequence
  ENSG00000198816_14 (sequence is synthesized)
agtgggtacaggagcaaggggcactgctggggcctgatggctgaaggagacgccggcatcctcgggggcctggggaagttgtgtgttgtgcagtcagtaaaatcctcccactgcctccgg

SEQ ID NO: 733421 - DNA, 120 bp, Artificial Sequence
  ENSG00000198816_15 (sequence is synthesized)
tctccaaggaaagtttgccccgagcccttcccggcccggcgtagggttctccggaaaccatcactcacatctagcacttggaggcctccagggacagcggtgacccaccatctgggtctt

SEQ ID NO: 733422 - DNA, 120 bp, Artificial Sequence
  ENSG00000198818_0 (sequence is synthesized)
gtttcctggtgggcgtcaggggcaggcaacagagtggcggccgctacggccctgtaacagggccatggagaagctgcggcgagtcctgagcggccaggacgacgaggagcagggcctgac

SEQ ID NO: 733423 - DNA, 120 bp, Artificial Sequence
  ENSG00000198818_1 (sequence is synthesized)
tgcgcaggtcctggatgcctcatcccttagtttcaacaccagattgaaatggtttgccatctgcttcgtatgtggcgttttcttttctattcttggaactggattgctgtggcttccggg

SEQ ID NO: 733424 - DNA, 120 bp, Artificial Sequence
  ENSG00000198818_2 (sequence is synthesized)
cggcataaagctttttgcagtgttttataccctcggcaatcttgctgcgttagccagtacatgctttttaatgggacctgtgaagcaactgaagaaaatgtttgaagcaacaagattgct

SEQ ID NO: 733425 - DNA, 120 bp, Artificial Sequence
  ENSG00000198818_3 (sequence is synthesized)
tgcaacaattgttatgcttttgtgtttcatatttaccctgtgtgctgctctttggtggcataagaagggactggctgtgttattctgcatattgcagttcttgtcaatgacctggtatag

SEQ ID NO: 733426 - DNA, 120 bp, Artificial Sequence
  ENSG00000198818_4 (sequence is synthesized)
acttgtggaaaagagcacttgaatgttggtactctatgtttggtgaagtttgcttttccccataaaacactccaggaacaactgacgtgacagttgaagaccgttttgtactaagtctca

SEQ ID NO: 733427 - DNA, 120 bp, Artificial Sequence
  ENSG00000198818_5 (sequence is synthesized)
ttttgtatactggtaaaaactacatgcttgattaaaccattaaatgcttgtaactttaaattcattatgtgtcattaatatacttttccaaagataagatttttaatcactgccagttgt

SEQ ID NO: 733428 - DNA, 120 bp, Artificial Sequence
  ENSG00000198818_6 (sequence is synthesized)
aaattatttttagccaatttttaaatcttttcaaagcagctttgaaatgtgaatatttaaaggtagacctgtgctgcaagataattaaacttttttgcttttaaaaaatgtctgcatttt

SEQ ID NO: 733429 - DNA, 120 bp, Artificial Sequence
  ENSG00000198818_7 (sequence is synthesized)
gagccagacaggccctgcagggtcagaggaggggaggtctgcgatgagtcctgttgcacttgacagcgtggctcagtggtactgttcgggagaagtatggggtgctgtgctcgtagagtt

SEQ ID NO: 733430 - DNA, 120 bp, Artificial Sequence
  ENSG00000198818_8 (sequence is synthesized)
acatagtgatatgttctgcttttttctaatgtgagaaagagaaataataagaaaagtaggtgatgccatgtgagtacataaaagtgagaccaaatcacagggtgagtccaagggaagatg

SEQ ID NO: 733431 - DNA, 120 bp, Artificial Sequence
  ENSG00000198818_9 (sequence is synthesized)
agtttacctgcattctccactctattgctggataaatacaacgtggaatttatcctgatgttgactctgtggccctgtgatatctggagatgtcttctgaattggcagtgattaaatact

SEQ ID NO: 733432 - DNA, 120 bp, Artificial Sequence
  ENSG00000198818_10 (sequence is synthesized)
tatctggagatgtcttctgaattggcagtgattaaatacttcttaagttactggttgagcatcccaaatccaaaatgcttcaggatccaaaactttttttttttttttttgaggcagagt

SEQ ID NO: 733433 - DNA, 86 bp, Artificial Sequence
  ENSG00000198818_11 (sequence is synthesized)
aatgtgaggcaccatgcccagccccaaatccaaaacttcttgaacgctgacatgatgctcagatttggttgatactcaaccagtaa

SEQ ID NO: 733434 - DNA, 120 bp, Artificial Sequence
  ENSG00000198818_12 (sequence is synthesized)
ccaaaaatccagaaaaatccagtatccaacacatttctagttcctatcatttcagatcagaggtgcttcacctgcactgcctttcccagtccacttttgtgaagattcagtcatgtcctg

SEQ ID NO: 733435 - DNA, 120 bp, Artificial Sequence
  ENSG00000198818_13 (sequence is synthesized)
gtttctgctcagactgtcctccttgtagcctttttgtgtctcgcacagtaagagttcatctgcataaaggccataaatatctgggtggttgattaaacgtgccctgcagctcctgcgctc

SEQ ID NO: 733436 - DNA, 120 bp, Artificial Sequence
  ENSG00000198818_14 (sequence is synthesized)
ttctgtgttagtgaagagtacttttccttttcctttagagcagctcttgcttcctaatttttgcttcctggttttgccattttacattcctcttactcgacattacccagtttgggatca

SEQ ID NO: 733437 - DNA, 120 bp, Artificial Sequence
  ENSG00000198818_15 (sequence is synthesized)
cctttctttcggccttctttctactgacagatgaaacatcagtgaatgttaaatgtaattctctgtatatctcaaattcaccataaaatgttctttactttttttcactgatatgtgaag

SEQ ID NO: 733438 - DNA, 120 bp, Artificial Sequence
  ENSG00000198818_16 (sequence is synthesized)
aaacttaatctcttggttattttctctagtattttgccttttattgcctaatttgtaactaataattgatttatccctaaaggagactataattatcagttgtggtacagtttctatttt

SEQ ID NO: 733439 - DNA, 120 bp, Artificial Sequence
  ENSG00000198818_17 (sequence is synthesized)
attataagaagctcaaactttagcatgcaccagaatcacctagagagtttgtttaaagtgcaggttgcttgttaaagcaagcttgtgatttaggaggtttaaggtaggacctaataattt

SEQ ID NO: 733440 - DNA, 120 bp, Artificial Sequence
  ENSG00000198818_18 (sequence is synthesized)
acatttttaacaagttcccagatgatgctctcactgctggtcggggtcacactttgagaaccactgtacagtctcatgctgctgtatttattataaggttagacatggccttttggcata

SEQ ID NO: 733441 - DNA, 120 bp, Artificial Sequence
  ENSG00000198818_19 (sequence is synthesized)
aaggaaaaccatcattcagatgaagattcaacatgcttgaatatttcttgcaggtatagcctgtcgtacatcccatatgcaagggatgcagttattaaatgctgttcttctctcctaagt

SEQ ID NO: 733442 - DNA, 120 bp, Artificial Sequence
  ENSG00000198818_20 (sequence is synthesized)
acctgtgaagcaactgaagaaaatgtttgaagcaacaagattgcttgcaacaattgttatgcttttgtgtttcatatttaccctgtgtgctgctctttgggtaagttatgtcagccctac

SEQ ID NO: 733443 - DNA, 120 bp, Artificial Sequence
  ENSG00000198818_21 (sequence is synthesized)
atgttaccatccagctagttgctaaaaatgccatagattctactgtctacagcatagaggtagtcagtgaacacacatgtgcacacatgctcacccacccagctggtggctaaatgtgcc

SEQ ID NO: 733444 - DNA, 120 bp, Artificial Sequence
  ENSG00000198818_22 (sequence is synthesized)
tctacatttttgaaagacaagaattaagtttgattgagaaagatgtttttaaaactttgaaactcataattgctctgtttttgctgttgttagtggcataagaagggactggctgtgtta

SEQ ID NO: 733445 - DNA, 120 bp, Artificial Sequence
  ENSG00000198821_0 (sequence is synthesized)
ttttctcctaaccgtcccggccaccgctgcctcagcctctgcctcccagcctctttctgagggaaaggacaagatgaagtggaaggcgcttttcaccgcggccatcctgcaggcacagtt

SEQ ID NO: 733446 - DNA, 120 bp, Artificial Sequence
  ENSG00000198821_1 (sequence is synthesized)
gccgattacagaggcacagagctttggcctgctggatcccaaactctgctacctgctggatggaatcctcttcatctatggtgtcattctcactgccttgttcctgagagtgaagttcag

SEQ ID NO: 733447 - DNA, 120 bp, Artificial Sequence
  ENSG00000198821_2 (sequence is synthesized)
caggagcgcagacgcccccgcgtaccagcagggccagaaccagctctataacgagctcaatctaggacgaagagaggagtacgatgttttggacaagagacgtggccgggaccctgagat

SEQ ID NO: 733448 - DNA, 120 bp, Artificial Sequence
  ENSG00000198821_3 (sequence is synthesized)
ggggggaaagccgcagagaaggaagaaccctcaggaaggcctgtacaatgaactgcagaaagataagatggcggaggcctacagtgagattgggatgaaaggcgagcgccggaggggcaa

SEQ ID NO: 733449 - DNA, 120 bp, Artificial Sequence
  ENSG00000198821_4 (sequence is synthesized)
ggggcacgatggcctttaccagggtctcagtacagccaccaaggacacctacgacgcccttcacatgcaggccctgccccctcgctaacagccaggggatttcaccactcaaaggccaga

SEQ ID NO: 733450 - DNA, 120 bp, Artificial Sequence
  ENSG00000198821_5 (sequence is synthesized)
cctgcagacgcccagattatgagacacaggatgaagcatttacaacccggttcactcttctcagccactgaagtattcccctttatgtacaggatgctttggttatatttagctccaaac

SEQ ID NO: 733451 - DNA, 120 bp, Artificial Sequence
  ENSG00000198821_6 (sequence is synthesized)
agggcttacggccctggccttgggccctctggtttgccggtggtgcaggtagacctgtctcctggcggttcctcgttctccctgggaggcgggcgcactgcctctcacagctgagttgtt

SEQ ID NO: 733452 - DNA, 120 bp, Artificial Sequence
  ENSG00000198821_7 (sequence is synthesized)
gagtctgttttgtaaagtccccagagaaagcgcagatgctagcacatgccctaatgtctgtatcactctgtgtctgagtggcttcactcctgctgtaaatttggcttctgttgtcacctt

SEQ ID NO: 733453 - DNA, 120 bp, Artificial Sequence
  ENSG00000198821_8 (sequence is synthesized)
cacctcctttcaaggtaactgtactgggccatgttgtgcctccctggtgagagggccgggcagaggggcagatggaaaggagcctaggccaggtgcaaccagggagctgcaggggcatgg

SEQ ID NO: 733454 - DNA, 120 bp, Artificial Sequence
  ENSG00000198821_9 (sequence is synthesized)
gaaggtgggcgggcaggggagggtcagccagggcctgcgagggcagcgggagcctccctgcctcaggcctctgtgccgcaccattgaactgtaccatgtgctacaggggccagaagatga

SEQ ID NO: 733455 - DNA, 120 bp, Artificial Sequence
  ENSG00000198821_10 (sequence is synthesized)
acagactgaccttgatgagctgtgcacaaagtggcataaaaaacatgtggttacacagtgtgaataaagtgctgcggagcaagaggaggccgttgattcacttcacgctttcagcgaatg

SEQ ID NO: 733456 - DNA, 120 bp, Artificial Sequence
  ENSG00000198821_11 (sequence is synthesized)
acaaaatcatctttgtgaaggcctcgcaggaagacccaacacatgggacctataactgcccagcggacagtggcaggacaggaaaaacccgtcaatgtactaggatactgctgcgtcatt

SEQ ID NO: 733457 - DNA, 120 bp, Artificial Sequence
  ENSG00000198821_12 (sequence is synthesized)
acagggcacaggccatggatggaaaacgctctctactctgctttttttctactgttttaatttatactggcatgctaaagccttcctattttgcataataaatgcttcagtgaaaatgca

SEQ ID NO: 733458 - DNA, 120 bp, Artificial Sequence
  ENSG00000198821_13 (sequence is synthesized)
gccgcagagaaggaagaaccctcaggaaggcctgtacaatgtgagtagaggagacctcacatttgaccttggaaagttggaggaagggctggaggagggctccagaggaagggctggagg

SEQ ID NO: 733459 - DNA, 120 bp, Artificial Sequence
  ENSG00000198821_14 (sequence is synthesized)
aagggctggaggagggctccagaggaagggctggaggaagggctggaggagggctccggaggaagggctggaggaagggctggaggagggctccggaggaagggctggaggaagggctgg

SEQ ID NO: 733460 - DNA, 120 bp, Artificial Sequence
  ENSG00000198821_15 (sequence is synthesized)
aggagggctccggaggaagggctggaggaagggctggaggagggctccggaggaagggctggaggaagggctggaggagggctccggaggaagggctggaggtagggctggaggagggct

SEQ ID NO: 733461 - DNA, 120 bp, Artificial Sequence
  ENSG00000198821_16 (sequence is synthesized)
ccggaggaagggctggaggaagggctggaggagggctccggaggaagggctggaggaagggctggaggagggctccggaggaagggctggaggaagggctggaggagggctccggaggaa

SEQ ID NO: 733462 - DNA, 120 bp, Artificial Sequence
  ENSG00000198821_17 (sequence is synthesized)
gggctggaggagggctccggaggaagggctggaggaagggctggaggagggctccagaggaaggcggttgctcctcactctgtggtctttgtctgtccagaccttcccttcttggatcga

SEQ ID NO: 733463 - DNA, 120 bp, Artificial Sequence
  ENSG00000198821_18 (sequence is synthesized)
gtaatgtctcacctgcttgcggcctgcagcagcacctgcttctagaaagtctccttagctgaaaagtgccgagtaatctcccttccctccccaaaccctgctgctggagttcccaggttg

SEQ ID NO: 733464 - DNA, 120 bp, Artificial Sequence
  ENSG00000198821_19 (sequence is synthesized)
atcagcctggggtgtagggggacacagcaaggtcaagctaggcaaggacgaggtggctggccccttcgaggggctcctgtcctgggtgctgaagtcttctgagtgtacccccctatagga

SEQ ID NO: 733465 - DNA, 120 bp, Artificial Sequence
  ENSG00000198821_20 (sequence is synthesized)
aggtcaacctcaccctcctgggtgtgaccctgaaccctgattgtcgatctgggttgccatgcaggagacccttgcaggtggcagccttctgtgaaggagatgcctccccgcccctcctgt

SEQ ID NO: 733466 - DNA, 120 bp, Artificial Sequence
  ENSG00000198821_21 (sequence is synthesized)
ggggagggagggttgatctacagcccgtttggctgtgtaaagagacaacttgctcagataaatgattctggggctccaggtgagcccttgttttgcccagtctccgtgtctttgtctaga

SEQ ID NO: 733467 - DNA, 120 bp, Artificial Sequence
  ENSG00000198821_22 (sequence is synthesized)
ctcagtgcaaagagctggcagctcggaggagactccaaagggctgaggatgaggggggtgggctggagctggttgtgggcagagaagtttgtgtgcataaggtttggagccttgattgtg

SEQ ID NO: 733468 - DNA, 120 bp, Artificial Sequence
  ENSG00000198821_23 (sequence is synthesized)
ggagccctccctgtctgccactgctgccaacttggggatcaagaagcttcctgttgtaggggaacctgctgctttctgcattagttggtaaaaatcagtgttccacgccctcttctgcag

SEQ ID NO: 733469 - DNA, 120 bp, Artificial Sequence
  ENSG00000198821_24 (sequence is synthesized)
gttcagaggggccttggtcttggaaggtctcaagctcgggtggtgcctggggcttggtatccaggagcaaagcaaggaccagccaagtgtgtgccttgagtgggctgaggaggaggtggc

SEQ ID NO: 733470 - DNA, 120 bp, Artificial Sequence
  ENSG00000198821_25 (sequence is synthesized)
acagggtaggagggagagcctggtgctaggcacctccatgacaagccgtacaaatgtgtgcacatcagagtgtcccagggaaggcgatgctactggtgacaaaggggcttacactcaggc

SEQ ID NO: 733471 - DNA, 120 bp, Artificial Sequence
  ENSG00000198821_26 (sequence is synthesized)
agaggtccttctttccaagtgtgaatgaaggccatgttagcctttctcttgaaaaggccctttcctcatctgtaactggggagctgaccagagcgtgggtttttcacttggtgccttgca

SEQ ID NO: 733472 - DNA, 120 bp, Artificial Sequence
  ENSG00000198821_27 (sequence is synthesized)
gaccctggatttcttcgtggggctggtcatggtgtgggcagagattggaagaatttaggagtaaaggggagaatccagtcccagtcatcacttcagtgcttctcaacccatttcttgttt

SEQ ID NO: 733473 - DNA, 120 bp, Artificial Sequence
  ENSG00000198821_28 (sequence is synthesized)
gaattttggactttggcataatattttatttgaaaaaccaaatcttactgagtttcttgttttaagtttgaaaatgctgccctagatgatttctaaggttgtttccaatgctctagatct

SEQ ID NO: 733474 - DNA, 120 bp, Artificial Sequence
  ENSG00000198821_29 (sequence is synthesized)
gtaagacattgcagtttctcccgcctgaagcggcatgaagtgaagcaggagtgaggctgtgtcagcttcccacagatgctcaggacactaagcgaacgcgaggcttcctgggcaccgggg

SEQ ID NO: 733475 - DNA, 120 bp, Artificial Sequence
  ENSG00000198821_30 (sequence is synthesized)
tcctgggccagcgtgatgaatgcacgtgtcacaggcgggaggaaaaaggacaactgggctcagaaaaaggggctgccacgccccggcccctgcaagggctcagccccaggaggcagggca

SEQ ID NO: 733476 - DNA, 120 bp, Artificial Sequence
  ENSG00000198821_31 (sequence is synthesized)
gcattgttagttgccaaggagcggagtagggctgtccctcgggtcgccgcgcgccctggcaccccggctcccctgcgcgccctcgcggagcagtaacgcgctttgctttctgtgttgcag

SEQ ID NO: 733477 - DNA, 120 bp, Artificial Sequence
  ENSG00000198822_0 (sequence is synthesized)
gtgcagttgagtcgcgagtacggctgagctgcgtaccggcctccctggctctcacactccctctctgctcccgctctcctaatctcctctggcatgcggtcagccccctgcccagggacc

SEQ ID NO: 733478 - DNA, 120 bp, Artificial Sequence
  ENSG00000198822_1 (sequence is synthesized)
acaggagagttcttgtaaggactgttagtccctgcttacctgaaagccaagcgctctagcagagctttaaagttggagccgccaccctccctaccgccccatgccccttcaccccactcc

SEQ ID NO: 733479 - DNA, 120 bp, Artificial Sequence
  ENSG00000198822_2 (sequence is synthesized)
gaaattcaccgacctttgcatgcactgcctaaggatttcagagtgaggcaaagcagtcggcaaatctaccctggcttttcgtataaaaatcctctcgtctaggtaccctggctcactgaa

SEQ ID NO: 733480 - DNA, 120 bp, Artificial Sequence
  ENSG00000198822_3 (sequence is synthesized)
gactctgcagatatacccttataagagggagggtgggggagggaaaagaacgagagagggaggaaagaatgaaaaggagaggatgccaggaggtccgtgcttctgccaagagtcccaatt

SEQ ID NO: 733481 - DNA, 120 bp, Artificial Sequence
  ENSG00000198822_4 (sequence is synthesized)
agatgcgacggcttcagcctggtcaaggtgaaggaaagttgcttccgcgcctaggaagtgggtttgcctgataagagaaggaggaggggactcggctgggaagagctcccctcccctccg

SEQ ID NO: 733482 - DNA, 120 bp, Artificial Sequence
  ENSG00000198822_5 (sequence is synthesized)
cggaagaccactgggtcccctctttccccaacctcctccctctcttctactccacccctccgttttcccactccccactgactcggatgcctggatgttctgccaccgggcagtggtcca

SEQ ID NO: 733483 - DNA, 120 bp, Artificial Sequence
  ENSG00000198822_6 (sequence is synthesized)
gcgtgcagccgggagggggcaggggcagggggcactgtgacaggaagctgcgcgcacaagttggccatttcgagggcaaaataagttctcccttggatttggaaaggacaaagccagtaa

SEQ ID NO: 733484 - DNA, 120 bp, Artificial Sequence
  ENSG00000198822_7 (sequence is synthesized)
gctacctcttttgtgtcggatgaggaggaccaaccatgagccagagcccgggtgcaggctcaccgccgccgctgccaccgcggtcagctccagttcctgccaggagttgtcggtgcgagg

SEQ ID NO: 733485 - DNA, 120 bp, Artificial Sequence
  ENSG00000198822_8 (sequence is synthesized)
aattttgtgacaggctctgttagtctgttcctcccttatttgaaggacaggccaaagatccagtttggaaatgagagaggactagcatgacacattggctccaccattgatatctcccag

SEQ ID NO: 733486 - DNA, 120 bp, Artificial Sequence
  ENSG00000198822_9 (sequence is synthesized)
aggtacagaaacaggattcatgaagatgttgacaagactgcaagttcttaccttagctttgttttcaaagggatttttactctctttaggggaccataactttctaaggagagagattaa

SEQ ID NO: 733487 - DNA, 120 bp, Artificial Sequence
  ENSG00000198822_10 (sequence is synthesized)
aatagaaggtgaccttgttttagggggcctgtttcctattaacgaaaaaggcactggaactgaagaatgtgggcgaatcaatgaagaccgagggattcaacgcctggaagccatgttgtt

SEQ ID NO: 733488 - DNA, 120 bp, Artificial Sequence
  ENSG00000198822_11 (sequence is synthesized)
tgctattgatgaaatcaacaaagatgattacttgctaccaggagtgaagttgggtgttcacattttggatacatgttcaagggatacctatgcattggagcaatcactggagtttgtcag

SEQ ID NO: 733489 - DNA, 120 bp, Artificial Sequence
  ENSG00000198822_12 (sequence is synthesized)
ggcatctttgacaaaagtggatgaagctgagtatatgtgtcctgatggatcctatgccattcaagaaaacatcccacttctcattgcaggggtcattggtggctcttatagcagtgtttc

SEQ ID NO: 733490 - DNA, 120 bp, Artificial Sequence
  ENSG00000198822_13 (sequence is synthesized)
catacaggtggcaaacctgctgcggctcttccagatccctcagatcagctacgcatccaccagcgccaaactcagtgataagtcgcgctatgattactttgccaggaccgtgccccccga

SEQ ID NO: 733491 - DNA, 120 bp, Artificial Sequence
  ENSG00000198822_14 (sequence is synthesized)
cttctaccaggccaaagccatggctgagatcttgcgcttcttcaactggacctacgtgtccacagtagcctccgagggtgattacggggagacagggatcgaggccttcgagcaggaagc

SEQ ID NO: 733492 - DNA, 120 bp, Artificial Sequence
  ENSG00000198822_15 (sequence is synthesized)
ccgcctgcgcaacatctgcatcgctacggcggagaaggtgggccgctccaacatccgcaagtcctacgacagcgtgatccgagaactgttgcagaagcccaacgcgcgcgtcgtggtcct

SEQ ID NO: 733493 - DNA, 120 bp, Artificial Sequence
  ENSG00000198822_16 (sequence is synthesized)
cttcatgcgcagcgacgactcgcgggagctcattgcagccgccagccgcgccaatgcctccttcacctgggtggccagcgacggctggggcgcgcaggagagcatcatcaagggcagcga

SEQ ID NO: 733494 - DNA, 120 bp, Artificial Sequence
  ENSG00000198822_17 (sequence is synthesized)
tccagagcctcaacccctacaacaaccaccgcaacccctggttccgggacttctgggagcaaaagtttcagtgcagcctccagaacaaacgcaaccacaggcgcgtctgcgacaagcacc

SEQ ID NO: 733495 - DNA, 120 bp, Artificial Sequence
  ENSG00000198822_18 (sequence is synthesized)
tggccatcgacagcagcaactacgagcaagagtccaagatcatgtttgtggtgaacgcggtgtatgccatggcccacgctttgcacaaaatgcagcgcaccctctgtcccaacactacca

SEQ ID NO: 733496 - DNA, 120 bp, Artificial Sequence
  ENSG00000198822_19 (sequence is synthesized)
agctttgtgatgctatgaagatcctggatgggaagaagttgtacaaggattacttgctgaaaatcaacttcacggctccattcaacccaaataaagatgcagatagcatagtcaagtttg

SEQ ID NO: 733497 - DNA, 120 bp, Artificial Sequence
  ENSG00000198822_20 (sequence is synthesized)
acacttttggagatggaatggggcgatacaacgtgttcaatttccaaaatgtaggtggaaagtattcctacttgaaagttggtcactgggcagaaaccttatcgctagatgtcaactcta

SEQ ID NO: 733498 - DNA, 120 bp, Artificial Sequence
  ENSG00000198822_21 (sequence is synthesized)
tccactggtcccggaactcagtccccacttcccagtgcagcgacccctgtgcccccaatgaaatgaagaatatgcaaccaggggatgtctgctgctggatttgcatcccctgtgaaccct

SEQ ID NO: 733499 - DNA, 120 bp, Artificial Sequence
  ENSG00000198822_22 (sequence is synthesized)
acgaatacctggctgatgagtttacctgtatggattgtgggtctggacagtggcccactgcagacctaactggatgctatgaccttcctgaggactacatcaggtgggaagacgcctggg

SEQ ID NO: 733500 - DNA, 120 bp, Artificial Sequence
  ENSG00000198822_23 (sequence is synthesized)
ccattggcccagtcaccattgcctgtctgggttttatgtgtacatgcatggttgtaactgtttttatcaagcacaacaacacacccttggtcaaagcatcgggccgagaactctgctaca

SEQ ID NO: 733501 - DNA, 120 bp, Artificial Sequence
  ENSG00000198822_24 (sequence is synthesized)
tcttattgtttggggttggcctgtcatactgcatgacattcttcttcattgccaagccatcaccagtcatctgtgcattgcgccgactcgggctggggagttccttcgctatctgttact

SEQ ID NO: 733502 - DNA, 120 bp, Artificial Sequence
  ENSG00000198822_25 (sequence is synthesized)
cagccctgctgaccaagacaaactgcattgcccgcatcttcgatggggtcaagaatggcgctcagaggccaaaattcatcagccccagttctcaggttttcatctgcctgggtctgatcc

SEQ ID NO: 733503 - DNA, 120 bp, Artificial Sequence
  ENSG00000198822_26 (sequence is synthesized)
tggtgcaaattgtgatggtgtctgtgtggctcatcctggaggccccaggcaccaggaggtatacccttgcagagaagcgggaaacagtcatcctaaaatgcaatgtcaaagattccagca

SEQ ID NO: 733504 - DNA, 120 bp, Artificial Sequence
  ENSG00000198822_27 (sequence is synthesized)
tgttgatctctcttacctacgatgtgatcctggtgatcttatgcactgtgtacgccttcaaaacgcggaagtgcccagaaaatttcaacgaagctaagttcataggttttaccatgtaca

SEQ ID NO: 733505 - DNA, 120 bp, Artificial Sequence
  ENSG00000198822_28 (sequence is synthesized)
ccacgtgcatcatctggttggccttcctccctatattttatgtgacatcaagtgactacagagtgcagacgacaaccatgtgcatctctgtcagcctgagtggctttgtggtcttgggct

SEQ ID NO: 733506 - DNA, 120 bp, Artificial Sequence
  ENSG00000198822_29 (sequence is synthesized)
gtttgtttgcacccaaggttcacatcatcctgtttcaaccccagaagaatgttgtcacacacagactgcacctcaacaggttcagtgtcagtggaactgggaccacatactctcagtcct

SEQ ID NO: 733507 - DNA, 120 bp, Artificial Sequence
  ENSG00000198822_30 (sequence is synthesized)
ctgcaagcacgtatgtgccaacggtgtgcaatgggcgggaagtcctcgactccaccacctcatctctgtgattgtgaattgcagttcagttcttgtgtttttagactgttagacaaaagt

SEQ ID NO: 733508 - DNA, 120 bp, Artificial Sequence
  ENSG00000198822_31 (sequence is synthesized)
gctcacgtgcagctccagaatatggaaacagagcaaaagaacaaccctagtacctttttttagaaacagtacgataaattatttttgaggactgtatatagtgatgtgctagaactttct

SEQ ID NO: 733509 - DNA, 120 bp, Artificial Sequence
  ENSG00000198822_32 (sequence is synthesized)
aggctgagtctagtgcccctattattaacaattcccccagaacatggaaataaccattgtttacagagctgagcattggtgacagggtctgacatggtcagtctactaaaaaacaaaaaa

SEQ ID NO: 733510 - DNA, 120 bp, Artificial Sequence
  ENSG00000198822_33 (sequence is synthesized)
aaaacaaaagaaaaaaataaaaatacggtggcaatattatgtaaccttttttcctatgaagttttttgtaggtccttgttgtaactaatttaggatgagtttctatgttgtatattaaag

SEQ ID NO: 733511 - DNA, 120 bp, Artificial Sequence
  ENSG00000198822_34 (sequence is synthesized)
atgttgtatattaaagttacattatgtgtaacagattgattttctcagcacaaaataaaaagcatctgtattaatgtaaagatactgagaataaaaccttcaaggttttccagcatggtg

SEQ ID NO: 733512 - DNA, 120 bp, Artificial Sequence
  ENSG00000198822_35 (sequence is synthesized)
agttcctgccaggagttgtcggtgcgaggtaagggtcccagaggaggacgtgtccctctggagggcgcccagccagggcgcggaagctcgggtgccgcgtggggcaggcgcagccgggaa

SEQ ID NO: 733513 - DNA, 120 bp, Artificial Sequence
  ENSG00000198824_0 (sequence is synthesized)
gcgcacccggatcccggctcctgcatccagtcgccattcgggaggccgctgcgctgcagggcctcgcggagccgcccgcgaccgcgagccgggccctccgcgcggtccatcgcccactgg

SEQ ID NO: 733514 - DNA, 120 bp, Artificial Sequence
  ENSG00000198824_1 (sequence is synthesized)
acgccgcccgcggccggaccggttcaacttctcatctttgttcttcttcatatactataggctgtttgctgtggtttagtcaaaaagccatgtagaatgcctgccttttgaagaccactt

SEQ ID NO: 733515 - DNA, 120 bp, Artificial Sequence
  ENSG00000198824_2 (sequence is synthesized)
ttaaggtgtctagtaagacagcagcagtattgaaagtttttaaagaatataaccgtgtgtgttggtaacagacagaagaatggaagcattccaggaacttcgtaaaccatcagcacgttt

SEQ ID NO: 733516 - DNA, 120 bp, Artificial Sequence
  ENSG00000198824_3 (sequence is synthesized)
ggagtgtgaccattgcagtttcagaggcacagactatgaaaatgtacaaatccatatgggtaccatccatccagaattttgtgatgaaatggatgctggtgggctaggcaaaatgatatt

SEQ ID NO: 733517 - DNA, 120 bp, Artificial Sequence
  ENSG00000198824_4 (sequence is synthesized)
ttaccagaaaagtgcaaagttatttcactgccataaatgcttcttcaccagcaagatgtactctaatgtatactatcacatcacatccaaacatgcatccccagacaaatggaatgataa

SEQ ID NO: 733518 - DNA, 120 bp, Artificial Sequence
  ENSG00000198824_5 (sequence is synthesized)
accaaaaaatcagttgaacaaagaaacagatcctgtgaaaagccctcctcttcctgaacaccagaaaataccctgcaattcagcagaaccaaaatccatacctgccctttcaatggaaac

SEQ ID NO: 733519 - DNA, 120 bp, Artificial Sequence
  ENSG00000198824_6 (sequence is synthesized)
acagaaacttggttcagttttgtctccagaatcgccaaaacctactcctcttactcccctggagcctcagaaacctggctctgttgtttctcctgagctacagacacctcttccttctcc

SEQ ID NO: 733520 - DNA, 120 bp, Artificial Sequence
  ENSG00000198824_7 (sequence is synthesized)
tgagccttcaaaacctgcctctgtttcttctcctgaacctccaaaatcagtccctgtttgtgagtctcagaaacttgcccctgttccttctccagaaccacagaaacctgcccctgtatc

SEQ ID NO: 733521 - DNA, 120 bp, Artificial Sequence
  ENSG00000198824_8 (sequence is synthesized)
tcctgagtcagtaaaggctactcttagtaatcccaaaccccagaagcagtctcatttcccggaaacattggggccaccttcagcctcatctccagagtcaccagttctagctgcttcccc

SEQ ID NO: 733522 - DNA, 120 bp, Artificial Sequence
  ENSG00000198824_9 (sequence is synthesized)
agaaccttggggaccatccccagctgcatctccagaatctcggaagtcagcccggactacctcccctgagccaaggaagccatccccttcagagtctcctgaaccttggaagccgttccc

SEQ ID NO: 733523 - DNA, 120 bp, Artificial Sequence
  ENSG00000198824_10 (sequence is synthesized)
tgctgtctccccagagcctaggagaccagcccccgctgtgtcaccaggctcttggaaaccagggccacctgggtcccctaggccttggaaatccaatccttcagcatcatcaggaccttg

SEQ ID NO: 733524 - DNA, 120 bp, Artificial Sequence
  ENSG00000198824_11 (sequence is synthesized)
gaagccagctaaacctgctccatctgtgtctcctggaccttggaaaccaattccttctgtatctcctggaccttggaaaccaactccatctgtgtcttctgcatcctggaaatcttcatc

SEQ ID NO: 733525 - DNA, 120 bp, Artificial Sequence
  ENSG00000198824_12 (sequence is synthesized)
agtctcacccagctcctggaagtctccccctgcatctcctgagtcatggaagtctggcccaccagaactccgaaagacagctcccacgttgtctcctgaacattggaaggcagttccccc

SEQ ID NO: 733526 - DNA, 120 bp, Artificial Sequence
  ENSG00000198824_13 (sequence is synthesized)
agtgtctccagagcttcgcaaacccggcccaccactatccccagagatccgtagtccagcaggatctccagagctcagaaaaccctcagggtcaccagatctttggaagctttctcctga

SEQ ID NO: 733527 - DNA, 120 bp, Artificial Sequence
  ENSG00000198824_14 (sequence is synthesized)
tcagcggaaaacttctcctgcttcacttgatttccctgagtcccagaaaagttcccgtggtggttctcctgatctctggaagtcttccttttttattgagcctcagaaacctgtcttccc

SEQ ID NO: 733528 - DNA, 120 bp, Artificial Sequence
  ENSG00000198824_15 (sequence is synthesized)
atcgatactgagcctagaaaacctgccctgtttcccgagcctgccaaaacagcccctcctgcttctccagaagcacgcaaacgtgccctttttccagagccccggaagcatgcccttttc

SEQ ID NO: 733529 - DNA, 120 bp, Artificial Sequence
  ENSG00000198824_16 (sequence is synthesized)
cctgaactccccaaatctgctctattctcagaatcacagaaggctgttgagcttggtgatgaactacaaatagatgccatagatgatcaaaaatgtgatattttggttcaggaagaactt

SEQ ID NO: 733530 - DNA, 120 bp, Artificial Sequence
  ENSG00000198824_17 (sequence is synthesized)
ctagcttcacctaagaaactcttagaagatactttatttccttcctcaaagaagctcaagaaagacaaccaagagagctcagacgctgagcttagtagtagtgagtacataaaaacagat

SEQ ID NO: 733531 - DNA, 120 bp, Artificial Sequence
  ENSG00000198824_18 (sequence is synthesized)
ttggatgcgatggatattaagggccaggaatcaagcagtgatcaagagcaggttgatgtggaatccattgattttagcaaagagaacaaaatggacatgactagtccagagcagtctaga

SEQ ID NO: 733532 - DNA, 120 bp, Artificial Sequence
  ENSG00000198824_19 (sequence is synthesized)
aatgtgctacagtttactgaagaaaaagaagcttttatctctgaagaggagattgcaaaatacatgaagcgtggaaaaggaaagtattattgcaaaatttgttgctgtcgtgctatgaaa

SEQ ID NO: 733533 - DNA, 120 bp, Artificial Sequence
  ENSG00000198824_20 (sequence is synthesized)
aaaggtgctgttttgcatcatttggttaataagcataatgttcatagcccttacaaatgcacaatctgtggaaaggcttttcttttggaatctctccttaaaaatcatgtagcagcccat

SEQ ID NO: 733534 - DNA, 120 bp, Artificial Sequence
  ENSG00000198824_21 (sequence is synthesized)
gggcaaagtttacttaaatgtccacgttgtaattttgaatcaaatttcccaagaggttttaagaaacatttaactcattgtcaaagccggcataatgaagaggcaaataaaaagctaatg

SEQ ID NO: 733535 - DNA, 120 bp, Artificial Sequence
  ENSG00000198824_22 (sequence is synthesized)
gaagctcttgaaccgccactggaggagcagcaaatttgataacacagtgtgaatatttgttctacaaaggtgtttgttggaaccattctttgtaagtatagcttatcagatagcatagtt

SEQ ID NO: 733536 - DNA, 120 bp, Artificial Sequence
  ENSG00000198824_23 (sequence is synthesized)
ggatcagtagatgacatgtatggtgtaccgtgtttcactgtctcagttgtgttactaagaatgagcatttgatcatttttttctggtctctgtctatgtgactatcttgtaagtcaataa

SEQ ID NO: 733537 - DNA, 120 bp, Artificial Sequence
  ENSG00000198824_24 (sequence is synthesized)
atttctgtatagtccagatggattaaacttctcatttcttttaaatatgtatgaataataatacaaggaagtaggcattccatttaataatcaagagcaagttgtactcaaagcattcag

SEQ ID NO: 733538 - DNA, 120 bp, Artificial Sequence
  ENSG00000198824_25 (sequence is synthesized)
ttaaagtgtatctgtgtgtggaactaatttcagacaatagaaaatattagttgaaatgtttaagaattaggcatgaaaaataaatttgagaaattttgtttccttacatgtatttttaaa

SEQ ID NO: 733539 - DNA, 120 bp, Artificial Sequence
  ENSG00000198824_26 (sequence is synthesized)
tcataagagttattttctatctgatgtaaaattagtttataaatcttaatcagcttctagatgtttattagcttttatgtcatgaaatgttggagtctcagggttgctgattttctgcta

SEQ ID NO: 733540 - DNA, 120 bp, Artificial Sequence
  ENSG00000198824_27 (sequence is synthesized)
atgggaaaaattgactaagtctttaaaatagtttgcagccttctcccacaggagacaagtgaaagataagtgtgattttagatctttcttgtccatagttgttttcagtggagtcttcca

SEQ ID NO: 733541 - DNA, 120 bp, Artificial Sequence
  ENSG00000198824_28 (sequence is synthesized)
ttctgtatcttaccctaagatctggttcttccctccccatccccaccccccacccaccgcctgccagctcacactaatagatgattcttaattgccaaatgtgttagagtttgtatatcc

SEQ ID NO: 733542 - DNA, 120 bp, Artificial Sequence
  ENSG00000198824_29 (sequence is synthesized)
tactcctgggccttacatgtcgcctgttggggcttaagaccaggttgataagtaggaactgaaagtcttccagattcacagtagaaaattttatagacatttctgttaaagaaatatatc

SEQ ID NO: 733543 - DNA, 120 bp, Artificial Sequence
  ENSG00000198824_30 (sequence is synthesized)
gattttatgtttttcaattatgttactgtaaataccttgtacctgttcatggattattttattctaaaatattttgtcaaatgtgtatcaaccaaattaaaaagaaaggttttcatgtca

SEQ ID NO: 733544 - DNA, 120 bp, Artificial Sequence
  ENSG00000198824_31 (sequence is synthesized)
agccactgcgcccagcctatacatttttttaaaataatggttttgtaattaataaagggagagcctgcatttctaatctgtactgttctttgaggaggagtaaatatcattaccgtcaat

SEQ ID NO: 733545 - DNA, 120 bp, Artificial Sequence
  ENSG00000198824_32 (sequence is synthesized)
aagggaaggtgttcagtctttctcattaaagagaagcacattaacacaatagtgaaatactagctttcacctaggttgtagcaaggattaggaatttataggaaattgtctctcatatat

SEQ ID NO: 733546 - DNA, 120 bp, Artificial Sequence
  ENSG00000198824_33 (sequence is synthesized)
acacgttgttatgcagtaatagaagtttttgagagtttggtaaaatgtatcaattttacacacaaatggccaagtaatccattgctaggaattttccctgcagaaataccctcacatgca

SEQ ID NO: 733547 - DNA, 120 bp, Artificial Sequence
  ENSG00000198824_34 (sequence is synthesized)
cagataagtacagggaaagtcagtgcttattccatatgtaaaaatgtcttagagataaattctaaatgagagtaagttgccagataatatgtttaatatcccatttgtgtaaagcatgtg

SEQ ID NO: 733548 - DNA, 120 bp, Artificial Sequence
  ENSG00000198824_35 (sequence is synthesized)
tgttgatcaatatatgcttaggacatttcttccaggacacatgagtacactggctacccctagggactgacactctgtatctcgtactgtgtgaatgtgtttttaactgtgagcttctat

SEQ ID NO: 733549 - DNA, 120 bp, Artificial Sequence
  ENSG00000198824_36 (sequence is synthesized)
tccctttactacttaagaagactggtttacaatttttttaaattcatgttttccggcaactgtgttccagctgctggggtgtcctctgatttgccctttggttggtatgcgccttcacat

SEQ ID NO: 733550 - DNA, 120 bp, Artificial Sequence
  ENSG00000198824_37 (sequence is synthesized)
cattcaggatctctgctggaatgtcccatgcatagaggtcttttccaacggcctctacatcactctccaccttatctttccaactcatgaacgccatattgcaaagcactgctttaagcc

SEQ ID NO: 733551 - DNA, 120 bp, Artificial Sequence
  ENSG00000198824_38 (sequence is synthesized)
taagtgcctagaacattgtaggacacaaagttatttatttattaaatgaattaatagaatactatattgggatagattaaacattacaaaatatgttgacatgaaatcaagccagcatca

SEQ ID NO: 733552 - DNA, 120 bp, Artificial Sequence
  ENSG00000198824_39 (sequence is synthesized)
tgttttaaagtcatctttttatagctagatttaatttattaagtgctttctgcaaaagttttagtctcttgttcatccttaaatagccaagatttaattttgatattcactcatctttgt

SEQ ID NO: 733553 - DNA, 120 bp, Artificial Sequence
  ENSG00000198824_40 (sequence is synthesized)
gtgctgaggacttttgtactcggagtttgagagtcaaagtataaagcacatgcaatagctaattctagagtcaggctcacatcactgatagtcctatagcctggaccagagaaagtcagg

SEQ ID NO: 733554 - DNA, 120 bp, Artificial Sequence
  ENSG00000198824_41 (sequence is synthesized)
taacttctctgaacctgtttcttcatctgtaagtgaaaataatagttgagtcatatcattaggattaaatgagatgatgtatgtgaaactcctagcagagtgcctgggactgttctatat

SEQ ID NO: 733555 - DNA, 120 bp, Artificial Sequence
  ENSG00000198824_42 (sequence is synthesized)
ctcctttttcttcaaattctccctagagatactatcaaataaagcacgcactgttctagacttaaaattatgcagttatagaatggactgacagcattttattcagaattacagttcatg

SEQ ID NO: 733556 - DNA, 83 bp, Artificial Sequence
  ENSG00000198824_43 (sequence is synthesized)
agccggcatgatctcagctctctgcaacctccgacttctggtccaagcgattggcctgcctcagcctcccaagtagctgggac

SEQ ID NO: 733557 - DNA, 120 bp, Artificial Sequence
  ENSG00000198825_0 (sequence is synthesized)
gagaggcctctacggccgccgctgccgccgccgctgccggggcgcgttctcctcctaccggtcgggtgccccggggcgttccctctgccgctgcttctcggcgcggttcctacccggccg

SEQ ID NO: 733558 - DNA, 120 bp, Artificial Sequence
  ENSG00000198825_1 (sequence is synthesized)
ccgaggcgcgggctctggcggcctcgaccgactaggacgccccgtgcgccgcccgcgggccgccgcctccctgggcgcgcggggccagcatggagctcttccaagccaaggaccactaca

SEQ ID NO: 733559 - DNA, 120 bp, Artificial Sequence
  ENSG00000198825_2 (sequence is synthesized)
tacatcctgcagcagggcgagcgcgcgctgtggtgcagccgccgcgacggcggcctccagctccgacccgctactgatctacttcttgcctggaatcccatttgtttggggttggtagaa

SEQ ID NO: 733560 - DNA, 120 bp, Artificial Sequence
  ENSG00000198825_3 (sequence is synthesized)
ggtgttattgggaaaattcaacttcattcagatcttccatggtggcttattctaattcggcagaaagcattggtgggcaaactcccaggagaccatgaggtctgtaaagttaccaaaatt

SEQ ID NO: 733561 - DNA, 120 bp, Artificial Sequence
  ENSG00000198825_4 (sequence is synthesized)
gctgtgctctcactttctgaaatggaacctcaggatcttgagctagagctctgtaagaagcatcattttggtattaacaaaccagagaagatcataccatctcctgatgactcaaagttt

SEQ ID NO: 733562 - DNA, 120 bp, Artificial Sequence
  ENSG00000198825_5 (sequence is synthesized)
ctactgaagacctttacgcatattaaatccaatgtgtctgctcctaataaaaagaaagttaaggaaagtaaagagaaggagaagttggagaggagattacttgaagagttgctgaagatg

SEQ ID NO: 733563 - DNA, 120 bp, Artificial Sequence
  ENSG00000198825_6 (sequence is synthesized)
ttcatggactcagaatccttttattatagcttgacctatgacctgaccaattccgtgcagaggcagagcactggggagagggacggtcggcccctctggcagaaggttgatgaccgattt

SEQ ID NO: 733564 - DNA, 120 bp, Artificial Sequence
  ENSG00000198825_7 (sequence is synthesized)
ttttggaataaatacatgatacaagatcttactgagattggtactccagatgtggacttttggattatccccatgatccaaggttttgtgcagattgaagaacttgtggttaattatacc

SEQ ID NO: 733565 - DNA, 120 bp, Artificial Sequence
  ENSG00000198825_8 (sequence is synthesized)
gaatcatctgatgatgagaaaagcagcccagagaccccccctcaggagtccacctgtgtagatgatattcacccacgatttctagtggctctcatttcacgccgaagtaggcacagagca

SEQ ID NO: 733566 - DNA, 120 bp, Artificial Sequence
  ENSG00000198825_9 (sequence is synthesized)
ggaatgcgctataaacgaagaggagtggataaaaatggaaatgttgccaattatgtggagactgagcagttgattcatgttcataatcataccctgtcatttgttcaaacacgaggctct

SEQ ID NO: 733567 - DNA, 120 bp, Artificial Sequence
  ENSG00000198825_10 (sequence is synthesized)
gtgcctgtcttttggagccaggttgggtatcgatataacccaagaccgcggctggacagaagtgaaaaggaaactgttgcctatttctgtgcccatttcgaagaacaactgaacatttac

SEQ ID NO: 733568 - DNA, 120 bp, Artificial Sequence
  ENSG00000198825_11 (sequence is synthesized)
aaaaaacaggttattattaacttggtagaccaggcaggaagagagaagattattggcgatgcttacctgaagcaagtgttgcttttcaacaactcacacctcacttacgtttcgtttgac

SEQ ID NO: 733569 - DNA, 120 bp, Artificial Sequence
  ENSG00000198825_12 (sequence is synthesized)
ttccatgagcactgccgaggaatgaagtttgagaatgttcagacactaacagatgccatttatgacattattcttgatatgaagtggtgttgggttgatgaagctggggtaatatgtaag

SEQ ID NO: 733570 - DNA, 120 bp, Artificial Sequence
  ENSG00000198825_13 (sequence is synthesized)
caggaagggatttttcgtgttaattgtatggactgcctggatcgcaccaacgtggtccaagctgccatcgcgagagtggtcatggaacagcagctgaaaaaattaggtgtgatgcccccg

SEQ ID NO: 733571 - DNA, 120 bp, Artificial Sequence
  ENSG00000198825_14 (sequence is synthesized)
gaacagccattacctgtgaaatgtaatcgcatctaccagataatgtgggccaataatggtgactccattagcagacagtatgctgggacagctgctctgaagggtgactttacaaggaca

SEQ ID NO: 733572 - DNA, 120 bp, Artificial Sequence
  ENSG00000198825_15 (sequence is synthesized)
ggagaaaggaagttagcaggagttatgaaagatggagtgaactcagcaaacagatattacctcaaccgatttaaggatgcttataggcaagctgttatagatttgatgcaaggcattcca

SEQ ID NO: 733573 - DNA, 120 bp, Artificial Sequence
  ENSG00000198825_16 (sequence is synthesized)
gtgacagaagatctttattccatatttaccaaggagaaagaacatgaagctttgcataaggaaaatcagagaagccaccaggaactaattagccagctcttacaaagttacatgaagtta

SEQ ID NO: 733574 - DNA, 120 bp, Artificial Sequence
  ENSG00000198825_17 (sequence is synthesized)
ctactgcctgatgatgagaagttccatgggggctgggccctcattgactgtgaccctagcctcattgatgctactcacagagacgtggatgtgctgttactgctttctaactctgcctac

SEQ ID NO: 733575 - DNA, 120 bp, Artificial Sequence
  ENSG00000198825_18 (sequence is synthesized)
tacgtggcctattatgatgatgaagttgataaagtaaaccagtatcaacgactaagtctagaaaacctggaaaaaattgaaataggccctgaacccactctttttggtaagccaaagttc

SEQ ID NO: 733576 - DNA, 120 bp, Artificial Sequence
  ENSG00000198825_19 (sequence is synthesized)
tcctgcatgcgactgcactacagatacaaagaagcgagtggctatttccacacattgcgagctgtaatgcgtaatcctgaagaggatggaaaagatacccttcagtgcattgcagagatg

SEQ ID NO: 733577 - DNA, 120 bp, Artificial Sequence
  ENSG00000198825_20 (sequence is synthesized)
gaggaagagcagtaaacctcacgaagacatcattggtatcaggtctcaaaaccaaggttctttggcccagggaaagaattttttaatgagcaaattttcatctctaaatcaaaaagtgaa

SEQ ID NO: 733578 - DNA, 120 bp, Artificial Sequence
  ENSG00000198825_21 (sequence is synthesized)
gcagaccaaatccaatgtaaatattggcaacctccgaaagctaggaaactttaccaaacctgaaatgaaagttaactttctaaaaccaaacttaaaagtaaatctttggaaatcagatag

SEQ ID NO: 733579 - DNA, 120 bp, Artificial Sequence
  ENSG00000198825_22 (sequence is synthesized)
tagtcttgaaactatggaaaacacaggagtgatggataaggttcaggcagagtctgatggggacatgtcttcagataatgactcataccactctgatgaattccttacaaattctaagtc

SEQ ID NO: 733580 - DNA, 120 bp, Artificial Sequence
  ENSG00000198825_23 (sequence is synthesized)
tgatgaagacaggcagctagctaactcattagagagtgtagggccaatagattacgttcttcctagttgtggtattattgcctcagcgcctcgattgggcagtcggtcccagtctcttag

SEQ ID NO: 733581 - DNA, 120 bp, Artificial Sequence
  ENSG00000198825_24 (sequence is synthesized)
cagcacagatagtagcgttcatgctccttcagagattactgttgctcatgggagtgggcttggaaaaggccaggagtctcctttgaagaaaagtccttctgctggcgacgtacacatatt

SEQ ID NO: 733582 - DNA, 120 bp, Artificial Sequence
  ENSG00000198825_25 (sequence is synthesized)
gactggctttgccaagcctatggatatttactgccacagatttgtgcaagatgcacagaacaaagtgacccacctatcagagaccagatctgtgtctcagcaggctagtcaggaaagaaa

SEQ ID NO: 733583 - DNA, 120 bp, Artificial Sequence
  ENSG00000198825_26 (sequence is synthesized)
tcaaatgaccaatcaagtttcaaatgaaacccaatcagaatcaacagaacagacaccttctcggccatcgcaattagatgtctctctttctgcaacaggcccacagtttttgtcagttga

SEQ ID NO: 733584 - DNA, 120 bp, Artificial Sequence
  ENSG00000198825_27 (sequence is synthesized)
gccagcgcattcagttgcatctcaaaaaacccccacctccgcttccagcatgcttgaacttgagacagggcttcatgtaactccttctccttcagagagcagtagcagcagagcagtctc

SEQ ID NO: 733585 - DNA, 120 bp, Artificial Sequence
  ENSG00000198825_28 (sequence is synthesized)
tccctttgccaagattcgaagttccatggtccaggttgctagtattacccaagctggattaacccatgggataaactttgcagtgtcaaaagttcagaagagtcctccagaacctgaaat

SEQ ID NO: 733586 - DNA, 120 bp, Artificial Sequence
  ENSG00000198825_29 (sequence is synthesized)
cattaatcaagtccagcaaaatgaacttaaaaagatgtttatacaatgccagacacggataattcagatttagcttttagccataagaatccttccatggcttttatttaaaaatatgaa

SEQ ID NO: 733587 - DNA, 120 bp, Artificial Sequence
  ENSG00000198825_30 (sequence is synthesized)
attttcacctcttggggtattttaattgtactgtctgaacccagggatcacaaattctgttcattggaaagggttttaaacggagtcggaacctgagtagatttccaaattttacagcca

SEQ ID NO: 733588 - DNA, 120 bp, Artificial Sequence
  ENSG00000198825_31 (sequence is synthesized)
ggactacagaagtgcatcattctagaatgtgtagacctgagtagcttatacactacagagcactttgcttatttgaaagtaattcagcaacaggtcactttgggatataacctgaacctt

SEQ ID NO: 733589 - DNA, 120 bp, Artificial Sequence
  ENSG00000198825_32 (sequence is synthesized)
tttttggagtggggtgggtagactacagtagacacaagggctggacatgcagatgcttaggggattagcgtttttcataatttgttctgtttgtcagttcattcctgtgtgttcttacct

SEQ ID NO: 733590 - DNA, 120 bp, Artificial Sequence
  ENSG00000198825_33 (sequence is synthesized)
ctacaaagtaaattacacatttagtttttagtgactttaacatgttactgaagcatttgaatataaagctattttagttttgatggcttaactgttccctgaggagttgagggttattga

SEQ ID NO: 733591 - DNA, 120 bp, Artificial Sequence
  ENSG00000198825_34 (sequence is synthesized)
cactagagaaatgaattctcatttgatcctaattttccccgtattctacttgaacacattaaaaatactctgctgcctatacaatgtaaacctaggagcattaagacttgtcacacagta

SEQ ID NO: 733592 - DNA, 120 bp, Artificial Sequence
  ENSG00000198825_35 (sequence is synthesized)
aacctgatacatcagaggtgaataccagcacctattaggtttcattttgctgttttcaggaatgtaagaacacccatattggctactggaaattctagaagtcagtcaggttttaattta

SEQ ID NO: 733593 - DNA, 120 bp, Artificial Sequence
  ENSG00000198825_36 (sequence is synthesized)
ttctagaagtcagtcaggttttaatttattccaggaggggcatcctcgacatcttatgtagatgatccacaacttcaaaatttagtctgggcctagtgcagtggctcacacctataatcc

SEQ ID NO: 733594 - DNA, 66 bp, Artificial Sequence
  ENSG00000198825_37 (sequence is synthesized)
agtttctagctacgcaggaggattgcttgagcccatgagattgaggctgcagtgagctgtgatcgt

SEQ ID NO: 733595 - DNA, 120 bp, Artificial Sequence
  ENSG00000198825_38 (sequence is synthesized)
agtgagctgtgatcgtgccactgacctccagcctgggggacagagcaagaccgtgtctcaaaaacaatttagtctgaaacacaattgtgctgaatctgtctgactataactctgaccaca

SEQ ID NO: 733596 - DNA, 120 bp, Artificial Sequence
  ENSG00000198825_39 (sequence is synthesized)
cagaaccagggctgcccctgtaatccccacagtaagaaagttgtatggcatattccaacaagtattggttcgtctggtgtctttagagctttactctgttgaagtgactgattctcaact

SEQ ID NO: 733597 - DNA, 120 bp, Artificial Sequence
  ENSG00000198825_40 (sequence is synthesized)
gaacattatgtcgttactttgataagcattccacttttgttatttattagtgctatcttttttttttacgtgttaaatcttgtgattattaaaataaagtaccattgtaatttaaagtga

SEQ ID NO: 733598 - DNA, 120 bp, Artificial Sequence
  ENSG00000198825_41 (sequence is synthesized)
agccttattgtatcccaagccttattcaggcctcacatttaatactttgtcacaaattgctttatggtaatgtattccatttggatattcatactgcttttttgggacattgattttttt

SEQ ID NO: 733599 - DNA, 120 bp, Artificial Sequence
  ENSG00000198825_42 (sequence is synthesized)
tcaatacactgctaaagatactgttttaatatattttctggtgaatgttttctcatcactgcttcctattttattttagctactgatctacttcttgcctggaatcccatttgtttgggg

SEQ ID NO: 733600 - DNA, 120 bp, Artificial Sequence
  ENSG00000198825_43 (sequence is synthesized)
gcctttctccgagacagcgccgagcccctaccccagtgcggagcagaaggggctggcgaccctcgtccttcccaccgcgtcacgcggccgcccttggggcttggggcccaggccgagggg

SEQ ID NO: 733601 - DNA, 120 bp, Artificial Sequence
  ENSG00000198825_44 (sequence is synthesized)
agggggtcccctccggcagaaagttccagcaaggtgcacctggccgtaaaggcctcttcctccttggagtagttcttacatggccttcgccagaagttctgggttcgaattccgatctgg

SEQ ID NO: 733602 - DNA, 120 bp, Artificial Sequence
  ENSG00000198825_45 (sequence is synthesized)
agcggttgcgccagttccgtctagggctctgctggacactcactccctgttgccatcccgtgtgttcttggtcccttattattaaagctactgatctacttcttgcctggaatcccattt

SEQ ID NO: 733603 - DNA, 120 bp, Artificial Sequence
  ENSG00000198825_46 (sequence is synthesized)
tttccagtgtttattgtaattataaaataggcttcagtgtatatactttggttgttgaggtgtaccctcagggtaaattcccaaagatgggatcactggactgattaaagatcttccatg

SEQ ID NO: 733604 - DNA, 120 bp, Artificial Sequence
  ENSG00000198825_47 (sequence is synthesized)
attcgctgcaggcgcgaggttgggtgcaggcagctgtttgagcctcgaggcatcgacggacggacagacggacggactgactgacgatgccgcgctctcacaggcctccgcctaccgcgc

SEQ ID NO: 733605 - DNA, 120 bp, Artificial Sequence
  ENSG00000198825_48 (sequence is synthesized)
agcgggctgccactgccgcagcagccgagcccaagtctgagggcgttgtggctatgactttcaagatttttctcctttttgcagggcttatggttaaagttcctgtggggttatattttt

SEQ ID NO: 733606 - DNA, 120 bp, Artificial Sequence
  ENSG00000198825_49 (sequence is synthesized)
cctgcaaattacttcttttccaaagtctgatgttgatgtcccctgaagacagcggcttttatgcgaccattgttgcagtggtcgggcttcatgtggtgctggcaattttcgtcttcatag

SEQ ID NO: 733607 - DNA, 120 bp, Artificial Sequence
  ENSG00000198825_50 (sequence is synthesized)
tgtggaaggagggcttgccccagtggcgggaaaacaaaaacgaatagagcagcttcttcagagctgcagacgtggggggtggggaaatacctaaagggtttttgtcttgtttcttgttcg

SEQ ID NO: 733608 - DNA, 120 bp, Artificial Sequence
  ENSG00000198825_51 (sequence is synthesized)
tttttttttttttttttttttaaaggggaagggtgggtggggagggaattaaatatttactgcagctaagacttcagtaaaattgggggtggggggagggttgacattttccgactgcct

SEQ ID NO: 733609 - DNA, 120 bp, Artificial Sequence
  ENSG00000198825_52 (sequence is synthesized)
cattttccgactgcctgttacgtgccaagtgctttttgttaaggacataatgtttttgactggggatcatgtttggctgatgtaaatattaatgccaaaataggagctaggatgaaagta

SEQ ID NO: 733610 - DNA, 120 bp, Artificial Sequence
  ENSG00000198825_53 (sequence is synthesized)
acactgtaattagtagtagaatttatttcatattaaaatgtgtcatgacgtaatttttatggcttggctcaagcaacaattttcagagtgcaccctcattgatgctactcacagagacgt

SEQ ID NO: 733611 - DNA, 120 bp, Artificial Sequence
  ENSG00000198825_54 (sequence is synthesized)
ccactgcagggcaattcagaaatattcagtacctagatgctgagtgcttcgtccttctctctttgctcccctcagcttgttgctacattttgtgcttcagaatttcccacctcccttgtt

SEQ ID NO: 733612 - DNA, 120 bp, Artificial Sequence
  ENSG00000198825_55 (sequence is synthesized)
cctagtcttgagcccgtctccttggtgcagatggttccacctcccgggtagaagtgatgcttgaagaagtcacatgaatgcgacccacagttctgagctccccagagtgtggttacacaa

SEQ ID NO: 733613 - DNA, 120 bp, Artificial Sequence
  ENSG00000198825_56 (sequence is synthesized)
gaagtgatggcctgttttggcttttgtaggaaaactgaaataatgtgtttctgaactattgttcctgcaccttttctaggttgatgaccgatttttttggaataaatacatgatacaaga

SEQ ID NO: 733614 - DNA, 120 bp, Artificial Sequence
  ENSG00000198825_57 (sequence is synthesized)
tacctgctgtgtctctgtgtgctggcccactgcagggcaattcagaaatattcactgcatagtactccattgcatggatgtgccatagtttattcaaccactgtcctgtatctggacatt

SEQ ID NO: 733615 - DNA, 120 bp, Artificial Sequence
  ENSG00000198825_58 (sequence is synthesized)
acactgtaattagtagtagaatttatttcatattaaaatgtgtcatgacgtaatttttatggcttggctcaagcaacaattttcagagtgcacattaagactgttggactcaagctacaa

SEQ ID NO: 733616 - DNA, 120 bp, Artificial Sequence
  ENSG00000198825_59 (sequence is synthesized)
ggcttggctcaagcaacaattttcagagtgcacgtaagtatcaacgcgtaaaacttaacattttacagtgttatttggtattattctctatgaagctgtctggatcggtctccttttccc

SEQ ID NO: 733617 - DNA, 120 bp, Artificial Sequence
  ENSG00000198825_60 (sequence is synthesized)
attggttaattggttaatgctcagattttggctcctagaatcgatctgtgtgttcccggtcttggcatctcattatgtcatttgctgtattttttgatatattattgtacgtgcaaattg

SEQ ID NO: 733618 - DNA, 120 bp, Artificial Sequence
  ENSG00000198825_61 (sequence is synthesized)
gtgacttggcactgccgcgtcgcagttgccgcattcgccgcattcgctgcaggcgcgagcaacaattttcagagtgcaccctcattgatgctactcacagagacgtggatgtgctgttac

SEQ ID NO: 733619 - DNA, 120 bp, Artificial Sequence
  ENSG00000198825_62 (sequence is synthesized)
gtccgaagccttattgtatcccaagccttattcaggcctcacatttaatactttgtcacaaattgctttatgctactgatctacttcttgcctggaatcccatttgtttggggttggtag

SEQ ID NO: 733620 - DNA, 120 bp, Artificial Sequence
  ENSG00000198826_0 (sequence is synthesized)
gacccccccgtggtggctctgggtgtctgcggaggagctgggggcggaagcatgaggctaacggcttggcttcagtgaacgcaccgggatgtgcaggccgggaggtagaggcaggctgat

SEQ ID NO: 733621 - DNA, 120 bp, Artificial Sequence
  ENSG00000198826_1 (sequence is synthesized)
gggggagggaacgagcagcctgtgagacggggtgacggcggctaccagcccgggcgggcaccgggactggaagagttgcctgagcagccggctggtccggcggccaggctagggcggggg

SEQ ID NO: 733622 - DNA, 120 bp, Artificial Sequence
  ENSG00000198826_2 (sequence is synthesized)
cgagcgcccagttgagcctgctggggctggaggagcgagaagggttttcttcacatttcagagcgaaccagacggggacagtaaggtttggaggaagggggatcgttggaagtagcaaga

SEQ ID NO: 733623 - DNA, 120 bp, Artificial Sequence
  ENSG00000198826_3 (sequence is synthesized)
agtggagagaatctggcaatagacgagaaaccgaaagaatcagaaagaagtctatgtgagtagctgaaagcattgggtgaccagaaagaaggtcggtgtaagtgaaggaagagtgaggtg

SEQ ID NO: 733624 - DNA, 120 bp, Artificial Sequence
  ENSG00000198826_4 (sequence is synthesized)
tggctggatcaaagggctaagagaagcgggtctgtgtaagtggatgtgagtgaggatcaaggaaaagccgtggaagtggccgggggtcggggccgcagaagtgccagacggggccggaaa

SEQ ID NO: 733625 - DNA, 120 bp, Artificial Sequence
  ENSG00000198826_5 (sequence is synthesized)
gcagccgagcggagttcaaatttgagagcgtttggaaattggaagacttggtggcgaacgagggtcaggacctgcatcctgcctcagagagttatcgacgtatccggaatgtgggatcag

SEQ ID NO: 733626 - DNA, 120 bp, Artificial Sequence
  ENSG00000198826_6 (sequence is synthesized)
aggctggtgaggttggccctgttgcagcatctgcgggccttctatggtattaaggtgaagggtgtccgtgggcagtgcgatcgcaggagacatgaaacagcagccacggaaatagggggt

SEQ ID NO: 733627 - DNA, 120 bp, Artificial Sequence
  ENSG00000198826_7 (sequence is synthesized)
aaaatatttggagtaccttttaatgcactgccccattctgctgtaccagaatatggacacattccaagctttcttgtcgatgcttgcacatctttagaagaccatattcataccgaaggg

SEQ ID NO: 733628 - DNA, 120 bp, Artificial Sequence
  ENSG00000198826_8 (sequence is synthesized)
ctttttcggaaatcaggatctgtgattcgcctaaaagcactaaagaataaagtggatcatggtgaaggttgcctatcttctgcacctccttgtgatattgcgggacttcttaagcagttt

SEQ ID NO: 733629 - DNA, 120 bp, Artificial Sequence
  ENSG00000198826_9 (sequence is synthesized)
tttagggaactgccagagcccattctcccagctgatttgcatgaagcacttttgaaagctcaacagttaggcacagaggaaaagaataaagctacactgttgctctcctgtcttctggct

SEQ ID NO: 733630 - DNA, 120 bp, Artificial Sequence
  ENSG00000198826_10 (sequence is synthesized)
gaccacacagttcatgtattaagatacttctttaactttctcaggaatgtttctcttagatccagtgagaataagatggacagcagcaatcttgcagtaatatttgcaccgaatcttctt

SEQ ID NO: 733631 - DNA, 120 bp, Artificial Sequence
  ENSG00000198826_11 (sequence is synthesized)
cagacaagtgaaggacatgaaaagatgtcttctaacacagaaaagaagctacgattacaggctgcagtagtacagactcttatcgattatgcatcagatattgggcgtgtaccagatttt

SEQ ID NO: 733632 - DNA, 120 bp, Artificial Sequence
  ENSG00000198826_12 (sequence is synthesized)
atcctggaaaagataccagccatgttgggtattgatggtctctgtgctactccatcactggaaggctttgaagaaggtgaatatgaaactcctggtgaatataagagaaagagaagacaa

SEQ ID NO: 733633 - DNA, 120 bp, Artificial Sequence
  ENSG00000198826_13 (sequence is synthesized)
agtgtaggagattttgttagtggagcactaaataaatttaaacctaacagaacaccttctattacacctcaagaagaaagaattgcccagctatctgaatcaccagtgattcttacacca

SEQ ID NO: 733634 - DNA, 120 bp, Artificial Sequence
  ENSG00000198826_14 (sequence is synthesized)
aatgctaagcgtacattgccagtagattcttctcatggtttctcaagtaagaaaaggaagtccatcaagcacaattttaactttgagctgttgccaagtaatctcttcaatagcagttct

SEQ ID NO: 733635 - DNA, 120 bp, Artificial Sequence
  ENSG00000198826_15 (sequence is synthesized)
acaccggtatcagttcacatcgatacaagctcagaagggtcatctcagagttcactctctcctgtactcattggtggaaaccatttgatcactgcaggtgtgccaaggcgaagtaaaaga

SEQ ID NO: 733636 - DNA, 120 bp, Artificial Sequence
  ENSG00000198826_16 (sequence is synthesized)
attgcaggcaaaaaagtttgcagagtggaatcaggaaaagcaggctgcttttctcctaaaatcagccataaagaaaaggttcgaagatctctgcgtttgaaattcaatctagggaaaaat

SEQ ID NO: 733637 - DNA, 120 bp, Artificial Sequence
  ENSG00000198826_17 (sequence is synthesized)
ggcagagaagtaaatggatgttctggtgtcaatagatatgaaagtgttggttggcgacttgcaaatcaacaaagtttaaaaaatcgaattgaatctgtaaaaacaggtttgctttttagc

SEQ ID NO: 733638 - DNA, 120 bp, Artificial Sequence
  ENSG00000198826_18 (sequence is synthesized)
ccagatgttgatgaaaagttaccaaagaaaggttcagaaaagatcagtaagtctgaggaaaccttactaactccagagcgactagttggaacaaattaccggatgtcttggacaggacct

SEQ ID NO: 733639 - DNA, 120 bp, Artificial Sequence
  ENSG00000198826_19 (sequence is synthesized)
aataattcaagttttcaagaagtagatgcaaatgaagcttcttcaatggtggaaaatcttgaggtagaaaactctttggagcctgatattatggtagaaaagtcacctgctacttcatgt

SEQ ID NO: 733640 - DNA, 120 bp, Artificial Sequence
  ENSG00000198826_20 (sequence is synthesized)
gaactcaccccttccaatttaaacaataagcataatagcaacataacaagtagccctcttagcggggatgaaaataacatgaccaaagagactttggtgaaagttcaaaaagcgttttct

SEQ ID NO: 733641 - DNA, 120 bp, Artificial Sequence
  ENSG00000198826_21 (sequence is synthesized)
gaatctggaagtaatcttcacgcattgatgaatcagaggcagtcatcagtaactaatgtggggaaagtaaaattaactgaaccatcttatttagaagatagcccagaggaaaatctattt

SEQ ID NO: 733642 - DNA, 120 bp, Artificial Sequence
  ENSG00000198826_22 (sequence is synthesized)
gaaactaatgatttgactatagtagaatcaaaggagaaatatgaacaccacactggtaaaggtgaaaaatgtttttcagagagggacttttcaccccttcaaactcaaacatttaataga

SEQ ID NO: 733643 - DNA, 120 bp, Artificial Sequence
  ENSG00000198826_23 (sequence is synthesized)
gaaacaactataaaatgttattcaactcagatgaagatggaacatgaaaaagacattcattcaaatatgccaaaagattatttaagcaagcaagaattctccagtgatgaagaaataaag

SEQ ID NO: 733644 - DNA, 120 bp, Artificial Sequence
  ENSG00000198826_24 (sequence is synthesized)
ctcacagcagagtacatgtgttgtaacaaacttgtcaaaacctaggcctatgagaattgctaaacagcagtcattggaaacatgtgagaaaacagtttctgaaagttcacaaatgacaga

SEQ ID NO: 733645 - DNA, 120 bp, Artificial Sequence
  ENSG00000198826_25 (sequence is synthesized)
acatagaaaggtttctgatcacatacagtggtttaacaagctttctttaaatgaaccaaatagaataaaagtcaagtcacctcttaagtttcagcgtactcctgttcgtcagtccgtcag

SEQ ID NO: 733646 - DNA, 120 bp, Artificial Sequence
  ENSG00000198826_26 (sequence is synthesized)
aagaattaattctttgttggagtatagcagacaacctacagggcataagttggcgagtcttggtgatacagcttctcctttggtcaaatcagtgagctgtgacggtgctctttcctcttg

SEQ ID NO: 733647 - DNA, 120 bp, Artificial Sequence
  ENSG00000198826_27 (sequence is synthesized)
tatagaaagtgcatcaaaagattcctctgtttcatgtatcaaatcaggtcctaaagaacagaagtccatgtcatgtgaagagtcaaatattggtgcaatttcaaagtcaagcatggagtt

SEQ ID NO: 733648 - DNA, 120 bp, Artificial Sequence
  ENSG00000198826_28 (sequence is synthesized)
accctcgaaatctttcttaaagatgaggaagcacccagattcagtgaatgcttctcttaggtctactacagtttataaacagaagatcttatctgatggccaagttaaggttcccttgga

SEQ ID NO: 733649 - DNA, 120 bp, Artificial Sequence
  ENSG00000198826_29 (sequence is synthesized)
tgatctgactaatcatgatatagtaaaaccagttgtaaataacaacatgggcatttcttctgggataaataacagggtccttaggagaccatcagaaagaggaagggcctggtacaaagg

SEQ ID NO: 733650 - DNA, 120 bp, Artificial Sequence
  ENSG00000198826_30 (sequence is synthesized)
ttctccaaaacatcctatcggaaaaactcaattactaccaacaagtaaacctgtagatttgtaattggtaaatgttatacttgtcattaatgtaaataaagtgagtaattggtatgactt

SEQ ID NO: 733651 - DNA, 120 bp, Artificial Sequence
  ENSG00000198826_31 (sequence is synthesized)
gcaggatgatgtacatgttagtttgtagctcaggatgattgttaagcaatagatttgctctattgaaaatgtttcatttttttcactgtacaagcaacttagatttttatttgtacaaat

SEQ ID NO: 733652 - DNA, 120 bp, Artificial Sequence
  ENSG00000198826_32 (sequence is synthesized)
aaattacttctttgtttttcttaatgatggcaatttttaaactttaattttattgtgatctcttaaagcagaggttagactttacctttctgactctgtcgtccaggctggagtgcagtg

SEQ ID NO: 733653 - DNA, 120 bp, Artificial Sequence
  ENSG00000198826_33 (sequence is synthesized)
ttctaaagaaattgtttactggatttataagaagttaatttttgaaaatgacatatttttgtgtgatagaaagaatggagcaagttgtgcctatttcctccaagtcagataaggtttcta

SEQ ID NO: 733654 - DNA, 120 bp, Artificial Sequence
  ENSG00000198826_34 (sequence is synthesized)
aaataaataaatttctagcatataaagggtagagataaactctgcaaatcttatgtctggaattatattaatgtttattgtccttgccaaaattcctagaaattaatttccttcaatagc

SEQ ID NO: 733655 - DNA, 120 bp, Artificial Sequence
  ENSG00000198826_35 (sequence is synthesized)
atcctaaaactctatttttatttggggcagagtaatttcatttatagtgccagtaggtgtaccttgtgttcactcgaactaagaacaatggttaaggcagaataatgactaaaatatgtt

SEQ ID NO: 733656 - DNA, 120 bp, Artificial Sequence
  ENSG00000198826_36 (sequence is synthesized)
catatattatgatgtggaaataattgataacttttaagccatactatgtttttaaagataatttgcacaaacacgtttgtgtctgttctgtccaatatagatttggcaattatttaaaga

SEQ ID NO: 733657 - DNA, 120 bp, Artificial Sequence
  ENSG00000198826_37 (sequence is synthesized)
gggataatcttgaaaaaaattaaccaaggtgatttcttatatgtagatgctcgattttggaatttgaaatagtagatgcacctctttaccttttttacttggataaaaacctatgatgat

SEQ ID NO: 733658 - DNA, 120 bp, Artificial Sequence
  ENSG00000198826_38 (sequence is synthesized)
tttgtcctgtgtgtaaatgttatttatttagcatagacattaaagataactctctggaaaatgacttgactaaggctctcatgaaattcaaagtgccatttagaacatgcaccaaattgt

SEQ ID NO: 733659 - DNA, 120 bp, Artificial Sequence
  ENSG00000198826_39 (sequence is synthesized)
caagtaaatctgtctaaatttatattttaaattattacaaattacacatctttgaggaaagagtattatgaacaatagaacatattctctaggttgtagaggaaggaataagcagacaga

SEQ ID NO: 733660 - DNA, 120 bp, Artificial Sequence
  ENSG00000198826_40 (sequence is synthesized)
atcaaccactaaaggtagtttttcagattggttgttagaatgtcatgtttagatgttggagcagattagagcagcattcatgccactcggagcaaccagacttacagcataagtatgtac

SEQ ID NO: 733661 - DNA, 120 bp, Artificial Sequence
  ENSG00000198826_41 (sequence is synthesized)
gaggaatttcaaatcatcagatgtttgcttggctaggttctactttgtttatttgatatcaaataggtttgtagatgtttatggcatttctaattgtaagtagagacaaaatattcatat

SEQ ID NO: 733662 - DNA, 120 bp, Artificial Sequence
  ENSG00000198826_42 (sequence is synthesized)
agtcagatatatgttgtctgctttaaacaatttttaaattttaaaaatgcattaacgtctttttatatccatcaagggaaggatgaaatgttgaatttgaagactaattcagtaagaagt

SEQ ID NO: 733663 - DNA, 120 bp, Artificial Sequence
  ENSG00000198826_43 (sequence is synthesized)
cctaggggtttaactgtacatactacctgaactggcttttctgagagatgaatcaataatgaaacatgtctgttttaaaaactaccacatgtgactcctatttttgttagctgaaagctg

SEQ ID NO: 733664 - DNA, 120 bp, Artificial Sequence
  ENSG00000198826_44 (sequence is synthesized)
ctatacggagtattacaggaatgtgaaggtgactagcttgaaggtagggtaactagagagccagaaaagttttgttttaaacttgatttaatgcgtttttattttttcttatacaaaata

SEQ ID NO: 733665 - DNA, 120 bp, Artificial Sequence
  ENSG00000198826_45 (sequence is synthesized)
gagataatgttgctaacttcatggaatatttgaggaaatgatatgaaagtgtctggacgtgcagtaacctcatgggttcttctcactgtcttataaatgtaaataaagatctaatattaa

SEQ ID NO: 733666 - DNA, 120 bp, Artificial Sequence
  ENSG00000198826_46 (sequence is synthesized)
aagaaaggtacatttacatactactgttagagttttacctaaaaatcctgctttagttgcttttttaatggcaaaacatattaattaatttactgttctagagattaaaagttcatgttt

SEQ ID NO: 733667 - DNA, 120 bp, Artificial Sequence
  ENSG00000198826_47 (sequence is synthesized)
gaatagtgaaaatattagaattggcaatgtatttttctatcaacaattgggaaatgcttatacatgtaaatatgaaaatgtttgacattcttatgttaaaaattatttcttgtaacacaa

SEQ ID NO: 733668 - DNA, 120 bp, Artificial Sequence
  ENSG00000198826_48 (sequence is synthesized)
ggcttcagtgaacgcaccgggatgtgcaggccgggagagcgaaccagacggggacagtaaggtttggaggaagggggatcgttggaagtagcaagaagtggagagaatctggcaatagac

SEQ ID NO: 733669 - DNA, 120 bp, Artificial Sequence
  ENSG00000198826_49 (sequence is synthesized)
tttgacacttgaagtttctaaccagaaattaagtgatttcggttgttgcttgggatagaaattaaggctttgaatctaattgctgctattactattttatactttaaaaggaaaatagat

SEQ ID NO: 733670 - DNA, 120 bp, Artificial Sequence
  ENSG00000198826_50 (sequence is synthesized)
tttcttcataagagggccttcagcgacagccaagctcggaaaagaacgggaataagttgtcttttatatttcctcaaatactgtgaatggtctgaggcgcagagcgaaccagacggggac

SEQ ID NO: 733671 - DNA, 120 bp, Artificial Sequence
  ENSG00000198829_0 (sequence is synthesized)
gtcagaagctatatccagctgctggcagagttcctgtcaagggatcaagtcttccaacagaatggttatggtttaactcagcagaatttgttgaacaactacgacatgctggggatcatg

SEQ ID NO: 733672 - DNA, 120 bp, Artificial Sequence
  ENSG00000198829_1 (sequence is synthesized)
gcatggaatgcaacttgcaaaaactggctggcagcagaggctgccctggaaaagtactacctttccattttttatgggattgagttcgttgtgggagtccttggaaataccattgttgtt

SEQ ID NO: 733673 - DNA, 120 bp, Artificial Sequence
  ENSG00000198829_2 (sequence is synthesized)
tacggctacatcttctctctgaagaactggaacagcagtaatatttatctctttaacctctctgtctctgacttagcttttctgtgcaccctccccatgctgataaggagttatgccaat

SEQ ID NO: 733674 - DNA, 120 bp, Artificial Sequence
  ENSG00000198829_3 (sequence is synthesized)
ggaaactggatatatggagacgtgctctgcataagcaaccgatatgtgcttcatgccaacctctataccagcattctctttctcacttttatcagcatagatcgatacttgataattaag

SEQ ID NO: 733675 - DNA, 120 bp, Artificial Sequence
  ENSG00000198829_4 (sequence is synthesized)
tatcctttccgagaacaccttctgcaaaagaaagagtttgctattttaatctccttggccatttgggttttagtaaccttagagttactacccatacttccccttataaatcctgttata

SEQ ID NO: 733676 - DNA, 120 bp, Artificial Sequence
  ENSG00000198829_5 (sequence is synthesized)
actgacaatggcaccacctgtaatgattttgcaagttctggagaccccaactacaacctcatttacagcatgtgtctaacactgttggggttccttattcctctttttgtgatgtgtttc

SEQ ID NO: 733677 - DNA, 120 bp, Artificial Sequence
  ENSG00000198829_6 (sequence is synthesized)
ttttattacaagattgctctcttcctaaagcagaggaataggcaggttgctactgctctgccccttgaaaagcctctcaacttggtcatcatggcagtggtaatcttctctgtgcttttt

SEQ ID NO: 733678 - DNA, 120 bp, Artificial Sequence
  ENSG00000198829_7 (sequence is synthesized)
acaccctatcacgtcatgcggaatgtgaggatcgcttcacgcctggggagttggaagcagtatcagtgcactcaggtcgtcatcaactccttttacattgtgacacggcctttggccttt

SEQ ID NO: 733679 - DNA, 120 bp, Artificial Sequence
  ENSG00000198829_8 (sequence is synthesized)
ctgaacagtgtcatcaaccctgtcttctattttcttttgggagatcacttcagggacatgctgatgaatcaactgagacacaacttcaaatcccttacatcctttagcagatgggctcat

SEQ ID NO: 733680 - DNA, 120 bp, Artificial Sequence
  ENSG00000198829_9 (sequence is synthesized)
gaactcctactttcattcagagaaaagtgaggggcttgtgaaacagattgttctacagatgaatctgtaagccagttacagtttgccttaactcatagacatcaatcagagagtgtcaca

SEQ ID NO: 733681 - DNA, 120 bp, Artificial Sequence
  ENSG00000198829_10 (sequence is synthesized)
gatttaaccttgatctaaagacaagttgtacccagagtatgtgaaaagaatgggacgacaagaatgtactggtttcttcctctaagaattgaaaggagttgaactgccttatgtttgggc

SEQ ID NO: 733682 - DNA, 120 bp, Artificial Sequence
  ENSG00000198829_11 (sequence is synthesized)
atgtaactccaaaatactaggtagtataaggctttctcaatcagtgcaaaaatggaagatatataaagcaacaagttgtctgcatttgatcactggtcagattgtaaaaaaaaaaaaaat

SEQ ID NO: 733683 - DNA, 120 bp, Artificial Sequence
  ENSG00000198829_12 (sequence is synthesized)
tgttttggcaacattctctatgttattcttattcacatgatcctagaactttatgtgagaactgaatagcagaagatatattattaaatagtttttggaagttgtgctgttaagcaaatg

SEQ ID NO: 733684 - DNA, 120 bp, Artificial Sequence
  ENSG00000198829_13 (sequence is synthesized)
taaagtcaacagtaacaatgattaagaaaggaatataatgagttcaaagatatctatctgatatattttttatattcatcatgaatcggggtagtcttgtaatttatctaacctttttgt

SEQ ID NO: 733685 - DNA, 120 bp, Artificial Sequence
  ENSG00000198829_14 (sequence is synthesized)
tgtatgggtttatagtggaaagaatcttaatttaaataaaaagaacctgaagagataattcaacaaaagtagagaatatgtttgagcttgtcagagaatttaagtatcaaaatactagag

SEQ ID NO: 733686 - DNA, 120 bp, Artificial Sequence
  ENSG00000198829_15 (sequence is synthesized)
agatacaccaaggatatttgaataaaaaaaaaatttgtagaacacaaaatgcctatcaggaaacccaaagcaaaacagaacaaaaagtgaatacatcgttttaaatgatgattttgccat

SEQ ID NO: 733687 - DNA, 120 bp, Artificial Sequence
  ENSG00000198829_16 (sequence is synthesized)
ctggtattttattatcataatttgaccaccagtgcatgaaaatatattaaagttcattagccttctgctcttgatttaatagtgaactttaaaatatattaatatcataaaccagcaaat

SEQ ID NO: 733688 - DNA, 120 bp, Artificial Sequence
  ENSG00000198829_17 (sequence is synthesized)
tggaataatttacaaggataactttattgtagcgagagcaaatcacatctggagtgagccttgttttcatgcaacattaccataagaccattggagtaaatgtttcaaacaaaatgtact

SEQ ID NO: 733689 - DNA, 120 bp, Artificial Sequence
  ENSG00000198829_18 (sequence is synthesized)
tcatgaaattatagaacataaaaatatttatgtgcatattaacctgtattatcccaggagggttaatgaggccccatttcctgcacaaaacaaatgtaggggaaaaaatgggtgctgcat

SEQ ID NO: 733690 - DNA, 120 bp, Artificial Sequence
  ENSG00000198829_19 (sequence is synthesized)
tagctttttaaagtcaaacaactatcacataataattccttgatatgcaacataaagtacctatggccacatatctaagttcctttccttgatgtcattagctataaggagtgagtaatg

SEQ ID NO: 733691 - DNA, 120 bp, Artificial Sequence
  ENSG00000198829_20 (sequence is synthesized)
tgaaggacaaaataagcattatgaatacagagacataaaattccactgtcccttccttttctgaaatactctgggaggtattctgatatttttaaatcccccaattttcccagttgatat

SEQ ID NO: 733692 - DNA, 120 bp, Artificial Sequence
  ENSG00000198829_21 (sequence is synthesized)
ctctagacttcaagcaactgaaatattataaaaatgcattagtcacaaaagatttattttcttacatcacaccaggctttaagatattttctgccatgccttgcctttagtatcaatatt

SEQ ID NO: 733693 - DNA, 120 bp, Artificial Sequence
  ENSG00000198829_22 (sequence is synthesized)
ttaaaaatttcactgtaattttataactgcctaataacaaactgaaaacagaacttctgagtttccttatcagaaagggccacagaaaaggccttaagaaagaaagattcacttacttct

SEQ ID NO: 733694 - DNA, 120 bp, Artificial Sequence
  ENSG00000198829_23 (sequence is synthesized)
gcaaacttggcaatccgtaatttaactttaatttgtattttatgcatgaattttacttgtaaagacaaaattaaatttgcttcccctacatcccaactccaagaagtcacaggaatagac

SEQ ID NO: 733695 - DNA, 81 bp, Artificial Sequence
  ENSG00000198829_24 (sequence is synthesized)
ttcccctacatcccaactccaagaagtcacaggaatagactctttctaatagtgcagtgaaatattttttcaaaccataaa

SEQ ID NO: 733696 - DNA, 120 bp, Artificial Sequence
  ENSG00000198829_25 (sequence is synthesized)
gcacattttaaaattattttcttcctcaaatctatcatgtggtaacttaatctttaacagactttagggccctaaactaaaattataagagctatttcatttgcttgttgtactgggtaa

SEQ ID NO: 733697 - DNA, 120 bp, Artificial Sequence
  ENSG00000198829_26 (sequence is synthesized)
ttgtaagaatcacaaacaataaatcatgaaaatcctttctgggtttgtggtttctaaaggaaataatattgagcttttgtattttgtcttttaattggctccctggtatcttcagaatga

SEQ ID NO: 733698 - DNA, 120 bp, Artificial Sequence
  ENSG00000198829_27 (sequence is synthesized)
tgtctagattcttcagtctggacccacctactcttctcacattatctcccatcactgttgtcacaaaccataccctatagctaaagattgctactttagtttattacattcagaactttc

SEQ ID NO: 733699 - DNA, 120 bp, Artificial Sequence
  ENSG00000198829_28 (sequence is synthesized)
ttcactttgttcacctgttgcccatctttgttctatcatacctgaatggtataataattctaaacaactttcaaggttcatctcatctgtcattctttgttgaagcttgcccttatatcc

SEQ ID NO: 733700 - DNA, 120 bp, Artificial Sequence
  ENSG00000198829_29 (sequence is synthesized)
tctcttccccaaacctaaaagtaaaactttctaccactggggcttcagatacttttaatactacttatttgaatttcattatttttattatagtttattattgtcttcatagctgagtac

SEQ ID NO: 733701 - DNA, 120 bp, Artificial Sequence
  ENSG00000198829_30 (sequence is synthesized)
tcttaaaattactgtttattataagtgaatgtcttacagaacaaactcaaagtcaatgcttcttttgcatgtgaataatcaagctatttttttgtcatcattactttagtaagtaacatt

SEQ ID NO: 733702 - DNA, 120 bp, Artificial Sequence
  ENSG00000198829_31 (sequence is synthesized)
attttatatgaagaatagagtgtatatacataaacccatgtgccagctgccattgcactgcctcacattttcctttagatgtttgagcatagttttaatgactgtttgaaatctctgtct

SEQ ID NO: 733703 - DNA, 120 bp, Artificial Sequence
  ENSG00000198829_32 (sequence is synthesized)
cctagttccaaatatgggtcatcttggagttggtcttcattggtgccttttctcttcagtatgagtcataattttcctgtttctctatatgcctagtaaattagaattttattctagatg

SEQ ID NO: 733704 - DNA, 120 bp, Artificial Sequence
  ENSG00000198829_33 (sequence is synthesized)
atgaataatgtgtggcagagattctggattctgttacattccatcaaagagtattgatattttgtatatacatttacaaatgtacatgtacacaataataaaaataatttttttctcaga

SEQ ID NO: 733705 - DNA, 120 bp, Artificial Sequence
  ENSG00000198830_0 (sequence is synthesized)
gaaatccggttctaaccggtccggggctcccagcgctataaaaactttataaaccccccggagcccgagcagtgtgaagaagaggcgagaacgacccccggaccgaccaaagcccgcgcg

SEQ ID NO: 733706 - DNA, 120 bp, Artificial Sequence
  ENSG00000198830_1 (sequence is synthesized)
ccgctgcatcccgcgtccagcacctacgtcccgctgccgtcgccgccgccaccatgcccaagagaaaggctgaaggggatgctaagggagataaagcaaaggtgaaggacgaaccacaga

SEQ ID NO: 733707 - DNA, 65 bp, Artificial Sequence
  ENSG00000198830_2 (sequence is synthesized)
gctaagggagataaagcaaaggtgaaggacgaaccacagagaagatccgcgctgcaaagaaggga

SEQ ID NO: 733708 - DNA, 89 bp, Artificial Sequence
  ENSG00000198830_3 (sequence is synthesized)
gttgttagcacacagaacacttcattgttgtttttgggggaaggggcatatgtcactaatagaatgtctccaaagctggattgatgtgg

SEQ ID NO: 733709 - DNA, 120 bp, Artificial Sequence
  ENSG00000198830_4 (sequence is synthesized)
caccttggcacaaaagccttgtggtatagaaaaacaaatttgtttttatgtcctcttctccctttccatcgttcagcatagacttaactcccttaagcccagacatctgttgagacctga

SEQ ID NO: 733710 - DNA, 66 bp, Artificial Sequence
  ENSG00000198830_5 (sequence is synthesized)
cctttccatcgttcagcatagacttaactcccttaagcccagacatctgttgagacctgaccccta

SEQ ID NO: 733711 - DNA, 120 bp, Artificial Sequence
  ENSG00000198830_6 (sequence is synthesized)
taataaagctggatacagtttggcttggaatgctgcctctgatcttttcccacaagtggggtaacctggtttatccaagtctcttggaacagggtacgttctgctttgaggtactccatg

SEQ ID NO: 733712 - DNA, 120 bp, Artificial Sequence
  ENSG00000198830_7 (sequence is synthesized)
ctgctttgaggtactccatgtacagtctaatgatgatctttcactgatttatagtcagcttccaaaacacacagtgctaggtgcagttaggaaggattccaggagtagacttagctgatg

SEQ ID NO: 733713 - DNA, 120 bp, Artificial Sequence
  ENSG00000198830_8 (sequence is synthesized)
gtgaaaggctgggagtatggagtgatttctgtacttggttatgcagcattccctgcagtgtttgttttttgcatgactccgaatacatgaagtgtattaaatgcagatttttggtagatc

SEQ ID NO: 733714 - DNA, 120 bp, Artificial Sequence
  ENSG00000198830_9 (sequence is synthesized)
tgcggttttggctgggtagctgacaggagcctctctacttccatctgcatttgcaacttctataaaattagcaaattaatagactcatgtcagagagtgtctctgtgaatgtgtacacag

SEQ ID NO: 733715 - DNA, 120 bp, Artificial Sequence
  ENSG00000198830_10 (sequence is synthesized)
ttgtccatttgtaaggtagatgacactttgctcctaagtagacctgcaaacaaagacaatggggtctttcctgattcctttagtttggagatgcagagaaccccacgtttctctaagtga

SEQ ID NO: 733716 - DNA, 120 bp, Artificial Sequence
  ENSG00000198830_11 (sequence is synthesized)
aatggcaagaagttatttgttagaatatggaactggtaacaaattcatgtttgcaccttgaatttgctttcacagacctggctgtattgttggacaggaataaagtaaattggagactaa

SEQ ID NO: 733717 - DNA, 120 bp, Artificial Sequence
  ENSG00000198830_12 (sequence is synthesized)
gtttgcgccatctgcagctgttgctcctgcctgtcgcggtggtgcgggctccgctgccctccccggctgcgctccggtccagccctcgcttctcggggtcggcgagccggagctcctgcg

SEQ ID NO: 733718 - DNA, 120 bp, Artificial Sequence
  ENSG00000198830_13 (sequence is synthesized)
cgcgcttcgttcttatacgaacgtcgggctcactcatttatgtcctagaaaagttgtgtggacgactgctttaattttcatttttagcactctaaagtttgggaagtaattaagaaccac

SEQ ID NO: 733719 - DNA, 120 bp, Artificial Sequence
  ENSG00000198830_14 (sequence is synthesized)
cttggactagcagaggccactggactcggtgattaaccgtaacctgtgtcctgaatttacactcctataatctagagcaaattgataccaaactttcaaagcgacttacctgtcctattt

SEQ ID NO: 733720 - DNA, 120 bp, Artificial Sequence
  ENSG00000198830_15 (sequence is synthesized)
ctaactttctcgttgtctttaatagccacagagaagatccgcgaggttgtctgctgtaagtgtatgcttttgaattttcgtgcttgtccctgaaactaaaaaacatcaaaaaacaattcc

SEQ ID NO: 733721 - DNA, 120 bp, Artificial Sequence
  ENSG00000198830_16 (sequence is synthesized)
tgggttttgctggttctgaaattctgatgcctgtagccaaagtgggacatttgagtgggcttctggaaatccaacattctagaagaaagccaaccacaaaaacttttgaggaggaggaga

SEQ ID NO: 733722 - DNA, 120 bp, Artificial Sequence
  ENSG00000198830_17 (sequence is synthesized)
aacttctctacccttggtacttttggttggttgtgggtggttttcttcagtccattgtactgatgttcactttttcctctcttcctgccaaaaaaagaaacctgctcctccaaagccaga

SEQ ID NO: 733723 - DNA, 120 bp, Artificial Sequence
  ENSG00000198830_18 (sequence is synthesized)
aagtaattaagaaccacctcaaaatctgcagttttttgttcttgtttcttataggctgaaggggatgctaagggagataaagcaaaggtgaaggacgaagtaagtcattctctcttcaag

SEQ ID NO: 733724 - DNA, 120 bp, Artificial Sequence
  ENSG00000198830_19 (sequence is synthesized)
gaaaatggagatgccaaaacagaccaggtataactgctgtttcaccctttgttagatttgttcattcagttagttgctgatatcaaaaatttaattgcccttttcttgtatcactccaaa

SEQ ID NO: 733725 - DNA, 120 bp, Artificial Sequence
  ENSG00000198830_20 (sequence is synthesized)
tgtaccatttggtccagtgtgcttgtggctttcctgttaacttaaatcctggattcttgaaatctctactgtcagctgaagggcattgtgttttatactacatgaagttttcaagctagg

SEQ ID NO: 733726 - DNA, 120 bp, Artificial Sequence
  ENSG00000198830_21 (sequence is synthesized)
agtaacctcaggtctcttattctggtgttcttcctacctcaattttacagtgaggcccagaggagaggtgacttagcaaagttacctagtaagtcattctcagaagaaatactgagtctc

SEQ ID NO: 733727 - DNA, 120 bp, Artificial Sequence
  ENSG00000198830_22 (sequence is synthesized)
agtacctgaaacctgaactttggcctgggagcaaagtgatgctgtaggtggaatgtgaacacagatagttttgaaatctacgcattgcattaatttgtctgttttcttttaggcacagaa

SEQ ID NO: 733728 - DNA, 120 bp, Artificial Sequence
  ENSG00000198832_0 (sequence is synthesized)
agacgtggcgcagcgactcggaggttcgcctccagcttgcgcatcatctgcggccgggtcccgatgagcctcctgttgcctccgctggcgctgctgctgcttctcgcggcgcttgtggcc

SEQ ID NO: 733729 - DNA, 120 bp, Artificial Sequence
  ENSG00000198832_1 (sequence is synthesized)
ccagccacagccgccactgcctaccggccggactggaaccgtctgagcggcctaacccgcgcccgggtagagacctgcgggggatgacagctgaaccgcctaaaggaggtgaaggctttc

SEQ ID NO: 733730 - DNA, 120 bp, Artificial Sequence
  ENSG00000198832_2 (sequence is synthesized)
aactagagcgcatcccactcagtgaaatgacccgcgaagagatcaatgcgctagtgcaggagctcggcttctaccgcaaggcggcgcccgacgcgcaggtgccccccgagtacgtgtggg

SEQ ID NO: 733731 - DNA, 120 bp, Artificial Sequence
  ENSG00000198832_3 (sequence is synthesized)
cgcccgcgaagcccccagaggaaacttcggaccacgctgacctgtaggtccgggggcgcggcggagctgggacctacctgcctgagtcctggagacagaatgaagcgctcagcatcccgg

SEQ ID NO: 733732 - DNA, 120 bp, Artificial Sequence
  ENSG00000198832_4 (sequence is synthesized)
gaatacttctcttgctgagagccgatgcccgtccccgggccagcagggatggggttggggaggttctcccaaccccactttcttccttccccagctccactaaattccctcctgccttaa

SEQ ID NO: 733733 - DNA, 120 bp, Artificial Sequence
  ENSG00000198832_5 (sequence is synthesized)
ggaagaaaccgaggcccagggattacacagccagtagagagaggacagagcatggagctcctggagaggcagtggataattcttcccgacagaggagctgactgttgaaccccttctttg

SEQ ID NO: 733734 - DNA, 120 bp, Artificial Sequence
  ENSG00000198832_6 (sequence is synthesized)
aaggagagtccgtgctgccaaatcgaagaagagaaacgccctggctggaaagcagagagaacagcagtcgcaggttcggctcagaaactccagtgtccctcagcgtctcgccggcaccct

SEQ ID NO: 733735 - DNA, 120 bp, Artificial Sequence
  ENSG00000198832_7 (sequence is synthesized)
ctgccggcgtgaggtggcgctgcctggccgcatcctgggggagcgtccacatcctcggtcgacaaaaggagcgtcgacactctcggacctgggaaagtgacggcccaaacgccagggagg

SEQ ID NO: 733736 - DNA, 120 bp, Artificial Sequence
  ENSG00000198832_8 (sequence is synthesized)
tgggccgccgctacgaggaactagaggtgaggccgtgggaggtgggctgggggcgaggccagaggcgaggcccagcctgctgaccccgcccctcctccgcctcagcgcatcccactcagt

SEQ ID NO: 733737 - DNA, 120 bp, Artificial Sequence
  ENSG00000198832_9 (sequence is synthesized)
ccggactggaaccgtctgagcggcctaacccgcgcccgggtagagggataaggaagtatggctttggggatgtgactggaataaacgtgaaggactcctgacctatcccattttatcccc

SEQ ID NO: 733738 - DNA, 120 bp, Artificial Sequence
  ENSG00000198832_10 (sequence is synthesized)
tgggcttcagtgtctcgtctgtacctcgagtagactgaggtcatggtctctgatgctctggttcctccccaggtgaaggctttcgtcacgcaggacattccattctagtatccttctgtt

SEQ ID NO: 733739 - DNA, 120 bp, Artificial Sequence
  ENSG00000198832_11 (sequence is synthesized)
ctgggggaggggaaatgggatgggcacctgggagaatctccacgtaacttcagaaaggggtggcagatggttttcaactgacaagttgaattgattggtagtggctcccagaggattctg

SEQ ID NO: 733740 - DNA, 120 bp, Artificial Sequence
  ENSG00000198832_12 (sequence is synthesized)
ttacttctttgaaccctaattttctcacgtataagcggagaccctggcccctcccgggcacagagtaagctctgagcaaaggaggcaatgctgttcccatcagtaaggctgcggaaacca

SEQ ID NO: 733741 - DNA, 120 bp, Artificial Sequence
  ENSG00000198832_13 (sequence is synthesized)
gtctgagcggcctaacccgcgcccgggtagaggcctgagtctccccacctgtatacacagttcccccttctgcccacaagggtccagcatttccttcagaccttgggaactgctgatccg

SEQ ID NO: 733742 - DNA, 120 bp, Artificial Sequence
  ENSG00000198832_14 (sequence is synthesized)
gaaccgtctgagcggcctaacccgcgcccgggtagaggtgagtacgccggcctccagccccggcactatcgttccccaaccctgcggccccatgggagcaccgtccgtcccggccccaag

SEQ ID NO: 733743 - DNA, 120 bp, Artificial Sequence
  ENSG00000198832_15 (sequence is synthesized)
accacctcgaaccgcgagtctccctgctttccccctggcgccgggaccatccctcctgttccctagccccagatggccccagcatccaccgtggaagcctgagacaccgactttggggcc

SEQ ID NO: 733744 - DNA, 120 bp, Artificial Sequence
  ENSG00000198832_16 (sequence is synthesized)
tggaactccgaacccttccccagctccccctacccggtccgacagcggacacccagacacactgacgcagtctcctaactcttctcgtggcctatgactcccaatcctgtcccaacttcc

SEQ ID NO: 733745 - DNA, 120 bp, Artificial Sequence
  ENSG00000198832_17 (sequence is synthesized)
catcccccatcacttcatgttttcctggaattcccccccgacccggttccagggctggaggctccagaaagtctcttttccttctcctggggggaaagaagactttctgggtgcctcctc

SEQ ID NO: 733746 - DNA, 120 bp, Artificial Sequence
  ENSG00000198832_18 (sequence is synthesized)
ccatatgcaggatccggggaagggggccaactcggaggggcaaccgagttgggaacttggttgccaacatttactctgcagcagcctcccatcctcccccaaccaggaaattcccgttcg

SEQ ID NO: 733747 - DNA, 120 bp, Artificial Sequence
  ENSG00000198832_19 (sequence is synthesized)
gagtccctgtcttgctatgtgactttgaccatcacagcccgcctctgagctttttgtcagctctgtctgacaaaagggtgtagaatggttgggtgccggtggtgcacgcctgtaatccca

SEQ ID NO: 733748 - DNA, 120 bp, Artificial Sequence
  ENSG00000198832_20 (sequence is synthesized)
tgagcccaggagttcaagaccagcttgggggacatagtgagaccctgtctctaagaaaagggctgagggtaggatggaggagggctggagtgggtggtcctggggtctagactcctgctg

SEQ ID NO: 733749 - DNA, 120 bp, Artificial Sequence
  ENSG00000198832_21 (sequence is synthesized)
tggatggtggcatctcctcagggaaggcagggaggagccctcccatcctcccatgtcagggaagcaaccacatggtctgtggggctgggccgcaggtggcaggcagggtgaggtctgcct

SEQ ID NO: 733750 - DNA, 120 bp, Artificial Sequence
  ENSG00000198832_22 (sequence is synthesized)
gtgtagagtagggaccagatggtaggtgtctccaatgggggcccccagggccattctgaggtgtttccttctgctctgcctccactgtgagatttcagggatcaaaggccaagcccaggt

SEQ ID NO: 733751 - DNA, 120 bp, Artificial Sequence
  ENSG00000198832_23 (sequence is synthesized)
ctctactgcttaagaggagcagggtgatcatttcccctgggcattgggagtcagtccacagccagtaggatgtacaggccccaaggctggcaggcacactgtgggtctctggccttgctc

SEQ ID NO: 733752 - DNA, 120 bp, Artificial Sequence
  ENSG00000198833_0 (sequence is synthesized)
cgcagtccaggctggactgggcggcatttgccgaggctcctcggccaggccccgtccgcccgagccgcgctgagacccgggcagcggccgcgtggagaggaggtggcagcggcccgggag

SEQ ID NO: 733753 - DNA, 120 bp, Artificial Sequence
  ENSG00000198833_1 (sequence is synthesized)
cccgggaggccggagccaagccagcgacccaccatggagacccgctacaacctgaagagtccggctgttaaacgtttaatgaaagaagcggcagaattgaaagatccaacagatcattac

SEQ ID NO: 733754 - DNA, 120 bp, Artificial Sequence
  ENSG00000198833_2 (sequence is synthesized)
catgcgcagcctttagaggataacctttttgaatggcacttcacggttagagggcccccagactccgattttgatggaggagtttatcacgggcggatagtactgccaccagagtatccc

SEQ ID NO: 733755 - DNA, 120 bp, Artificial Sequence
  ENSG00000198833_3 (sequence is synthesized)
atgaaaccaccaagcattattctcctaacggctaatggtcgatttgaagtgggcaagaaaatctgtttgagcatctcaggccatcatcctgaaacttggcagccttcgtggagtataagg

SEQ ID NO: 733756 - DNA, 120 bp, Artificial Sequence
  ENSG00000198833_4 (sequence is synthesized)
acagcattattagccatcattgggtttatgccaacaaaaggagagggagccataggttctctagattacactcctgaggaaagaagagcacttgccaaaaaatcacaagatttctgttgt

SEQ ID NO: 733757 - DNA, 120 bp, Artificial Sequence
  ENSG00000198833_5 (sequence is synthesized)
gaaggatgtggctctgccatgaaggatgtcctgttgcctttaaaatctggaagcgattcaagccaagctgaccaagaagccaaagaactggctaggcaaataagctttaaggcagaagtc

SEQ ID NO: 733758 - DNA, 120 bp, Artificial Sequence
  ENSG00000198833_6 (sequence is synthesized)
aattcatctggaaagactatctctgagtcagacttaaaccactctttttcactaactgatttacaagatgatatacctacaacattccagggtgctacggccagtacatcgtacggactc

SEQ ID NO: 733759 - DNA, 120 bp, Artificial Sequence
  ENSG00000198833_7 (sequence is synthesized)
cagaattcctcagcagcatcctttcatcaacctacccaacctgtagctaagaatacctccatgagccctcgacagcgccgggcccagcagcagagtcagagaaggttgtctacttcacca

SEQ ID NO: 733760 - DNA, 120 bp, Artificial Sequence
  ENSG00000198833_8 (sequence is synthesized)
gatgtaatccagggccaccagccaagagacaaccacactgatcatggtgggtcagctgtactgattgtcatcctgactttggcattggcagctcttatattccgacgaatatatctggca

SEQ ID NO: 733761 - DNA, 120 bp, Artificial Sequence
  ENSG00000198833_9 (sequence is synthesized)
aacgaatacatatttgactttgagttataatatggttttgtgacttatgagctgtgactcaactgcttcattaaacattctgcattgggtataatctaagaattgtttacaaaaagatta

SEQ ID NO: 733762 - DNA, 120 bp, Artificial Sequence
  ENSG00000198833_10 (sequence is synthesized)
ttttgtatttacccttcattcctttttttgatccttgtaagtttagtataaatatatctagacattcagactgtgtctagcagttacgtcctgcttaaagggactagaagtcaaagttcc

SEQ ID NO: 733763 - DNA, 120 bp, Artificial Sequence
  ENSG00000198833_11 (sequence is synthesized)
ttgtctcactatttgatctgctttgcagggaaataacttgttttttctcatgtttcatcttctttttatgtaaatttgtaatactttcctatattgccctttgaaatttttggataaaag

SEQ ID NO: 733764 - DNA, 120 bp, Artificial Sequence
  ENSG00000198833_12 (sequence is synthesized)
atgatgttttaagttccaatgagtattactagttactcaataccacttattgagtactctgtttctacgtatgtagaatgtatagggatagaagagttgaaaagggaaagcaaaactcct

SEQ ID NO: 733765 - DNA, 120 bp, Artificial Sequence
  ENSG00000198833_13 (sequence is synthesized)
caagtagcttccttaaaatgtcattcataggagatgtactggaattgctcattctgtgactttatttgtgtcctaaacattcttcagtgaaaataattttatttcagtcaaacatttatg

SEQ ID NO: 733766 - DNA, 120 bp, Artificial Sequence
  ENSG00000198833_14 (sequence is synthesized)
aggaaatgagatcacatctttgtcactggatgctacttgaagagggagtactttgtaaccactttgatatgctgttatcaccaccccctgccctctgctgccataatcacacaaatttaa

SEQ ID NO: 733767 - DNA, 120 bp, Artificial Sequence
  ENSG00000198833_15 (sequence is synthesized)
aaagaaagaaaacagtcttccatagatttttaaggaagaaagggcccaagccaggagatcgcttggttttcttccagaagttaaatggggggatctgaagatttgaatgtttggtctgct

SEQ ID NO: 733768 - DNA, 120 bp, Artificial Sequence
  ENSG00000198833_16 (sequence is synthesized)
ttgaaatgtatgtcttttgggatgtattatatgcctagctttataatcagtataaattttaattattccaggaatatgcataatattgaaatatttcatgtcctattttaatagaaaacc

SEQ ID NO: 733769 - DNA, 120 bp, Artificial Sequence
  ENSG00000198833_17 (sequence is synthesized)
agtggaaaaatcaatatataacttagtgctagctagcgccacagactctagtagataatattatcatcataatggctggtgaaaccatataatcacagaaaaacattgccttcagcatgt

SEQ ID NO: 733770 - DNA, 120 bp, Artificial Sequence
  ENSG00000198833_18 (sequence is synthesized)
tcagttcgcagcactgagggcactcttgagggtgttgttaatgaagatttaatttttaaatacaggtggttccaagctttcaaataggttatgctccaaaagtgttatttgtaagttaat

SEQ ID NO: 733771 - DNA, 120 bp, Artificial Sequence
  ENSG00000198833_19 (sequence is synthesized)
ttttttacaagtcaaacaatgttggaagtggtatttaggttctagatcggtccacgaaagttagcccatatgtatatcttgaatagtataggggagggtattcataaagtccttatgtgg

SEQ ID NO: 733772 - DNA, 120 bp, Artificial Sequence
  ENSG00000198833_20 (sequence is synthesized)
ttttaactaagtgaaattatggacaagagaaataattgtaaaatcgtcttaaaggaaaatttaatttttactcctgtttatgggacattcgttctattaactgtcagacacaatttctgt

SEQ ID NO: 733773 - DNA, 120 bp, Artificial Sequence
  ENSG00000198833_21 (sequence is synthesized)
tttcatctgagagccagttttcctttatttctacatctaaaataagaacatattgtacactattatataatacagaattgtcttaaactttaataaattcgcattttaaaggtgtttaca

SEQ ID NO: 733774 - DNA, 120 bp, Artificial Sequence
  ENSG00000198833_22 (sequence is synthesized)
gattattttttatatctgtagctgaatttgttaaagtctaaaaagctcaaggactttatgaagatctcattatatgaggaaaatcataggttaccattttataactctattgccataaga

SEQ ID NO: 733775 - DNA, 120 bp, Artificial Sequence
  ENSG00000198833_23 (sequence is synthesized)
aaatacactctaaaatcttgatttgaaacatattagaaaccttgattcagtgctcagtggtctcctagtaagaagtcaccgacggtagcgtcatatgagaagaaagaaatccccaccacc

SEQ ID NO: 733776 - DNA, 120 bp, Artificial Sequence
  ENSG00000198833_24 (sequence is synthesized)
tcaacctctgctgagattgtgtgctaggaacagccttccctccgtttcccctcagtcaaacttgagccagcctctggatcgatgtgatcttattgcatgtttccatggggtgtacctata

SEQ ID NO: 733777 - DNA, 120 bp, Artificial Sequence
  ENSG00000198833_25 (sequence is synthesized)
ctttaagccaatcctgctgcattcactgctaagttaaataaaaagccaagaagattttgcactgtgcagatcctttgctatctgacttgcatctcttcccccacctgtcagctagccacc

SEQ ID NO: 733778 - DNA, 120 bp, Artificial Sequence
  ENSG00000198833_26 (sequence is synthesized)
tgcttgtttgtgttgggatattttttagcacctgaagcaccatctgaaaggggcaccattttcttcttccctttgatctcacatatgctccctaaaaatccttaagttgtcaatctgatc

SEQ ID NO: 733779 - DNA, 120 bp, Artificial Sequence
  ENSG00000198833_27 (sequence is synthesized)
cccagtgtgaggttaatgagcaaaattggtctttggggccctttttgtccaagccccactgaaaggcctcttcagaaaactattatctttaaagccctactttaactccttaattccagc

SEQ ID NO: 733780 - DNA, 120 bp, Artificial Sequence
  ENSG00000198833_28 (sequence is synthesized)
atacagctaaaactggatgtatattctggcaagtaaaggctgaggactcctctttaatcctcagatctagataactcatgacattttatttgaccaacatagcacatgatgagatatcaa

SEQ ID NO: 733781 - DNA, 120 bp, Artificial Sequence
  ENSG00000198833_29 (sequence is synthesized)
ggtaattaaaatagcatgcttgaaaaaaaaatacgtaatctgtttcacctgtaactgtttaagccaataaacttttcaaaatttatgtaatgtggggcttttatgtagcactttacgttt

SEQ ID NO: 733782 - DNA, 120 bp, Artificial Sequence
  ENSG00000198833_30 (sequence is synthesized)
tcatgctgcttattgttttattctactgaaaaaaatgaatttcaagattctcaacttttttaatttcaaaaattgtttattgttttgactataggaatacaaaatttcctattttgggag

SEQ ID NO: 733783 - DNA, 120 bp, Artificial Sequence
  ENSG00000198833_31 (sequence is synthesized)
aataagaactctttttgtcatttttggctatgaataaactttctggtcttttgagaccacccatttttatagatcagaatcagaaaacaggtaaacctcactcacacatttggactcatt

SEQ ID NO: 733784 - DNA, 120 bp, Artificial Sequence
  ENSG00000198833_32 (sequence is synthesized)
tgaacaaaaatctaggccaaaatactgaaaagcctatgtgtttttttaattggaagtatatgtaaggttaatgcatttagtgaacgtgactaacaaagactaatgtgcacattaacagat

SEQ ID NO: 733785 - DNA, 120 bp, Artificial Sequence
  ENSG00000198833_33 (sequence is synthesized)
gtactttttaaggttttatgggaggctgtgcattgctcaaaagctgttgggaacgccttctgaacagttgccttcagaactagtttgagctgctcaataaaaccagtgactttactcata

SEQ ID NO: 733786 - DNA, 120 bp, Artificial Sequence
  ENSG00000198835_0 (sequence is synthesized)
acacaccctcggggaggaccagcatccaagcaggtggaagggctctgagggagactggaattttctggcctggagaaggacccgcccgcccgcccctatgaccaacatgagctggagctt

SEQ ID NO: 733787 - DNA, 120 bp, Artificial Sequence
  ENSG00000198835_1 (sequence is synthesized)
cctgacgcggctgctggaggagatccacaaccactccaccttcgtgggcaaggtgtggctcacggtgctggtggtcttccgcatcgtgctgacggctgtgggcggcgaggccatctactc

SEQ ID NO: 733788 - DNA, 120 bp, Artificial Sequence
  ENSG00000198835_2 (sequence is synthesized)
ggacgagcaggccaagttcacttgcaacacgcggcagccaggctgcgacaacgtctgctatgacgccttcgcgcccctgtcgcacgtgcgcttctgggtcttccagattgtggtcatctc

SEQ ID NO: 733789 - DNA, 120 bp, Artificial Sequence
  ENSG00000198835_3 (sequence is synthesized)
tgtggtcatctccacgccctcggtcatgtacctgggctacgccgtgcaccgcctggcccgtgcgtctgagcaggagcggcgccgcgccctccgccgccgcccggggccacgccgcgcgcc

SEQ ID NO: 733790 - DNA, 120 bp, Artificial Sequence
  ENSG00000198835_4 (sequence is synthesized)
cccccgcacgccggctggcctgagcccgccgacctgggcgaggaggagcccatgctgggcctgggcgaggaggaggaggaggaggagacgggggcagccgagggcgccggcgaggaagcg

SEQ ID NO: 733791 - DNA, 120 bp, Artificial Sequence
  ENSG00000198835_5 (sequence is synthesized)
agcggaggaggcaggcgcggaggaggcgtgcactaaggcggtcggcgctgacggcaaggcggcagggaccccgggcccgaccgggcaacacgatgggcggaggcgcatccagcgggaggg

SEQ ID NO: 733792 - DNA, 120 bp, Artificial Sequence
  ENSG00000198835_6 (sequence is synthesized)
cctgatgcgcgtgtacgtggcccagctggtggccagggcagctttcgaggtggccttcctggtgggccagtacctgctgtacggcttcgaggtgcgaccgttctttccctgcagccgcca

SEQ ID NO: 733793 - DNA, 120 bp, Artificial Sequence
  ENSG00000198835_7 (sequence is synthesized)
gccctgcccgcacgtggtggactgcttcgtgtcgcgccctactgaaaagacggtcttcctgctggttatgtacgtggtcagctgcctgtgcctgctgctcaacctctgtgagatggccca

SEQ ID NO: 733794 - DNA, 80 bp, Artificial Sequence
  ENSG00000198835_8 (sequence is synthesized)
aacctctgtgagatggcccacctgggcttgggcagcgcgcaggacgcggtgcgcggccgccgcggccccccggcctccgc

SEQ ID NO: 733795 - DNA, 120 bp, Artificial Sequence
  ENSG00000198835_9 (sequence is synthesized)
cgcccgactacagcctggtggtgcgggcggccgagcgcgctcgggcgcatgaccagaacctggcaaacctggccctgcaggcgctgcgcgacggggcagcggctggggaccgcgaccggg

SEQ ID NO: 733796 - DNA, 120 bp, Artificial Sequence
  ENSG00000198835_10 (sequence is synthesized)
cgaccgggacagttcgccgtgcgtcggcctccctgcggcctcccgggggccccccagagcaggcgcccccgcgtcccggacgggcagtgctacctctgcgggcactgtcggggagcaggg

SEQ ID NO: 733797 - DNA, 120 bp, Artificial Sequence
  ENSG00000198835_11 (sequence is synthesized)
gcacccacgagcggccaggagccaagcccagggctggctccgagaagggcagtgccagcagcagggacgggaagaccaccgtgtggatctgagggcgctggcttgcgagctgggccaggg

SEQ ID NO: 733798 - DNA, 120 bp, Artificial Sequence
  ENSG00000198835_12 (sequence is synthesized)
aggaggagggttggggggctccggtggaaacctgcgaccccttctcctcagccttctccttagccggtggcctcaggcagactctgcccagaggggcagccaggctgctcagggaagggg

SEQ ID NO: 733799 - DNA, 120 bp, Artificial Sequence
  ENSG00000198835_13 (sequence is synthesized)
ctgaaagcggcagaggagtgccctggcttggtcaccactggggccaaggtggggtggagagaggcctaggagccagaaagggccctctgctgtggtctgaaccccagggggagtggggca

SEQ ID NO: 733800 - DNA, 120 bp, Artificial Sequence
  ENSG00000198835_14 (sequence is synthesized)
ttgactccacccctgtcctgagctggaataggtcctctgggatgccagctctcccctttgtgcttccctgcagcaacccatggagggcccagggtgcctggtatgggcatcagttggtgg

SEQ ID NO: 733801 - DNA, 120 bp, Artificial Sequence
  ENSG00000198835_15 (sequence is synthesized)
gggtgcgggggtgcgtgtccccattccctgcaacagcaaatggggctccttcttcagccctccccttcccagccccaaactgagacagactgggagctgggagcctggggtggacaggac

SEQ ID NO: 733802 - DNA, 120 bp, Artificial Sequence
  ENSG00000198835_16 (sequence is synthesized)
cataccctctttgagcttctgcgatgccggccttccgttcctctgggaggcttgaagttctgcaaagatgttgatatgccttgcagcttggacccaatgggtggtggtcagggcctgggg

SEQ ID NO: 733803 - DNA, 120 bp, Artificial Sequence
  ENSG00000198835_17 (sequence is synthesized)
gcttggccatgctgggggaatggggctctgggttcctgcctgtggcctgtctgtcctcctccctaattcagacccagcctcaagaggaaagggagtaaaataaaactaacttgtttataa

SEQ ID NO: 733804 - DNA, 120 bp, Artificial Sequence
  ENSG00000198836_0 (sequence is synthesized)
ggactgagtacgggtgcctgtcaggctcttgcggaagtccatgcgccattgggagggcctcggccgcggctctgtgcccttgctgctgagggccacttcctgggtcattcctggaccggg

SEQ ID NO: 733805 - DNA, 120 bp, Artificial Sequence
  ENSG00000198836_1 (sequence is synthesized)
agccgggctggggctcacacgggggctcccgcgtggccgtctcggcgcctgcgtgacctccccgccggcgggatgtggcgactacgtcgggccgctgtggcctgtgaggtctgccagtct

SEQ ID NO: 733806 - DNA, 120 bp, Artificial Sequence
  ENSG00000198836_2 (sequence is synthesized)
ttagtgaaacacagctctggaataaaaggaagtttaccactacaaaaactacatctggtttcacgaagcatttatcattcacatcatcctaccttaaagcttcaacgaccccaattaagg

SEQ ID NO: 733807 - DNA, 120 bp, Artificial Sequence
  ENSG00000198836_3 (sequence is synthesized)
acatcctttcagcagttctcttctctgacaaaccttcctttacgtaaactgaaattctctccaattaaatatggctaccagcctcgcaggaatttttggccagcaagattagctacgaga

SEQ ID NO: 733808 - DNA, 120 bp, Artificial Sequence
  ENSG00000198836_4 (sequence is synthesized)
ctcttaaaacttcgctatctcatactaggatcggctgttgggggtggctacacagccaaaaagacttttgatcagtggaaagatatgataccggaccttagtgaatataaatggattgtg

SEQ ID NO: 733809 - DNA, 120 bp, Artificial Sequence
  ENSG00000198836_5 (sequence is synthesized)
cctgacattgtgtgggaaattgatgagtatatcgattttgagaaaattagaaaagcccttcctagttcagaagaccttgtaaagttagcaccagactttgacaagattgttgaaagcctt

SEQ ID NO: 733810 - DNA, 120 bp, Artificial Sequence
  ENSG00000198836_6 (sequence is synthesized)
agcttattgaaggacttttttacctcaggttctccggaagaaacggcgtttagagcaacagatcgtggatctgaaagtgacaagcattttagaaagggtctgcttggtgagctcattctc

SEQ ID NO: 733811 - DNA, 120 bp, Artificial Sequence
  ENSG00000198836_7 (sequence is synthesized)
ttacaacaacaaattcaagagcatgaagaggaagcgcgcagagccgctggccaatatagcacgagctatgcccaacagaagcgcaaggtgtcagacaaagagaaaattgaccaacttcag

SEQ ID NO: 733812 - DNA, 120 bp, Artificial Sequence
  ENSG00000198836_8 (sequence is synthesized)
gaagaacttctgcacactcagttgaagtatcagagaatcttggaacgattagaaaaggagaacaaagaattgagaaaattagtattgcagaaagatgacaaaggcattcatcatagaaag

SEQ ID NO: 733813 - DNA, 120 bp, Artificial Sequence
  ENSG00000198836_9 (sequence is synthesized)
cttaagaaatctttgattgacatgtattctgaagttcttgatgttctctctgattatgatgccagttataatacgcaagatcatctgccacgggttgttgtggttggagatcagagtgct

SEQ ID NO: 733814 - DNA, 120 bp, Artificial Sequence
  ENSG00000198836_10 (sequence is synthesized)
ggaaagactagtgtgttggaaatgattgcccaagctcgaatattcccaagaggatctggggagatgatgacacgttctccagttaaggtgactctgagtgaaggtcctcaccatgtggcc

SEQ ID NO: 733815 - DNA, 120 bp, Artificial Sequence
  ENSG00000198836_11 (sequence is synthesized)
ctatttaaagatagttctcgggagtttgatcttaccaaagaagaagatcttgcagcattaagacatgaaatagaacttcgaatgaggaaaaatgtgaaagaaggctgtaccgttagccct

SEQ ID NO: 733816 - DNA, 120 bp, Artificial Sequence
  ENSG00000198836_12 (sequence is synthesized)
gagaccatatccttaaatgtaaaaggccctggactacagaggatggtgcttgttgacttaccaggtgtgattaatactgtgacatcaggcatggctcctgacacaaaggaaactattttc

SEQ ID NO: 733817 - DNA, 120 bp, Artificial Sequence
  ENSG00000198836_13 (sequence is synthesized)
agtatcagcaaagcttacatgcagaatcctaatgccatcatactgtgtattcaagatggatctgtggatgctgaacgcagtattgttacagacttggtcagtcaaatggaccctcatgga

SEQ ID NO: 733818 - DNA, 120 bp, Artificial Sequence
  ENSG00000198836_14 (sequence is synthesized)
aggagaaccatattcgttttgaccaaagtagacctggcagagaaaaatgtagccagtccaagcaggattcagcagataattgaaggaaagctcttcccaatgaaagctttaggttatttt

SEQ ID NO: 733819 - DNA, 120 bp, Artificial Sequence
  ENSG00000198836_15 (sequence is synthesized)
gctgttgtaacaggaaaagggaacagctctgaaagcattgaagctataagagaatatgaagaagagttttttcagaattcaaagctcctaaagacaagcatgctaaaggcacaccaagtg

SEQ ID NO: 733820 - DNA, 120 bp, Artificial Sequence
  ENSG00000198836_16 (sequence is synthesized)
actacaagaaatttaagccttgcagtatcagactgcttttggaaaatggtacgagagtctgttgaacaacaggctgatagtttcaaagcaacacgttttaaccttgaaactgaatggaag

SEQ ID NO: 733821 - DNA, 120 bp, Artificial Sequence
  ENSG00000198836_17 (sequence is synthesized)
aataactatcctcgcctgcgggaacttgaccggaatgaactatttgaaaaagctaaaaatgaaatccttgatgaagttatcagtctgagccaggttacaccaaaacattgggaggaaatc

SEQ ID NO: 733822 - DNA, 120 bp, Artificial Sequence
  ENSG00000198836_18 (sequence is synthesized)
cttcaacaatctttgtgggaaagagtatcaactcatgtgattgaaaacatctaccttccagctgcgcagaccatgaattcaggaacttttaacaccacagtggatatcaagcttaaacag

SEQ ID NO: 733823 - DNA, 120 bp, Artificial Sequence
  ENSG00000198836_19 (sequence is synthesized)
tggactgataaacaacttcctaataaagcagtagaggttgcttgggagaccctacaagaagaattttcccgctttatgacagaaccgaaagggaaagagcatgatgacatatttgataaa

SEQ ID NO: 733824 - DNA, 120 bp, Artificial Sequence
  ENSG00000198836_20 (sequence is synthesized)
cttaaagaggctgttaaggaagaaagtattaaacgacacaagtggaatgactttgcggaggacagcttgagggttattcaacacaatgctttggaagaccgatccatatctgataaacag

SEQ ID NO: 733825 - DNA, 120 bp, Artificial Sequence
  ENSG00000198836_21 (sequence is synthesized)
caatgggatgcagctatttattttatggaagaggctctgcaggctcgtctcaaggatactgaaaatgcaattgaaaacatggtgggtccagactggaaaaagaggtggttatactggaag

SEQ ID NO: 733826 - DNA, 120 bp, Artificial Sequence
  ENSG00000198836_22 (sequence is synthesized)
aatcggacccaagaacagtgtgttcacaatgaaaccaagaatgaattggagaagatgttgaaatgtaatgaggagcacccagcttatcttgcaagtgatgaaataaccacagtccggaag

SEQ ID NO: 733827 - DNA, 120 bp, Artificial Sequence
  ENSG00000198836_23 (sequence is synthesized)
aaccttgaatcccgaggagtagaagtagatccaagcttgattaaggatacttggcatcaagtttatagaagacattttttaaaaacagctctaaaccattgtaacctttgtcgaagaggt

SEQ ID NO: 733828 - DNA, 120 bp, Artificial Sequence
  ENSG00000198836_24 (sequence is synthesized)
ttttattactaccaaaggcattttgtagattctgagttggaatgcaatgatgtggtcttgttttggcgtatacagcgcatgcttgctatcaccgcaaatactttaaggcaacaacttaca

SEQ ID NO: 733829 - DNA, 120 bp, Artificial Sequence
  ENSG00000198836_25 (sequence is synthesized)
aatactgaagttaggcgattagagaaaaatgttaaagaggtattggaagattttgctgaagatggtgagaagaagattaaattgcttactggtaaacgcgttcaactggcggaagacctc

SEQ ID NO: 733830 - DNA, 120 bp, Artificial Sequence
  ENSG00000198836_26 (sequence is synthesized)
tcattgaagctcttcatcaggagaaataaattaaaatcgtactcataatcagctctgcatacatctgaagaacaaaaacatcaacgtcttttgtccagcctctttttcttctgctgttcc

SEQ ID NO: 733831 - DNA, 120 bp, Artificial Sequence
  ENSG00000198836_27 (sequence is synthesized)
acctttctaaacatacaataaagtcatgggataaaaataatcgatgtatgttacgggcgctttaaccatcagctgcctctcgaatggaagaacagtggtaatggattaacatcctatttt

SEQ ID NO: 733832 - DNA, 120 bp, Artificial Sequence
  ENSG00000198836_28 (sequence is synthesized)
gttgtactaaagtgacaaatcggaataatataattggtatggccattaggttcagtccttgaagataagaaacttgttctctgtttgttgtcttatttgtggtggcactcgtttaatgga

SEQ ID NO: 733833 - DNA, 120 bp, Artificial Sequence
  ENSG00000198836_29 (sequence is synthesized)
ttaactgaggttgctcaatgttcagtttcttttccagaaatacaatgctaggtgttttgaaataaaacttatatagcaattgtttaaagttatcaattgtatataaaatcacagtagcct

SEQ ID NO: 733834 - DNA, 120 bp, Artificial Sequence
  ENSG00000198836_30 (sequence is synthesized)
gctaaatcattgtatgtgtctgtagtattctattcccagaaactatttgaccatgataattcagtttatattcaccacatgaaagaaaaatgggtaacagaagaacccttaaaacaggtt

SEQ ID NO: 733835 - DNA, 120 bp, Artificial Sequence
  ENSG00000198836_31 (sequence is synthesized)
aatttggattgtaacgttcagtgaaagaaatttcaacccttcatagccagcgaagaaatttgccttggaagccaagtcagtaccagcttacctatttgattcagttgctgttttctcact

SEQ ID NO: 733836 - DNA, 120 bp, Artificial Sequence
  ENSG00000198836_32 (sequence is synthesized)
ctctatatccatttgaaattgatttattttagatgttgtatacttacgttaggctttctgttaatagtggtttttctcctgttgacagagccaccggattatgacacaggatgaggaaga

SEQ ID NO: 733837 - DNA, 120 bp, Artificial Sequence
  ENSG00000198836_33 (sequence is synthesized)
ttaaggataatcaattgactaatttcatttagaatattatcaaacatttcaactaggtatcagaaaaaggctttctttcataagactattttaaatagaaattatttcaacaattaaagt

SEQ ID NO: 733838 - DNA, 120 bp, Artificial Sequence
  ENSG00000198836_34 (sequence is synthesized)
aatgttgaccatccccctctcagctgaataaagaaaaatttagttcaatttattgcaatttaattacaatactaccttcacaacattttcatgtgttttaaataaatattttttaattgg

SEQ ID NO: 733839 - DNA, 120 bp, Artificial Sequence
  ENSG00000198836_35 (sequence is synthesized)
ctaaaggacattcaagcaaagaaatgctttctttacttaaaatgtctatctcatttgctgccttttcactaagcctttactttgttaataaaagtgtccattgtgtgatgtttttgattt

SEQ ID NO: 733840 - DNA, 120 bp, Artificial Sequence
  ENSG00000198836_36 (sequence is synthesized)
tacagtttgctaaatcttattttcttggagttgctttttggtaacagccccattgctactccccattttattgttttacatcaatgcatgcttcgttgtgatccctcaagatgtaacact

SEQ ID NO: 733841 - DNA, 120 bp, Artificial Sequence
  ENSG00000198836_37 (sequence is synthesized)
tggtatgctcggttgaggatatgaaaaaatacttccgaaaccaggaattcaatgtatgtttgttttatactgtttgataagaaaagtaggtccagccttaagcagcacagatgcgctggt

SEQ ID NO: 733842 - DNA, 120 bp, Artificial Sequence
  ENSG00000198836_38 (sequence is synthesized)
agatgcatagtcaggaactttttttatttcttttaggtctagggacaggagtgaatagaaagggaggagagctctattatgttctatacacagattaggagatgaccttactgggtacac

SEQ ID NO: 733843 - DNA, 120 bp, Artificial Sequence
  ENSG00000198836_39 (sequence is synthesized)
ccctctaaccagtgcttacaggttaatgcatgttaatgaatatttttgcagttgtaaagcataacaattacaactacacatctatttctaaagaataaaacaggaccatatttatttact

SEQ ID NO: 733844 - DNA, 120 bp, Artificial Sequence
  ENSG00000198836_40 (sequence is synthesized)
tctgtcaactatagaaagaaagaccttcagctgtatttccacagatttctcccaaggaaaaggctaatattagtcactactgttatcacatccctttgtataagttttaaaaagagatgg

SEQ ID NO: 733845 - DNA, 120 bp, Artificial Sequence
  ENSG00000198836_41 (sequence is synthesized)
agggagatcttcatttctttgaggagatcagtattgtaacgtatgtgaatagatgataacaattaatattactaaaagtcccacatgagagtcctgacgccctctccatgccccacagta

SEQ ID NO: 733846 - DNA, 120 bp, Artificial Sequence
  ENSG00000198836_42 (sequence is synthesized)
atgtggcttctttcatgggtttttttttcttctttttagctgatctcatcctaagcatgctttatttttccttgaaagctaggtatttatcaactgcagatgttattgaaagaaaataaa

SEQ ID NO: 733847 - DNA, 120 bp, Artificial Sequence
  ENSG00000198836_43 (sequence is synthesized)
attcagtctcaagagtaaaccctgtgtcttgtgtctgtagttcaaaagtcagaaatgattctaatttaaacaaaaagatactaaatatacagaagttaaattcgaactagccacagaatc

SEQ ID NO: 733848 - DNA, 120 bp, Artificial Sequence
  ENSG00000198836_44 (sequence is synthesized)
atttgtttttatgtcagaatttgcaaagagtggagtggacaaagctctgtatggaagactgaacaactgtaaatagatgatatccaaacttaatttggctaggacttcaattttaaaaat

SEQ ID NO: 733849 - DNA, 120 bp, Artificial Sequence
  ENSG00000198836_45 (sequence is synthesized)
cagtgtacctaggcagtgcacagcacgaaataagtggcccttgcagcttccccgtttaacccactgtgctatagttgcgggtggaacagtcaacctttctagtagtttatgatattgccc

SEQ ID NO: 733850 - DNA, 120 bp, Artificial Sequence
  ENSG00000198836_46 (sequence is synthesized)
tctttgtattcccattttctacagttttttccgcagacttctttctgcaaattattcagcctccaaatgcaaatgaatgatataaaaataagtagggaacatggcagagagtggtgcttc

SEQ ID NO: 733851 - DNA, 120 bp, Artificial Sequence
  ENSG00000198836_47 (sequence is synthesized)
ccagcctcacaatgtgggaatttgacataggatgagagtcagagtataggtttaaaagataaaatctttagttaataattttgtatttatttattctagatgtatgtatctgaggaaaga

SEQ ID NO: 733852 - DNA, 120 bp, Artificial Sequence
  ENSG00000198836_48 (sequence is synthesized)
aatctggtatttttgctttccaataaaggggatcaaagtaatggtttttctctcagttctctaagctggtctatgttatagctctagcagtatggaaatgtgctttaaaatatgcttacc

SEQ ID NO: 733853 - DNA, 120 bp, Artificial Sequence
  ENSG00000198836_49 (sequence is synthesized)
ttttgaatgatcatggctatatgttgttgagatatttgaaacttaccttgttttcacttgtgcactgtgaatgaactttgtattatttttttaaaaccttcacattacgtgtagatatta

SEQ ID NO: 733854 - DNA, 120 bp, Artificial Sequence
  ENSG00000198836_50 (sequence is synthesized)
ttgcaacttatattttgcctgagcttgatcaaaggtcatttgtgtagatgagtaattaaaaaatatttaaatcacattataattctattattggagagcatcttttaaatttttttctgt

SEQ ID NO: 733855 - DNA, 120 bp, Artificial Sequence
  ENSG00000198836_51 (sequence is synthesized)
tttaacgagggaaagagaaacctgtatacctagggtcattatttgaccccatagtataaccagattcatggtctaacaagctctcagtgtggcttttctctgaatgcttgaatttcacat

SEQ ID NO: 733856 - DNA, 120 bp, Artificial Sequence
  ENSG00000198836_52 (sequence is synthesized)
gccttgcatttcacagttgtactccatggtcaaccggtgctttttttcacatcgtggtacttgtcaaaacattttgttattttccttggtaaaatatataaaaaaggttttctaatttca

SEQ ID NO: 733857 - DNA, 120 bp, Artificial Sequence
  ENSG00000198836_53 (sequence is synthesized)
tgataagctaaagtactttggttttgactataactactaatttgtaagaatacatctctaggagcagttatctctttcagtaatttaaattatttattatataacattaaaaatggatta

SEQ ID NO: 733858 - DNA, 120 bp, Artificial Sequence
  ENSG00000198836_54 (sequence is synthesized)
atgtcaaaacaagtgttgaaagtgttttctgagaaggtaatgaatgtgctttaaaggttttgtagaattcgtgtattcctgtaatttagtgggaattaaacattgtttttccttgatttt

SEQ ID NO: 733859 - DNA, 120 bp, Artificial Sequence
  ENSG00000198836_55 (sequence is synthesized)
agctcggactcaacactacacaccaggccaccacatggcgccgcacccagcattgacacttcttttaccttgtctgggctctgacatccgtgccaggttgctcttcgtcatggagtccct

SEQ ID NO: 733860 - DNA, 120 bp, Artificial Sequence
  ENSG00000198836_56 (sequence is synthesized)
tttactgagctctgctctgacgctttgtgccaggtgcctctccatctcatccttcccacccgctagcctctgcccgaccccagacagattccttcctcacctgaagccagaccatgcctt

SEQ ID NO: 733861 - DNA, 120 bp, Artificial Sequence
  ENSG00000198836_57 (sequence is synthesized)
tgtggagataccctctttaccctgcctgtgcttcgccagcctgcaccaggccaccctcctgcacagatactctcctcagtactggaccaggctaccaacagccccatgtgaacccattgt

SEQ ID NO: 733862 - DNA, 120 bp, Artificial Sequence
  ENSG00000198836_58 (sequence is synthesized)
aacccaggtcaggcattaacacctgcagtaggctaccatggcttccccttcccacccccctagcttggccctactaataatcactttgtcactgtttggggttgatatttggttgtttct

SEQ ID NO: 733863 - DNA, 120 bp, Artificial Sequence
  ENSG00000198836_59 (sequence is synthesized)
tgtaggttcctagctttaagataggattgcatactaaaatttacttagatctttgagaactcaaggaaatcagtgaaacattattgttattaaataaaaataaaatacctgtagttggta

SEQ ID NO: 733864 - DNA, 69 bp, Artificial Sequence
  ENSG00000198836_60 (sequence is synthesized)
tgtccaacatggacaagcatgctaaaggcacaccaagtgactacaagaaatttaagccttgcagtatca

SEQ ID NO: 733865 - DNA, 120 bp, Artificial Sequence
  ENSG00000198836_61 (sequence is synthesized)
ctcaggttatcagtcatgttccttaaaataagaataaaggcgatttgattctttgaatctgagttgctctaaaaatccattcaccttttcattgactcgatgtaatttgaaattcagctt

SEQ ID NO: 733866 - DNA, 120 bp, Artificial Sequence
  ENSG00000198836_62 (sequence is synthesized)
taatgtaaatctacctctagtggctctggtatttttaaacttatttatagctggcaaagtacttttttgtatgtatttttatagcaccattgcacttctcatgtttgttgcaagcatctc

SEQ ID NO: 733867 - DNA, 120 bp, Artificial Sequence
  ENSG00000198836_63 (sequence is synthesized)
ccacagcttcctttgtcttttaattttatgacatataaataaaagtatacatttcaatatggccatattgattgatcttttcctttgtaactcttactactttatatttaaaaagtcatt

SEQ ID NO: 733868 - DNA, 120 bp, Artificial Sequence
  ENSG00000198836_64 (sequence is synthesized)
tcccagtctaaggccacctctattttcttttagttttttaaaatggtttcattgttttatatttgcctatgatccagacattagtaactgtgggttcttaattgggcttcagagaatctg

SEQ ID NO: 733869 - DNA, 120 bp, Artificial Sequence
  ENSG00000198836_65 (sequence is synthesized)
agaattccttaaaattctctacataattgtacatgtacttaatacatgcttttttccatgttaagagtccagagtttttgttagatcctcaaaggggtcagtcagtctctcctcccactt

SEQ ID NO: 733870 - DNA, 120 bp, Artificial Sequence
  ENSG00000198836_66 (sequence is synthesized)
ccaaaaaatgtctgagacctactactataatccatctggactttatttgggtaaaaggtggtatggtgagactcatatttttctttttcccgcaaatagttaagtataccaaccatttag

SEQ ID NO: 733871 - DNA, 120 bp, Artificial Sequence
  ENSG00000198837_0 (sequence is synthesized)
agacgcttgccagggtcacggccgccggccgaggaggaggggtgggggtagcggcggcgcccgcggcccggagcgggggttgggggagtagagaaagcggggcgcgcggaggaacgctgg

SEQ ID NO: 733872 - DNA, 120 bp, Artificial Sequence
  ENSG00000198837_1 (sequence is synthesized)
ggagtagagaaagcggggcgcgcggaggaacgctgggtccccggcgccgcgggagctgggaggaccgagccggccgagcgagcagcgcggcagcacagtccccgcgtggcgcagcgcggc

SEQ ID NO: 733873 - DNA, 120 bp, Artificial Sequence
  ENSG00000198837_2 (sequence is synthesized)
ctgcgccccgcgctctgcggtcctcggccgcctcttcttccttcactcactgcccgggcgggagcggcgcccaagtcgggtgcgccatgtctggggccgggtagccccgccgcccgccgg

SEQ ID NO: 733874 - DNA, 120 bp, Artificial Sequence
  ENSG00000198837_3 (sequence is synthesized)
ccagctcgccctccgagccacccgccagcgggccggccggccgggaagcgcgggacagatgcagtgagtgaggggggggccatggcggaggagcggcccccccggctggtggattacttc

SEQ ID NO: 733875 - DNA, 120 bp, Artificial Sequence
  ENSG00000198837_4 (sequence is synthesized)
gtggtagctgggcttgcagggaacggagcacccatccctgaggaaacgtgggttcctgaacccagtgggcccctgcgccctccccggccagctgagcccatcacagatgtggcagtcatc

SEQ ID NO: 733876 - DNA, 120 bp, Artificial Sequence
  ENSG00000198837_5 (sequence is synthesized)
gctagggcactgggcgaggaagtgccccagggctacacatgcatccaggcttctgctgggggccaccccttggaactcagtgctggacttctgggtggaactcaacccgtcatctgctac

SEQ ID NO: 733877 - DNA, 120 bp, Artificial Sequence
  ENSG00000198837_6 (sequence is synthesized)
cgcaggggccgtgacaagccccccctcgttgagctgggggtgttgtatgaggggaaggaacgtcccaagcctggcttccaagtgcttgacacgacaccctacagccactcagcaaacctg

SEQ ID NO: 733878 - DNA, 120 bp, Artificial Sequence
  ENSG00000198837_7 (sequence is synthesized)
gcccctccaggccccgggcacccccgcacctacctcacttaccggcgggcagcagagggggcagggctgcatgccctgggcatcactgacctctgcctggtgctgcccagtaagggcgag

SEQ ID NO: 733879 - DNA, 120 bp, Artificial Sequence
  ENSG00000198837_8 (sequence is synthesized)
ggcactcctcatacttactgccggctgccccgcaacctcaaccctggcatgtggggcccagcagtgtacctgtgctataaggtgggcctggcgaaggccaacacgctggtgtacgaggca

SEQ ID NO: 733880 - DNA, 120 bp, Artificial Sequence
  ENSG00000198837_9 (sequence is synthesized)
gagctgctgggccgctacccggaggaggacaatgaggcgttcccgctgcccgagtcagtgcccgtcttctgcctgcccatgggggccactatcgagtgctggcctgcccagaccaagtac

SEQ ID NO: 733881 - DNA, 120 bp, Artificial Sequence
  ENSG00000198837_10 (sequence is synthesized)
cccgtgcccgtcttctccacctttgtgctcacgggtgcagctggtgataaggtgtatggtgccgccctgcagttctacgaggcgttcccaagggccaggctatcagagcgacaggcacgg

SEQ ID NO: 733882 - DNA, 120 bp, Artificial Sequence
  ENSG00000198837_11 (sequence is synthesized)
gcactgggcctgctgagcgccgtggagcggggtcgggcactggggggcagagctgtgcgcagccggcgtgccatcgctgtgctgtcccgctggcctgccttccctgccttccgcgccttc

SEQ ID NO: 733883 - DNA, 120 bp, Artificial Sequence
  ENSG00000198837_12 (sequence is synthesized)
ctcaccttcctttaccgctactccgtctcaggcccccaccgcctacccttggaagcgcacatctcccacttcattcacaacgttcccttcccttccccacagagaccccgcatcctagtg

SEQ ID NO: 733884 - DNA, 120 bp, Artificial Sequence
  ENSG00000198837_13 (sequence is synthesized)
cagatgtctccctatgacaacttgctcctctgtcagcctgtatcctcacccctgcccctcagtggtgccagcttcctgcagctgctgcagagcctgggccctgagctggctatcacactg

SEQ ID NO: 733885 - DNA, 120 bp, Artificial Sequence
  ENSG00000198837_14 (sequence is synthesized)
ctgctggctgtgctcacagagcacaagctgctagtccactcgctgcggccagacctgctcaccagcgtctgtgaggccctcgtctcgatgatcttcccactgcactggcagtgcccctac

SEQ ID NO: 733886 - DNA, 120 bp, Artificial Sequence
  ENSG00000198837_15 (sequence is synthesized)
attcctctgtgcccgctggtgctggcagatgtgctgagtgccccagtgcccttcattgtgggtatccactccagctactttgatctgcatgacccgcctgctgatgtcatctgtgtagac

SEQ ID NO: 733887 - DNA, 120 bp, Artificial Sequence
  ENSG00000198837_16 (sequence is synthesized)
cttgataccaacacgctcttccagactgaggaaaagaagctcctctcccctcggaccctgccccgcagaccctacaaggttctgctggccacactgacaaacctgtaccagcagctggac

SEQ ID NO: 733888 - DNA, 120 bp, Artificial Sequence
  ENSG00000198837_17 (sequence is synthesized)
cagacatacactggacctgaggaggaagcatccctggagttcctactgacagactacgaggcagtgtgtggccgcagggcccggctggagcgcgaagtccaaggagccttcctccgcttc

SEQ ID NO: 733889 - DNA, 120 bp, Artificial Sequence
  ENSG00000198837_18 (sequence is synthesized)
atggcctgtctgctcaagggctaccgggtcttcctgcgcccactcacccaggccccctccgagggagctcgtgatgttgacaaccttttcttcctgcagggcttcctcaaatcccgggaa

SEQ ID NO: 733890 - DNA, 120 bp, Artificial Sequence
  ENSG00000198837_19 (sequence is synthesized)
cgctccagccacaaactttactctcagctgctgcacacacagatgttctcacagttcattgaggagtgctcttttggctctgctcgccatgctgcccttgaattctttgactcttgtgtt

SEQ ID NO: 733891 - DNA, 120 bp, Artificial Sequence
  ENSG00000198837_20 (sequence is synthesized)
gaaaaggtccacccagagcaggagaagcctgagccgacacccttagtggagctagaggagctgtcaggaagtgagctcactgtctttatcacacctcccgaggagcctgccttaccagag

SEQ ID NO: 733892 - DNA, 120 bp, Artificial Sequence
  ENSG00000198837_21 (sequence is synthesized)
ggcagtgaatccactccccagtactgctatgatggattcccagagctacgggctgagttgtttgagtctcttcaagagcaacctggggccctgcctgtgccaggcccttcccgtagcgcc

SEQ ID NO: 733893 - DNA, 120 bp, Artificial Sequence
  ENSG00000198837_22 (sequence is synthesized)
cccagcagtcctgctcctcgccgtaccaaacaggagatgaaagttgcacagcggatggcacagaagtcagcagctgtgcctgagctgtgggcccggtgcctgctggggcactgctatggg

SEQ ID NO: 733894 - DNA, 120 bp, Artificial Sequence
  ENSG00000198837_23 (sequence is synthesized)
tggagagcggcaaggtggtgctccctgatgaggtgtgttaccgggtactgatgcagctctgctcacactatgggcagcctgtgctgtctgtgcgggtcatgctggagatgcgtcaggcag

SEQ ID NO: 733895 - DNA, 120 bp, Artificial Sequence
  ENSG00000198837_24 (sequence is synthesized)
gcattgtgcccaacaccatcacctatggctactacaataaggctgtgttggaaagcaagtggccgtctggcacaccaggtgggcgtctgcgctgggccaagctccggaatgttgtcctgg

SEQ ID NO: 733896 - DNA, 120 bp, Artificial Sequence
  ENSG00000198837_25 (sequence is synthesized)
gggcgtctgcgctgggccaagctccggaatgttgtcctgggggctgctcagttccgccagcccttgagagaacggcaacagcagcagcagcagcaacagcagcagcagcagcagcagcag

SEQ ID NO: 733897 - DNA, 120 bp, Artificial Sequence
  ENSG00000198837_26 (sequence is synthesized)
aggcagagccctatttggagcgcccttcccctactcgccctcttcagcgccagactacttgggctgggcgaagtctgagagacccagcctcaccccctggacgcctggtgaagagtggta

SEQ ID NO: 733898 - DNA, 120 bp, Artificial Sequence
  ENSG00000198837_27 (sequence is synthesized)
gcctgggcagtgcccgaggggcacagcccactgtggaggccggtgtggcccacatgatagaggccttgggggtcctggaaccccggggatcacctgtgccctggcacgatggaagtctct

SEQ ID NO: 733899 - DNA, 120 bp, Artificial Sequence
  ENSG00000198837_28 (sequence is synthesized)
cagacctgagcctgacaggggaggagccgctccctggaggcagcccagggggctcaggctcagccctgagtgcccagtccactgaggccctggaagggctaagtgggcggggacccaagg

SEQ ID NO: 733900 - DNA, 120 bp, Artificial Sequence
  ENSG00000198837_29 (sequence is synthesized)
ctggtgggcgacaggatgaggcaggcaccccccgacgagggctgggtgcccgcctccaacagctgctcactccttcccgccactcccctgcctcccgcattcccccacctgagctgcctc

SEQ ID NO: 733901 - DNA, 120 bp, Artificial Sequence
  ENSG00000198837_30 (sequence is synthesized)
ctgacctgccacccccagcccgccgcagccccatggacagtcttctgcacccccgggagcgccctggatccactgcctccgagagctcagcctctctgggcagtgagtgggacctctcag

SEQ ID NO: 733902 - DNA, 120 bp, Artificial Sequence
  ENSG00000198837_31 (sequence is synthesized)
aatcttctctcagcaacctgagtcttcgccgttcctcagagcgcctcagtgacacccctggatccttccagtcaccttccctggaaattctgctgtccagctgctccctgtgccgtgcct

SEQ ID NO: 733903 - DNA, 120 bp, Artificial Sequence
  ENSG00000198837_32 (sequence is synthesized)
gtgattcgctggtgtatgatgaggaaatcatggctggctgggcacctgatgactctaacctcaacacaacctgccccttctgcgcctgcccctttgtgcccctgctcagtgtccagaccc

SEQ ID NO: 733904 - DNA, 120 bp, Artificial Sequence
  ENSG00000198837_33 (sequence is synthesized)
ttgattcccggcccagtgtccccagccccaaatctgctggtgccagtggcagcaaagatgctcctgtccctggtggtcctggccctgtgctcagtgaccgaaggctctgccttgctctgg

SEQ ID NO: 733905 - DNA, 120 bp, Artificial Sequence
  ENSG00000198837_34 (sequence is synthesized)
atgagccccagctctgcaacgggcacatggggggagcctcccggcgggttgagagtggggcatgggcatacctgagccccctggtgctgcgtaaggagctggagtcgctggtagagaacg

SEQ ID NO: 733906 - DNA, 120 bp, Artificial Sequence
  ENSG00000198837_35 (sequence is synthesized)
agggcagtgaggtgctggcgttgcctgaactgccctctgcccaccccatcatcttctggaaccttttgtggtatttccaacggctacgcctgcccagtattctaccaggcctggtgctgg

SEQ ID NO: 733907 - DNA, 120 bp, Artificial Sequence
  ENSG00000198837_36 (sequence is synthesized)
cctcctgtgatgggccttcgcactcccaggccccatctccttggctaacccctgatccagcctctgttcaggtacggctgctgtgggatgtactgacccctgaccccaatagctgcccac

SEQ ID NO: 733908 - DNA, 120 bp, Artificial Sequence
  ENSG00000198837_37 (sequence is synthesized)
ctctctatgtgctctggagggtccacagccagatcccccagcgggtggtatggccaggccctgtacctgcatcccttagtttggcactgttggagtcagtgctgcgccatgttggactca

SEQ ID NO: 733909 - DNA, 120 bp, Artificial Sequence
  ENSG00000198837_38 (sequence is synthesized)
atgaagtgcacaaggctgtggggctcctgctggaaactctagggcccccacccactggcctgcacctgcagaggggaatctaccgtgagatattattcctgacaatggctgctctgggca

SEQ ID NO: 733910 - DNA, 120 bp, Artificial Sequence
  ENSG00000198837_39 (sequence is synthesized)
aggaccacgtggacatagtggccttcgataagaagtacaagtctgcctttaacaagctggccagcagcatgggcaaggaggagctgaggcaccggcgggcgcagatgcccactcccaagg

SEQ ID NO: 733911 - DNA, 120 bp, Artificial Sequence
  ENSG00000198837_40 (sequence is synthesized)
ccattgactgccgaaaatgttttggagcacctccagaatgctagagaccttaagcttccctctccagcctagggtggggaagtgaggaagaagggattctagagttaaactgcttccctg

SEQ ID NO: 733912 - DNA, 120 bp, Artificial Sequence
  ENSG00000198837_41 (sequence is synthesized)
ttgccttcatggagttgggaacaggctgggaaggatgcccagtcaaaggctccaagcgaggacaacaggaagagggatccactgttaccaaaagtcctgattcccccatcaccaacctac

SEQ ID NO: 733913 - DNA, 120 bp, Artificial Sequence
  ENSG00000198837_42 (sequence is synthesized)
ccagtttgttcgtgctgatgttgggggagatctggggggagttggtacagctctgttcttcccttgtcctataccgggaactcccctccagggtacccacagatctgcattgccctggtc

SEQ ID NO: 733914 - DNA, 120 bp, Artificial Sequence
  ENSG00000198837_43 (sequence is synthesized)
attttagaagtttttgttttaaaaaacaactggaaagatgcagagctactgagcctttgccctgaatgggaggtagggatgtcattctccaccaataatggtccctcttccctgacgttg

SEQ ID NO: 733915 - DNA, 120 bp, Artificial Sequence
  ENSG00000198837_44 (sequence is synthesized)
ctgaaggagcccaaggctctccatgcctttctacctaagtgtttgtattttattttaaattatttattctggagccacagcccccttgcttatgaggttcttatggagagtgagaaaggg

SEQ ID NO: 733916 - DNA, 120 bp, Artificial Sequence
  ENSG00000198837_45 (sequence is synthesized)
aagggaaatagggcaccatggtccggtggtttgtagttccttcaaagtcaggcactgggagctagaggagtctcaagctccccttaggaagaactggtgccccctccagtcctaattttt

SEQ ID NO: 733917 - DNA, 120 bp, Artificial Sequence
  ENSG00000198837_46 (sequence is synthesized)
cttgcctgccccgccttggggaatgcctcacccacccaggtcctgacctgtgcaataaggattgttccctgcgaagttttgttggatgtaaatatagtaaaagctgcttctgtctttttc

SEQ ID NO: 733918 - DNA, 120 bp, Artificial Sequence
  ENSG00000198837_47 (sequence is synthesized)
ctgagtcttcgccgttcctcagagcgcctcagtgacacccctggatccttccagtcaccttccctggaagtgaggataacccctcccacacagatgtgcttgaacacacatagcacacac

SEQ ID NO: 733919 - DNA, 120 bp, Artificial Sequence
  ENSG00000198837_48 (sequence is synthesized)
tcaccctgtccaaggcaggagatggggaggaggtgggaggggctggggaaggggcatgggctccagagtgctggcggccagacagcacctacttcccgactctccctgcccacagattct

SEQ ID NO: 733920 - DNA, 120 bp, Artificial Sequence
  ENSG00000198837_49 (sequence is synthesized)
cagctctgcaacgggcacatgggggtaagggctgggccaaaggggcatgaggaacgggaatgttgccctgtgtggggcctgtggggtgccagggagagatgggcacatctcttgcccttg

SEQ ID NO: 733921 - DNA, 120 bp, Artificial Sequence
  ENSG00000198837_50 (sequence is synthesized)
agggcaaggggcatcccaaaagctgttggatgtggtggctcagtgggaggcaaggctctggggatgtacatgccctctactgccctccccctttgtgcctgatagggagcctcccggcgg

SEQ ID NO: 733922 - DNA, 120 bp, Artificial Sequence
  ENSG00000198837_51 (sequence is synthesized)
ctgggtgatccctggtctgtccggggctccacaccccttttctctcactcatacacttctgcctccactaaaggggaatctaccgtgagatattattcctgacaatggctgctctgggca

SEQ ID NO: 733923 - DNA, 120 bp, Artificial Sequence
  ENSG00000198837_52 (sequence is synthesized)
tcccctctgaagcaccccccacgcttctgggcccctgctgcgagctacccaccaggctttttcccagcttctgcaccctggggcgcctcaggacccttggggctcctactccccggggtt

SEQ ID NO: 733924 - DNA, 120 bp, Artificial Sequence
  ENSG00000198837_53 (sequence is synthesized)
acatccctttgccctggtgcctcttggcaggcaccttaagtgtccccagagtttactttctctttgctactcgggccttctctgggatcccttggttcatttcccttggagtctgatgga

SEQ ID NO: 733925 - DNA, 120 bp, Artificial Sequence
  ENSG00000198837_54 (sequence is synthesized)
ccctgctccttttgggtacccccaactatgctgggggtgcagagctgctgggccgctacccggaggaggacaatgaggcgttcccgctgcccgagtcagtgcccgtcttctgcctgccca

SEQ ID NO: 733926 - DNA, 120 bp, Artificial Sequence
  ENSG00000198837_55 (sequence is synthesized)
gtccaggtggtggctgtgcctggcatctggggaagggtccccagggtatcctggtgaccctttccccacctcggcattgcctgcagtggtgccagcttcctgcagctgctgcagagcctg

SEQ ID NO: 733927 - DNA, 120 bp, Artificial Sequence
  ENSG00000198837_56 (sequence is synthesized)
caagtaccccgtgcccgtcttctccacctttgtgctcacgggtgcagctggtgataaggtgggtgtgtggagtgtggcaaggggtccaggctatgcagggcctgcctgactacccttctg

SEQ ID NO: 733928 - DNA, 120 bp, Artificial Sequence
  ENSG00000198837_57 (sequence is synthesized)
ctactacaataaggtacctactttggggtgaggggtgggatggcagctgtgccagggtgtgtgaggggaggctgctgctgctcccctcgctccttggagattgggctggtactgtttgcc

SEQ ID NO: 733929 - DNA, 120 bp, Artificial Sequence
  ENSG00000198837_58 (sequence is synthesized)
taggtcctggaaccactgtcatccacattgcactcctgtggtgccttagcacctacagtttctcagacgaggctgctttgattcccactcatgacagccctgcctacaactaatagtgtc

SEQ ID NO: 733930 - DNA, 120 bp, Artificial Sequence
  ENSG00000198837_59 (sequence is synthesized)
cttaaggaggtgagtgaagttaggattgcatttggtggaactgagggagattccaattccaactgaagctagaaggaagggcagacagtattcctgaacatgtgggaaatatcaagcttg

SEQ ID NO: 733931 - DNA, 120 bp, Artificial Sequence
  ENSG00000198837_60 (sequence is synthesized)
aacctgttagttgaaggtaatactttagttgctactggtgcaaggtctgccagaggctggaggtggagatggaggcatgagagcagagttgagggtaacactatgggagccagccctgac

SEQ ID NO: 733932 - DNA, 120 bp, Artificial Sequence
  ENSG00000198838_0 (sequence is synthesized)
ggaggaggagaaagagcgcagcagcagtcagcgcacgccgagcggctgccgggggaagcagaggcgccggaggctggggcaccgccgacgcctcgggagccatggccgaagggggagaag

SEQ ID NO: 733933 - DNA, 120 bp, Artificial Sequence
  ENSG00000198838_1 (sequence is synthesized)
gaggcgaggacgagatccagtttctgaggactgaggatgaagtggtactccagtgcatcgccaccattcataaggagcagaggaagttctgcctggcagccgagggacttgggaatcgcc

SEQ ID NO: 733934 - DNA, 120 bp, Artificial Sequence
  ENSG00000198838_2 (sequence is synthesized)
tgtgcttcttggaacccacttcagaagccaagtacattcctccagatctctgcgtctgcaattttgtgctggaacagtccctatctgtcagagccctgcaggaaatgcttgccaacacag

SEQ ID NO: 733935 - DNA, 120 bp, Artificial Sequence
  ENSG00000198838_3 (sequence is synthesized)
gtgaaaatggcggcgaaggggcagcacaaggaggtggccacaggaccctgttatacggccatgcagttctcctgaggcactctttcagcggaatgtatctaacatgcttgactacatcaa

SEQ ID NO: 733936 - DNA, 120 bp, Artificial Sequence
  ENSG00000198838_4 (sequence is synthesized)
gatcccagacagacaaacttgcctttgatgtaggtctacgggaacatgccacaggagaagcctgttggtggactatacatcctgcttccaaacagaggtccgaaggagagaaagttcgaa

SEQ ID NO: 733937 - DNA, 120 bp, Artificial Sequence
  ENSG00000198838_5 (sequence is synthesized)
ttggcgatgacctcatcctcgtcagcgtgtcctctgaaagataccttcatctctcagtatcaaatggtaacatacaagtggatgcctcctttatgcaaacactctggaatgtacatccta

SEQ ID NO: 733938 - DNA, 120 bp, Artificial Sequence
  ENSG00000198838_6 (sequence is synthesized)
cgtgctcaggaagtagcatcgaagaaggatacctacttggtgggcatgtagtacgtcttttccatggtcatgatgaatgtttgacgataccatctacagaccagaatgattcccagcaca

SEQ ID NO: 733939 - DNA, 120 bp, Artificial Sequence
  ENSG00000198838_7 (sequence is synthesized)
ggaggatattctacgaagctgggggagctgggactcgagccaggtctctttggagagtggaaccccttcggataagctggagtggcagtaacatcagatggggccaggctttccgactcc

SEQ ID NO: 733940 - DNA, 120 bp, Artificial Sequence
  ENSG00000198838_8 (sequence is synthesized)
ggcatctcaccacaggccactacctggccttgacagaagaccaaggccttatactgcaagaccgggcaaagtcagacaccaagtccacagctttctctttccgggcatcaaaggaactca

SEQ ID NO: 733941 - DNA, 120 bp, Artificial Sequence
  ENSG00000198838_9 (sequence is synthesized)
aggagaaattagactccagtcacaagcgagacatagaaggcatgggagttccagaaatcaagtatggagattctgtctgctttgtgcagcatatagccagtggtctgtgggtgacctaca

SEQ ID NO: 733942 - DNA, 120 bp, Artificial Sequence
  ENSG00000198838_10 (sequence is synthesized)
aagcacaagacgccaaaacttcccgcctgggacctctaaaaagaaaggtcatactccatcaggaaggccacatggatgatggattaacactgcagagatgccagcgtgaggagtcccagg

SEQ ID NO: 733943 - DNA, 120 bp, Artificial Sequence
  ENSG00000198838_11 (sequence is synthesized)
ctgctcggatcatccggaacactacagccttattcagccagtttgtcagcggaaacaatcgcacagctgcccccatcaccctgcctatagaagaagtcctgcagaccctacaggacttga

SEQ ID NO: 733944 - DNA, 120 bp, Artificial Sequence
  ENSG00000198838_12 (sequence is synthesized)
tcgcctacttccagcccccagaggaggagatgcgacatgaagacaagcagaacaagctccgctcactcaaaaacagacaaaatcttttcaaggaagagggaatgttggcccttgtcttaa

SEQ ID NO: 733945 - DNA, 120 bp, Artificial Sequence
  ENSG00000198838_13 (sequence is synthesized)
attgcattgaccgcttaaatgtctacaatagcgtagcacactttgcagggattgcaagggaagagagtggcatggcctggaaagaaattctgaacctcctctacaaattgctggctgctc

SEQ ID NO: 733946 - DNA, 120 bp, Artificial Sequence
  ENSG00000198838_14 (sequence is synthesized)
tcattcgcggaaacagaaacaattgcgctcaattctccaataaccttgattggctcatcagtaaattggacagactagaatcttcctcaggtatcttggaagttttgcactgcatcttaa

SEQ ID NO: 733947 - DNA, 120 bp, Artificial Sequence
  ENSG00000198838_15 (sequence is synthesized)
ctgaaagcccagaagccttaaatctgatagcggagggccacatcaagtcgatcatctccctgttggataagcacgggcggaatcacaaggttctggatatcctgtgctccctctgtctct

SEQ ID NO: 733948 - DNA, 120 bp, Artificial Sequence
  ENSG00000198838_16 (sequence is synthesized)
gcaatggggttgcagtgagagccaaccagaatctgatctgtgacaacttgctgccccggagaaacctactcctgcagacacgactgattaacgatgtaaccagtatccggccaaacatct

SEQ ID NO: 733949 - DNA, 120 bp, Artificial Sequence
  ENSG00000198838_17 (sequence is synthesized)
tcctgggagtcgcggagggctcagcccagtacaagaagtggtacttcgagctgattatcgaccaggtggaccccttcctaacagcagagcccacacatctgcgggtgggctgggcctctt

SEQ ID NO: 733950 - DNA, 120 bp, Artificial Sequence
  ENSG00000198838_18 (sequence is synthesized)
cttcaggctatgccccatacccaggaggtggagaaggatggggaggcaatggtgttggtgacgacctgtactcctatggctttgatggacttcacctttggtcaggccggatacccagag

SEQ ID NO: 733951 - DNA, 120 bp, Artificial Sequence
  ENSG00000198838_19 (sequence is synthesized)
ctgtggcttccatcaaccagcacctcctgagatcggatgacgtggtaagctgctgcctggacctcggggtgcccagcatctcattccgcatcaatgggcagcccgtgcaggggatgtttg

SEQ ID NO: 733952 - DNA, 120 bp, Artificial Sequence
  ENSG00000198838_20 (sequence is synthesized)
agaacttcaacacagacgggctcttcttccctgtgatgagcttttcagcaggtgtcaaagtacgtttcctgatgggtggacgtcatggagagtttaagttcctgcctccctctggctatg

SEQ ID NO: 733953 - DNA, 120 bp, Artificial Sequence
  ENSG00000198838_21 (sequence is synthesized)
ccccttgctatgaagccttacttccaaaagagaagatgagattggagcctgtcaaagaatataaacgtgatgctgatggcattagagatctcttgggtaccacccagttcctctcccaag

SEQ ID NO: 733954 - DNA, 120 bp, Artificial Sequence
  ENSG00000198838_22 (sequence is synthesized)
cctctttcatcccatgccccgtagacaccagtcaggttattttgccacctcacctagaaaagatccgagacagactagctgaaaacatccatgagctttggggaatgaataaaatagaac

SEQ ID NO: 733955 - DNA, 120 bp, Artificial Sequence
  ENSG00000198838_23 (sequence is synthesized)
ttggctggactttcggcaagatacgagatgacaataaaagacaacacccttgccttgtggagttttcaaagctcccagaaactgagaagaactataacctgcaaatgtcaactgaaacct

SEQ ID NO: 733956 - DNA, 120 bp, Artificial Sequence
  ENSG00000198838_24 (sequence is synthesized)
taaaaaccctcttggccctggggtgccacattgctcatgttaacccagctgctgaggaggatctcaagaaggtcaaactgcccaaaaactatatgatgtccaacggctataagccagccc

SEQ ID NO: 733957 - DNA, 120 bp, Artificial Sequence
  ENSG00000198838_25 (sequence is synthesized)
ctttggatttgtctgatgtgaagctgttacctcctcaagaaattttagtggataagcttgcagaaaatgcacacaatgtttgggcaaaagacagaataaaacaaggatggacctatggca

SEQ ID NO: 733958 - DNA, 120 bp, Artificial Sequence
  ENSG00000198838_26 (sequence is synthesized)
tccaacaggatttgaagaacaaaagaaatccccgtctggtgccatatgcattactggatgagcgtaccaagaagtcaaacagggacagcctgcgggaagctgtgcgcacttttgttggtt

SEQ ID NO: 733959 - DNA, 120 bp, Artificial Sequence
  ENSG00000198838_27 (sequence is synthesized)
acgggtataacattgagccatcagaccaagaactagctgactcggctgtggagaaggtcagcatagacaagatccgatttttccgggtagagcgatcttatgcagtgagatctggaaagt

SEQ ID NO: 733960 - DNA, 120 bp, Artificial Sequence
  ENSG00000198838_28 (sequence is synthesized)
ggtattttgagtttgaagtggtgactggaggagacatgcgagtcggctgggcgaggccaggctgtcgacctgatgtcgagctgggggccgatgaccaagcctttgtgtttgaaggcaaca

SEQ ID NO: 733961 - DNA, 120 bp, Artificial Sequence
  ENSG00000198838_29 (sequence is synthesized)
ggggccagcgttggcatcaaggaagtgggtattttgggcgtacctggcagccaggggatgtggtcggatgtatgattaacctggatgatgcttcaatgatcttcacactgaatggggagc

SEQ ID NO: 733962 - DNA, 120 bp, Artificial Sequence
  ENSG00000198838_30 (sequence is synthesized)
tgctgatcaccaacaaaggctctgaacttgccttcgctgactacgagattgagaatggcttcgtgcccatctgctgtctgggtctatctcagatcggccgcatgaatctcgggacagatg

SEQ ID NO: 733963 - DNA, 120 bp, Artificial Sequence
  ENSG00000198838_31 (sequence is synthesized)
ccagtaccttcaagttttataccatgtgcggtctccaagagggctttgagccttttgctgtcaacatgaacagagatgttgctatgtggttcagcaagcgcctcccgacgtttgtcaacg

SEQ ID NO: 733964 - DNA, 120 bp, Artificial Sequence
  ENSG00000198838_32 (sequence is synthesized)
tgccaaaggatcatccacacatagaggtcatgaggattgatggcaccatggacagccctccgtgtctcaaggtgacgcataagacatttggcacacagaatagcaatgccgacatgatct

SEQ ID NO: 733965 - DNA, 120 bp, Artificial Sequence
  ENSG00000198838_33 (sequence is synthesized)
attgccgcttgagcatgcctgtcgagtgccactcctccttcagccacagcccctgtctggacagtgaagctttccagaaaaggaaacagatgcaagaaatactctctcatacaacaacac

SEQ ID NO: 733966 - DNA, 120 bp, Artificial Sequence
  ENSG00000198838_34 (sequence is synthesized)
agtgctactacgccatccgcatctttgctggacaggatccatcctgtgtctgggtcggatgggtgactccagactatcacttgtacagtgaaaagtttgacctgaataaaaactgcacag

SEQ ID NO: 733967 - DNA, 120 bp, Artificial Sequence
  ENSG00000198838_35 (sequence is synthesized)
tgactgtcaccctaggggatgaaagaggccgggtccatgaaagtgtgaaacgcagcaactgctacatggtctggggtggagacattgtagccagttcccagagatcaaatcggagcaacg

SEQ ID NO: 733968 - DNA, 120 bp, Artificial Sequence
  ENSG00000198838_36 (sequence is synthesized)
tggacctggagatcggctgtctcgtggatctggccatgggcatgttgtccttctcagccaatggaaaggaactgggcacctgctaccaggtggagcctaataccaaagtgtttccagcag

SEQ ID NO: 733969 - DNA, 120 bp, Artificial Sequence
  ENSG00000198838_37 (sequence is synthesized)
tcttcctgcagcctacaagtacttctttgtttcagtttgaacttggaaagctgaagaacgcaatgcccctgtcagcggccatattcaggagtgaagagaagaacccagtcccacagtgtc

SEQ ID NO: 733970 - DNA, 120 bp, Artificial Sequence
  ENSG00000198838_38 (sequence is synthesized)
cacctcggctggacgtccaaaccatccagcccgtgctctggagccgcatgcccaacagcttcctgaaggtggagaccgagcgtgtgagcgagcgccacggctgggtggtgcagtgcctgg

SEQ ID NO: 733971 - DNA, 120 bp, Artificial Sequence
  ENSG00000198838_39 (sequence is synthesized)
agcccctgcagatgatggcgctccacatccccgaggagaacaggtgtgtggatatcctggagctctgtgagcaggaggacctgatgcggttccattaccacacgctgaggctctacagcg

SEQ ID NO: 733972 - DNA, 120 bp, Artificial Sequence
  ENSG00000198838_40 (sequence is synthesized)
cggtgtgcgccctgggaaacagccgcgtggcctacgccctgtgcagccacgtggacctctcccagctcttctatgccattgacaacaagtacctccccggcctccttcgatctggtttct

SEQ ID NO: 733973 - DNA, 120 bp, Artificial Sequence
  ENSG00000198838_41 (sequence is synthesized)
atgacctgctcatcagcatccacctggccagcgccaaggagaggaagctgatgatgaagaacgagtacatcatccccattaccagcaccaccaggaatatccgcctcttcccggacgagt

SEQ ID NO: 733974 - DNA, 120 bp, Artificial Sequence
  ENSG00000198838_42 (sequence is synthesized)
ccaagaggcatggactgcctggggtgggcctgagaacatgtctcaagcccgggttcaggttctccaccccttgctttgttgtgactggtgaggatcaccaaaagcagagccccgagattc

SEQ ID NO: 733975 - DNA, 120 bp, Artificial Sequence
  ENSG00000198838_43 (sequence is synthesized)
ccttggagagtctcaggacgaaggctctgagtatgctgacagaggcagtgcagtgcagcggggcccacatccgagaccctgtaggggggtctgtggagttccagtttgtgcctgtgctga

SEQ ID NO: 733976 - DNA, 120 bp, Artificial Sequence
  ENSG00000198838_44 (sequence is synthesized)
aactcattggaaccctgctggtcatgggcgtgtttgatgatgatgatgttcggcagatcctcctcctgattgatccctctgtgtttggggagcatagtgcggggacagaggagggagcag

SEQ ID NO: 733977 - DNA, 120 bp, Artificial Sequence
  ENSG00000198838_45 (sequence is synthesized)
aaaaggaggaagtgacccaggtggaggagaaggctgtggaggctggggagaaggccggcaaggaggctcctgtcaaaggcttgttgcagactcgattacccgaatccgtcaagctgcaga

SEQ ID NO: 733978 - DNA, 120 bp, Artificial Sequence
  ENSG00000198838_46 (sequence is synthesized)
tgtgtgagctcctcagctatctctgcgactgtgagctgcagcaccgagtggaggccattgtggcatttggtgacatttatgtctccaagctgcaggcaaatcagaagttccgctacaatg

SEQ ID NO: 733979 - DNA, 120 bp, Artificial Sequence
  ENSG00000198838_47 (sequence is synthesized)
agctcatgcaggccctgaacatgtctgcggccctgactgcccggaagaccaaggagttccgctcacccccacaggagcagatcaacatgctgcttaactttcaactgggagagaactgcc

SEQ ID NO: 733980 - DNA, 120 bp, Artificial Sequence
  ENSG00000198838_48 (sequence is synthesized)
cctgcccagaggagattcgggaggagctgtatgatttccatgaggaccttctccttcactgtggggttcctttggaagaagaggaagaggaggaggaggacacctcctggacaggaaaac

SEQ ID NO: 733981 - DNA, 120 bp, Artificial Sequence
  ENSG00000198838_49 (sequence is synthesized)
tctgtgccttggtttacaaaatcaaaggcccacccaagccagagaaggagcagccgacggaggaggaggagagatgccccacaacattgaaggaactcatctcacagacgatgatctgct

SEQ ID NO: 733982 - DNA, 120 bp, Artificial Sequence
  ENSG00000198838_50 (sequence is synthesized)
gggcccaggaggaccagatccaggattcagagctggtccgaatgatgttcaacctcctccggaggcagtatgacagcattggggagctgctgcaggcgctgcggaagacctacaccatca

SEQ ID NO: 733983 - DNA, 120 bp, Artificial Sequence
  ENSG00000198838_51 (sequence is synthesized)
gccacacctctgtaagcgacaccatcaacctgctggctgccctgggccaaatccgctccctcctcagtgtcaggatgggcaaggaagaggagttgctcatgatcaatgggctgggagaca

SEQ ID NO: 733984 - DNA, 120 bp, Artificial Sequence
  ENSG00000198838_52 (sequence is synthesized)
taatgaacaacaaggtgttttaccagcatcccaacctcatgagagtcctgggcatgcacgagacggtgatggaggtgatggtgaacgtgttgggtacagagaaatctcagattgcatttc

SEQ ID NO: 733985 - DNA, 120 bp, Artificial Sequence
  ENSG00000198838_53 (sequence is synthesized)
caaagatggttgctagctgctgccgtttcctttgctatttctgtcgaattagccggcaaaatcagaaggccatgtttgagcatctgagttatcttctggagaatagcagtgttggcctag

SEQ ID NO: 733986 - DNA, 120 bp, Artificial Sequence
  ENSG00000198838_54 (sequence is synthesized)
cctccccgtcgatgaggggatccaccccgctggatgtggcagcttcctctgtgatggacaacaatgagttagcgctgagcttagaggaaccagacctcgagaaggtggtgacctacttgg

SEQ ID NO: 733987 - DNA, 120 bp, Artificial Sequence
  ENSG00000198838_55 (sequence is synthesized)
caggctgtggcctacagagctgccccatgcttctggccaaaggataccctgatgtcggctggaaccccattgaaggggaacgctacctgtccttcctgaggtttgctgtcttcgtgaaca

SEQ ID NO: 733988 - DNA, 120 bp, Artificial Sequence
  ENSG00000198838_56 (sequence is synthesized)
gtgagagtgtggaagaaaacgccagcgttgtggtcaagctgctcatcagacgcccagagtgcttcggcccggccctgcggggtgaggggggaaacgggctcttggcagccatgcagggtg

SEQ ID NO: 733989 - DNA, 120 bp, Artificial Sequence
  ENSG00000198838_57 (sequence is synthesized)
ccattaagatctctgagaacccagcgctcgacctcccctctcaaggatacaaaagagaagtcagcacgggggacgatgaagaggaagaagaaatcgtgcatatgggcaatgcaattatgt

SEQ ID NO: 733990 - DNA, 120 bp, Artificial Sequence
  ENSG00000198838_58 (sequence is synthesized)
cattttattcggcccttatagatctactgggccgctgtgctcctgaaatgcacctcatccagacaggaaagggggaagccatccgcatcaggtccatcctgcgctccctggtccccacag

SEQ ID NO: 733991 - DNA, 120 bp, Artificial Sequence
  ENSG00000198838_59 (sequence is synthesized)
aagacctggttgggatcatcagcatccccttgaaactgccctccctcaacaaagatgggtcggtcagtgagccagatatggcggccaatttctgccctgaccacaaggcacctatggtgc

SEQ ID NO: 733992 - DNA, 120 bp, Artificial Sequence
  ENSG00000198838_60 (sequence is synthesized)
tgttcttggaccgcgtttatggcattaaggatcaaacttttctgctccacttgctggaggttggatttttacctgacctaagagcttctgcctctctagatacagtttccctaagcacca

SEQ ID NO: 733993 - DNA, 120 bp, Artificial Sequence
  ENSG00000198838_61 (sequence is synthesized)
cagaggctgcgcttgcactaaataggtatatatgttctgctgtgctcccgctcctcacaagatgtgcccctctctttgccggaacagaacactgcacctctctgattgattccacactgc

SEQ ID NO: 733994 - DNA, 120 bp, Artificial Sequence
  ENSG00000198838_62 (sequence is synthesized)
agacaatatacaggctatccaagggacgttccctcaccaaagcacaaagggacactatagaagaatgtttgcttgccatttgcaatcacttgaggccttccatgttacagcaactcctgc

SEQ ID NO: 733995 - DNA, 120 bp, Artificial Sequence
  ENSG00000198838_63 (sequence is synthesized)
gacgcctcgtttttgatgtgccgcaactcaatgaatactgcaaaatgcctctcaagcttctgacgaatcactatgaacagtgttggaagtattactgcctgccttcaggatgggggagct

SEQ ID NO: 733996 - DNA, 120 bp, Artificial Sequence
  ENSG00000198838_64 (sequence is synthesized)
cttgtctcagtgctatagctggggccttgccaccagattatttagataccagaatcacagccacgttggagaaacagatctcagtggatgcggatggcaactttgacccaaaacctatta

SEQ ID NO: 733997 - DNA, 120 bp, Artificial Sequence
  ENSG00000198838_65 (sequence is synthesized)
acaccatgaatttttccttgcctgaaaaattggaatacatcgtcaccaagtatgctgagcattcacatgataaatgggcctgtgacaagagtcagagtggatggaaatatgggatttccc

SEQ ID NO: 733998 - DNA, 120 bp, Artificial Sequence
  ENSG00000198838_66 (sequence is synthesized)
tggatgaaaatgtgaagacccacccactgataaggcctttcaagacattaacggagaaggagaaggaaatttatcgctggcctgcgcgagagtccctgaaaaccatgctggctgtgggct

SEQ ID NO: 733999 - DNA, 120 bp, Artificial Sequence
  ENSG00000198838_67 (sequence is synthesized)
ggactgtggagaggaccaaagagggagaagctttggttcaacagcgggaaaatgagaagcttcgaagtgtgtcccaggccaaccagggcaacagctacagtcctgctcccctcgacctct

SEQ ID NO: 734000 - DNA, 120 bp, Artificial Sequence
  ENSG00000198838_68 (sequence is synthesized)
caaacgttgtgctctccagagagctccagggaatggtggaggtcgtggctgagaactatcacaatatctgggccaagaagaagaagctggagctggagagcaaaggtggtggcagccacc

SEQ ID NO: 734001 - DNA, 120 bp, Artificial Sequence
  ENSG00000198838_69 (sequence is synthesized)
ctcttctggtaccatatgacaccttgactgccaaggaaaagttcaaggaccgggagaaggcacaggacctgtttaagttcctccaagtgaatggcatcatagtttccaggggtatgaagg

SEQ ID NO: 734002 - DNA, 120 bp, Artificial Sequence
  ENSG00000198838_70 (sequence is synthesized)
atatggagctggatgcctcctccatggagaagaggtttgcctataagttcttgaagaagatcctgaaatacgttgattctgctcaagaatttattgcccatttagaagccattgtcagca

SEQ ID NO: 734003 - DNA, 120 bp, Artificial Sequence
  ENSG00000198838_71 (sequence is synthesized)
gtgggaaaactgaaaagtctccccgtgaccaggagatcaaattctttgccaaagttctcctcccgctggttgaccagtacttcaccagtcattgcctctacttcttgtcatcccctctga

SEQ ID NO: 734004 - DNA, 120 bp, Artificial Sequence
  ENSG00000198838_72 (sequence is synthesized)
agccccttagcagcagcggatatgcctcccataaggagaaagaaatggtggccggcctgttctgcaaacttgccgctctcgttagacacagaatttccctctttggtagtgattctacta

SEQ ID NO: 734005 - DNA, 120 bp, Artificial Sequence
  ENSG00000198838_73 (sequence is synthesized)
caatggtgagctgtcttcacatcttagctcagacacttgacacaaggactgtcatgaagtcaggctcagagctggtgaaggctgggttacgagcattctttgaaaatgctgcagaagatt

SEQ ID NO: 734006 - DNA, 120 bp, Artificial Sequence
  ENSG00000198838_74 (sequence is synthesized)
tggagaagacttcagaaaacctgaaacttgggaagttcacccattcccgaacgcagattaaaggcgtttctcagaatattaactacactacagtggctctgctccccatcctgacgtcca

SEQ ID NO: 734007 - DNA, 120 bp, Artificial Sequence
  ENSG00000198838_75 (sequence is synthesized)
tctttgagcacgtcactcagcatcagtttggaatggatctactcttgggtgatgtgcagatttcatgctaccacatactgtgcagcctctactcccttgggacgggaaagaacatttatg

SEQ ID NO: 734008 - DNA, 120 bp, Artificial Sequence
  ENSG00000198838_76 (sequence is synthesized)
ttgaaaggcaacgccctgcccttggagaatgtctggcctcgctggcagctgccataccagtggcattcctggagcccacccttaatcgctacaatccactctcggtcttcaacaccaaaa

SEQ ID NO: 734009 - DNA, 120 bp, Artificial Sequence
  ENSG00000198838_77 (sequence is synthesized)
cccccagggagaggtctattctggggatgccagacacggtagaagacatgtgtcctgacatcccccagctggaaggcctgatgaaggaaatcaacgacctggccgagtcaggggcccggt

SEQ ID NO: 734010 - DNA, 120 bp, Artificial Sequence
  ENSG00000198838_78 (sequence is synthesized)
acacagagatgccccatgtcatcgaggtgatcttacccatgctctgcaactacttgtcctactggtgggagcggggtcctgagaacctgccccccagcacagggccatgctgcaccaagg

SEQ ID NO: 734011 - DNA, 120 bp, Artificial Sequence
  ENSG00000198838_79 (sequence is synthesized)
tcacctctgaacacctcagtctcatcctgggcaacattctgaaaatcatcaacaacaacctgggcatcgatgaggcctcctggatgaagcgcattgcagtgtatgcacagcccatcatca

SEQ ID NO: 734012 - DNA, 120 bp, Artificial Sequence
  ENSG00000198838_80 (sequence is synthesized)
gcaaagccaggcccgacctgctgagaagccacttcatcccaactctggagaagctgaagaaaaaggctgtcaagacggtgcaggaggaggagcagttgaaagccgatggcaaaggggaca

SEQ ID NO: 734013 - DNA, 120 bp, Artificial Sequence
  ENSG00000198838_81 (sequence is synthesized)
cccaggaggcagaactcctcatcctggacgagttcgcggtcctctgcagagatctctatgccttctaccccatgctgatccgctacgtggacaacaacagatctaactggctgaaaagtc

SEQ ID NO: 734014 - DNA, 120 bp, Artificial Sequence
  ENSG00000198838_82 (sequence is synthesized)
ctgatgctgattctgaccagctcttccgcatggtggcagaagtcttcattctgtggtgtaaatctcataacttcaagagagaagagcaaaattttgtgattcagaatgaaattaataatt

SEQ ID NO: 734015 - DNA, 120 bp, Artificial Sequence
  ENSG00000198838_83 (sequence is synthesized)
tggcatttttaactggagacagcaaaagcaagatgtcaaaagccatgcaagtaaagtctggaggacaagaccaggagcggaagaagacaaagcggcggggagacttgtattccatccaga

SEQ ID NO: 734016 - DNA, 120 bp, Artificial Sequence
  ENSG00000198838_84 (sequence is synthesized)
cctccctcatcgtggctgcactcaagaaaatgctgcccattggtttgaatatgtgtactccaggcgaccaggagctgatctccctcgcaaaatcgcgatacagccatagggacacagatg

SEQ ID NO: 734017 - DNA, 120 bp, Artificial Sequence
  ENSG00000198838_85 (sequence is synthesized)
aagaggtcagagaacatctgcggaacaacttgcacttgcaggaaaagtctgatgacccagctgtaaaatggcaactgaacctctacaaggatgttctgaagagtgaagaacctttcaatc

SEQ ID NO: 734018 - DNA, 120 bp, Artificial Sequence
  ENSG00000198838_86 (sequence is synthesized)
cggaaaagacagtggagcgtgtgcagagaatttcagcagctgtcttccacctggaacaggtggaacagcctttgaggtccaagaaggccgtctggcacaaactgttatcaaagcaacgga

SEQ ID NO: 734019 - DNA, 120 bp, Artificial Sequence
  ENSG00000198838_87 (sequence is synthesized)
aacgggcagtggtggcctgtttcaggatggcccctctctacaacctgcccaggcaccgctctattaacctcttcctccatggctatcagagattttggatagaaacagaggagtattcct

SEQ ID NO: 734020 - DNA, 120 bp, Artificial Sequence
  ENSG00000198838_88 (sequence is synthesized)
ttgaagagaaactagtacaggatttggctaaatctccaaaggtggaagaggaggaggaggaagagacagaaaaacaacctgacccactacatcagatcattctctattttagccgcaacg

SEQ ID NO: 734021 - DNA, 120 bp, Artificial Sequence
  ENSG00000198838_89 (sequence is synthesized)
ctctcacggagaggagcaaattggaagacgaccctttgtacacctcctattccagcatgatggccaagagttgtcaaagtggtgaggatgaagaagaagatgaagacaaggaaaaaacat

SEQ ID NO: 734022 - DNA, 120 bp, Artificial Sequence
  ENSG00000198838_90 (sequence is synthesized)
tcgaagagaaagagatggagaagcaaaaaaccctctatcagcaagctcggctgcatgagcgtggtgctgcagagatggtccttcagatgataagcgctagcaaaggtgagatgagcccca

SEQ ID NO: 734023 - DNA, 120 bp, Artificial Sequence
  ENSG00000198838_91 (sequence is synthesized)
tggtggttgagacgctgaagctggggatcgccattctgaacggaggcaatgctggtgtgcaacagaaaatgctagattacctaaaggagaaaaaggatgctggattctttcaaagccttt

SEQ ID NO: 734024 - DNA, 120 bp, Artificial Sequence
  ENSG00000198838_92 (sequence is synthesized)
ctggtcttatgcagtcttgcagtgtccttgatttgaatgcatttgagaggcagaataaagctgaaggcctggggatggtgactgaagaaggaacactcattgttcgggaacgtggtgaaa

SEQ ID NO: 734025 - DNA, 120 bp, Artificial Sequence
  ENSG00000198838_93 (sequence is synthesized)
aagtactccagaatgacgagttcacgcgtgatctctttagattcctacagttactttgtgagggacataacagtgactttcagaacttcctgcggactcagatgggcaacaccaccaccg

SEQ ID NO: 734026 - DNA, 120 bp, Artificial Sequence
  ENSG00000198838_94 (sequence is synthesized)
tgaatgtcatcatcagcactgtggactaccttctgcgtctgcaggaatcaatcagtgatttctactggtattattcagggaaggacatcattgatgaatctggacagcacaatttttcca

SEQ ID NO: 734027 - DNA, 120 bp, Artificial Sequence
  ENSG00000198838_95 (sequence is synthesized)
aagctctggcagtcaccaagcagattttcaattctcttacagaatacatccagggcccttgcattggtaatcaacagagcctggctcacagcaggctgtgggacgcagtggttggcttcc

SEQ ID NO: 734028 - DNA, 120 bp, Artificial Sequence
  ENSG00000198838_96 (sequence is synthesized)
tccatgtctttgctaatatgcagatgaaactctctcaggattccagtcagatcgagctgctgaaggaactcttggatctccttcaggacatggtggtgatgcttctgtccctcctggaag

SEQ ID NO: 734029 - DNA, 120 bp, Artificial Sequence
  ENSG00000198838_97 (sequence is synthesized)
ggaatgtggtaaatggcaccattggcaagcagatggttgacacactggtagaatcatctaccaatgtagaaatgatcttgaaattctttgacatgttcttgaaacttaaagacttaacca

SEQ ID NO: 734030 - DNA, 120 bp, Artificial Sequence
  ENSG00000198838_98 (sequence is synthesized)
gctcagacaccttcaaagaatatgacccagatggtaaaggaattatctccaaaaaagaattccagaaggccatggaagggcaaaaacagtacacgcagtcagagattgactttctcctgt

SEQ ID NO: 734031 - DNA, 120 bp, Artificial Sequence
  ENSG00000198838_99 (sequence is synthesized)
cgtgtgcagaagctgatgagaatgacatgtttaattacgttgattttgtagaccggttccatgagccagccaaggacatagggtttaatgtggctgtgttattgacaaatctttctgaac

SEQ ID NO: 734032 - DNA, 120 bp, Artificial Sequence
  ENSG00000198838_100 (sequence is synthesized)
acatgccaaacgattcccgcctgaagtgtctgttggacccagcagaaagtgtgctaaattacttcgaaccctacctaggacgcatcgagatcatgggtggggccaagaagattgagcgtg

SEQ ID NO: 734033 - DNA, 120 bp, Artificial Sequence
  ENSG00000198838_101 (sequence is synthesized)
tttattttgagatcagtgaatccagtcgcactcagtgggagaagccccaggtgaaggaatctaagcgacagttcatttttgatgttgtcaatgaaggtggggagcaggaaaagatggagc

SEQ ID NO: 734034 - DNA, 120 bp, Artificial Sequence
  ENSG00000198838_102 (sequence is synthesized)
tgtttgtgaacttctgtgaggacaccatctttgaaatgcagttagcatctcagatctctgaatccgattcagctgacaggccagaagaggaggaagaagatgaagattcttcttacgtgt

SEQ ID NO: 734035 - DNA, 120 bp, Artificial Sequence
  ENSG00000198838_103 (sequence is synthesized)
tagaaattgcgggtgaagaggaagaagacgggtctcttgagccggcctctgcatttgctatggcctgtgcctctgtgaagaggaatgtcaccgacttcctgaagagagcaaccctgaaga

SEQ ID NO: 734036 - DNA, 120 bp, Artificial Sequence
  ENSG00000198838_104 (sequence is synthesized)
acctcaggaagcagtacaggaacgtgaaaaagatgactgcgaaggagctggtgaaggtgctcttctcctttttctggatgctgttcgtggggctattccagttgctcttcaccatcctgg

SEQ ID NO: 734037 - DNA, 120 bp, Artificial Sequence
  ENSG00000198838_105 (sequence is synthesized)
gaggaatctttcagatcctctggagcacagtgtttggagggggcctggtagaaggggcaaagaacatcagagtgaccaagatcctgggtgacatgcctgacccaacccaatttggtatcc

SEQ ID NO: 734038 - DNA, 120 bp, Artificial Sequence
  ENSG00000198838_106 (sequence is synthesized)
atgatgacactatggaggctgagagggcagaggtgatggagccaggtatcaccactgaactagtacacttcataaagggggagaagggagatacagatatcatgtcagacctctttggac

SEQ ID NO: 734039 - DNA, 120 bp, Artificial Sequence
  ENSG00000198838_107 (sequence is synthesized)
tccacccaaagaaagagggcagcttaaagcatgggcctgaagtgggtttgggtgacctctcagaaattattggcaaggatgaaccccctacattagagagtactgtacagaagaagagga

SEQ ID NO: 734040 - DNA, 120 bp, Artificial Sequence
  ENSG00000198838_108 (sequence is synthesized)
aagctcaggcagcagaaatgaaagcagcaaatgaagcagaaggaaaagtagaatccgagaaggcagacatggaagatggagagaaggaagacaaagacaaagaagaggagcaagctgagt

SEQ ID NO: 734041 - DNA, 120 bp, Artificial Sequence
  ENSG00000198838_109 (sequence is synthesized)
acctgtggacagaagtgacaaaaaagaagaagcggcggtgtggtcagaaggttgagaagccggaagctttcacagccaatttctttaaagggctggaaatctatcagaccaagttactgc

SEQ ID NO: 734042 - DNA, 120 bp, Artificial Sequence
  ENSG00000198838_110 (sequence is synthesized)
attacctggccaggaatttctacaacctgaggttccttgctctgtttgtagccttcgctatcaacttcatcctgcttttttataaggtcactgaagaacctttagaagaagagacagagg

SEQ ID NO: 734043 - DNA, 120 bp, Artificial Sequence
  ENSG00000198838_111 (sequence is synthesized)
atgttgcaaacctatggaattcctttaatgacgaggaagaggaagaagcgatggtattctttgtccttcaggagagcaccgggtatatggcaccaaccctgcgtgccctggccatcatcc

SEQ ID NO: 734044 - DNA, 120 bp, Artificial Sequence
  ENSG00000198838_112 (sequence is synthesized)
ataccatcatctctctagtctgtgtggtgggctactactgcctgaaggtgcctttggtggttttcaaaagggaaaaagaaatcgccaggaagctggagtttgatggcctatatatcaccg

SEQ ID NO: 734045 - DNA, 120 bp, Artificial Sequence
  ENSG00000198838_113 (sequence is synthesized)
aacagccatctgaagatgacatcaaggggcagtgggaccgcttggtgatcaacacaccatcttttcctaataactactgggacaagtttgtaaagagaaaggtgatcaacaagtatggag

SEQ ID NO: 734046 - DNA, 120 bp, Artificial Sequence
  ENSG00000198838_114 (sequence is synthesized)
atctctacggagcagaacgcattgctgaacttctgggtttggacaaaaatgctcttgactttagcccagtagaagagaccaaagcagaagcggcttctctggtgtcatggctaagttcca

SEQ ID NO: 734047 - DNA, 120 bp, Artificial Sequence
  ENSG00000198838_115 (sequence is synthesized)
tagacatgaagtaccatatctggaagcttggagttgtttttactgacaactcctttctctaccttgcctggtatacaaccatgtcagtcctgggccactacaataacttcttctttgctg

SEQ ID NO: 734048 - DNA, 120 bp, Artificial Sequence
  ENSG00000198838_116 (sequence is synthesized)
ctcacctattggacatcgcaatgggcttcaagacactgaggaccattctgtcatctgtaactcacaatggcaaacagttggttctgactgtcggtctcctggccgtggtggtttatctct

SEQ ID NO: 734049 - DNA, 120 bp, Artificial Sequence
  ENSG00000198838_117 (sequence is synthesized)
atactgtggtggctttcaacttcttccgcaagttctacaacaaaagcgaagacgatgacgagcccgatatgaagtgcgacgacatgatgacgtgttaccttttccacatgtacgtgggag

SEQ ID NO: 734050 - DNA, 120 bp, Artificial Sequence
  ENSG00000198838_118 (sequence is synthesized)
tgagagcaggaggtggcattggtgatgaaattgaagaccctgctggtgatccttatgaaatgtatcgcattgtctttgacattacctttttcttcttcgtcattgtcatcttgctggcca

SEQ ID NO: 734051 - DNA, 120 bp, Artificial Sequence
  ENSG00000198838_119 (sequence is synthesized)
tcattcaaggtcttattattgatgctttcggagagctaagagaccagcaggaacaagtacgagaagatatggagactaaatgtttcatctgtgggattggcaatgactactttgacacaa

SEQ ID NO: 734052 - DNA, 120 bp, Artificial Sequence
  ENSG00000198838_120 (sequence is synthesized)
cccctcatggttttgaaacacatacattacaagagcacaacttagccaactacttgttctttctgatgtatttgattaataaagatgaaacagagcacacgggtcaggaatcttatgtct

SEQ ID NO: 734053 - DNA, 120 bp, Artificial Sequence
  ENSG00000198838_121 (sequence is synthesized)
ggaagatgtaccaagaaaggtgttgggatttcttcccagccggtgactgctttcgtaaacaatatgaagatcagcttggataaatctgaatcaaagaagcgcgacaattctggacagtca

SEQ ID NO: 734054 - DNA, 120 bp, Artificial Sequence
  ENSG00000198838_122 (sequence is synthesized)
acttcccatgaaataaagtcccctttttacagttctgcaacatatctgaaatgtgacattttctaaatgcctcccttaaaaaaaaaactgctgaaaatctgtgctattttgaaattgatt

SEQ ID NO: 734055 - DNA, 120 bp, Artificial Sequence
  ENSG00000198838_123 (sequence is synthesized)
tggctttttgtgcctaatggacatacactgtgggagagaacctgtcaaaatgtcgaagaaggaaggcgaagaatcaagtaatctctaggcaaatgccttcaagttttccagttctgaggt

SEQ ID NO: 734056 - DNA, 120 bp, Artificial Sequence
  ENSG00000198838_124 (sequence is synthesized)
aactagttcagtttgttgggatggaagcatgaaggaaagggctagagaagtatgaaatctcgaatgtgtaatacctgaaaatttaaacacttgaatgtcatcatggtatccaacttgtga

SEQ ID NO: 734057 - DNA, 120 bp, Artificial Sequence
  ENSG00000198838_125 (sequence is synthesized)
ctcatagggtctgaactcactccaaaagataataactgcagtctaatttttcccatggtacttgctagtgactgtatccagaaaagctttaagcagttaaagaaacagaaaaaaaccgac

SEQ ID NO: 734058 - DNA, 120 bp, Artificial Sequence
  ENSG00000198838_126 (sequence is synthesized)
actttgtcgacactgaaatatcgattaagtgccttaaaacctctttagacatagctatgcaagttttttatgtttgtgttccagaaggacagttccattcattagttgtgatcttccgtc

SEQ ID NO: 734059 - DNA, 120 bp, Artificial Sequence
  ENSG00000198838_127 (sequence is synthesized)
ttactttatgaaactgcacttgaaggttattcatacaagtttttttagtaacagctgtcagtcaactgctgttattagaagaaaagtactgtactgaaaattcagaaaaaaaatctcaac

SEQ ID NO: 734060 - DNA, 120 bp, Artificial Sequence
  ENSG00000198838_128 (sequence is synthesized)
cttatgccaaaatggagtaatgctttatggtcccttgtaagtagtggagctgctctgtttaggtgaatctcctcaaatacaatgaagtgcccactgcaataaagtaatacgtaccaatac

SEQ ID NO: 734061 - DNA, 120 bp, Artificial Sequence
  ENSG00000198838_129 (sequence is synthesized)
cacggcaggcattagtcgctgagctttgcctcacctcccacatcatctgtgtactaacagtcatcatcagttcctcacagtgtgcagtggctactagcctttgccaccttcctatcgtgc

SEQ ID NO: 734062 - DNA, 120 bp, Artificial Sequence
  ENSG00000198838_130 (sequence is synthesized)
gaacattcttatacctgatacacaagttgaaggatttctctagagtatagacccaggagagaaatttgctgaatagtaggatatgcaaaatgtttgtcccaatttatgctccaaacagta

SEQ ID NO: 734063 - DNA, 120 bp, Artificial Sequence
  ENSG00000198838_131 (sequence is synthesized)
ctatattcgagtttcttcttctctgcttatttgctggcacttattgctggcagataattttgctgatctagtaggtgtatagtggcacctcattgtatgtttccctgattactaaatggg

SEQ ID NO: 734064 - DNA, 120 bp, Artificial Sequence
  ENSG00000198838_132 (sequence is synthesized)
ttaagcatcttgtactttttccctgaacattcatgtacagatgtactctttatttatgcactttccttctgaaggtctgttctctatgccacactttaaggactcgtaacaagtaaaaaa

SEQ ID NO: 734065 - DNA, 120 bp, Artificial Sequence
  ENSG00000198838_133 (sequence is synthesized)
tctgttttctaccttcaaggagtttgcatacctagtcaggggacaagaaattcagaatgctcagatgaaggtaagaccgcatctatgaaggggtcatgcccagagcctgtggtccttggc

SEQ ID NO: 734066 - DNA, 120 bp, Artificial Sequence
  ENSG00000198838_134 (sequence is synthesized)
ccttcagcatcactcgtggaatcttctgcttaggagaaaatgcgaccaggctgagttgtatgttaccatttgtataaatgatttaagagaaaggaggtatcagtgtggcagagagcgcat

SEQ ID NO: 734067 - DNA, 120 bp, Artificial Sequence
  ENSG00000198838_135 (sequence is synthesized)
ggcttgatttttatttgttttattttcaatttaaatgcagtgcataaaaaaatcaaggagcaatgtacaaggaagaaagtcaaaataattgttattttcatcccccagagataaaatatt

SEQ ID NO: 734068 - DNA, 120 bp, Artificial Sequence
  ENSG00000198838_136 (sequence is synthesized)
agcagtttactctgtaacaccagcatttgtttttgctttcaagtggcatttaaatgtttaagacaaagaaactgctttaacaaaccaaaaaaaaaaaacatttttttttaaatactgcca

SEQ ID NO: 734069 - DNA, 120 bp, Artificial Sequence
  ENSG00000198838_137 (sequence is synthesized)
ccctgttgggggagaggcggcatgagaggtcagtgaatagtaggaggtctccatttccttatcaccaacttgggtggtctctggagaatagggaactgttgtgttctagaaccaaaaaga

SEQ ID NO: 734070 - DNA, 120 bp, Artificial Sequence
  ENSG00000198838_138 (sequence is synthesized)
atgaatcaaataaaggaaaacaaaagtaagaatgcatgcaccaaaggccagagactcctaggctgcaatccagtcttacaaggaacccccccacaggaaggattcagtaattctggatag

SEQ ID NO: 734071 - DNA, 120 bp, Artificial Sequence
  ENSG00000198838_139 (sequence is synthesized)
gaacaacatattttcaatggtttttgcaagcattcctgaagatgacagttctttcttaactttaacagtaagaaatatttgcagtggagctggtacaagctacagagagaagaaagatca

SEQ ID NO: 734072 - DNA, 120 bp, Artificial Sequence
  ENSG00000198838_140 (sequence is synthesized)
tctctctggggatgctaggggatggtacagaaccatctccaaaaaagaaagggatccaactcctggaggaaagcaggccctgtggcattacgtgggaatagaaaatagagtggaaaaaca

SEQ ID NO: 734073 - DNA, 120 bp, Artificial Sequence
  ENSG00000198838_141 (sequence is synthesized)
tagagcctgtgatgactctgaacttcaatcagatcttaaaattctttggtgagcaggacacaaaccagaaagatcccagatccaggcactcaaactgaaacgtttcttgatgtgttttcc

SEQ ID NO: 734074 - DNA, 120 bp, Artificial Sequence
  ENSG00000198838_142 (sequence is synthesized)
ctggccatcatccataccatcatctctctagtctgtgtggtgggctactactgcctgaaggagactgaaggggaatgcttggaatcccagagatgagcaccgctctacaacttgatatta

SEQ ID NO: 734075 - DNA, 120 bp, Artificial Sequence
  ENSG00000198838_143 (sequence is synthesized)
gcgtcatcattcatctatttccgggtgttaccttttccacatgtacgtgggagtgagagcaggaggtggcattggtgatgaaattgaagaccctgctggtgatccttatgaaatgtatcg

SEQ ID NO: 734076 - DNA, 120 bp, Artificial Sequence
  ENSG00000198838_144 (sequence is synthesized)
gttattgtgctttgtcactgttttaggctctgggaatatggtgctgaataagaaacacactgtccctacagcttagtggagaataaaggcattggacaagtcaagacaagtataaagaat

SEQ ID NO: 734077 - DNA, 120 bp, Artificial Sequence
  ENSG00000198838_145 (sequence is synthesized)
aaaagccatgcaagtaaaggtacaggtcaaatgcatgacgtgtcttttctgtcctagtattagaggtgccgggctctggccccctctgcactgtgatcaccatgggggtggtagagaatg

SEQ ID NO: 734078 - DNA, 120 bp, Artificial Sequence
  ENSG00000198838_146 (sequence is synthesized)
gattttcccgcctggaggtcccccaggcctgctccagggaagacaactgcctgtcaaagagtgaatgtaggcctacccacccttggaatggggaagccggggaagccagccaagcctcac

SEQ ID NO: 734079 - DNA, 89 bp, Artificial Sequence
  ENSG00000198838_147 (sequence is synthesized)
gactgaagaaggaacacgtaagtaactaatgaatgtgaaggccattctcttcctgaccccatacagagtttcgctcttgttgctcaggc

SEQ ID NO: 734080 - DNA, 120 bp, Artificial Sequence
  ENSG00000198838_148 (sequence is synthesized)
ttgagaagccggaagctttcacagccaatttctttaaagggctggaaatctatcagaccaagttactgcgagtgtgtattttgagccaggtcactgaagaacctttagaagaagagacag

SEQ ID NO: 734081 - DNA, 120 bp, Artificial Sequence
  ENSG00000198838_149 (sequence is synthesized)
tttctgaggacttacattcctccagatctctgcgtctgcaattttgtgctggaacagtccctatctgtcagagccctgcaggaaatgcttgccaacacaggtgaaaatggcggcgaaggg

SEQ ID NO: 734082 - DNA, 72 bp, Artificial Sequence
  ENSG00000198838_150 (sequence is synthesized)
gcctatatatcaccgaacagccatctgaagatgacatcaaggggcagtgggaccgcttggtgatcaacacac

SEQ ID NO: 734083 - DNA, 120 bp, Artificial Sequence
  ENSG00000198838_151 (sequence is synthesized)
gcatgagccaccacgcccggcctgaagtcctcctcttaaccaaatagcctgcttggtaagagacctcgtcttaacgtaagattgagaggcaattacatgggcaggtaaatagagccgtct

SEQ ID NO: 734084 - DNA, 120 bp, Artificial Sequence
  ENSG00000198838_152 (sequence is synthesized)
gtctggtagggatatgaagacctgtggaggcaagcctgccttcctgtaggcatgtggcactgtggtgggaagaaggaagagcactgattgacaggcaggtgacaccaaggctctgacgct

SEQ ID NO: 734085 - DNA, 120 bp, Artificial Sequence
  ENSG00000198838_153 (sequence is synthesized)
tactggtctgtgaacttgcacaaggtaatcaagccttctcagccttagtttcctcatcagtaatagaaggatgagaatatcatcctgcagaggattaatgaatgtatgtgtcaaatgctt

SEQ ID NO: 734086 - DNA, 120 bp, Artificial Sequence
  ENSG00000198838_154 (sequence is synthesized)
ggcaaatgcctggcacgtggtaggcattaagctgttactcattctcttttctttcctgtaactatccaaaaagtggccatcaccattagcaaatgtcacactctaatgacagttgattca

SEQ ID NO: 734087 - DNA, 120 bp, Artificial Sequence
  ENSG00000198838_155 (sequence is synthesized)
caagtaagtgacagtttcaagataaattaatgtggcaaaagaaaagaaatagggccaaatagtaaacaaaggtgactgtgttgaaactcttaggtgtgccaattaagataggcatgttaa

SEQ ID NO: 734088 - DNA, 120 bp, Artificial Sequence
  ENSG00000198838_156 (sequence is synthesized)
gaaacagcaaccctgactccaggggaagaaagctgtgtcctatccaaagatgatcaggcaaactgagaagcagctctgcaaaggtacaactaaggatatttatttctttatattctccag

SEQ ID NO: 734089 - DNA, 120 bp, Artificial Sequence
  ENSG00000198838_157 (sequence is synthesized)
aaaaggaagcctcttcccttagaagggggaaaatgtgaacaggcacatcctcacatcctaagtctgtccctgcctgcgggtcccctgccaatcttctcacacaaggaaaagcactgtttc

SEQ ID NO: 734090 - DNA, 120 bp, Artificial Sequence
  ENSG00000198838_158 (sequence is synthesized)
tgatgctttgtcattacattacagaagtcttagacactattgaatagtttaatcctttggtaagctttgtgcaatcatcagtaatgcctgcgtcttgttatacaggggcatgtggcctaa

SEQ ID NO: 734091 - DNA, 84 bp, Artificial Sequence
  ENSG00000198838_159 (sequence is synthesized)
gtaatgcctgcgtcttgttatacaggggcatgtggcctaaaagtcccagtaagaaggcagttcaatttcggccaggcacaatgg

SEQ ID NO: 734092 - DNA, 76 bp, Artificial Sequence
  ENSG00000198838_160 (sequence is synthesized)
gaaggcagttcaatttctagcaatgtatcctaaggagataatgagacaagtacactaaaatgtcctaacaaaggta

SEQ ID NO: 734093 - DNA, 120 bp, Artificial Sequence
  ENSG00000198838_161 (sequence is synthesized)
gataatgagacaagtacactaaaatgtcctaacaaaggtatttcccaatattttttacttagagtggcttaaacgtccatgagtaggaaatgcataaataaatagctattttttaaaatg

SEQ ID NO: 734094 - DNA, 120 bp, Artificial Sequence
  ENSG00000198838_162 (sequence is synthesized)
ttagatagaccaatgtttaattttttttcacaatggcatcatagtacatgttcatgttttgtaacgtgctttttttcagttaactgtatgtcatgggagctttctttttaaacattttac

SEQ ID NO: 734095 - DNA, 120 bp, Artificial Sequence
  ENSG00000198838_163 (sequence is synthesized)
gtcatctgtaactcacaatggcaaacagattcaaactgtttagcatttcattcctcattaagtacaagtctgtgtatgacagacaggcttcctcacatgtccaaacctttgtacgggaga

SEQ ID NO: 734096 - DNA, 120 bp, Artificial Sequence
  ENSG00000198838_164 (sequence is synthesized)
aacgggcagtggtggcctgtttcaggatggcccctctctacaacctgcccaggaatagaaattggaatccttggcctatggagctattgcagtctgcatagtataagggcctggctaaga

SEQ ID NO: 734097 - DNA, 120 bp, Artificial Sequence
  ENSG00000198839_0 (sequence is synthesized)
cccttttcttttctgccgggtaatggctgcttccaagacccagggggctgtcgcccgaatgcaggaagaccgtgatgggagctgcagcacagtcgggggtgtaggttatggggacagtaa

SEQ ID NO: 734098 - DNA, 120 bp, Artificial Sequence
  ENSG00000198839_1 (sequence is synthesized)
ggattgtatcctggagccgctttccctgccagaaagtccaggtggcaccaccactttagaaggttctccatctgtgccttgtattttctgtgaagaacattttcctgtggctgaacaaga

SEQ ID NO: 734099 - DNA, 120 bp, Artificial Sequence
  ENSG00000198839_2 (sequence is synthesized)
caaacttctgaagcacatgattattgagcataagattgtcatagctgatgtcaagttggttgctgatttccaaaggtacattttatattggaggaaaaggttcactgaacagcccatcac

SEQ ID NO: 734100 - DNA, 120 bp, Artificial Sequence
  ENSG00000198839_3 (sequence is synthesized)
agatttttgtagtgtaataagaattaattccactgctccatttgaagaacaagagaattattttttgttatgtgacgttttaccagaagatagaattcttagagaagagcttcagaaaca

SEQ ID NO: 734101 - DNA, 120 bp, Artificial Sequence
  ENSG00000198839_4 (sequence is synthesized)
gagactgagagaaattctggaacaacagcagcaagaacgaaatgataccaattttcatggcgtttgtatgttttgcaatgaagaattccttggaaacagatctgttattttgaaccacat

SEQ ID NO: 734102 - DNA, 120 bp, Artificial Sequence
  ENSG00000198839_5 (sequence is synthesized)
ggccagagaacatgctttcaacattggattgccagacaacattgtaaactgcaatgaatttttgtgtacattacagaaaaagcttgacaatttgcagtgcttgtactgtgagaagacctt

SEQ ID NO: 734103 - DNA, 120 bp, Artificial Sequence
  ENSG00000198839_6 (sequence is synthesized)
cagggacaaaaatacacttaaagatcacatgaggaaaaaacagcatcgtaagattaatcctaagaacagagaatatgacagattttatgtcatcaattatttggaacttggaaaatcgtg

SEQ ID NO: 734104 - DNA, 120 bp, Artificial Sequence
  ENSG00000198839_7 (sequence is synthesized)
ggaagaagttcagttggaagatgatcgggagttgctggaccatcaggaagatgactggtctgattgggaagaacaccctgcctctgcagtctgcttattttgtgaaaagcaagcagaaac

SEQ ID NO: 734105 - DNA, 120 bp, Artificial Sequence
  ENSG00000198839_8 (sequence is synthesized)
aattgagaagttgtatgtccacatggaggatgcacacgaatttgatcttctcaaaataaagtcagaacttggattaaatttctatcagcaagtgaaactggtcaattttattcggaggca

SEQ ID NO: 734106 - DNA, 120 bp, Artificial Sequence
  ENSG00000198839_9 (sequence is synthesized)
agttcaccaatgcagatgttatggctgccatgtgaagttcaaatccaaagcagacttaagaactcacatggaagaaactaaacacacttcgctgctccccgatagaaagacgtgggatca

SEQ ID NO: 734107 - DNA, 120 bp, Artificial Sequence
  ENSG00000198839_10 (sequence is synthesized)
tgaaagtgacctgacagctcaggaacaaaatgaaaatgttcccatcatcagtgaagatacatctaaactgtatgctttgaaacaaagcagtattttgaaccagttgctactataagagta

SEQ ID NO: 734108 - DNA, 120 bp, Artificial Sequence
  ENSG00000198839_11 (sequence is synthesized)
cttgaaaacctagaagaaactaccacagaagcaatttttcatgtttttctcctatgagacagatatgaaagaacaatttaaatttgaacatcaacaaaagattggtccttggtgaaataa

SEQ ID NO: 734109 - DNA, 120 bp, Artificial Sequence
  ENSG00000198839_12 (sequence is synthesized)
acttttcaaaaatgaatgttcttttcaaaaaataaagtagaaaaatgcacttactaagaacatgaaaaaaaatgaagtaggaaaataagatgaagactttgtattttggctgtaaagttt

SEQ ID NO: 734110 - DNA, 120 bp, Artificial Sequence
  ENSG00000198839_13 (sequence is synthesized)
gctgtaaagttttattgtgtgatcatcttaaattatctcacttcattaaactcataattatatatagaagtatatgtcaattacaaagaaatgaaatgttcaaattatttataaacctga

SEQ ID NO: 734111 - DNA, 120 bp, Artificial Sequence
  ENSG00000198839_14 (sequence is synthesized)
tagtttcagtctcctccccaaggaccttcttcatccaacaagttgcaaaatttgaatatcccttctgtactatattgggtgagctgtaaatgtaatgactaaaagaaaagccacagaaga

SEQ ID NO: 734112 - DNA, 120 bp, Artificial Sequence
  ENSG00000198839_15 (sequence is synthesized)
aagaagaaatggtcaaagacgtggataatatgcaaattggccattatattagaacaatcaagagctgactgtgttattaccactttctgcctagggtggccaaattccctagaaatagac

SEQ ID NO: 734113 - DNA, 120 bp, Artificial Sequence
  ENSG00000198839_16 (sequence is synthesized)
atcaagccagttaacttcacttttccctgcaatttgtatgtcactaacatttaaatgccattttttaaaaacataaccacaataccattatgacacctaaaaaacattaacattaactta

SEQ ID NO: 734114 - DNA, 120 bp, Artificial Sequence
  ENSG00000198839_17 (sequence is synthesized)
atatcatctgttttcagtttttcccacttgtctcaaaatgtatgtttacaatattatcagtttcattactgatgaatattatatgcctcctgataagatgtactgaggaggacagaatat

SEQ ID NO: 734115 - DNA, 120 bp, Artificial Sequence
  ENSG00000198839_18 (sequence is synthesized)
cagaatatcacttttgtagatttataccaaaaatgcataatttggatataatgaagaaacagtcaaatccaagtttgaggctgggcacagtagctcatatctgtaatcccagcactttgg

SEQ ID NO: 734116 - DNA, 68 bp, Artificial Sequence
  ENSG00000198839_19 (sequence is synthesized)
ggccaacgtggcaaaaccccatctctacgaaaaatacacagattagccaggcatggtggaatccagga

SEQ ID NO: 734117 - DNA, 120 bp, Artificial Sequence
  ENSG00000198839_20 (sequence is synthesized)
gtggctcatgtctgtaatcctagtactttgggaggccaaagtgggaggatcacccgaggccagtagtagttcaagatgccagctctaaaaacaaaatttaaaaattatctaggatcaatg

SEQ ID NO: 734118 - DNA, 83 bp, Artificial Sequence
  ENSG00000198839_21 (sequence is synthesized)
aatggcatgcaggctgcttgcacccatgagttcgaggctgcagtgagttatggttataccattgcactccagcctgggtgaca

SEQ ID NO: 734119 - DNA, 120 bp, Artificial Sequence
  ENSG00000198839_22 (sequence is synthesized)
gagaccctgtctcttaagaaagagaattaaatgtattgtttgttaaaggagtgacataatctatatataaaataattcccatacaaatatgaaaattcatattcattttcaggtttctcc

SEQ ID NO: 734120 - DNA, 88 bp, Artificial Sequence
  ENSG00000198839_23 (sequence is synthesized)
atacaaatatgaaaattcatattcattttcaggtttctccttagacttaaaaaaaaaaactttacaactcttttgtacttctgagaat

SEQ ID NO: 734121 - DNA, 120 bp, Artificial Sequence
  ENSG00000198839_24 (sequence is synthesized)
tttattttctataagttctctaaagagatgaactttccaaagagtagataatactcactttgcagcattccatgacattgtagatcttattgatgtctcccagattatgtctcatgtttt

SEQ ID NO: 734122 - DNA, 120 bp, Artificial Sequence
  ENSG00000198839_25 (sequence is synthesized)
aggccatagacattctctgagtgggtccttccagtaattccagaatagacttggcaacaggacactcaaaaggcagtgtttgggaatgggatccttggagactttcaagccaaaaggata

SEQ ID NO: 734123 - DNA, 120 bp, Artificial Sequence
  ENSG00000198839_26 (sequence is synthesized)
ttgcccaaacaaatctcagtttaaatgttgtgatgaggttgattccttttttcccaatttataatttctggaagtagttgtccaagagaaataccttccctgtatagttactgaaagcat

SEQ ID NO: 734124 - DNA, 120 bp, Artificial Sequence
  ENSG00000198839_27 (sequence is synthesized)
aaaatttggtgtatctggtaaggtcccattttgaggtattctgtcctgatttccccataaaacattgtagtagcccagacattgaatacccctgcatctaaactctgtttctcccaggcc

SEQ ID NO: 734125 - DNA, 120 bp, Artificial Sequence
  ENSG00000198839_28 (sequence is synthesized)
atataaaacattcctagcaaacagcttctttcttatgataggtcttgcaaaagagcaagctgtattattaagagctgactatgaaagtaggaaagcctggggttgagtgcaggctttcac

SEQ ID NO: 734126 - DNA, 120 bp, Artificial Sequence
  ENSG00000198839_29 (sequence is synthesized)
acttcctaatcttgtgatttcctgccaagctacctaactactctaagcattgattttctcatctataaaatgggggtaacaccagccctcatggttattgaatattacataaaacaaagt

SEQ ID NO: 734127 - DNA, 120 bp, Artificial Sequence
  ENSG00000198839_30 (sequence is synthesized)
atggaatgtgagggcgatctggctgtgacatctgtcaccccattaatcgccagggttgattcggctgatctggctggctaagtggctgtccccttcctccctcaccactccatgttcatg

SEQ ID NO: 734128 - DNA, 120 bp, Artificial Sequence
  ENSG00000198839_31 (sequence is synthesized)
cctcccaaagctgtgttctcagtcaaagaggacaaccatctccactagaagaggaccagtctttggtcaagggtatacgagtagctgcgcttccctgctggaacctccagacaagctctc

SEQ ID NO: 734129 - DNA, 120 bp, Artificial Sequence
  ENSG00000198839_32 (sequence is synthesized)
tctcaagtccatttgtaggagaacatagggtagtcaagcttccaagattccagacacatccaaatgaagtgctgcatgtggcagtctgcctttcttaaaaaaaaaaaaaaaaaaaaaaaa

SEQ ID NO: 734130 - DNA, 120 bp, Artificial Sequence
  ENSG00000198839_33 (sequence is synthesized)
aacttaaaatttgattgcagtactgcaaacaaaatctttctgaggaccaactaatatttgaataagcaattattgcaaaagtcaaaatgtaattgaggggcacattcaagtagtgattag

SEQ ID NO: 734131 - DNA, 120 bp, Artificial Sequence
  ENSG00000198839_34 (sequence is synthesized)
ctttgaaatggttagagtacaagacatttgatttgacttgtcttttatttgacagtgtttatgtagtaaaaatgtcatgtctctagaactcacagtcatcttgaccaaaaaaaaaaaaaa

SEQ ID NO: 734132 - DNA, 120 bp, Artificial Sequence
  ENSG00000198840_0 (sequence is synthesized)
ataaacttcgccttaattttaataatcaacaccctcctagccttactactaataattattacattttgactaccacaactcaacggctacatagaaaaatccaccccttacgagtgcggc

SEQ ID NO: 734133 - DNA, 120 bp, Artificial Sequence
  ENSG00000198840_1 (sequence is synthesized)
catgagccctacaaacaactaacctgccactaatagttatgtcatccctcttattaatcatcatcctagccctaagtctggcctatgagtgactacaaaaaggattagactgaaccgaat

SEQ ID NO: 734134 - DNA, 120 bp, Artificial Sequence
  ENSG00000198841_0 (sequence is synthesized)
aacccggaagttggcgcagcgcggttgccaatggtcgctccctgagaggatgccgctcgtggtgttttgcgggctgccgtacagcggcaagagccggcgtgctgaagagttgcgcgtggc

SEQ ID NO: 734135 - DNA, 120 bp, Artificial Sequence
  ENSG00000198841_1 (sequence is synthesized)
gctggctgccgagggccgcgcggtgtacgtggtggacgacgcagctgtcctgggcgcagaggacccagcggtgtacggcgattctgcccgtgagaaggcattgcgtggagctctgcgagc

SEQ ID NO: 734136 - DNA, 120 bp, Artificial Sequence
  ENSG00000198841_2 (sequence is synthesized)
ctccgtggaacggcgcctgagtcgccacgacgtggtcatcctggactcgcttaactacatcaaaggtttccgttacgagctctactgcctggcacgggcggcgcgcaccccgctctgcct

SEQ ID NO: 734137 - DNA, 120 bp, Artificial Sequence
  ENSG00000198841_3 (sequence is synthesized)
ggtctactgcgtacggcccggcggcccgatcgcgggacctcaggtggcgggcgcgaacgagaaccctggccggaacgtcagtgtgagttggcggccacgcgctgaggaggacgggagagc

SEQ ID NO: 734138 - DNA, 120 bp, Artificial Sequence
  ENSG00000198841_4 (sequence is synthesized)
ccaggcggcgggcagcagcgtcctcagggaactgcatactgcggactctgtagtaaatggaagtgcccaggccgacgtacccaaggaactggagcgagaagaatccggggctgcggagtc

SEQ ID NO: 734139 - DNA, 120 bp, Artificial Sequence
  ENSG00000198841_5 (sequence is synthesized)
tccagctcttgtgactccggattcagagaaatctgcaaagcatgggtccggtgccttttactctcccgaactcctggaggccctaacgctgcgctttgaggctcccgattctcggaatcg

SEQ ID NO: 734140 - DNA, 120 bp, Artificial Sequence
  ENSG00000198841_6 (sequence is synthesized)
ctgggaccggcctttattcactttggtgggcctagaggagccgttgcccctggcggggatccgctctgccctgtttgagaaccgggccccaccaccccatcagtctacgcagtcccagcc

SEQ ID NO: 734141 - DNA, 120 bp, Artificial Sequence
  ENSG00000198841_7 (sequence is synthesized)
ttggaccaggtcacgagtcaagtactggccggattgatggaagcgcagaagagcgctgtccccggggacttgctcacgcttcctggtaccacagagcacttgcggtttacccggcccttg

SEQ ID NO: 734142 - DNA, 120 bp, Artificial Sequence
  ENSG00000198841_8 (sequence is synthesized)
accatggcagaactgagtcgccttcgtcgccagtttatttcgtacactaaaatgcatcccaacaatgagaacttgccgcaactggccaacatgtttcttcagtatttgagccagagcctg

SEQ ID NO: 734143 - DNA, 120 bp, Artificial Sequence
  ENSG00000198841_9 (sequence is synthesized)
cactgaccagaggaggtaggggggaagccatggcttctgatctccactccactttatttctctgggaaaaataggctgcaggtctccagagcatatcgatgcagtactgtactagagctg

SEQ ID NO: 734144 - DNA, 120 bp, Artificial Sequence
  ENSG00000198841_10 (sequence is synthesized)
ttgtgactgattcactcaaactttcctgcatacccctgtgccaggccttgggtttacagcataagttcagactaaagagaatggagaactattgtggtgcaacctggcaaatccctcaga

SEQ ID NO: 734145 - DNA, 120 bp, Artificial Sequence
  ENSG00000198841_11 (sequence is synthesized)
ggacagagctaaggtggacagggattacctagattggatcctacttgggctatcacagagcattgaccattggcttccctcatctgaggcgtgggagagcagactggatagatgagaatt

SEQ ID NO: 734146 - DNA, 120 bp, Artificial Sequence
  ENSG00000198841_12 (sequence is synthesized)
gttttaaaacaattgtgaacagaaactgaagatggtacagttctacatctgcacctgcccttttttcataccacaaaagtattttttgagtactgtactgactttttgctagtttctatt

SEQ ID NO: 734147 - DNA, 120 bp, Artificial Sequence
  ENSG00000198841_13 (sequence is synthesized)
ctgggaccgagttcacagataaatccattggtttgtatccttgagaaactttgtttttgtggaagtaagaaagttatctactagattatttcctctaataaaatcttttaaaatagtcta

SEQ ID NO: 734148 - DNA, 120 bp, Artificial Sequence
  ENSG00000198842_0 (sequence is synthesized)
atgacgcctgagccaaaggccctacctcctgtggccttggttagagacaccgaaggccagctgtgtcttccccagcagagacaaaggtgtgcgcatgggcatagaggttggcaggttgtc

SEQ ID NO: 734149 - DNA, 120 bp, Artificial Sequence
  ENSG00000198842_1 (sequence is synthesized)
atggcgaccagaaaggacacagaggaggagcaggtagtcccaagcgaggaggacgaagccaacgtgagggcggtgcaggcccactacctccgaagcccctcccctagccagtattcgatg

SEQ ID NO: 734150 - DNA, 120 bp, Artificial Sequence
  ENSG00000198842_2 (sequence is synthesized)
gtctcagatgcagaaacagaaagcattttcatggaacccattcacctctcctcagccattgcagccaaacagatcatcaatgaagaactcaagccaccgggggtcagagcagacgcagag

SEQ ID NO: 734151 - DNA, 120 bp, Artificial Sequence
  ENSG00000198842_3 (sequence is synthesized)
tgtccaggcatgctggagtctgctgaacagctgctggtggaggacctgtacaaccgcgtcagggagaagatggatgacaccagcctctataatacgccctgtgtcctggacctacagcgg

SEQ ID NO: 734152 - DNA, 120 bp, Artificial Sequence
  ENSG00000198842_4 (sequence is synthesized)
gccctggttcaggatcgccaagaggcgccctggaatgaggtggatgaggtctggcccaatgtcttcatagctgagaagagtgtggctgtgaacaaggggaggctgaagaggctgggaatc

SEQ ID NO: 734153 - DNA, 120 bp, Artificial Sequence
  ENSG00000198842_5 (sequence is synthesized)
acccacattctgaatgctgcgcatggcaccggcgtttacactggccccgaattctacactggcctggagatccagtacctgggtgtagaggtggatgactttcctgaggtggacatttcc

SEQ ID NO: 734154 - DNA, 120 bp, Artificial Sequence
  ENSG00000198842_6 (sequence is synthesized)
cagcatttccggaaggcgtctgagttcctggatgaggcgctgctgacttacagagggaaagtcctggtcagcagcgaaatgggcatcagccggtcagcagtgctggtggtcgcctacctg

SEQ ID NO: 734155 - DNA, 120 bp, Artificial Sequence
  ENSG00000198842_7 (sequence is synthesized)
atgatcttccacaacatggccatcctggaggctttgatgaccgtgcgtaagaagcgggccatctaccccaatgagggcttcctgaagcagctgcgggagctcaatgagaagttgatggag

SEQ ID NO: 734156 - DNA, 120 bp, Artificial Sequence
  ENSG00000198842_8 (sequence is synthesized)
gagagagaagaggactatggccgggaggggggatcagctgaggctgaggagggcgagggcactgggagcatgctcggggccagagtgcacgccctgacggtggaagaggaggacgacagc

SEQ ID NO: 734157 - DNA, 120 bp, Artificial Sequence
  ENSG00000198842_9 (sequence is synthesized)
gccagccacctgagtggctcctccctggggaaggccacccaggcctccaagcccctcaccctcatagacgaggaggaggaggagaaactgtacgagcagtggaagaaggggcagggcctc

SEQ ID NO: 734158 - DNA, 120 bp, Artificial Sequence
  ENSG00000198842_10 (sequence is synthesized)
ctctcagacaaggtcccccaggatggaggtggctggcgctcagcctcctctggccagggtggggaggagctcgaggacgaggacgtggagaggatcatccaggagtggcagagccgaaac

SEQ ID NO: 734159 - DNA, 120 bp, Artificial Sequence
  ENSG00000198842_11 (sequence is synthesized)
gagaggtaccaagcagaagggtaccggaggtggggaagggaggaggagaaggaggaggagagcgacgctggctcctcggtggggaggcggcggcgcaccctgagcgagagcagcgcctgg

SEQ ID NO: 734160 - DNA, 120 bp, Artificial Sequence
  ENSG00000198842_12 (sequence is synthesized)
gagagcgtgagcagccacgacatctgggtcctgaagcagcagctggagctgaaccgcccggaccacggcaggaggcgccgcgcagactcgatgtcctcggagagcacctgggacgcatgg

SEQ ID NO: 734161 - DNA, 120 bp, Artificial Sequence
  ENSG00000198842_13 (sequence is synthesized)
aacgagaggctgctggagattgagaaggaggcttcccggaggtaccacgccaagagcaagagagaggaggcggcagacaggagctcagaagcagggagcagggtgcgggaggatgatgag

SEQ ID NO: 734162 - DNA, 120 bp, Artificial Sequence
  ENSG00000198842_14 (sequence is synthesized)
gacttgggagcgggagacagcagcggtgagcccggtgcagaggaggcagtaggggagaagaacccctccgacgtcagcctgacagcctaccaggcctggaagctgaaacaccagaagaag

SEQ ID NO: 734163 - DNA, 120 bp, Artificial Sequence
  ENSG00000198842_15 (sequence is synthesized)
gtgggcagtgagaacaaggaggaggtggtggagctcagcaagggggaggactcggccttggctaagaagagacaacggaggctggagctgctggagagaagccggcagacgctggaggag

SEQ ID NO: 734164 - DNA, 120 bp, Artificial Sequence
  ENSG00000198842_16 (sequence is synthesized)
agccagtctatggcaagctgggaggcggacagctccacggccagcgggagcattcccctgtctgcgttctggtctgcagacccctcagtcagcgctgatggggacacgacgtcagtactg

SEQ ID NO: 734165 - DNA, 120 bp, Artificial Sequence
  ENSG00000198842_17 (sequence is synthesized)
agcacccagagccaccgctcccacctgtctcaggctgcaagcaacatagcggggtgttcaacctccaaccccaccacacccctgcctaacctgccagtggggcctggagacaccatttcc

SEQ ID NO: 734166 - DNA, 120 bp, Artificial Sequence
  ENSG00000198842_18 (sequence is synthesized)
attgccagtatccagaactggattgccaatgtagtcagtgagacccttgctcagaagcaaaatgaaatgctgctgttgtcccgctcaccgtctgttgcaagcatgaaggcagtaccagcg

SEQ ID NO: 734167 - DNA, 120 bp, Artificial Sequence
  ENSG00000198842_19 (sequence is synthesized)
gctagctgcctgggggatgaccaagtctccatgcttagtggacacagcagctcctccttgggtggctgcctgttgcctcagagccaggcaagacccagctctgacatgcagtctgtgctg

SEQ ID NO: 734168 - DNA, 120 bp, Artificial Sequence
  ENSG00000198842_20 (sequence is synthesized)
tcctgcaacaccacactgagctcacccgcggaaagttgcagaagcaaagtgagggggaccagcaagcccatcttcagcctctttgctgacaatgtggacctaaaggaacttggccggaag

SEQ ID NO: 734169 - DNA, 120 bp, Artificial Sequence
  ENSG00000198842_21 (sequence is synthesized)
gagaaggagatgcagatggagcttagggagaagatgtctgagtacaaaatggaaaagctggcctcagacaacaaacgcagctccctcttcaagaagaagaaggtcaaggaagatgaggat

SEQ ID NO: 734170 - DNA, 120 bp, Artificial Sequence
  ENSG00000198842_22 (sequence is synthesized)
gatggtgtgggtgatggggatgaggacactgacagtgccatagggagcttccgatattcttcccgcagtaattcccagaaacctgaaacagacacatgctcctccctggctgtctgtgat

SEQ ID NO: 734171 - DNA, 120 bp, Artificial Sequence
  ENSG00000198842_23 (sequence is synthesized)
cactatgcaagtggcagcagagttggcaaagagatggatagcagtattaataagtggctcagtggcctcaggacggaggaaaaacctcctttccaaagtgactggtctggaagttccaga

SEQ ID NO: 734172 - DNA, 120 bp, Artificial Sequence
  ENSG00000198842_24 (sequence is synthesized)
gggaagtacaccagatcgtccctgctcagggagacagagtctaaatcctccagttacaagttttccaaatcccagtcagaggaacaggacacctcctcctaccacgaggcaaatggcaac

SEQ ID NO: 734173 - DNA, 120 bp, Artificial Sequence
  ENSG00000198842_25 (sequence is synthesized)
tctgtaagaagcacttcacggttctcatcttcctccaccagggagggcagagagatgcacaagttctccaggtccacgtacaacgagacctcaagttcccgagaggagagcccagagccc

SEQ ID NO: 734174 - DNA, 120 bp, Artificial Sequence
  ENSG00000198842_26 (sequence is synthesized)
tacttcttccgccggaccccagagtcctcagaaagggaagagtccccagaaccacagcgcccaaattgggccaggtccagggactgggaagatgtggaagagtcatccaagtcagacttc

SEQ ID NO: 734175 - DNA, 120 bp, Artificial Sequence
  ENSG00000198842_27 (sequence is synthesized)
tctgaatttggagccaagaggaagttcacccagagctttatgaggtctgaagaagagggagagaaagagaggacagaaaacagagaagaagggaggtttgcatctggacggcggtcccag

SEQ ID NO: 734176 - DNA, 120 bp, Artificial Sequence
  ENSG00000198842_28 (sequence is synthesized)
tatcggagaagcactgacagggaggaagaggaagaaatggacgatgaagccatcattgctgcttggagacgccggcaagaagaaaccaggaccaagctgcagaaaaggagggaggactga

SEQ ID NO: 734177 - DNA, 120 bp, Artificial Sequence
  ENSG00000198842_29 (sequence is synthesized)
aggagaagaagccctgaggaaggaggtggctggttcctgtctcactggccggagcttcagcttcagtcatttcatctgggtccctcagcccttggtggggaacatccaggcaggttagag

SEQ ID NO: 734178 - DNA, 120 bp, Artificial Sequence
  ENSG00000198842_30 (sequence is synthesized)
tcgcaggatgaggatacagagaggatcttccagaggggcagagccaaaatgagaggtaccaagcataagggcagcagaggtggagtagggaggaggcaaggagggggagaaccatcaata

SEQ ID NO: 734179 - DNA, 120 bp, Artificial Sequence
  ENSG00000198842_31 (sequence is synthesized)
cgaatacgaggtccgaatgcggaccaactgataccattttctgttgctcagcgccctctaagctttggtgtttcacttaatgtatttggcagtgttcatcacaggctagagaggtgagct

SEQ ID NO: 734180 - DNA, 120 bp, Artificial Sequence
  ENSG00000198842_32 (sequence is synthesized)
tggaaaagcactgtagtttgtcagagactccagtttacatccagaaaggccatgaacataggacacgcttctgtctgtagaggcttcatatgagacccagaaagtctatcctatggcaag

SEQ ID NO: 734181 - DNA, 120 bp, Artificial Sequence
  ENSG00000198842_33 (sequence is synthesized)
tctgacctctcctggcaatgctcagttctgatttttttttttttaatgttttgagtctccattaaaaatggtatgttggcaaatagttcttctttattctggtcatgtttaactttttgg

SEQ ID NO: 734182 - DNA, 120 bp, Artificial Sequence
  ENSG00000198843_0 (sequence is synthesized)
gcagtctgtctgagggcggccgaagtggctggctcatttaagatgaggcttctgctgcttctcctagtggcggcgtctgcgatggtccggagcgaggcctcggccaatctgggcggcgtg

SEQ ID NO: 734183 - DNA, 120 bp, Artificial Sequence
  ENSG00000198843_1 (sequence is synthesized)
cccagcaagagattaaagatgcagtacgccacggggccgctgctcaagttccagatttgtgtttcctgaggttataggcgggtgtttgaggagtacatgcgggttattagccagcggtac

SEQ ID NO: 734184 - DNA, 120 bp, Artificial Sequence
  ENSG00000198843_2 (sequence is synthesized)
ccagacatccgcattgaaggagagaattacctccctcaaccaatatatagacacatagcatctttcctgtcagtcttcaaactagtattaataggcttaataattgttggcaaggatcct

SEQ ID NO: 734185 - DNA, 120 bp, Artificial Sequence
  ENSG00000198843_3 (sequence is synthesized)
tttgctttctttggcatgcaagctcctagcatctggcagtggggccaagaaaataaggtttatgcatgtatgatggttttcttcttgagcaacatgattgagaaccagtgtatgtcaaca

SEQ ID NO: 734186 - DNA, 120 bp, Artificial Sequence
  ENSG00000198843_4 (sequence is synthesized)
ggtgcatttgagataactttaaatgatgtacctgtgtggtctaagctggaatctggtcaccttccatccatgcaacaacttgttcaaattcttgacaatgaaatgaagctcaatgtgcat

SEQ ID NO: 734187 - DNA, 120 bp, Artificial Sequence
  ENSG00000198843_5 (sequence is synthesized)
atggattcaatcccacaccatcgatcatagcaccacctatcagcactgaaaactcttttgcattaagggatcattgcaagagcagcgtgactgacattatgaaggcctgtactgaagaca

SEQ ID NO: 734188 - DNA, 120 bp, Artificial Sequence
  ENSG00000198843_6 (sequence is synthesized)
gcaagctgttagtacagaccagatgctttcttggcaggctcgttgtacctcttggaaaacctcaatgcaagatagtgtttcagtgctggcatattttggaattctgcacattcatggagt

SEQ ID NO: 734189 - DNA, 120 bp, Artificial Sequence
  ENSG00000198843_7 (sequence is synthesized)
gcaataatactgtatagctttccccacctcccacaaaatcacccagttaatgtgtgtgtgtgttttttttttaaggtaaacattactacttgtaactttttttcttagtcatatttgaaa

SEQ ID NO: 734190 - DNA, 120 bp, Artificial Sequence
  ENSG00000198843_8 (sequence is synthesized)
aagtagaaaattgagttacaatttgattttttttccaaagatgtctgttaaatctgttgtgcttttatatgaatatttgttttttatagtttaaaattgatcctttgggaatccagttga

SEQ ID NO: 734191 - DNA, 120 bp, Artificial Sequence
  ENSG00000198843_9 (sequence is synthesized)
agttcccaaatactttataagagtttatcagacatctctaatttggccatgtccagtttatacagtttacaaaatatagcagatgcaagattatgggggaaatcctatattcagagtact

SEQ ID NO: 734192 - DNA, 120 bp, Artificial Sequence
  ENSG00000198843_10 (sequence is synthesized)
ctataaatttttgtgtatgtgtgtatgtgcgtgtgattaccagagaactactaaaaaaaccaactgctttttaaatcctattgtgtagttaaagtgtcatgccttgaccaatctaatgaa

SEQ ID NO: 734193 - DNA, 120 bp, Artificial Sequence
  ENSG00000198843_11 (sequence is synthesized)
ttgattaattaactgggcctttatacttaactaaataaaaaactaagcagatatgagttaaatttaaaagtttcaatttattgctcagtgtacctgttaacattatatttaacaattgct

SEQ ID NO: 734194 - DNA, 120 bp, Artificial Sequence
  ENSG00000198843_12 (sequence is synthesized)
taaatttttgtttttgatttatggataatttcttaagagtacacactttagatacacaaataatcgttcatttaccatctttaggatcattgaaactcatctcactaaagaaagttcact

SEQ ID NO: 734195 - DNA, 120 bp, Artificial Sequence
  ENSG00000198843_13 (sequence is synthesized)
tgaacctctttatagcattgatactaggtgaacagaaattacctgactaataatttgtctaacatcatatatcagaattttattgtatatgatgaacaaaacttaaaattttttaaattt

SEQ ID NO: 734196 - DNA, 120 bp, Artificial Sequence
  ENSG00000198843_14 (sequence is synthesized)
tttagcagaaatagaaccagaatgtagaagagtagtcatgtaacagcagtaataacatacttcagcttccatataggaatagaagtggtagagccaaaagtgatttaggaaaagttataa

SEQ ID NO: 734197 - DNA, 120 bp, Artificial Sequence
  ENSG00000198843_15 (sequence is synthesized)
ggtacaggttgagtatcccttttccaaaaatgcttgggacaagaagtatttcagatttcataatttttttcaaagtttggaatatttgcattatacttaccagttgggcatcccaaatct

SEQ ID NO: 734198 - DNA, 120 bp, Artificial Sequence
  ENSG00000198843_16 (sequence is synthesized)
gaaatctgaaatgttccatgagcatttcctttgagtgtcatgttggcactcaaaaaggttcaacattgagtccacttaacacttaggtgttagaagacctaactttctgtaacaattaac

SEQ ID NO: 734199 - DNA, 120 bp, Artificial Sequence
  ENSG00000198843_17 (sequence is synthesized)
cttatactttgtttgtcatcgaatatttgttgaatgcatgtcaggtaatggtcttgattgtgatagcttcaaggtggaacatactgtaatctccagatgctaggaagttagtctaataat

SEQ ID NO: 734200 - DNA, 120 bp, Artificial Sequence
  ENSG00000198843_18 (sequence is synthesized)
tcactgcagaaaattgattaagtggctgtccttttaattaagagtgtggagtcataaacttaagttcttcatatagtgacaagagtccttagagattgttattcaagttccttagaaatt

SEQ ID NO: 734201 - DNA, 120 bp, Artificial Sequence
  ENSG00000198843_19 (sequence is synthesized)
gttatttaggtataatatcatcttgtctttgactagagcttgaaaccttgttatctgattgtgtaccactccaaattccctgccttctgcaagttgaatgtcttgctgaatgtgtctagg

SEQ ID NO: 734202 - DNA, 120 bp, Artificial Sequence
  ENSG00000198843_20 (sequence is synthesized)
ggttcatcttcagtaatcgacattccactagtgccatagttaacttcatgacatgtagacattcaaaacttgagccttggatgttcctgtggacctgacagttaaaaatataaagaacct

SEQ ID NO: 734203 - DNA, 120 bp, Artificial Sequence
  ENSG00000198843_21 (sequence is synthesized)
aggattcaattccaactttctctgtttgccttgggttgaataacttatcttttggagaatagctttaagtggcttagacactgataaaattcagctgtgttgttgacgctcatctctttt

SEQ ID NO: 734204 - DNA, 120 bp, Artificial Sequence
  ENSG00000198843_22 (sequence is synthesized)
gtcttacgcttagccatatttaaatcttgaatttaatagagtctagtgaaaaaaatgagtgggaagaatgaatataaaagtaataatataaggaaaaagggaaagtaaactatttagaat

SEQ ID NO: 734205 - DNA, 120 bp, Artificial Sequence
  ENSG00000198843_23 (sequence is synthesized)
gtagttttgttatattcccagcatttcaatatttattagttacttgtaaattactgtggctgtgtagtttataaatgtctgtgcactatattaattagaagaccatagaacatgccagca

SEQ ID NO: 734206 - DNA, 120 bp, Artificial Sequence
  ENSG00000198843_24 (sequence is synthesized)
ggttggctaatgctatgggggtttttaccacagttgccattgtggaagaaattatttggtacattaataaaaaaagttggtaaaacatggttttatacctcagtgtataagatgtgcaag

SEQ ID NO: 734207 - DNA, 120 bp, Artificial Sequence
  ENSG00000198843_25 (sequence is synthesized)
acaaatatgcttatttccttttctagaatataagtgatattatttgcttatgacactaacactattaatgacaggagtcaatcagcctttacagctatcaaaatataatgagatcccaat

SEQ ID NO: 734208 - DNA, 120 bp, Artificial Sequence
  ENSG00000198843_26 (sequence is synthesized)
gatgattcttttttactttgaatgttaattagtttgggactttgattggctggcaaacattttatcattgtcagaatttaatttagatttcaaaaatagcttacaggattttaaacatgg

SEQ ID NO: 734209 - DNA, 120 bp, Artificial Sequence
  ENSG00000198843_27 (sequence is synthesized)
tgtggtattctaaagccttttttttaaaaaaagagatctttttgagagaaacaaatgaggattgtaaagtttggggacttacctctgtagcattgtgaaaataaactttgattaagctga

SEQ ID NO: 734210 - DNA, 86 bp, Artificial Sequence
  ENSG00000198843_28 (sequence is synthesized)
atgcccagcctatgatagactttaaaaagcacaaaaccaatttgaaatagcatggacaagagattttgctgtattttcgaaatttc

SEQ ID NO: 734211 - DNA, 120 bp, Artificial Sequence
  ENSG00000198843_29 (sequence is synthesized)
caggagaaagcaatattgtaagatcaaagaaaaggccataacagcgcacccaaaaaatttcagcattaccattctgagggtcaggagtctcctcccttccatccgccaacacttgaatca

SEQ ID NO: 734212 - DNA, 120 bp, Artificial Sequence
  ENSG00000198843_30 (sequence is synthesized)
atcccagttgtgtacatagatgataaatattagtgggatgaatgcatattataaaatcatctttaattttttggggggcggtgccatttatttttatagatgtacctgtgtggtctaagc

SEQ ID NO: 734213 - DNA, 120 bp, Artificial Sequence
  ENSG00000198843_31 (sequence is synthesized)
aagatgcagtacgccacggggccgctgctcaagttccagatttggtgagtatgtgcactgggccccggccaccccgccgcgcctctgctcggcgccattggctacgcgaggccccggctt

SEQ ID NO: 734214 - DNA, 120 bp, Artificial Sequence
  ENSG00000198843_32 (sequence is synthesized)
cgcggcctaaatggccgcatcttcgctggcctcgtagaactgtgccggcgcccttccacagccagccttctcgcggccccttagcgcggtcaggccgccctccttttccagtgtttcctg

SEQ ID NO: 734215 - DNA, 120 bp, Artificial Sequence
  ENSG00000198844_0 (sequence is synthesized)
agaatcacaggaacacacacttggaaacctcagccctgcattcctcgctccaaggggcagacaggacaggctgaaaatagcaactggttccaaaaagataaaggggatgactccagcaga

SEQ ID NO: 734216 - DNA, 120 bp, Artificial Sequence
  ENSG00000198844_1 (sequence is synthesized)
gcacctcactcctttgaagagcacagaggaagatgtcagcccagtcccttcctgcagcaacaccccccacgcagaagccccctcggatcatccgcccccgccctccttctcgttccaggg

SEQ ID NO: 734217 - DNA, 120 bp, Artificial Sequence
  ENSG00000198844_2 (sequence is synthesized)
ctgcccagtccccagggcctccccacaatggctcctctccacaagaactaccccgaaactccaatgatgcaccaaccccaatgtgcacccccatcttctgggagcccccagctgcatccc

SEQ ID NO: 734218 - DNA, 120 bp, Artificial Sequence
  ENSG00000198844_3 (sequence is synthesized)
tcaagccccctgctcttttgcccccctcagcttctagagccagcctcgactcccagacttccccagactcaccttccagcacccccacacctagtccagtgtcccggcgctccgcctccc

SEQ ID NO: 734219 - DNA, 120 bp, Artificial Sequence
  ENSG00000198844_4 (sequence is synthesized)
cagaacctgctccccggtctccagtccccccacccaagccgtctgggtcaccctgcacgcctctgctccccatggctggagtcctggctcagaatggctctgcctcagctcctggcactg

SEQ ID NO: 734220 - DNA, 120 bp, Artificial Sequence
  ENSG00000198844_5 (sequence is synthesized)
tgcggaggctggctggcaggtttgaagggggtgctgaaggccgggctcaggatgcagatgccccggagccaggtctccaagcgagagcagatgtgaatggggagagagaagctcccctca

SEQ ID NO: 734221 - DNA, 120 bp, Artificial Sequence
  ENSG00000198844_6 (sequence is synthesized)
ccgggagtgggtcccaggagaacggtgctccagatgctggcctggcctgccctccctgctgcccctgtgtctgccacaccacccggcctggcctggagctcagatgggtgcctgtggggg

SEQ ID NO: 734222 - DNA, 120 bp, Artificial Sequence
  ENSG00000198844_7 (sequence is synthesized)
gctatgaggaggtccccagggtcccccgtcgggcctccccgctgcggacctctcgctcccgcccccaccctccaagcatcggtcaccctgccgttgtcctcacatcctaccgctccactg

SEQ ID NO: 734223 - DNA, 120 bp, Artificial Sequence
  ENSG00000198844_8 (sequence is synthesized)
ctgagcgcaaactcctgccactcctcaagcctcccaaaccaactcgtgtcaggcaggatgccaccattttcggggaccccccacagccagatcttgatctgctttctgaagatggaatcc

SEQ ID NO: 734224 - DNA, 120 bp, Artificial Sequence
  ENSG00000198844_9 (sequence is synthesized)
aaacaggggacagtcctgatgaagctcctcagaatactcctccagcaactgtggaggggagggaagaggaggggctagaggtgctgaaggagcagaattgggagctgcccctgcaggatg

SEQ ID NO: 734225 - DNA, 120 bp, Artificial Sequence
  ENSG00000198844_10 (sequence is synthesized)
aacctctgtaccagacctaccgagcagccgtgctgtcagaggagctgtggggggtgggtgaggatgggagtccttctccagcaaatgctggagatgcacccaccttcccacgaccccctg

SEQ ID NO: 734226 - DNA, 120 bp, Artificial Sequence
  ENSG00000198844_11 (sequence is synthesized)
gacctcgcaacaccctgtggcaggagcttccggctgtgcaagccagcggtcttctggataccctcagcccccaggagaggcgcatgcaggagagtcttttcgaggtggtgacgtccgagg

SEQ ID NO: 734227 - DNA, 120 bp, Artificial Sequence
  ENSG00000198844_12 (sequence is synthesized)
cttcctacctgcgctccctgcggctgctgaccgacaccttcgtgctgagccaggcactccgggacacgctcaccccccgtgatcaccacacactcttctccaatgtgcagcgagtccagg

SEQ ID NO: 734228 - DNA, 120 bp, Artificial Sequence
  ENSG00000198844_13 (sequence is synthesized)
gagtcagcgagcggtttctagcaacgctcctgtcccgtgtgcgctcttccccccacatcagcgacttgtgtgatgtggtgcatgcccacgctgtggggcctttctcggtgtatgtggatt

SEQ ID NO: 734229 - DNA, 120 bp, Artificial Sequence
  ENSG00000198844_14 (sequence is synthesized)
atgtgcggaaccagcagtatcaggaggagacctacagccgcctcatggacaccaacgtgcgcttctccgccgagctgcgccggctgcagagcctccctaagtgtgagcggctcccgctgc

SEQ ID NO: 734230 - DNA, 120 bp, Artificial Sequence
  ENSG00000198844_15 (sequence is synthesized)
cgtccttcctgctactgcccttccagcgcatcacccggctgcgcatgctgctgcagaatatcctgcgccagacagaagaggggtccagccgtcaggagaatgcccagaaggccctgggtg

SEQ ID NO: 734231 - DNA, 120 bp, Artificial Sequence
  ENSG00000198844_16 (sequence is synthesized)
ctgtcagcaagatcatcgagcgttgcagcgctgaggtggggcgcatgaagcagactgaagagctgatccggctcacccaaaggctgcgcttccacaaagtcaaggccctgcccctggtct

SEQ ID NO: 734232 - DNA, 120 bp, Artificial Sequence
  ENSG00000198844_17 (sequence is synthesized)
gacctgctgctcatcactcagcctaagagtgggcagcggttacaggttctggactatgcccatcgctccctggtccaggcccagcaggttccggatccatctggaccccctaccttccgc

SEQ ID NO: 734233 - DNA, 120 bp, Artificial Sequence
  ENSG00000198844_18 (sequence is synthesized)
ctctcccttctcagcaaccaccagggccgccccacccaccgactactccaagcttcttccctatcagacatgcagcgctggctgggagccttcccaaccccaggcccccttccctgctcc

SEQ ID NO: 734234 - DNA, 120 bp, Artificial Sequence
  ENSG00000198844_19 (sequence is synthesized)
ccagacaccatctatgaggactgtgactgttcccaggaactgtgttcagagtcgtctgcacctgccaagactgaaggacggagtctggagtccagggctgcccccaaacacctgcacaag

SEQ ID NO: 734235 - DNA, 120 bp, Artificial Sequence
  ENSG00000198844_20 (sequence is synthesized)
acccctgaaggttggctgaaggggcttcctggggccttccctgcccagctggtgtgtgaagtcacaggggaacacgaaaggaggaggcaccttcgccagaaccagaggcttctcgaggct

SEQ ID NO: 734236 - DNA, 120 bp, Artificial Sequence
  ENSG00000198844_21 (sequence is synthesized)
gttggatcttcttcaggcacccccaatgcccccccaccctaatgcaggctgaggagggggcacatgttgggagacacctaccagtgtggcacggagagaacaaagcccattcatccattg

SEQ ID NO: 734237 - DNA, 120 bp, Artificial Sequence
  ENSG00000198844_22 (sequence is synthesized)
gattcactgtcagtggagatactacctctcgtggcaaccatagagatcgagcttcaggacagagcagccaatgaaaacggccgcctgaacccacagcaataagaatgaatgaggatgcct

SEQ ID NO: 734238 - DNA, 120 bp, Artificial Sequence
  ENSG00000198844_23 (sequence is synthesized)
tgaatgtgtggccaatggagacagaggcttagtgcagagcagccaatgggtactgagctggctgagcctatggccaatgagtattcctgctatgctcagggccaaggaagacaaatctag

SEQ ID NO: 734239 - DNA, 120 bp, Artificial Sequence
  ENSG00000198844_24 (sequence is synthesized)
gtcatggcagttgaaaaagggcctcattggagataaagtcgtaggataaaattgggaacaggaatgagcaggaagccaatcagccaaagaaaatggtgatctggacccaagagaccagta

SEQ ID NO: 734240 - DNA, 120 bp, Artificial Sequence
  ENSG00000198844_25 (sequence is synthesized)
gtcaccctgcttgtttctgcagcaatgactggtcctgtcttttgagtctgggaaatactagtttccattcctggatgcttcctgtgccctctcaagccagttcttctcttccagaagaat

SEQ ID NO: 734241 - DNA, 120 bp, Artificial Sequence
  ENSG00000198844_26 (sequence is synthesized)
tcagagtatgtgtctcagaaaatctgtgtgtgtacatgtgcatgtgtagatatgtgtgtatatgtatcaggaaaggcattctgctgactgtggtgtgtgtgtggtgattgtgctcctgac

SEQ ID NO: 734242 - DNA, 120 bp, Artificial Sequence
  ENSG00000198844_27 (sequence is synthesized)
ccacaaatgactgagtgctccatttcttcctttaccccccatttttcctattattcgctccaagaaagatgctaagtctgagctccagaagagactgtgctgggtgtggcttggcaccca

SEQ ID NO: 734243 - DNA, 120 bp, Artificial Sequence
  ENSG00000198844_28 (sequence is synthesized)
ggggatgagagccctgagctttgggtctcttggaggctagggttctgtggcagttgcagggcaatgttatggagcagccaacggcctggcagaggagcccaagggactgaagatggccag

SEQ ID NO: 734244 - DNA, 120 bp, Artificial Sequence
  ENSG00000198844_29 (sequence is synthesized)
tagctgggtcctgaggcccctgaagtctgcagacccttctccttgccccaaacactggcctccataattcctgcctgcagatctcccaacttgaactataatccaccagccagcctcagc

SEQ ID NO: 734245 - DNA, 120 bp, Artificial Sequence
  ENSG00000198844_30 (sequence is synthesized)
cttgagctttggaaccacattagatcctgcatctgggtgaagaaacgggagctgtggaccacaggccagccagtgaacctcctgggctttcttgcctttgtcctgatcctctcacagaaa

SEQ ID NO: 734246 - DNA, 120 bp, Artificial Sequence
  ENSG00000198844_31 (sequence is synthesized)
cactgggccaaacagtggggagagattggagagcgggtgtggctgcccaaccccatccagagcatctgcttccagatgagccagtgcctcgcatgataccagaggaggcgagggacagag

SEQ ID NO: 734247 - DNA, 120 bp, Artificial Sequence
  ENSG00000198844_32 (sequence is synthesized)
acagcaaggcagacagtggctggcaggggggcccaggcccgggacgaggcctccccttcagctcaggcacagcaacttgcccaggactgacactgtcaccctgactgcaggaggcacagg

SEQ ID NO: 734248 - DNA, 120 bp, Artificial Sequence
  ENSG00000198844_33 (sequence is synthesized)
gactccgggagactcagagggcgaagagcactggcatttggcatgtccatgacattggagactcccctagcagggtgcctgacgtgtggggaaccctcagtaaatagtggtgcatttgta

SEQ ID NO: 734249 - DNA, 120 bp, Artificial Sequence
  ENSG00000198844_34 (sequence is synthesized)
acaggcactgggctctttgcttccccaccagctgctgctctggtgctgaagagagttgcagtttttatagtaaccatccctgctggggctggagtcgggagtcctggctggggatcctgg

SEQ ID NO: 734250 - DNA, 120 bp, Artificial Sequence
  ENSG00000198844_35 (sequence is synthesized)
atcactcagcctaagaggcccagcaggttccggatccatctggaccccctaccttccgcctctcccttctcagcaaccaccagggccgccccacccaccgactactccaagcttcttccc

SEQ ID NO: 734251 - DNA, 120 bp, Artificial Sequence
  ENSG00000198844_36 (sequence is synthesized)
tctctccccaccatgcttctacctgagggcagactaaccttcagctccagctaaatcccacctccacaaagaaggccgggcacggtggcttacatctgtaatcccagcactctgggaggc

SEQ ID NO: 734252 - DNA, 65 bp, Artificial Sequence
  ENSG00000198844_37 (sequence is synthesized)
catctgtaatcccagcactctgggaggccgcggcagaaggatcacctgaagtcaggagttcaaga

SEQ ID NO: 734253 - DNA, 89 bp, Artificial Sequence
  ENSG00000198844_38 (sequence is synthesized)
gacccagggagatggaggttgcagggagccaagagcgtgccactgcactccagcctggtcgacaagagagaaactccatctcaaaaaaa

SEQ ID NO: 734254 - DNA, 120 bp, Artificial Sequence
  ENSG00000198844_39 (sequence is synthesized)
agaatcacaggaacacacacttggaaacctcagccctgcattcctcgctccaaggggcagacaggacaggctgaaaatagcaactggttccaaaaagataaagccctgggaggtgactga

SEQ ID NO: 734255 - DNA, 120 bp, Artificial Sequence
  ENSG00000198844_40 (sequence is synthesized)
gtggcgggtggggggcgctgggtgacctcaatccacccatcttctccgttttcagtgctaacaactttcaggggctaccttttcaaaaatggagttaatgtttgggatatctggtttctg

SEQ ID NO: 734256 - DNA, 120 bp, Artificial Sequence
  ENSG00000198844_41 (sequence is synthesized)
tatgtcgggatttgaagggagtcagggtggaggagatctatagatgcctggaccttgatattgcagttgctgggcaggttaaagatggagatggtctgggcgggggtggagctgggcccc

SEQ ID NO: 734257 - DNA, 120 bp, Artificial Sequence
  ENSG00000198844_42 (sequence is synthesized)
gccagggctctagagataagcagcccttgtttcgaatcccagctctggcccttatcaattctgtgatcttatagaaggccgggcacggtggcttacatctgtaatcccagcactctggga

SEQ ID NO: 734258 - DNA, 120 bp, Artificial Sequence
  ENSG00000198846_0 (sequence is synthesized)
ctcttcttcttaaacaaaccacaaacggatgtgagggaaggaaggtgtttcttttactcctgagcccagacacctcactctgttccgtctaagcttgttttgctgaacacttttttttaa

SEQ ID NO: 734259 - DNA, 120 bp, Artificial Sequence
  ENSG00000198846_1 (sequence is synthesized)
aaaaggaaaaagaaaaggagttgcttgatgtgagagtgaaatggacgtaagattttatccacctccagcccagcccgccgctgcgcccgacgctccctgtctgggaccttctccctgcct

SEQ ID NO: 734260 - DNA, 120 bp, Artificial Sequence
  ENSG00000198846_2 (sequence is synthesized)
ggacccctactattgcaacaagtttgacggtgagaacatgtatatgagcatgacagagccgagccaggactatgtgccagccagccagtcctaccctggtccaagcctggaaagtgaaga

SEQ ID NO: 734261 - DNA, 120 bp, Artificial Sequence
  ENSG00000198846_3 (sequence is synthesized)
cttcaacattccaccaattactcctccttccctcccagaccactcgctggtgcacctgaatgaagttgagtctggttaccattctctgtgtcaccccatgaaccataatggcctgctacc

SEQ ID NO: 734262 - DNA, 120 bp, Artificial Sequence
  ENSG00000198846_4 (sequence is synthesized)
atttcatccacaaaacatggacctccctgaaatcacagtctccaatatgctgggccaggatggaacactgctttctaattccatttctgtgatgccagatatacgaaacccagaaggaac

SEQ ID NO: 734263 - DNA, 120 bp, Artificial Sequence
  ENSG00000198846_5 (sequence is synthesized)
tcagtacagttcccatcctcagatggcagccatgagaccaaggggccagcctgcagacatcaggcagcagccaggaatgatgccacatggccagctgactaccattaaccagtcacagct

SEQ ID NO: 734264 - DNA, 120 bp, Artificial Sequence
  ENSG00000198846_6 (sequence is synthesized)
aagtgctcaacttggtttgaatatgggaggaagcaatgttccccacaactcaccatctccacctggaagcaagtctgcaactccttcaccatccagttcagtgcatgaagatgaaggcga

SEQ ID NO: 734265 - DNA, 120 bp, Artificial Sequence
  ENSG00000198846_7 (sequence is synthesized)
tgatacctctaagatcaatggtggagagaagcggcctgcctctgatatggggaaaaaaccaaaaactcccaaaaagaagaagaagaaggatcccaatgagccccagaagcctgtgtctgc

SEQ ID NO: 734266 - DNA, 120 bp, Artificial Sequence
  ENSG00000198846_8 (sequence is synthesized)
ctatgcgttattctttcgtgatactcaggccgccatcaagggccaaaatccaaacgctacctttggcgaagtctctaaaattgtggcttcaatgtgggacggtttaggagaagagcaaaa

SEQ ID NO: 734267 - DNA, 120 bp, Artificial Sequence
  ENSG00000198846_9 (sequence is synthesized)
acaggtctataaaaagaaaaccgaggctgcgaagaaggagtacctgaagcaactcgcagcatacagagccagccttgtatccaagagctacagtgaacctgttgacgtgaagacatctca

SEQ ID NO: 734268 - DNA, 120 bp, Artificial Sequence
  ENSG00000198846_10 (sequence is synthesized)
acctcctcagctgatcaattcgaagccgtcggtgttccatgggcccagccaggcccactcggccctgtacctaagttcccactatcaccaacaaccgggaatgaatcctcacctaactgc

SEQ ID NO: 734269 - DNA, 120 bp, Artificial Sequence
  ENSG00000198846_11 (sequence is synthesized)
catgcatcctagtctccccaggaacatagcccccaagccgaataaccaaatgccagtgactgtctctatagcaaacatggctgtgtcccctcctcctcccctccagatcagcccgcctct

SEQ ID NO: 734270 - DNA, 120 bp, Artificial Sequence
  ENSG00000198846_12 (sequence is synthesized)
tcaccagcatctcaacatgcagcagcaccagccgctcaccatgcagcagccccttgggaaccagctccccatgcaggtccagtctgccttacactcacccaccatgcagcaaggatttac

SEQ ID NO: 734271 - DNA, 120 bp, Artificial Sequence
  ENSG00000198846_13 (sequence is synthesized)
tcttcaacccgactatcagactattatcaatcctacatctacagctgcacaagttgtcacccaggcaatggagtatgtgcgttcggggtgcagaaatcctcccccacaaccggtggactg

SEQ ID NO: 734272 - DNA, 120 bp, Artificial Sequence
  ENSG00000198846_14 (sequence is synthesized)
gaataacgactactgcagtagtgggggcatgcagagggacaaagcactgtaccttacttgagaatctgaacacctcttctttccactgaggaattcagggaagtgttttcaccatggatt

SEQ ID NO: 734273 - DNA, 120 bp, Artificial Sequence
  ENSG00000198846_15 (sequence is synthesized)
gctttgtacagtcaaggcagttctccattttattagaaaatacaagttgctaagcacttaggaccatttgagcttgtgggtcacccactctggaagaaatagtcatgcttctttattatt

SEQ ID NO: 734274 - DNA, 120 bp, Artificial Sequence
  ENSG00000198846_16 (sequence is synthesized)
tgtagatgtctcggataaaagtcctggattttccattggttttcataatgggtgtttatatgaaactactaaagactttttaaatggcttgatgtagcagtcatagcaagtttgtaaata

SEQ ID NO: 734275 - DNA, 120 bp, Artificial Sequence
  ENSG00000198846_17 (sequence is synthesized)
gcatctatgttacactctcctagagtataaaatgtgaatgtttttgtagctaaattgtaattgaaactggctcattccagtttattgatttcacaataggggttaaattggcaaacattc

SEQ ID NO: 734276 - DNA, 120 bp, Artificial Sequence
  ENSG00000198846_18 (sequence is synthesized)
atatttttacttcatttttaaaacaactgactgatagttctatattttcaaaatatttgaaaataaaaagtattcccaagtgattttaatttaaaaacaaattggctttgtctcattgat

SEQ ID NO: 734277 - DNA, 120 bp, Artificial Sequence
  ENSG00000198846_19 (sequence is synthesized)
cagacaaaaagaaactagtattaagggaagcgcaaacacatttattttgtactgcagaaaaattgcttttttgtatcactttttgtgtaatggttagtaaatgtcatttaagtcctttta

SEQ ID NO: 734278 - DNA, 120 bp, Artificial Sequence
  ENSG00000198846_20 (sequence is synthesized)
tgtataaaactgccaaatgcttacctggtattttattagatgcagaaacagattggaaacagctaaattacaacttttacatatggctctgtcttattgtttcttcatactgtgtctgta

SEQ ID NO: 734279 - DNA, 120 bp, Artificial Sequence
  ENSG00000198846_21 (sequence is synthesized)
tttaatctttttttatggaacctgttgcgcctatttatgaaataataaatataggtgtttgtaagtaaatttgttagtatttgaaagaggtttctttgatgttttaacttttgctggcaa

SEQ ID NO: 734280 - DNA, 120 bp, Artificial Sequence
  ENSG00000198846_22 (sequence is synthesized)
aaaaaaattcacgcttggtgtgaatactttattatttagtttttacagtaacatgaataaagccaaacctgcttttcatttagcagcaaattaaagtaaccagtccttatttctgcattt

SEQ ID NO: 734281 - DNA, 120 bp, Artificial Sequence
  ENSG00000198846_23 (sequence is synthesized)
ctttggttgatgcaaacaaaaaactattatatttaagaactttatttcttcatacgacataacagaattgccctccaagtcacacaagctccaagactaaacaaacagacaggtcctctg

SEQ ID NO: 734282 - DNA, 120 bp, Artificial Sequence
  ENSG00000198846_24 (sequence is synthesized)
tcttaaaaaggttacttcttggttctcagctggttctagtcaattctgaaccaccaccccccgccccccgcaaaaaagtaaaagtcaaaccaaacttcctcaagctgcatgcttttcaca

SEQ ID NO: 734283 - DNA, 120 bp, Artificial Sequence
  ENSG00000198846_25 (sequence is synthesized)
aaatccagaaagcatttaagaattgaactaggggctggaagaagtgaaagggaagcatctaaaaatgaaaggtgagtaaccagatagcaaaagaaaagggaaagccatccaaatttgaaa

SEQ ID NO: 734284 - DNA, 120 bp, Artificial Sequence
  ENSG00000198846_26 (sequence is synthesized)
gctgttgatagaaattgagattcttgctgtcttttgtgcctctacaagctactactcattccagaattcctgggtcttccaagaggattcttaaggtaccagagatttgctagggaacca

SEQ ID NO: 734285 - DNA, 120 bp, Artificial Sequence
  ENSG00000198846_27 (sequence is synthesized)
aaagtgcttgagaatctgcctgagggcttgcatagctttcacattaaaaaaagaaaaagctagcagatttactcctttttaggggatcatatcaagaaagttagtctggttggaaaccaa

SEQ ID NO: 734286 - DNA, 120 bp, Artificial Sequence
  ENSG00000198846_28 (sequence is synthesized)
gagaatggctgatgtctctttcttggaatatgtgaaataaatttagcagtttaactaaatacaaatatatgcattgtgtaatccactcagaattaaacagacaaaaggtatgcttgcttt

SEQ ID NO: 734287 - DNA, 120 bp, Artificial Sequence
  ENSG00000198846_29 (sequence is synthesized)
ggaatgattttaggcattgtacaaccttgaatcacttgagcatgtaataactaataaataatgcagatccatgtgattattaaaatgactgtagctgagagctctaattttcctgtcttg

SEQ ID NO: 734288 - DNA, 120 bp, Artificial Sequence
  ENSG00000198846_30 (sequence is synthesized)
aaactgtataagaactcatgtgattaagttcacagtttattgtttgtctgtttagtattttagaaatataccagcactactaattaactaatgtcttttatttattatattatgataaag

SEQ ID NO: 734289 - DNA, 120 bp, Artificial Sequence
  ENSG00000198846_31 (sequence is synthesized)
taaaaatttcacttgcattaagtctaaactgagaaggtaattactgggaggagaatgagcagctttgactttgacaggcggtttgtgcaggaaagcacagtgccgtgttgtttacagctt

SEQ ID NO: 734290 - DNA, 120 bp, Artificial Sequence
  ENSG00000198846_32 (sequence is synthesized)
ttctagagcagctgtgcgaccagggtagagagtgttgaaattcaataccaaatacagtaaaaacaaatgtaaataaaagaaaacacatcatcaataaaactgttattatgcgtgaccgta

SEQ ID NO: 734291 - DNA, 120 bp, Artificial Sequence
  ENSG00000198848_0 (sequence is synthesized)
agggcggtaactctgggcggggctgggctccagggctggacagcacagtccctctgaactgcacagagacctcgcaggccccgagaactgtcgcccttccacgatgtggctccgtgcctt

SEQ ID NO: 734292 - DNA, 120 bp, Artificial Sequence
  ENSG00000198848_1 (sequence is synthesized)
tatcctggccactctctctgcttccgcggcttgggcagggcatccgtcctcgccacctgtggtggacaccgtgcatggcaaagtgctggggaagttcgtcagcttagaaggatttgcaca

SEQ ID NO: 734293 - DNA, 120 bp, Artificial Sequence
  ENSG00000198848_2 (sequence is synthesized)
gcctgtggccattttcctgggaatcccttttgccaagccgcctcttggacccctgaggtttactccaccgcagcctgcagaaccatggagctttgtgaagaatgccacctcgtaccctcc

SEQ ID NO: 734294 - DNA, 120 bp, Artificial Sequence
  ENSG00000198848_3 (sequence is synthesized)
tatgtgcacccaagatcccaaggcggggcagttactctcagagctatttacaaaccgaaaggagaacattcctctcaagctttctgaagactgtctttacctcaatatttacactcctgc

SEQ ID NO: 734295 - DNA, 120 bp, Artificial Sequence
  ENSG00000198848_4 (sequence is synthesized)
tgacttgaccaagaaaaacaggctgccggtgatggtgtggatccacggaggggggctgatggtgggtgcggcatcaacctatgatgggctggcccttgctgcccatgaaaacgtggtggt

SEQ ID NO: 734296 - DNA, 120 bp, Artificial Sequence
  ENSG00000198848_5 (sequence is synthesized)
ggtgaccattcaatatcgcctgggcatctggggattcttcagcacaggggatgaacacagccgggggaactggggtcacctggaccaggtggctgccctgcgctgggtccaggacaacat

SEQ ID NO: 734297 - DNA, 120 bp, Artificial Sequence
  ENSG00000198848_6 (sequence is synthesized)
tgccagctttggagggaacccaggctctgtgaccatctttggagagtcagcgggaggagaaagtgtctctgttcttgttttgtctccattggccaagaacctcttccaccgggccatttc

SEQ ID NO: 734298 - DNA, 120 bp, Artificial Sequence
  ENSG00000198848_7 (sequence is synthesized)
tgagagtggcgtggccctcacttctgttctggtgaagaaaggtgatgtcaagcccttggctgagcaaattgctatcactgctgggtgcaaaaccaccacctctgctgtcatggttcactg

SEQ ID NO: 734299 - DNA, 120 bp, Artificial Sequence
  ENSG00000198848_8 (sequence is synthesized)
agagtcaaccccttctgggcactgtgattgatgggatgctgctgctgaaaacacctgaagagcttcaagctgaaaggaatttccacactgtcccctacatggtcggaattaacaagcagg

SEQ ID NO: 734300 - DNA, 120 bp, Artificial Sequence
  ENSG00000198848_9 (sequence is synthesized)
agtttggctggttgattccaatgcagttgatgagctatccactctccgaagggcaactggaccagaagacagccatgtcactcctgtggaagtcctatccccttgtttgcattgctaagg

SEQ ID NO: 734301 - DNA, 120 bp, Artificial Sequence
  ENSG00000198848_10 (sequence is synthesized)
aactgattccagaagccactgagaaatacttaggaggaacagacgacactgtcaaaaagaaagacctgttcctggacttgatagcagatgtgatgtttggtgtcccatctgtgattgtgg

SEQ ID NO: 734302 - DNA, 120 bp, Artificial Sequence
  ENSG00000198848_11 (sequence is synthesized)
cccggaaccacagagatgctggagcacccacctacatgtatgagtttcagtaccgtccaagcttctcatcagacatgaaacccaagacggtgataggagaccacggggatgagctcttct

SEQ ID NO: 734303 - DNA, 120 bp, Artificial Sequence
  ENSG00000198848_12 (sequence is synthesized)
ccgtctttggggccccatttttaaaagagggtgcctcagaagaggagatcagacttagcaagatggtgatgaaattctgggccaactttgctcgcaatggaaaccccaatggggaagggc

SEQ ID NO: 734304 - DNA, 120 bp, Artificial Sequence
  ENSG00000198848_13 (sequence is synthesized)
tgccccactggccagagtacaaccagaaggaagggtatctgcagattggtgccaacacccaggcggcccagaagctgaaggacaaagaagtagctttctggaccaacctctttgccaaga

SEQ ID NO: 734305 - DNA, 120 bp, Artificial Sequence
  ENSG00000198848_14 (sequence is synthesized)
aggcagtggagaagccaccccagacagaacacatagagctgtgaatgaagatccagccggccttgggagcctggaggagcaaagactggggtcttttgcgaaagggattgcaggttcaga

SEQ ID NO: 734306 - DNA, 120 bp, Artificial Sequence
  ENSG00000198848_15 (sequence is synthesized)
aggcatcttaccatggctggggaattgtctggtggtggggggcaggggacagaggccatgaaggagcaagttttgtatttgtgacctcagctttgggaataaaggatcttttgaaggcca

SEQ ID NO: 734307 - DNA, 120 bp, Artificial Sequence
  ENSG00000198848_16 (sequence is synthesized)
gtagttgggcaagtttacagctctctgtaatctgacagtagagtccagactggtttgatgaaagagggtaaactgtgggtgggcgtggcctgaggccccactagaagcccagggagatct

SEQ ID NO: 734308 - DNA, 120 bp, Artificial Sequence
  ENSG00000198848_17 (sequence is synthesized)
ggcctcaccatcactccccagggtaggaaggaccctacagacatcagagcagaccctgctcatctcagcagccaggtgttcggaggctttccagcagcccaccagtggccgccttctttt

SEQ ID NO: 734309 - DNA, 120 bp, Artificial Sequence
  ENSG00000198848_18 (sequence is synthesized)
cttcccttttttaaaaaataatgtttactgtttttattttctgagtgcaaatgtaatatatacttattacagaaaatttaggaaatacagagaaaggaaagtaagaaaattaagatcaca

SEQ ID NO: 734310 - DNA, 120 bp, Artificial Sequence
  ENSG00000198848_19 (sequence is synthesized)
tgaactgcacagagacctcgcaggccccgagaactgtcgcccttccacgatgtggctccgtgcctttatcctggccactctctctgcttccgcggcttggggtgatggtgtggatccacg

SEQ ID NO: 734311 - DNA, 120 bp, Artificial Sequence
  ENSG00000198848_20 (sequence is synthesized)
ccggctggtacgtctccggctggacacccccacctccttggctctatgctcctgaatcctcagggatctctcttgtggtcggttgtagctaatgttctcctagaatcactgaggcaccaa

SEQ ID NO: 734312 - DNA, 120 bp, Artificial Sequence
  ENSG00000198848_21 (sequence is synthesized)
tggctgagcaggaagggcgaggagacaccttgatcagcgtcccagtttcacagccaggcaaaccgacacagggcttggaagggatttgccaagggcagcaggtgatcagggcagagctgg

SEQ ID NO: 734313 - DNA, 120 bp, Artificial Sequence
  ENSG00000198848_22 (sequence is synthesized)
gactccagctcatggccctagcagccagtacagtgccctatctgtgaccacactcctcctatgtgccagggcctggtgccatgttgggcagtgatggtgtcttgtgtctctctgggtctg

SEQ ID NO: 734314 - DNA, 120 bp, Artificial Sequence
  ENSG00000198851_0 (sequence is synthesized)
gctaaatgtcatgtatttttcatggcccctccaggtattgtcagagtcctcttgtttggccttctaggaaggctgtgggacccagctttcttcaaccagtccaggtggaggcctctgcct

SEQ ID NO: 734315 - DNA, 120 bp, Artificial Sequence
  ENSG00000198851_1 (sequence is synthesized)
tgaacgtttccaagtgaggtaaaacccgcaggcccagaggcctctctacttcctgtgtggggttcagaaaccctcctcccctcccagcctcaggtgcctgcttcagaaaatgaagtagta

SEQ ID NO: 734316 - DNA, 120 bp, Artificial Sequence
  ENSG00000198851_2 (sequence is synthesized)
agtctgctggcctccgccatcttagtaaagtaacagtcccatgaaacaaagatgcagtcgggcactcactggagagttctgggcctctgcctcttatcagttggcgtttgggggcaagat

SEQ ID NO: 734317 - DNA, 120 bp, Artificial Sequence
  ENSG00000198851_3 (sequence is synthesized)
ggtaatgaagaaatgggtggtattacacagacaccatataaagtctccatctctggaaccacagtaatattgacatgccctcagtatcctggatctgaaatactatggcaacacaatgat

SEQ ID NO: 734318 - DNA, 120 bp, Artificial Sequence
  ENSG00000198851_4 (sequence is synthesized)
aaaaacataggcggtgatgaggatgataaaaacataggcagtgatgaggatcacctgtcactgaaggaattttcagaattggagcaaagtggttattatgtctgctaccccagaggaagc

SEQ ID NO: 734319 - DNA, 120 bp, Artificial Sequence
  ENSG00000198851_5 (sequence is synthesized)
aaaccagaagatgcgaacttttatctctacctgagggcaagagtgtgtgagaactgcatggagatggatgtgatgtcggtggccacaattgtcatagtggacatctgcatcactgggggc

SEQ ID NO: 734320 - DNA, 120 bp, Artificial Sequence
  ENSG00000198851_6 (sequence is synthesized)
ccaccacctgttcccaacccagactatgagcccatccggaaaggccagcgggacctgtattctggcctgaatcagagacgcatctgaccctctggagaacactgcctcccgctggcccag

SEQ ID NO: 734321 - DNA, 120 bp, Artificial Sequence
  ENSG00000198851_7 (sequence is synthesized)
gtctcctctccagtccccctgcgactccctgtttcctgggctagtcttggaccccacgagagagaatcgttcctcagcctcatggtgaactcgcgccctccagcctgatcccccgctccc

SEQ ID NO: 734322 - DNA, 120 bp, Artificial Sequence
  ENSG00000198851_8 (sequence is synthesized)
tcctccctgccttctctgctggtacccagtcctaaaatattgctgcttcctcttcctttgaagcatcatcagtagtcacaccctcacagctggcctgccctcttgccaggatatttattt

SEQ ID NO: 734323 - DNA, 120 bp, Artificial Sequence
  ENSG00000198851_9 (sequence is synthesized)
gtgctattcactcccttccctttggatgtaacttctccgttcagttccctccttttcttgcatgtaagttgtcccccatcccaaagtattccatctacttttctatcgccgtcccctttt

SEQ ID NO: 734324 - DNA, 120 bp, Artificial Sequence
  ENSG00000198851_10 (sequence is synthesized)
gcagccctctctggggatggactgggtaaatgttgacagaggccctgccccgttcacagatcctggccctgagccagccctgtgctcctccctcccccaacactccctaccaacccccta

SEQ ID NO: 734325 - DNA, 120 bp, Artificial Sequence
  ENSG00000198851_11 (sequence is synthesized)
atcccctactccctccaccccccctccactgtaggccactggatggtcatttgcatctccgtaaatgtgctctgctcctcagctgagagagaaaaaaataaactgtatttggctgcaaga

SEQ ID NO: 734326 - DNA, 120 bp, Artificial Sequence
  ENSG00000198851_12 (sequence is synthesized)
cattttcaggtggtattacacagacacgtgagtttattggtcttttatttatgccctgtctgaggatgcagattggtgggtagatgagaaggaactgattgagagagattaaccccaaga

SEQ ID NO: 734327 - DNA, 120 bp, Artificial Sequence
  ENSG00000198851_13 (sequence is synthesized)
actgatatcttcccagcattgcattctcaactccattttagaaaggttccaaatagggacttctgtgggtttttctttacatccatcttacccttcccaagtccccatgtccctgcgtaa

SEQ ID NO: 734328 - DNA, 120 bp, Artificial Sequence
  ENSG00000198851_14 (sequence is synthesized)
accctaaagccacctctcaaaaggttctctagttcccttcaaggttctctagttcccttcattccacatatctcctcttccacaccctctagccagtagagctcccttctgacaagcaag

SEQ ID NO: 734329 - DNA, 120 bp, Artificial Sequence
  ENSG00000198851_15 (sequence is synthesized)
tctaagatctagatgacagatgacttcctgcatttgggtggttcttttgtcactaatttgccttttctaaaattgtcctggtttcttctgccaatttcccttctttctccccagcatata

SEQ ID NO: 734330 - DNA, 120 bp, Artificial Sequence
  ENSG00000198851_16 (sequence is synthesized)
aagaggtaatccaggtctccagaacaggtaccaccggctctttagggaggaccattcaaaagggcattctcagtgattttccctaacccagctcacagtgcccaggcgtctttgcgcttc

SEQ ID NO: 734331 - DNA, 120 bp, Artificial Sequence
  ENSG00000198851_17 (sequence is synthesized)
ctcccacactcaatcctgggactctctggtaccacacggcatcagtgttttctggaatatagattaaacaccaatatgaggcttctgggtaaccccagtctgtgcgagatctaaaatagc

SEQ ID NO: 734332 - DNA, 120 bp, Artificial Sequence
  ENSG00000198851_18 (sequence is synthesized)
aactccctaagagacaggactgggtcatttgcaccgcatcacacccaggttcatagcacaccaacatgagtttatctaatgcttcctccagagataaatttttcagaaaggtttgcaaaa

SEQ ID NO: 734333 - DNA, 120 bp, Artificial Sequence
  ENSG00000198851_19 (sequence is synthesized)
aacactcaaggccactatagtaaaatggcataagctaaggtataataataaaataataacaatacttaacatttattgagtgcttattaagtctcaagcactgtctgtacccaacactta

SEQ ID NO: 734334 - DNA, 120 bp, Artificial Sequence
  ENSG00000198851_20 (sequence is synthesized)
aagggatgaggaaacagagggtttgtgagttgaaaacacatttcacgcttctcacagctagtgagtaataaagctgggactcaaacccagggctgtttgactccagtgcctctacccacg

SEQ ID NO: 734335 - DNA, 120 bp, Artificial Sequence
  ENSG00000198851_21 (sequence is synthesized)
gccaccactctttgcttgtcaatgttgttctaaacatattgaagggggggctctgaccgtggcaagcgtgtgagtagtaaggggagaatggccttcatgcactccctcctcacctccagc

SEQ ID NO: 734336 - DNA, 120 bp, Artificial Sequence
  ENSG00000198853_0 (sequence is synthesized)
gagacacgccgccgccgccgccgccgccggcgcggaaggacgaggctgaggcgagaaacgaggtgccaagctctcctgatgaaatgtgttctgccccactgggctccagggacagtgtct

SEQ ID NO: 734337 - DNA, 120 bp, Artificial Sequence
  ENSG00000198853_1 (sequence is synthesized)
ggtgctgttgaagcccttattcgaactttccagaatggatagtcccccaaagctgactggagagaccctcatcgttcatcacatccccctggtgcactgccaagtcccagacaggcagtg

SEQ ID NO: 734338 - DNA, 120 bp, Artificial Sequence
  ENSG00000198853_2 (sequence is synthesized)
ctgtggaggggcaggtggaggtggtgggagcacaagacctaatcccttctgcccacctgagctgggcatcacccagcccgatcaagacctaggacaagctgactccctgctattcagcag

SEQ ID NO: 734339 - DNA, 120 bp, Artificial Sequence
  ENSG00000198853_3 (sequence is synthesized)
cctgcactctactccaggaggaactgcacggtctatagacagcaccaagagtaggagtcgggatggaagaggccctggagcccccaaacgacacaaccccttcttgctgcaggagggtgt

SEQ ID NO: 734340 - DNA, 120 bp, Artificial Sequence
  ENSG00000198853_4 (sequence is synthesized)
gggtgagccaggacttggtgacctgtatgatgacagcattggtgacagtgccacccagcagtccttccacctgcatggcactggccagcccaactttcatctatcctctttccagctgcc

SEQ ID NO: 734341 - DNA, 120 bp, Artificial Sequence
  ENSG00000198853_5 (sequence is synthesized)
accatctggccccagagtgggcaggccatgggggacaacacgcagtcgggctggagtggtggaagggcaggaacaggagccagtgatgaccttggatactcagcagtgcggcaccagcca

SEQ ID NO: 734342 - DNA, 120 bp, Artificial Sequence
  ENSG00000198853_6 (sequence is synthesized)
ctgctgccggccagagctggaagcagagactatggagctggatgagtgtgggggacctggtgggagtggcagtgggggtggagccagcgatacctctggcttttcctttgaccaggaatg

SEQ ID NO: 734343 - DNA, 120 bp, Artificial Sequence
  ENSG00000198853_7 (sequence is synthesized)
gaagctcagttcagatgaatccccaaggaaccctggatgctccggctcaggggaccagcactgccgctgcagtagcacatccagtcagtccgaggcagctgaccagtccatgggctatgt

SEQ ID NO: 734344 - DNA, 120 bp, Artificial Sequence
  ENSG00000198853_8 (sequence is synthesized)
gagcgactcctcctgcaacagttcagatggtgtgctggtcaccttcagcaccctctacaacaagatgcatggcaccccccgtgccaatctcaactctgccccacagtcctgcagcgactc

SEQ ID NO: 734345 - DNA, 120 bp, Artificial Sequence
  ENSG00000198853_9 (sequence is synthesized)
ttccttctgcagccactcagaccctggcgccttctatctggatctgcagccctccccatttgagtctaagatgtcttatgagtcccatcaccctgaaagtggaggaagggaagggggcta

SEQ ID NO: 734346 - DNA, 120 bp, Artificial Sequence
  ENSG00000198853_10 (sequence is synthesized)
tggttgccctcatgcctcttctcctgagcttgatgccaactgcaactcctaccgcccacactgtgagccgtgcccagcagtggctgacctcacagcctgcttccaaagccaggcccgtct

SEQ ID NO: 734347 - DNA, 120 bp, Artificial Sequence
  ENSG00000198853_11 (sequence is synthesized)
tgttgtggccacacaaaattactataaacttgtcacctgtgacctatcttcccaatcatccccaagccctgctggctcttccatcactagctgctctgaggaacacaccaagataagtcc

SEQ ID NO: 734348 - DNA, 120 bp, Artificial Sequence
  ENSG00000198853_12 (sequence is synthesized)
cccaccaggccctggcccagacccaggccccagccagccctctgagtattacctattccagaagccagaagtccagccagaggaacaagaagcagtgagttcctccacccaagcagcagc

SEQ ID NO: 734349 - DNA, 120 bp, Artificial Sequence
  ENSG00000198853_13 (sequence is synthesized)
tgctgtgggccccactgtgcttgagggacaagtatacacgaatacttcaccccccaacctcagcactggacgtcagcgctcccgcagctatgatcgcagcctgcagcgcagccctcctgt

SEQ ID NO: 734350 - DNA, 120 bp, Artificial Sequence
  ENSG00000198853_14 (sequence is synthesized)
ccgcctgggctcgctggaacgtatgttgagttgcccagtgcgcttgagtgagggccctgcagccatggccgggcctggctccccacccaggagggtcacctcctttgccgagctggccaa

SEQ ID NO: 734351 - DNA, 120 bp, Artificial Sequence
  ENSG00000198853_15 (sequence is synthesized)
gggccggaagaaaactggaggctctggctcgcccccacttcgtgtgagtgttggggactcctcccaggagttctcacccatccaagaagcccagcaagatcggggggccccactggatga

SEQ ID NO: 734352 - DNA, 120 bp, Artificial Sequence
  ENSG00000198853_16 (sequence is synthesized)
gggcacttgctgtagccatagcctgccacccatgcctttggggccaggcatggacctacttggcccagacccaagtccaccctggtccacccaggtctgtcagggaccccactccagtga

SEQ ID NO: 734353 - DNA, 120 bp, Artificial Sequence
  ENSG00000198853_17 (sequence is synthesized)
gatgcctcctgctggcctcagagctactgggcaaggccccctggctcagctgatggatccagggcctgctctcccagggagcccagccaacagccatacccagagggatgcaagagctag

SEQ ID NO: 734354 - DNA, 120 bp, Artificial Sequence
  ENSG00000198853_18 (sequence is synthesized)
agctgacgggggtggcaccgagagccgaccagtccttcgctacagcaaggaacagaggccaaccacactgcccatccagcccttcgtgttccagcaccacttccccaagcagctggccaa

SEQ ID NO: 734355 - DNA, 120 bp, Artificial Sequence
  ENSG00000198853_19 (sequence is synthesized)
ggcccgggccctccacagcctttcccagctctacagcctctcaggctgcagccgtacacagcagcctgccccactggctgcccctgctgctcaagtctcagtcccagctccctcagggga

SEQ ID NO: 734356 - DNA, 120 bp, Artificial Sequence
  ENSG00000198853_20 (sequence is synthesized)
accgcaggcatccactccccgagccactggcagaggtgccaggaaagctgggtctgagccagagacctctcggccatcgcccctgggcagctactcccccatccggagtgttggcccctt

SEQ ID NO: 734357 - DNA, 120 bp, Artificial Sequence
  ENSG00000198853_21 (sequence is synthesized)
acagccacagaaagcctgcccccatggagccactcctgtccttctgctgtccggcctgccacctcccagcagccgcagaaggaggatcagaagatactgaccttgactgagtaccggctc

SEQ ID NO: 734358 - DNA, 120 bp, Artificial Sequence
  ENSG00000198853_22 (sequence is synthesized)
catggaacaggaagcttgccgcctctgggctcctggcgatctggcctcagccgagcagagagcctggcccggggaggtggtgagggcagcatggccaccaggcccagtaatgccaaccac

SEQ ID NO: 734359 - DNA, 120 bp, Artificial Sequence
  ENSG00000198853_23 (sequence is synthesized)
ctatcccctcaagccctcaagtggcgggaatacaggaggaagaacccactagggccacctggtttgtcagggagcctagaccgaagatcacaagaagctcggctggcccgaagaaaccct

SEQ ID NO: 734360 - DNA, 120 bp, Artificial Sequence
  ENSG00000198853_24 (sequence is synthesized)
atctttgagttccctggctccctcagtgctgccagccatctgaactgccggctgaatggccaagcagtgaagccgttaccactgacctgccctgacttccaggaccccttttccttgacg

SEQ ID NO: 734361 - DNA, 120 bp, Artificial Sequence
  ENSG00000198853_25 (sequence is synthesized)
gagaagcctccagctgagttttgtctgtccccagatggcagctcagaggccatttccattgacctgcttcagaaaaaagggctggtaaaagctgttaacatcgctgtggacctcattgtg

SEQ ID NO: 734362 - DNA, 120 bp, Artificial Sequence
  ENSG00000198853_26 (sequence is synthesized)
gctcattttggcacaagccgggatcccggggtgaaggcaaagctgggaaacagttctgtgagccccaatgtgggccacctggttctgaagtacttgtgccctgccgtccgcgccgtgctg

SEQ ID NO: 734363 - DNA, 120 bp, Artificial Sequence
  ENSG00000198853_27 (sequence is synthesized)
gaggatgggctcaaggcctttgtactggacgtcatcatcgggcagcgtaagaacatgccatggagtgtggttgaggcttccacacagctaggcccatccaccaaggtcctgcatggcctc

SEQ ID NO: 734364 - DNA, 120 bp, Artificial Sequence
  ENSG00000198853_28 (sequence is synthesized)
tacaacaaagtcagccaattcccagagctcaccagtcataccatgcgcttcaacgccttcatcctcggcctgctcaacatccggtccctggagttctggtttaatcacctctataaccac

SEQ ID NO: 734365 - DNA, 120 bp, Artificial Sequence
  ENSG00000198853_29 (sequence is synthesized)
gaagacatcatccagacccactaccagccctggggcttcctgagtgcagctcataccgtgtgtcccggcctctttgaagagctgctgctgctgctacagcccctggccctgctgcccttc

SEQ ID NO: 734366 - DNA, 120 bp, Artificial Sequence
  ENSG00000198853_30 (sequence is synthesized)
agcctcgacttgctgttccagcaccggctgctgcaaagtgggcagcagcagcggcagcacaaggaactgctgcgggtgtcccaggacctgctgctgtctgcccactccacgctgcagctg

SEQ ID NO: 734367 - DNA, 120 bp, Artificial Sequence
  ENSG00000198853_31 (sequence is synthesized)
gcccgggcccggggccaggagggccctggagacgtggacagggcagcccaaggggagcgggtgaagggtgtgggtgcctcagaaggtggagaagaggaagaggaagaagaggagacagaa

SEQ ID NO: 734368 - DNA, 120 bp, Artificial Sequence
  ENSG00000198853_32 (sequence is synthesized)
gaggtggcagaggcagccgggggctcagggcgtgccaggtgggcccgaggtgggcaggccggctggtggtaccagctcatgcagagctcccaggtctacatcgatggctccattgagggt

SEQ ID NO: 734369 - DNA, 120 bp, Artificial Sequence
  ENSG00000198853_33 (sequence is synthesized)
tccaggttccctcgtggtagcagcaacagcagcagcgagaaaaagaaaggggcaggaggtgggggacctccccaggctccaccaccccgagagggagtagtggagggggctgaggcctgc

SEQ ID NO: 734370 - DNA, 120 bp, Artificial Sequence
  ENSG00000198853_34 (sequence is synthesized)
cctgcctctgaggaggccctgggccgggaaaggggctggcccttctggatggggagcccccctgactctgtgctggccgagctgaggcgcagtcgggagagggaagggcccgctgcctcg

SEQ ID NO: 734371 - DNA, 120 bp, Artificial Sequence
  ENSG00000198853_35 (sequence is synthesized)
ccagcagaaaatgaggaaggggcctcagagccttcacctggaggcatcaagtggggacacctctttggctcccgaaaagcccagcgggaggcccggcccacaaataggctcccctcggac

SEQ ID NO: 734372 - DNA, 120 bp, Artificial Sequence
  ENSG00000198853_36 (sequence is synthesized)
tggctgagcctggacaagtccatgttccaactagtggcgcagacagtgggttcccgccgggagccagagcccaaggagagcctgcaggagccacactccccagccctgccctccagtcct

SEQ ID NO: 734373 - DNA, 120 bp, Artificial Sequence
  ENSG00000198853_37 (sequence is synthesized)
ccgtgtgaggtgcaggcactgtgccaccacctggccaccggccctggacagctgagcttccacaaaggagacatcctacgagtgctggggcgagctggaggagactggctgcgctgcagc

SEQ ID NO: 734374 - DNA, 120 bp, Artificial Sequence
  ENSG00000198853_38 (sequence is synthesized)
cgtggccccgactctggcctggtgcccctggcctacgtgacattgaccccaactccaagtccaacccctggaagcagccaaaactgaggccctgtgcatgctggtggcctcagggaccct

SEQ ID NO: 734375 - DNA, 120 bp, Artificial Sequence
  ENSG00000198853_39 (sequence is synthesized)
cataacccccagactcagagcccgagagcccttcccaagccattggcttggctgcagagtagactgagagctggggccacgtatccctgtgctggcacctgctccctgtgctcagtatta

SEQ ID NO: 734376 - DNA, 120 bp, Artificial Sequence
  ENSG00000198853_40 (sequence is synthesized)
attacgcccccttaactgtcccagtgaccttgtccagacctccacccaggagagggatgggacacagcactgggctgccaggattcccctggcccgtctgggccaacccttccatgggtg

SEQ ID NO: 734377 - DNA, 120 bp, Artificial Sequence
  ENSG00000198853_41 (sequence is synthesized)
aagacaagcaagtccccctggaggcgggtggcccagaaagccatctacagggttccctaggccaggtggagatgaggatgggtaacagtattggggccagatccctaagccccccagctg

SEQ ID NO: 734378 - DNA, 120 bp, Artificial Sequence
  ENSG00000198853_42 (sequence is synthesized)
taaataggctgtggccagtgcctggtcatcagaagagggaggaggagcccaggcgtctgtttatgtatttatttatttatttattatacctattaataaaaaaggtgctcagcctccaaa

SEQ ID NO: 734379 - DNA, 120 bp, Artificial Sequence
  ENSG00000198853_43 (sequence is synthesized)
atcttccctgagatgcctaaggacaaaagaggagctagacacaactctccccatttttcctttgctgtcttaagagtgctccatcttccagcactgactgccctctgtggctggctcctt

SEQ ID NO: 734380 - DNA, 120 bp, Artificial Sequence
  ENSG00000198853_44 (sequence is synthesized)
tctctaccctcccccttccctaggctaaagggcccacaggggctggaagggagggaggctgagtggctgtgctgtgggcctgcctgctcctttcccttcccccttcccttagcagcaacg

SEQ ID NO: 734381 - DNA, 120 bp, Artificial Sequence
  ENSG00000198853_45 (sequence is synthesized)
tcaccgcagcaccagcagccgcggcagcagcacggagactggggctgggattgcgcagcctccctgcattagcaacgatgccattgtattagcagaaatcagatcttaggaaatcggccc

SEQ ID NO: 734382 - DNA, 120 bp, Artificial Sequence
  ENSG00000198853_46 (sequence is synthesized)
agttcccctgtgtgatcccgtggaacagtgtctcagctggaactgtcgcggtagagcttggtcggagtgcaaaagggacagacgcatcaggggtccagctcaaggctcctgacagaggtg

SEQ ID NO: 734383 - DNA, 120 bp, Artificial Sequence
  ENSG00000198854_0 (sequence is synthesized)
atgtgtgaccagcagaagcagccacagttccctccatcttgtgtgaaaggttcgggactaggggctgggcagggtagcaatggtgcctctgtgaaatgcccagttccatgccagacccaa

SEQ ID NO: 734384 - DNA, 120 bp, Artificial Sequence
  ENSG00000198854_1 (sequence is synthesized)
actgtctgtgtgacaggccctgctccatgccctactcaaacttatgtgaagtaccaagttccatgccagactcaaacctacgtgaagtgcccagctccctgccagaggacctatgtgaaa

SEQ ID NO: 734385 - DNA, 120 bp, Artificial Sequence
  ENSG00000198854_2 (sequence is synthesized)
tacccaacaccctgccaaacctatgtgaagtgcccagctccctgccagacaacctatgtaaaatgcccaactccctgccaaacctacgtgaagtgcccagctccctgccagatgacctac

SEQ ID NO: 734386 - DNA, 120 bp, Artificial Sequence
  ENSG00000198854_3 (sequence is synthesized)
gtgtcactgacccatgctctgctccctgttccaccagctactgctgtctggctccccggaccttcggggtgagtcccctgagacgctggattcagcggccccagaactgcaacacaggat

SEQ ID NO: 734387 - DNA, 120 bp, Artificial Sequence
  ENSG00000198854_4 (sequence is synthesized)
catctggctgctgtgagaattcgggaagctctggatgctgtggttctgggggctgtggctgcagctgtggatgtggcagctctgggtgctgctgtttgggaattatccccatgaggtccc

SEQ ID NO: 734388 - DNA, 120 bp, Artificial Sequence
  ENSG00000198854_5 (sequence is synthesized)
gaggtcctgcatgctgtgaccatgaggatgactgctgctgctaaacatacgacagctcaactccagaatgcactgccccgctaccccttctggaacatgcaccagcttctggccccctct

SEQ ID NO: 734389 - DNA, 120 bp, Artificial Sequence
  ENSG00000198854_6 (sequence is synthesized)
ctgttagtgccagtgatgtagaacctcatcactttgcctctgtgctttgcttctctaccaaggcagcctgccagagttagtacagtccccaaactttggcatgaataaagctctgaatgc

SEQ ID NO: 734390 - DNA, 120 bp, Artificial Sequence
  ENSG00000198855_0 (sequence is synthesized)
gccggcggagaaggaggacccgggagccggcggcccggagctgggagcgcggggaaggcggttggggttctgacagctgcgcgcgatcctgctctctctcagccgcctgtggacatgcgc

SEQ ID NO: 734391 - DNA, 120 bp, Artificial Sequence
  ENSG00000198855_1 (sequence is synthesized)
aaagggccctctcctgagtccagatgatgctcataccaatggcttcagtgatggcggtgactgaaccgaaatgggtctcggtctggagccgcttcctctgggtgacgctgctgagcatgg

SEQ ID NO: 734392 - DNA, 120 bp, Artificial Sequence
  ENSG00000198855_2 (sequence is synthesized)
tgctggggtccctgctggccctgctgctgccgctgggggctgtggaggagcagtgcttggctgtgctcaaaggcctctacctgctcaggagcaaaccggacagggcgcagcatgccgcca

SEQ ID NO: 734393 - DNA, 120 bp, Artificial Sequence
  ENSG00000198855_3 (sequence is synthesized)
ccaagtgcaccagcccgtccacggagctcagcatcacctccaggggcgcgacgctgctggtggccaagaccaaggcctctccagcgggtaagttggaagccagagctgccctgaaccagg

SEQ ID NO: 734394 - DNA, 120 bp, Artificial Sequence
  ENSG00000198855_4 (sequence is synthesized)
ccctggagatgaagcgccagggcaagcgggaaaaagcccaaaagctcttcatgcacgccctcaagatggacccggacttcgtggacgcgctcaccgagtttggcatcttctcggaagaag

SEQ ID NO: 734395 - DNA, 120 bp, Artificial Sequence
  ENSG00000198855_5 (sequence is synthesized)
acaaggacatcatccaggcggactacttgtacaccagagcattgaccatctcaccctaccatgagaaagcactggtcaaccgcgatcggacactgcctcttgtggaagagatcgaccaga

SEQ ID NO: 734396 - DNA, 120 bp, Artificial Sequence
  ENSG00000198855_6 (sequence is synthesized)
ggtatttcagcatcatcgacagcaaagtgaagaaggtcatgtccatccccaaggggaactcagctctgcgcagggtcatggaggagacctactaccatcacatctaccacacagtggcca

SEQ ID NO: 734397 - DNA, 120 bp, Artificial Sequence
  ENSG00000198855_7 (sequence is synthesized)
tcgagggcaacaccctcaccctctcggaaatcaggcacatcctggagacccgctacgccgtgcccgggaagagcctggaggagcagaacgaggtcataggcatgcatgcagccatgaagt

SEQ ID NO: 734398 - DNA, 120 bp, Artificial Sequence
  ENSG00000198855_8 (sequence is synthesized)
acatcaacacgactctggtttcgcgcatcggctccgtcaccatcagcgacgtgctggagatccacaggcgggtgctgggctacgtggaccccgtggaagccggcaggtttcggacaacac

SEQ ID NO: 734399 - DNA, 120 bp, Artificial Sequence
  ENSG00000198855_9 (sequence is synthesized)
aggtcctggtcggacaccacatccctccccatccgcaggatgtggaaaagcagatgcaggagtttgtacagtggctcaactccgaggaagccatgaacctgcacccagtggagtttgcag

SEQ ID NO: 734400 - DNA, 120 bp, Artificial Sequence
  ENSG00000198855_10 (sequence is synthesized)
ccttagcccattataaactcgtttacatccaccctttcattgatggcaacgggaggacctcccgtctgctcatgaacctcatcctcatgcaggcgggctacccgcccatcaccatccgca

SEQ ID NO: 734401 - DNA, 120 bp, Artificial Sequence
  ENSG00000198855_11 (sequence is synthesized)
aggagcagcggtccgactactaccacgtgttggaagctgccaacgagggcgacgtgaggcctttcattcgcttcatcgccaagtgtactgagaccaccctggacaccctgctttttgcca

SEQ ID NO: 734402 - DNA, 120 bp, Artificial Sequence
  ENSG00000198855_12 (sequence is synthesized)
caactgagtactcggtggcactgccagaagcccaacccaaccactctgggttcaaggagacgcttcctgtgaagccctaaccctagaaatcctcagtgacaaaggctgtcctgaggtagg

SEQ ID NO: 734403 - DNA, 120 bp, Artificial Sequence
  ENSG00000198855_13 (sequence is synthesized)
cagcatttctagaaacctagtcacttcctaaagcaaaaggagaaacattctttacctccaaatgttttagttttaaaaaaaaaaaaaaactaagttatgaagccttgtctctaaaataac

SEQ ID NO: 734404 - DNA, 120 bp, Artificial Sequence
  ENSG00000198855_14 (sequence is synthesized)
ttataattcaaccaagctatttattttcttctttggagcaagctagtcagtattgtatggtgtctgctgtgtcttgctggtggccgtgctttaggggcaacagtgccaccatgtgaccag

SEQ ID NO: 734405 - DNA, 120 bp, Artificial Sequence
  ENSG00000198855_15 (sequence is synthesized)
aacaaaggttctggagcagaatttgcactaaggtggaggagcggccaagaggtgtgggacggggcccagagccactgacataactcctccaagtgcttctctgaaacaggctgagaggtt

SEQ ID NO: 734406 - DNA, 120 bp, Artificial Sequence
  ENSG00000198855_16 (sequence is synthesized)
ctgtgactgcaactgggaagtcagacccaagtcgcagctgagagaaatggttgaaagctcactttctcaaggtttagattagtggtgactaacttccaagcaaacttcatagaagagaaa

SEQ ID NO: 734407 - DNA, 120 bp, Artificial Sequence
  ENSG00000198855_17 (sequence is synthesized)
atgaatgccgacattccttacttacctgcaggaagactttttgagccatagtttgcaaactttagtgccagcagctgtttttttttttttttttttcatattgagactatttttctaatt

SEQ ID NO: 734408 - DNA, 120 bp, Artificial Sequence
  ENSG00000198855_18 (sequence is synthesized)
aagaatagggggtagccataaagagctgtatgttggagggggaaacatggtgggcgggcagtttggttttctttgtgtatccgcgtttctctcacacttcatttgtagcaactcaggcca

SEQ ID NO: 734409 - DNA, 120 bp, Artificial Sequence
  ENSG00000198855_19 (sequence is synthesized)
gatgttttcgtctgaaattctctgggcttgtcattccacctgtatcgtgctgcaaaccaggtgttatgctagtaggcatctgccctcacccctctgcctgagttttctgtaggcagatgt

SEQ ID NO: 734410 - DNA, 120 bp, Artificial Sequence
  ENSG00000198855_20 (sequence is synthesized)
taacctgagaaaacaagtgccatgtggacaccaagtaagcatttttgataatgaattagagcaccagtttctactgaatggagcaaaaaccttcagccatggccaggctgcatccctttg

SEQ ID NO: 734411 - DNA, 120 bp, Artificial Sequence
  ENSG00000198855_21 (sequence is synthesized)
gtcctggagtttcatctacttactgccatcttccacggtctttgcactgtcccgtgtcccatccccctgggaggcagaagagattgcctcggagtggccttatttttctcgcaacttgtg

SEQ ID NO: 734412 - DNA, 120 bp, Artificial Sequence
  ENSG00000198855_22 (sequence is synthesized)
aaatgatgtagtgctctatgtaatatggccgggtttccaagctgtcatccaatggaagtagaatcttctctttgaatcatatggtacaggtgccaatatgactgctgctatttagagtca

SEQ ID NO: 734413 - DNA, 120 bp, Artificial Sequence
  ENSG00000198855_23 (sequence is synthesized)
gagaggtggaagtcactgggtccctttcccagtgacagagcccatgatgtctaacactactgcactttgtcagtgtgtgagtgatggcgaatacgcagtgttgtctctttgatttggtaa

SEQ ID NO: 734414 - DNA, 120 bp, Artificial Sequence
  ENSG00000198855_24 (sequence is synthesized)
ttccgttcctgacagtaatgaggccactgctctaaagtagtttatacagttcttcagttgtataaatagcacagagtagtttttgaaaggttaagaaaaataagtgaaaagacatacacg

SEQ ID NO: 734415 - DNA, 120 bp, Artificial Sequence
  ENSG00000198855_25 (sequence is synthesized)
atatatgaaatggctccaaatgataattgttcaaacctttataaaatgtgttttcgtactcttatgctgccagaggtacttcttaaaactcttctcgtcttggttttataagcacaccac

SEQ ID NO: 734416 - DNA, 120 bp, Artificial Sequence
  ENSG00000198855_26 (sequence is synthesized)
ggaggtctgacagatgtgcttgcttctactacagagcaagagaatttgcactttagctatatgtgaaggatattattttaacaaattcctgattctaataaagttattttattacatgaa

SEQ ID NO: 734417 - DNA, 120 bp, Artificial Sequence
  ENSG00000198855_27 (sequence is synthesized)
gtgctgtacctgaacacctataggaagaaggaagacagagaaaaaccatgattcgaggcatgacccagctcacctgactcctctgacaccagccttgtccccatgagcagcccagccagg

SEQ ID NO: 734418 - DNA, 120 bp, Artificial Sequence
  ENSG00000198855_28 (sequence is synthesized)
cagactagagccaagccatgctctgaaacttgttaatggggccaccggagcgagtcacttaacctctccaggcctccatgtcttcctctgtaaaacggcaagaataaaagtaaccattca

SEQ ID NO: 734419 - DNA, 120 bp, Artificial Sequence
  ENSG00000198855_29 (sequence is synthesized)
catgtcctgtatgtggggcatcggggtattgtgaacaagtcagccctgagctcctagtatagacaaggtgatgtgactgagacagtgtcacaagtgtggtgatggggaagcataaagggc

SEQ ID NO: 734420 - DNA, 120 bp, Artificial Sequence
  ENSG00000198855_30 (sequence is synthesized)
cctctgtctacaggcttatttccccaccctactctccttcccgagtgctgctatgcactgtaacttcagataacccttccaagttcagcacaccttgtacgtgctgcagaagtagaaaga

SEQ ID NO: 734421 - DNA, 120 bp, Artificial Sequence
  ENSG00000198855_31 (sequence is synthesized)
actgcataccaccacacggctggggcaacagagtggtaccgggcatgttgagtacacacgatgcggctgcaacaagctcctcaaggccagggacacaggctggtcatcatggtttcctgc

SEQ ID NO: 734422 - DNA, 120 bp, Artificial Sequence
  ENSG00000198855_32 (sequence is synthesized)
ggagaccagcacaggggacagccccccgaatgtcctctgccccctagcctccctccctcacagcgcttctttggctctcttccagcgggtaagttggaagccagagctgccctgaaccag

SEQ ID NO: 734423 - DNA, 120 bp, Artificial Sequence
  ENSG00000198856_0 (sequence is synthesized)
ctgtttccgggaggcgcgtggggcttgaggccgagaacggcccttgctgccaccaacatggagactttgtaccgtgtcccgttcttagtgctcgaatgtcccaacctgaagctgaagaag

SEQ ID NO: 734424 - DNA, 120 bp, Artificial Sequence
  ENSG00000198856_1 (sequence is synthesized)
ccgccctggttgcacatgccgtcggccatgactgtgtatgctctggtggtggtgtcttacttcctcatcaccggaggaataatttatgatgttattgttgaacctccaagtgtcggttct

SEQ ID NO: 734425 - DNA, 120 bp, Artificial Sequence
  ENSG00000198856_2 (sequence is synthesized)
atgactgatgaacatgggcatcagaggccagtagctttcttggcctacagagtaaatggacaatatattatggaaggacttgcatccagcttcctatttacaatgggaggtttaggtttc

SEQ ID NO: 734426 - DNA, 120 bp, Artificial Sequence
  ENSG00000198856_3 (sequence is synthesized)
ataatcctggaccgatcgaatgcaccaaatatcccaaaactcaatagattccttcttctgttcattggattcgtctgtgtcctattgagttttttcatggctagagtattcatgagaatg

SEQ ID NO: 734427 - DNA, 120 bp, Artificial Sequence
  ENSG00000198856_4 (sequence is synthesized)
taatatgaaatgtggaaaagaatgaagagcagcagtaaaagaaatatctagtgaaaaaacaggaagcgtattgaagcttggactagaatttcttcttggtattaaagagacaagtttatc

SEQ ID NO: 734428 - DNA, 120 bp, Artificial Sequence
  ENSG00000198856_5 (sequence is synthesized)
acagaattttttttcctgctggcctattgctataccaatgatgttgagtggcattttctttttagtttttcattaaaatatattccatatctacaactataatatcaaataaagtgatta

SEQ ID NO: 734429 - DNA, 120 bp, Artificial Sequence
  ENSG00000198856_6 (sequence is synthesized)
ttttttacaaccctcttaacattttttggagatgacatttctgattttcagaaattaacataaaatccagaagcaagattccgtaagctgagaactctggacagttgatcagctttacct

SEQ ID NO: 734430 - DNA, 120 bp, Artificial Sequence
  ENSG00000198856_7 (sequence is synthesized)
atggtgctttgcctttaactagagtgtgtgatggtagattatttcagatatgtatgtaaaactgtttcctgaacaataagatgtatgaacggagcagaaataaatactttttctaattaa

SEQ ID NO: 734431 - DNA, 120 bp, Artificial Sequence
  ENSG00000198856_8 (sequence is synthesized)
tgtatgctctggtggtggtgtcttacttcctcatcaccggagccctcccatcccagggatccgagtcaaatatatttttcaaggccaaattgttgctctttttgttgcttgccatacgtt

SEQ ID NO: 734432 - DNA, 120 bp, Artificial Sequence
  ENSG00000198856_9 (sequence is synthesized)
tttggcaaactccgtttccatggttggttgtttgataaaggtcctgggaaggtctaatttggccaactccgcttccatggttggtcaagagcttgtgggacttttaaacttatctttgtc

SEQ ID NO: 734433 - DNA, 120 bp, Artificial Sequence
  ENSG00000198856_10 (sequence is synthesized)
ctggaatcttggaagagacttgacaatctttagttttgttggctcaaacctagggttctgtgttgccttttgcatgacctacaataaatatcaatggaattttctgaaatcacaggtttg

SEQ ID NO: 734434 - DNA, 120 bp, Artificial Sequence
  ENSG00000198856_11 (sequence is synthesized)
ataaatatttgagattggagatgagatttgcagacgatactgtatttcagtgggcagaagttgagaattaaaaaaataagataaatagcattactattaaacgcttctgaattgtctatc

SEQ ID NO: 734435 - DNA, 80 bp, Artificial Sequence
  ENSG00000198858_0 (sequence is synthesized)
acttcctgcccggcccggtgaaggccctgccgggcggcggcggcggcgacagcgtgcgagccatggtcgcgctggagaac

SEQ ID NO: 734436 - DNA, 120 bp, Artificial Sequence
  ENSG00000198858_1 (sequence is synthesized)
ggcggcggctgctgccccttcccagctgcctgcctgccctagccagctcccaggtgaagagactctcggcttccaggcggaaacagcacttcatcaaccaggcagtgcggaactcagacc

SEQ ID NO: 734437 - DNA, 120 bp, Artificial Sequence
  ENSG00000198858_2 (sequence is synthesized)
tcgtgcccaaggccaaggggcggaagagcctccagcgcctggagaacacccagtacctcctgaccctgctggagacagacgggggcctgcctggcctggaggatggggacttggcacccc

SEQ ID NO: 734438 - DNA, 120 bp, Artificial Sequence
  ENSG00000198858_3 (sequence is synthesized)
ctgcatcaccaggcatctttgccgaggcctgcaacaacgccacctatgtggaggtctggaacgatttcatgaaccgctccggggaggagcaggagcgggttcttcgctacctggaggatg

SEQ ID NO: 734439 - DNA, 120 bp, Artificial Sequence
  ENSG00000198858_4 (sequence is synthesized)
agggcaggagcaaggcgcggaggaggggccctggccgtggggaggaccggaggagagaggaccccgcctatacaccccgcgagtgcttccagcgcatcagccggcgtctgcgagccgtcc

SEQ ID NO: 734440 - DNA, 120 bp, Artificial Sequence
  ENSG00000198858_5 (sequence is synthesized)
tcaagcgcagccgcatccccatggaaacgctggagacctgggaggagcggctgcttcggttcttctccgtgtccccccaggccgtgtacacagcaatgctagacaacagcttcgagaggc

SEQ ID NO: 734441 - DNA, 120 bp, Artificial Sequence
  ENSG00000198858_6 (sequence is synthesized)
ttctgctgcacgctgtctgccagtacatggacctcatctcggccagtgctgacctggaggggaagcggcagatgaaggtcagtaatcggcacctggatttcctgccgccggggctgctcc

SEQ ID NO: 734442 - DNA, 120 bp, Artificial Sequence
  ENSG00000198858_7 (sequence is synthesized)
ccgcctacctggagcagcacagctgatggcggccccgcggagaccccgctgccacctcgcccagccatcaagccctccgataccttcggctaaaatatctttcatatttttagaatttgt

SEQ ID NO: 734443 - DNA, 120 bp, Artificial Sequence
  ENSG00000198858_8 (sequence is synthesized)
cctcggaaacctttttcgcttggggtggtctctctcactctgccccctcctcacgcagctcttggcagtcaacagacgctggcggctggggctgcccatgccatcccagctccaagcttc

SEQ ID NO: 734444 - DNA, 120 bp, Artificial Sequence
  ENSG00000198858_9 (sequence is synthesized)
ccactccgggacttgtgtttgggtggggagacctgacctgggcatgttcctgtttcttcatcgttgagcttttctggcccggtctgaagctcaagtgaggagggggaggctgggttttta

SEQ ID NO: 734445 - DNA, 120 bp, Artificial Sequence
  ENSG00000198858_10 (sequence is synthesized)
tcacttttaatgaatttggtgtgatttgttgtagatttttaaatttcccttttggagagaaaaaccaaaaaaactcgccccactggtaaaacatgggtcttggtcccagcccctgctcag

SEQ ID NO: 734446 - DNA, 120 bp, Artificial Sequence
  ENSG00000198858_11 (sequence is synthesized)
cccctcccagtttttagcttgaatgagggtggggtctctgggaccctgcccctcatgccagaagcatcttgtgttgtatatgtgtgcgcgcgtgtgccctgagacccaggacagaagcca

SEQ ID NO: 734447 - DNA, 120 bp, Artificial Sequence
  ENSG00000198858_12 (sequence is synthesized)
cggtcctaagagccggttttatcctcgtcattctgcgtgtcctcccccacgccacctgtgtcggggctcagggtctcctgctttatatgagcccccttcctttcctcccctcctttatgc

SEQ ID NO: 734448 - DNA, 120 bp, Artificial Sequence
  ENSG00000198858_13 (sequence is synthesized)
tgggggtccaggacttccagccagaagcctctgcccttgcactaccttgtctgtcaccccatcccgtgtcccctcgtcccccagcctgactcctgcctgatagctcctgtgtccccatgc

SEQ ID NO: 734449 - DNA, 120 bp, Artificial Sequence
  ENSG00000198858_14 (sequence is synthesized)
tggtcctcctggcccaggctgcaggagccaggctggggggcctccgcacccccttgctgcgtgtgggtaattgtgttttgggggaaagtggggaatttaataaatttctggtgctctggc

SEQ ID NO: 734450 - DNA, 120 bp, Artificial Sequence
  ENSG00000198858_15 (sequence is synthesized)
cttgaacccctgagctcaagtgatccaccggcctcagcctcccacaatgctgggatcaccggcatgagccaccacacccagcccgtcttcacaattgtatctgcttcctgtgatgtgagg

SEQ ID NO: 734451 - DNA, 120 bp, Artificial Sequence
  ENSG00000198858_16 (sequence is synthesized)
ggcggcggcggcgacagcgtgcgagccatggtcgcgctggagaaccccgagtgcggcccggaggcggcggagggcaccccgggcgggcggcggctgcttcttgctctgttgcccaggctg

SEQ ID NO: 734452 - DNA, 120 bp, Artificial Sequence
  ENSG00000198858_17 (sequence is synthesized)
ccaggctggagtgcagtggtgccatcatgccaacctcgacctcctggacttaagtgatcctcctgcctcaggcccctgagtagctgggactacagtcttgctatgttgctcaggctggtc

SEQ ID NO: 734453 - DNA, 120 bp, Artificial Sequence
  ENSG00000198858_18 (sequence is synthesized)
tcagctgtaggccgggggaccatataaatagagccagacacaggcgccccctggactcttggatcagggctgggtgggagggcgccccgggcattggagctggggctttaaaggatatat

SEQ ID NO: 734454 - DNA, 120 bp, Artificial Sequence
  ENSG00000198858_19 (sequence is synthesized)
aggagttcgacaatccagaacctggggtctaggtggtctctgtaccttctggggaagacagttggagcatggaggtgcggaggttgagatgataaaaaaggaggaaggctagttcttggg

SEQ ID NO: 734455 - DNA, 120 bp, Artificial Sequence
  ENSG00000198858_20 (sequence is synthesized)
tccccatggtgcctgggggtccccaaatgccaccccggcccagagagcatctgtttccacctagcccagtacctcctgaccctgctggagacagacgggggcctgcctggcctggaggat

SEQ ID NO: 734456 - DNA, 120 bp, Artificial Sequence
  ENSG00000198858_21 (sequence is synthesized)
ttcgagctcctggattcacctgcccaacacgtttgggaaccctccaacgattgcaggagtgtttcacctcaatcccccccaccccgagacagctgggcccaccccggttccccgcttccc

SEQ ID NO: 734457 - DNA, 120 bp, Artificial Sequence
  ENSG00000198858_22 (sequence is synthesized)
tgcgctcagctcagggcccgacacaagcagcggcccctcagtggacagaggtgaccgcaggagcgcgtccacgtgcttggcggccttaccgtgcccatttgcccggggatgtcagcgcag

SEQ ID NO: 734458 - DNA, 120 bp, Artificial Sequence
  ENSG00000198860_0 (sequence is synthesized)
cagctgcgagcctcggggaagcggaacccacaggcgcgcgcgccgctgcttctggccgggcgcgggtcgtggtgcaccacgggagcgccgcaccggccggcatggaggagcgcggcgatt

SEQ ID NO: 734459 - DNA, 120 bp, Artificial Sequence
  ENSG00000198860_1 (sequence is synthesized)
gattccgagccgacccccggctgcagcggcctgggtccgggcggtgttcgcggctttggcgacggcggtggagctccttcgtgggcccctgaggacgcctggatgggcactcaccctaag

SEQ ID NO: 734460 - DNA, 120 bp, Artificial Sequence
  ENSG00000198860_2 (sequence is synthesized)
tatctagaaatgatggaattagatataggagatgccacccaagtttatgtagcgttcttggtttacctggacctcatggaaagcaaaagctggcatgaagtaaactgtgtaggattacca

SEQ ID NO: 734461 - DNA, 120 bp, Artificial Sequence
  ENSG00000198860_3 (sequence is synthesized)
gaactccagctcatctgccttgttggtactgagatagaaggggaggggttacagactgtggtgcctacccccatcactgcttccctcagccataacaggataagggagatcttgaaggca

SEQ ID NO: 734462 - DNA, 120 bp, Artificial Sequence
  ENSG00000198860_4 (sequence is synthesized)
tctcgaaagttgcaaggtgatccagatttgccgatgtcttttactttggccatagtggagtctgattctacaatagtctattataaacttactgatggatttatgctgccagaccctcag

SEQ ID NO: 734463 - DNA, 120 bp, Artificial Sequence
  ENSG00000198860_5 (sequence is synthesized)
aatatttctcttagaagatgacatccatgtttcctgatgcttgttttattcatacaagattggatttgagacccatcagactgcttcatcttttatctcagaaatagggttgacgtacat

SEQ ID NO: 734464 - DNA, 120 bp, Artificial Sequence
  ENSG00000198860_6 (sequence is synthesized)
agtgagggttgacttccccattccataaggttttcattctgaagagtaaaacttccccaggtagaagactttctccttcttaaaaaatatagggtgatttctttaaaactttgttatcta

SEQ ID NO: 734465 - DNA, 120 bp, Artificial Sequence
  ENSG00000198860_7 (sequence is synthesized)
gagacagtttaattacagttatatacaggtttatgcctaggatgtattcagatgggtgggacctgtgtgctgcttttgtcatcccacactcaaagttgtctctttgtttcttgctgccac

SEQ ID NO: 734466 - DNA, 120 bp, Artificial Sequence
  ENSG00000198860_8 (sequence is synthesized)
ctgcagctaccgtagaatggcattttatatgtaccttgtcacccacttctgtttactttttcctctccagtaaaaagtaaaagatttctttcaattggtcttcccattgcagttactgtt

SEQ ID NO: 734467 - DNA, 120 bp, Artificial Sequence
  ENSG00000198860_9 (sequence is synthesized)
atttctcttttttggttaactttaaatcaaaactcaaaatatgttcatccagagtgtgtcttaagtaacttacgtgtcttaagtaacagggaccagagacatgttacctacaagagttct

SEQ ID NO: 734468 - DNA, 120 bp, Artificial Sequence
  ENSG00000198860_10 (sequence is synthesized)
gggctatccttttcattcttatcacatatcatagcttgaatattacaacagtgtgggagagaatcaaccgtaaaaatgtcttcattaattagacccagttattccacttttgttaatgtc

SEQ ID NO: 734469 - DNA, 120 bp, Artificial Sequence
  ENSG00000198860_11 (sequence is synthesized)
tctcaaattgtacaaagtataaaaaattatatgcacaaagatgttccaagtgacattacttttagtagcccaaattataaaccactttaaagtttggggtaaagattggcaaactttttc

SEQ ID NO: 734470 - DNA, 120 bp, Artificial Sequence
  ENSG00000198860_12 (sequence is synthesized)
tataaagggccagaaagtaactattttaggtttttaaacctactgtctctgtcataacttgtcaacactgctgtatgaagcacaaaagcagccatagacaatacataaacaatacgggcg

SEQ ID NO: 734471 - DNA, 120 bp, Artificial Sequence
  ENSG00000198860_13 (sequence is synthesized)
tggctttgttccagtaaaactttgtttacaaatgtggtgccatagtttgtcatccctgggtctaggaaatagtcaataaacagatatatacaaatgatacataatgtacttattaaaaat

SEQ ID NO: 734472 - DNA, 120 bp, Artificial Sequence
  ENSG00000198860_14 (sequence is synthesized)
tagtaatgaatattattaaaaacatgaaaatattaccttaagtaaaaattgcaagacggaaaagtgtataagtgggtgtaatcatggctgaaataacagaccaagcatatgataaaaaga

SEQ ID NO: 734473 - DNA, 120 bp, Artificial Sequence
  ENSG00000198860_15 (sequence is synthesized)
taacaaagtaaatcaaattactaactggttatagtgggataggaggcagaaaatggatgactttgtcttttctcaatgtttttatttgtattttataataaaaatgttttaaaattaaaa

SEQ ID NO: 734474 - DNA, 120 bp, Artificial Sequence
  ENSG00000198860_16 (sequence is synthesized)
cctcctgacctccaactccactccctactggaagaatttatttgaatctctcttttccttggctaagaagaatgaagaggcaggagacttgggggaccccttaactggggataattactg

SEQ ID NO: 734475 - DNA, 120 bp, Artificial Sequence
  ENSG00000198860_17 (sequence is synthesized)
ggacaaatcagccagcacaaagaggagacaagtgcagctacgactgctgctgggaccgcgatactgtgatgagactttgcatatttaaaaggatgtcgagagaggaggaggaatgataaa

SEQ ID NO: 734476 - DNA, 120 bp, Artificial Sequence
  ENSG00000198860_18 (sequence is synthesized)
tgaactcaggaagatgtgatgtcttctgtgatgacactaatagatggaatgcagaattcagctccaatacttagggttggaaaccaaacataaacaagcaagcaaggaaaatgaaaagga

SEQ ID NO: 734477 - DNA, 120 bp, Artificial Sequence
  ENSG00000198860_19 (sequence is synthesized)
aagtgtgactcaagtcagtcacagaactgccacttcctttgccatagggaaaattcaagaaaaaaagtcttgattttcagacgtcagaaaattggttatattttgttcaaagtagcatgt

SEQ ID NO: 734478 - DNA, 120 bp, Artificial Sequence
  ENSG00000198860_20 (sequence is synthesized)
tcctagttatttttgcaaaaaaaaaattgatttccttactctttggagaatttcatggttttccaaagtattttatgaagtcatcatgcatttaattatttagtgagtagctgaggtgga

SEQ ID NO: 734479 - DNA, 120 bp, Artificial Sequence
  ENSG00000198860_21 (sequence is synthesized)
atgtaaaggctaataatagttgtaagtaaaaaaacgcttatttaagaaatgttaaattggttgacattttgacaggaacattttaataagataaatgtgctatatgtgatttctttacat

SEQ ID NO: 734480 - DNA, 120 bp, Artificial Sequence
  ENSG00000198860_22 (sequence is synthesized)
ctgcttccctcagccataacagatcaggacctggaagggaagacctccttcactgttgctgagactgcgagctcttggaagacgttgtacacagaagaaagcccatatgaggacacagca

SEQ ID NO: 734481 - DNA, 120 bp, Artificial Sequence
  ENSG00000198860_23 (sequence is synthesized)
gaggacacagcaagaaggtggctgtcttcaagccaagaagagaggcctcatcagagatggaatgttcctgcacttcggtctggatttctagtgtccagaactgtgagaaaataaatttct

SEQ ID NO: 734482 - DNA, 120 bp, Artificial Sequence
  ENSG00000198860_24 (sequence is synthesized)
ggatgagagtgaccataataaaaaccaaaaagttaacatgtattgagtatttactatgaactgggcactcttcaaagtgctgtacagaaattaactaattatcatgccatcccatgagct

SEQ ID NO: 734483 - DNA, 120 bp, Artificial Sequence
  ENSG00000198860_25 (sequence is synthesized)
aaccactaatatttcctccattttacaaatagaagacactcgtgtcctggtttcctggtaaaatgtgaaagtttgaatgtgtcagaagaattttgtaaggaagggatagattgctcaaat

SEQ ID NO: 734484 - DNA, 120 bp, Artificial Sequence
  ENSG00000198860_26 (sequence is synthesized)
tccacctagaggaacagcatatactgccatcactctagtgttttaatatagcctgattctaatatgaaaaattcacagcagcctggtagcttagggtagggatggagcttaggagaaatt

SEQ ID NO: 734485 - DNA, 120 bp, Artificial Sequence
  ENSG00000198860_27 (sequence is synthesized)
gcccactgtagcatctatctcacagggtaccaacattgagactggaagacattaactccaattattccttgccctctgaatgctgaaattgcccttacctcaaccttgtttttggctggg

SEQ ID NO: 734486 - DNA, 120 bp, Artificial Sequence
  ENSG00000198860_28 (sequence is synthesized)
acctgttgaaatgctgcaagcctccagcttgctaatcaggtttacagaaaaaaagagattttaagcctctactaattaaagatataatgctaaccatctatgaccagttaaccatctatg

SEQ ID NO: 734487 - DNA, 120 bp, Artificial Sequence
  ENSG00000198860_29 (sequence is synthesized)
accagttagctcatttaattagagcccattgagaataagagtgaactaatcgaacctaacatttactttctattacagaagaatttatttgaatctctcttttccttggctaagaagaat

SEQ ID NO: 734488 - DNA, 120 bp, Artificial Sequence
  ENSG00000198860_30 (sequence is synthesized)
gaagaggcaggagacttgggggaccccttaactggggataattactgggacaaatcagccagcacaaagaggaggcactaaacaatcagtcctggtctctgttatcagagacttttgatg

SEQ ID NO: 734489 - DNA, 120 bp, Artificial Sequence
  ENSG00000198860_31 (sequence is synthesized)
ctaccattggagtcagacaagcagacaaacatcaacaaaatgattataaactatgacacactatgatgggaaagaaggaggctgacagagaggacattggcaggaaggagccctactgta

SEQ ID NO: 734490 - DNA, 120 bp, Artificial Sequence
  ENSG00000198860_32 (sequence is synthesized)
gatgtggtggtcagagaagggcctttgtgagaagctgacacataatctcacagttgaagttgtgagaaggagctggtcctccagagagaagtaggaagagcgctccagcagaatctctgg

SEQ ID NO: 734491 - DNA, 120 bp, Artificial Sequence
  ENSG00000198860_33 (sequence is synthesized)
aaagttagatgctgctaaagggacagacatgtaggaattttacattagggttgttctgattttcattttcttgccttttaaaatttaatgataaacaagtctccagagatttttacagcc

SEQ ID NO: 734492 - DNA, 120 bp, Artificial Sequence
  ENSG00000198860_34 (sequence is synthesized)
tgggagaccactggtaagacaacaatataggtggtcctccagcaggatctaaatcagagccttcatagtggactgtcgggccaggtgcagctgtagacaatgcatcttcaggagtggggt

SEQ ID NO: 734493 - DNA, 120 bp, Artificial Sequence
  ENSG00000198860_35 (sequence is synthesized)
gaagaaatttaatggactagtaatgcaacaggaggtagaagaaaagtgttctctcactaaagcatggtgggtgttttcaaaatgtttaaaaaacatttttaggcgtgagccaccgcgcct

SEQ ID NO: 734494 - DNA, 120 bp, Artificial Sequence
  ENSG00000198860_36 (sequence is synthesized)
ggccagacctcaattctttaaaaaccaattgtgttatgcttttggttgctgggttcttagaaggaggttctcaaggtggcaagtcagagacattctgttctgtctgtcagaaatgcaaaa

SEQ ID NO: 734495 - DNA, 120 bp, Artificial Sequence
  ENSG00000198860_37 (sequence is synthesized)
taatggagcaaaattccaaagataaagtgaaaaatatggcaatcaggatagcaagagctgagtgaatggtgtgagtttgaggaggtgttttcgattaacttgttttaacattgagctgta

SEQ ID NO: 734496 - DNA, 120 bp, Artificial Sequence
  ENSG00000198860_38 (sequence is synthesized)
aaaagaagttaagatagggaaggatggggtgaaatattgcctggtctccaactgaaacacatgggcctgagatatggtgaagttttactaatgggatgaaaaagtggagtaggcctggtg

SEQ ID NO: 734497 - DNA, 120 bp, Artificial Sequence
  ENSG00000198860_39 (sequence is synthesized)
tggaggagcacagcatcctgagcctcggaagtgattcaggttaaagggcctctaaggctacactctcagagccttggaagagctacctggcttgagctctactcatagctacttttctat

SEQ ID NO: 734498 - DNA, 120 bp, Artificial Sequence
  ENSG00000198860_40 (sequence is synthesized)
cccctggttgtcagctcttcagccctttattcattcaaaaaatatttattgatggcctactaaatgacaggccctgggtgaacagctgtgaaaaaaaaatgggcaaatgtctctgccctc

SEQ ID NO: 734499 - DNA, 120 bp, Artificial Sequence
  ENSG00000198860_41 (sequence is synthesized)
ctgggattcatatactaaagggtcaagaatataagaatttattaaaagaacagtccatggaggaaaaaatgaagcacaagtataatggatctattgacctgtgtaatgaccccagatcaa

SEQ ID NO: 734500 - DNA, 120 bp, Artificial Sequence
  ENSG00000198860_42 (sequence is synthesized)
gaccctgatcaccccatttatttggtgcctgttattgtaatgtcttccgccatctgttattactacttaccacctctcctctgagacgtatggtccaagccacataccctcaaaaaaaaa

SEQ ID NO: 734501 - DNA, 120 bp, Artificial Sequence
  ENSG00000198860_43 (sequence is synthesized)
tctgtattgaagtataatttatgtaccataaggttcacctattttgagtgtataattcaatgatttttaataaatgtatagagttgtatggtcttatcattacaatccagacttagaaca

SEQ ID NO: 734502 - DNA, 120 bp, Artificial Sequence
  ENSG00000198860_44 (sequence is synthesized)
agtgatgtaatacttttaatgaaatttgggatacagggttcatagctttactcttggctatttgaggaataagttaaatatgagtgttgtattcggccattcttgcattgctataaagaa

SEQ ID NO: 734503 - DNA, 120 bp, Artificial Sequence
  ENSG00000198860_45 (sequence is synthesized)
ccacttttgaagaaggaaaatacttagctacattaaaagatttgcattgaagaagcaattgtgatatgctgccttttatcacagtgtgacttcccatcagtgctgagataagggagatct

SEQ ID NO: 734504 - DNA, 120 bp, Artificial Sequence
  ENSG00000198860_46 (sequence is synthesized)
atatttattaaagatattaacaaaaagcagctctcaccttcttgtgaatcagatccaaatcccttaacgtcttcattgattcagttgtacacagaagaaagcccatatgaggacacagca

SEQ ID NO: 734505 - DNA, 84 bp, Artificial Sequence
  ENSG00000198860_47 (sequence is synthesized)
cattttagcttggggtggctgaggacccaaaaggaggatcccttgatgccaggagttgtagaccagcctggtctaacatagcaa

SEQ ID NO: 734506 - DNA, 120 bp, Artificial Sequence
  ENSG00000198860_48 (sequence is synthesized)
tatgacaggcctagcaaactaacgtaaaatgctttggtacagcagcaggcacaaggtagagattcattaattgtaataataccatataaataattattgataatggcactatcaataatt

SEQ ID NO: 734507 - DNA, 120 bp, Artificial Sequence
  ENSG00000198860_49 (sequence is synthesized)
gccattgttattgcttctaataaaacacccacccttctgggggagagaggaagaattttggaaactccagtaacaaacagtctgcaaatccactttgagcttctgatgagaaattgaggg

SEQ ID NO: 734508 - DNA, 120 bp, Artificial Sequence
  ENSG00000198860_50 (sequence is synthesized)
cactcgaaagaaataaatcacattcactgaaattttctgatcctatttctgtacatatgtcatgataatttgtgtcaagtaatatgacagcatctttcctctgagggacttaatgtgctt

SEQ ID NO: 734509 - DNA, 120 bp, Artificial Sequence
  ENSG00000198860_51 (sequence is synthesized)
atgccaactacttatccatcaggcaaatgtttacattctgaggatgaactaagggaatgtcttagatagctgggagcctgaggctaggactgtgcactgaggggcactaataaaatcaga

SEQ ID NO: 734510 - DNA, 120 bp, Artificial Sequence
  ENSG00000198860_52 (sequence is synthesized)
gtggttggttttaggaatcacagggttgagcttacagtacaagacagattttacttcaagtctaagttagccttgactaatgattgttccatcacttttagatgtccagctaactcactt

SEQ ID NO: 734511 - DNA, 120 bp, Artificial Sequence
  ENSG00000198860_53 (sequence is synthesized)
tttagatgtccagctaactcacttacaggcacatcaggaagagggacctctcaagactgttttctcaccaaaactctgaggttctggtttcataactgtattagtccattttcacgctgc

SEQ ID NO: 734512 - DNA, 84 bp, Artificial Sequence
  ENSG00000198860_54 (sequence is synthesized)
tggcagcaggcaaaaagtgagagagtctctcgtgagactatcatgataacagcacgagaaagacctgcccccatgattcagtta

SEQ ID NO: 734513 - DNA, 120 bp, Artificial Sequence
  ENSG00000198860_55 (sequence is synthesized)
tggggacacagccaaaccatattaataacattcacattctttctggacacccaatcaagccctccacatggacctgtgggctgcagactcttgcagacagatcagggaggagggcagaaa

SEQ ID NO: 734514 - DNA, 120 bp, Artificial Sequence
  ENSG00000198860_56 (sequence is synthesized)
ctgcagactcttgcagacagatcagggaggagggcagaaaaggcctctcagcaactgcagttctttgtgcctgcatttccaattcagatgaatgcattagaaatggtcctaaaatgtatt

SEQ ID NO: 734515 - DNA, 120 bp, Artificial Sequence
  ENSG00000198860_57 (sequence is synthesized)
tgaaaaaaacagaaccatctaagatcattggtcagagctccaaatggtttataaagagggggaacaatatgctgacttctgaaaaatgggaagggggttacattggcttgattgaaacca

SEQ ID NO: 734516 - DNA, 120 bp, Artificial Sequence
  ENSG00000198860_58 (sequence is synthesized)
gttgaaggaggttttttgtgtttttcccccaagtttttcttgactaatgattgttcaggtctttaaatcagtgttgtccaactgtccccaaagactacataaggcacagttgaaatctgt

SEQ ID NO: 734517 - DNA, 120 bp, Artificial Sequence
  ENSG00000198860_59 (sequence is synthesized)
attgtcccttgctgttactgcctctccgctgcccttaactcacaggatgaggtattataggttatagaatcccttgctttttattcctttatcacagatggatgaagtgctcaaatctga

SEQ ID NO: 734518 - DNA, 120 bp, Artificial Sequence
  ENSG00000198860_60 (sequence is synthesized)
gtttctgattaatatctatcgttgctttatcagaatatctttctctaaagtaaatcattcttgtgaataagaatctagctagttgtaatgcagttcagcataggtggaaataatttttta

SEQ ID NO: 734519 - DNA, 120 bp, Artificial Sequence
  ENSG00000198860_61 (sequence is synthesized)
aggactaagtcaatttctgggattcagactgtttcagaaaagaaacattttctgtatttccactaatggcacagtgtaccttagtatgtttgggttagtattcagttttagcaataatca

SEQ ID NO: 734520 - DNA, 120 bp, Artificial Sequence
  ENSG00000198860_62 (sequence is synthesized)
tggaggcaggggtatctataaatattatatcccaatttgcaaggtagcaaagttgtatatatactacataatatgaccacttgacagtttatgaagtcttttcatatatgccatttaatt

SEQ ID NO: 734521 - DNA, 120 bp, Artificial Sequence
  ENSG00000198860_63 (sequence is synthesized)
gattcatataataatcttatgtgtaaacataaaggtgtactactatcttcatttcaagtatccttgaaaagactttctccattgaattgcctttgtacctttgtcaaaaatcaactgacc

SEQ ID NO: 734522 - DNA, 120 bp, Artificial Sequence
  ENSG00000198860_64 (sequence is synthesized)
actgcaggagtgcactatagtaattagagcagagtctctggtctcagggttcaaaacttggtatgtgatattgagccaattgcttaagttcactgggccacaatccttgatctgcgactt

SEQ ID NO: 734523 - DNA, 120 bp, Artificial Sequence
  ENSG00000198860_65 (sequence is synthesized)
caaattgaaactatttataggctttacttgcttaatataaatctttctattttgggtgcagaaatattgggtttgattctaagggaccaccccagaccttggtgggtgttctgtaatatc

SEQ ID NO: 734524 - DNA, 120 bp, Artificial Sequence
  ENSG00000198860_66 (sequence is synthesized)
tgtcatatgcaccctgttgcctttattaattctgcattctgagttgcaaaactcatctggtttccagagatttggggatctatgatataccctcatagggtcgctgagctatagtcactt

SEQ ID NO: 734525 - DNA, 120 bp, Artificial Sequence
  ENSG00000198860_67 (sequence is synthesized)
catgccccccctccgaatcttattagctattattatcatcttggaatggttttttgatgtggcggttattctcccattttacatatgaggaaaataagacccagaaaagttaaatcacca

SEQ ID NO: 734526 - DNA, 120 bp, Artificial Sequence
  ENSG00000198860_68 (sequence is synthesized)
catagctcatatgtgatatggtcagaatacaagcaaggcatttctgacatcagatcccatgcattctgttgaattcattctgttgaattcccaggaccctgtacatgccctggcagggcc

SEQ ID NO: 734527 - DNA, 120 bp, Artificial Sequence
  ENSG00000198860_69 (sequence is synthesized)
agcctcaattaagattccacctggagagattagagtctacagttaagaaaacacaatcaactgggactgtcctcttcaggcatctcacaagcagaccagttctggtgtgggctcctcacc

SEQ ID NO: 734528 - DNA, 120 bp, Artificial Sequence
  ENSG00000198860_70 (sequence is synthesized)
agaagggagctggcctgcacaccgtcctttgctgatttctcctaagggatgtgagcagagcattgacagggtctgtgatacaccctttagcataattctgtgccatagcaggaacagtct

SEQ ID NO: 734529 - DNA, 120 bp, Artificial Sequence
  ENSG00000198860_71 (sequence is synthesized)
attttgtgaaaagctcaggatgaaggctgtctctctcactactgttttgatgttcactgacaaacccacctaccatcaaatgattcccaccacactgcctgccatggtgcctgaaatttg

SEQ ID NO: 734530 - DNA, 120 bp, Artificial Sequence
  ENSG00000198860_72 (sequence is synthesized)
tgctataagccatcagtctccagagactaccaataaaatgtctggacagtagggtaggggatgagggaaggataagaggtgggtcaccatcactgaagagtctgggtgaactggggtact

SEQ ID NO: 734531 - DNA, 120 bp, Artificial Sequence
  ENSG00000198860_73 (sequence is synthesized)
agctcccaggctggaggtggcctctgacagacatggcctctgaggagtgtagcaccaaacacggacccaaaagcacccctcagaaaaggaaagggatgaaggggtcatttgcctgtttta

SEQ ID NO: 734532 - DNA, 120 bp, Artificial Sequence
  ENSG00000198860_74 (sequence is synthesized)
cacatttatccagatcaggacctggaagggaagacctccttcactgttgctgagactgcgagctcttggaagacggtgactgtctttttgtctctctctctccccagaactcagcagagt

SEQ ID NO: 734533 - DNA, 120 bp, Artificial Sequence
  ENSG00000198860_75 (sequence is synthesized)
aacccatgacttgtttgactgaacagagtgcccatgggttcagtgctctgctctagtctccacctgccagtttccttctgacactgctatgagcaacccccatatttatgcagatgagtg

SEQ ID NO: 734534 - DNA, 120 bp, Artificial Sequence
  ENSG00000198860_76 (sequence is synthesized)
ctccataactccacttctcttcaataagaagaaagagcaacaccgctaacaacttattgttggtggtgagactttgggcaaattaatgagctctctgtttattcattgataaaatgtaga

SEQ ID NO: 734535 - DNA, 120 bp, Artificial Sequence
  ENSG00000198860_77 (sequence is synthesized)
gaatgcccctggcttcccacacttgtggtgaggactcagtaaggttcttgtggactgattgtgtccctctctaaattccccaattcacacactgaagctctaatctccagtgtgattgtt

SEQ ID NO: 734536 - DNA, 120 bp, Artificial Sequence
  ENSG00000198860_78 (sequence is synthesized)
tttggagttaggccctatatggaggtaatcaaattaacagaggtcatgagagtggggccttaatccaacaggactaatattcttataaaatggggaagaaacaggataccagagatctct

SEQ ID NO: 734537 - DNA, 120 bp, Artificial Sequence
  ENSG00000198862_0 (sequence is synthesized)
agtggggcagcaaatggacagggtgggtggcggaaaagggcccgggggaagttattacagggtgtcctcttccgccgccagaagccggaagttgtgtcccggacgtgtcaaccggggtct

SEQ ID NO: 734538 - DNA, 120 bp, Artificial Sequence
  ENSG00000198862_1 (sequence is synthesized)
gagtgctcagagtacagctgcaaccgcgaccatgggcgggaagaacaagcagcgaactaaagggaacctgaggccttcaaacagtggccgagctgcagaactccttgccaaagaacaggg

SEQ ID NO: 734539 - DNA, 120 bp, Artificial Sequence
  ENSG00000198862_2 (sequence is synthesized)
aacagtgcctggatttattggttttggaacatctcagagtgacctaggctatgttcctgctattcaaggagctgaagaaattgacagtcttgtagattctgatttccgaatggtgctgcg

SEQ ID NO: 734540 - DNA, 120 bp, Artificial Sequence
  ENSG00000198862_3 (sequence is synthesized)
gaaactttcaaagaaagatgtcaccacaaaattaaaagctatgcaggaatttggaaccatgtgtacagagagagacacagaaactgtgaaaggagttcttccatattggccaagaatttt

SEQ ID NO: 734541 - DNA, 120 bp, Artificial Sequence
  ENSG00000198862_4 (sequence is synthesized)
ttgcaaaatttcacttgatcatgaccgtcgcgtccgagaagccacacaacaagcttttgaaaaacttatccttaaagtaaagaaacagttggctccctacttaaaaagtttaatgggata

SEQ ID NO: 734542 - DNA, 120 bp, Artificial Sequence
  ENSG00000198862_5 (sequence is synthesized)
ttggctaatggctcagtgtgatacttacacaccagctgcgtttgcagcaaaagatgcatttgaagcggcttttcctccaagcaagcaacctgaagccatagcattttgtaaggatgaaat

SEQ ID NO: 734543 - DNA, 120 bp, Artificial Sequence
  ENSG00000198862_6 (sequence is synthesized)
tacaagtgtgctgcaggatcatcttataaaagaaacacctgatacactcagtgacccgcaaactgttccagaggaagaaagagaagctaaattctaccgggttgtaacttgttccttatt

SEQ ID NO: 734544 - DNA, 120 bp, Artificial Sequence
  ENSG00000198862_7 (sequence is synthesized)
ggcattaaagagattactttgccttttacctgataatgagcttgattctctggaggagaaatttaagtctcttttatcacagaataagttttggaagtatggaaaacacagtgtacctca

SEQ ID NO: 734545 - DNA, 120 bp, Artificial Sequence
  ENSG00000198862_8 (sequence is synthesized)
gattcgctcagcttattttgagttagtctctgcattgtgccagcgcattccacagttgatgaaagaggaagcatccaaagtgagcccatcagttctacttagcattgatgacagtgaccc

SEQ ID NO: 734546 - DNA, 120 bp, Artificial Sequence
  ENSG00000198862_9 (sequence is synthesized)
aattgtctgcccagctctctgggaagctgtactctatacacttacaactattgaggactgttggcttcatgtaaatgcaaaaaagagtgtgtttcccaagctatcaactgtgattcgtga

SEQ ID NO: 734547 - DNA, 120 bp, Artificial Sequence
  ENSG00000198862_10 (sequence is synthesized)
aggtggtcggggtctagctactgtcatatatccttaccttctgccattcatcagcaagctccctcagtccatcacaaatccaaagttggatttcttcaaaaatttcctcacgtctctagt

SEQ ID NO: 734548 - DNA, 120 bp, Artificial Sequence
  ENSG00000198862_11 (sequence is synthesized)
tgctgggctgtcaacagagagaactaaaaccagctctttagagtcctcggcagtaatatctgctttttttgaatgcttacgttttataatgcagcaaaacttaggtgaggaagagattga

SEQ ID NO: 734549 - DNA, 120 bp, Artificial Sequence
  ENSG00000198862_12 (sequence is synthesized)
acagatgctcgtcaatgatcagttgatcccttttattgatgcagttctcaaagacccaggattgcaacatgggcagctatttaaccatttagcagaaactctaagttcctgggaagccaa

SEQ ID NO: 734550 - DNA, 120 bp, Artificial Sequence
  ENSG00000198862_13 (sequence is synthesized)
agcagacacggaaaaagatgaaaaaacagctcacaacttggagaacgtactgatacatttctgggaaagactgtcagagatctgtgttgcgaaaatcagtgagccagaagctgatgttga

SEQ ID NO: 734551 - DNA, 120 bp, Artificial Sequence
  ENSG00000198862_14 (sequence is synthesized)
gtccgttttgggtgtatctaacctattacaggtgcttcagaagccgaagagctcattgaagtcaagtaaaaaaaaaaatggtaaggttagatttgctgatgagatacttgaaagcaataa

SEQ ID NO: 734552 - DNA, 120 bp, Artificial Sequence
  ENSG00000198862_15 (sequence is synthesized)
agagaatgaaaaatgtgtatcttcagaaggagagaagattgaaggctgggaattaacaactgaaccttctctcactcataattcttcaggccttttgtctcctctaaggaaaaaaccttt

SEQ ID NO: 734553 - DNA, 120 bp, Artificial Sequence
  ENSG00000198862_16 (sequence is synthesized)
ggaagacttagtctgtaaactcgcagatataagtattaattatgtcaatgaacgaaagtcagagcaacatctaaggtttctttctactctgcttgactccttttcttcaagccgagtatt

SEQ ID NO: 734554 - DNA, 120 bp, Artificial Sequence
  ENSG00000198862_17 (sequence is synthesized)
taaaatgctacttggtgatgaaaaacagagtattgtccaagccaaacctcttgaaatagccaagcttgtacaaaaaaatcctgcggtgcagtttttataccagaaactgataggttggct

SEQ ID NO: 734555 - DNA, 120 bp, Artificial Sequence
  ENSG00000198862_18 (sequence is synthesized)
aaatgaagatcaaaggaaggattttggtttcctggtggacattttgtacagtgctctccggtgctgtgacaatgatatggaaagaaaaaaagtcttggatgatctaaccaaggtggactt

SEQ ID NO: 734556 - DNA, 120 bp, Artificial Sequence
  ENSG00000198862_19 (sequence is synthesized)
gaaatggaattctcttcttaagattattgaaaaggcatgtcctagttcagataaacatgctttagtaactccttggctcaaaggcgatatccttggtgagaaattggtcaacttggcaga

SEQ ID NO: 734557 - DNA, 120 bp, Artificial Sequence
  ENSG00000198862_20 (sequence is synthesized)
ttgtctttgtaatgaggacttggaatccagggtatcttcagaatctcacttctcagaaagatggactcttctaagcttggtattatcccaacatgttaaaaatgattacttgattggaga

SEQ ID NO: 734558 - DNA, 120 bp, Artificial Sequence
  ENSG00000198862_21 (sequence is synthesized)
cgtatatgttgaaagaatcattgttagacttcatgaaactttattcaaaacaaagaaattatcagaagctgaaagcagtgactcatcagtgtcttttatctgtgatgtggcctataacta

SEQ ID NO: 734559 - DNA, 120 bp, Artificial Sequence
  ENSG00000198862_22 (sequence is synthesized)
tttcagctcagcgaaaggatgcttgctaatgccatcatctgaagatttattattaactctctttcagttatgtgctcagagcaaagaaaaaacacatttgccagattttcttatctgtaa

SEQ ID NO: 734560 - DNA, 120 bp, Artificial Sequence
  ENSG00000198862_23 (sequence is synthesized)
actgaaaaatacttggctctctggtgtaaatttattggttcatcaaactgacagttcatataaagagagtaccttcctacatttgtctgctctgtggctgaagaaccaagttcaggcttc

SEQ ID NO: 734561 - DNA, 120 bp, Artificial Sequence
  ENSG00000198862_24 (sequence is synthesized)
atctttggatatcaacagtctccaagtcctcttgtctgctgttgatgatttgctaaatacacttctagagagtgaagattcttatcttatgggagtttatattggaagtgtaatgccgaa

SEQ ID NO: 734562 - DNA, 120 bp, Artificial Sequence
  ENSG00000198862_25 (sequence is synthesized)
cgacagtgaatgggaaaagatgaggcagtctcttcctatgcagtggttacatagacctcttttagagggaagattgagtttgaattatgaatgtttcaaaacagattttaaggaacagga

SEQ ID NO: 734563 - DNA, 120 bp, Artificial Sequence
  ENSG00000198862_26 (sequence is synthesized)
cataaagacacttcccagccatttgtgtacttcagcattattgagcaaaatggtcttaattgcactgagaaaggaaacagtcttagaaaataatgagcttgagaaaataattgcagaact

SEQ ID NO: 734564 - DNA, 120 bp, Artificial Sequence
  ENSG00000198862_27 (sequence is synthesized)
gctttattcactgcagtggtgtgaagaattagataacccacctatttttctaattggattttgtgaaatacttcaaaaaatgaatattacgtatgataacttacgtgtacttggtaatac

SEQ ID NO: 734565 - DNA, 120 bp, Artificial Sequence
  ENSG00000198862_28 (sequence is synthesized)
gtcgggccttttgcagctgttatttaacaggtccagagaacatggcacactgtggtctcttattattgctaagttgatcctttcccgaagcatttcatctgatgaagtaaaaccacatta

SEQ ID NO: 734566 - DNA, 120 bp, Artificial Sequence
  ENSG00000198862_29 (sequence is synthesized)
taagagaaaagaaagtttttttccactaactgaaggcaatttgcataccattcaaagtctatgtccatttttgtcaaaagaagaaaagaaagaatttagtgctcaatgtatacctgctct

SEQ ID NO: 734567 - DNA, 120 bp, Artificial Sequence
  ENSG00000198862_30 (sequence is synthesized)
tttgggctggactaagaaagatctttgcagcactaatggaggttttggacatcttgccattttcaattcttgtctgcaaaccaaaagtatagatgatggagagctattacatggaatatt

SEQ ID NO: 734568 - DNA, 120 bp, Artificial Sequence
  ENSG00000198862_31 (sequence is synthesized)
aaaaatcataatatcctggaagaaagagcatgaagatatttttcttttcagttgtaatctatcagaagcaagtccagaggtactgggtgtaaatatagaaataatccggtttctttccct

SEQ ID NO: 734569 - DNA, 120 bp, Artificial Sequence
  ENSG00000198862_32 (sequence is synthesized)
gagacaacaagtgagaatcaggcattgtattctattccacttgtgcaactgtttgcctgtgtcagctgtgatttggcctgtgacctcagtgctttctttgattccacaactctggatacc

SEQ ID NO: 734570 - DNA, 120 bp, Artificial Sequence
  ENSG00000198862_33 (sequence is synthesized)
attggcaatcttcctgtaaatctaatcagtgaatggaaagaatttttttcccaaggcatccacagtttgcttttacctattttggtgactgttacaggagaaaacaaagatgtgtctgaa

SEQ ID NO: 734571 - DNA, 120 bp, Artificial Sequence
  ENSG00000198862_34 (sequence is synthesized)
acatcctttcagaatgcaatgctgaaacccatgtgtgaaacattaacgtatatctcaaaggaacagctattgagtcacaaacttcctgcaagattagttgctgaccaaaaaacaaactta

SEQ ID NO: 734572 - DNA, 120 bp, Artificial Sequence
  ENSG00000198862_35 (sequence is synthesized)
ccagaatatctccagactttgttaaatacattggccccattactcctcttcagagctaggcctgtgcaaattgctgtttatcatatgctatacaaattgatgcctgaattaccacagtat

SEQ ID NO: 734573 - DNA, 120 bp, Artificial Sequence
  ENSG00000198862_36 (sequence is synthesized)
gatcaggataatctaaagtcatacggagatgaagaagaagagccagccttgtcaccaccagcagcactgatgtctcttcttagcattcaagaggacttactagaaaatgttttggggtgt

SEQ ID NO: 734574 - DNA, 120 bp, Artificial Sequence
  ENSG00000198862_37 (sequence is synthesized)
attcctgttggacagatagttactattaaaccactgagtgaagacttctgttatgttctgggataccttctcacttggaaattaatactaactttcttcaaagctgcatcatcacagctt

SEQ ID NO: 734575 - DNA, 120 bp, Artificial Sequence
  ENSG00000198862_38 (sequence is synthesized)
cgggctttgtattccatgtatcttcggaaaacaaagagtttgaataaattgctctatcacctgttcaggcttatgccagaaaatccaacctatgcagagacagcagttgaggtcccaaat

SEQ ID NO: 734576 - DNA, 120 bp, Artificial Sequence
  ENSG00000198862_39 (sequence is synthesized)
aaggaccctaaaacattctttactgaggagctccagctgagtattagagaaacaacaatgcttccataccacattccacacttggcttgttcagtctatcatatgacattaaaagacttg

SEQ ID NO: 734577 - DNA, 120 bp, Artificial Sequence
  ENSG00000198862_40 (sequence is synthesized)
cctgccatggttaggttgtggtggaatagcagtgagaagcgtgttttcaatattgtggatagatttacaagcaagtatgtcagcagtgttctttcttttcaagaaatatcttctgtacaa

SEQ ID NO: 734578 - DNA, 120 bp, Artificial Sequence
  ENSG00000198862_41 (sequence is synthesized)
acaagtacacaactatttaatggcatgacggttaaagctcgagctactactcgagaggtaatggctacttatactattgaggacatagttattgaacttataatacaactgccttcaaat

SEQ ID NO: 734579 - DNA, 120 bp, Artificial Sequence
  ENSG00000198862_42 (sequence is synthesized)
tatccactgggttcaataatagtagaaagtgggaaaagagtaggagtagctgttcagcagtggcggaactggatgctgcagttaagcacttacctcacccatcagaatggaagtattatg

SEQ ID NO: 734580 - DNA, 120 bp, Artificial Sequence
  ENSG00000198862_43 (sequence is synthesized)
gaaggcttagctttatggaaaaataacgtagacaaacgttttgagggtgttgaagattgcatgatctgtttctcagtcattcacggtttcaactattcccttcccaaaaaagcctgtaga

SEQ ID NO: 734581 - DNA, 120 bp, Artificial Sequence
  ENSG00000198862_44 (sequence is synthesized)
acatgcaagaaaaaattccattcagcctgcttgtacaaatggtttacatctagcaacaaatccacttgtccactgtgtcgtgagacgtttttctgagatttttttcactggaagggatcc

SEQ ID NO: 734582 - DNA, 120 bp, Artificial Sequence
  ENSG00000198862_45 (sequence is synthesized)
ctgaagtacatcaaacaaaggcattggatttggatccgtctgaaagtgtggatgtggggaagccagtgagcattacttttaaataggaccttctctggaaaattattttggttaatgtaa

SEQ ID NO: 734583 - DNA, 120 bp, Artificial Sequence
  ENSG00000198862_46 (sequence is synthesized)
taatcctaaaatcaggtttacttaactttagattgctttgtaaatgtttggaaactttcttttacaaaagaatattacatatttgagagaaaatatttctattaatggtttaatttcttt

SEQ ID NO: 734584 - DNA, 120 bp, Artificial Sequence
  ENSG00000198862_47 (sequence is synthesized)
gtatatttaaaaataaatatgaaaaacccctaaattacagaattggaatttgtgaaaagattgcacaactatattattgataaacccattccgtttgttgatctgtgttttagaatagtc

SEQ ID NO: 734585 - DNA, 120 bp, Artificial Sequence
  ENSG00000198862_48 (sequence is synthesized)
caagtgaagcaaaacgaactgagagagctgatttacatctatagatattttaagccttatttattagttatgacaataaattagtattctgatatttgtagattattttaatgataaaaa

SEQ ID NO: 734586 - DNA, 120 bp, Artificial Sequence
  ENSG00000198862_49 (sequence is synthesized)
tgacactaagctattaatacggcttgtcttaagatatctggaggcatgctctgaaatcctatataaaagagtttaaactgaactttaaggtgcctccatttatcaagggttatgaaactc

SEQ ID NO: 734587 - DNA, 120 bp, Artificial Sequence
  ENSG00000198862_50 (sequence is synthesized)
agaaaattaaattcttgatgctgacctttttgcttgtgggagaattatttctatatattagtgaaatttgaattgtaaacttgtcagtgaatttatcactctgagcgagtctctagaggg

SEQ ID NO: 734588 - DNA, 120 bp, Artificial Sequence
  ENSG00000198862_51 (sequence is synthesized)
tgagaatttgagagaaatagtaatttgattatttcattcatgaagcggagtggtagttatccttctattgagagggaagaaataaatgagtattactgaaacttaaagatcagtggaaaa

SEQ ID NO: 734589 - DNA, 120 bp, Artificial Sequence
  ENSG00000198862_52 (sequence is synthesized)
aaaaaacatttaaaaatgttgtaggagactttcaattttggaagcaaactgagctattcttaccagccaaagttatactaaataagagacttgggggagcaaatgtttttcagccttcag

SEQ ID NO: 734590 - DNA, 120 bp, Artificial Sequence
  ENSG00000198862_53 (sequence is synthesized)
aaatgaaagttaaggattttagcactaggtaaaattcagtataataggctgaagtggagtaagtgaaaacctgccttttgccactcttaaaaattgtgcccaaaatataaaagtgtggaa

SEQ ID NO: 734591 - DNA, 120 bp, Artificial Sequence
  ENSG00000198862_54 (sequence is synthesized)
ctttagaacttggaataattttattgcagtcttccattacatggaaatagcatatctaatatctaggttacttgagagaccagctaatcatctctgttgcacatgtttaattggcaaaaa

SEQ ID NO: 734592 - DNA, 120 bp, Artificial Sequence
  ENSG00000198862_55 (sequence is synthesized)
gcaattcatgataaataaaattactgctttccatctactgggtaaaatgactattgaaatagtatgaatgtggtcagaggattatagttgagagtgaagtactatgtgtgagttatagat

SEQ ID NO: 734593 - DNA, 120 bp, Artificial Sequence
  ENSG00000198862_56 (sequence is synthesized)
ctctcgaattatatttatagatgcagtgtcctgcccagttttgtttgcctcctacattttactgtaaaatatttattgtcttctagccttgagcctctgagggtcagtaagtgaagtaca

SEQ ID NO: 734594 - DNA, 120 bp, Artificial Sequence
  ENSG00000198862_57 (sequence is synthesized)
gatagcaaaattttactacctcgttaacccttttcttaaaatattctctatctttctatgtctctttctgacatagtaatcccaaaggattgtgttactccccgtgaaagttattacttt

SEQ ID NO: 734595 - DNA, 120 bp, Artificial Sequence
  ENSG00000198862_58 (sequence is synthesized)
tcctttaaaaatggttttataataagactgtttaaaacctttccagtattggtacatcttggcttctggcccaaaccccaagcagaaaagaaaatggaataatggagcattgtttttcca

SEQ ID NO: 734596 - DNA, 120 bp, Artificial Sequence
  ENSG00000198862_59 (sequence is synthesized)
cattagtattagggcatcagattcttggtgaaacactataattaagtagttataattaaataactgttcttcatacttaggactcttaatacatttctttaagacttgtaagtataattg

SEQ ID NO: 734597 - DNA, 120 bp, Artificial Sequence
  ENSG00000198862_60 (sequence is synthesized)
taaagcttgttaactgtttatatactaaagaaaaagctttacaagataagactgaaattcagaataccacatctgtacagcgttgacaactctaactaaaaggattacagcccttaaaat

SEQ ID NO: 734598 - DNA, 120 bp, Artificial Sequence
  ENSG00000198862_61 (sequence is synthesized)
tttagcttaaggacattttaaaattgcatgagattagcaaaattattaatttaaaaccccaaagtaaattgcaaattttaaaatttatttttgactcttttatcacatgctccaatgtat

SEQ ID NO: 734599 - DNA, 120 bp, Artificial Sequence
  ENSG00000198862_62 (sequence is synthesized)
gtacataagtgtctgtggcttaaataatatgttgttatttgatacatttttgtggtgcaagtaattaatgttattatttgattgttataccatatgtgcccattaaaattctttttaatt

SEQ ID NO: 734600 - DNA, 120 bp, Artificial Sequence
  ENSG00000198862_63 (sequence is synthesized)
aaaaatatttcaaatatgcagaaaaataataatataaatgcccttgtacccttcacatactattttgccatatttgcttctgatttttaaataaataaaatgttactcttttgtacttct

SEQ ID NO: 734601 - DNA, 120 bp, Artificial Sequence
  ENSG00000198862_64 (sequence is synthesized)
gggatagaattggagccatgataacgaagggatagtaatatggtacaagtaatattttggacagagagagtatttgatcttgctgttaatctttgctttaattttatggttttaggcatg

SEQ ID NO: 734602 - DNA, 120 bp, Artificial Sequence
  ENSG00000198862_65 (sequence is synthesized)
gaatctccggctctgaccttcatagtgagtattttcttatctgtaaactgaaaaatacttggctctctggtgtaaatttattggttcatcaaactgacagttcatataaagagagtacct

SEQ ID NO: 734603 - DNA, 120 bp, Artificial Sequence
  ENSG00000198862_66 (sequence is synthesized)
gagggcctttatgtgtgagagaatgtgttgatttgttgataaaattttgtctaatacattttaaaatccaggaaagacccatagaattattaatccaaagtaagatatttaaaaatacac

SEQ ID NO: 734604 - DNA, 120 bp, Artificial Sequence
  ENSG00000198862_67 (sequence is synthesized)
aatcctcttcctgagcagtgattggaagttcctagccagtgtttgctgcctgcgcttccatgactcactagcctcctcatctccttacagctaggcagcttctttcattagatatgttca

SEQ ID NO: 734605 - DNA, 120 bp, Artificial Sequence
  ENSG00000198862_68 (sequence is synthesized)
tactggcatatctcagagacatcattgctttgaaatgaaccaagttgcaaattccttacttctcagcccttaaagcaaaagaagctctgggaacatggatcagcatgctttaggggtgga

SEQ ID NO: 734606 - DNA, 120 bp, Artificial Sequence
  ENSG00000198862_69 (sequence is synthesized)
tttacagcttttttttttcttgcttccccacctcatgaaaataagttgctgtcagatatctggccctagtaactctatatcagagaatttggggaaataaatcccattgttcatattgaa

SEQ ID NO: 734607 - DNA, 120 bp, Artificial Sequence
  ENSG00000198862_70 (sequence is synthesized)
gcagtcagttctgcagcagataccagctatgtgtcctccaattcaattctgactatctacctggagatagtgtcagatctcactggcttaggactcagtcccacaagaccgctccccact

SEQ ID NO: 734608 - DNA, 120 bp, Artificial Sequence
  ENSG00000198862_71 (sequence is synthesized)
tctgatgccaatcgcaagccccaggctgttttacctgggcttctgaccaaccagctgtacatctaaatcagggatcccatgaccccctcctggggtttgcttaatttgctagactgtctc

SEQ ID NO: 734609 - DNA, 120 bp, Artificial Sequence
  ENSG00000198863_0 (sequence is synthesized)
gtttccgggaagatggcggctgtcgaagcggctgcagagccggtaacggtggtggcggctgttgggccaaaggcgaaagacgaagaggaggaggaagaggagccgctgccaccgtgcgag

SEQ ID NO: 734610 - DNA, 120 bp, Artificial Sequence
  ENSG00000198863_1 (sequence is synthesized)
cgaggcggtgcgctgggccccagtgggggcggtggcggaggcccggcctggggcaaccgcgtttttagaagaggcgacggccgaggagcctggcgcggccccgggctccccgccggattc

SEQ ID NO: 734611 - DNA, 120 bp, Artificial Sequence
  ENSG00000198863_2 (sequence is synthesized)
attcgccgggccggacgctgcggcggctgcgggcagagcggcggcggctggactcggcgctgctggcgctgtcctcgcacttcgcgcaggtgcagttccgcctgcgccaggtggtgcgcg

SEQ ID NO: 734612 - DNA, 120 bp, Artificial Sequence
  ENSG00000198863_3 (sequence is synthesized)
gcggagcagcagcgccttctgcgggagctcgaagacttcgccttccgcggctgccctcacgtcctaggttacgaagggcccggcgaccccgccagcgatgagggcgatgggctgccaggg

SEQ ID NO: 734613 - DNA, 120 bp, Artificial Sequence
  ENSG00000198863_4 (sequence is synthesized)
gaccggccatggttgcggggcgaggaccagagtgagcaggaaaagcaagagcgtctggaaacccaaagggagaagcagaaagaactgatactgcagctcaagacccagctagatgacctg

SEQ ID NO: 734614 - DNA, 120 bp, Artificial Sequence
  ENSG00000198863_5 (sequence is synthesized)
gaaacgtttgcctatcaagagggcagttatgactcgctgccacagtccgtggtgttggaaagacagcgggtgatcatagatgagttaataaagaaactggacatgaatctgaatgaggac

SEQ ID NO: 734615 - DNA, 120 bp, Artificial Sequence
  ENSG00000198863_6 (sequence is synthesized)
atcagttccctgtccactgaagagcttcgtcagcgtgtagatgcagcagtggctcagatcgtcaacccagcccgagtcaaagaacagttggttgagcaactgaaaactcagatccgagac

SEQ ID NO: 734616 - DNA, 120 bp, Artificial Sequence
  ENSG00000198863_7 (sequence is synthesized)
cttgagatgtttatcaacttcatccaagatgaagtgggaagccccttgcagacaggtggtggacactgtgagtgcaaggccggtgggaagacaggaaatggctgcagcagaacaggcagc

SEQ ID NO: 734617 - DNA, 120 bp, Artificial Sequence
  ENSG00000198863_8 (sequence is synthesized)
agcagaacgcctccaggaaacagcaaaacaaaggcagaggatgtgaagaaagtccgggagacggggctgcacctgatgcggcgagcgctggccgtgctccagatctttgctgttagccag

SEQ ID NO: 734618 - DNA, 120 bp, Artificial Sequence
  ENSG00000198863_9 (sequence is synthesized)
tttggttgtgccacaggccagatccctccaaccctgtggcagagggtccaggctgacagagactactctcccttgctgaagaggctggaggtgtcagtggacagagtgaagcagctagcc

SEQ ID NO: 734619 - DNA, 120 bp, Artificial Sequence
  ENSG00000198863_10 (sequence is synthesized)
ttgaggcagcagccacatgaccatgtcatcacctctgccaacctccaggacctctctctgggaggcaaggatgagctgactatggctgtgcggaaggagctaacggtggctgtgagggac

SEQ ID NO: 734620 - DNA, 120 bp, Artificial Sequence
  ENSG00000198863_11 (sequence is synthesized)
ctgctggcccatggactgtatgcctcctccccagggatgagccttgttatggctcctattgcttgtttgctgccagccttctcctcggccccagaggccatgcacccgtgggagctcttt

SEQ ID NO: 734621 - DNA, 120 bp, Artificial Sequence
  ENSG00000198863_12 (sequence is synthesized)
gtaaagtactaccatgctaagaacggccgtgcttatgtggaatccccagcccggaagctctcccagtccttcgcccttcctgttacgggaggcactgttgtcacccccaaacagagccta

SEQ ID NO: 734622 - DNA, 120 bp, Artificial Sequence
  ENSG00000198863_13 (sequence is synthesized)
ctgacagccatccacatggtgctgacagagcatgacccttttaagcgcagtgcagactcagaattgaaggccttggtgtgcatggcactgaatgagcagcgtctggtgtcctgggtgaac

SEQ ID NO: 734623 - DNA, 120 bp, Artificial Sequence
  ENSG00000198863_14 (sequence is synthesized)
ctcatctgcaagtccgggtcactcatcgagcctcactaccagccctggagctacatggcacacacaggctttgagagtgccctcaacctgctcagtcgcctcagcagcctcaagtttagc

SEQ ID NO: 734624 - DNA, 120 bp, Artificial Sequence
  ENSG00000198863_15 (sequence is synthesized)
gtcttctagcataggagcaaggaatcagaggtggggttaaaggcatttttcccagaccctgctcaggcagtcggccaaatgagtgcaaagtctgttttccccaccaacttagctctcgga

SEQ ID NO: 734625 - DNA, 78 bp, Artificial Sequence
  ENSG00000198863_16 (sequence is synthesized)
gagtgcaaagtctgttttccccaccaacttagctctcggaaagatgtgctggagggaccctcttgttaagaaggttct

SEQ ID NO: 734626 - DNA, 62 bp, Artificial Sequence
  ENSG00000198863_17 (sequence is synthesized)
ggttgtacccacagtatacgtgtgggcacttgtgcttgagcctgtattaaaggaatcaggcc

SEQ ID NO: 734627 - DNA, 80 bp, Artificial Sequence
  ENSG00000198863_18 (sequence is synthesized)
tctcaaaaaaaaaaagaaggttgtacccacagtatacgtgtgggcacttgtgcttgagcctgtattaaaggaaattggga

SEQ ID NO: 734628 - DNA, 61 bp, Artificial Sequence
  ENSG00000198863_19 (sequence is synthesized)
atacaaaaattagctaggcggcccgagaggtggagactgcagtaagccaagatcatgccat

SEQ ID NO: 734629 - DNA, 69 bp, Artificial Sequence
  ENSG00000198863_20 (sequence is synthesized)
tgcactccagcctgggcaacttgaggctcctgttagttaagctatcttctttcacttgaagcaggtttg

SEQ ID NO: 734630 - DNA, 120 bp, Artificial Sequence
  ENSG00000198863_21 (sequence is synthesized)
ctgttagttaagctatcttctttcacttgaagcaggtttgagaggcctaggccagaatttaaattccttttatgaatagatttccctttcttcctgaccccaaggtcagaggagactata

SEQ ID NO: 734631 - DNA, 120 bp, Artificial Sequence
  ENSG00000198863_22 (sequence is synthesized)
tattccatggctgcctctaagactaggaataggaatatctgaaaacagcatttctaagggtggtaaccacaggtcgattttaatacgagtcctttttcttgtagaggtaagtaaaatctt

SEQ ID NO: 734632 - DNA, 120 bp, Artificial Sequence
  ENSG00000198863_23 (sequence is synthesized)
cctgacaaggtagtcctcttttcatggcacagacaatgggctttctgtttatgaggggtgagaagtgatgtttgttactatgttctccagcaagtaaacattcctctgctcacctcccaa

SEQ ID NO: 734633 - DNA, 120 bp, Artificial Sequence
  ENSG00000198863_24 (sequence is synthesized)
caagactaacagtctttttagaagtaaatatattcaagacaaacgagaaaatcctggctacccaagtcgagtatatacaggaatacaaatcggtaaccagcagctgttcctcaggttgtg

SEQ ID NO: 734634 - DNA, 120 bp, Artificial Sequence
  ENSG00000198863_25 (sequence is synthesized)
actcactgagcaccacttgtcctggaggctggatgatggaggacatctggttataggtactgtagcagggataggtgccacaggaggataggaactacagcagatcgctgtttccagaac

SEQ ID NO: 734635 - DNA, 120 bp, Artificial Sequence
  ENSG00000198863_26 (sequence is synthesized)
ggggaggagtatctcattgtgaaacagactctagagtggttctatttggtcttcagtgttttagcctcgttagttcatatttggcatgcagcttgtggtgagtactgttctaggactggc

SEQ ID NO: 734636 - DNA, 120 bp, Artificial Sequence
  ENSG00000198863_27 (sequence is synthesized)
caaaaatgggcaaaatgtatcactccaaacactactgattcagcattgttttcatgtcttaaaattgccacctgcactttgtttctgcactattatgtagtgcattttaacttaaatttt

SEQ ID NO: 734637 - DNA, 120 bp, Artificial Sequence
  ENSG00000198863_28 (sequence is synthesized)
ttccagcaacatgttacttatttaagatacattactgatatttcattataattagttcaccttccctgtgaaacaagagaattgtaaaatgttgtggaaaatgatacatatgtggatgct

SEQ ID NO: 734638 - DNA, 120 bp, Artificial Sequence
  ENSG00000198863_29 (sequence is synthesized)
aatgaaatcatagtattttgtgtagcttctctgaagaccttagagatctgcagctttggtttataagtgtttgggccttatcagcccatctgatccagatcaatatttttttgaaaactg

SEQ ID NO: 734639 - DNA, 120 bp, Artificial Sequence
  ENSG00000198863_30 (sequence is synthesized)
gaccggccatggttgcggggcgaggaccaggtgagtggctggagccgggccgcgaggaatatgggaatagtggggtcgtgtgggtggcgatccagacccggatgatggtgcatgcgggga

SEQ ID NO: 734640 - DNA, 120 bp, Artificial Sequence
  ENSG00000198863_31 (sequence is synthesized)
gaggatgtggagagatgtcggtgcgtgatgacgtgagtggtagaggagcggtgagcgaagtgagtcgttgagagggcagcagagcagccaagagcagtgctgcgcccactcacctttccc

SEQ ID NO: 734641 - DNA, 120 bp, Artificial Sequence
  ENSG00000198863_32 (sequence is synthesized)
tcacgtatctcagtcttgaacactttggctgctagaggaccccgactctggggattgggaaaattggcaaaggaaaggaaagtgagttggaatccgtggaaatttaggttaactccctgt

SEQ ID NO: 734642 - DNA, 120 bp, Artificial Sequence
  ENSG00000198863_33 (sequence is synthesized)
ccctgctttcctgaaatctaggcagtctttacacttctttgggtgggagtttggattaacagcagggtctcttagtaactgaaataaacacaactcttgattagataaatttcctaatgt

SEQ ID NO: 734643 - DNA, 90 bp, Artificial Sequence
  ENSG00000198863_34 (sequence is synthesized)
gttgcccatcctcccgcctcagcctcaggactacaggcgtgtgccaccgtgcaggctataatgttgaaatttttaaactcttcctccatc

SEQ ID NO: 734644 - DNA, 120 bp, Artificial Sequence
  ENSG00000198863_35 (sequence is synthesized)
gcaggctataatgttgaaatttttaaactcttcctccatcctgcttaatcattaggcattctgaatgaggtcctctgataactgacaagatcgattcagtgtgcctaccccagaagtagt

SEQ ID NO: 734645 - DNA, 120 bp, Artificial Sequence
  ENSG00000198863_36 (sequence is synthesized)
gaaactatgtataagacaccaggtaaacgtttccttacaagctttgcatctctggaagtgcacaaagtgctggctttattggaagtgttgaggtacactgccttttcacttttttttttt

SEQ ID NO: 734646 - DNA, 120 bp, Artificial Sequence
  ENSG00000198865_0 (sequence is synthesized)
attcaggggtgtaccaggccccagaggcagcggaaagggagactgtggggaactaggagcaacagcaggcatggaccaaagcagtgaaggatgtatgaaaaagattagcagtgtgaatct

SEQ ID NO: 734647 - DNA, 120 bp, Artificial Sequence
  ENSG00000198865_1 (sequence is synthesized)
tgacaaacttataaatgacttctcacagatagaaaagaaaatggtagaaaccaatggaaagaacaatatactggatattcagttggaaaaaagtaattgcctattaaaagtaatgcaagc

SEQ ID NO: 734648 - DNA, 120 bp, Artificial Sequence
  ENSG00000198865_2 (sequence is synthesized)
aaaggaggtctccattaaagaagaatgtgctactcttcataatataataaaagggctacaacagaccattgaatatcaacagaatttgaaaggtgaaaatgaacaactaaaaataagtgc

SEQ ID NO: 734649 - DNA, 120 bp, Artificial Sequence
  ENSG00000198865_3 (sequence is synthesized)
tgatcttataaaagagaagttaaagtctcatgaacaggaatataagaataatattgccaaacttgtaagtgaaatgaaaatcaaagaggagggatataagaaagaaataagcaaacttta

SEQ ID NO: 734650 - DNA, 120 bp, Artificial Sequence
  ENSG00000198865_4 (sequence is synthesized)
tcaggacatgcagagaaaagttgaattaaatgaagaaaagcacaaagaactaatagagaaaaaggagatggaaatttcagagttaaatgcaaagctaagaagtcaagaaaaagaaaaaca

SEQ ID NO: 734651 - DNA, 120 bp, Artificial Sequence
  ENSG00000198865_5 (sequence is synthesized)
aaatgaaataatcaagctacaactagaatttgatgccaaactagcaagagttcagactaaatcaaaatcatatcaggattctactgttttgccacaaagtatctacagaaggaaacttca

SEQ ID NO: 734652 - DNA, 120 bp, Artificial Sequence
  ENSG00000198865_6 (sequence is synthesized)
gcattttcaagaagaaaaaaacaaggagattgcaattcttcgtaataccattcgcgatttagagcaacgcctttctgttggcaaagattctcaccttaagcgtagacggttttgagctta

SEQ ID NO: 734653 - DNA, 120 bp, Artificial Sequence
  ENSG00000198865_7 (sequence is synthesized)
gcagtaaattcattagttggtatttatttaaaagcaatcgaaagtttcacttctgttttcaatatatgcatacagcctacataacaaacgaagtcagctttaaggtttttattgaattta

SEQ ID NO: 734654 - DNA, 120 bp, Artificial Sequence
  ENSG00000198865_8 (sequence is synthesized)
tttggacaaatccgtactgtatccaattctgtactgcattcttgcttaatagtattaaccataaaggaggtcaggtttatagggtttggtttacctattaaaccatcattgactatggaa

SEQ ID NO: 734655 - DNA, 120 bp, Artificial Sequence
  ENSG00000198865_9 (sequence is synthesized)
atacttactaagcaatatagagacagacaatattatctttccccttatatcttttaagacagccactcaagttttagaagagtatgatacaacattagagaaagaaagatacaaaggctt

SEQ ID NO: 734656 - DNA, 120 bp, Artificial Sequence
  ENSG00000198865_10 (sequence is synthesized)
tattcatgtgtgatagtaaaaatcaggatgagtcttagatatacaaaagataaatggatatttaaaatagttatatatgcttttttagcaaaatattcacgtgttaagtatttctggatc

SEQ ID NO: 734657 - DNA, 120 bp, Artificial Sequence
  ENSG00000198865_11 (sequence is synthesized)
ttaaaatacaaaatccacttattttattagttaaaagtagaagattgaaaagacaaagtaatattgttttgagagataagtaaagaaaaaaatggaaagcatgtctttgttgttcttcct

SEQ ID NO: 734658 - DNA, 120 bp, Artificial Sequence
  ENSG00000198865_12 (sequence is synthesized)
ccattctaaactgctaattatccaacagaaacccctaggtcatagtttacgtttctattctcattaaagcaaatagaacactggaaaaagaaaaaaaaagacatattaaccaaaagctgc

SEQ ID NO: 734659 - DNA, 120 bp, Artificial Sequence
  ENSG00000198865_13 (sequence is synthesized)
aatcacctttcagttgctccatcataaaaaatatggtttgagtcaatatttctatgacataaaatttaaaatctggaagccaattcagtagatttctccatgtttgcacaaatctaattt

SEQ ID NO: 734660 - DNA, 120 bp, Artificial Sequence
  ENSG00000198865_14 (sequence is synthesized)
actaatttggtagtttataaaaatgctggaaatgaaattgtgtctagactaaattggggagtatgtcctattttaaatatttagtttgaaggtcattctcacttttttgcctgattcttt

SEQ ID NO: 734661 - DNA, 120 bp, Artificial Sequence
  ENSG00000198865_15 (sequence is synthesized)
cagcgtcaactggcactggcttctgtgggtataagctgctgacttatttgtcaggcagctggaggcaaacgtcactgacaagattcagttatgttctcctctgcccgaagtccctgtcag

SEQ ID NO: 734662 - DNA, 120 bp, Artificial Sequence
  ENSG00000198865_16 (sequence is synthesized)
ctacataaagatgggaggttttctttacactgtcaggtgattgcagaccctgttttttcaaatatcagatgtcgacaatggcagcatcagctcctaggagccaactctgaatctgtgggc

SEQ ID NO: 734663 - DNA, 120 bp, Artificial Sequence
  ENSG00000198865_17 (sequence is synthesized)
aatttacagagtaattgatttatacatctctttcgacagagcttcttttgtaaatcttgtaaatcttcacttgctggcatatctcggttctctgggtgaccctgcctatgctgacccttg

SEQ ID NO: 734664 - DNA, 120 bp, Artificial Sequence
  ENSG00000198865_18 (sequence is synthesized)
tgcttatggtggtgatgaaggcctggaggagcaggatgagtaggagcatttggtgctcctggttgctgattctctgaaagctcactgctgccaaggtgctgatgtccatgattgtgatga

SEQ ID NO: 734665 - DNA, 120 bp, Artificial Sequence
  ENSG00000198865_19 (sequence is synthesized)
tgctcatgatggtaatgaggcgatggagtttcaactgttttatccacagtagccaaagatacacgtttacaaaagtcttcatctttgagagtctggaacaaatttataaatcacttttta

SEQ ID NO: 734666 - DNA, 120 bp, Artificial Sequence
  ENSG00000198865_20 (sequence is synthesized)
acaagcttatagagataggaataatgcgtgaaaaatgatttgtagagctaacatgtgaaattccaactagttaattagaatcgagctggctttgtattatattaatgagaaagagtctga

SEQ ID NO: 734667 - DNA, 120 bp, Artificial Sequence
  ENSG00000198865_21 (sequence is synthesized)
tgttagtctcaacacctagacattttattaaaggcttaaaaagaaagccaaaccactgtacttatatttgcagaagcaaatgaagtaaactggcaaaaggaacttggattgcaggaaagt

SEQ ID NO: 734668 - DNA, 83 bp, Artificial Sequence
  ENSG00000198865_22 (sequence is synthesized)
atggccgaggggggcagattacttgggctcaggagtcggagaccagcctgggcaacatggcgagatcctgtctctgcaaaata

SEQ ID NO: 734669 - DNA, 120 bp, Artificial Sequence
  ENSG00000198865_23 (sequence is synthesized)
tacttgggctcaggagtcggagaccagcctgggcaacatggcgagatcctgtctctgcaaaatatacaaaaattagctgggtgtggtgtcagatgcctgtagtcccagctacttgtgagg

SEQ ID NO: 734670 - DNA, 88 bp, Artificial Sequence
  ENSG00000198865_24 (sequence is synthesized)
atctcaaaaaaataaaaaataaataaaaaatcagttgaactatatggaaacttctgtacctgtgtcaacggtgcatcttatctaatac

SEQ ID NO: 734671 - DNA, 120 bp, Artificial Sequence
  ENSG00000198865_25 (sequence is synthesized)
aacttctgtacctgtgtcaacggtgcatcttatctaatactatatgatactgtaatctaatattatctctgataattcaaaaatgctaataaactctgctcaaatgtgttagtttttcat

SEQ ID NO: 734672 - DNA, 120 bp, Artificial Sequence
  ENSG00000198865_26 (sequence is synthesized)
acttcatcctatgccaggaaatgttttgaacttcaccaaagctttgctaatgtctccctaccataaggctgtcagctgaaaatagcaaattactgcccgactcccattgaccataatatc

SEQ ID NO: 734673 - DNA, 120 bp, Artificial Sequence
  ENSG00000198865_27 (sequence is synthesized)
cattccgcatgatcctagttctttaatttactggaagtctttactgttttgtggtacctactaatcagagactcaaagcctatagatacagaaatgtaacagtaaatctcaacctaaggc

SEQ ID NO: 734674 - DNA, 120 bp, Artificial Sequence
  ENSG00000198865_28 (sequence is synthesized)
taatttgcaaataaaattacaaaatcaacttagaacccaaagactcactaagtgatatgcttttgatgttttgaaggttttaaaaggttataaattccattaaattttagcatacaacta

SEQ ID NO: 734675 - DNA, 120 bp, Artificial Sequence
  ENSG00000198870_0 (sequence is synthesized)
gagtgcctcgagggcgccgttcgggcggggaggatcccgcgggtcccactgacccacgcggggtggggccaggggtggacgctcgcccgtacgcggtcgctactgatcatgcttgggcca

SEQ ID NO: 734676 - DNA, 120 bp, Artificial Sequence
  ENSG00000198870_1 (sequence is synthesized)
gggtccaatcgcaggcgccccacgcagggggagcgaggcccagggtcccccggagagcccatggagaagtaccaggttttgtaccagctgaatcctggggccttgggggtgaacctggtg

SEQ ID NO: 734677 - DNA, 120 bp, Artificial Sequence
  ENSG00000198870_2 (sequence is synthesized)
gtggaggaaatggaaaccaaagtcaagcatgtgataaagcaggtggaatgcatggatgaccattacgccagtcaggccctggaggagctgatgccactgctgaagctgcggcacgcccac

SEQ ID NO: 734678 - DNA, 120 bp, Artificial Sequence
  ENSG00000198870_3 (sequence is synthesized)
atctctgtgtaccaggagctgttcatcacgtggaatggggagatctcttctctgtacctctgcctggtgatggagttcaatgagctcagcttccaggaggtcattgaggataagaggaag

SEQ ID NO: 734679 - DNA, 120 bp, Artificial Sequence
  ENSG00000198870_4 (sequence is synthesized)
gcaaagaaaatcattgactctgagtggatgcagaatgtgctgggccaggtgctggacgcgctggaatacctgcaccatttggacatcatccacaggaatctcaaaccctccaacatcatc

SEQ ID NO: 734680 - DNA, 120 bp, Artificial Sequence
  ENSG00000198870_5 (sequence is synthesized)
ctcatcagcagtgaccactgcaaactgcaggacctgagttccaatgtgctaatgacagacaaagccaaatggaatattcgtgcggaggaagacccctttcgtaagtcctggatggcccct

SEQ ID NO: 734681 - DNA, 120 bp, Artificial Sequence
  ENSG00000198870_6 (sequence is synthesized)
gaagccctcaacttctccttcagccagaaatcagacatctggtccctgggctgcatcattctggacatgaccagctgctccttcatggatggcacagaagccatgcatctgcggaagtcc

SEQ ID NO: 734682 - DNA, 120 bp, Artificial Sequence
  ENSG00000198870_7 (sequence is synthesized)
ctccgccagagcccaggcagcctgaaggccgtcctgaagacaatggaggagaagcagatcccggatgtggaaaccttcaggaatcttctgcccttgatgctccagatcgacccctcggat

SEQ ID NO: 734683 - DNA, 120 bp, Artificial Sequence
  ENSG00000198870_8 (sequence is synthesized)
cgaataacgataaaggacgtggtgcacatcaccttcttgagaggctccttcaagtcctcgtgcgtctctctgaccctgcaccggcagatggtgcctgcgtccatcaccgacatgctgtta

SEQ ID NO: 734684 - DNA, 120 bp, Artificial Sequence
  ENSG00000198870_9 (sequence is synthesized)
gaaggcaacgtggccagcattttagaggtcatgcagaaattctctggctggcccgaagtccagctcagggccatgaagaggcttctgaaaatgcctgcagatcagctaggtctgccgtgg

SEQ ID NO: 734685 - DNA, 120 bp, Artificial Sequence
  ENSG00000198870_10 (sequence is synthesized)
cccccggagctggtggaggtggtggtcacgaccatggagctacatgacagggtcctcgatgtccagctgtgtgcctgctccctgctgctgcacctcctgggccaagcgctggtgcaccac

SEQ ID NO: 734686 - DNA, 120 bp, Artificial Sequence
  ENSG00000198870_11 (sequence is synthesized)
cccgaggaggagccacttcttgtcatggtctacagcctgctagccatcaccacaacccaggagtcagagtcactgtcagaggagctgcagaatgctgggctgctggagcacatcctggag

SEQ ID NO: 734687 - DNA, 120 bp, Artificial Sequence
  ENSG00000198870_12 (sequence is synthesized)
cacctcaacagctccctcgaaagcagggacgtctgcgccagcggcctgggcctgctctgggccctcctgctggacggtatcattgtgaacaaggcccccttggagaaggtcccggacctc

SEQ ID NO: 734688 - DNA, 120 bp, Artificial Sequence
  ENSG00000198870_13 (sequence is synthesized)
atcagccaggtgttggccacctaccctgcggatggggaaatggcagaagccagctgcggagtcttctggctgctgtccctgctgggctgcatcaaggagcagcagtttgaacaagtggtg

SEQ ID NO: 734689 - DNA, 120 bp, Artificial Sequence
  ENSG00000198870_14 (sequence is synthesized)
gcgctgctcctgcaaagcatccggctgtgccaggacagagccctgctggtgaacaatgcctaccggggactggccagcctggtgaaggtgtcagagctggcggccttcaaggtggtggtg

SEQ ID NO: 734690 - DNA, 120 bp, Artificial Sequence
  ENSG00000198870_15 (sequence is synthesized)
caggaggagggcggcagtggcctcagcctcatcaaggagacctaccagctccacagggacgacccggaggtggtggagaacgtgggcatgctgctggtccacctggcttcctatgaggag

SEQ ID NO: 734691 - DNA, 120 bp, Artificial Sequence
  ENSG00000198870_16 (sequence is synthesized)
atcctgccggagctggtgtccagtagtatgaaggccctgctccaggagatcaaggagcgcttcacctccagcctggtgagtgacagcagcgccttcagcaaaccaggcctccctccaggt

SEQ ID NO: 734692 - DNA, 120 bp, Artificial Sequence
  ENSG00000198870_17 (sequence is synthesized)
ggaagcccccagctggggtgcaccacgtctgggggactggaatagatgtttgtatggaactgaccttgatctccacgtgtatagttttcaagactgctctcctgcctgcctattatccca

SEQ ID NO: 734693 - DNA, 120 bp, Artificial Sequence
  ENSG00000198870_18 (sequence is synthesized)
tctctatgactgggccaaaatcaatcttaaacgggaggggtaatcagacctctccaaagagtttcctgtccatgactgctggattgagtcacatgagtaactgctcctggacccggggac

SEQ ID NO: 734694 - DNA, 120 bp, Artificial Sequence
  ENSG00000198870_19 (sequence is synthesized)
tgtccacgaaaactgacttgcctgcttcctccttccaggaactggtttcttgcgcggaaaaagtgctcttgaggctggaggcagccacctctcccagcccactgggtggggaagcagctc

SEQ ID NO: 734695 - DNA, 120 bp, Artificial Sequence
  ENSG00000198870_20 (sequence is synthesized)
agccctgatgcgggggagaagacagataccccacaggcccctccctccacgtgtgccctctccctgtccttcctttccatgggccactgtttcccttggggtggggggaagggtcatcca

SEQ ID NO: 734696 - DNA, 120 bp, Artificial Sequence
  ENSG00000198870_21 (sequence is synthesized)
gcaccagaatgcgcatctcacactcctcttaggtgactaataaagaggcccaaggccagtttctgccttaatcatttctggcaagaggctgtgactggccagtgggatacttaattctgc

SEQ ID NO: 734697 - DNA, 120 bp, Artificial Sequence
  ENSG00000198870_22 (sequence is synthesized)
agtctctatagacctcgcccctggacagagcagtccttccagaccattctagatgagagtcaacactgagcctccacaggctccattccaagtaaacatctgcatttattttaaatcgca

SEQ ID NO: 734698 - DNA, 120 bp, Artificial Sequence
  ENSG00000198870_23 (sequence is synthesized)
tggctttgtaacgcctcaaagaactccatcacagatgccctgattatccctgcacagctgggctttgcccagttctggctctcccaaaccgtgctgcggcgagtaatcccgaatgtacgg

SEQ ID NO: 734699 - DNA, 120 bp, Artificial Sequence
  ENSG00000198870_24 (sequence is synthesized)
tggagtgagcagactgacccccaggaggcacaggaggcgtagcccccaggacccacgacacttttagggttccagaaaaaagttttcattctacataaaaaaaaaaattcctaaagacaa

SEQ ID NO: 734700 - DNA, 120 bp, Artificial Sequence
  ENSG00000198870_25 (sequence is synthesized)
ggggccttgggggtgaacctggtggtggaggaaatggaaaccaaagtcaagcatgtgataaagcaggtggaatgcatggatgaccattacgccagtcaggccctggaggagcaatggggt

SEQ ID NO: 734701 - DNA, 120 bp, Artificial Sequence
  ENSG00000198870_26 (sequence is synthesized)
aatttctgggctcaagcaatcgtcccacctcggcctccaaagtgctggggtacaggcatgtaccaccacacccataccagaactgtttaacaaaacaaatataaattacccttaattcta

SEQ ID NO: 734702 - DNA, 120 bp, Artificial Sequence
  ENSG00000198870_27 (sequence is synthesized)
cctggaggaggtaactctcagggtagttttccctctggaagagctcaatggagcatacacagactgtgttctgtaccttcttgttgagtgcctggatgaagagaaggctggagggaggga

SEQ ID NO: 734703 - DNA, 120 bp, Artificial Sequence
  ENSG00000198870_28 (sequence is synthesized)
tagagcatcagcaccagttttgcctcagctgtgaagccagcagccccaggtcatgaagggagtccatgccccaaacactcactgctaaatgcaggtgccgacaacttagaacatatgttc

SEQ ID NO: 734704 - DNA, 62 bp, Artificial Sequence
  ENSG00000198870_29 (sequence is synthesized)
agttcaagaccagcctagccaacatggggaaaccctgtctcaaccgagaggttgaggcggga

SEQ ID NO: 734705 - DNA, 120 bp, Artificial Sequence
  ENSG00000198870_30 (sequence is synthesized)
cacttgaacctgggaggcggagattgcaatgagccgagattgcaccattgcattccaccctgggtgacagagcaaaactttgtctcaaaaataaataaatattggccgggtccctaggtt

SEQ ID NO: 734706 - DNA, 120 bp, Artificial Sequence
  ENSG00000198870_31 (sequence is synthesized)
tgtctcaaaaataaataaatattggccgggtccctaggttaatctaccaataacttctttaaatattttttcttcaatataaaattattaattacagcagaaaattttaaaaatacagaa

SEQ ID NO: 734707 - DNA, 120 bp, Artificial Sequence
  ENSG00000198870_32 (sequence is synthesized)
gttccagttgagaaagtagggcagagcaactgtaactttgcccccaaggtcctgacatttagaaggggcaagaagtttagaggggtgcacagtttcttggcacgtgcctcttccaactcc

SEQ ID NO: 734708 - DNA, 120 bp, Artificial Sequence
  ENSG00000198870_33 (sequence is synthesized)
ttctacagccatccagggcacacagacacaccacctatatgggccagcctggtgggcacccaccaagatggacagcttcagtggctccagatcaacacaaagctcccgctgattggggcc

SEQ ID NO: 734709 - DNA, 120 bp, Artificial Sequence
  ENSG00000198870_34 (sequence is synthesized)
tcttcctccccacagttaatattctccacctcttctgagaagaggacctgcagggcttgtgtttcaagctgcttgcggggggccaccaaaggggatacagtgctgggcagggtgactctg

SEQ ID NO: 734710 - DNA, 120 bp, Artificial Sequence
  ENSG00000198873_0 (sequence is synthesized)
agaagcatccgaggcattaaagcatccgagggagccggaggggaggagaatggagtgacagagacacgcggagggtggggggtgggggggagcgtgttgagggaggggggaggggggaca

SEQ ID NO: 734711 - DNA, 120 bp, Artificial Sequence
  ENSG00000198873_1 (sequence is synthesized)
cggcggcggcggcggcggcggcggcggctcctctttgcagagggggaaactcttgggctgagagcaggaataatgcggtaggcaaggcgggctgctggctcccccggctccggcagcagc

SEQ ID NO: 734712 - DNA, 120 bp, Artificial Sequence
  ENSG00000198873_2 (sequence is synthesized)
cggctccggcagcagcggcggcagcccgagcagcggcagcagcagcggcagcaccccaggcgctgacagccccgccggccggctccgttgctgaccgccgactgtcaatggagctggaaa

SEQ ID NO: 734713 - DNA, 120 bp, Artificial Sequence
  ENSG00000198873_3 (sequence is synthesized)
acatcgtggccaacacggtcttgctgaaagccagggaagggggcggaggaaagcgcaaagggaaaagcaagaagtggaaagaaatcctgaagttccctcacattagccagtgtgaagacc

SEQ ID NO: 734714 - DNA, 120 bp, Artificial Sequence
  ENSG00000198873_4 (sequence is synthesized)
tccgaaggaccatagacagagattactgcagtttatgtgacaagcagccaatcgggaggctgcttttccggcagttttgtgaaaccaggcctgggctggagtgttacattcagttcctgg

SEQ ID NO: 734715 - DNA, 120 bp, Artificial Sequence
  ENSG00000198873_5 (sequence is synthesized)
actccgtggcagaatatgaagttactccagatgaaaaactgggagagaaagggaaggaaattatgaccaagtacctcaccccaaagtcccctgttttcatagcccaagttggccaagacc

SEQ ID NO: 734716 - DNA, 120 bp, Artificial Sequence
  ENSG00000198873_6 (sequence is synthesized)
tggtctcccagacggaggagaagctcctacagaagccgtgcaaagaactcttttctgcctgtgcacagtctgtccacgagtacctgaggggagaaccattccacgaatatctggacagca

SEQ ID NO: 734717 - DNA, 120 bp, Artificial Sequence
  ENSG00000198873_7 (sequence is synthesized)
tgttttttgaccgctttctccagtggaagtggttggaaaggcaaccggtgaccaaaaacactttcaggcagtatcgagtgctaggaaaagggggcttcggggaggtctgtgcctgccagg

SEQ ID NO: 734718 - DNA, 120 bp, Artificial Sequence
  ENSG00000198873_8 (sequence is synthesized)
ttcgggccacgggtaaaatgtatgcctgcaagcgcttggagaagaagaggatcaaaaagaggaaaggggagtccatggccctcaatgagaagcagatcctcgagaaggtcaacagtcagt

SEQ ID NO: 734719 - DNA, 120 bp, Artificial Sequence
  ENSG00000198873_9 (sequence is synthesized)
ttgtggtcaacctggcctatgcctacgagaccaaggatgcactgtgcttggtcctgaccatcatgaatgggggtgacctgaagttccacatctacaacatgggcaaccctggcttcgagg

SEQ ID NO: 734720 - DNA, 120 bp, Artificial Sequence
  ENSG00000198873_10 (sequence is synthesized)
aggagcgggccttgttttatgcggcagagatcctctgcggcttagaagacctccaccgtgagaacaccgtctaccgagatctgaaacctgaaaacatcctgttagatgattatggccaca

SEQ ID NO: 734721 - DNA, 120 bp, Artificial Sequence
  ENSG00000198873_11 (sequence is synthesized)
ttaggatctcagacctgggcttggctgtgaagatccccgagggagacctgatccgcggccgggtgggcactgttggctacatggctccagaggtcctgaacaaccagaggtacggcctga

SEQ ID NO: 734722 - DNA, 120 bp, Artificial Sequence
  ENSG00000198873_12 (sequence is synthesized)
gccccgactactggggccttggctgcctcatctatgagatgatcgagggccagtcgccgttccgcggccgcaaggagaaggtgaagcgggaggaggtggaccgccgggtcctggagacgg

SEQ ID NO: 734723 - DNA, 120 bp, Artificial Sequence
  ENSG00000198873_13 (sequence is synthesized)
aggaggtgtactcccacaagttctccgaggaggccaagtccatctgcaagatgctgctcacgaaagatgcgaagcagaggctgggctgccaggaggagggggctgcagaggtcaagagac

SEQ ID NO: 734724 - DNA, 120 bp, Artificial Sequence
  ENSG00000198873_14 (sequence is synthesized)
accccttcttcaggaacatgaacttcaagcgcttagaagccgggatgttggaccctcccttcgttccagacccccgcgctgtgtactgtaaggacgtgctggacatcgagcagttctcca

SEQ ID NO: 734725 - DNA, 120 bp, Artificial Sequence
  ENSG00000198873_15 (sequence is synthesized)
ctgtgaagggcgtcaatctggaccacacagacgacgacttctactccaagttctccacgggctctgtgtccatcccatggcaaaacgagatgatagaaacagaatgctttaaggagctga

SEQ ID NO: 734726 - DNA, 120 bp, Artificial Sequence
  ENSG00000198873_16 (sequence is synthesized)
acgtgtttggacctaatggtaccctcccgccagatctgaacagaaaccaccctccggaaccgcccaagaaagggctgctccagagactcttcaagcggcagcatcagaacaattccaaga

SEQ ID NO: 734727 - DNA, 120 bp, Artificial Sequence
  ENSG00000198873_17 (sequence is synthesized)
gttcgcccagctccaagaccagttttaaccaccacataaactcaaaccatgtcagctcgaactccaccggaagcagctagtttcggctctggcctccaagtccacagtggaaccagccca

SEQ ID NO: 734728 - DNA, 120 bp, Artificial Sequence
  ENSG00000198873_18 (sequence is synthesized)
gacccttctccttagaagtggaagtagtggagcccctgctctggtggggctgccaggggagaccccgggagccggggaaggaggccgtccatcccgtcgacgtagaacctcgaggtttct

SEQ ID NO: 734729 - DNA, 120 bp, Artificial Sequence
  ENSG00000198873_19 (sequence is synthesized)
caaagaaatttccactcaggtctgttttccgaggcggccccggccggggtggattggatttgtctttggtgaacattgcaatagaaatccaattggatacgacaacttgcacgtatttta

SEQ ID NO: 734730 - DNA, 120 bp, Artificial Sequence
  ENSG00000198873_20 (sequence is synthesized)
atagcgtcataactagaactgaattttgtctttatgatttttaaagaaaagttttgtaaatttctctactgtctcagtttacattttgtatatttgtatttaaatgaaagtgagactttg

SEQ ID NO: 734731 - DNA, 120 bp, Artificial Sequence
  ENSG00000198873_21 (sequence is synthesized)
agggtgtatattttctgtgcagccactgttaagccatgtgttccaaggcattttagcggggagggggttatcaaaaaaaaaaaaatgtgactcaagacttccagagcctcaaatgagaaa

SEQ ID NO: 734732 - DNA, 120 bp, Artificial Sequence
  ENSG00000198873_22 (sequence is synthesized)
atgtctttattaaatgtagaaagtgatccatacttcacctttgaaggattggttgtatttacccacatctatctctggagccatttcctcacattggtgtcacccttctgtcggcttgga

SEQ ID NO: 734733 - DNA, 120 bp, Artificial Sequence
  ENSG00000198873_23 (sequence is synthesized)
acaatctgaattaaatgttccagacacacgtgggacttccccctcccagccagaatgtcctctcctggggccctcggagtcgcctaggctgagcccttctcctcgaggggcacgccgagc

SEQ ID NO: 734734 - DNA, 120 bp, Artificial Sequence
  ENSG00000198873_24 (sequence is synthesized)
cactgtcgcacccacctctgtctgctcttccttcaggaaggcggctggcacgcggatctaggtgtttgcagcctggtgggcgatgggcctctttccttctaagcaggtcctgactgctaa

SEQ ID NO: 734735 - DNA, 120 bp, Artificial Sequence
  ENSG00000198873_25 (sequence is synthesized)
agccagtcatttgcaagaggtttgcattgggggatttttgctctatttttaacagaagcataggaccgtaaagatgtgtcatgaaaccccaagtgtcccaaagcctcggggcccacagga

SEQ ID NO: 734736 - DNA, 120 bp, Artificial Sequence
  ENSG00000198873_26 (sequence is synthesized)
gcatcgggaagtgaggcagtgcgctcatcctgacggagcagcgtcgtgtctgtagcggggagggaggctggcccaggggcccggcatgttcctgaagcgttcacagggttttgagacctt

SEQ ID NO: 734737 - DNA, 120 bp, Artificial Sequence
  ENSG00000198873_27 (sequence is synthesized)
cacagccccatcaatgtgctggcccatgtggcatggatggggtagtctctctgggcaaatgagaggcccaaggagagaccaagccaccaaagggctcaagacaaagtcactgttccttcc

SEQ ID NO: 734738 - DNA, 120 bp, Artificial Sequence
  ENSG00000198873_28 (sequence is synthesized)
ttgccagcccaggggcctctgaaggcagcccccagacccttgtagcagggctgtccatccccagggagcagctggccacctcctcctgcctcgaagaagtgaccaggggccaatctgctc

SEQ ID NO: 734739 - DNA, 120 bp, Artificial Sequence
  ENSG00000198873_29 (sequence is synthesized)
ccacctcccgtccaggacagggtgaacatttgacctcactgtcccctgcccggctgagtccctgatgtctgactgtgccacccagcagctgccagggtctctcaccatgtggaccctgcc

SEQ ID NO: 734740 - DNA, 120 bp, Artificial Sequence
  ENSG00000198873_30 (sequence is synthesized)
ctagctgcagctgcacctcctgtcaaaagtgcagactcgcaggttccaccccaaaccacagaatgggaatgcctgggagcccacccctgctgtgggctctcagcggggctttgggggtga

SEQ ID NO: 734741 - DNA, 120 bp, Artificial Sequence
  ENSG00000198873_31 (sequence is synthesized)
tcatcccaaacacatttctctggatgacgcaggcagcattggagcatgagccgtggggaggacagtcgtgagcacaccagctgtgaggcccggtttccatgcctaacccccggactctac

SEQ ID NO: 734742 - DNA, 120 bp, Artificial Sequence
  ENSG00000198873_32 (sequence is synthesized)
ccctgggtcctggggcgtaccgctaaaagggtcctggcctttgggactgatcattttgaggcccttttacaaagaaatgggggagaagaaatagctgggcttccctcaaatctttttaat

SEQ ID NO: 734743 - DNA, 120 bp, Artificial Sequence
  ENSG00000198873_33 (sequence is synthesized)
gtgcagtatttttttgttcaagaccagctcttgttttatgaggctccttccattacctttcttgggctgaatgcaaaacaaatacagccacattcaagtcttccaaggaagtagaaaact

SEQ ID NO: 734744 - DNA, 120 bp, Artificial Sequence
  ENSG00000198873_34 (sequence is synthesized)
ctttgaatggtatcttaagatccttaagctcttgctgaacttcctttttcaatgaaaagaaggaccatcatcctaggatggtcaccagcccaagccaccaccccagccacccatccagga

SEQ ID NO: 734745 - DNA, 120 bp, Artificial Sequence
  ENSG00000198873_35 (sequence is synthesized)
ggttggttccttttgcccagttcatagcagctcagtccttaccagatggattcttggtgttgggaagcagcctctttttattcctgaaaggcaatgccctgtccgtttgcagtagagaat

SEQ ID NO: 734746 - DNA, 120 bp, Artificial Sequence
  ENSG00000198873_36 (sequence is synthesized)
ccccagggagcaagaaagatgacagaagtgtggctgccgtgtttctaggtcatgagagctctggcgatactaccacaaggcctgcacgtggactctatgataacttgagtcttccatcat

SEQ ID NO: 734747 - DNA, 120 bp, Artificial Sequence
  ENSG00000198873_37 (sequence is synthesized)
gtttgccaccagccctccctgagtgcccagaggagatgggggcagagtcacttggcctactaaagcctcctgttccttctggctcatgcattgctttgtggtaagagaaaggaagtcttt

SEQ ID NO: 734748 - DNA, 120 bp, Artificial Sequence
  ENSG00000198873_38 (sequence is synthesized)
agaacagcgcctgggaatcagcccttctccctactgagtccccagtcctgtcccttccctgactcgctcctcctccaaccttggtttctatagctgcatttttttttttttttttttttg

SEQ ID NO: 734749 - DNA, 120 bp, Artificial Sequence
  ENSG00000198873_39 (sequence is synthesized)
agacaagatctcattgtgttccccaggctgaagtgcagtggcatgattctggctcactgcagcctcaaactcctgagtccaagctatcctcctgcctcagcctccgaggtagctgggacc

SEQ ID NO: 734750 - DNA, 120 bp, Artificial Sequence
  ENSG00000198873_40 (sequence is synthesized)
ataggcgtgcaccaccatactcagctaatttttaaaattttttgtagagatggggggggggtctccccatgttgcccaggctggcctcgaattcctgagcccaagctatcctcctgcctc

SEQ ID NO: 734751 - DNA, 120 bp, Artificial Sequence
  ENSG00000198873_41 (sequence is synthesized)
agcctcccaaagtgctgaggttataggtgtgagccactgtccctggcctatacggtcattttttaaaagatattttaaaattaaaagcaaacaacactgtccacccatctacctgtccag

SEQ ID NO: 734752 - DNA, 120 bp, Artificial Sequence
  ENSG00000198873_42 (sequence is synthesized)
gataaggcatatttggacggtgaacggatttactctcgttcatgcatttgagcgcttcacagaagagtctttcttgctccaggcatgacattttttttcaccagacgttcactgacttcg

SEQ ID NO: 734753 - DNA, 120 bp, Artificial Sequence
  ENSG00000198873_43 (sequence is synthesized)
tgactttgaggtgagacatgggatctctcagaagcgtctctgcatctgcatttcaggagatgagctgctgtccctggtggacagaggcggtctctgccatggtcaccatgatgccctaca

SEQ ID NO: 734754 - DNA, 120 bp, Artificial Sequence
  ENSG00000198873_44 (sequence is synthesized)
agtgtttattgagtcccctggggggcacccagaataccacccaaaatagcaagaagacccggtccccgccttgcggacgatgcactcacatgccacagcaacccattctcgcctcttcct

SEQ ID NO: 734755 - DNA, 120 bp, Artificial Sequence
  ENSG00000198873_45 (sequence is synthesized)
tggccgggaacccggggctctagggctgctcgctgctgctgtggcctgcgcagccacgggaggcttcctgaaaggcattgctcggaggggcgggggcggggaggcctagcctgccccaca

SEQ ID NO: 734756 - DNA, 120 bp, Artificial Sequence
  ENSG00000198873_46 (sequence is synthesized)
gacacagctgtgaggcctgggtcatacacataccagcaagcagctgccgagacaaatggtggtgggaagtcctgggaacacacacagcctttgcattgacagcacaagtaggatcagagc

SEQ ID NO: 734757 - DNA, 120 bp, Artificial Sequence
  ENSG00000198873_47 (sequence is synthesized)
ccaggtgagcccctgaggataccgaggccttccctccctgaggcccgcaagtctccatgcgtctcccgggagcctggccccgctgcagaaatcccttctcttcctccacaccctgtcctt

SEQ ID NO: 734758 - DNA, 120 bp, Artificial Sequence
  ENSG00000198873_48 (sequence is synthesized)
tccccaaaggctcgtgttatcagttccagctacccatcgactttcccaccgagccgctgccctcaaaacggagggggcaccgcagcctccttgagcctggcatcccaggccttgccaaag

SEQ ID NO: 734759 - DNA, 120 bp, Artificial Sequence
  ENSG00000198873_49 (sequence is synthesized)
gggacggtggcttcctggataattggaaatctctgagaagaagaggaaacacctgagtgacactcagctgtcctctggggtcccctggtgtgcatgcacgtcctcctgaatacctgtact

SEQ ID NO: 734760 - DNA, 120 bp, Artificial Sequence
  ENSG00000198873_50 (sequence is synthesized)
tccaagaggtggtctcctgttttcataacccaacactctgagataggatcttccaactttttagccccggctgtggaaagatagtgagtatgaagtctttgtgcatttggaagtgacatc

SEQ ID NO: 734761 - DNA, 120 bp, Artificial Sequence
  ENSG00000198873_51 (sequence is synthesized)
gctgtgtggattatgaatacagagagctgccatcttcctgatcacaatagaccacgattgcaaagcctcctctcccagagaccccttctgcgcctgccctccccacccaccacccagctg

SEQ ID NO: 734762 - DNA, 120 bp, Artificial Sequence
  ENSG00000198873_52 (sequence is synthesized)
ttgaagctcagcgtgtgcaagtcagaccctgcacaggccgggggtgtctcacctggcctaaacgtaaaggcttgtgccggagacagtgattgaaaacatttgaaaagccagctctccctg

SEQ ID NO: 734763 - DNA, 120 bp, Artificial Sequence
  ENSG00000198873_53 (sequence is synthesized)
gcagagaaagacacttcccccccaaagtggaatttagatgtctttccctagtccatcaagaagtcatttttgtaacagtccctaagcgagtgttctcaattagaagagtttagtggcttt

SEQ ID NO: 734764 - DNA, 120 bp, Artificial Sequence
  ENSG00000198873_54 (sequence is synthesized)
tggtgttgttaaaataataagaatccttctagcatccaaagctttctaatttttttcagggagatttggacattaatgaatggaaacttccacagtggcggtcactcctgaaggcagcgg

SEQ ID NO: 734765 - DNA, 120 bp, Artificial Sequence
  ENSG00000198873_55 (sequence is synthesized)
cttctgttctcccgctgctgtaactctgtgtgttccgtctatcgcgtcacagtgccgctggatctagatggagccactgttgttgtttttaaaagagaaataaattccttaatggaagta

SEQ ID NO: 734766 - DNA, 120 bp, Artificial Sequence
  ENSG00000198873_56 (sequence is synthesized)
catcatctgaggtggacaggaagcccagccaagccactggggccgacccctcccctggactcacctgcatctgagccacacaccctccagccactacccatagcagttctgggggtgtgt

SEQ ID NO: 734767 - DNA, 120 bp, Artificial Sequence
  ENSG00000198873_57 (sequence is synthesized)
cctgggaagactcccttctgctccccaaaaccccaaggcctggctcggggccactggagccgcaggcgggacatatgtgtgaccggccctctgcccctggcagccccgcgctgtgtactg

SEQ ID NO: 734768 - DNA, 120 bp, Artificial Sequence
  ENSG00000198874_0 (sequence is synthesized)
ctggcagtgtcatggctgcccacaggtctgcaggcactcggtacgccgctaacgcggcgaggtagctcggtgcgtctcgcggtaccagtgcgaatcatcgggctatccaggtccgagatc

SEQ ID NO: 734769 - DNA, 120 bp, Artificial Sequence
  ENSG00000198874_1 (sequence is synthesized)
ctagtctcctgtcggctctgaggaggatggatccttctgcggatacatgggacctcttctcacctttaatatcattatggataaacaggttttacatttatttgggctttgctgttagca

SEQ ID NO: 734770 - DNA, 120 bp, Artificial Sequence
  ENSG00000198874_2 (sequence is synthesized)
ttagcctttggatttgtgtccagattgtcatcaagacgcagggcaagaacttacaggaaaaatctgttccaaaagcagctcaggatttgatgacaaatggttatgtctcccttcaagaga

SEQ ID NO: 734771 - DNA, 120 bp, Artificial Sequence
  ENSG00000198874_3 (sequence is synthesized)
aagacatctttgtgtctggagtgaagattttttatggttctcagactggaacagcgaagggattcgcaacagttcttgctgaagcagttacatccctggatctgcctgtggccattatta

SEQ ID NO: 734772 - DNA, 120 bp, Artificial Sequence
  ENSG00000198874_4 (sequence is synthesized)
atctaaaagaatatgatccagatgatcatctgatagaagaggtgactagtaaaaatgtctgtgtcttcctggttgcgacatacactgacggcctaccaactgaaagtgcagagtggttct

SEQ ID NO: 734773 - DNA, 120 bp, Artificial Sequence
  ENSG00000198874_5 (sequence is synthesized)
gcaaatggttagaggaagcatccattgattttcgatttggcaaaacttacctgaagggtatgagatatgcggtatttggcctgggaaattctgcctatgctagccacttcaacaaggttg

SEQ ID NO: 734774 - DNA, 120 bp, Artificial Sequence
  ENSG00000198874_6 (sequence is synthesized)
gcaaaaatgttgacaagtggctctggatgcttggcgcgcatcgtgtgatgagtcgaggggagggcgactgcgacgtggttaaaagcaagcacggcagcattgaggccgacttcagagcat

SEQ ID NO: 734775 - DNA, 120 bp, Artificial Sequence
  ENSG00000198874_7 (sequence is synthesized)
ggaagaccaagttcatctcccagctgcaggcacttcagaaaggggagagaaagaagtcctgtggcggccactgcaagaaaggcaaatgtgaatctcaccaacatggctcagaggagaggg

SEQ ID NO: 734776 - DNA, 120 bp, Artificial Sequence
  ENSG00000198874_8 (sequence is synthesized)
aggaaggatctcatgagcaggatgaattgcatcatagagacaccgaggaggaagaaccctttgagagctccagtgaagaagagtttggtggtgaggaccatcagagcctaaattccattg

SEQ ID NO: 734777 - DNA, 120 bp, Artificial Sequence
  ENSG00000198874_9 (sequence is synthesized)
ttgatgttgaagatttgggcaaaattatggatcatgtgaagaaagaaaagagagaaaaggaacagcaggaagagaagtctggtttgttcaggaacatggggaggaatgaagatggtgaaa

SEQ ID NO: 734778 - DNA, 120 bp, Artificial Sequence
  ENSG00000198874_10 (sequence is synthesized)
gaagagctatgataactcctgctctccgagaagcccttactaaacaaggttatcagttgattgggagccactcgggggtgaagctttgcaggtggacaaagtccatgctccgagggagag

SEQ ID NO: 734779 - DNA, 120 bp, Artificial Sequence
  ENSG00000198874_11 (sequence is synthesized)
gaggttgttacaaacacacattctatggaattgagagccatcgctgcatggaaaccaccccgagcttggcgtgtgctaataaatgtgtcttctgttggcggcaccacaccaaccccgtgg

SEQ ID NO: 734780 - DNA, 120 bp, Artificial Sequence
  ENSG00000198874_12 (sequence is synthesized)
gcactgagtggcggtggaagatggaccagcctgaaatgatcttgaaggaagccattgaaaaccatcagaacatgattaagcagtttaaaggagtaccgggcgtcaaagcagaacgctttg

SEQ ID NO: 734781 - DNA, 120 bp, Artificial Sequence
  ENSG00000198874_13 (sequence is synthesized)
accagtgtaaaatttccagcttcctggtcacaaacgcacaatttcctgcggaaatcaggaacctcgagccggttactcagctgtatgtcagtgtggatgccagtaccaaagacagcctga

SEQ ID NO: 734782 - DNA, 120 bp, Artificial Sequence
  ENSG00000198874_14 (sequence is synthesized)
agaaaatcgaccgcccactcttcaaggatttctggcagagattccttgacagtttaaaagccttggcagtcaagcaacaacgaactgtctacagactgacgctcgtgaaagcatggaacg

SEQ ID NO: 734783 - DNA, 120 bp, Artificial Sequence
  ENSG00000198874_15 (sequence is synthesized)
tggacgagctccaggcctacgcgcagctcgtgtccctggggaatcctgacttcatcgaagtgaagggcgttacctactgcggagaaagttcagcaagcagtcttaccatggcccacgtgc

SEQ ID NO: 734784 - DNA, 120 bp, Artificial Sequence
  ENSG00000198874_16 (sequence is synthesized)
cctggcatgaggaagtggtacagtttgtccacgagttggtggatctgatccccgaatatgaaattgcatgtgaacacgaacactctaattgcctcctgatagcacacagaaagtttaaaa

SEQ ID NO: 734785 - DNA, 120 bp, Artificial Sequence
  ENSG00000198874_17 (sequence is synthesized)
ttggtggtgaatggtggacatggatcgattataaccgcttccaggagctcatccaggaatatgaagatagtggtggatcaaaaacgttcagcgcaaaggattatatggccagaactcctc

SEQ ID NO: 734786 - DNA, 120 bp, Artificial Sequence
  ENSG00000198874_18 (sequence is synthesized)
actgggcattatttggtgccagtgaaagaggctttgatcccaaggacacaagacatcagagaaagaacaaatcaaaggctatttctggatgttgagattatctgatttcaaggtactgaa

SEQ ID NO: 734787 - DNA, 120 bp, Artificial Sequence
  ENSG00000198874_19 (sequence is synthesized)
ggacaaaaacttggatggcctcaaaaggttcttgaacaccactgtgattctccaaggacgaattacgtaaattatactttcatacaaaggagacgataaggcagtaaacatggagacacg

SEQ ID NO: 734788 - DNA, 120 bp, Artificial Sequence
  ENSG00000198874_20 (sequence is synthesized)
ggggacagcgtccacactcagagggcctgggccacagccccgatgtttcttttcagaactcagcccctttcctgattttacttctaagaggaaaattattttggggaggaactacacagt

SEQ ID NO: 734789 - DNA, 120 bp, Artificial Sequence
  ENSG00000198874_21 (sequence is synthesized)
cgtgattagaatttatctgatggttttgtattataacttgtaagacctgccagaatgctagtcccgagagtgtcagacaaggaagaagtccctgggcctcttccccttacccggccctta

SEQ ID NO: 734790 - DNA, 120 bp, Artificial Sequence
  ENSG00000198874_22 (sequence is synthesized)
gatttcatggagcagccacttagcattgaattgcactaccctgagctaaacgtgtctgtgctttctaagataagagcttgatccctttcttctatcttaagacagcacctcctgaaaaga

SEQ ID NO: 734791 - DNA, 120 bp, Artificial Sequence
  ENSG00000198874_23 (sequence is synthesized)
atcgaagttgtcacaactctcaattattttttaaatactgcatagattgagttttggtttattaccaacccttcccagaattgcgttggatctaaaactactagatctcatcccattccc

SEQ ID NO: 734792 - DNA, 120 bp, Artificial Sequence
  ENSG00000198874_24 (sequence is synthesized)
atgtaaattaccacagaccgcagtaccggggctggagcggagtgaagctgtctgctgtaagaggagtggccatgtgagggcatggagtcattagtctcacaaacacactttggactgaag

SEQ ID NO: 734793 - DNA, 120 bp, Artificial Sequence
  ENSG00000198874_25 (sequence is synthesized)
aggatcatttctttttgttcgtgaggtcactgtccaggcctctcatatcatgaccagacggcgggtctccatcttctttcactcctgtggccctggctgctttacacaatctgttctata

SEQ ID NO: 734794 - DNA, 120 bp, Artificial Sequence
  ENSG00000198874_26 (sequence is synthesized)
aggttcaggtgttttcaagttggaaagatcataaatactcaaaattgttttcaagttagcaagttcttttaacagtcttttatgcaaaaattgaattaataaaataatcttttgtaaaga

SEQ ID NO: 734795 - DNA, 120 bp, Artificial Sequence
  ENSG00000198874_27 (sequence is synthesized)
ctgatgcgaatttcctgcgtcatgcagttaccagtaggagtattcatggttacgaaacacatggtttctcttaaaaatgatgccttggtggtttgtttctgtgctttgacaattttattc

SEQ ID NO: 734796 - DNA, 120 bp, Artificial Sequence
  ENSG00000198874_28 (sequence is synthesized)
atttcctccccggccaacaccccagcctggcccattcactcgacttgggcagagacaggccgcctcggaggtgacggctcaggcccaggcccaggcccgagggagggggctactcacacg

SEQ ID NO: 734797 - DNA, 120 bp, Artificial Sequence
  ENSG00000198874_29 (sequence is synthesized)
ccgctccgccagccgacgaccttgtttttgtagcaggcgatttcgaagcgcttcccggcacgcttcatccgtaccacggccacattggttaggcggatctggttggtgggggtgaagatc

SEQ ID NO: 734798 - DNA, 120 bp, Artificial Sequence
  ENSG00000198876_0 (sequence is synthesized)
gttctagccgctcgccgtccttgcaggctctgccgtcggaaagccgctcattctcgcttccccttccctttcccggctcaagtccttcctctctctttcctttctttccgcctatctttt

SEQ ID NO: 734799 - DNA, 120 bp, Artificial Sequence
  ENSG00000198876_1 (sequence is synthesized)
ttctgctgccgctccgggtccgggccattttccgggccgggcgcactaaggtgcgcggccccggggcccagtatatgacccgccgtcctgctatccttcgcttcccccgccccatgtggc

SEQ ID NO: 734800 - DNA, 120 bp, Artificial Sequence
  ENSG00000198876_2 (sequence is synthesized)
tgcggggccgcggcggcgctgcccactatggcccggaaagtagttagcaggaagcggaaagcgcccgcctcgccgggagctgggagcgacgctcagggcccgcagtttggctgggatcac

SEQ ID NO: 734801 - DNA, 120 bp, Artificial Sequence
  ENSG00000198876_3 (sequence is synthesized)
tcgcttcacaaaaggaaaagacttcctcctgtgaagagatccttagtatactacttgaagaaccgggaagtcaggctacagaatgaaaccagctactctcgagtgttgcatggttatgca

SEQ ID NO: 734802 - DNA, 120 bp, Artificial Sequence
  ENSG00000198876_4 (sequence is synthesized)
gcacagcaacttcccagtctcctgaaggagagagagtttcaccttgggacccttaataaagtgtttgcatctcagtggttgaatcataggcaagtggtgtgtggcacaaaatgcaacacg

SEQ ID NO: 734803 - DNA, 120 bp, Artificial Sequence
  ENSG00000198876_5 (sequence is synthesized)
ctatttgtcgtagatgtccagacaagccagatcaccaagatccccattctgaaagaccgggagcctggaggtgtgacccagcagggctgtggtatccatgccatcgagctgaatccttct

SEQ ID NO: 734804 - DNA, 120 bp, Artificial Sequence
  ENSG00000198876_6 (sequence is synthesized)
agaacactgctagccactggaggagacaaccccaacagtcttgccatctatcgactacctacgctggatcctgtgtgtgtaggagatgatggacacaaggactggatcttttccatcgca

SEQ ID NO: 734805 - DNA, 120 bp, Artificial Sequence
  ENSG00000198876_7 (sequence is synthesized)
tggatcagcgacactatggcagtgtctggctcacgtgatggttctatgggactctgggaggtgacagatgatgttttgaccaaaagtgatgcgagacacaatgtgtcacgggtccctgtg

SEQ ID NO: 734806 - DNA, 120 bp, Artificial Sequence
  ENSG00000198876_8 (sequence is synthesized)
tatgcacacatcactcacaaggccttaaaggacatccccaaagaagacacaaaccctgacaactgcaaggttcgggctctggccttcaacaacaagaacaaggaactgggagcagtgtct

SEQ ID NO: 734807 - DNA, 120 bp, Artificial Sequence
  ENSG00000198876_9 (sequence is synthesized)
ctggatggctactttcatctctggaaggctgaaaatacactatctaagctcctctccaccaaactgccatattgccgtgagaatgtgtgtctggcttatggtagtgaatggtcagtttat

SEQ ID NO: 734808 - DNA, 120 bp, Artificial Sequence
  ENSG00000198876_10 (sequence is synthesized)
gcagtgggctcccaagctcatgtctccttcttggatccacggcagccatcatacaacgtcaagtctgtctgttccagggagcgaggcagtggaatccggtcagtgagtttctacgagcac

SEQ ID NO: 734809 - DNA, 120 bp, Artificial Sequence
  ENSG00000198876_11 (sequence is synthesized)
atcatcactgtgggaacagggcagggctccctgctgttctatgacatccgagctcagagatttctggaagagaggctctcagcttgttatgggtccaagcccagactagcaggggagaat

SEQ ID NO: 734810 - DNA, 120 bp, Artificial Sequence
  ENSG00000198876_12 (sequence is synthesized)
ctgaaactaaccactggcaaaggctggctgaatcatgatgaaacctggaggaattacttttcagacattgacttcttccccaatgctgtttacacccactgctacgactcgtctggaacg

SEQ ID NO: 734811 - DNA, 120 bp, Artificial Sequence
  ENSG00000198876_13 (sequence is synthesized)
aaactctttgtggcaggaggtcccctcccttcagggctccatggaaactatgctgggctctggagttaatgacaactccccaaatgcagagatttacactaacttccattctcagtttcc

SEQ ID NO: 734812 - DNA, 120 bp, Artificial Sequence
  ENSG00000198876_14 (sequence is synthesized)
atctgaaagttgttttgctttttgttttcccctttggtaatcaaaattttactatcttttattatttctggcttttcaaccaaacattgttgctaatccctatttttctttaagtgacac

SEQ ID NO: 734813 - DNA, 120 bp, Artificial Sequence
  ENSG00000198876_15 (sequence is synthesized)
acattctcctgtctctggcttcttcaggctgaaatgacatagctcacccttacttcactcttgagaggtagggctcctttataattacatggttgctctcagactttctgtgaaagtttg

SEQ ID NO: 734814 - DNA, 120 bp, Artificial Sequence
  ENSG00000198876_16 (sequence is synthesized)
ggagctgtgtgtgtctgtgtgtgtgtgagagagagatcttgtctgcgtgtgtgtgtgtgatcttgtgtgcctgtaggtactgtgtgtcactgaaattacctggagtgaggattacttgta

SEQ ID NO: 734815 - DNA, 120 bp, Artificial Sequence
  ENSG00000198876_17 (sequence is synthesized)
attaaaatatttataaaagaaacaactttattcacagagtccagctttgggactagtctgtatcttgttttttaagtctaacaacactgataataggaagtaaaaacagaaaggaaaaga

SEQ ID NO: 734816 - DNA, 120 bp, Artificial Sequence
  ENSG00000198876_18 (sequence is synthesized)
aattaccactgggaaaatctttttagttagattgtaggcttcctggggcctcccatgccaggactgcaaagtgatccagccctacctgtcttcccacctgtgtgtcccccgtgtgggaag

SEQ ID NO: 734817 - DNA, 120 bp, Artificial Sequence
  ENSG00000198876_19 (sequence is synthesized)
ttggtgtcacttccccttcccaccctcacatctgcttagccagtagccacacccctaaaacatcagactcaccatccaggtgcagctccagaggctacaaaaggcttcatgggacttgaa

SEQ ID NO: 734818 - DNA, 120 bp, Artificial Sequence
  ENSG00000198876_20 (sequence is synthesized)
tccccatcctagcttctctctccttcccctcaagacctgatctggttttaaggggcctggagctgggagtctcaagtctgctaagattcacatccatagcccccatggctttgaggagaa

SEQ ID NO: 734819 - DNA, 120 bp, Artificial Sequence
  ENSG00000198876_21 (sequence is synthesized)
tcctctctgccattcttccaatctccccagtgggttttgctattattttctaaattgggttaagtctaagaaggtgggggtgagcagggggtttatctgtgtgtagtgagtgcttcatgt

SEQ ID NO: 734820 - DNA, 120 bp, Artificial Sequence
  ENSG00000198876_22 (sequence is synthesized)
gtggaatattcattttcttactgcagtgggacttggggttgaagccacccctcctactctgttggcttagccctgagatggtgacaggctggcctgcagtcagcatcattgtgcatgtga

SEQ ID NO: 734821 - DNA, 120 bp, Artificial Sequence
  ENSG00000198876_23 (sequence is synthesized)
cagcatcaatgtgattagtaatttgtctgttcctcccttgaactgtctgtttagtctgaggtttttaaacttgcaggcagctgactgtgatgtccacttgttccctgatttttacacatc

SEQ ID NO: 734822 - DNA, 120 bp, Artificial Sequence
  ENSG00000198876_24 (sequence is synthesized)
atgtcaaagataacagctgttcccacccaccagttcctctaagcacatactctgcttttctgtcaacatcccattttggggaaaggaaaagtcatatttattcctgcaccccagtttttt

SEQ ID NO: 734823 - DNA, 120 bp, Artificial Sequence
  ENSG00000198876_25 (sequence is synthesized)
aacttgttctcccagttgtccccctcttctctgggtgtaagaagggaaattggaaaaaaaattatatatatattctccttttaatggtggggggctactggagaggagagacagcaagtc

SEQ ID NO: 734824 - DNA, 120 bp, Artificial Sequence
  ENSG00000198876_26 (sequence is synthesized)
caccctaacttgttacacagcacataccacaggttctggaattctcatcttcgaacctagagaaataggtgctataaacagggaattaagcaaaatgctggatgctatagatcttttaat

SEQ ID NO: 734825 - DNA, 120 bp, Artificial Sequence
  ENSG00000198876_27 (sequence is synthesized)
tgtcttaattttttttctattattaaactacaggctgtagatttcttagttctcacagaacttctatcattttaaactgacttgtatatttaaaaaaaaaatcttcagtaggatgttttg

SEQ ID NO: 734826 - DNA, 120 bp, Artificial Sequence
  ENSG00000198876_28 (sequence is synthesized)
tactattgctagaccctcttctgtaatgggtaatgcgtttgattgtttgagattttctgtttttaaaaatgtagcacttgactttttgccaaggaaaaaaataaaaattattccagtgca

SEQ ID NO: 734827 - DNA, 120 bp, Artificial Sequence
  ENSG00000198876_29 (sequence is synthesized)
gggagccaggtctggctccttggactgtatcttccgtgctccagtgggagtacagactgagagggagaagggggctgggtagagatgcagcccatgtcggtatgggaatcactctacctc

SEQ ID NO: 734828 - DNA, 120 bp, Artificial Sequence
  ENSG00000198876_30 (sequence is synthesized)
tggaaatctaaagggaatggtgaagttgcaccgtaaggggaaggtgactgaggagctgaaactgactgaggggctgaagcatttcggacaggagaaaggatcaggaggagacagagcgga

SEQ ID NO: 734829 - DNA, 120 bp, Artificial Sequence
  ENSG00000198876_31 (sequence is synthesized)
tgccctggaacgattcccagaaacaacctgaatagttgaaacagcctaccaagaaaggccttggcctttccagctacttctgattatttattccagatttaccttttccccaacctatct

SEQ ID NO: 734830 - DNA, 120 bp, Artificial Sequence
  ENSG00000198876_32 (sequence is synthesized)
ccttcagtatctaggtcttaccgtttattaacattcacctcctctttctcctgtatacctaggggtggaacagagtgttatttctgtaatcagggcttgattttatgtggcttttatatg

SEQ ID NO: 734831 - DNA, 120 bp, Artificial Sequence
  ENSG00000198876_33 (sequence is synthesized)
tgatgatgcatccctggaagacctgggagccaggtctggctccttggactgtatcttccgtgctccagtgggagtacagactgagagggagaagggggctgggtagagatgcagcccatg

SEQ ID NO: 734832 - DNA, 120 bp, Artificial Sequence
  ENSG00000198879_0 (sequence is synthesized)
cgccttgtgtgtgctggatcctgcgcgggtagatccccgagtaattttttctgcaggatgaattaagagaagagacacttgctcatcaggcatggagagcactttgtcagcttccaatat

SEQ ID NO: 734833 - DNA, 120 bp, Artificial Sequence
  ENSG00000198879_1 (sequence is synthesized)
gcaagacccttcatcttcacccttggaaaagtgtctcggctcagctaatggaaatggagaccttgattctgaagaaggctcaagcttggaggaaactggctttaactggggagaatattt

SEQ ID NO: 734834 - DNA, 120 bp, Artificial Sequence
  ENSG00000198879_2 (sequence is synthesized)
ggaagagacaggagcaagtgctgctccccacacatcattcaaacacgttgaaatcagcattcagagcaacttccagccaggaatgaaattggaagtggctaataagaacaacccggacac

SEQ ID NO: 734835 - DNA, 120 bp, Artificial Sequence
  ENSG00000198879_3 (sequence is synthesized)
gtactgggtggccacgatcattaccacgtgcgggcagctgctgcttctgcgctactgcggttacggggaggaccgcagggccgacttctggtgtgacgtagtcatcgcggatttgcaccc

SEQ ID NO: 734836 - DNA, 120 bp, Artificial Sequence
  ENSG00000198879_4 (sequence is synthesized)
cgtggggtggtgcacacagaacaacaaggtgttgatgccgccggacgcaatcaaagagaagtacacagactggacagaatttctcatacgtgacttgactggttcgaggacagcacccgc

SEQ ID NO: 734837 - DNA, 120 bp, Artificial Sequence
  ENSG00000198879_5 (sequence is synthesized)
caacctcctggaaggtcctctgcgagggaaaggccctatagacctcattacagttggttccttaatagaacttcaggattcccagaacccttttcagtactggatagttagtgtgattga

SEQ ID NO: 734838 - DNA, 120 bp, Artificial Sequence
  ENSG00000198879_6 (sequence is synthesized)
aaatgttggaggaagattacgccttcgctatgtgggattggaggacactgaatcctatgaccagtggttgttttacttggattacagacttcgaccagttggttggtgtcaagagaataa

SEQ ID NO: 734839 - DNA, 120 bp, Artificial Sequence
  ENSG00000198879_7 (sequence is synthesized)
atacagaatggacccaccttcagaaatctatcctttgaagatggcctctgaatggaaatgtactctggaaaaatcccttattgatgctgccaaatttcctcttccaatggaagtgtttaa

SEQ ID NO: 734840 - DNA, 120 bp, Artificial Sequence
  ENSG00000198879_8 (sequence is synthesized)
ggatcacgcagatttgcgaagccatttcttcacagttgggatgaagcttgagacagtgaatatgtgcgagcccttttacatctctcctgcgtcggtgactaaggtttttaacaatcactt

SEQ ID NO: 734841 - DNA, 120 bp, Artificial Sequence
  ENSG00000198879_9 (sequence is synthesized)
ttttcaagtgactattgatgacctaagacctgaaccaagtaaactgtcaatgctgtgccatgcagattctttggggattttgccagtacagtggtgccttaaaaatggagtcagcctcac

SEQ ID NO: 734842 - DNA, 120 bp, Artificial Sequence
  ENSG00000198879_10 (sequence is synthesized)
tcctcccaaaggttactctggccaggacttcgactgggcagattatcacaagcagcatggggcgcaggaagcccctcccttctgcttccgaaatacatcattcagtcgaggtttcacaaa

SEQ ID NO: 734843 - DNA, 120 bp, Artificial Sequence
  ENSG00000198879_11 (sequence is synthesized)
gaacatgaaacttgaagctgtgaaccccaggaatccaggagaactgtgtgtggcctccgttgtgagtgtgaaggggcggctaatgtggcttcacctggaagggctgcagactcctgttcc

SEQ ID NO: 734844 - DNA, 120 bp, Artificial Sequence
  ENSG00000198879_12 (sequence is synthesized)
agaggtcattgttgatgtggaatccatggacatcttcccagtgggctggtgtgaagccaattcttatcctttgactgcaccacacaaaacagtctcacaaaagaagagaaagattgcagt

SEQ ID NO: 734845 - DNA, 120 bp, Artificial Sequence
  ENSG00000198879_13 (sequence is synthesized)
cgtgcaaccagagaaacaattgccgcccacagtgcctgttaagaaaatacctcatgacctttgtttattccctcacctggacaccacaggaaccgtcaacgggaaatactgctgtcctca

SEQ ID NO: 734846 - DNA, 120 bp, Artificial Sequence
  ENSG00000198879_14 (sequence is synthesized)
gctcttcatcaaccacaggtgtttctcaggcccttacctgaacaaaggaaggattgcagagctacctcagtcggtgggaccgggcaaatgcgtgctggttcttaaagaggttcttagcat

SEQ ID NO: 734847 - DNA, 120 bp, Artificial Sequence
  ENSG00000198879_15 (sequence is synthesized)
gataatcaacgcagcctacaagcctggaagggtattaagagaattacagctggtagaagatccccactggaatttccaggaagagacgctgaaggccaaatacagaggcaaaacatacag

SEQ ID NO: 734848 - DNA, 120 bp, Artificial Sequence
  ENSG00000198879_16 (sequence is synthesized)
ggctgtggtcaaaatcgtacggacatctgaccaagtcgcaaatttctgccgccgagtctgtgccaagctagagtgctgtccaaatttgtttagtcctgtgctgatatctgaaaactgccc

SEQ ID NO: 734849 - DNA, 120 bp, Artificial Sequence
  ENSG00000198879_17 (sequence is synthesized)
agagaactgctccattcataccaaaaccaaatacacctattactatggaaagagaaagaagatctccaagccccccatcggggaaagcaaccccgacagcggacaccccaaacccgccag

SEQ ID NO: 734850 - DNA, 120 bp, Artificial Sequence
  ENSG00000198879_18 (sequence is synthesized)
gcggaggaagcgacggaaatccattttcgtgcagaagaaacggaggtcttctgccgtggacttcaccgcgggctcgggggaggaaagtgaagaggaggacgctgacgccatggacgatga

SEQ ID NO: 734851 - DNA, 120 bp, Artificial Sequence
  ENSG00000198879_19 (sequence is synthesized)
caccgccagtgaggagaccggctccgagctccgggatgaccagacggacacctcgtcggcggaggtgccctcggcccggccccggagggccgtcaccctgcggagcggctcagagcccgt

SEQ ID NO: 734852 - DNA, 120 bp, Artificial Sequence
  ENSG00000198879_20 (sequence is synthesized)
gcgccggccacccccagagaggacacgaaggggccgcggggcgccggctgcctcctcagcagaggaaggggagaagtgcccgccgaccaagcccgaggggacagaggacacgaaacagga

SEQ ID NO: 734853 - DNA, 120 bp, Artificial Sequence
  ENSG00000198879_21 (sequence is synthesized)
ggaggaggagagactggttctggagagcaacccgttggagtggacggtcaccgacgtggtgaggttcattaagctgacagactgtgcccccttggccaagatatttcaggagcaggatat

SEQ ID NO: 734854 - DNA, 120 bp, Artificial Sequence
  ENSG00000198879_22 (sequence is synthesized)
tgacggccaagcactcctgcttctgacccttccgacggtgcaggagtgcatggagctgaagctggggcctgccatcaagttatgccaccagatcgagagagtcaaagtggctttctacgc

SEQ ID NO: 734855 - DNA, 120 bp, Artificial Sequence
  ENSG00000198879_23 (sequence is synthesized)
ccagtacgccaactgagtctgccctcgggaggtggcccattattgctgggatgcggtgttggtaaaggtttccaggactgaaactttgattttccgggatatgttaaatggtacagccac

SEQ ID NO: 734856 - DNA, 120 bp, Artificial Sequence
  ENSG00000198879_24 (sequence is synthesized)
taagtatcaccagaaaaccagaagcccaggatcttctgcctccgccagcctgtgagctgtttccatgttttcaaagcacagcagcagtcgcttctggggagtgccagttaaagtcatgca

SEQ ID NO: 734857 - DNA, 120 bp, Artificial Sequence
  ENSG00000198879_25 (sequence is synthesized)
tcagaccctgccagacgtgggcctgcttcttggctcacccacgttttgcctttctcctgccccaaatcaggcagctcccttggagcagggtttcctcagatgaggactgcattctttgaa

SEQ ID NO: 734858 - DNA, 120 bp, Artificial Sequence
  ENSG00000198879_26 (sequence is synthesized)
aacaaagaatgtcgccaaggaagaaacctcacgccatgctgtagtgtttcctgtaatcacacgagcacatttatatatgcagtttcccatggataggcgtgtgaccctggttgagtggca

SEQ ID NO: 734859 - DNA, 120 bp, Artificial Sequence
  ENSG00000198879_27 (sequence is synthesized)
cttgcggtttcatcttggtggcaactcctttgcaatgcagctggcagcgacatccttataaaaacatgtgctaaagctctgtcctctgttagaggtgccttttaggaatacggggagtga

SEQ ID NO: 734860 - DNA, 120 bp, Artificial Sequence
  ENSG00000198879_28 (sequence is synthesized)
ggaatacggggagtgaaggaaggccggcaggcatctccatgcaactagatggtttgtttgtttgtttgtttgtttgttgttcattttgttgtgttttttgagacagggtcttgctctgtc

SEQ ID NO: 734861 - DNA, 120 bp, Artificial Sequence
  ENSG00000198879_29 (sequence is synthesized)
ccggcccaactggatggtttttgattgaagcctagaacatctgtagagacaaactctacccagtcttttctagaccctcaactatctccagtgttgttgtttaatcgtagccggatcagg

SEQ ID NO: 734862 - DNA, 120 bp, Artificial Sequence
  ENSG00000198879_30 (sequence is synthesized)
gagtgagtcttttaggcaaatgttggattatatatcaaaggaaaagcttagtttcagagaggaggaagggaaagagatgtgagggaagcatttcatcaaccagctacgtcccccttagaa

SEQ ID NO: 734863 - DNA, 120 bp, Artificial Sequence
  ENSG00000198879_31 (sequence is synthesized)
atcactgcagcaggtcaccgagcaggagtccctctgagcgtcccttctgtctcgttctgccctagctggcagcatatgaaccaggcatgatgcagcaggagcagtgaatctggagtcagc

SEQ ID NO: 734864 - DNA, 120 bp, Artificial Sequence
  ENSG00000198879_32 (sequence is synthesized)
cacttggcaccctggtttcgctgagaacaaactctgagatcttgggtgacttctcatcactctggacctccattcctgtgaagtgacaggtgtggaccctgagggtgcggtggtgagcac

SEQ ID NO: 734865 - DNA, 120 bp, Artificial Sequence
  ENSG00000198879_33 (sequence is synthesized)
actgtctcctgctggcattcaccccactcatgctggaaaggaagatccagatcgtacaaaaattagaaaaagaaagaataagaagggtctggtcccagttctgactcggccattcttaca

SEQ ID NO: 734866 - DNA, 120 bp, Artificial Sequence
  ENSG00000198879_34 (sequence is synthesized)
gctctttctggctttgagtttgcttgtggaatttcctgggcagttgtgttaaatccgccaggtcacgtgcagacaaagctgtggctgcgagagttggctggcctcttggaccagaagcca

SEQ ID NO: 734867 - DNA, 120 bp, Artificial Sequence
  ENSG00000198879_35 (sequence is synthesized)
tctccatatcctcatgagcgattccatatctccactcagaccctgtggactacagtgttccgctgtggtggctgccaagatgccttcttaaacttatgcaaggaaaccaaaccctcccac

SEQ ID NO: 734868 - DNA, 120 bp, Artificial Sequence
  ENSG00000198879_36 (sequence is synthesized)
agttcccaagcagacactggaagcagaggcttctcacccttcctgctttttcaccacaatcaccttgagctcgtcccttggactagagtctccacagttccagtaaaattctgcggtggg

SEQ ID NO: 734869 - DNA, 120 bp, Artificial Sequence
  ENSG00000198879_37 (sequence is synthesized)
ctgatgagctgcttgcatttctgtgacatttccagatatgattctcagtgggattttggaaactttgattgctcaagctcacccttcttaacattctgtaatggttacagatgagaatgg

SEQ ID NO: 734870 - DNA, 120 bp, Artificial Sequence
  ENSG00000198879_38 (sequence is synthesized)
aaaacacatattttatggatgaggcgttttggtctcccctgcagtcgatttctagaatcaagttttagagttcggctgatgcatctgcctggggacctcagatgggaggagtgtgtcagt

SEQ ID NO: 734871 - DNA, 120 bp, Artificial Sequence
  ENSG00000198879_39 (sequence is synthesized)
tgtaccccgacagaaatgtctctgggatctgtggctggcttgccccgggcatctctcctttaagctcaagttttgaactctctgcggttttccacccctgccttctcagccacatgcttt

SEQ ID NO: 734872 - DNA, 120 bp, Artificial Sequence
  ENSG00000198879_40 (sequence is synthesized)
tggccttaaacgctcagtcttgtggagttcaactctgtcaaacgattggaaagggcatccatttccagatctttggcattttccccgcgctgactctttgatgatccttcactgtggcct

SEQ ID NO: 734873 - DNA, 120 bp, Artificial Sequence
  ENSG00000198879_41 (sequence is synthesized)
tttcaagctcagctgttcctgttgtatttgagacgagggtgagggaatgtggtggccacaaaagaacagggacttgcagcacaaatgtcacttctgtctcccttttcagtggtagcacgg

SEQ ID NO: 734874 - DNA, 120 bp, Artificial Sequence
  ENSG00000198879_42 (sequence is synthesized)
aggaggaggtgctgcgttggagggaggggatcctccaggagctctctggagcccatctaggaagctagagtgtgtggcccgccaggagctcaggaaggatacagccactgtcgcagggga

SEQ ID NO: 734875 - DNA, 120 bp, Artificial Sequence
  ENSG00000198879_43 (sequence is synthesized)
aagtgtttgcttcccgtggagccaagcgcccaagactctccgtatccttcaccctgacagtttaacttcagcgtttctctgtgcagttgcggtcaccatgggtgagcactgtctgtgcac

SEQ ID NO: 734876 - DNA, 120 bp, Artificial Sequence
  ENSG00000198879_44 (sequence is synthesized)
gtgccagggaggagatggctgggaccactgcacaggagggcgcagcctggcgtcgccatgaaagttgtctctgtgccatctctccggtccttgaggagagcccagaaagattttaggacc

SEQ ID NO: 734877 - DNA, 120 bp, Artificial Sequence
  ENSG00000198879_45 (sequence is synthesized)
caggaggtgcttttcctccagctgttgccagtgtccttctgagcctggattctccggggatttccgtcgtggtggatggacttcacatcagcagcagttctggtacagaattgtaatgtg

SEQ ID NO: 734878 - DNA, 120 bp, Artificial Sequence
  ENSG00000198879_46 (sequence is synthesized)
ttttcatttctctgtaggattcacctctcaccagcgtctgtcttaaaggtagggccaatttcatggagcatttttctgtgtgtgtccttgttgcttttgccagaaaaagtggatttgaca

SEQ ID NO: 734879 - DNA, 120 bp, Artificial Sequence
  ENSG00000198879_47 (sequence is synthesized)
tgcgtgccccgatgccaccatagcccctaggccaacaatgtcatggtctaaacaccaaaaagtgatgccccgcattccttccctggatggtaccgtttcttctccgtctctctttgatga

SEQ ID NO: 734880 - DNA, 120 bp, Artificial Sequence
  ENSG00000198879_48 (sequence is synthesized)
ttctttgggaccaaagtcctctccttagtgcgcctacttcctgtgggcatcatgccacttggaacttattggaactggcccgggagactctgcagtctgcgccgtttgaaaaccctgaga

SEQ ID NO: 734881 - DNA, 120 bp, Artificial Sequence
  ENSG00000198879_49 (sequence is synthesized)
aagagatgccacctcaacttgaatcatgacagcccatcgctcagtctcaccctaaactcatggagcttgtttcagctcctcacttcttgactgtatttgtactatgttgaaaaaatatcc

SEQ ID NO: 734882 - DNA, 120 bp, Artificial Sequence
  ENSG00000198879_50 (sequence is synthesized)
tgtccacaaagacataagcctaacaacctagaaaaacaacagggtactactggcattacagaacttctttgcctttcaaaacaaaagcaaaacacagtgaacttcaccacggagctgcac

SEQ ID NO: 734883 - DNA, 120 bp, Artificial Sequence
  ENSG00000198879_51 (sequence is synthesized)
agcgtggggaactcatccatcactttcaaaattagagtcatttgatccaagttggagtcagacacagtatttgagctgcacggcttctgggttctcccaccttatttgatcatattcgaa

SEQ ID NO: 734884 - DNA, 120 bp, Artificial Sequence
  ENSG00000198879_52 (sequence is synthesized)
agattatttcctgtgtttgctttgatttgttcctcagtacattaaaatgatccacaccttgaacactgccctctctagaaggttgattttgatcagccttttgaagatgggtgtcgtttc

SEQ ID NO: 734885 - DNA, 120 bp, Artificial Sequence
  ENSG00000198879_53 (sequence is synthesized)
cctaacttatctcacagaattttgagtgttgtatttggcaagttctgagatttgccttctgtcttatgccaaacacccctttctaagagctgtccccgcttagttttagaagtactaggg

SEQ ID NO: 734886 - DNA, 120 bp, Artificial Sequence
  ENSG00000198879_54 (sequence is synthesized)
gttttcatacttattttatagaacacccatttatatttatttctgtatatagaactaaaaaaaacagtagtgttaaaaatctttgttgtggtttgagcatctttgctgcttttggattga

SEQ ID NO: 734887 - DNA, 120 bp, Artificial Sequence
  ENSG00000198879_55 (sequence is synthesized)
gatggcgaatcaaggcttcacttcctctctcttctgtctttagaaagctgtgatcgtgcgtgcaattatttgaaaggcaacatagtcaattaagaaacctgtagttgttaaggaagaaat

SEQ ID NO: 734888 - DNA, 120 bp, Artificial Sequence
  ENSG00000198879_56 (sequence is synthesized)
tgttggcaagatatccatactgcccatatctcgttggtgcaataattaaatagcaaaggaaatctgtattggcaactattataattcaataattcttttgtttactgcccttttctgttc

SEQ ID NO: 734889 - DNA, 120 bp, Artificial Sequence
  ENSG00000198879_57 (sequence is synthesized)
aagaattttctggaaattactccctttcacatggttgaactcttaagttgaccagttctcatagctctatcactagaatggtttgcagataccccaaacatactatgataaaatcaaatt

SEQ ID NO: 734890 - DNA, 120 bp, Artificial Sequence
  ENSG00000198879_58 (sequence is synthesized)
gtgctacttttgacccatgtaatttacctaaaagttgtaattgctgacagagtactgccttgaattttggtttaaaacctctctagtttcaatgacaagtaacaactcaaataattccat

SEQ ID NO: 734891 - DNA, 120 bp, Artificial Sequence
  ENSG00000198879_59 (sequence is synthesized)
attgtttgaggaagaggccataatccttctgaattgttggcactaagtaatgggatttggcccagtaagtatgacggtcgtgtcgcctaaccaacgcagagcagtgctttttgtgtggct

SEQ ID NO: 734892 - DNA, 120 bp, Artificial Sequence
  ENSG00000198879_60 (sequence is synthesized)
gaagcgatgtgctgacgaaaaaaggaaaattctaggacaatcgttggctaaaaatcaccttaggatgaaaaatttgaggcaaatttttttaaatgacagaaaaagataatcatctcactt

SEQ ID NO: 734893 - DNA, 120 bp, Artificial Sequence
  ENSG00000198879_61 (sequence is synthesized)
gcttgaaacaggagccagcatgatctctggaagcatcaactatccctcgtcgtgattgttgaaagctctttcactgttttgcattctagtttgaatagtttgtattgaaattggattcct

SEQ ID NO: 734894 - DNA, 120 bp, Artificial Sequence
  ENSG00000198879_62 (sequence is synthesized)
atcttgtgtatgtttttggtgcgtaaaagggaaaaattggtgtcattacttttgaaatttgcaggacgaagggcatgcttttggtttgctgtaagattgtattctgtatatatgttttca

SEQ ID NO: 734895 - DNA, 120 bp, Artificial Sequence
  ENSG00000198879_63 (sequence is synthesized)
aaagcgcaagtttgtgcacacggtcgactgagccattggaaacccagctcacgaaccgcagccagggaaacgggagtttgcccagttgtccttgcggaggggtgtgcggaaacgcccgcg

SEQ ID NO: 734896 - DNA, 120 bp, Artificial Sequence
  ENSG00000198879_64 (sequence is synthesized)
agaccgtcacgaaatgaaacaactccccgatcccacacgaacctctcccaccaccctcaaacataaaccaacccaaaccctttgaaaagctccaaagaaaataaaatgtttttagaactt

SEQ ID NO: 734897 - DNA, 120 bp, Artificial Sequence
  ENSG00000198879_65 (sequence is synthesized)
atgtattgttgttatacatctaatgtatctctgaagcaccccagttacgtgagctcagacctgacagcacctttgcatatatccttcagcagatgcgtgctttctgcagacactgccatc

SEQ ID NO: 734898 - DNA, 120 bp, Artificial Sequence
  ENSG00000198879_66 (sequence is synthesized)
caaatagcctcccttcctcttttgtcctgaattacttaggtgactgatttgaatggcattgatgaaacttcccctgtgatgcaatcagcaaatggaaaatttgctctatgtgaatccaat

SEQ ID NO: 734899 - DNA, 120 bp, Artificial Sequence
  ENSG00000198879_67 (sequence is synthesized)
ttttaaatcacaatatgctaggatgtcttcctactgtcctatatctttaagcctctttcctatgtgagtgaatataaatcaaatcctgtagaatcactgttttgaacaggtgacaagatc

SEQ ID NO: 734900 - DNA, 120 bp, Artificial Sequence
  ENSG00000198879_68 (sequence is synthesized)
atgtatgtgctaatatagtctcttggagtacattgataagtcgttccattaaatgttctattttgacgcataaccccaagatttgaacatacacacgttaaccaataattgaattaactt

SEQ ID NO: 734901 - DNA, 120 bp, Artificial Sequence
  ENSG00000198879_69 (sequence is synthesized)
cttgtaaaaacaagaggagaaatggcagatcgtatttcagtgtagccaaggaaattttaatgtattgaagaaaacatagtttaatctgaaatcttgatggtttatttgaaaataatttta

SEQ ID NO: 734902 - DNA, 120 bp, Artificial Sequence
  ENSG00000198879_70 (sequence is synthesized)
tgttgaaacatcttagtatgtatatgtagtatttgtatttgtataatggaacaggaagagaaaggcactgtgtcataagtaattattgaattacctagtctgtttttcttaagaatgccc

SEQ ID NO: 734903 - DNA, 120 bp, Artificial Sequence
  ENSG00000198879_71 (sequence is synthesized)
ctaaaaaggggaaaacttaatgaataacaagtaataaggtgtggattttgacagtatcatattctcttaaccttaaactttccctcttttcataaatgatattgacattttagaacgtca

SEQ ID NO: 734904 - DNA, 120 bp, Artificial Sequence
  ENSG00000198879_72 (sequence is synthesized)
tagtctaatatagttaacgggttttgttttgtgaagattttgcctgatgtatttgttatatatcattagagatactattttaattgttcattaacaaatcaaaatgatgatagttcatcc

SEQ ID NO: 734905 - DNA, 120 bp, Artificial Sequence
  ENSG00000198879_73 (sequence is synthesized)
tttcaaaaggacaaattgtctcactatgttaattttctaaaacatatttgcctacaaagctggctgaacaaacacccttttcatatgctatcataggctaagaaggtttcttagaagggg

SEQ ID NO: 734906 - DNA, 120 bp, Artificial Sequence
  ENSG00000198879_74 (sequence is synthesized)
cagtaattatacattctgtaaaccaattaccagcttaagtgtagaaataattttacatagtagtctaatttagctgatcattactgtgtgttagacatgtcattgacacacactcatgcc

SEQ ID NO: 734907 - DNA, 120 bp, Artificial Sequence
  ENSG00000198879_75 (sequence is synthesized)
ttcgtcacataatcaaagtatgagagcattttggtcattagagtagcggccagtagagtaagatgaatgtctgggaaaccgtcatggtgtaaattgaatgctctgtattagaattatctg

SEQ ID NO: 734908 - DNA, 120 bp, Artificial Sequence
  ENSG00000198879_76 (sequence is synthesized)
tctgttggaaaagtagaccgtttgctaccacgttttctaggtccaggcaaatttgggtagaactcttcttaaaagcatactgattgttaacaaaagcaattttatctgggaagggtgatt

SEQ ID NO: 734909 - DNA, 120 bp, Artificial Sequence
  ENSG00000198879_77 (sequence is synthesized)
tgtttggtgagaacttagcacaaactgttattttctattgacttgtgatttttttgttgttggatacggaatggggtacatggatgtgtgggagggaggaaagggaaggggtggggcatg

SEQ ID NO: 734910 - DNA, 120 bp, Artificial Sequence
  ENSG00000198879_78 (sequence is synthesized)
ggctgggcaaggatggggtggagggaacgccagactgttcgccagtaccttggatgatggtgtgaaaaaatattatcttctgctgtcatctgtttccatgagaaccttaaaataaagttt

SEQ ID NO: 734911 - DNA, 120 bp, Artificial Sequence
  ENSG00000198881_0 (sequence is synthesized)
attgttaacagtgggaaacgagagccccagctgctccaggttggggccgtgggggctccctaaggaggggacaccagggccccaatgtttcacagaggggcggggggcagcgaccctggg

SEQ ID NO: 734912 - DNA, 120 bp, Artificial Sequence
  ENSG00000198881_1 (sequence is synthesized)
cagcatggcctcaggctgaagcccgatctggcatttccttgtgctcataatgagaatagttctccaattagccaagatgaacctcatggacatcaccaagatcttctccctcctgcagcc

SEQ ID NO: 734913 - DNA, 120 bp, Artificial Sequence
  ENSG00000198881_2 (sequence is synthesized)
cgacaaggaggaggaggacactgacacagaggagaagcaggctctcaatcaagcagtgtatgacaacgactcctatactttggaccagcttttgcgccaggagcgttacaaacgtttcat

SEQ ID NO: 734914 - DNA, 120 bp, Artificial Sequence
  ENSG00000198881_3 (sequence is synthesized)
caacagcaggagtggctggggtgttcctgggacacccttgcgcttggctgcttcttatggccacttgagctgtttgcaagtcctcttagcccatggtgctgatgttgacagcttggatgt

SEQ ID NO: 734915 - DNA, 120 bp, Artificial Sequence
  ENSG00000198881_4 (sequence is synthesized)
caaggcacagacgccacttttcactgctgtcagtcatggccatctggactgtgtacgtgtgcttttggaagctggtgcctctcctggtggtagcatctacaacaactgttctcccgtgct

SEQ ID NO: 734916 - DNA, 120 bp, Artificial Sequence
  ENSG00000198881_5 (sequence is synthesized)
gtcaaagctaaactaccagtctgggcatcaaacatagcttcatgttctggccccctctatttggccgcagtctacgggcacctggactgtttccgcctgcttttgctccacggggcagac

SEQ ID NO: 734917 - DNA, 120 bp, Artificial Sequence
  ENSG00000198881_6 (sequence is synthesized)
cctgactacaactgcactgaccagggcctattggctcgtgtcccaagaccccgcaccctccttgaaatctgcctccatcataattgtgagccagagtatatccagctgttaatcgatttt

SEQ ID NO: 734918 - DNA, 120 bp, Artificial Sequence
  ENSG00000198881_7 (sequence is synthesized)
ggtgctaatatctaccttccatctctctcccttgacctgacctcacaagatgataaaggcattgcattgctgctacaggcccgagccactccacggtcacttctatcacaggtccgttta

SEQ ID NO: 734919 - DNA, 120 bp, Artificial Sequence
  ENSG00000198881_8 (sequence is synthesized)
gtcgtccgcagagccttgtgccaggctggccagccacaagccatcaaccagctggatattcctcccatgttgattagctacctaaaacaccaactgtaatcttgcagtctccccaggaac

SEQ ID NO: 734920 - DNA, 120 bp, Artificial Sequence
  ENSG00000198881_9 (sequence is synthesized)
ttatgatgcctccgaaaaccacctggggactcacgtagctggagagcattacagcctcatccacttacctggagctgctctcctgtattatcctccacaataaaattctccagaaaataa

SEQ ID NO: 734921 - DNA, 120 bp, Artificial Sequence
  ENSG00000198883_0 (sequence is synthesized)
cattgcattgcgcagagctcagccatctttctcatccgtcaggcattcctgagaaagagggccactctacctctcttgctgccagccttcactccagcaaggagggtgctgggtgacctg

SEQ ID NO: 734922 - DNA, 120 bp, Artificial Sequence
  ENSG00000198883_1 (sequence is synthesized)
agcccacatagccccgagtgagcagtgaggctgtctcctgccctcttctgcctggagggctcgtcagtgtccccaggtgtcaggccctgcctcctgacgttggccttttcactacaggca

SEQ ID NO: 734923 - DNA, 120 bp, Artificial Sequence
  ENSG00000198883_2 (sequence is synthesized)
cccgaagcacacacagcagagtcctctggactttgaggaagaacccacagcaggaggaagctgtgtgaaacctgggaccacttctgccttcctacgtggcagtggctcagagttatttga

SEQ ID NO: 734924 - DNA, 120 bp, Artificial Sequence
  ENSG00000198883_3 (sequence is synthesized)
gtgctgtcaaactgagctgattgctgccctagtattagatcagtccatagaaagtgggagcaatggcactgacactgctagaggattggtgcaaggggatggacatggaccccagaaagg

SEQ ID NO: 734925 - DNA, 120 bp, Artificial Sequence
  ENSG00000198883_4 (sequence is synthesized)
ccctgctgattgtaggcatccccatggagtgtagtgaggtggaaattcaggacactgtgaaggcaggcttacagcccctgtgcgcatacagggtcctagggagaatgttcaggagggaag

SEQ ID NO: 734926 - DNA, 120 bp, Artificial Sequence
  ENSG00000198883_5 (sequence is synthesized)
acaatgccaaggcagtcttcattgaactggctgacactgtcaattacactactctgcccagtcacataccaggaaagggtggctcctgggaagtggtggtaaaaccccgtaacccagatg

SEQ ID NO: 734927 - DNA, 120 bp, Artificial Sequence
  ENSG00000198883_6 (sequence is synthesized)
atgagtttctcagtagactgaactacttcctgaaagatgagggccgaagtatgacagatgtggccagagccctgggatgttgcagcctccctgccgagagcctggatgcagaggtcatgc

SEQ ID NO: 734928 - DNA, 120 bp, Artificial Sequence
  ENSG00000198883_7 (sequence is synthesized)
cccaagttagatccccacctttagagcctccgaaagaaagtatgtggtacaggaaactgaaagtgttttcgggaactgcttcccctagcccaggcgaagagacctttgaagactggctag

SEQ ID NO: 734929 - DNA, 120 bp, Artificial Sequence
  ENSG00000198883_8 (sequence is synthesized)
agcaggtcactgagataatgcccatatggcaagtgtctgaggtggagaagaggcggcgtttgctggagagcttacgtgggcctgctctgtcaatcatgcgggtgctccaggccaacaatg

SEQ ID NO: 734930 - DNA, 120 bp, Artificial Sequence
  ENSG00000198883_9 (sequence is synthesized)
actccataactgtggagcagtgccttgacgccctaaagcagatctttggggataaagaggactttagagcctctcagtttaggtttctgcagacctctccgaagattggagagaaagtct

SEQ ID NO: 734931 - DNA, 120 bp, Artificial Sequence
  ENSG00000198883_10 (sequence is synthesized)
ccactttcctgctgcgcttagagcccctgctgcagaaagccgtgcacaagagccccttgtcagtgcgcagcacagacatgattcgtctgaaacatctcttagctcgggtcgccatgaccc

SEQ ID NO: 734932 - DNA, 120 bp, Artificial Sequence
  ENSG00000198883_11 (sequence is synthesized)
ccgccctcaggggcaagctggagctcttggatcagcgagggtgtcctcccaattttctggagttaatgaagctcattcgagatgaagaagagtgggagaacactgaggcagtgatgaaga

SEQ ID NO: 734933 - DNA, 120 bp, Artificial Sequence
  ENSG00000198883_12 (sequence is synthesized)
ataaggagaagccatcagggagaggccggggggcctccggtagacaggcaagagcagaagccagtgtctctgcacctcaggccaccgtgcaggcaaggtcttttagcgacagcagccccc

SEQ ID NO: 734934 - DNA, 120 bp, Artificial Sequence
  ENSG00000198883_13 (sequence is synthesized)
catggccaggccacgtatcccaaggctgaaaaccagactccaggcagggaggggccacaggctgcaggagaggagttgggaaacgaggcaggggctggggccatgagccatcccaagccc

SEQ ID NO: 734935 - DNA, 120 bp, Artificial Sequence
  ENSG00000198883_14 (sequence is synthesized)
tgggaaacataggctcagaagaccgaagcactccttcccctggcaggcagcagggacatttgaacaaggggaaggggcagcttacactaacagggaacttgactggggcagagggacagg

SEQ ID NO: 734936 - DNA, 120 bp, Artificial Sequence
  ENSG00000198883_15 (sequence is synthesized)
gaagccaggtcgagatcaagcccccttactttccaccagctggaagggacttcaccaaccaagaccaaatagcatctggttcagtgggggccgggcccatagcccctaacaggtacagga

SEQ ID NO: 734937 - DNA, 120 bp, Artificial Sequence
  ENSG00000198883_16 (sequence is synthesized)
gacacaagcggggaaccactacacttagcacatggggtgcctgggcttcagatggggaccccagcgaagcaggggctgaagaaggtgtggctgggggctctggcctggtcctctggacac

SEQ ID NO: 734938 - DNA, 120 bp, Artificial Sequence
  ENSG00000198883_17 (sequence is synthesized)
ccccaaatatctaccctgtggactttgagctgagcatgcccactggcacccaggccacgtgggacctggaggagcctgcctggggcctgcctctgccagaaggagccagggctgctgagg

SEQ ID NO: 734939 - DNA, 120 bp, Artificial Sequence
  ENSG00000198883_18 (sequence is synthesized)
aagagctgtggggcagaagtgaagccccgcaggggaggccacagggtccagcctgtctttaggatcatctacactgcatgaggggagccccaggaaggcagcattcataagcccctgcac

SEQ ID NO: 734940 - DNA, 120 bp, Artificial Sequence
  ENSG00000198883_19 (sequence is synthesized)
cagtgaggaagagaaagaggaggagaattaagaagaggatgatcgggaggaggaagaggagaataaggaggagcaggaggaagagggggaggagaaggaggaagagggggaggaggaaga

SEQ ID NO: 734941 - DNA, 120 bp, Artificial Sequence
  ENSG00000198883_20 (sequence is synthesized)
ggggaaggaggaggaagaagtgtaagaagagaagagaggatgtgttgggggtgggtagttgtttttggtttgcgtcatcatcaggcccgggctctgctcactgctgttccgtgtcaagaa

SEQ ID NO: 734942 - DNA, 120 bp, Artificial Sequence
  ENSG00000198883_21 (sequence is synthesized)
ctccacctctgctttgccggtgtagatctcggccagtggctgcttgttctcttggggatgtgtgtgtttttatctgagcagctcctttccagagtaccccagcgcagttccaggagacgg

SEQ ID NO: 734943 - DNA, 120 bp, Artificial Sequence
  ENSG00000198883_22 (sequence is synthesized)
tgggaaggaggcatggcagacgctcaccttgtgactgtgacctcgactgcaggaggaccaaccagacacgggaaggagcagggctgcctgaggctccccaggaagctttgtgctttggcg

SEQ ID NO: 734944 - DNA, 120 bp, Artificial Sequence
  ENSG00000198883_23 (sequence is synthesized)
ttccacccctgctgttactcgtgactcagtttcctcaacttggtggggtgttccctgctatgttttccagcatcctgtgactgtcctgtgcagtctatagggcagggccctgccccagcg

SEQ ID NO: 734945 - DNA, 120 bp, Artificial Sequence
  ENSG00000198883_24 (sequence is synthesized)
ggtgggctcaggagggggttccctgaagcgagtacacattgccagagcccaccatcctggcaagaggtggatcctggggccctatggaaggagggatgtggtggggggggccacactgag

SEQ ID NO: 734946 - DNA, 120 bp, Artificial Sequence
  ENSG00000198883_25 (sequence is synthesized)
ggaggggccggggacttgtgacctgtagtggctgtttgcagtttctctctgtgttagattcccttttcttcagcagtttcagttcatgtttctcttcagtaaattttgttcagtgttcca

SEQ ID NO: 734947 - DNA, 120 bp, Artificial Sequence
  ENSG00000198883_26 (sequence is synthesized)
gcagtcagcacggaggcggcagccgccatagacgtgtggtggtcgcgctgcgcgggaactccggcttggaggcacctccggcagatccagtgaagcaggacccatcacgcctgagtcagg

SEQ ID NO: 734948 - DNA, 120 bp, Artificial Sequence
  ENSG00000198883_27 (sequence is synthesized)
aactgcctaactggatagagttgaaaagcagagcgagtctgaagtggctgtgttattgcagcatccgcgctgccagcagggccaacccagcaaggcacccgaagcacacacagcagagtc

SEQ ID NO: 734949 - DNA, 120 bp, Artificial Sequence
  ENSG00000198885_0 (sequence is synthesized)
gctgcggcgcgcgggcgccctcggagccgcgtgctgggggtcgtaggggcccaccgcgctcagccagacgttcagacgctcggacaagcatggtctataacccaggaaaggggagcaggg

SEQ ID NO: 734950 - DNA, 120 bp, Artificial Sequence
  ENSG00000198885_1 (sequence is synthesized)
ccactcccgcgggcggccccagcgatgaaccggacgcccccaccctgccgggaaaaaagcagtggcggtcaggccgcgctgtctctttaagatcgtgttcctactaacactgacgatgca

SEQ ID NO: 734951 - DNA, 120 bp, Artificial Sequence
  ENSG00000198885_2 (sequence is synthesized)
gaggcctccatggctgtgataagcctgctgttcttggcagtgatgtatgttgttcaccaccctctgatggtcagtgatcggatggacctggacacattagccaggagtcggcagctggag

SEQ ID NO: 734952 - DNA, 120 bp, Artificial Sequence
  ENSG00000198885_3 (sequence is synthesized)
aagcgaatgagtgaggagatgcgcctgctagagatggagtttgaagagagaaagcgagccgctgagcagaggcagaaggcagagaacttctggacaggagacacatccagtgaccagtta

SEQ ID NO: 734953 - DNA, 120 bp, Artificial Sequence
  ENSG00000198885_4 (sequence is synthesized)
gtgctggggaagaaagacatggggtggccgttccaggccgatggccaggaagggcctctgggctggatgctgggaaacctgtggaacactggcctcttttgcctttttctcgtctttgag

SEQ ID NO: 734954 - DNA, 120 bp, Artificial Sequence
  ENSG00000198885_5 (sequence is synthesized)
ctcctgcgacagaacatgcagcatgaaccggcctttgattccagcagtgaggaggaggaggaggaagtccgtgttgtccctgtcacctcttacaactggcttactgacttcccctcccag

SEQ ID NO: 734955 - DNA, 120 bp, Artificial Sequence
  ENSG00000198885_6 (sequence is synthesized)
gaggccctggactccttttacaaacactatgtccaaaatgccatccgtgacctgccctgcacctgtgagtttgtggagagttttgtggatgatctcattgaggcctgtcgggtgctcagc

SEQ ID NO: 734956 - DNA, 120 bp, Artificial Sequence
  ENSG00000198885_7 (sequence is synthesized)
cgccaagaggctcacccacaattggaagactgcctgggcatcggggctgcctttgagaaatggggaaccctccatgagacccagaaatttgatatcctggtgcccattgtccccccacag

SEQ ID NO: 734957 - DNA, 120 bp, Artificial Sequence
  ENSG00000198885_8 (sequence is synthesized)
gacccagccctgggccgccgctgtggctgtgtgctggtggagtcagaatgtgtgtgcaagcgtgagaaactcctaggggacgtgctgtgcctggtgcaccaccacagggacccctcggca

SEQ ID NO: 734958 - DNA, 120 bp, Artificial Sequence
  ENSG00000198885_9 (sequence is synthesized)
gtcttggggaagtgtagtagctccatcaaggcagctctctgcaccggcttccacctagacgtgtgcaagactgtgcagtggttccggaacatgatgggcaatgcctgggcccttgtggcc

SEQ ID NO: 734959 - DNA, 120 bp, Artificial Sequence
  ENSG00000198885_10 (sequence is synthesized)
cacaagtatgactttaaactcagtctcccaccgtctaccacctcctgcaagctccggctggactatcgctcaggccgctttctctcaatccacttggtcctgggggtgcaacgagaagac

SEQ ID NO: 734960 - DNA, 120 bp, Artificial Sequence
  ENSG00000198885_11 (sequence is synthesized)
accttggtctacctggtgagtcaggctcctgaccaggagcagctcaccagtgtggactggcctgagtcctttgtggcctgtgagcacctgttcctgaagctggtggggcgctttgccccc

SEQ ID NO: 734961 - DNA, 120 bp, Artificial Sequence
  ENSG00000198885_12 (sequence is synthesized)
gagaacacctgtcacctcaagtgcctccagatcattttaagtctccggcagcatcagagcttaccccatggagcatcccgccccatcctcacttcttaccattttaaaacagctctcatg

SEQ ID NO: 734962 - DNA, 120 bp, Artificial Sequence
  ENSG00000198885_13 (sequence is synthesized)
cacctcttgctacggctgcccctcacggactgggcccacaacatgctctctcagcggctccaggacattctctggttcttgggccgtggcctccagcaaaggtccctccatcatttcctc

SEQ ID NO: 734963 - DNA, 120 bp, Artificial Sequence
  ENSG00000198885_14 (sequence is synthesized)
attggtaacaattttctgcccctgaccatcccaatccctaagacatttaggaatgctgagccggtcaatctcttccaacacctggtgctcaaccccaaggcacattcacaggcagtggaa

SEQ ID NO: 734964 - DNA, 120 bp, Artificial Sequence
  ENSG00000198885_15 (sequence is synthesized)
gagttccaaaaccttctgacccaggtgaaaactctgcctcatgccccactggctgcagcaccttgatgtaaagaccattaaaaaaaaaacagaggaaggtatttctaattccttgggcta

SEQ ID NO: 734965 - DNA, 120 bp, Artificial Sequence
  ENSG00000198885_16 (sequence is synthesized)
ggcaggttcagggctttctggctataaaagggagcctctgggatcagcaggtcatatctggtgcccatggttgactgaggagtcgggtgaggccaccctaccacaagggtccccctcccc

SEQ ID NO: 734966 - DNA, 120 bp, Artificial Sequence
  ENSG00000198885_17 (sequence is synthesized)
atcctacacaggaatgaaaacagtcccatgtacactttctggaagcctaaataccacccacaccatgtggaaggaaagcaggagagagactgagtggcacatcctttcgccctcttttct

SEQ ID NO: 734967 - DNA, 120 bp, Artificial Sequence
  ENSG00000198885_18 (sequence is synthesized)
ctcgaacctcctcccaggccgaccacccttgctgtgtccaagccaagctctgtgggctttctgttcctcctgagtagctgattttcagaatttggggtaccagggctctggggaatgtga

SEQ ID NO: 734968 - DNA, 120 bp, Artificial Sequence
  ENSG00000198885_19 (sequence is synthesized)
agtgtttacttttcagatatatcagtggtatatgtgaccttcaccttgccagtgggggctatgatgagacaccttaaggagcgtgtgaggtggtcatgaggatgggcataatgaccctgc

SEQ ID NO: 734969 - DNA, 120 bp, Artificial Sequence
  ENSG00000198885_20 (sequence is synthesized)
agggcctagtcaaggatgggtcatctgaggttttcttctgctaactttcatcatgacccaaagaaggtccagggaaacggatgttatgggaggatcttgctgctaaggaggtgagatcca

SEQ ID NO: 734970 - DNA, 120 bp, Artificial Sequence
  ENSG00000198885_21 (sequence is synthesized)
gagggtcactgtgaagttgtgtttttgtatcaacactcgaagtgagagaaccagagaataccttcattccagcttattcctttttgtgattgacttccagtatgttccttgtgaattggt

SEQ ID NO: 734971 - DNA, 120 bp, Artificial Sequence
  ENSG00000198885_22 (sequence is synthesized)
ttccttgttgaactgttagcttaattctcatccgagctggtggcactccattttatcccaaatactgtgatgggcaacttctcataatttacgatctaatttttcaaaccttcactattt

SEQ ID NO: 734972 - DNA, 73 bp, Artificial Sequence
  ENSG00000198885_23 (sequence is synthesized)
ctcataatttacgatctaatttttcaaaccttcactattttgaaaatataaccaaggccggttgctgtatcgc

SEQ ID NO: 734973 - DNA, 120 bp, Artificial Sequence
  ENSG00000198885_24 (sequence is synthesized)
caagatgtttacattccattttcttaacttagccctattttcatatgacaatagagttgtttttatgcatctgaaaaaactacctaatttattcgcattgattcacaaatattaagtcaa

SEQ ID NO: 734974 - DNA, 120 bp, Artificial Sequence
  ENSG00000198885_25 (sequence is synthesized)
tagtaacctgtctcataattgagataatgtatttaccataataatgaaatggttaacatctgatgacctttttaaggtgcctggaggcaacattataaaggccttcacaaggacaatctt

SEQ ID NO: 734975 - DNA, 120 bp, Artificial Sequence
  ENSG00000198885_26 (sequence is synthesized)
tttgggggctctgagatgaataattactttgttgcttgtggggagccacttgttgagtgtaaagaaggtttagctgccatgtttagctgtgctttttctgtctggccatgcctcctttgt

SEQ ID NO: 734976 - DNA, 120 bp, Artificial Sequence
  ENSG00000198885_27 (sequence is synthesized)
atttttttttttttttttcaaaaatgacaaagggattacttgaactgtgtttgtggttttgaaagagaggtcatcacaatccaggctcactgccaggtttgtataggaaaggattgggaa

SEQ ID NO: 734977 - DNA, 120 bp, Artificial Sequence
  ENSG00000198885_28 (sequence is synthesized)
acagtccaactctaaaattgtgattctagagatataattggtgtatttttcccttttttcaaaaccatgggatgctgaggaggagtgttaagaaatgcaactatagttatgggtgtgatt

SEQ ID NO: 734978 - DNA, 120 bp, Artificial Sequence
  ENSG00000198885_29 (sequence is synthesized)
gttttggaaacgccaatgctgttctatctgcactgccaagaagatctgctggggagggtaacctgtccccactgaacttgacctcagcagggatcagatgctggcccttataggcttcag

SEQ ID NO: 734979 - DNA, 90 bp, Artificial Sequence
  ENSG00000198885_30 (sequence is synthesized)
acctcagcagggatcagatgctggcccttataggcttcagtcatagaatacacaccctctcctccagcaaaaataaattaaaaatgtccc

SEQ ID NO: 734980 - DNA, 120 bp, Artificial Sequence
  ENSG00000198885_31 (sequence is synthesized)
gttcaagaccagcctgggcaacatgtcgcaatcccgtctctacaaaaaattagctgggcatggtggcatatacctgtgatccctgctactctggaggttgaggcggaaagactgcttgag

SEQ ID NO: 734981 - DNA, 120 bp, Artificial Sequence
  ENSG00000198885_32 (sequence is synthesized)
ggaaagactgcttgagcccaggaggtcagggctgtagtgagctatgatagtgtcactgtgctccagcgaccctgggcaaaaaagtgagaccgcgtctcaaaaaaaaaaaaaaaaaaaaaa

SEQ ID NO: 734982 - DNA, 120 bp, Artificial Sequence
  ENSG00000198885_33 (sequence is synthesized)
ggttcccagaagctgatgccagtcaatcattggggctcccagtgcacaatagctactgtgttcctgtgttgcctgcatctgtcaggtaccgctttcaatgcaagatgcaatcatggttgc

SEQ ID NO: 734983 - DNA, 120 bp, Artificial Sequence
  ENSG00000198885_34 (sequence is synthesized)
ttccctgctgatgggattttggtgttttagcaacattcacatactttttgtttagaaaattatttgctgatgttttaagttaaagtcaataaaggaggctattttctgtatacattggaa

SEQ ID NO: 734984 - DNA, 120 bp, Artificial Sequence
  ENSG00000198886_0 (sequence is synthesized)
atgctaaaactaatcgtcccaacaattatattactaccactgacatgactttccaaaaaacacataatttgaatcaacacaaccacccacagcctaattattagcatcatccctctacta

SEQ ID NO: 734985 - DNA, 120 bp, Artificial Sequence
  ENSG00000198886_1 (sequence is synthesized)
ttttttaaccaaatcaacaacaacctatttagctgttccccaaccttttcctccgaccccctaacaacccccctcctaatactaactacctgactcctacccctcacaatcatggcaagc

SEQ ID NO: 734986 - DNA, 120 bp, Artificial Sequence
  ENSG00000198886_2 (sequence is synthesized)
caacgccacttatccagtgaaccactatcacgaaaaaaactctacctctctatactaatctccctacaaatctccttaattataacattcacagccacagaactaatcatattttatatc

SEQ ID NO: 734987 - DNA, 120 bp, Artificial Sequence
  ENSG00000198886_3 (sequence is synthesized)
ttcttcgaaaccacacttatccccaccttggctatcatcacccgatgaggcaaccagccagaacgcctgaacgcaggcacatacttcctattctacaccctagtaggctcccttccccta

SEQ ID NO: 734988 - DNA, 120 bp, Artificial Sequence
  ENSG00000198886_4 (sequence is synthesized)
ctcatcgcactaatttacactcacaacaccctaggctcactaaacattctactactcactctcactgcccaagaactatcaaactcctgagccaacaacttaatatgactagcttacaca

SEQ ID NO: 734989 - DNA, 120 bp, Artificial Sequence
  ENSG00000198886_5 (sequence is synthesized)
atgtcgaagcccccatcgctgggtcaatagtacttgccgcagtactcttaaaactaggcggctatggtataatacgcctcacactcattctcaaccccctgacaaaacacatagcctacc

SEQ ID NO: 734990 - DNA, 120 bp, Artificial Sequence
  ENSG00000198886_6 (sequence is synthesized)
ccttccttgtactatccctatgaggcataattataacaagctccatctgcctacgacaaacagacctaaaatcgctcattgcatactcttcaatcagccacatagccctcgtagtaacag

SEQ ID NO: 734991 - DNA, 120 bp, Artificial Sequence
  ENSG00000198886_7 (sequence is synthesized)
ccattctcatccaaaccccctgaagcttcaccggcgcagtcattctcataatcgcccacgggcttacatcctcattactattctgcctagcaaactcaaactacgaacgcactcacagtc

SEQ ID NO: 734992 - DNA, 120 bp, Artificial Sequence
  ENSG00000198886_8 (sequence is synthesized)
gcatcataatcctctctcaaggacttcaaactctactcccactaatagctttttgatgacttctagcaagcctcgctaacctcgccttaccccccactattaacctactgggagaactct

SEQ ID NO: 734993 - DNA, 120 bp, Artificial Sequence
  ENSG00000198886_9 (sequence is synthesized)
ctgtgctagtaaccacgttctcctgatcaaatatcactctcctacttacaggactcaacatactagtcacagccctatactccctctacatatttaccacaacacaatggggctcactca

SEQ ID NO: 734994 - DNA, 120 bp, Artificial Sequence
  ENSG00000198886_10 (sequence is synthesized)
cccaccacattaacaacataaaaccctcattcacacgagaaaacaccctcatgttcatacacctatcccccattctcctcctatccctcaaccccgacatcattaccgggttttcctctt

SEQ ID NO: 734995 - DNA, 120 bp, Artificial Sequence
  ENSG00000198887_0 (sequence is synthesized)
agttcgcgcgggagcggggcgcctgggtggatgggcgcttgggcgcctgggctgccggacggtgggaacggaagtcgctgtgggacgctgaggaagccaggatggcgactccgagcaaga

SEQ ID NO: 734996 - DNA, 120 bp, Artificial Sequence
  ENSG00000198887_1 (sequence is synthesized)
agacgtcaactccaagcccccagccttccaagagagctctcccgagagacccttcgtcggaggtcccgagcaagaggaagaattcggccccgcagctgccgctgttgcagtcgtccgggc

SEQ ID NO: 734997 - DNA, 120 bp, Artificial Sequence
  ENSG00000198887_2 (sequence is synthesized)
ctttcgtggaaggctctatcgtccgcatctcgatggagaacttcctaacatatgatatttgtgaagtatctcctggaccccacttgaatatgatcgttggagccaatggaacagggaagt

SEQ ID NO: 734998 - DNA, 120 bp, Artificial Sequence
  ENSG00000198887_3 (sequence is synthesized)
cgagcattgtgtgtgccatttgccttggtttagctggaaaacctgctttcatgggacgagcagataaggttgggttttttgtgaagagaggatgttctagaggcatggttgaaattgaat

SEQ ID NO: 734999 - DNA, 120 bp, Artificial Sequence
  ENSG00000198887_4 (sequence is synthesized)
tgttcagggcttctggaaatcttgtaatcacccgtgagattgatgtggcaaaaaatcagtccttttggttcatcaacaaaaaatctacaacccagaaaatagtggaagagaaagttgcag

SEQ ID NO: 735000 - DNA, 120 bp, Artificial Sequence
  ENSG00000198887_5 (sequence is synthesized)
ccttaaatattcaagtggggaatctttgccagtttctccctcaggacaaagttggagaatttgctaaactcagcaaaattgaactcctcgaagccactgaaaagtcaattggtcccccag

SEQ ID NO: 735001 - DNA, 120 bp, Artificial Sequence
  ENSG00000198887_6 (sequence is synthesized)
aaatgcacaaatatcactgtgaactcaaaaacttaagggagaaagaaaaacagctcgagacctcatgcaaagagaaaactgagtatctacagaaaatggttcagaggaatgaaagatata

SEQ ID NO: 735002 - DNA, 120 bp, Artificial Sequence
  ENSG00000198887_7 (sequence is synthesized)
aacaagatgtggagaggttctatgaacggaagcgacatttagatttaattgagatgcttgaagcaaaaaggccatgggtggaatatgaaaatgttcgtcaggaatatgaagaagtaaaac

SEQ ID NO: 735003 - DNA, 120 bp, Artificial Sequence
  ENSG00000198887_8 (sequence is synthesized)
tagttcgtgaccgagtgaaggaagaggtcagaaaacttaaagaagggcagattcctgtaacatgtcgaattgaagaaatggaaaacgagcgtcacaatttggaggctcgaatcaaagaaa

SEQ ID NO: 735004 - DNA, 120 bp, Artificial Sequence
  ENSG00000198887_9 (sequence is synthesized)
aggcaacagatattaaggaggcatctcaaaaatgcaaacagaagcaagatgttatagaaaggaaagataaacatattgaggaacttcagcaggctttaatagtaaagcaaaatgaagagc

SEQ ID NO: 735005 - DNA, 120 bp, Artificial Sequence
  ENSG00000198887_10 (sequence is synthesized)
ttgaccgacagaggagaataggtaatacccgcaaaatgatagaggatttgcaaaatgaactaaagaccacggaaaactgcgagaatcttcagccccagattgatgccattacaaatgatc

SEQ ID NO: 735006 - DNA, 120 bp, Artificial Sequence
  ENSG00000198887_11 (sequence is synthesized)
tgagacggattcaggatgaaaaggcattatgtgaaggcgaaataattgataagcgaagagagagggaaactctagagaaggagaaaaagagtgtggacgatcatattgtacgttttgaca

SEQ ID NO: 735007 - DNA, 120 bp, Artificial Sequence
  ENSG00000198887_12 (sequence is synthesized)
atcttatgaatcagaaggaagataagctaagacagagattccgtgacacgtatgatgctgttttatggctaagaaataacagagacaaatttaaacaaagagtctgtgagcccataatgc

SEQ ID NO: 735008 - DNA, 120 bp, Artificial Sequence
  ENSG00000198887_13 (sequence is synthesized)
tcacgatcaatatgaaagataataaaaatgccaaatatattgaaaatcatattccatcaaatgacttaagagcctttgtatttgaaagtcaagaagatatggaggttttcctcaaagagg

SEQ ID NO: 735009 - DNA, 120 bp, Artificial Sequence
  ENSG00000198887_14 (sequence is synthesized)
ttcgtgacaataaaaaattaagagtaaatgctgttattgctcccaagagttcatatgcagacaaagcaccttcaagatctttgaatgaacttaaacaatacggatttttctcttatttga

SEQ ID NO: 735010 - DNA, 120 bp, Artificial Sequence
  ENSG00000198887_15 (sequence is synthesized)
gagaattatttgatgcacctgatcctgtaatgagttacctttgctgtcagtatcatattcatgaagttcctgtaggaactgaaaagaccagagaaagaattgaacgggtaatacaagaaa

SEQ ID NO: 735011 - DNA, 120 bp, Artificial Sequence
  ENSG00000198887_16 (sequence is synthesized)
cccgattaaaacagatttatacagcagaagaaaagtatgtggtgaaaacttctttttattcaaacaaagttatttctagtaacacatctctaaaagtagcgcagtttctcactgtcactg

SEQ ID NO: 735012 - DNA, 120 bp, Artificial Sequence
  ENSG00000198887_17 (sequence is synthesized)
tggacctagagcagagaagacacttagaagaacagctaaaggaaattcatagaaaattgcaagcagtggattcagggttgattgccttacgtgaaacaagcaaacatctggagcacaaag

SEQ ID NO: 735013 - DNA, 120 bp, Artificial Sequence
  ENSG00000198887_18 (sequence is synthesized)
acaatgaacttagacaaaagaagaaggagcttcttgagagaaaaaccaagaaaagacaactggaacaaaaaatcagttccaaactaggaagtttaaagctgatggaacaggatacttgca

SEQ ID NO: 735014 - DNA, 120 bp, Artificial Sequence
  ENSG00000198887_19 (sequence is synthesized)
atcttgaagaggaagagcgaaaagcaagtaccaaaatcaaagaaataaatgttcaaaaagcgaaacttgttaccgaattaacaaacctaataaagatttgtacttctttgcatatacaaa

SEQ ID NO: 735015 - DNA, 120 bp, Artificial Sequence
  ENSG00000198887_20 (sequence is synthesized)
aagtagatttaattctccaaaatactacagtgatctctgagaagaacaaattagaatcagattatatggccgcatcttcacaactccgtcttacagagcaacatttcattgaattggatg

SEQ ID NO: 735016 - DNA, 120 bp, Artificial Sequence
  ENSG00000198887_21 (sequence is synthesized)
aaaatagacagagattattgcagaaatgcaaggaacttatgaaaagagctaggcaagtatgtaacctgggtgcagagcagactcttcctcaagaataccagacacaagtacccaccattc

SEQ ID NO: 735017 - DNA, 120 bp, Artificial Sequence
  ENSG00000198887_22 (sequence is synthesized)
caaatggacacaactcctcactccccatggttttccaagaccttccaaacacattggatgaaattgatgctttattaactgaagaaagatcaagagcttcctgcttcacgggactgaatc

SEQ ID NO: 735018 - DNA, 120 bp, Artificial Sequence
  ENSG00000198887_23 (sequence is synthesized)
ctacaattgttcaggaatatacaaaaagagaagaagaaatagaacagttaactgaggaactaaagggaaagaaagttgaactagatcaatacagggaaaacatttcacaggtaaaagaaa

SEQ ID NO: 735019 - DNA, 120 bp, Artificial Sequence
  ENSG00000198887_24 (sequence is synthesized)
tgcagtgtgctggtgaagttgatctccatacagaaaatgaggaagattatgataaatatggaattcgaattagagtcaaatttcgaagtagtactcaactgcatgaattaactcctcatc

SEQ ID NO: 735020 - DNA, 120 bp, Artificial Sequence
  ENSG00000198887_25 (sequence is synthesized)
atcaaagtggaggtgaaagaagtgtttctaccatgttatacttgatggcacttcaggagctaaatagatgtccattcagagtagttgatgaaatcaatcagggaatggacccaatcaatg

SEQ ID NO: 735021 - DNA, 120 bp, Artificial Sequence
  ENSG00000198887_26 (sequence is synthesized)
aacggagagtgtttgaaatggttgtaaatactgcctgtaaagaaaatacatctcaatactttttcataacaccaaagctcctgcaaaatcttccttattctgaaaagatgacagttttgt

SEQ ID NO: 735022 - DNA, 120 bp, Artificial Sequence
  ENSG00000198887_27 (sequence is synthesized)
ttgtctacaatggccctcatatgctggaaccaaacacatggaatttaaaggctttccaaaggcggcggcgccgtattacattcactcaaccttcttaataaaagtaaagagagggaactt

SEQ ID NO: 735023 - DNA, 120 bp, Artificial Sequence
  ENSG00000198887_28 (sequence is synthesized)
gggaattttttttgttaaattctgtttataagtatggctcaactgaataaaaggagattcactaaaacgaaaagcagttatttttggaaacctgcttttaaatacaaataggttgataat

SEQ ID NO: 735024 - DNA, 120 bp, Artificial Sequence
  ENSG00000198887_29 (sequence is synthesized)
ggaaactataatgacctttccaaaatagcagctggtagtaaaagttaagtcttcttcagtcttggttgaacttgagttcttggcactctgaccatgagtcattcagttctcatgttaaaa

SEQ ID NO: 735025 - DNA, 120 bp, Artificial Sequence
  ENSG00000198887_30 (sequence is synthesized)
tgtacttaatattacaaatcaaaggtacagtggaagaagggttaatcacaagaagttacttatatggtagccctgagctttaattgcagagtaactttaattacttttagagcctaaaga

SEQ ID NO: 735026 - DNA, 120 bp, Artificial Sequence
  ENSG00000198887_31 (sequence is synthesized)
tgactctagagcctaagtcctagtttctcccaatgttatatttaattttaaaaaattgatatgaaaatgtctaatgtatagtaataatttatgacagatctagtcatttcttcctattaa

SEQ ID NO: 735027 - DNA, 120 bp, Artificial Sequence
  ENSG00000198887_32 (sequence is synthesized)
aaaagattaccttatctccagtaggaaatggaattttatgggcctttaaaagaaagttttatgaaacttgatgctataattttattggtatttcaaggggaaaaaagcactggggttcaa

SEQ ID NO: 735028 - DNA, 120 bp, Artificial Sequence
  ENSG00000198887_33 (sequence is synthesized)
aaatggtagcagaactgctttgaaatgctgcaaggtggccactagatgatgcaaaatacaaccaaaagattgactgagaataaaattaggtgacaagggtttttaaagaataacctttta

SEQ ID NO: 735029 - DNA, 120 bp, Artificial Sequence
  ENSG00000198887_34 (sequence is synthesized)
aagtgtgggggcaggggttgcttttttttattttatttaaagtcaattatattttacatcttacatttctaaaagcattttataattatttttagtaagatttttcttaaaatttcatat

SEQ ID NO: 735030 - DNA, 120 bp, Artificial Sequence
  ENSG00000198887_35 (sequence is synthesized)
actggtttctacaatttatatttgaaatttctcagtgttatgtaaagagtgatggaaaagcattgatttctttaaaaccgtaatgtttttagaacttaagcctatagggcctttcttaca

SEQ ID NO: 735031 - DNA, 120 bp, Artificial Sequence
  ENSG00000198887_36 (sequence is synthesized)
atgttgatgtacccattatcttagaaaatctagtttaaactgttttctttcaccgcaaaagaattaaatgggaaaatcatttgtttatctctaagttatactaattagtagaaccaaaca

SEQ ID NO: 735032 - DNA, 120 bp, Artificial Sequence
  ENSG00000198887_37 (sequence is synthesized)
aattatcttcttttaaaaaataaatcttataggaaaatagacagtccaaagtcatgtctttgaacagtggattggatctgtgccagtaatgacaaaattatttttttgacttgcttgcct

SEQ ID NO: 735033 - DNA, 120 bp, Artificial Sequence
  ENSG00000198887_38 (sequence is synthesized)
gaataaattgaagaattgctttcagtttgggttttgtatattcttaagtagccattgaaatttatattcttaactaggtcaaaaaataatgagccataagtttatgtcctctcacttaga

SEQ ID NO: 735034 - DNA, 120 bp, Artificial Sequence
  ENSG00000198887_39 (sequence is synthesized)
cattttctctttaaaaaggtattttcttctttataaacattttaaaagagccttcccttcttaaactaactccagtgcatgaagtgtgaaaatattttaaaatgacatttttactaatat

SEQ ID NO: 735035 - DNA, 120 bp, Artificial Sequence
  ENSG00000198887_40 (sequence is synthesized)
gagcaagtcatgtaaacattgaagaacttggtaacatattagtaaatggatattaccaaatgttttcatcgttaattactttgcgttccaccaaaatatctttactaaaatgtgcttggt

SEQ ID NO: 735036 - DNA, 120 bp, Artificial Sequence
  ENSG00000198887_41 (sequence is synthesized)
gtagtttgtttattgtctaaattagtaccagtcatcttatttctgcaaaatgagtatcaatgtgaaaaagacacgtgaagattaagcatgtttgaaaataaaatggtcaattacatttca

SEQ ID NO: 735037 - DNA, 120 bp, Artificial Sequence
  ENSG00000198887_42 (sequence is synthesized)
atttacataggccaacaactgttccatactttgtttgtaaacatttaatttctctactggacaaaattaatatttggctttacattgaattttgagctgtgaagaataaattatgtatca

SEQ ID NO: 735038 - DNA, 120 bp, Artificial Sequence
  ENSG00000198887_43 (sequence is synthesized)
ttgaattttgagctgtgaagaataaattatgtatcattttagcatattaaacagtagtaagtctagcacatagtctcagccacttaaaacaaaagtttttttgtttgtttgtttgtttgt

SEQ ID NO: 735039 - DNA, 120 bp, Artificial Sequence
  ENSG00000198887_44 (sequence is synthesized)
tgcacccggccaaaagttgatttttaattacataaaaatcgtaaaaacttctagtaaaaacttgatttggtgaatacagttatatttaaaaaccttaaggtgacaagcattttctatgcc

SEQ ID NO: 735040 - DNA, 120 bp, Artificial Sequence
  ENSG00000198887_45 (sequence is synthesized)
taaatcttcattggtttgcctggaaagagtctctgttaaaagattttccatattcaaagtaaaaggaaagatttcttgctttctaattgtcttttggacacatgcctattttctttgagg

SEQ ID NO: 735041 - DNA, 120 bp, Artificial Sequence
  ENSG00000198887_46 (sequence is synthesized)
tataaacctttagatgtgaaaaatgtaatttcattctgctattgtgtgtgcttgtgtgtgtgtaattgaaaaaactgggaaatcctgctttgttggtaataaatcaatatttttatattc

SEQ ID NO: 735042 - DNA, 120 bp, Artificial Sequence
  ENSG00000198887_47 (sequence is synthesized)
atgtactgattgcctcccctcaaaaaaaaaagtatatgttctaatttgtccccatggcatggactcagaagatagtactgtggtgaaattcaactgtcaaagtaattagattctcaggat

SEQ ID NO: 735043 - DNA, 120 bp, Artificial Sequence
  ENSG00000198887_48 (sequence is synthesized)
ttttaagattatggaatcttagccattgtaacaggccgtgaaaaacatgatgtgtcgtaaaaaatagggagtttttccacatttttaaactgaatatatatatatatataaaataatgtt

SEQ ID NO: 735044 - DNA, 120 bp, Artificial Sequence
  ENSG00000198887_49 (sequence is synthesized)
gcttaagagatcaatggtattggtactataacatttattcttccaatacaaatgccttttaatgggtacagttggaacatatatagtttttcatggaaacattgtaccagtaattggtat

SEQ ID NO: 735045 - DNA, 120 bp, Artificial Sequence
  ENSG00000198887_50 (sequence is synthesized)
atcagaaataataaatagaatattttaaaaataaagggaaaatgaaaatgtttccctggaaattggggtgtttaattagggttcaatgagagctgaatatttaaggctaacatctgccaa

SEQ ID NO: 735046 - DNA, 120 bp, Artificial Sequence
  ENSG00000198888_0 (sequence is synthesized)
atacccatggccaacctcctactcctcattgtacccattctaatcgcaatggcattcctaatgcttaccgaacgaaaaattctaggctatatacaactacgcaaaggccccaacgttgta

SEQ ID NO: 735047 - DNA, 120 bp, Artificial Sequence
  ENSG00000198888_1 (sequence is synthesized)
ggcccctacgggctactacaacccttcgctgacgccataaaactcttcaccaaagagcccctaaaacccgccacatctaccatcaccctctacatcaccgccccgaccttagctctcacc

SEQ ID NO: 735048 - DNA, 120 bp, Artificial Sequence
  ENSG00000198888_2 (sequence is synthesized)
atcgctcttctactatgaacccccctccccatacccaaccccctggtcaacctcaacctaggcctcctatttattctagccacctctagcctagccgtttactcaatcctctgatcaggg

SEQ ID NO: 735049 - DNA, 120 bp, Artificial Sequence
  ENSG00000198888_3 (sequence is synthesized)
ctttaacctctccacccttatcacaacacaagaacacctctgattactcctgccatcatgacccttggccataatatgatttatctccacactagcagagaccaaccgaacccccttcga

SEQ ID NO: 735050 - DNA, 120 bp, Artificial Sequence
  ENSG00000198888_4 (sequence is synthesized)
ccttgccgaaggggagtccgaactagtctcaggcttcaacatcgaatacgccgcaggccccttcgccctattcttcatagccgaatacacaaacattattataataaacaccctcaccac

SEQ ID NO: 735051 - DNA, 120 bp, Artificial Sequence
  ENSG00000198888_5 (sequence is synthesized)
tacaatcttcctaggaacaacatatgacgcactctcccctgaactctacacaacatattttgtcaccaagaccctacttctaacctccctgttcttatgaattcgaacagcatacccccg

SEQ ID NO: 735052 - DNA, 120 bp, Artificial Sequence
  ENSG00000198888_6 (sequence is synthesized)
attccgctacgaccaactcatacacctcctatgaaaaaacttcctaccactcaccctagcattacttatatgatatgtctccatacccattacaatctccagcattccccctcaaaccta

SEQ ID NO: 735053 - DNA, 120 bp, Artificial Sequence
  ENSG00000198889_0 (sequence is synthesized)
agacgcacttcccgccttcgcctaggtctgcaccgccaccgccgccctctcccgcgcgtccctcacccggtccgccactgccgcgcctcagaatccgaaggctcggttccagcgcagcca

SEQ ID NO: 735054 - DNA, 120 bp, Artificial Sequence
  ENSG00000198889_1 (sequence is synthesized)
tccacgccgccgccacgaccgactccggagccacgcgctgcaaccgccaccaacgccttgccgccgccgctcgcccgccgcccaccatggcccagcagcaaacaggtagcaggaaacgga

SEQ ID NO: 735055 - DNA, 120 bp, Artificial Sequence
  ENSG00000198889_2 (sequence is synthesized)
aagcgcccgcggtcgaggcggacgccgagagctcgccgtcgcagggcttggcggcagcggacggtgaggggccgctgctactcaagaggcagaggcggccggcgacgtatcgctcgatgg

SEQ ID NO: 735056 - DNA, 120 bp, Artificial Sequence
  ENSG00000198889_3 (sequence is synthesized)
cgcactatctgaaggttcgggaggtaggcgggtggggccccgccaggctccagggcttcgatggcgagctgcggggctacgcggtacagaggctgcccgagctgctgacggagcgccaac

SEQ ID NO: 735057 - DNA, 120 bp, Artificial Sequence
  ENSG00000198889_4 (sequence is synthesized)
tggagctgggcacggtcaacaaggtgttcgcgtcacagtggctgaactccaggcaggtggtgtgcggcaccaagtgtaacacgcttttcgtggtggacgtggagtcaggccacatcgcgc

SEQ ID NO: 735058 - DNA, 120 bp, Artificial Sequence
  ENSG00000198889_5 (sequence is synthesized)
gcattcccctcttgcgggacagtgaggccaggctggcccaggaccaacagggctgcggcatccatgccatcgagctgaatccctccaagacgcttctggccaccggcggcgaaaacccca

SEQ ID NO: 735059 - DNA, 120 bp, Artificial Sequence
  ENSG00000198889_6 (sequence is synthesized)
acagcctggccatctaccagctgccctccctggatcccctgtgcctgggcgaccgccatggccacaaggactggatcttcgccgtcgcctggctgagtgacaccgtagccgtgagcggct

SEQ ID NO: 735060 - DNA, 120 bp, Artificial Sequence
  ENSG00000198889_7 (sequence is synthesized)
cccgcgacggcactgtggcgctgtggcggatggacccggacaagttcgatgacactgttgcctggcatagcgaggtgggtctccccgtatatgcccacatccgtccgagggatgtggagg

SEQ ID NO: 735061 - DNA, 120 bp, Artificial Sequence
  ENSG00000198889_8 (sequence is synthesized)
ccatccccagggccatcatcaaccccagtaaccgcaaggtgcgggccctggcctgcggcggcaagaaccaggaactgggagcggtgtccttggacggctacttccacctgtggaaagccg

SEQ ID NO: 735062 - DNA, 120 bp, Artificial Sequence
  ENSG00000198889_9 (sequence is synthesized)
ggagcgcactatccaggctgctgtccatcaggctgccctacttccgggataatgtgtgcctgacctactgtgatgatatgtctgtgtacgccgtgggctcccattcccacgtctctttcc

SEQ ID NO: 735063 - DNA, 120 bp, Artificial Sequence
  ENSG00000198889_10 (sequence is synthesized)
tggatctgcgccaggaccagcagaacatccggcccctgtgttctcgagagggtggcacaggcgtgcggtcgctgagcttctaccgccacatcatcactgtgggcaccggtcagggctccc

SEQ ID NO: 735064 - DNA, 120 bp, Artificial Sequence
  ENSG00000198889_11 (sequence is synthesized)
tgctcttctatgacgtccgggcccagaaattcctggaggaaagagcctccgccaccctggagtcctcttcgggacctgcaaggaggaagctcaggcttgcctgtggcagaggctggctca

SEQ ID NO: 735065 - DNA, 120 bp, Artificial Sequence
  ENSG00000198889_12 (sequence is synthesized)
accacaatgatttctgggtgaattactttggtggcatggaagtgtttcccaatgcgctctacacccactgctacaactggcctgagatgaagctctttgtggctggggggcctctccctg

SEQ ID NO: 735066 - DNA, 120 bp, Artificial Sequence
  ENSG00000198889_13 (sequence is synthesized)
tgagtggtcctttggtcaatgaaaacttggctttaagactttttgactcctttccaacaccatcttttggaattttcatacaaagaaatttggttaatcgttaatctttagttgcattct

SEQ ID NO: 735067 - DNA, 120 bp, Artificial Sequence
  ENSG00000198889_14 (sequence is synthesized)
ctctttgagtgattcatacattctgtttctttaagaagatgcagtcatggtctttcagttatgtatatttgttttccttgtttttcctcgttaccaatattacaacagcattgttttcag

SEQ ID NO: 735068 - DNA, 120 bp, Artificial Sequence
  ENSG00000198889_15 (sequence is synthesized)
ttatttttcattgcagatacgaagagaaaattttctagtaagcaaggtgttcctacatcttttctggagagcttaccatagttttatagcattgttcaattggaaaagtacattccaagt

SEQ ID NO: 735069 - DNA, 120 bp, Artificial Sequence
  ENSG00000198889_16 (sequence is synthesized)
tctagattacctacgtttggaaacacttaatttacaaattgtgatcttagtgtatatagtttttacgttgttggtgctaaagtgcttttttgaagtttattctctttcaaaataagttat

SEQ ID NO: 735070 - DNA, 120 bp, Artificial Sequence
  ENSG00000198889_17 (sequence is synthesized)
catagaatcttgtgcttgtatcaaactcctaattggtcggaacactttaggagtgcaggggttctgcttcattgcattttcagaattaacctgaaagttgaaacaaccatttttttttat

SEQ ID NO: 735071 - DNA, 120 bp, Artificial Sequence
  ENSG00000198889_18 (sequence is synthesized)
ttcaaaacttatttaagttgttatcacctgtccttaaatagataaaagaatgtgtattttttcacttgttgccttagtactatcaagacttgtgaatatatttgaatgtatgttgtttga

SEQ ID NO: 735072 - DNA, 120 bp, Artificial Sequence
  ENSG00000198889_19 (sequence is synthesized)
aaaacttgcacagggcattggagccatcatgaaaagcaggaaatgtaaacgtggaatgtatggcaggctgggcagaatgtatactgatccagggtatagactagatatttttgctgttgc

SEQ ID NO: 735073 - DNA, 120 bp, Artificial Sequence
  ENSG00000198889_20 (sequence is synthesized)
tgtttttattataaaatgttatatttgaggatatttaacattttccaattctgcttaagaggtaattcacaataaaaaaaacaaagaccaaaaatagcacattctgaaaaaaagattctt

SEQ ID NO: 735074 - DNA, 120 bp, Artificial Sequence
  ENSG00000198889_21 (sequence is synthesized)
aataagattttattttgtgaagttcaaagattctttcctaaagtataacgtgttgttaaaaagtagtggtgttataactctcaatgtaatagtatgcaatatcaagaacacaggaagttc

SEQ ID NO: 735075 - DNA, 120 bp, Artificial Sequence
  ENSG00000198889_22 (sequence is synthesized)
gtttcaagataggtgagatttaaaataaataggatgaggttgaagaaaagtatattggagcgcagataaatataaattgtggactgctatgaaaacaggttgtacttctccatatgtgag

SEQ ID NO: 735076 - DNA, 120 bp, Artificial Sequence
  ENSG00000198889_23 (sequence is synthesized)
actactggaagtgagaagcaatatttgtcatttctaaaactggccaggctgtgctgacccaggattagtaatttgttatgtctgttttcccttagatgtttgggcactcagatgctatct

SEQ ID NO: 735077 - DNA, 120 bp, Artificial Sequence
  ENSG00000198889_24 (sequence is synthesized)
tggtgcacacacacaacattgctgttcagtcacaaatccgaacaacttaatataataaattgtactaaaagtcatttaagaaataccaaaaagtaagcttttgtttctaaccattgttat

SEQ ID NO: 735078 - DNA, 120 bp, Artificial Sequence
  ENSG00000198889_25 (sequence is synthesized)
aaaggctaatataattgttgttatatagcagtaagatatatttgtgtgcatgcgtctccaagtcagttgtaaatgtcttgagaacagagaatacaattgtcatctttatattgcctcatt

SEQ ID NO: 735079 - DNA, 120 bp, Artificial Sequence
  ENSG00000198889_26 (sequence is synthesized)
tctccactaatacttagcaaataaaaggcaataagtaaatatgtactggttgaatgcctctggagacctagagtttaaagttttaagtcaataaataaataaatatttactcttaaataa

SEQ ID NO: 735080 - DNA, 120 bp, Artificial Sequence
  ENSG00000198890_0 (sequence is synthesized)
gtgccgcgctacgcccgccgggagccgggcagagcggccaagatgtcgcagcccaagaaaagaaagcttgagtcggggggcggcggcgaaggaggggagggaactgaagaggaagatggc

SEQ ID NO: 735081 - DNA, 120 bp, Artificial Sequence
  ENSG00000198890_1 (sequence is synthesized)
gcggagcgggaggcggccctggagcgaccccggaggactaagcgggaacgggaccagctgtactacgagtgctactcggacgtttcggtccacgaggagatgatcgcggaccgcgtccgc

SEQ ID NO: 735082 - DNA, 120 bp, Artificial Sequence
  ENSG00000198890_2 (sequence is synthesized)
accgatgcctaccgcctgggtatccttcggaactgggcagcactgcgaggcaagacggtactggacgtgggcgcgggcaccggcattctgagcatcttctgtgcccaggccggggcccgg

SEQ ID NO: 735083 - DNA, 120 bp, Artificial Sequence
  ENSG00000198890_3 (sequence is synthesized)
cgcgtgtacgcggtagaggccagcgccatctggcaacaggcccgggaggtggtgcggttcaacgggctggaggaccgggtgcacgtcctgccgggaccagtggagactgtagagttgccg

SEQ ID NO: 735084 - DNA, 120 bp, Artificial Sequence
  ENSG00000198890_4 (sequence is synthesized)
gaacaggtggatgccatcgtgagcgagtggatgggctacggactcctgcacgagtccatgctgagctccgtcctccacgcgcgaaccaagtggctgaaggagggcggtcttctcctgccg

SEQ ID NO: 735085 - DNA, 120 bp, Artificial Sequence
  ENSG00000198890_5 (sequence is synthesized)
gcctccgccgagctcttcatagcccccatcagcgaccagatgctggaatggcgcctgggcttctggagccaggtgaagcagcactatggtgtggacatgagctgcctggagggcttcgcc

SEQ ID NO: 735086 - DNA, 120 bp, Artificial Sequence
  ENSG00000198890_6 (sequence is synthesized)
acgcgctgtctcatgggccactcggagatcgttgtgcagggattgtccggcgaggacgtgctggcccggccgcagcgctttgctcagctagagctctcccgcgccggcttggagcaggag

SEQ ID NO: 735087 - DNA, 120 bp, Artificial Sequence
  ENSG00000198890_7 (sequence is synthesized)
ctggaggccggagtgggcgggcgcttccgctgcagctgctatggctcggcgcccatgcatggctttgccatctggttccaggtgaccttccctggaggggagtcggagaaacccctggtg

SEQ ID NO: 735088 - DNA, 120 bp, Artificial Sequence
  ENSG00000198890_8 (sequence is synthesized)
ctgtccacctcgccttttcacccggccactcactggaaacaggcgctcctctacctgaacgagccggtgcaagtggagcaagacacggacgtttcaggagagatcacgctgctgccctcc

SEQ ID NO: 735089 - DNA, 120 bp, Artificial Sequence
  ENSG00000198890_9 (sequence is synthesized)
cgggacaacccccgtcgcctgcgcgtgctgctgcgctacaaagtgggagaccaggaggagaagaccaaagactttgccatggaggactgagcgttgccttttctcccagctacctcccaa

SEQ ID NO: 735090 - DNA, 120 bp, Artificial Sequence
  ENSG00000198890_10 (sequence is synthesized)
ctagggagggagagtgacttcattctccatttgaagagattcttctggtgatgtttacttaaaaagtgatccccctcaacaacggatacagcgtgcttattattgggcatttagcctcaa

SEQ ID NO: 735091 - DNA, 120 bp, Artificial Sequence
  ENSG00000198890_11 (sequence is synthesized)
aagcatgtagtaccaagcacttgtatttccgtatattttgtttcgcgggggagtgagggggaagaacacggatgaaaatgtcagtttttgaagggtccatgcacatccctgacacctcac

SEQ ID NO: 735092 - DNA, 120 bp, Artificial Sequence
  ENSG00000198890_12 (sequence is synthesized)
accttatctaagtctgaagctggggagaaaggggttcatttagacttcatacatttccagtacgactttagtatctctccagagccatattttctcagtccgaattaattccccctccct

SEQ ID NO: 735093 - DNA, 120 bp, Artificial Sequence
  ENSG00000198890_13 (sequence is synthesized)
aggtgcctgtaggctatggtacttcttcctcattgttttctaggtaaacttcactactggtaattaaggggaaggatatgaggaagcagtttaaatagccctgttctcattactctgacc

SEQ ID NO: 735094 - DNA, 120 bp, Artificial Sequence
  ENSG00000198890_14 (sequence is synthesized)
acatacatcatagggtgctaaagttgatgaacacattaatccgttaagtaaaatggactttgtaattgtacagcatacctaagaaactcagaaggtgcatttaagagagagacctgaaag

SEQ ID NO: 735095 - DNA, 120 bp, Artificial Sequence
  ENSG00000198890_15 (sequence is synthesized)
aaatagtatggatttttaaaaattcttgtctctactattataaccaaaaaatatttcttgtatgtcccataaaaatatttgtgtaattcttatgaaacaggctggtagaggaggtttctg

SEQ ID NO: 735096 - DNA, 120 bp, Artificial Sequence
  ENSG00000198890_16 (sequence is synthesized)
agcctagcccaagggcttattcatcaccatgggtaaattatttaaactcacttaattaaggaaaatattttcccagctagaaaagtatactcattctcatttaaactctctcatttggag

SEQ ID NO: 735097 - DNA, 120 bp, Artificial Sequence
  ENSG00000198890_17 (sequence is synthesized)
ggatcatgtgagttggcctacttacaagtagtgaaagttcccttttcagttttgttttgttttgttttgtttttctctttcactcagccaaatgtgaaagttgtgaatttaggaaaatca

SEQ ID NO: 735098 - DNA, 120 bp, Artificial Sequence
  ENSG00000198890_18 (sequence is synthesized)
cttgtaatgaagtgtgaatcttgttatcaaatttatttctctgatgtttccttccttatccttgtagccaataaaacattgacattctcacgttttatagatgaggtaaaaagtcttgtg

SEQ ID NO: 735099 - DNA, 120 bp, Artificial Sequence
  ENSG00000198890_19 (sequence is synthesized)
tgctgtgagttataatgcttttgcctttttaatattattagttcttaagtgttacagccccttcagaatataacttcaggacaattcaaactatgcttaatgtatgattttcgagcttct

SEQ ID NO: 735100 - DNA, 120 bp, Artificial Sequence
  ENSG00000198890_20 (sequence is synthesized)
gtatgctaagaaaataggtgtgaaaaactggtgttctgaaatagcctaacatttattgtaattctgaattttctgcccttttattcattgcatattaaagtattagagtataaaaactaa

SEQ ID NO: 735101 - DNA, 120 bp, Artificial Sequence
  ENSG00000198890_21 (sequence is synthesized)
cctctggagtgaggacacctccagaaggatgaaggtgtaagatgtatcaacatccaggcactgtccaatctgtctgtatggactggtactgactgcttggtgccattggaccacaggcag

SEQ ID NO: 735102 - DNA, 120 bp, Artificial Sequence
  ENSG00000198890_22 (sequence is synthesized)
gaactaccaggcccaaaggagaggaaaacatggtaaagttcaacctgcttccctcaaacaacttacatttattttgcgctgtgaaagtttacaaatattttcattaattcattggaccaa

SEQ ID NO: 735103 - DNA, 120 bp, Artificial Sequence
  ENSG00000198890_23 (sequence is synthesized)
tggacattttattgagtatacaatgcaacagtcattgtgataagcatttaggatacaaaccaacaaaacacagtttcttccttcaaatgatatgttcataagataaaatggtaagtacaa

SEQ ID NO: 735104 - DNA, 120 bp, Artificial Sequence
  ENSG00000198890_24 (sequence is synthesized)
tctcaagagttaaagtgacatctgtaggcatttaaagccgactgatcattgtcttaggtcagaatctccaggagccaaccttgagataaggatacatgtaaaagtgttatcaaaaagtgt

SEQ ID NO: 735105 - DNA, 120 bp, Artificial Sequence
  ENSG00000198890_25 (sequence is synthesized)
tccaaaaaaatggcagaagggtagttggcaaatgagactaggaatggtaagccaggctagagtgtgatatcgagcaaattcccaagaaatgttcagtctcacagagatactctggctaca

SEQ ID NO: 735106 - DNA, 120 bp, Artificial Sequence
  ENSG00000198890_26 (sequence is synthesized)
ggatggatcacgcctcagaatgtatcagtgaagaagcaaaaaatctggaacattcctaccttctcacctgccagtcattcgttaatgactgccccaggggagacataagtttcctggctc

SEQ ID NO: 735107 - DNA, 120 bp, Artificial Sequence
  ENSG00000198890_27 (sequence is synthesized)
tctacatgaatgtgcatcgcagcttccacaggctaaggacagtcacccaacaaagggttgccagtgcagtgctgagggttgaggtgaaagcactgggggagcagatatgggaaaaagaag

SEQ ID NO: 735108 - DNA, 120 bp, Artificial Sequence
  ENSG00000198890_28 (sequence is synthesized)
aaagaaaaaagcaaaggatataaagcaatgtaattggaacactgataggatatggctatagtggtaaatgtcctttttaagattcctttacattctaaaatagttgcagacacatttgtt

SEQ ID NO: 735109 - DNA, 120 bp, Artificial Sequence
  ENSG00000198890_29 (sequence is synthesized)
ttatgtccctctttcattaggtttttgaagctgcattaataaagtgcgaatgaaacaaattgtttggaagtaaaaagttaataattccctatttccacagtccagtatatctttccacta

SEQ ID NO: 735110 - DNA, 120 bp, Artificial Sequence
  ENSG00000198890_30 (sequence is synthesized)
cataaacttacatacaaatatttatataattttttacaaatatggaaacgtataattcatgttactctggaagttgtttttttttcagtttaactctgcacatactaagtatcccaagaa

SEQ ID NO: 735111 - DNA, 120 bp, Artificial Sequence
  ENSG00000198890_31 (sequence is synthesized)
ctcaatacatgtacaaataacttgttattgataatagcaatatgaaagtttatggtatgaaaatttattgttttgtgtactgatatttctgtatctttaggctagactcccttaagtatt

SEQ ID NO: 735112 - DNA, 120 bp, Artificial Sequence
  ENSG00000198890_32 (sequence is synthesized)
tgcttatttttaattttagtaaatcctggcagattgttttccgaaagggtcatataattcacattcctaacaaggatataagagaaagcctgttttgtgatacacccactcacctggatt

SEQ ID NO: 735113 - DNA, 120 bp, Artificial Sequence
  ENSG00000198890_33 (sequence is synthesized)
ttattaatcttatttatgttaatcttatgggcaaaaaaatactagcttcttgttttagtttttattaccctaactcctggtgggttgagcatctttctttatattcattatccatttata

SEQ ID NO: 735114 - DNA, 120 bp, Artificial Sequence
  ENSG00000198892_0 (sequence is synthesized)
ccaccgcggagccggggacagggggagcagggcagtgctctgctgggtgaggggcacccagctccagaggctaggtgggcgtcgctggtgggtggactcctgggcgctgcgcggagccgc

SEQ ID NO: 735115 - DNA, 120 bp, Artificial Sequence
  ENSG00000198892_1 (sequence is synthesized)
gccggctgggttagcgcgggcggggcgcttagtcccacccccagaggaggcggaagaggagcccgagcctggccgcgggctgggccccgccgcagctccagctggccggcttggtcctgc

SEQ ID NO: 735116 - DNA, 120 bp, Artificial Sequence
  ENSG00000198892_2 (sequence is synthesized)
gcttggtcctgcggtcccttctctgggaggcccgaccccggccgcgcccagcccccaccatgccacccgcggggctccgccgggccgcgccgctcaccgcaatcgctctgttggtgctgg

SEQ ID NO: 735117 - DNA, 120 bp, Artificial Sequence
  ENSG00000198892_3 (sequence is synthesized)
tgctggccggcgaggactgcctgtggtacctggaccggaatggctcctggcatccggggtttaactgcgagttcttcaccttctgctgcgggacctgctaccatcggtactgctgcaggg

SEQ ID NO: 735118 - DNA, 120 bp, Artificial Sequence
  ENSG00000198892_4 (sequence is synthesized)
acctgaccttgcttatcaccgagaggcagcagaagcactgcctggccttcagccccaagaccatagcaggcatcgcctcagctgtgatcctctttgttgctgtggttgccaccaccatct

SEQ ID NO: 735119 - DNA, 120 bp, Artificial Sequence
  ENSG00000198892_5 (sequence is synthesized)
gctacctgtaccgccggcgccagcagctccagagcccatttgaaggccaggagattccaatgacaggcatcccagtgcagccagtatacccatacccccaggaccccaaagctggccctg

SEQ ID NO: 735120 - DNA, 120 bp, Artificial Sequence
  ENSG00000198892_6 (sequence is synthesized)
cacccccacagcctggcttcatatacccacctagtggtcctgctccccaatatccactctacccagctgggcccccagtctacaaccctgcagctcctcctccctatatgccaccacagc

SEQ ID NO: 735121 - DNA, 120 bp, Artificial Sequence
  ENSG00000198892_7 (sequence is synthesized)
cctcttacccgggagcctgaggaaccagccatgtctctgctgccccttcagtgatgccaaccttgggagatgccctcatcctgtacctgcatctggtcctgggggtggcaggagtcctcc

SEQ ID NO: 735122 - DNA, 120 bp, Artificial Sequence
  ENSG00000198892_8 (sequence is synthesized)
agccaccaggccccagaccaagccaagccctgggccctactggggacagagccccagggaagtggaacaggagctgaactagaactatgaggggttggggggagggcttggaattatggg

SEQ ID NO: 735123 - DNA, 120 bp, Artificial Sequence
  ENSG00000198892_9 (sequence is synthesized)
ctatttttactgggggcaagggagggagatgacagcctgggtcacagtgcctgttttcaaatagtccctctgctcccaagatcccagccaggaaggctggggccctactgtttgtcccct

SEQ ID NO: 735124 - DNA, 120 bp, Artificial Sequence
  ENSG00000198892_10 (sequence is synthesized)
ctgggctggggtggggggagggaggaggttccgtcagcagctggcagtagccctcctctctggctgccccactggccacatctctggcctgctagattaaagctgtaaagacataactca

SEQ ID NO: 735125 - DNA, 120 bp, Artificial Sequence
  ENSG00000198892_11 (sequence is synthesized)
ccacgggagccttgggtgttgctgggtcctcaagaagcgggaagagggagctccaggatgctgggccatgggaggctgatcccggggtgcagggtcagcttcaggcagaggcctcggggg

SEQ ID NO: 735126 - DNA, 120 bp, Artificial Sequence
  ENSG00000198892_12 (sequence is synthesized)
tggggctgagaccctcagggtggagacaaggggcaaccctcagtgttcgggagccgtcaggctggggaccgccgggggagtggggccgagcgcggctggggatgaactggcctggtggcc

SEQ ID NO: 735127 - DNA, 120 bp, Artificial Sequence
  ENSG00000198894_0 (sequence is synthesized)
gagacacccagcgacgacgaggttgtcatggtgccgcggggccgtgctcgcgcatgcgccacctgacccacaggccggtcgtggagctgcgaccccggccctagggcagtccagatgaaa

SEQ ID NO: 735128 - DNA, 120 bp, Artificial Sequence
  ENSG00000198894_1 (sequence is synthesized)
agagtaccaatgaatctgcctccagctgaataaaccatggagaggaaaaacccatccagagagagccccagaagactctctgccaaagtaggcaaaggcacagagatgaagaaagtggct

SEQ ID NO: 735129 - DNA, 120 bp, Artificial Sequence
  ENSG00000198894_2 (sequence is synthesized)
cgtcagcttgggatggctgctgctgagtcagacaaggactctggcttttcagatgggagctcggaatgtctgagctctgcagagcagatggagtccgaggacatgctgagcgccttaggc

SEQ ID NO: 735130 - DNA, 120 bp, Artificial Sequence
  ENSG00000198894_3 (sequence is synthesized)
tggagcagagaagacaggccgaggcagaactccaaaactgcaaagaatgccttccctaccctgtctcccatggtcgtcatgaagaatgtgcttgtcaaacagggcagcagctcatcccag

SEQ ID NO: 735131 - DNA, 120 bp, Artificial Sequence
  ENSG00000198894_4 (sequence is synthesized)
ctccagtcgtggactgtccagccctcctttgaagtgatctcagcacagccacagctcttattccttcatccacctgtaccatctcctgtcagtccatgtcacactggtgagaaaaagtcc

SEQ ID NO: 735132 - DNA, 120 bp, Artificial Sequence
  ENSG00000198894_5 (sequence is synthesized)
gactccaggaactacttgcccattctgaattcttacaccaaaatagccccacatccaggcaaaaggggcctttcccttggcccagaagaaaaaggaacaagtggagtgcagaagaaaatc

SEQ ID NO: 735133 - DNA, 120 bp, Artificial Sequence
  ENSG00000198894_6 (sequence is synthesized)
tgtactgagagacttgggcctagcttgtcttccagtgagccaaccaaggctggtgctgtcccatccagtccctcgacgccagcaccacccagcgccaaacttgccgaggactcagctctg

SEQ ID NO: 735134 - DNA, 120 bp, Artificial Sequence
  ENSG00000198894_7 (sequence is synthesized)
cagggtgtgccctctctggtggcaggtggaagtccacagactcttcagccggtatccagcagtcacgtggctaaagctcccagtctgaccttcgcttcccccgccagtcctgtctgcgca

SEQ ID NO: 735135 - DNA, 120 bp, Artificial Sequence
  ENSG00000198894_8 (sequence is synthesized)
tcagacagcactctccatgggttagagagcaactctcccctttcaccactgtccgctaattatagctcacctttatgggctgcagagcacctctgccgcagcccagatatcttttcagag

SEQ ID NO: 735136 - DNA, 120 bp, Artificial Sequence
  ENSG00000198894_9 (sequence is synthesized)
cagcggcagagcaaacataggcgctttcagaataccctagtagtcctacataaatctggtttgctggagatcactttgaaaaccaaggagttgattcgtcagaatcaggcaactcaggta

SEQ ID NO: 735137 - DNA, 120 bp, Artificial Sequence
  ENSG00000198894_10 (sequence is synthesized)
gaactagaccagctaaaggagcaaacccagctgtttatagaagccaccaagagcagggcccctcaggcttgggccaagctgcaggcatctttaacacctgggtccagtaatacaggcagt

SEQ ID NO: 735138 - DNA, 120 bp, Artificial Sequence
  ENSG00000198894_11 (sequence is synthesized)
gacctagaagcattctctgatcacccagccatatagcacagaggcatattttcctgttacttgagtggttcttttagctcatttgctgttacctactcctgtttcccaaagcttatgtaa

SEQ ID NO: 735139 - DNA, 120 bp, Artificial Sequence
  ENSG00000198894_12 (sequence is synthesized)
gagcttttccttctaaacttaaactgtgttgtggttcacttaggaagccacgtgccaatacctggctgctgtcttaactcgtagtctgggcacaggatacatatgtccccgtcccactga

SEQ ID NO: 735140 - DNA, 120 bp, Artificial Sequence
  ENSG00000198894_13 (sequence is synthesized)
ggacctcagtttgggagtgcccttgagccccttttccttagcctgcaggtgcttcaatggatcatggggcaaagcaggagatgattgtgtggggctcttcctgctgtcacctcccatcat

SEQ ID NO: 735141 - DNA, 120 bp, Artificial Sequence
  ENSG00000198894_14 (sequence is synthesized)
cccactctctcaccaggatcaagggtacagtaacacgaatgagcatacagagcaacacctgttgagccagggagtaggtgacacaaggaaaccttcatggatcttcccttgcctgtctta

SEQ ID NO: 735142 - DNA, 120 bp, Artificial Sequence
  ENSG00000198894_15 (sequence is synthesized)
gtcacagagagaaataagaggaggttgtttgcatcccacaaggcatcgtactagttgggcgagacctaaaattccctgggcacaggttgcacctgggtgtgagcacttaatcactcaacg

SEQ ID NO: 735143 - DNA, 120 bp, Artificial Sequence
  ENSG00000198894_16 (sequence is synthesized)
ctttgttttcttacacttgaaaatcaagggaaagagtagtaccatctgactcctacactttcattacaagtcagatttttcttaaactagcaggcaaaaacagtacttccaaattttaag

SEQ ID NO: 735144 - DNA, 120 bp, Artificial Sequence
  ENSG00000198894_17 (sequence is synthesized)
gtatggaatgaatgcagtacatctggaattgtagtcgatgaattgcttttttgacttagaagctgaagaaaatagacatagccggcatatctcatggtcaggagctggacgattctggta

SEQ ID NO: 735145 - DNA, 120 bp, Artificial Sequence
  ENSG00000198894_18 (sequence is synthesized)
ggctttttttctctcttcttttgaaacagtgtaacctgttttatgtctaaaaatcttaaggatagtttcagtggttcctgggatgtagtataagttaactctgctgccatcttgtttttt

SEQ ID NO: 735146 - DNA, 120 bp, Artificial Sequence
  ENSG00000198894_19 (sequence is synthesized)
ttttttttcctttattttgataagtgattattatgcttgataaactttgaattaaatacagttgtcttgagggtatgataagtccacaaaaaattggaaagcatcttacccattttcttc

SEQ ID NO: 735147 - DNA, 120 bp, Artificial Sequence
  ENSG00000198894_20 (sequence is synthesized)
acatcccaaatttttatttgttccatgtcatagtgatgggaagcagttacagagcagcgtcttctgtgtttccttcatgtgttagatattggcaacaaagccagaggtgtaatgttggtt

SEQ ID NO: 735148 - DNA, 120 bp, Artificial Sequence
  ENSG00000198894_21 (sequence is synthesized)
atatgaagttcatctcaaaatggagaccatgaccagagtttccagatgatacacgttcttttcagcttcattaaataggcaactatgtttctaaatagtaaagtttcaaaatattctctc

SEQ ID NO: 735149 - DNA, 120 bp, Artificial Sequence
  ENSG00000198894_22 (sequence is synthesized)
aaatattctctcaatttaaaatttcatcctcttgaaaatctttgttctttacaaaattatcttaataagttctatatggtcagcttcatcttccttttttttttttttgagatggagttt

SEQ ID NO: 735150 - DNA, 120 bp, Artificial Sequence
  ENSG00000198894_23 (sequence is synthesized)
gagccaccacgctcagctcagcttcaccctgtctgcaaagaaaagttttaccaagaccagaagttaaatatgacatttcctaggtagttgtaactctaacatagtttaaaaagtatgtgg

SEQ ID NO: 735151 - DNA, 120 bp, Artificial Sequence
  ENSG00000198894_24 (sequence is synthesized)
cttcagattgcctatactttgttcacaaacgtgtgatttagatatgactgatgtagaagtgaacaacttggtaacatccctagactccactcatgaacgcagaattattacctgctgttt

SEQ ID NO: 735152 - DNA, 120 bp, Artificial Sequence
  ENSG00000198894_25 (sequence is synthesized)
gctttctgaaagaatttcagaaatcagagcaaatgtgtctttaggcagattcagctccttttaatatttttctcttggcccactctctttgcttcccctgaatctgtgtggtactatagc

SEQ ID NO: 735153 - DNA, 120 bp, Artificial Sequence
  ENSG00000198894_26 (sequence is synthesized)
agctctactctgtgcaccatgctaggaagcttcctttttggcagaatatgtttggcagcaaagctatagagacaggtgcattcagaacatcctgggcaccagtcatgagtcttactgtgt

SEQ ID NO: 735154 - DNA, 120 bp, Artificial Sequence
  ENSG00000198894_27 (sequence is synthesized)
caaaaatctgaaaacacttgctgagaaccaaatttattccattggaaaaaccctctgtggagctataagcctcttggactcttcttcctagattaaggcttgcatttccctccctgtttc

SEQ ID NO: 735155 - DNA, 120 bp, Artificial Sequence; identical to SEQ ID NO: 523216
  ENSG00000198894_28 (sequence is synthesized)

SEQ ID NO: 735156 - DNA, 120 bp, Artificial Sequence; identical to SEQ ID NO: 523217
  ENSG00000198894_29 (sequence is synthesized)

SEQ ID NO: 735157 - DNA, 120 bp, Artificial Sequence
  ENSG00000198894_30 (sequence is synthesized)
gtgaccagaaagatctccatcggttgcccaaggctgtaagtagtgatggttttagcgatgaataacgtaattggctatgaagtactgtggcagagctgctgttttctgaaggtgagaagc

SEQ ID NO: 735158 - DNA, 120 bp, Artificial Sequence
  ENSG00000198894_31 (sequence is synthesized)
catttttagctcagagcaacccttaagagaacttttggcagattttgttggcattattgaaatatatatagaaaagttgctgattgcaatggttatgggaatggaatttaatgacatttg

SEQ ID NO: 735159 - DNA, 120 bp, Artificial Sequence
  ENSG00000198894_32 (sequence is synthesized)
taatttattacactcattggtttttattgattatagtattgtctgactttttattttctactatggttcctttagcagaaaagtaacttttgtgcatatattgaagtggtttttcagcta

SEQ ID NO: 735160 - DNA, 120 bp, Artificial Sequence
  ENSG00000198894_33 (sequence is synthesized)
tgaattctttagggtagaaatttatttagcaaatgtgaattcttttgagaaagtatgaagttttgcagaaattgactgtgaaatgtcagagaaaaataaaagtcacttacttgaaaccta

SEQ ID NO: 735161 - DNA, 120 bp, Artificial Sequence
  ENSG00000198894_34 (sequence is synthesized)
agatgcaacgtgggctggtgcgaatgggggaccagacgtggaggttagatcttaaggtgaccgtggtgtttggaaatgcagaatcttgaccttcaagctgttcagggcagtccagatgaa

SEQ ID NO: 735162 - DNA, 120 bp, Artificial Sequence
  ENSG00000198894_35 (sequence is synthesized)
gaaagggagggctcggtccgggaggaggggagcagggatgacggcgggagagggattgggcgaggagcgtggggaaaggaggtggaagtaggggagagaggaagaggagcgagtaggcaa

SEQ ID NO: 735163 - DNA, 120 bp, Artificial Sequence
  ENSG00000198894_36 (sequence is synthesized)
gaggggcaaaccgggactttcggaggacggagagccaaatggtgggagcagggctttggtttgctgtgaggggcgtgggagagggaatcgcgggtgaggagggggctgcgtgtggggagg

SEQ ID NO: 735164 - DNA, 120 bp, Artificial Sequence
  ENSG00000198894_37 (sequence is synthesized)
aggcttgtgtgaggggcaggtgggccctggtctagccctgggcgcaaccgccagccggctgggcggggagagagcttggagtccagcccggctgggagctgagggccaagcaatgggcag

SEQ ID NO: 735165 - DNA, 120 bp, Artificial Sequence
  ENSG00000198894_38 (sequence is synthesized)
aatatcttatccttcctctgttttgtgagtgaatgctttgcgtgaaaaatttcctccccaaaactcatttatgtgataaggatgggatgctttcacacacaggataaatacttacctgct

SEQ ID NO: 735166 - DNA, 120 bp, Artificial Sequence
  ENSG00000198894_39 (sequence is synthesized)
ttaaaatggtaattctgatgccatatgtcagggtacccatcaaagtcaccacagggttagttctgaaagaattatttaacatcttttttcaacttagactctgaatcttacacttccaac

SEQ ID NO: 735167 - DNA, 120 bp, Artificial Sequence
  ENSG00000198894_40 (sequence is synthesized)
ttccaagggcccttctaggagaacagcgtgcggtctccatggtgccgggtcatccgagtcgggtcacgtggctggcgaaagccgtcgcggaggcgtggggaggagaaatgggcgggaggc

SEQ ID NO: 735168 - DNA, 120 bp, Artificial Sequence
  ENSG00000198898_0 (sequence is synthesized)
gccgcggtttgtcgccagaaggaagatggcggatctggaggagcagttgtctgatgaagagaaggtgcgtatagcagcaaaattcatcattcatgcccctcctggagaatttaatgaggt

SEQ ID NO: 735169 - DNA, 120 bp, Artificial Sequence
  ENSG00000198898_1 (sequence is synthesized)
tttcaatgatgttcggttactgcttaataatgacaatcttctcagggaaggagcagcccatgcatttgcacagtataacttggaccagtttactccagtaaaaattgaaggttatgaaga

SEQ ID NO: 735170 - DNA, 120 bp, Artificial Sequence
  ENSG00000198898_2 (sequence is synthesized)
tcaggtattgataacagaacatggcgacttgggaaatggaaagtttttggatccaaagaacagaatctgttttaaatttgatcacttaaggaaggaggcaactgatccaagaccctgtga

SEQ ID NO: 735171 - DNA, 120 bp, Artificial Sequence
  ENSG00000198898_3 (sequence is synthesized)
agtagaaaatgcagttgaatcatggagaacttcagtagaaactgctctgagagcttacgtaaaagaacattacccgaatggagtctgcactgtgtatggcaaaaaaatagatggacagca

SEQ ID NO: 735172 - DNA, 120 bp, Artificial Sequence
  ENSG00000198898_4 (sequence is synthesized)
aaccattattgcatgcatagaaagccatcagttccaagcaaaaaatttttggaatggtcgttggaggtcagaatggaagtttacaatcactccttcaaccactcaagtggttggcatctt

SEQ ID NO: 735173 - DNA, 120 bp, Artificial Sequence
  ENSG00000198898_5 (sequence is synthesized)
gaaaattcaggttcattattatgaagatggtaatgttcagctagtgagtcataaagatatacaagattccctaacagtgtctaatgaagtgcaaacagcaaaagaatttataaagattgt

SEQ ID NO: 735174 - DNA, 120 bp, Artificial Sequence
  ENSG00000198898_6 (sequence is synthesized)
agaagctgcagaaaatgaataccagactgccatcagtgagaattatcagacaatgtcggacactactttcaaagccttacgtcgacagttgccagttacacgcactaagattgattggaa

SEQ ID NO: 735175 - DNA, 120 bp, Artificial Sequence
  ENSG00000198898_7 (sequence is synthesized)
caagatccttagctacaagattggcaaagagatgcagaatgcataagatgaacattgcatgaccggatcattttagtgtctttgcgttaaaaaatcattgcaaaagtattctgaactgtc

SEQ ID NO: 735176 - DNA, 120 bp, Artificial Sequence
  ENSG00000198898_8 (sequence is synthesized)
aagctgcccagtcagatgggctgttgccatttaaaatcactgtaattaattagtttgattagagcacaaagcttagctaatcaaccattatttttcattttgtttgttctaagaggattg

SEQ ID NO: 735177 - DNA, 120 bp, Artificial Sequence
  ENSG00000198898_9 (sequence is synthesized)
aaaatcagtttagtttaaatgtctttctgttaggcctttctttcttacaatgaagagatgattcttctagtttatggttaaaagtttttgaagtgtctcaaaaatattttactaactgta

SEQ ID NO: 735178 - DNA, 120 bp, Artificial Sequence
  ENSG00000198898_10 (sequence is synthesized)
accctaaaattgatgtcttttggtttatgaaatcagtaatttttgatatttccccagttctttttaatggggtcaataatggacattctagtttaaggtggttgatggatttagccatat

SEQ ID NO: 735179 - DNA, 120 bp, Artificial Sequence
  ENSG00000198898_11 (sequence is synthesized)
atgctgctaaagaaattgtctaccttttcttcctcacctgttccatttatgtaaagttgagattagagggaaagcattttctatatcaattgtgtttaaacctttcaagaaggttattta

SEQ ID NO: 735180 - DNA, 120 bp, Artificial Sequence
  ENSG00000198898_12 (sequence is synthesized)
gctagcttagtgttgaactaaattttttttaaacaaggcaaggtctaatgctgttttgagattctgaaattaatgaaaatacttatttcagaaatgcatttaatgctttttttcttgtga

SEQ ID NO: 735181 - DNA, 120 bp, Artificial Sequence
  ENSG00000198898_13 (sequence is synthesized)
cagttacgcaaatcagcttgaattccatatgtccctgagttatttttatcataaagccacaaatgtattataacaaggcaaattgtaatatatataatcctgaactcatgaccatgtctc

SEQ ID NO: 735182 - DNA, 120 bp, Artificial Sequence
  ENSG00000198898_14 (sequence is synthesized)
ggtttattttttttttcttggattgaaaagtactgaaattcaatgtgacattaaaatgcaaattttcctatttatttgagtagaaaatcacttaccagtgagcatatatattttaaaata

SEQ ID NO: 735183 - DNA, 120 bp, Artificial Sequence
  ENSG00000198898_15 (sequence is synthesized)
ctttctttggatattgtaattcttaactggttgtaaattagaaaagctgggattacatatggtgtgcggttacagtctaaattttttcatcctcctatgcatcataagcatgtttgtaat

SEQ ID NO: 735184 - DNA, 120 bp, Artificial Sequence
  ENSG00000198898_16 (sequence is synthesized)
attttcaaaaatagttctactgatgctacaggaatttcaagcctgtggtgaatgttagtatttaccatagggagtgaagtggagttatggtttcattcaatagagtattgctgattatac

SEQ ID NO: 735185 - DNA, 90 bp, Artificial Sequence
  ENSG00000198898_17 (sequence is synthesized)
ggagttatggtttcattcaatagagtattgctgattatacttgagtggaatcctttcctcacgtactcccacagacgtctgggcctggaa

SEQ ID NO: 735186 - DNA, 120 bp, Artificial Sequence
  ENSG00000198898_18 (sequence is synthesized)
atttcattagcttgaattgtatagatttttaaaaattcaatgaaagcatgttgtttaatttctttttaaaatcactgttgggctttgaaagcattgagaatataatatgaaattatgaca

SEQ ID NO: 735187 - DNA, 120 bp, Artificial Sequence
  ENSG00000198898_19 (sequence is synthesized)
ttttgtctaaatcatcttttctttagttttaaaatacaagttttggcacattgggattcctaaagaaaatgaattggtaacattaattatctgttcctttttaaaatatatatatttgaa

SEQ ID NO: 735188 - DNA, 120 bp, Artificial Sequence
  ENSG00000198898_20 (sequence is synthesized)
agtttgatgatggtgaactaaatactagatctaattgacaagcttagttgtatcagttaggccatcatgagtttctatcccatgaaagtcatcaatttcctatctctgttctagtctgga

SEQ ID NO: 735189 - DNA, 120 bp, Artificial Sequence
  ENSG00000198898_21 (sequence is synthesized)
ttctagtctggaatgcattactgaaaatgtatgcaactgtttttaaggtgatttgcttgtgagacggaagatttatcaaaaataatttagaacaggctgggcgcggtggctcacatctgt

SEQ ID NO: 735190 - DNA, 120 bp, Artificial Sequence
  ENSG00000198898_22 (sequence is synthesized)
ataataataataataataataatataatttagaacagtctgaaataatgatggcacagaatagtcttttatagtataagaatggcatttattaggcagggcacagtggctcacacctgta

SEQ ID NO: 735191 - DNA, 65 bp, Artificial Sequence
  ENSG00000198898_23 (sequence is synthesized)
acacagggagcctctgtctcaaaataataataataataaaagaatggcatttattaaagtgaaag

SEQ ID NO: 735192 - DNA, 120 bp, Artificial Sequence
  ENSG00000198898_24 (sequence is synthesized)
aataataataataaaagaatggcatttattaaagtgaaagaagaatggaaacccagagtatcctatagctcagggatgtaattttagtaggagacattatggctgctttgctgagtaggc

SEQ ID NO: 735193 - DNA, 120 bp, Artificial Sequence
  ENSG00000198898_25 (sequence is synthesized)
tgaagtgtggtggcaaaggcataatcagggagaacagctaggagactactgcagtaatctagttgagagagcatgctggcttggactgaggtggttgctgtagaggtggtataaagcagt

SEQ ID NO: 735194 - DNA, 120 bp, Artificial Sequence
  ENSG00000198898_26 (sequence is synthesized)
gaggtctaggtatatcctaaaggtaaaatcagcaagacctggggagagtttggtcatggagtgtgagataaagagaaccatgtctggggctggagaaattgaggaagattcttgtaggag

SEQ ID NO: 735195 - DNA, 120 bp, Artificial Sequence
  ENSG00000198898_27 (sequence is synthesized)
caagttggtttggagaagaaggctggtcaggagctcagttttctattcaaaggagaaatatctcatgtagcagttagatacaggagacaggaactagaggaaagctctgggctagaagaa

SEQ ID NO: 735196 - DNA, 120 bp, Artificial Sequence
  ENSG00000198898_28 (sequence is synthesized)
tgggaaagtgcatgaacctggaaacaattttataggcagacaggatgaaggacctcaaggttagtgataatgaatttaaagtaaatgagaccaatgatgagcatggctgtatgtttttct

SEQ ID NO: 735197 - DNA, 120 bp, Artificial Sequence
  ENSG00000198898_29 (sequence is synthesized)
tcaaccgtgtaaagctgtttgggtgcaggcatagagtagatgaaataaatttcaccagggctgtggttttgcccagagtgaatgaccacatgaagaggggcagggtatgatgatggtctg

SEQ ID NO: 735198 - DNA, 120 bp, Artificial Sequence
  ENSG00000198898_30 (sequence is synthesized)
tggaatttcagctgggtaagcagggaagtgagggcttgagacggggggagggatagtgaaaatgtacaaccagtggattataggtgtgttaaagtaggggaactagaaagaatgacctgg

SEQ ID NO: 735199 - DNA, 77 bp, Artificial Sequence
  ENSG00000198898_31 (sequence is synthesized)
cgagattgtgccactgcactccaggctggcgacagagcgagactctgtcccaaaaaaaaaaaaaagtggtgggctgg

SEQ ID NO: 735200 - DNA, 81 bp, Artificial Sequence
  ENSG00000198898_32 (sequence is synthesized)
taatcccagcactttgggaggccacggcaagtgtatgatgaaaccccttctgtattaaaaatacaaatattagccgggcat

SEQ ID NO: 735201 - DNA, 120 bp, Artificial Sequence
  ENSG00000198898_33 (sequence is synthesized)
tcaggaggctgaggcaggagaatctttgaacccaggaagtgacagttacaacgagcggagactgtgccacttcactgcagcctgggtgacagggtgagagtctgtctcaaaaaaagaaaa

SEQ ID NO: 735202 - DNA, 120 bp, Artificial Sequence
  ENSG00000198898_34 (sequence is synthesized)
aaaaaggaaatgtaagaagtggtgattggagaatggtgtgcttaattaaaattgaggttttgaggagttactagtaatgacaaatatgaccaacggagtgactggctgaggggagagagg

SEQ ID NO: 735203 - DNA, 120 bp, Artificial Sequence
  ENSG00000198898_35 (sequence is synthesized)
agaggacttaagcaactgtgccactcagcattggaaaggtcacctctgtgacattaaaatcaagaattctgatagaagtaagagttctggcatgagtggtgcttttccagagtacacttg

SEQ ID NO: 735204 - DNA, 120 bp, Artificial Sequence
  ENSG00000198898_36 (sequence is synthesized)
gatatatgattacattttaataagttatataaatatgcagatattcatgcggcttttcctcatttgggattttggaaactaaaatagtagtaagagcattaaaaaaaagatgtcctggaa

SEQ ID NO: 735205 - DNA, 120 bp, Artificial Sequence
  ENSG00000198898_37 (sequence is synthesized)
atttattccatttattttggaaatataagtgatttgattgaagaagtagcttaaaatttatctccacagtagcttatgacttagttttgtattggtttttgttttgttttgtttttttta

SEQ ID NO: 735206 - DNA, 120 bp, Artificial Sequence
  ENSG00000198898_38 (sequence is synthesized)
aggctagtcaagtggagatggaacaaagaaacctgtaactgattgtgatcaattagtggcaaacagcactgcacacacaccagcctgaattgtattttaagccttagctttagaattctg

SEQ ID NO: 735207 - DNA, 120 bp, Artificial Sequence
  ENSG00000198898_39 (sequence is synthesized)
ttgactatttcagtgattaaaaatttaatgtccagtattcatcccccacactctctcatactgtagcatgaaatataatctgaaacttaaaattgattcaaattattttccctaccttat

SEQ ID NO: 735208 - DNA, 120 bp, Artificial Sequence
  ENSG00000198898_40 (sequence is synthesized)
cattgttttaagtctttgtagttcttgctttagtgatttgggctacaccttgtttgtttatgattaagaacaatttagagatggtataaaattttagccttttgatataaggaaggtaaa

SEQ ID NO: 735209 - DNA, 120 bp, Artificial Sequence
  ENSG00000198898_41 (sequence is synthesized)
tttgctcaacagcctaatcactaaaggtagtggtaaatctgttgacattcagtggaaagagtatgggactagcaaacagcatcctgagggagcatgtgtgcctgcgagaacaccagttgg

SEQ ID NO: 735210 - DNA, 120 bp, Artificial Sequence
  ENSG00000198898_42 (sequence is synthesized)
caatccatatgctcattctgtgaaggggctgttcctgaatgaaacttatgtgcaggagaacaaagataattatagaacaaaaaatgatactacttttgtgaactttgtgactctgaagta

SEQ ID NO: 735211 - DNA, 120 bp, Artificial Sequence
  ENSG00000198898_43 (sequence is synthesized)
agaaggaagatggcggatctggaggagcagttgtctgatgaagagaaggtgcgtatagcagcaaaattcatcattcatgcccctcctggagaatttaatgaggttttcaatggtgagtgt

SEQ ID NO: 735212 - DNA, 120 bp, Artificial Sequence
  ENSG00000198898_44 (sequence is synthesized)
ttgatttataacactaggcttgatatatcaagccctctttttaaaagaaaaccaaaataatcaaaataagctaaggacagtatgcagaaaaatctgtgttttctgaattacaatgacaat

SEQ ID NO: 735213 - DNA, 120 bp, Artificial Sequence
  ENSG00000198898_45 (sequence is synthesized)
tggctagaatataatgtatttatttatatatgatgattctgttagcaaattaacccttttaaagcctgaaataaattttattcatatcactgactagaatatatcctcattctgggaaag

SEQ ID NO: 735214 - DNA, 120 bp, Artificial Sequence
  ENSG00000198898_46 (sequence is synthesized)
gagagtctttttggtaaatggttttatttaagtaaaactataaacgcatatagtagatatttcttcaatagaactcttaaatagtttaaaaagacaacaggccaggtgcagtggctcact

SEQ ID NO: 735215 - DNA, 87 bp, Artificial Sequence
  ENSG00000198898_47 (sequence is synthesized)
atagtttaaaaagacaacaggccaggtgcagtggctcactcctgtaataccagcactttgggaagatgaggcaggcagggcagtatg

SEQ ID NO: 735216 - DNA, 87 bp, Artificial Sequence
  ENSG00000198898_48 (sequence is synthesized)
cctcggctgactgcaacctccgtctcccgggttgcagggacagggacaacctccgcctctcgggttgcaatgacttctgcaactctc

SEQ ID NO: 735217 - DNA, 120 bp, Artificial Sequence
  ENSG00000198898_49 (sequence is synthesized)
gccgcggtttgtcgccagaaggaagatggcggatctggaggagcagttgtctgatgaagagaagactaagtcagtgctacactttgaggattttgaaagcagagggcctggaaagttggc

SEQ ID NO: 735218 - DNA, 120 bp, Artificial Sequence
  ENSG00000198898_50 (sequence is synthesized)
ttttcattgttttatatttttacaccatatatataaagtataaggtgttagagacttttacattaacactgttttattttttaaatccagattctgttaactttactgttaggaaaaagc

SEQ ID NO: 735219 - DNA, 120 bp, Artificial Sequence
  ENSG00000198898_51 (sequence is synthesized)
aaacaaacccatctattggcatgttaaaaaaaaaatttccagaaaaatacattcttcctgattagtgattttttttttttttttggtatcactgttctgttacgtaatgttcagtaaata

SEQ ID NO: 735220 - DNA, 120 bp, Artificial Sequence
  ENSG00000198898_52 (sequence is synthesized)
aacttttcatccatgtgtgtatcattgagatttcactttccttagccagctgaacattgagaccagcttattctgtagacttttaaaataattttacctattttccccttagacttagaa

SEQ ID NO: 735221 - DNA, 120 bp, Artificial Sequence
  ENSG00000198898_53 (sequence is synthesized)
tattttgtttttttttttttcagaatgaagtgcaaacagcaaaagaatttataaagattgtagaagctgcagaaaatgaataccagactgccatcagtgagaattatcagacaatgtcgg

SEQ ID NO: 735222 - DNA, 120 bp, Artificial Sequence
  ENSG00000198898_54 (sequence is synthesized)
gtagcagctttgtgtgtgtgttttgtgtaaatgtgagtctttagcgtctcttaaaatttacagtaacttacagaattgacattgtataatttgtcatttttttccttaaatatttctaag

SEQ ID NO: 735223 - DNA, 120 bp, Artificial Sequence
  ENSG00000198898_55 (sequence is synthesized)
aatgtttactattttttcaagaaattctggataataaatagatatactaggatggcttaaaatagagaaatggttgtaccttgatttaaatccatgtagaaattctaatacattgattaa

SEQ ID NO: 735224 - DNA, 120 bp, Artificial Sequence
  ENSG00000198898_56 (sequence is synthesized)
aggagcaggatatggtgagattctgtaatcttatgttcatgactcgtctcagtttagatcaaagttatttttattaagtcacagaaatcttagaacaaataaaattacttggaagtaaaa

SEQ ID NO: 735225 - DNA, 120 bp, Artificial Sequence
  ENSG00000198898_57 (sequence is synthesized)
gaaggaagatggcggatctggaggagcagttgtctgatgaagagaagatggtaattataaaactgaagtagcactaccaattgcttctgacttccagtaataaacacatcttgaagaggt

SEQ ID NO: 735226 - DNA, 120 bp, Artificial Sequence
  ENSG00000198898_58 (sequence is synthesized)
gacataggctgagggaacccagtcacttccacctgtggtacttcaccatggagcttgtctttgcttgagaaaggtacattctgtaccattaatgcaaagagtgacacagtcaaggattgc

SEQ ID NO: 735227 - DNA, 120 bp, Artificial Sequence
  ENSG00000198898_59 (sequence is synthesized)
atgttcatccagccctccttccctttgttctctttccctgataagtttttcagtcttattcagcaatgtaggtgtaagattgtacatttccaaattccatattccaagtatcataggcca

SEQ ID NO: 735228 - DNA, 120 bp, Artificial Sequence
  ENSG00000198898_60 (sequence is synthesized)
ttaaaagtactagatgttttgcactcactactttttctgagatatcactcaaggccaaaggcaacaattcaaaaacctgctgatacttgcctggttcatcagggtatcccataatgatac

SEQ ID NO: 735229 - DNA, 120 bp, Artificial Sequence
  ENSG00000198898_61 (sequence is synthesized)
caaggcttttgatcacagcttctcatatcaaatatgctttaccttccatttaaggaggaccagggagttaggaacttcttgaggaaagtaaggcaccactactccacaggatttagctac

SEQ ID NO: 735230 - DNA, 120 bp, Artificial Sequence
  ENSG00000198898_62 (sequence is synthesized)
gcggcgctgaggaccgcacggaaacggggaagtcaggtggccgctgccgccgccgccgccgcggtttgtcgccagaaggaagatggcggatctggaggagcagttgtctgatgaagagaa

SEQ ID NO: 735231 - DNA, 120 bp, Artificial Sequence
  ENSG00000198899_0 (sequence is synthesized)
atgaacgaaaatctgttcgcttcattcattgcccccacaatcctaggcctacccgccgcagtactgatcattctatttccccctctattgatccccacctccaaatatctcatcaacaac

SEQ ID NO: 735232 - DNA, 120 bp, Artificial Sequence
  ENSG00000198899_1 (sequence is synthesized)
cgactaatcaccacccaacaatgactaatcaaactaacctcaaaacaaatgataaccatacacaacactaaaggacgaacctgatctcttatactagtatccttaatcatttttattgcc

SEQ ID NO: 735233 - DNA, 120 bp, Artificial Sequence
  ENSG00000198899_2 (sequence is synthesized)
ttatgagcgggcacagtgattataggctttcgctctaagattaaaaatgccctagcccacttcttaccacaaggcacacctacaccccttatccccatactagttattatcgaaaccatc

SEQ ID NO: 735234 - DNA, 120 bp, Artificial Sequence
  ENSG00000198899_3 (sequence is synthesized)
agcctactcattcaaccaatagccctggccgtacgcctaaccgctaacattactgcaggccacctactcatgcacctaattggaagcgccaccctagcaatatcaaccattaaccttccc

SEQ ID NO: 735235 - DNA, 120 bp, Artificial Sequence
  ENSG00000198899_4 (sequence is synthesized)
tctacacttatcatcttcacaattctaattctactgactatcctagaaatcgctgtcgccttaatccaagcctacgttttcacacttctagtaagcctctacctgcacgacaacacataa

SEQ ID NO: 735236 - DNA, 120 bp, Artificial Sequence
  ENSG00000198900_0 (sequence is synthesized)
caaatgcgaacttaggctgttacacaactgctggggtctgttctcgccgcccgcccggcagtcaggcagcgtcgccgccgtggtagcagcctcagccgtttctggagtctcgggcccaca

SEQ ID NO: 735237 - DNA, 120 bp, Artificial Sequence
  ENSG00000198900_1 (sequence is synthesized)
gtcaccgccgcttacctgcgcctcctcgagcctccggagtccccgtccgcccgcacaggccggttcgccgtctgcgtctcccccacgccgcctcgcctgccgccgcgctcgtccctccgg

SEQ ID NO: 735238 - DNA, 120 bp, Artificial Sequence
  ENSG00000198900_2 (sequence is synthesized)
gccgacatgagtggggaccacctccacaacgattcccagatcgaagcggatttccgattgaatgattctcataaacacaaagataaacacaaagatcgagaacaccggcacaaagaacac

SEQ ID NO: 735239 - DNA, 120 bp, Artificial Sequence
  ENSG00000198900_3 (sequence is synthesized)
aagaaggagaaggaccgggaaaagtccaagcatagcaacagtgaacataaagattctgaaaagaaacacaaagagaaggagaagaccaaacacaaagatggaagctcagaaaagcataaa

SEQ ID NO: 735240 - DNA, 120 bp, Artificial Sequence
  ENSG00000198900_4 (sequence is synthesized)
gacaaacataaagacagagacaaggaaaaacgaaaagaggaaaaggttcgagcctctggggatgcaaaaataaagaaggagaaggaaaatggcttctctagtccaccacaaattaaagat

SEQ ID NO: 735241 - DNA, 120 bp, Artificial Sequence
  ENSG00000198900_5 (sequence is synthesized)
gaacctgaagatgatggctattttgttcctcctaaagaggatataaagccattaaagagacctcgagatgaggatgatgctgattataaacctaagaaaattaaaacagaagataccaag

SEQ ID NO: 735242 - DNA, 120 bp, Artificial Sequence
  ENSG00000198900_6 (sequence is synthesized)
aaggagaagaaaagaaaactagaagaagaagaggatggtaaattgaaaaaacccaagaataaagataaagataaaaaagttcctgagccagataacaagaaaaagaagccgaagaaagaa

SEQ ID NO: 735243 - DNA, 120 bp, Artificial Sequence
  ENSG00000198900_7 (sequence is synthesized)
gaggaacagaagtggaaatggtgggaagaagagcgctatcctgaaggcatcaagtggaaattcctagaacataaaggtccagtatttgccccaccatatgagcctcttccagagaatgtc

SEQ ID NO: 735244 - DNA, 120 bp, Artificial Sequence
  ENSG00000198900_8 (sequence is synthesized)
aagttttattatgatggtaaagtcatgaagctgagccccaaagcagaggaagtagctacgttctttgcaaaaatgctcgaccatgaatatactaccaaggaaatatttaggaaaaatttc

SEQ ID NO: 735245 - DNA, 120 bp, Artificial Sequence
  ENSG00000198900_9 (sequence is synthesized)
tttaaagactggagaaaggaaatgactaatgaagagaagaatattatcaccaacctaagcaaatgtgattttacccagatgagccagtatttcaaagcccagacggaagctcggaaacag

SEQ ID NO: 735246 - DNA, 120 bp, Artificial Sequence
  ENSG00000198900_10 (sequence is synthesized)
atgagcaaggaagagaaactgaaaatcaaagaggagaatgaaaaattactgaaagaatatggattctgtattatggataaccacaaagagaggattgctaacttcaagatagagcctcct

SEQ ID NO: 735247 - DNA, 120 bp, Artificial Sequence
  ENSG00000198900_11 (sequence is synthesized)
ggacttttccgtggccgcggcaaccaccccaagatgggcatgctgaagagacgaatcatgcccgaggatataatcatcaactgtagcaaagatgccaaggttccttctcctcctccagga

SEQ ID NO: 735248 - DNA, 120 bp, Artificial Sequence
  ENSG00000198900_12 (sequence is synthesized)
cataagtggaaagaagtccggcatgataacaaggttacttggctggtttcctggacagagaacatccaaggttccattaaatacatcatgcttaaccctagttcacgaatcaagggtgag

SEQ ID NO: 735249 - DNA, 120 bp, Artificial Sequence
  ENSG00000198900_13 (sequence is synthesized)
aaggactggcagaaatacgagactgctcggcggctgaaaaaatgtgtggacaagatccggaaccagtatcgagaagactggaagtccaaagagatgaaagtccggcagagagctgtagcc

SEQ ID NO: 735250 - DNA, 120 bp, Artificial Sequence
  ENSG00000198900_14 (sequence is synthesized)
ctgtacttcatcgacaagcttgctctgagagcaggcaatgaaaaggaggaaggagaaacagcggacactgtgggctgctgctcacttcgtgtggagcacatcaatctacacccagagttg

SEQ ID NO: 735251 - DNA, 120 bp, Artificial Sequence
  ENSG00000198900_15 (sequence is synthesized)
tgtggtagagtttgacttcctcgggaaggactccatcagatactataacaaggtccctgttgagaaacgagtttttaagaacctacaactatttatggagaacaagcagcccgaggatga

SEQ ID NO: 735252 - DNA, 120 bp, Artificial Sequence
  ENSG00000198900_16 (sequence is synthesized)
tctttttgatagactcaatactggtattctgaataagcatcttcaggatctcatggagggcttgacagccaaggtattccgtacatacaatgcctccatcacgctacagcagcagctaaa

SEQ ID NO: 735253 - DNA, 120 bp, Artificial Sequence
  ENSG00000198900_17 (sequence is synthesized)
agaactgacagccccggatgagaacatcccagcgaagatcctttcttataaccgtgccaatcgagctgttgcaattctttgtaaccatcagagggcaccaccaaaaacttttgagaagtc

SEQ ID NO: 735254 - DNA, 120 bp, Artificial Sequence
  ENSG00000198900_18 (sequence is synthesized)
tatgatgaacttgcaaactaagattgatgccaagaaggaacagctagcagatgcccggagagacctgaaaagtgctaaggctgatgccaaggtcatgaaggatgcaaagacgaagaaggt

SEQ ID NO: 735255 - DNA, 120 bp, Artificial Sequence
  ENSG00000198900_19 (sequence is synthesized)
agtagagtcaaagaagaaggctgttcagagactggaggaacagttgatgaagctggaagttcaagccacagaccgagaggaaaataaacagattgccctgggaacctccaaactcaatta

SEQ ID NO: 735256 - DNA, 120 bp, Artificial Sequence
  ENSG00000198900_20 (sequence is synthesized)
tctggaccctaggatcacagtggcttggtgcaagaagtggggtgtcccaattgagaagatttacaacaaaacccagcgggagaagtttgcctgggccattgacatggctgatgaagacta

SEQ ID NO: 735257 - DNA, 120 bp, Artificial Sequence
  ENSG00000198900_21 (sequence is synthesized)
tgagttttagccagtctcaagaggcagagttctgtgaagaggaacagtgtggtttgggaaagatggataaactgagcctcacttgccctcgtgcctgggggagagaggcagcaagtctta

SEQ ID NO: 735258 - DNA, 120 bp, Artificial Sequence
  ENSG00000198900_22 (sequence is synthesized)
acaaaccaacatctttgcgaaaagataaacctggagatattataagggagagctgagccagttgtcctatggacaacttatttaaaaatatttcagatatcaaaattctagctgtatgat

SEQ ID NO: 735259 - DNA, 120 bp, Artificial Sequence
  ENSG00000198900_23 (sequence is synthesized)
ttgttttgaattttgtttttattttcaagagggcaagtggatgggaatttgtcagcgttctaccaggcaaattcactgtttcactgaaatgtttggattctcttagctactgtatgcaaa

SEQ ID NO: 735260 - DNA, 120 bp, Artificial Sequence
  ENSG00000198900_24 (sequence is synthesized)
gtccgattatattggtgcgtttttacagttagggttttgcaataacttctatattttaatagaaataaattcctaaactcccttccctctctcccatttcaggaatttaaaattaagtag

SEQ ID NO: 735261 - DNA, 120 bp, Artificial Sequence
  ENSG00000198900_25 (sequence is synthesized)
aacaaaaaacccagcgcacctgttagagtcgtcactctctattgtcatggggatcaattttcattaaacttgaagcagtcgtggctttggcagtgttttggttcagacacctgttcacag

SEQ ID NO: 735262 - DNA, 120 bp, Artificial Sequence
  ENSG00000198900_26 (sequence is synthesized)
aaaaagcatgatgggaaaatatttcctgacttgagtgttcctttttaaatgtgaatttttatttctttttaattattttaaaatatttaaacctttttcttgatcttaaagatcgtgtag

SEQ ID NO: 735263 - DNA, 120 bp, Artificial Sequence
  ENSG00000198900_27 (sequence is synthesized)
attggggttggggagggatgaagggcgagtgaatctaaggataatgaaataatcagtgactgaaaccattttcccatcatcctttgttctgagcattcgctgtaccctttaagatatcca

SEQ ID NO: 735264 - DNA, 120 bp, Artificial Sequence
  ENSG00000198900_28 (sequence is synthesized)
tctttttctttttaaccctaatctttcacttgaaagattttattgtataaaaagtttcacaggtcaataaacttagaggaaaatgagtatttggtccaaaaaaaggaaaaataatcaaga

SEQ ID NO: 735265 - DNA, 120 bp, Artificial Sequence
  ENSG00000198900_29 (sequence is synthesized)
ttttagggcttttattttttcttttgtaattgtgtaaaaaatggaaaaaaacataaaaagcagaattttaatgtgaagacattttttgctataatcattagttttagaggcattgttagt

SEQ ID NO: 735266 - DNA, 120 bp, Artificial Sequence
  ENSG00000198900_30 (sequence is synthesized)
ttagtgtgtgtgcagagtccatttcccacatctttcctcaagtatcttctatttttatcatgaattcccttttaatcaactgtaggttatttaaaataaattcctacaacttaatggaaa

SEQ ID NO: 735267 - DNA, 120 bp, Artificial Sequence
  ENSG00000198901_0 (sequence is synthesized)
aacggctcgcggagcggctacgcggagtgacatcgccggtgtttgcgggtggttgttgctctcggggccgtgtggagtaggtctggacctggactcacggctgcttggagcgtccgccat

SEQ ID NO: 735268 - DNA, 120 bp, Artificial Sequence
  ENSG00000198901_1 (sequence is synthesized)
gaggagaagtgaggtgctggcggaggagtccatagtatgtctgcagaaagccctaaatcaccttcgggaaatatgggagctaattgggattccagaggaccagcggttacaaagaactga

SEQ ID NO: 735269 - DNA, 120 bp, Artificial Sequence
  ENSG00000198901_2 (sequence is synthesized)
ggtggtaaagaagcatatcaaggaactcctggatatgatgattgctgaagaggaaagcctgaaggaaagactcatcaaaagcatatccgtctgtcagaaagagctgaacactctgtgcag

SEQ ID NO: 735270 - DNA, 120 bp, Artificial Sequence
  ENSG00000198901_3 (sequence is synthesized)
cgagttacatgttgagccatttcaggaagaaggagagacgaccatcttgcaactagaaaaagatttgcgcacccaagtggaattgatgcgaaaacagaaaaaggagagaaaacaggaact

SEQ ID NO: 735271 - DNA, 120 bp, Artificial Sequence
  ENSG00000198901_4 (sequence is synthesized)
gaagctacttcaagagcaagatcaagaactgtgcgaaattctttgtatgccccactatgatattgacagtgcctcagtgcccagcttagaagagctgaaccagttcaggcaacatgtgac

SEQ ID NO: 735272 - DNA, 120 bp, Artificial Sequence
  ENSG00000198901_5 (sequence is synthesized)
aactttgagggaaacaaaggcttctaggcgtgaggagtttgtcagtataaagagacagatcatactgtgtatggaagcattagaccacaccccagacacaagctttgaaagagatgtggt

SEQ ID NO: 735273 - DNA, 120 bp, Artificial Sequence
  ENSG00000198901_6 (sequence is synthesized)
gtgtgaagacgaagatgccttttgtttgtctttggagaatattgcaacactacaaaagttgctacggcagctggaaatgcagaaatcacaaaatgaagcagtgtgtgaggggctgcgtac

SEQ ID NO: 735274 - DNA, 120 bp, Artificial Sequence
  ENSG00000198901_7 (sequence is synthesized)
tcaaatccgagagctctgggacaggttgcaaatacctgaagaagaaagagaagctgtggccaccattatgtctgggtcaaaggccaaggtccggaaagcgctgcaattagaagtggatcg

SEQ ID NO: 735275 - DNA, 120 bp, Artificial Sequence
  ENSG00000198901_8 (sequence is synthesized)
gttggaagaactgaaaatgcaaaacatgaagaaagtgattgaggcaattcgagtggagctggttcagtactgggaccagtgcttttatagccaggagcagagacaagcttttgccccttt

SEQ ID NO: 735276 - DNA, 120 bp, Artificial Sequence
  ENSG00000198901_9 (sequence is synthesized)
ctgtgctgaggactacacagaaagtctgctccagctccacgatgctgagattgtgcggttaaaaaactactatgaagttcacaaggaactctttgaaggtgtccagaagtgggaagaaac

SEQ ID NO: 735277 - DNA, 120 bp, Artificial Sequence
  ENSG00000198901_10 (sequence is synthesized)
ctggaggcttttcttagagtttgagagaaaagcttcagatccaaatcgatttacaaaccgaggaggaaatcttctaaaagaagaaaaacaacgagccaagctccagaaaatgctgcccaa

SEQ ID NO: 735278 - DNA, 120 bp, Artificial Sequence
  ENSG00000198901_11 (sequence is synthesized)
gctggaagaagagttgaaggcacgaattgaattgtgggaacaggaacattcaaaggcatttatggtgaatgggcagaaattcatggagtatgtggcagaacaatgggagatgcatcgatt

SEQ ID NO: 735279 - DNA, 120 bp, Artificial Sequence
  ENSG00000198901_12 (sequence is synthesized)
cagcgctcctcgaacacctagcaagcggcgaggactggctcccaatacaccgggcaaagcacgtaagctgaacactaccaccatgtccaatgctacggccaatagtagcattcggcctat

SEQ ID NO: 735280 - DNA, 120 bp, Artificial Sequence
  ENSG00000198901_13 (sequence is synthesized)
ctttggagggacagtctaccactcccccgtgtctcgacttcctccttctggcagcaagccagtcgctgcttccacctgttcagggaagaaaacaccccgtactggcaggcatggagccaa

SEQ ID NO: 735281 - DNA, 120 bp, Artificial Sequence
  ENSG00000198901_14 (sequence is synthesized)
caaggagaacctggagctcaacggcagcatcctgagtggtgggtaccctggctcggcccccctccagcgcaacttcagcattaattctgttgccagcacctattctgagtttgcgaagga

SEQ ID NO: 735282 - DNA, 120 bp, Artificial Sequence
  ENSG00000198901_15 (sequence is synthesized)
tccgtccctctctgacagttccactgttgggcttcagcgagaactttcaaaggcttccaaatctgatgctacttctggaatcctcaattcaaccaacatccagtcctgagaagccctgat

SEQ ID NO: 735283 - DNA, 120 bp, Artificial Sequence
  ENSG00000198901_16 (sequence is synthesized)
cagtcaaccagctgtggcttcctgtgcctagactggacctaattatatgggggtgactttagtttttcttcagcttaggcgtgcttgaaaccttggccaggttccatgaccatgggccta

SEQ ID NO: 735284 - DNA, 120 bp, Artificial Sequence
  ENSG00000198901_17 (sequence is synthesized)
acttaaagatgtgaatgagtgttacagttgaaagcccatcataggtttagtggtcctaggagacttggttttgacttatatacatgaaaagtttatggcaagaagtgcaaattttagcat

SEQ ID NO: 735285 - DNA, 120 bp, Artificial Sequence
  ENSG00000198901_18 (sequence is synthesized)
atggggcctgacttctctaccacataattctacttgctgaagcatgatcaaagcttgttttatttcaccactgtaggaaaatgattgactatgcccatccctgggggtaattttggcatg

SEQ ID NO: 735286 - DNA, 120 bp, Artificial Sequence
  ENSG00000198901_19 (sequence is synthesized)
tatacctgtaactagtaattaacatcttttttgtttaggcatgttcaattaatgctgtagctatcatagctttgctcttacctgaagccttgtccccaccacacaggacagccttcctcc

SEQ ID NO: 735287 - DNA, 120 bp, Artificial Sequence
  ENSG00000198901_20 (sequence is synthesized)
tgaagagaatgtctttgtgtgtccgaagttgagatggcctgccctactgccaaagaggtgacaggaaggctgggagcagctttgttaaattgtgttcagttctgttacacagtgcattgc

SEQ ID NO: 735288 - DNA, 120 bp, Artificial Sequence
  ENSG00000198901_21 (sequence is synthesized)
cctttgttgggggtatgcatgtatgaacacacatgcttgtcggaacgctttctcggcgtttgtcccttggctctcatctcccccattcctgtgcctactttgcctgagttcttctacccc

SEQ ID NO: 735289 - DNA, 120 bp, Artificial Sequence
  ENSG00000198901_22 (sequence is synthesized)
cgcagttgccagccacattgggagtctgtttgttccaatgggttgagctgtctttgtcgtggagatctggaactttgcacatgtcactactggggaggtgttcctgctctagcttccacg

SEQ ID NO: 735290 - DNA, 120 bp, Artificial Sequence
  ENSG00000198901_23 (sequence is synthesized)
atgaggcgccctctttacctatcctctcaatcactactcttcttgaagcactattatttattcttccgctgtctgcctgcagcagtactactgtcaacatagtgtaaatggttctcaaaa

SEQ ID NO: 735291 - DNA, 120 bp, Artificial Sequence
  ENSG00000198901_24 (sequence is synthesized)
gcttaccagtgtggacttggtgttagccacgctgtttactcatacagtacgtgtcctgtttttaaaatatacaattattcttaaaaataaattaaaatctgtatacttacatttcaaaaa

SEQ ID NO: 735292 - DNA, 120 bp, Artificial Sequence
  ENSG00000198901_25 (sequence is synthesized)
tgccagtattattattttacctacaaaatgagcaaagatgtttagaagtacaatagaattcagccctgctgagggtaacaaaaggagggtacttttccggtgaggctttgtgcagaaggc

SEQ ID NO: 735293 - DNA, 120 bp, Artificial Sequence
  ENSG00000198901_26 (sequence is synthesized)
aaattaataaagggagcattcagtaattacacctctaggaatcagccgtacgaaaatgcaggatgcatttataaatacatacatacacaaagatttatgtatgaagatattcagcccagc

SEQ ID NO: 735294 - DNA, 120 bp, Artificial Sequence
  ENSG00000198901_27 (sequence is synthesized)
cttatcttttaaattatcatctaaatatcaatagcagaatgggcgagatatctacacaccaggattcatgccaccatgccaccatgaatcactgggaaaaaacggtgatatataagcatt

SEQ ID NO: 735295 - DNA, 120 bp, Artificial Sequence
  ENSG00000198901_28 (sequence is synthesized)
tagggatgtaacatgttcatcgaggaaaggaggctacaaaagtaatgtctattttgagttttaaatttttcatgtaacgatttagaaactcatctaatttgataacgtgacttaggcaaa

SEQ ID NO: 735296 - DNA, 120 bp, Artificial Sequence
  ENSG00000198901_29 (sequence is synthesized)
tcattcaaatctttttgcgtttcctctgcaatggcgattgtggaggttaaatgggataactggcgttgaaacgttccaggcccatgagcaggactcaatgttccttcccttcccctttag

SEQ ID NO: 735297 - DNA, 120 bp, Artificial Sequence
  ENSG00000198901_30 (sequence is synthesized)
tgtatggcttcttacatctggggaagagtcccaccaaagatcgattccaagcttcgcttcttggatgagcgagggaaactaggcgctaacttacctattcacccccgcgcccgttcccgg

SEQ ID NO: 735298 - DNA, 120 bp, Artificial Sequence
  ENSG00000198901_31 (sequence is synthesized)
cagccgggactcagggaagccaggtagccgcggtgctctcaactccctccccgcccgcgcacttcgaatccaaactgcgcggggcgaggcggggcggcgctccgatgaggtagctggctt

SEQ ID NO: 735299 - DNA, 120 bp, Artificial Sequence
  ENSG00000198901_32 (sequence is synthesized)
gggagaggagtcccttgaggctgccgccaagccagggaagcgggaggcgcaggccacgcccggccactcacagacagtgacgtcatcccccgccgccactccggcgcttcccaggccctg

SEQ ID NO: 735300 - DNA, 120 bp, Artificial Sequence
  ENSG00000198901_33 (sequence is synthesized)
ctcgcgagtccccaccccgattgcgcacccgcgacttcagcccgaggggcggggattttcttggagcgacgggacgcgacgccaatcgcgacgaggcttcgccccgtggcgcggtttgaa

SEQ ID NO: 735301 - DNA, 120 bp, Artificial Sequence
  ENSG00000198901_34 (sequence is synthesized)
tgtctttggagaatattgcaacactacaaaagttgctacggcaggtactgtcttctcaaattatgccctaggatctccgtagtatatagcagtttgaacaaaactgacagctgtttcttc

SEQ ID NO: 735302 - DNA, 120 bp, Artificial Sequence
  ENSG00000198901_35 (sequence is synthesized)
agtcttaaataaggagacaatgtaaggtaagagaatgagggaagctaaggatagtaatatatgatatacaaccttgatttttgtttaacagttaaaaaacctttatatggctccaagaaa

SEQ ID NO: 735303 - DNA, 120 bp, Artificial Sequence
  ENSG00000198901_36 (sequence is synthesized)
atgaaattatagatgaaataatattagtcatttgaattagactagtgtttaattaaaatttttttcagttctaaatttgaatgctaattcttggggtctgagatcccgacagccttacag

SEQ ID NO: 735304 - DNA, 120 bp, Artificial Sequence
  ENSG00000198901_37 (sequence is synthesized)
ctcgtgtttaggaggcatgaaaacatgctactttgaactctcatgaaagtgcctcctcctctactccagacatttctttgcgggaggctagagggctagcctctgtgctgctgctttgcc

SEQ ID NO: 735305 - DNA, 120 bp, Artificial Sequence
  ENSG00000198901_38 (sequence is synthesized)
cccaatacaccgggcaaagcacgtaaggtaaacacaaggcttagggaaacactgatttcaagggagtgggtgagggtagtcccagccacctctttgaagggggccagcccctccacacct

SEQ ID NO: 735306 - DNA, 90 bp, Artificial Sequence
  ENSG00000198901_39 (sequence is synthesized)
ttcaagcgattttcctgccgtaaggagagacgaccatcttgcaactagaaaaagatttgcgcacccaagtggaattgatgcgaaaacaga

SEQ ID NO: 735307 - DNA, 120 bp, Artificial Sequence
  ENSG00000198901_40 (sequence is synthesized)
gtgacatcgccggtgtttgcgggtggttgttgctctcggggccgtgtggagtaggtctggacctggactcacggctgcttggagcgtccgccatgaggagaagccattctttgagctgct

SEQ ID NO: 735308 - DNA, 60 bp, Artificial Sequence
  ENSG00000198901_41 (sequence is synthesized)
ggagcgtccgccatgaggagaagccattctttgagctgctagttgtaatttaagaagaat

SEQ ID NO: 735309 - DNA, 120 bp, Artificial Sequence
  ENSG00000198901_42 (sequence is synthesized)
aaaaaaaaaaagtgttgatttataatacctttgtggctttgcattataattttacttaaaagggggggatcttttgcaaacctgagtgaatataaaactatggcagccacccttaacaag

SEQ ID NO: 735310 - DNA, 120 bp, Artificial Sequence
  ENSG00000198901_43 (sequence is synthesized)
ttcctcgtagggatggagctagacgaagaaggagagacgaccatcttgcaactagaaaaagatttgcgcacccaagtggaattgatgcgaaaacagaaaaaggagagaaaacaggaactg

SEQ ID NO: 735311 - DNA, 120 bp, Artificial Sequence
  ENSG00000198901_44 (sequence is synthesized)
agtgacatcgccggtgtttgcgggtggttgttgctctcggggccgtgtggagtaggtctggacctggactcacggctgcttggagcgtccgccatgaggagaaggaagaaggagagacga

SEQ ID NO: 735312 - DNA, 120 bp, Artificial Sequence
  ENSG00000198908_0 (sequence is synthesized)
gagaggagtgttttcttgcatccagaaaagacctgagaggcggacgacacctgtgctccgcagagcagaacgtgggaggaacggcgggatgttaaggagctcaagaagcagagagtctac

SEQ ID NO: 735313 - DNA, 120 bp, Artificial Sequence
  ENSG00000198908_1 (sequence is synthesized)
ctgcccgacgcgttcgtggagaggagcagcggttgctgttggaggaggtgggtgcaaggacggcagatggcatccctgagaggtggtgactgagactagatgcgggtgcaggtccatctc

SEQ ID NO: 735314 - DNA, 120 bp, Artificial Sequence
  ENSG00000198908_2 (sequence is synthesized)
cactggtggctgtggtggctttggattgttggaagaccatcaccttcagcaggtctgcacttgggaacaatcattctcccccagcccgagcgtgcctctgccctctgtatcattgacaga

SEQ ID NO: 735315 - DNA, 120 bp, Artificial Sequence
  ENSG00000198908_3 (sequence is synthesized)
ggctgtatgtttggaaagagaactttgtgactgcagaactgacagttgactctaattcttgctaccaagtttttccccgacccagtgaaagagtgttaagacttcgacctaggacacatt

SEQ ID NO: 735316 - DNA, 120 bp, Artificial Sequence
  ENSG00000198908_4 (sequence is synthesized)
gagaaccaaggccaagactggacagggccatataactgggcttcaaccatggctgggactaagaataagacaagagcccaggccaaaactgaaaaaaaggctgctatacaagctaaagct

SEQ ID NO: 735317 - DNA, 120 bp, Artificial Sequence
  ENSG00000198908_5 (sequence is synthesized)
ggagcagagagggaggctactggtgttgttaggcctgtagccaagaccagggccaaagcaaaagccaagacagggtctaagacagatgcagtagcagagatgaaggcagtgtctaagaac

SEQ ID NO: 735318 - DNA, 120 bp, Artificial Sequence
  ENSG00000198908_6 (sequence is synthesized)
aaggttgttgctgagacgaaggaaggagctctgtcagagcctaagactctgggcaaagccatgggagatttcactcccaaggctgggaatgagtccaccagctccacatgtaaaaatgag

SEQ ID NO: 735319 - DNA, 120 bp, Artificial Sequence
  ENSG00000198908_7 (sequence is synthesized)
gctggtactgatgcctggttctgggctggggaagaggccactatcaattcctggttctggaatggagaagaggctggtaatagtttcagcactaagaatgataaacctgaaattggtgcc

SEQ ID NO: 735320 - DNA, 120 bp, Artificial Sequence
  ENSG00000198908_8 (sequence is synthesized)
caggtctgtgctgaggagttggaacctgcggctggggccgattgcaaacctaggtcaggggctgaggaggaggaggaagagaatgttattgggaactggttttgggaaggagatgatact

SEQ ID NO: 735321 - DNA, 120 bp, Artificial Sequence
  ENSG00000198908_9 (sequence is synthesized)
agttttgaccctaatcctaaacctgtgagcaggatagttaagcctcagcctgtgtatgaaattaatgaaaaaaataggcccaaggactggtctgaggtaactatctggcccaatgcccct

SEQ ID NO: 735322 - DNA, 120 bp, Artificial Sequence
  ENSG00000198908_10 (sequence is synthesized)
gctgtaactccagctgtgttaggatttagatcccaggcaccatctgaggcaagccctccttcatatattgttctggcctccgctgaagaaaatgcctgttctttgcctgtggcaacagct

SEQ ID NO: 735323 - DNA, 120 bp, Artificial Sequence
  ENSG00000198908_11 (sequence is synthesized)
tgccgcccttctaggaacactcgctcatgctcacagcctatccctgagtgtcgttttgattctgacccctgcatccagaccatagatgagattagacgtcaaatcaggatcagggaggta

SEQ ID NO: 735324 - DNA, 120 bp, Artificial Sequence
  ENSG00000198908_12 (sequence is synthesized)
aatgggattaagccatttgcttgtccttgcaaaatggaatgctatatggattctgaggaatttgaaaaacttgttagcttacttaagtcaactactgatcctcttattcataaaatagca

SEQ ID NO: 735325 - DNA, 120 bp, Artificial Sequence
  ENSG00000198908_13 (sequence is synthesized)
cggattgcaatgggtgtccataatgttcacccatttgcccaagagtttattaacgaagtaggtgtagtgacacttattgaaagcttgctcagttttccttcccctgaaatgagaaaaaag

SEQ ID NO: 735326 - DNA, 120 bp, Artificial Sequence
  ENSG00000198908_14 (sequence is synthesized)
actgtaattactctgaatcctccttctggggatgaaagacaacgcaaaattgaattacatgttaagcatatgtgtaaagaaaccatgtcatttcctttgaactcaccgggacagcaatct

SEQ ID NO: 735327 - DNA, 120 bp, Artificial Sequence
  ENSG00000198908_15 (sequence is synthesized)
ggattaaagatactaggacaactgactactgattttgtccatcactacattgttgccaattacttttcagagcttttccatttgctgtcctcaggaaattgcaaaaccagaaatcttgtt

SEQ ID NO: 735328 - DNA, 120 bp, Artificial Sequence
  ENSG00000198908_16 (sequence is synthesized)
aaatatgtctgaaaatccaactgcagccagagacatgatcaatatgaaggcattggcagcattaaaactcatctttaaccagaaagaggcaaaagccaatcttgttagtggtgtggccat

SEQ ID NO: 735329 - DNA, 120 bp, Artificial Sequence
  ENSG00000198908_17 (sequence is synthesized)
atttattaacataaaggagcatatcagaaaaggctcaattgtagttgttgatcacttgagttataatacactcatggccattttcagggaagttaaagagattattgaaacaatgtaaaa

SEQ ID NO: 735330 - DNA, 120 bp, Artificial Sequence
  ENSG00000198908_18 (sequence is synthesized)
tgagccagagatagaacattttaagccatcttcaaactctagcaggctgtacattacagtgtacacattatacactgcatctttaacacagagtcacctgtgacaggctctaggtttgag

SEQ ID NO: 735331 - DNA, 120 bp, Artificial Sequence
  ENSG00000198908_19 (sequence is synthesized)
ctagactattttgggggtatcaaatgaatattataccttgggctgaaaatgtttgatttttatcttgtctagattggcatatttttaacattttacttaagatagcaaaccagttcgttt

SEQ ID NO: 735332 - DNA, 120 bp, Artificial Sequence
  ENSG00000198908_20 (sequence is synthesized)
taagtaagctaacttgttcattagtatctgtggcttaaaatggcaaaaaagaaaatatccttgagtttgtaatctagttacagaagtaaggcatacacacacacaaagataacagtacct

SEQ ID NO: 735333 - DNA, 120 bp, Artificial Sequence
  ENSG00000198908_21 (sequence is synthesized)
agagagagagtgtgtgtgagtgtgcgtgtctctgtgtgtgcacgtgcacgctcatggccaaatgtgcgcactctacataaaggaggcaggagttcctataggctatttaatgtaagagaa

SEQ ID NO: 735334 - DNA, 120 bp, Artificial Sequence
  ENSG00000198908_22 (sequence is synthesized)
actatttttctcctgttccagctgtatcagatactcgttccgcaacacagaaatgactcagaatctcagacaaaatgtattatttgttcaattttaattttgctactacattcataactc

SEQ ID NO: 735335 - DNA, 120 bp, Artificial Sequence
  ENSG00000198908_23 (sequence is synthesized)
ttaaattgttaggctgtttcatttacatcaaagttatctcacaaaagagaaggcaggaaacgttttgtgagtgcctattctatgtcaaacactgtgttggcaccatattttacaagtttt

SEQ ID NO: 735336 - DNA, 120 bp, Artificial Sequence
  ENSG00000198908_24 (sequence is synthesized)
tttcctcttctcacagtgatcttgtgagttagttacttatatttttattagaactcattattctgggtaccctccaatgagaattagagaggttaaataccttttcctagattcccacag

SEQ ID NO: 735337 - DNA, 120 bp, Artificial Sequence
  ENSG00000198908_25 (sequence is synthesized)
caggaaggtggcatagctgttttgtctgacaccagaacccatctcaccacactgctttacagtcttcctgaaggacattttgaggtgggggggccttcaaagctcagagactggtttgaa

SEQ ID NO: 735338 - DNA, 120 bp, Artificial Sequence
  ENSG00000198908_26 (sequence is synthesized)
tggtttaattttgcaatggatcatgtccatgccaggtgttacaattcttaacttcctccaaattcgtgtgtccattagacatttggctacatctggctggaggtcaggagaaaattctga

SEQ ID NO: 735339 - DNA, 120 bp, Artificial Sequence
  ENSG00000198908_27 (sequence is synthesized)
ggtaaatagatggattttatctggcagtgtcgaaaatagtaggagcctaaaactttgttcaatgagtaagatgtagatttggagtcatcagcaggggaaacttgttagatgtcctttgta

SEQ ID NO: 735340 - DNA, 120 bp, Artificial Sequence
  ENSG00000198908_28 (sequence is synthesized)
tctttttctatccatttgtattttttctttcccaaagagctgaaatcattttataccctgaatttaaaaggtaattgcttttttcctccttgcgaaatcataccttaatttttttttttt

SEQ ID NO: 735341 - DNA, 120 bp, Artificial Sequence
  ENSG00000198908_29 (sequence is synthesized)
ttttttttaccatttatgatttattctcctatgtgtcatatgaaaggccaaggggctttatcttttactagtaggcaagcctgggcatttctgcatttgtgccagctaacactacaaaat

SEQ ID NO: 735342 - DNA, 120 bp, Artificial Sequence
  ENSG00000198908_30 (sequence is synthesized)
agacttaattagagaaatttagacccagaattgcagcttcaacaacacaaaacaggaaagctagaagaggttgctgtgtcaacctacaagatagtgattcttggaagttggtatggacca

SEQ ID NO: 735343 - DNA, 120 bp, Artificial Sequence
  ENSG00000198908_31 (sequence is synthesized)
gaaagcattcccaggacatttaggctatggctgagttctctaagactcagggtgggaattataatccctggtctaagctgatatgaaagtttctatgtgtgaaaatatggagttatatgc

SEQ ID NO: 735344 - DNA, 120 bp, Artificial Sequence
  ENSG00000198908_32 (sequence is synthesized)
tttgagattttctgccagttaaactaaaacaagatcatactgtaaatgtttgtaacttgcttccccccactgtatactgtaaacatctttgcatgtcaataaatatgcctctacaacata

SEQ ID NO: 735345 - DNA, 120 bp, Artificial Sequence
  ENSG00000198908_33 (sequence is synthesized)
gagaatcgaagtgaggagccgccagaggagagctgaggagaggagggggaggtcgacgacctgggccctgggcctctgaaggaaaggagctgtaacttctattgggaaaatgactgactt

SEQ ID NO: 735346 - DNA, 120 bp, Artificial Sequence
  ENSG00000198908_34 (sequence is synthesized)
caaagttggcaggaggtgtaatcaggctgcaggtcttggggtgattagggaatcattgaggaagagcagacaggtctgtttctttctaggttcctgtagagatctgtatgtagctgttca

SEQ ID NO: 735347 - DNA, 120 bp, Artificial Sequence
  ENSG00000198908_35 (sequence is synthesized)
ttttcccatgttaacagttggtatatagtgttgtaaacctttattgcatattctcataacatacaatatacacattcttttgcaaaaatgggaacacagtattgagacttgccttttcct

SEQ ID NO: 735348 - DNA, 120 bp, Artificial Sequence
  ENSG00000198908_36 (sequence is synthesized)
cttaacacttatcttttcaatttagtattatatagatctgtcacatgctttttatctaataactttatagaaatataattgccatacattaagctgcatgttgaaagtatacagtgtgat

SEQ ID NO: 735349 - DNA, 120 bp, Artificial Sequence
  ENSG00000198908_37 (sequence is synthesized)
aagtatacagtgtgatcagttttggaatgtatatacacacaaaaccataaccacaatcaaaattgtaaatacattcatcacccaccaaagctactttttttttgagacagagtcttgctc

SEQ ID NO: 735350 - DNA, 120 bp, Artificial Sequence
  ENSG00000198908_38 (sequence is synthesized)
gcgtgagccaccatgcccagcctcccccaaagcttcttaatgcccttttgtaatccctccctcccctctctccctgtgcccctaacccaggcaaccatgggacattttctgacaaaatag

SEQ ID NO: 735351 - DNA, 120 bp, Artificial Sequence
  ENSG00000198908_39 (sequence is synthesized)
aattgttttcatttcctgtaattgtgtataaatggactcatatagcatgtactctttggtcgggaggggatctggcttatttcacttagtgtaattatttgagattcatccatatcatgt

SEQ ID NO: 735352 - DNA, 120 bp, Artificial Sequence
  ENSG00000198908_40 (sequence is synthesized)
gtctcactatttcattgctttttattgccaagtagtattccaccatatggctttaccacagtttatttatccattcacttattgatggacatttgggctgttcagagtttggccattata

SEQ ID NO: 735353 - DNA, 120 bp, Artificial Sequence
  ENSG00000198908_41 (sequence is synthesized)
agtaaagcagctatgagcatttgtgtacaagtgtttttatggacataggctttcatatctttggaatgacatctaacaatattgaatcttcgacccatgaataaaatctctctccactta

SEQ ID NO: 735354 - DNA, 120 bp, Artificial Sequence
  ENSG00000198908_42 (sequence is synthesized)
acaccctcgcggagagagcggttcttgcagcatcctgcgcagcccctgcccagtttggtgcagaggcgtggggggcgggacgcgtctttgccattctgatagcggggaaagcggtgagaa

SEQ ID NO: 735355 - DNA, 120 bp, Artificial Sequence
  ENSG00000198908_43 (sequence is synthesized)
tcgaagtgaggagccgccagaggagagctgaggagaggagggggaggtcgacgacctgggccctgggcctctgaaggtctgtttctttctaggttcctgtagagatctgtatgtagctgt

SEQ ID NO: 735356 - DNA, 120 bp, Artificial Sequence
  ENSG00000198908_44 (sequence is synthesized)
gcaggttcctgtagagatctgtatgtagctgttcacttggaagttaattaagaaagaacaaaaactattcatttggattcaaggtccatctccactggtggctgtggtggctttggattg

SEQ ID NO: 735357 - DNA, 120 bp, Artificial Sequence
  ENSG00000198908_45 (sequence is synthesized)
cggtgggtcatgtgaccaggctctgcattaggcctgccgagaggagtgttttcttgcatccagaaaagacctgagaggcggacgacacctgtgctccgcagagcagaacgtgggaggaac

SEQ ID NO: 735358 - DNA, 80 bp, Artificial Sequence
  ENSG00000198909_0 (sequence is synthesized)
ggagaacggtggccggacggagagactgcgggtctgagggactggcgggcgggcgggccgagcggcgccgccgaggccgg

SEQ ID NO: 735359 - DNA, 80 bp, Artificial Sequence
  ENSG00000198909_1 (sequence is synthesized)
gggatgtagcgggccaccctgccgatgccacagcgcccggccgcgggcggagccggagccggagcctggggaggcggcgg

SEQ ID NO: 735360 - DNA, 120 bp, Artificial Sequence
  ENSG00000198909_2 (sequence is synthesized)
ccgcccgggcccccggcatgcagccccggctgcggaggtgacactcacggaccttagccaccgccgccgccatcgccaccatggacgaacaggaggcattgaactcaatcatgaacgatc

SEQ ID NO: 735361 - DNA, 120 bp, Artificial Sequence
  ENSG00000198909_3 (sequence is synthesized)
tggtggccctccagatgaaccgacgtcaccggatgcctggatatgagaccatgaagaacaaagacacaggtcactcaaataggcagagtgacgtcagaatcaagttcgagcacaacgggg

SEQ ID NO: 735362 - DNA, 120 bp, Artificial Sequence
  ENSG00000198909_4 (sequence is synthesized)
agaggcgaattatagcgttcagccggcctgtgaaatatgaagatgtggagcacaaggtgacaacagtatttggacaacctcttgatctacattacatgaacaatgagctctccatcctgc

SEQ ID NO: 735363 - DNA, 120 bp, Artificial Sequence
  ENSG00000198909_5 (sequence is synthesized)
tgaaaaaccaagatgatcttgataaagcaattgacattttagatagaagctcaagcatgaaaagccttaggatattgctgttgtcccaggacagaaaccataacagttcctctccccact

SEQ ID NO: 735364 - DNA, 120 bp, Artificial Sequence
  ENSG00000198909_6 (sequence is synthesized)
ctggggtgtccagacaggtgcggatcaaggcttcccagtccgcaggggatataaatactatctaccagccccccgagcccagaagcaggcacctctctgtcagctcccagaaccctggcc

SEQ ID NO: 735365 - DNA, 120 bp, Artificial Sequence
  ENSG00000198909_7 (sequence is synthesized)
gaagctcacctccccctggctatgttcctgagcggcagcagcacattgcccggcaggggtcctacaccagcatcaacagtgagggggagttcatcccagagaccagcgagcagtgcatgc

SEQ ID NO: 735366 - DNA, 120 bp, Artificial Sequence
  ENSG00000198909_8 (sequence is synthesized)
tggatcccctgagcagtgcagaaaattccttgtctggaagctgccaatccttggacaggtcagcagacagcccatccttccggaaatcacgaatgtcccgtgcccagagcttccctgaca

SEQ ID NO: 735367 - DNA, 120 bp, Artificial Sequence
  ENSG00000198909_9 (sequence is synthesized)
acagacaggaatactcagatcgggaaactcagctttatgacaaaggggtcaaaggtggaacctacccccggcgctaccacgtgtctgtgcaccacaaggactacagtgatggcagaagaa

SEQ ID NO: 735368 - DNA, 120 bp, Artificial Sequence
  ENSG00000198909_10 (sequence is synthesized)
catttccccgaatacggcgtcatcaaggcaacttgttcaccctggtgccctccagccgctccctgagcacaaatggcgagaacatgggtctggctgtgcaatacctggacccccgtgggc

SEQ ID NO: 735369 - DNA, 120 bp, Artificial Sequence
  ENSG00000198909_11 (sequence is synthesized)
gcctgcggagtgcggacagcgagaatgccctctctgtgcaggagaggaatgtgccaaccaagtctcccagtgcccccatcaactggcgccggggaaagctcctgggccagggtgccttcg

SEQ ID NO: 735370 - DNA, 120 bp, Artificial Sequence
  ENSG00000198909_12 (sequence is synthesized)
gcagggtctatttgtgctatgacgtggacacgggacgtgaacttgcttccaagcaggtccaatttgatccagacagtcctgagacaagcaaggaggtgagtgctctggagtgcgagatcc

SEQ ID NO: 735371 - DNA, 120 bp, Artificial Sequence
  ENSG00000198909_13 (sequence is synthesized)
agttgctaaagaacttgcagcatgagcgcatcgtgcagtactatggctgtctgcgggaccgcgctgagaagaccctgaccatcttcatggagtacatgccagggggctcggtgaaagacc

SEQ ID NO: 735372 - DNA, 120 bp, Artificial Sequence
  ENSG00000198909_14 (sequence is synthesized)
gcggcagatcctggagggcatgtcctacctgcacagcaacatgattgttcaccgggacattaagggagccaacatcctccgagactctgctgggaatgtaaagctgggggactttggggc

SEQ ID NO: 735373 - DNA, 120 bp, Artificial Sequence
  ENSG00000198909_15 (sequence is synthesized)
cagcaaacgcctgcagacgatctgtatgtcggggacgggcatgcgctccgtcactggcacaccctactggatgagccctgaggtgatcagcggcgagggctatggaaggaaagcagacgt

SEQ ID NO: 735374 - DNA, 120 bp, Artificial Sequence
  ENSG00000198909_16 (sequence is synthesized)
gtggagcctgggctgcactgtggtggagatgctgacagagaaaccaccgtgggcagagtatgaagctatggccgccatcttcaagattgccacccagcccaccaatcctcagctgccctc

SEQ ID NO: 735375 - DNA, 120 bp, Artificial Sequence
  ENSG00000198909_17 (sequence is synthesized)
ccacatctctgaacatggccgggacttcctgaggcgcatttttgtggaggctcgccagagaccttcagctgaggagctgctcacacaccactttgcacagctcatgtactgagctctcac

SEQ ID NO: 735376 - DNA, 120 bp, Artificial Sequence
  ENSG00000198909_18 (sequence is synthesized)
ggccacacagctgccggtcgccctttgctgcatggcagggggctgctgctgggctcagtgaagttgctgcttctcccaggcaaggctgtggaccatggagtggcagcccagccagcgtcg

SEQ ID NO: 735377 - DNA, 120 bp, Artificial Sequence
  ENSG00000198909_19 (sequence is synthesized)
gtctgtgccccttccgccactggggctcagagccggggtggggtggctgcagcctcaggactgggagcccccagcctgtcagatccaggagctccagtgtcctgagctcagcgtggaggg

SEQ ID NO: 735378 - DNA, 120 bp, Artificial Sequence
  ENSG00000198909_20 (sequence is synthesized)
gtaggggctgggaacagtgtgcaaggcagccgtgggccccaccctcggggatgtgtcctgacactgcaattggcaccgaagcccagagggtctgggggcacaagactgacgccagggtat

SEQ ID NO: 735379 - DNA, 120 bp, Artificial Sequence
  ENSG00000198909_21 (sequence is synthesized)
gaagagtgttattttcattcaaagtgttattttgtttttccttccaatgtctggagaccaccagggcatctctgggctggatgagctcccacaagcctgagggaaaggccagcactcgct

SEQ ID NO: 735380 - DNA, 120 bp, Artificial Sequence
  ENSG00000198909_22 (sequence is synthesized)
agcagtggcaggcagaggcccaggctgccgtcccctagagtcccaggttggctctgccagtcctgtcctttaccaaagatgaatgaagcaaatgtcatgctgccttattcagggaaggag

SEQ ID NO: 735381 - DNA, 120 bp, Artificial Sequence
  ENSG00000198909_23 (sequence is synthesized)
gagcctgtcctgcctgtggccatgaccctgcctctcccaggcaggggcccgcgatgtggaactgctgccactgaggggggatccagttttgtcaatgcagttgtctctgttttacaagtt

SEQ ID NO: 735382 - DNA, 120 bp, Artificial Sequence
  ENSG00000198909_24 (sequence is synthesized)
ggagtcactcttatgctgtacccagtttctaaactggagactgtgtgtgccctctgggctctgagtacccctgctttgggcttgggcctaggctgcattgaaaagagctgaaggttgtgg

SEQ ID NO: 735383 - DNA, 120 bp, Artificial Sequence
  ENSG00000198909_25 (sequence is synthesized)
cctttgcgctcctggcccagcctttgttccccactggagcagaaggggagatggacgacacggtcggggcatctggcctggccagtgccctgatcccagagagcccgaggaggtgtctca

SEQ ID NO: 735384 - DNA, 120 bp, Artificial Sequence
  ENSG00000198909_26 (sequence is synthesized)
ggctgcctgagtcgtgacctgctaggccagagcccactccatctggtagaagggaaagcccatatgctaccaccagctgtgtccaaaaccgccagctctgttcttcctcagccagcctcg

SEQ ID NO: 735385 - DNA, 120 bp, Artificial Sequence
  ENSG00000198909_27 (sequence is synthesized)
cccatccccttgaggtctcagcccctttcccttgtagctcctcccctggagggggaatggcagcaggggttggggaaacagcatctccaagcagcttagagttggccatatttacctcag

SEQ ID NO: 735386 - DNA, 120 bp, Artificial Sequence
  ENSG00000198909_28 (sequence is synthesized)
cctgggcgctggtcctttcttccggcccctcccctccaaaatgtgcctattgctagagctcctccctctcaacacccagtttccttgggagttgtcattaaaggaaaaaaaaaaaaaaaa

SEQ ID NO: 735387 - DNA, 120 bp, Artificial Sequence
  ENSG00000198909_29 (sequence is synthesized)
ctgccctgggcaaaggattctcttggagctctttgcctgttacagaggtgggaagaaaggccaaggagggagagggctgtgcagccaggctggagttgggtcagatgggggagatttacc

SEQ ID NO: 735388 - DNA, 120 bp, Artificial Sequence
  ENSG00000198909_30 (sequence is synthesized)
actcagggtgctgtcaaatttgggtcacagactagtgaagggagggtggagaaagcaggagctgggctcagaaaagggctatttcccgcaaaatctgcttcccccacctaatgctgtggc

SEQ ID NO: 735389 - DNA, 120 bp, Artificial Sequence
  ENSG00000198909_31 (sequence is synthesized)
acgatgcacttttatgaatgtagtttctatcgctgtttttagccttttcacatcatgtaatgtgaggccttgtacttgttaatttatatctcagatcatatttgatggtttttatatata

SEQ ID NO: 735390 - DNA, 120 bp, Artificial Sequence
  ENSG00000198909_32 (sequence is synthesized)
tcaattctagactgttacaggtgacggacgcctcaagagagagaagagaaaatgaaagcagctggttttgcagaagtgtgtgtcgcatgcgccagttgggcctggaccctcctgtgtcca

SEQ ID NO: 735391 - DNA, 120 bp, Artificial Sequence
  ENSG00000198909_33 (sequence is synthesized)
tccctgttcccccaggggctctatcagcccctgtaccccacactgccctctgaagacaacacaggctcctgcttccacctcggcccttgcccagggtggggcctggccctcatcttgacc

SEQ ID NO: 735392 - DNA, 120 bp, Artificial Sequence
  ENSG00000198909_34 (sequence is synthesized)
aaagctgctgtgtggcagctcggcctctctacgaccccatcttggtggctgcacactcttcctggcccgcacccccatccccagtccctgttccccaagaggatacagagcacggtgctg

SEQ ID NO: 735393 - DNA, 120 bp, Artificial Sequence
  ENSG00000198909_35 (sequence is synthesized)
gctgactcaactgtgcgtcccaggttcagggtcttacagagctccaccccctggggtcttacctcactgggaatgtgttttgaaaatgaatttgaagacaagccaacaaaccctgcactc

SEQ ID NO: 735394 - DNA, 120 bp, Artificial Sequence
  ENSG00000198909_36 (sequence is synthesized)
caaaaaagcaaaacagaccctaatttttttgtgccaaaaactgtggacatgctggctcagcatcctcaggaccaagttgttgcttaatttattgttttttaataactaatccagataaaa

SEQ ID NO: 735395 - DNA, 120 bp, Artificial Sequence
  ENSG00000198909_37 (sequence is synthesized)
agttgtggggcttcagggtgacctgggcccaaaggttctgaagggcagttcctggcagccccaggcttgctgtgggaaggggccgtgccgtcactttctcatcattccatggggtgtgtc

SEQ ID NO: 735396 - DNA, 120 bp, Artificial Sequence
  ENSG00000198909_38 (sequence is synthesized)
tgcctgggccaactctgcatggagaggccagggctggggacagtccgcactctgccaccctcctgccccttccacccaccccagctctatgtctgtgtctgaattgtggatcgtgcagcc

SEQ ID NO: 735397 - DNA, 120 bp, Artificial Sequence
  ENSG00000198909_39 (sequence is synthesized)
atggttattgtggaactgtggaacctgcagccatagttatttgactatatcttgaccgagggcttgcagtgcaaagccaggccagtgttgcgcattacttacaataaaagggatcattta

SEQ ID NO: 735398 - DNA, 120 bp, Artificial Sequence
  ENSG00000198909_40 (sequence is synthesized)
aggcttcccagtccgcaggggatataaatactatctaccagccccccgagcccagaagcaggcacctctctgtcagtagaattgcttcaaattgaagtgtcctctgaagatcctgagctg

SEQ ID NO: 735399 - DNA, 120 bp, Artificial Sequence
  ENSG00000198909_41 (sequence is synthesized)
agcttgagagatctaagcactgatcctgttgctgagtttgtctgtttgcaatatgcctcctgagggagttacaggaaaaatatgtttctgaggtactgactttgccttactgagtaactt

SEQ ID NO: 735400 - DNA, 120 bp, Artificial Sequence
  ENSG00000198909_42 (sequence is synthesized)
gaggagactgcccaggtggtctcagacaagctacgggggcaaacagctgggcccctgggacccttaggctcagcaggtggtggctttggcccaaatgcaccacatgggataagccttgga

SEQ ID NO: 735401 - DNA, 120 bp, Artificial Sequence
  ENSG00000198909_43 (sequence is synthesized)
gtgtctgaagcctggctccactattgtgtgacaagcctcttctcctctctgatctttagtttttccatgtttaaactagggaagagcacacccttcatccctgccatattaagatattta

SEQ ID NO: 735402 - DNA, 120 bp, Artificial Sequence
  ENSG00000198909_44 (sequence is synthesized)
atttgtgctatgacgtggacacgggacgtgaacttgcttccaagcaggtccaatttgatccagacagtcctgagacaagcaagttcccaaggcagatccctgtgaggccactaactaggg

SEQ ID NO: 735403 - DNA, 80 bp, Artificial Sequence
  ENSG00000198910_0 (sequence is synthesized)
acagccgctgctgccgcagcatcggcatcgcagacgcgctcgggcggcgggtccgaggccggcgtgcgcggaggctgggc

SEQ ID NO: 735404 - DNA, 120 bp, Artificial Sequence
  ENSG00000198910_1 (sequence is synthesized)
ccaactcccgccccaagccgcccaccagcccccttcccctccggccggagcctgaaccgagcccggctggctgtgctgcgcggtgccgccgggaaagatggtcgtggcgctgcggtacgt

SEQ ID NO: 735405 - DNA, 120 bp, Artificial Sequence
  ENSG00000198910_2 (sequence is synthesized)
gtggcctctcctcctctgcagcccctgcctgcttatccagatccccgaggaatatgaaggacaccatgtgatggagccacctgtcatcacggaacagtctccacggcgcctggttgtctt

SEQ ID NO: 735406 - DNA, 120 bp, Artificial Sequence
  ENSG00000198910_3 (sequence is synthesized)
ccccacagatgacatcagcctcaagtgtgaggccagtggcaagcccgaagtgcagttccgctggacgagggatggtgtccacttcaaacccaaggaagagctgggtgtgaccgtgtacca

SEQ ID NO: 735407 - DNA, 120 bp, Artificial Sequence
  ENSG00000198910_4 (sequence is synthesized)
gtcgccccactctggctccttcaccatcacgggcaacaacagcaactttgctcagaggttccagggcatctaccgctgctttgccagcaataagctgggcaccgccatgtcccatgagat

SEQ ID NO: 735408 - DNA, 120 bp, Artificial Sequence
  ENSG00000198910_5 (sequence is synthesized)
ccggctcatggccgagggtgcccccaagtggccaaaggagacagtgaagcccgtggaggtggaggaaggggagtcagtggttctgccttgcaaccctcccccaagtgcagagcctctccg

SEQ ID NO: 735409 - DNA, 120 bp, Artificial Sequence
  ENSG00000198910_6 (sequence is synthesized)
gatctactggatgaacagcaagatcttgcacatcaagcaggacgagcgggtgacgatgggccagaacggcaacctctactttgccaatgtgctcacctccgacaaccactcagactacat

SEQ ID NO: 735410 - DNA, 120 bp, Artificial Sequence
  ENSG00000198910_7 (sequence is synthesized)
ctgccacgcccacttcccaggcaccaggaccatcattcagaaggaacccattgacctccgggtcaaggccaccaacagcatgattgacaggaagccgcgcctgctcttccccaccaactc

SEQ ID NO: 735411 - DNA, 120 bp, Artificial Sequence
  ENSG00000198910_8 (sequence is synthesized)
cagcagccacctggtggccttgcaggggcagccattggtcctggagtgcatcgccgagggctttcccacgcccaccatcaaatggctgcgccccagtggccccatgccagccgaccgtgt

SEQ ID NO: 735412 - DNA, 120 bp, Artificial Sequence
  ENSG00000198910_9 (sequence is synthesized)
cacctaccagaaccacaacaagaccctgcagctgctgaaagtgggcgaggaggatgatggcgagtaccgctgcctggccgagaactcactgggcagtgcccggcatgcgtactatgtcac

SEQ ID NO: 735413 - DNA, 120 bp, Artificial Sequence
  ENSG00000198910_10 (sequence is synthesized)
cgtggaggctgccccgtactggctgcacaagccccagagccatctatatgggccaggagagactgcccgcctggactgccaagtccagggcaggccccaaccagaggtcacctggagaat

SEQ ID NO: 735414 - DNA, 120 bp, Artificial Sequence
  ENSG00000198910_11 (sequence is synthesized)
caacgggatccctgtggaggagctggccaaagaccagaagtaccggattcagcgtggcgccctgatcctgagcaacgtgcagcccagtgacacaatggtgacccaatgtgaggcccgcaa

SEQ ID NO: 735415 - DNA, 120 bp, Artificial Sequence
  ENSG00000198910_12 (sequence is synthesized)
ccggcacgggctcttgctggccaatgcctacatctacgttgtccagctgccagccaagatcctgactgcggacaatcagacgtacatggctgtccagggcagcactgcctaccttctgtg

SEQ ID NO: 735416 - DNA, 120 bp, Artificial Sequence
  ENSG00000198910_13 (sequence is synthesized)
caaggccttcggagcgcctgtgcccagtgttcagtggctggacgaggatgggacaacagtgcttcaggacgaacgcttcttcccctatgccaatgggaccctgggcattcgagacctcca

SEQ ID NO: 735417 - DNA, 120 bp, Artificial Sequence
  ENSG00000198910_14 (sequence is synthesized)
ggccaatgacaccggacgctacttctgcctggctgccaatgaccaaaacaatgttaccatcatggctaacctgaaggttaaagatgcaactcagatcactcaggggccccgcagcacaat

SEQ ID NO: 735418 - DNA, 120 bp, Artificial Sequence
  ENSG00000198910_15 (sequence is synthesized)
cgagaagaaaggttccagggtgaccttcacgtgccaggcctcctttgacccctccttgcagcccagcatcacctggcgtggggacggtcgagacctccaggagcttggggacagtgacaa

SEQ ID NO: 735419 - DNA, 120 bp, Artificial Sequence
  ENSG00000198910_16 (sequence is synthesized)
gtacttcatagaggatgggcgcctggtcatccacagcctggactacagcgaccagggcaactacagctgcgtggccagtaccgaactggatgtggtggagagtagggcacagctcttggt

SEQ ID NO: 735420 - DNA, 120 bp, Artificial Sequence
  ENSG00000198910_17 (sequence is synthesized)
ggtggggagccctgggccggtgccacggctggtgctgtccgacctgcacctgctgacgcagagccaggtgcgcgtgtcctggagtcctgcagaagaccacaatgcccccattgagaaata

SEQ ID NO: 735421 - DNA, 120 bp, Artificial Sequence
  ENSG00000198910_18 (sequence is synthesized)
tgacattgaatttgaggacaaggaaatggcgcctgaaaaatggtacagtctgggcaaggttccagggaaccagacctctaccaccctcaagctgtcgccctatgtccactacacctttag

SEQ ID NO: 735422 - DNA, 120 bp, Artificial Sequence
  ENSG00000198910_19 (sequence is synthesized)
ggttactgccataaacaaatatggccccggggagcccagcccggtctctgagactgtggtcacacctgaggcagccccagagaagaaccctgtggatgtgaagggggaaggaaatgagac

SEQ ID NO: 735423 - DNA, 120 bp, Artificial Sequence
  ENSG00000198910_20 (sequence is synthesized)
caccaatatggtcatcacgtggaagccgctccggtggatggactggaacgccccccaggttcagtaccgcgtgcagtggcgccctcaggggacacgagggccctggcaggagcagattgt

SEQ ID NO: 735424 - DNA, 120 bp, Artificial Sequence
  ENSG00000198910_21 (sequence is synthesized)
aggtcactatcggctactctggagaggactacccccaggcaatccctgagctggaaggcattgaaatcctcaactcaagtgccgtgctggtcaagtggcggccggtggacctggcccagg

SEQ ID NO: 735425 - DNA, 120 bp, Artificial Sequence
  ENSG00000198910_22 (sequence is synthesized)
tcaagggccacctccgcggatacaatgtgacgtactggagggagggcagtcagaggaagcacagcaagagacatatccacaaagaccatgtggtggtgcccgccaacaccaccagtgtca

SEQ ID NO: 735426 - DNA, 120 bp, Artificial Sequence
  ENSG00000198910_23 (sequence is synthesized)
tcctcagtggcttgcggccctatagctcctaccacctggaggtgcaggcctttaacgggcgaggatcggggcccgccagcgagttcaccttcagcaccccagagggagtgcctggccacc

SEQ ID NO: 735427 - DNA, 120 bp, Artificial Sequence
  ENSG00000198910_24 (sequence is synthesized)
ccgaggcgttgcacctggagtgccagtcgaacaccagcctgctgctgcgctggcagcccccactcagccacaacggcgtgctcaccggctacgtgctctcctaccaccccctggatgagg

SEQ ID NO: 735428 - DNA, 120 bp, Artificial Sequence
  ENSG00000198910_25 (sequence is synthesized)
ggggcaaggggcaactgtccttcaaccttcgggaccccgaacttcggacacacaacctgaccgatctcagcccccacctgcggtaccgcttccagcttcaggccaccaccaaagagggcc

SEQ ID NO: 735429 - DNA, 120 bp, Artificial Sequence
  ENSG00000198910_26 (sequence is synthesized)
ctggtgaagccatcgtacgggaaggaggcactatggccttgtctgggatctcagattttggcaacatctcagccacagcgggtgaaaactacagtgtcgtctcctgggtccccaaggagg

SEQ ID NO: 735430 - DNA, 120 bp, Artificial Sequence
  ENSG00000198910_27 (sequence is synthesized)
gccagtgcaacttcaggttccatatcttgttcaaagccttgggagaagagaagggtggggcttccctttcgccacagtatgtcagctacaaccagagctcctacacgcagtgggacctgc

SEQ ID NO: 735431 - DNA, 120 bp, Artificial Sequence
  ENSG00000198910_28 (sequence is synthesized)
agcctgacactgactacgagatccacttgtttaaggagaggatgttccggcaccaaatggctgtgaagaccaatggcacaggccgcgtgaggctccctcctgctggcttcgccactgagg

SEQ ID NO: 735432 - DNA, 120 bp, Artificial Sequence
  ENSG00000198910_29 (sequence is synthesized)
gctggttcatcggctttgtgagtgccatcatcctcctgctcctcgtcctgctcatcctctgcttcatcaagcgcagcaagggcggcaaatactcagtgaaggataaggaggacacccagg

SEQ ID NO: 735433 - DNA, 120 bp, Artificial Sequence
  ENSG00000198910_30 (sequence is synthesized)
tggactctgaggcccgaccgatgaaagatgagaccttcggcgagtacaggtccctggagagtgacaacgaggagaaggcctttggcagcagccagccatcgctcaacggggacatcaagc

SEQ ID NO: 735434 - DNA, 120 bp, Artificial Sequence
  ENSG00000198910_31 (sequence is synthesized)
ccctgggcagtgacgacagcctggccgattatgggggcagcgtggatgttcagttcaacgaggatggttcgttcattggccagtacagtggcaagaaggagaaggaggcggcagggggca

SEQ ID NO: 735435 - DNA, 120 bp, Artificial Sequence
  ENSG00000198910_32 (sequence is synthesized)
atgacagctcaggggccacttcccccatcaaccctgccgtggccctagaatagtggagtccaggacaggagatgctgtgcccctggccttgggatccaggcccctccctctccagcaggc

SEQ ID NO: 735436 - DNA, 120 bp, Artificial Sequence
  ENSG00000198910_33 (sequence is synthesized)
ccatgggaggctggagttggggcagaggagaacttgctgcctcggatccccttcctaccacccggtccccactttattgccaaaacccagctgcaccccttcctgggcacacgctgctct

SEQ ID NO: 735437 - DNA, 120 bp, Artificial Sequence
  ENSG00000198910_34 (sequence is synthesized)
gccccagcttgggcagatctcccacatgccaggggcctttgggtgctgttttgccagcccatttgggcagagaggctgtggtttgggggagaagaagtaggggtggcccgaaagggtctc

SEQ ID NO: 735438 - DNA, 120 bp, Artificial Sequence
  ENSG00000198910_35 (sequence is synthesized)
cgaaatgctgtctttcttgctccctgactgggggcagacatggtggggtctcctcaggaccagggttggcaccttccccctcccccagccactccccagccagcctggctgggactggga

SEQ ID NO: 735439 - DNA, 120 bp, Artificial Sequence
  ENSG00000198910_36 (sequence is synthesized)
acagaactcggtgtccccaccatctgctgtcttttctttgccatctctgctccaaccgggatgggagccgggcaaactggccgcgggggcaggggaggccatctggagagcccagagtcc

SEQ ID NO: 735440 - DNA, 120 bp, Artificial Sequence
  ENSG00000198910_37 (sequence is synthesized)
ccccactcccagcatcgcactctggcagcaccgcctcttcccgccgcccagcccaccccatggccggctttcaggagctccatacacacgctgccttcggtacccaccacacaacatcca

SEQ ID NO: 735441 - DNA, 120 bp, Artificial Sequence
  ENSG00000198910_38 (sequence is synthesized)
agtggcctccgtcactacctggctgcggggcgggcacacctcctcccactgcccactggccggcctcttccagccgcccccaccccccaggaccccttagcagccctgccctccctatcg

SEQ ID NO: 735442 - DNA, 120 bp, Artificial Sequence
  ENSG00000198910_39 (sequence is synthesized)
tctgaacagttgtcttcctcagcctcctcccgcccccaccttgggaatgtaaatacaccgtgactttgaaagtttgtacccctgtccttccctttacgccactagtgtgtaggcagatgt

SEQ ID NO: 735443 - DNA, 120 bp, Artificial Sequence
  ENSG00000198910_40 (sequence is synthesized)
ctgagtccctaggtggtttctaggattgatagcaattagctttgatgaacccatcccaggaaaaataaaaacagacaaaaaaaaaggaaagattggttctcccagcactgctcagcagcc

SEQ ID NO: 735444 - DNA, 120 bp, Artificial Sequence
  ENSG00000198910_41 (sequence is synthesized)
acagcctccctgtatgcctgtgcttggtctactgataagccctctacaaaaaaacaaaagtatatatatatatgtacataatatcagaattataacaggcaaataaaacctgaaaatcaa

SEQ ID NO: 735445 - DNA, 120 bp, Artificial Sequence
  ENSG00000198910_42 (sequence is synthesized)
atccgaattcgtcttctctgtgtgtaggggcttgggcctggcctcagggctggggtgagagcctatggctctatccaagtcactggtggtttccagacccccaggcaatccctgagctgg

SEQ ID NO: 735446 - DNA, 120 bp, Artificial Sequence
  ENSG00000198910_43 (sequence is synthesized)
gagtgcaacccctcccagagaagacacaccacagaaataccagctcacatacagctcactccctgcttgcagatccacaaccacacacatgcccacggacacctgcacatgcagacacat

SEQ ID NO: 735447 - DNA, 120 bp, Artificial Sequence
  ENSG00000198910_44 (sequence is synthesized)
acggggatgtgcatgccatgcacaggggagctgatggggcaacaagttggtgctgggaaggcagctggcaggaaaggtgcagacagagagtagagagggaataaaaggcaacctagaggc

SEQ ID NO: 735448 - DNA, 120 bp, Artificial Sequence
  ENSG00000198910_45 (sequence is synthesized)
cgtaaaagttgggtggctgtgaccagaggcgcatctgaggcagagggcagtgtctgaaggcagagagagacacagcctggcgggggcctcagctgggagcagggaagcaagatttgcagg

SEQ ID NO: 735449 - DNA, 120 bp, Artificial Sequence
  ENSG00000198910_46 (sequence is synthesized)
gctcttgggggcccgaggaagccgtgcagagggtccctggctcctggcccagctgtggtcccaagtcctgccctgtctcctgaggctgttcctcccctagagctgccagccaagatcctg

SEQ ID NO: 735450 - DNA, 120 bp, Artificial Sequence
  ENSG00000198910_47 (sequence is synthesized)
tgctgccgcagcatcggcatcgcagacgcgctcgggcggcgggtccgaggccggcgtgcgcggaggctgggcgggcagcccgagcggtggccgcagcgcaggaactccaggcagaacctg

SEQ ID NO: 735451 - DNA, 120 bp, Artificial Sequence
  ENSG00000198910_48 (sequence is synthesized)
aggagaagggtaaggaggccctcagctgagcctgcacccccgccctcctgagtgccggggccctgctcggctctccctgagcaccatgtgcttctctcacctgtgtggggctggctttgt

SEQ ID NO: 735452 - DNA, 120 bp, Artificial Sequence
  ENSG00000198910_49 (sequence is synthesized)
tctgtctctgccccagcctgggtactctgtcaccctcactgttcctctctgccattctctctggtcccttctcccctgtctggggtttgtccttcttggtttctgtgtcttggcttttgt

SEQ ID NO: 735453 - DNA, 120 bp, Artificial Sequence
  ENSG00000198910_50 (sequence is synthesized)
tcggctttgtgagtgccatcatcctcctgctcctcgtcctgctcatcctctgcttcatcaagcgcagcaagggcggcaaatactcaggtagcctctgagccccacgtgacgggggtggag

SEQ ID NO: 735454 - DNA, 120 bp, Artificial Sequence
  ENSG00000198910_51 (sequence is synthesized)
ccgagggcagagaggagcacctcgccccttccacccttctgcaaggcctcctggattccccgagctccccacaagatgacaggcgcatggtgggggcaggcagggggatcatcctcccag

SEQ ID NO: 735455 - DNA, 120 bp, Artificial Sequence
  ENSG00000198910_52 (sequence is synthesized)
tggggcaacaggcaagtggtggctggaccgcagggggtgagcggtttctttcaaggcctcttgcctctgggcgctgttgagacagagtgctgggggtgcggggcgtagaggggcctggag

SEQ ID NO: 735456 - DNA, 120 bp, Artificial Sequence
  ENSG00000198910_53 (sequence is synthesized)
gccgcagcatcggcatcgcagacgcgctcgggcggcgggtccgaggccggcgtgcgcggaggctgggcgggcagcccgagcggtggccgcagcgcaggacacttgaaatatacagaaaag

SEQ ID NO: 735457 - DNA, 120 bp, Artificial Sequence
  ENSG00000198910_54 (sequence is synthesized)
aacaaaagaaattaagaatcgctagtgatctgatcaccaagagggaaacacgttcagcacgccccagcctccctggtttgctacaccgcgctcctaaaaggctcctccccaagttcccag

SEQ ID NO: 735458 - DNA, 120 bp, Artificial Sequence
  ENSG00000198910_55 (sequence is synthesized)
ctgccagctccctgctgagcatcaggaggacaatcagcgcttcaaggtggcggggtcccctgccctgcagccagtgaagagcttccctacccaggcgctcaggatcccagcgatgggcag

SEQ ID NO: 735459 - DNA, 120 bp, Artificial Sequence
  ENSG00000198910_56 (sequence is synthesized)
catggccagtgctcctttgggccgggctctgggctgcccatggaagagccagtgacaaactggaccagcattgtccctgtcttcgtggggtgtcacttgttttcttttttcttgatgatt

SEQ ID NO: 735460 - DNA, 120 bp, Artificial Sequence
  ENSG00000198910_57 (sequence is synthesized)
atctgaagggaaaagggaggcaaagagtgaggaagggcctggcctgagggctcctacagtgagcagggtgcccagattgtgcccccaatcggcctctcccaggtccgagccctttccacc

SEQ ID NO: 735461 - DNA, 120 bp, Artificial Sequence
  ENSG00000198910_58 (sequence is synthesized)
actggaactacagctggcgccttccttggcatgcacctggccaggactggcaggtgagggtcgaggagacaggcctgtgtgccctaccttgatcaccaagttccctttcaaagctcgaaa

SEQ ID NO: 735462 - DNA, 120 bp, Artificial Sequence
  ENSG00000198910_59 (sequence is synthesized)
acttctgcctggctgccaatgaccaaaacaatgttaccatcatggctaacctgaaggttaaaggtcaggcaacccttgccacatggctggcagtgcctctgggagggagggtctgggcct

SEQ ID NO: 735463 - DNA, 120 bp, Artificial Sequence
  ENSG00000198910_60 (sequence is synthesized)
ttccggcaccaaatggctgtgaagaccaatggcacagtgaaggataaggaggacacccaggtggactctgaggcccgaccgatgaaagatgagaccttcggcgagtacagtgacaacgag

SEQ ID NO: 735464 - DNA, 120 bp, Artificial Sequence
  ENSG00000198911_0 (sequence is synthesized)
ctttctgtgcggcgcccgggcgcaacgcaaacatggcggcgggtggcacccgtcggtgaggcggtgccgggcgggggttgtcgggtgtcatgggcggtggcgacggcaccgcccccgcgt

SEQ ID NO: 735465 - DNA, 120 bp, Artificial Sequence
  ENSG00000198911_1 (sequence is synthesized)
ctccctgagcgggacggcagggggggcttctgcgctgagccgggcgatggacgacagcggcgagctgggtggtctggagaccatggagaccctcacggagctgggcgacgagctgaccct

SEQ ID NO: 735466 - DNA, 120 bp, Artificial Sequence
  ENSG00000198911_2 (sequence is synthesized)
gggagacatcgacgagatgctgcaatttgtcagtaatcaagtgggagagttccctgacttgttttcagaacagctgtgtagctcctttcctggcagtggtggtagtggtagcagcagcgg

SEQ ID NO: 735467 - DNA, 120 bp, Artificial Sequence
  ENSG00000198911_3 (sequence is synthesized)
cagcagtggcagcagcagcagcagcagcaatggcaggggcagcagcagcggagctgtggacccttcagtgcaacggtcattcacccaggtcacattaccttccttctctccctcggcggc

SEQ ID NO: 735468 - DNA, 120 bp, Artificial Sequence
  ENSG00000198911_4 (sequence is synthesized)
ctccccacaggctccaactctgcaagtcaaggtttctcccacctcagttcccaccacacccagggcaactcctattcttcagccccgcccccagccccagcctcaacctcaaactcagct

SEQ ID NO: 735469 - DNA, 120 bp, Artificial Sequence
  ENSG00000198911_5 (sequence is synthesized)
gcaacaacagacggtaatgatcacgccaacattcagcaccactccgcagacgaggatcatccagcagcctttgatataccagaatgcagctactagctttcaagtccttcagcctcaagt

SEQ ID NO: 735470 - DNA, 120 bp, Artificial Sequence
  ENSG00000198911_6 (sequence is synthesized)
ccaaagcctggtgacatcctcccaggtacagccggtcaccattcagcagcaggtgcagacagtacaggcccagcgggtgctgacacaaacggccaatggcacgctgcagacccttgcccc

SEQ ID NO: 735471 - DNA, 120 bp, Artificial Sequence
  ENSG00000198911_7 (sequence is synthesized)
ggctacggtgcagacagttgctgcgccacaggtgcagcaggtcccggtcctggtccagcctcagatcatcaagacagattcccttgttttgaccacactgaagacagatggcagccctgt

SEQ ID NO: 735472 - DNA, 120 bp, Artificial Sequence
  ENSG00000198911_8 (sequence is synthesized)
tatggctgcggtccagaacccggccctcaccgccctcaccacccctatccagacggctgcccttcaagtaccaaccctggtgggcagcagtgggaccattctgaccacaatgcctgtaat

SEQ ID NO: 735473 - DNA, 120 bp, Artificial Sequence
  ENSG00000198911_9 (sequence is synthesized)
gatggggcaagagaaagtgcccattaagcaggtacctgggggagtcaagcagcttgagccccccaaagaaggagaaaggcggacaacccataatatcattgagaaacgatatcgctcctc

SEQ ID NO: 735474 - DNA, 120 bp, Artificial Sequence
  ENSG00000198911_10 (sequence is synthesized)
catcaatgacaaaatcatcgaattgaaagacctggtcatggggacagacgccaagatgcacaagtctggcgttctgaggaaggccattgattacatcaaatacttgcagcaggtcaatca

SEQ ID NO: 735475 - DNA, 120 bp, Artificial Sequence
  ENSG00000198911_11 (sequence is synthesized)
taaactgcgccaggagaacatggtgctgaagctggcaaatcaaaagaacaagcttctaaagggcatcgacctaggcagtctggtggacaatgaggtggacctgaagatcgaggactttaa

SEQ ID NO: 735476 - DNA, 120 bp, Artificial Sequence
  ENSG00000198911_12 (sequence is synthesized)
tcagaatgtccttctgatgtcccccccagcctctgactcagggtcccaggctggcttctctccctactccattgactctgagccaggaagccctctattggatgatgcaaaggtcaaaga

SEQ ID NO: 735477 - DNA, 120 bp, Artificial Sequence
  ENSG00000198911_13 (sequence is synthesized)
tgagccagactctcctcctgtggcgctgggcatggtagaccgctcacggattcttctgtgtgtcctcaccttcctgtgcctctcctttaaccccctgacttccctgctgcagtggggagg

SEQ ID NO: 735478 - DNA, 120 bp, Artificial Sequence
  ENSG00000198911_14 (sequence is synthesized)
ggcccacgactctgaccagcacccacactcaggctctggccgcagtgtcctgtcattcgagtcaggttctgggggctggtttgactggatgatgcctactcttctcttatggctggtaaa

SEQ ID NO: 735479 - DNA, 120 bp, Artificial Sequence
  ENSG00000198911_15 (sequence is synthesized)
tggtgtgattgtcctgagcgtctttgtgaagctgctggttcatggggagccagtgatccggccacactcgcgctcctcggtcaccttctggaggcaccggaaacaggcagatctggatct

SEQ ID NO: 735480 - DNA, 120 bp, Artificial Sequence
  ENSG00000198911_16 (sequence is synthesized)
cgccagaggagattttgcagctgctgccggcaacctacaaacctgcctggcagttttgggccgggcactgcccacctcccgcctggacctggcctgcagcctctcctggaacgtgatccg

SEQ ID NO: 735481 - DNA, 120 bp, Artificial Sequence
  ENSG00000198911_17 (sequence is synthesized)
ctacagcctgcagaagctacgcctggtgcgctggctgctcaagaaagtcttccagtgccggcgggccacgccagccactgaggcaggctttgaagacgaagctaagaccagcgcccggga

SEQ ID NO: 735482 - DNA, 120 bp, Artificial Sequence
  ENSG00000198911_18 (sequence is synthesized)
tgcggctctggcctatcaccggctgcaccagctgcacatcacagggaagcttcctgcaggatccgcctgttccgatgtacacatggcgttgtgtgccgtgaacctggctgaatgtgcaga

SEQ ID NO: 735483 - DNA, 120 bp, Artificial Sequence
  ENSG00000198911_19 (sequence is synthesized)
ggagaagatcccaccgagcacactggttgagatccatctgactgctgccatggggctcaagacccggtgtggaggcaagctgggcttcctggccagctacttcctcagccgagcccagag

SEQ ID NO: 735484 - DNA, 120 bp, Artificial Sequence
  ENSG00000198911_20 (sequence is synthesized)
cctgtgtggccccgagcacagtgctgttcctgactccctgcgctggctctgccaccccctgggccagaagtttttcatggagcggagctggtctgtgaagtcagctgccaaggagagtct

SEQ ID NO: 735485 - DNA, 120 bp, Artificial Sequence
  ENSG00000198911_21 (sequence is synthesized)
ctatagagtccttggtgaaacctcaggccaagaagaaggctggagaccaggaagaagagagctgtgaattctccagtgctctggagtacttgaaattacttcattcttttgtggactctg

SEQ ID NO: 735486 - DNA, 120 bp, Artificial Sequence
  ENSG00000198911_22 (sequence is synthesized)
tgggggttatgagccccccactctccaggagctccgtgctcaagtccgccctgggtccagacatcatctgtcggtggtggacgtctgcaatcactgtggccatcagctggctccagggag

SEQ ID NO: 735487 - DNA, 120 bp, Artificial Sequence
  ENSG00000198911_23 (sequence is synthesized)
acgatgcagctgtgcgctctcattttaccaaagtggaacgcatccccaaggccctggaagtgacagagagccccctggtgaaggccatcttccatgcctgcagagccatgcatgcctcac

SEQ ID NO: 735488 - DNA, 120 bp, Artificial Sequence
  ENSG00000198911_24 (sequence is synthesized)
tccctgggaaagcagatgggcagcagagttccttctgccattgcgagagggccagtggccacctatggagcagcctcaacgtcagtggggccacctctgaccctgccctcaaccacgtgg

SEQ ID NO: 735489 - DNA, 120 bp, Artificial Sequence
  ENSG00000198911_25 (sequence is synthesized)
tccagctgctcacctgtgacctgctactgtcgctacggacagcgctctggcaaaaacaggccagtgccagccaggctgtgggggagacctaccacgcgtcaggcgctgaactggcgggct

SEQ ID NO: 735490 - DNA, 120 bp, Artificial Sequence
  ENSG00000198911_26 (sequence is synthesized)
tccaacgggacctgggcagcctgcgcaggctggcacacagcttccgcccagcataccgcaaggtgttcctgcatgaagccaccgtgcgcctgatggcaggagccagccccacccgcaccc

SEQ ID NO: 735491 - DNA, 120 bp, Artificial Sequence
  ENSG00000198911_27 (sequence is synthesized)
accagctgctggaacacagcctgcggcggcgcaccacgcagagcaccaagcacggagaggtggatgcctggcccggccagcgagagcgggccaccgccatcctgctggcctgccgccacc

SEQ ID NO: 735492 - DNA, 120 bp, Artificial Sequence
  ENSG00000198911_28 (sequence is synthesized)
tgcccctctccttcctctcctccccgggccagcgggcagtgctgctggccgaagctgcccgcaccctggagaaggtgggcgaccggcgctcctgcaacgactgccagcagatgattgtta

SEQ ID NO: 735493 - DNA, 120 bp, Artificial Sequence
  ENSG00000198911_29 (sequence is synthesized)
agctgggtggtggcactgccattgccgcctcctgaccaccaggctcagcccacccctccacctctctctcgatttctctctctccccctcagcatcttcccgctgagagtggtggggaag

SEQ ID NO: 735494 - DNA, 120 bp, Artificial Sequence
  ENSG00000198911_30 (sequence is synthesized)
agccttgtcttcttagctgtcacctgccgaggcttctgggccactcaggccagtgcacccctgggcagagccccttaaagctgctgtcactagatgcccatggtccagggcctggtgggc

SEQ ID NO: 735495 - DNA, 120 bp, Artificial Sequence
  ENSG00000198911_31 (sequence is synthesized)
gtgagaggataggtggcagggcagaaactgggcagccctgacttgatagcagcagggggagctcccaagctgccaagcccctgcctccagccttcctgagtttctctctcctgaacccta

SEQ ID NO: 735496 - DNA, 120 bp, Artificial Sequence
  ENSG00000198911_32 (sequence is synthesized)
ctctctcctttttgcttcctcagtttttatcaggctttctctgggggacagcagtctctgagcaccagggagcagttgccctcaggcctgtgcccagcatgccctcccctttttatacga

SEQ ID NO: 735497 - DNA, 120 bp, Artificial Sequence
  ENSG00000198911_33 (sequence is synthesized)
atgttttctaccagtgtgcttgggtttgccatgatgcgaggctgagttgctgtagcgtcttgattctctccctgggtctgcgttccctcccctgggcctgactgagcctgctcattgttt

SEQ ID NO: 735498 - DNA, 120 bp, Artificial Sequence
  ENSG00000198911_34 (sequence is synthesized)
ttccctttattacacaggacagccaggggaggaggggggcccagccctgggaggctggtgggaggcagggggcaggcctgcggatgcatgaaataatgttggcattattttttaattttt

SEQ ID NO: 735499 - DNA, 120 bp, Artificial Sequence
  ENSG00000198911_35 (sequence is synthesized)
taaaaaataaatggtatcttatttaattgtcctgttccttcccactccccgcctcctaggatgttagcccaagctcagggtaggcccagggggctgggagaaatgaagccacccatgggg

SEQ ID NO: 735500 - DNA, 120 bp, Artificial Sequence
  ENSG00000198911_36 (sequence is synthesized)
actggggaccaggggccttcagcatggcttctaggttccctcctccccctaccccatctcctacctccacagtacagactgtccccaacttaacagtggttcaacttaaaccatgtttca

SEQ ID NO: 735501 - DNA, 120 bp, Artificial Sequence
  ENSG00000198911_37 (sequence is synthesized)
actttacaattggtctgttggggtattaaatgaatttgtgacttaggatattttcatttatgatgggtttatcaggaagtaaccccatggtaagttgaggcatatctgtatatatttaaa

SEQ ID NO: 735502 - DNA, 120 bp, Artificial Sequence
  ENSG00000198911_38 (sequence is synthesized)
cctaattaattcttgagctgaaaataaataaaccaggatggcagggaccaacccctaatccctccccagcggcaagcccctcttttcagagtgggcagagggttgcctatggtgggcact

SEQ ID NO: 735503 - DNA, 120 bp, Artificial Sequence
  ENSG00000198911_39 (sequence is synthesized)
aggaatgaggtcccctgcctcgatgcgggtcctaggagaaaaagtcctacttttctgggtccccaggtgcagcacctcccggagactgtttctcccatggcctcctgagtgatgggccct

SEQ ID NO: 735504 - DNA, 120 bp, Artificial Sequence
  ENSG00000198911_40 (sequence is synthesized)
gcctccctgtgcctcatcctcaggctggttggagcagagggtgggcaggagccccagcacagactggggggtgctcacagcagggccaccttgatgcaggctggaatgttatccctgggg

SEQ ID NO: 735505 - DNA, 120 bp, Artificial Sequence
  ENSG00000198911_41 (sequence is synthesized)
tgtgcttggaccccacctgctttctttctctcctgcccctcccctactctcactgtaatttatggaccctgcccgcctgcgtgttgtgtgtatgtcctgtgccttttctcactattgttt

SEQ ID NO: 735506 - DNA, 120 bp, Artificial Sequence
  ENSG00000198911_42 (sequence is synthesized)
gggtgtgggagggggtggtttttcactgaaaaggggggtacacctatagctttcttgatgttcaatcaatcagtcactgtgtcccagacatattcaataaacacagattggtaccaccca

SEQ ID NO: 735507 - DNA, 120 bp, Artificial Sequence
  ENSG00000198911_43 (sequence is synthesized)
tggtgaagcctgtgtctctgacttccagcattgaatgaaggtgctaaagggtggggcgctaaccctagctcagggctggcatttcagatctggagctggtggcatggtgccatagtggca

SEQ ID NO: 735508 - DNA, 120 bp, Artificial Sequence
  ENSG00000198911_44 (sequence is synthesized)
gtactgccaggtctggcagcacttggccaaagcgggcaggtctgtgttgaggttgctttatgcagactaacaaagggatcattctgctgtgtacctgtccctattctagaccctggtggg

SEQ ID NO: 735509 - DNA, 120 bp, Artificial Sequence
  ENSG00000198911_45 (sequence is synthesized)
gacagaccacctccacccccaccatcaaccctggcaactttgtcctgtaactaaaatagcctttagcacatggcataaccggagagcttttgacattcctctttggagattcatgtctgc

SEQ ID NO: 735510 - DNA, 120 bp, Artificial Sequence
  ENSG00000198911_46 (sequence is synthesized)
gtcttgggggcattcggcactagtgatgggcagccctgcctgctgactccccggctgtttctaattggatctgagtattctaagagaaactgtaaaatgctccaagacagaaaggcccca

SEQ ID NO: 735511 - DNA, 120 bp, Artificial Sequence
  ENSG00000198911_47 (sequence is synthesized)
cgaggtcctatccttagagccaaggctgtagcatttcctatcaagcagacccttaaccggcgcacaggaaggagctgagaagagtaaggaaactgaggcacacgttggaatgactatctt

SEQ ID NO: 735512 - DNA, 120 bp, Artificial Sequence
  ENSG00000198911_48 (sequence is synthesized)
agctggcaaatcaaaagaacagtaagtgtgctgagaaaaggcttgtcagccctggcccaggtggggctttgtaaaagcagatcattttcaccaggtggggttttctttgcagagcttcta

SEQ ID NO: 735513 - DNA, 120 bp, Artificial Sequence
  ENSG00000198911_49 (sequence is synthesized)
cctagctaggagccaggcttgggaactctcaaatgggtaattcccggtccttgttatcagctagctcacaacatgctgacctcaggctttctcttactctagcagaaacaggtatgtttt

SEQ ID NO: 735514 - DNA, 120 bp, Artificial Sequence
  ENSG00000198911_50 (sequence is synthesized)
actttgtgtcccactatggatagactgctgaatacatcaggtatgttcaagcattaccacatctctatttgtttccgtatctcagtaacagcagagatgagctgagaatgaatcagaacg

SEQ ID NO: 735515 - DNA, 120 bp, Artificial Sequence
  ENSG00000198911_51 (sequence is synthesized)
tgccctgtagtgacattgatatatttcctgaggtacatcacgatagtctaggggacaaagggcgcagggaagcccagtgtactctttatgtctacacttgatcttagccagaaggctgag

SEQ ID NO: 735516 - DNA, 120 bp, Artificial Sequence
  ENSG00000198911_52 (sequence is synthesized)
aagtgatactttttatgtcttacctctgtttctggtgactacagataagagactcatcccttgattcactcattcagcaaatatgactgagcaccgtctctaagcaggacatttgccttg

SEQ ID NO: 735517 - DNA, 120 bp, Artificial Sequence
  ENSG00000198911_53 (sequence is synthesized)
tcctcagggagcatagttggcaaggaatctagacagcagcccttcttgagcttgacattgatcttctcatgaggaggactgggctccagatcttcctgggaccaggtcttcaggacagtg

SEQ ID NO: 735518 - DNA, 120 bp, Artificial Sequence
  ENSG00000198911_54 (sequence is synthesized)
tgagctaggttatcagctcagattcagtgagtgctttgtggaaggttggcagagggtcgcgagggtcctctacatttgttctccagtatccagtatcaacactggttaccaaagaggaag

SEQ ID NO: 735519 - DNA, 120 bp, Artificial Sequence
  ENSG00000198911_55 (sequence is synthesized)
ttgtttgagttagcaggagcaaactggactgggtgggcgtgttggggtgaagggtcaggactgcatgacaggtgggcggctagaaaagtcgggggtgagggcaccatggagaactcaagt

SEQ ID NO: 735520 - DNA, 120 bp, Artificial Sequence
  ENSG00000198911_56 (sequence is synthesized)
tgggccagcaggtcctctgtgcaagtgtcctgctctgcacaacacgacagttgtcccagcagctgtcagcactgtgtccgggtcctcctccctgcagccttcatggcgccacaggctgaa

SEQ ID NO: 735521 - DNA, 120 bp, Artificial Sequence
  ENSG00000198911_57 (sequence is synthesized)
aagaagagacgagagcagtgtggcccccagcatcttcagaagctttgtggtggaggcaggcactggtggttcacaatcagtgcagagaggccactgttgcccccaaaactcatgtgcact

SEQ ID NO: 735522 - DNA, 120 bp, Artificial Sequence
  ENSG00000198911_58 (sequence is synthesized)
ctgggcagcctgcgcaggctggcacacagcttccgcccagcataccgcaaggcagcctccagggccttggggcttcacccagggcacttgtctaccagccccacgaggtgcgtccagggc

SEQ ID NO: 735523 - DNA, 120 bp, Artificial Sequence
  ENSG00000198911_59 (sequence is synthesized)
tttcttgtcaccagttgggaaaagcaggccttttgcctctctctcctctcatcctgctcctgctgttcagccaggtttcctgcctggctcagggtcagagtacgggacaacagaggttgc

SEQ ID NO: 735524 - DNA, 120 bp, Artificial Sequence
  ENSG00000198911_60 (sequence is synthesized)
ttttcaggggtgttcctgcatgaagccaccgtgcgcctgatggcaggagccagccccacccgcacccaccagctgctggaacacagcctgcggcggcgcaccacgcagagcaccaagcac

SEQ ID NO: 735525 - DNA, 120 bp, Artificial Sequence
  ENSG00000198912_0 (sequence is synthesized)
gcggcgcgctctgcagactccgggtcgccgctccgccgggacgcgttggccggggcgcgcggtgcttggctgcggtgctcacactcatgaggagccggaagctcacaggtgcagtgcggt

SEQ ID NO: 735526 - DNA, 120 bp, Artificial Sequence
  ENSG00000198912_1 (sequence is synthesized)
cttcagcgcgcttgaaagcacgaagttgttcggcagccaggttggcctctgcccaggaagttgctggttccacgtctgccaagacagcatgtctgacttcctcatcccacaaagccacag

SEQ ID NO: 735527 - DNA, 120 bp, Artificial Sequence
  ENSG00000198912_2 (sequence is synthesized)
acacgcgaacgtccaagaagttcaaatgtgacaaaggacatcttgtgaagtcagaattacagaagcttgtccctaagaatgacagcgcttctttgccaaaagtgacacctgagacccctt

SEQ ID NO: 735528 - DNA, 120 bp, Artificial Sequence
  ENSG00000198912_3 (sequence is synthesized)
gtgaaaatgagtttgctgaaggcagtgccttgcttccaggcagcgaggctggcgtttctgtgcagcagggggctgcaagtcttcctctcggtggctgcagagttgtgagtgactctcgct

SEQ ID NO: 735529 - DNA, 120 bp, Artificial Sequence
  ENSG00000198912_4 (sequence is synthesized)
tagcaaagactagagatggcctgtccgtgccaaaacacagtgccgggtccggagcagaagaatccaacagcagctccactgtgcagaagcagaatgagccagggctacagacagaggatg

SEQ ID NO: 735530 - DNA, 120 bp, Artificial Sequence
  ENSG00000198912_5 (sequence is synthesized)
tgcagaagccaccacttcagatggacaacagcgtctttctagatgacgacagcaatcagccaatgcccgtgagccggttctttggaaacgttgagctcatgcaggacctcccacctgcgt

SEQ ID NO: 735531 - DNA, 120 bp, Artificial Sequence
  ENSG00000198912_6 (sequence is synthesized)
tgcagaaatgtaggggccatacaaaataatgtccttgagtatttagtaccattaacaatttgacaatttagcacattacaagatttatataaaatgtatctccaagagaatgtcttaatc

SEQ ID NO: 735532 - DNA, 120 bp, Artificial Sequence
  ENSG00000198912_7 (sequence is synthesized)
aaacttcagaactgacccatctaagtcaatagtgcaaagcacccaatacctgtggaggatgtactcatgggaactaaaactcaaaccatctttgaggttgcaaagctgctgtactgtgcc

SEQ ID NO: 735533 - DNA, 81 bp, Artificial Sequence
  ENSG00000198912_8 (sequence is synthesized)
agtgtcctttcttatacacgtacatacatgatgatggcttgagtcagctgcagggcagtgggcttaatgagagggatcttt

SEQ ID NO: 735534 - DNA, 120 bp, Artificial Sequence
  ENSG00000198912_9 (sequence is synthesized)
agtcagctgcagggcagtgggcttaatgagagggatctttgtaaagacagctcttcacttcagctcagtagctttggtcataggcaagtttgttttccattatcataatttgatgattct

SEQ ID NO: 735535 - DNA, 120 bp, Artificial Sequence
  ENSG00000198912_10 (sequence is synthesized)
tgtgatgaattcaatgctagttcttaaagaactcttttatttctgtatgtggagctaatgtttaccttggaaattttgcaaaatacatgtaagaaagaaataaaatatattttgaaaata

SEQ ID NO: 735536 - DNA, 120 bp, Artificial Sequence
  ENSG00000198912_11 (sequence is synthesized)
cgccgctccgccgggacgcgttggccggggcgcgcggtgcttggctgcggtgctcacactcatgaggagccggaagtcacaggtgggatgagagcagaaagggaagcactgctatcctgc

SEQ ID NO: 735537 - DNA, 120 bp, Artificial Sequence
  ENSG00000198912_12 (sequence is synthesized)
ctctcctgggaagacaccccgctgcctgggagctggggaggtggccctgtgttcttggctgcagcaggatggagctcaagtgccacagactctccgtgtccttaccaaatgtatgtaggt

SEQ ID NO: 735538 - DNA, 120 bp, Artificial Sequence
  ENSG00000198912_13 (sequence is synthesized)
gttctggagcaagtgtttcttcatttgctgggtgcccataggaccatttccaaaggctctctaaatggctgttttgggactgctcattactctctgagaaggtcagtgaagctcctcgag

SEQ ID NO: 735539 - DNA, 120 bp, Artificial Sequence
  ENSG00000198912_14 (sequence is synthesized)
ccatcatgttgaagtcagtctcggccagcccttttggagaaaccatgtttgtgcttctgacataccagttattaaacaatctactggaatgaggagaatctcaatgatgagaaagtcttt

SEQ ID NO: 735540 - DNA, 120 bp, Artificial Sequence
  ENSG00000198912_15 (sequence is synthesized)
ccttttttggactgtgggagcagtccaagctgcccagctgcagagcaggaatctgcaagtgagactgtgaccaattcttgacattttggagttgacaccttggaggtggttaatccatga

SEQ ID NO: 735541 - DNA, 120 bp, Artificial Sequence
  ENSG00000198912_16 (sequence is synthesized)
cgaaactgaagctaagccgatctcatgttttgactcctgtcaatccggagaggacagcaaatggcctgctcaggtgtctgttaacagccagcgcttccaggcccaccagatcctcaggtg

SEQ ID NO: 735542 - DNA, 120 bp, Artificial Sequence
  ENSG00000198912_17 (sequence is synthesized)
tctgttaacagccagcgcttccagcccagcagatcatctggcttttctctgcagaaggggccaaaaggtccacctgatgaacctgttgcacgcgaaaagttcagaaccactgctgccaag

SEQ ID NO: 735543 - DNA, 120 bp, Artificial Sequence
  ENSG00000198912_18 (sequence is synthesized)
atgctgacagaagccttgagaagcacctgctgcgggaaaagacgtgcaggcgtagaacacagagcgggtggcagcttcttcagttcaatccccacctcaggcagttgttgggggtcatat

SEQ ID NO: 735544 - DNA, 120 bp, Artificial Sequence
  ENSG00000198912_19 (sequence is synthesized)
gccctgttaccgtggagaacgccaagatcctgactcgagggtccatttttatacaaaattgccactccaagatgtgttgctttagaaaaatatcgactgttacttatctgccagaggggg

SEQ ID NO: 735545 - DNA, 120 bp, Artificial Sequence
  ENSG00000198912_20 (sequence is synthesized)
tatctgccagagggggactattgcagatgaaaaggtgacagcactgtaattgccttcagagaaagacacactctgcaggccagggctggctctcctagcacccgcccacccgtgtgtgtg

SEQ ID NO: 735546 - DNA, 120 bp, Artificial Sequence
  ENSG00000198912_21 (sequence is synthesized)
cacccgtgtgtgtgtctagacccgggctctgatcctagcacctgcccacccgtgtgtgtgtctaaaccaggctctgaggccacttgtgctcatcgctctgctcttagcgtgctatggagt

SEQ ID NO: 735547 - DNA, 120 bp, Artificial Sequence
  ENSG00000198912_22 (sequence is synthesized)
ctcatcgctctgctcttagcgtgctatggagtcatgctggcccattgccgtgcagcctcaccgccagaggcttgaagagaaaggcagagtgggtggggaaaggaatctcatgccgtctgc

SEQ ID NO: 735548 - DNA, 120 bp, Artificial Sequence
  ENSG00000198912_23 (sequence is synthesized)
cgttcaccctagcccagccatcgattccgaggagcgagttcctgaacttaccggtgaagtagagccgcttcacggagcctacagttgaggggttaggacttggccatatgccagcgtgta

SEQ ID NO: 735549 - DNA, 120 bp, Artificial Sequence
  ENSG00000198912_24 (sequence is synthesized)
gcacagagctttgctcatgatgaggtgcttggtaaaattttgtcgaagtcaatttcacaaatatttcttgagcacctactgtgtgccaggcactaattggtgaataaagcaaagacccct

SEQ ID NO: 735550 - DNA, 120 bp, Artificial Sequence
  ENSG00000198912_25 (sequence is synthesized)
cctagcagaaatgaatgaaagctggattcttttactgtaattgtataatatataaatatatgcttcagaattcacctgaggagctgtaacgccactaggggaaactgaaagtgtaggagt

SEQ ID NO: 735551 - DNA, 120 bp, Artificial Sequence
  ENSG00000198912_26 (sequence is synthesized)
ggtgtggagctgtaacgccactagggaaaactgaaagtgtaggagtggtgtggggtgtgtctagattcagtctcgcttgtattttgtcccttggtggcaaaacagtgaaatgacgatctg

SEQ ID NO: 735552 - DNA, 120 bp, Artificial Sequence
  ENSG00000198912_27 (sequence is synthesized)
tgaaagttgtggtcacagcatctttatcatttccgatgtgagaagaaatactagcctctggattgaggcctgttttatttgctagatatgtctggttccccttacattttttttcttgac

SEQ ID NO: 735553 - DNA, 120 bp, Artificial Sequence
  ENSG00000198914_0 (sequence is synthesized)
attcgacagtccccgctctgagagggagggacagagagcgaactgtcagatcggagcgagagcgggcgcccgagagagggagagagagagagggagggagaggaaaagtgagagagggaa

SEQ ID NO: 735554 - DNA, 120 bp, Artificial Sequence
  ENSG00000198914_1 (sequence is synthesized)
agagagcgcgaacgagggcgcagagcgagctcctgctgcaactctgctccagcacggccagcgccagcgcccgccgtcggtgcactctacgagccgtgcagcgtgcccactggagttgtt

SEQ ID NO: 735555 - DNA, 120 bp, Artificial Sequence
  ENSG00000198914_2 (sequence is synthesized)
gtgtatcaaggatcgatcccctatatgcacacacacacctccacctccaccaatgcactcttcttcctcctccttctccagacaactgctgggaaaaaaataaaacaccaaccccaaccg

SEQ ID NO: 735556 - DNA, 120 bp, Artificial Sequence
  ENSG00000198914_3 (sequence is synthesized)
tcagcaacaaggtaacagagcgattcgacatcattttttttcctgttcaattttttccttgttatatttgtttcctaatttctgcccaaaaggaaagatgtcgcatcagactgtgactgt

SEQ ID NO: 735557 - DNA, 120 bp, Artificial Sequence
  ENSG00000198914_4 (sequence is synthesized)
tgcgaggagaatgaaaaaggactcttgtttcagaggcaaccaagagctccggcaatagcaacttcagagaaatgcaccatcgcaagaagttttcctaggacagaacaaaacttgaaacga

SEQ ID NO: 735558 - DNA, 120 bp, Artificial Sequence
  ENSG00000198914_5 (sequence is synthesized)
gaggaccagagggggagagcaggagccagcctcccctctccgcactcgcgagcagccagcagcaccacgccttcaaggacgaaaaagttttactactctaagggaaaacgagtgaaatgt

SEQ ID NO: 735559 - DNA, 120 bp, Artificial Sequence
  ENSG00000198914_6 (sequence is synthesized)
gttcctgaggaggagaggagaggagaggagagagcggacaagagaaggagcgggccggttgctggtcatccgtaatttggctaaggaagaaaggagcagcttctttctttgttatctccc

SEQ ID NO: 735560 - DNA, 120 bp, Artificial Sequence
  ENSG00000198914_7 (sequence is synthesized)
gtgaaaccttcacttagcaggtggacggagccccgcgaccgggcagagtccgggctcgcccgaggacaggaggaggagcgggagcccgcgcgtcccgggagagcgccccgagtgcaggtc

SEQ ID NO: 735561 - DNA, 80 bp, Artificial Sequence
  ENSG00000198914_8 (sequence is synthesized)
cgccggggctggggggcggccacgaccccccctgaagggggtggccacggagcgcaccccgagaagcgagcccccctccc

SEQ ID NO: 735562 - DNA, 120 bp, Artificial Sequence
  ENSG00000198914_9 (sequence is synthesized)
cgcaccccgagaagcgagcccccctccccagagcgctgctcctgcggctgctgctgctgctggtgaccaaggccggccggcgacccccgcgccctgccgagcggccttgcagctgcagcc

SEQ ID NO: 735563 - DNA, 120 bp, Artificial Sequence
  ENSG00000198914_10 (sequence is synthesized)
ctgctgcggcggcggcggcggtggtggcggcggtggggtggcgggagcggagcggcatggccacggcggcttctaacccctacctgccggggaacagcctgctcgcggccggctctattg

SEQ ID NO: 735564 - DNA, 80 bp, Artificial Sequence
  ENSG00000198914_11 (sequence is synthesized)
aacagcctgctcgcggccggctctattgtgcactcggacgcggcaggggctggcggcggcgggggtggcggcggcggcgg

SEQ ID NO: 735565 - DNA, 120 bp, Artificial Sequence
  ENSG00000198914_12 (sequence is synthesized)
cgccgccgtgacctcgggcgcctaccggggggacccgtcctctgtcaagatggtccagagcgacttcatgcagggggccatggccgccagcaacggcggccatatgctgagccacgcgca

SEQ ID NO: 735566 - DNA, 80 bp, Artificial Sequence
  ENSG00000198914_13 (sequence is synthesized)
ctgccgccgccgccgccgtggaggcgagctcgccgtggtcgggcagcgccgtgggcatggctggcagcccccagcagcca

SEQ ID NO: 735567 - DNA, 80 bp, Artificial Sequence
  ENSG00000198914_14 (sequence is synthesized)
gtgaagggcggcgccgggcgcgacgacctgcacgcgggcacagcgctgcaccaccgcgggccgccgcacctcggaccccc

SEQ ID NO: 735568 - DNA, 80 bp, Artificial Sequence
  ENSG00000198914_15 (sequence is synthesized)
gccgccgccgccgccgccgccgcgcacctcccgtccatggccgggggccagcagccgccgccgcagagtctgctctactc

SEQ ID NO: 735569 - DNA, 120 bp, Artificial Sequence
  ENSG00000198914_16 (sequence is synthesized)
gccgccgcagagtctgctctactcgcagcccggaggcttcacggtgaacggcatgctgagcgcgccaccggggcccggcggcggcggcggcggcgcgggcggtggagcccagagcttggt

SEQ ID NO: 735570 - DNA, 120 bp, Artificial Sequence
  ENSG00000198914_17 (sequence is synthesized)
ggctggtgcgcggggacacgccagagctggccgagcaccaccaccaccaccaccaccacgcgcatcctcacccgccgcacccgcaccacgcgcagggacccccgcaccacggcggcggcg

SEQ ID NO: 735571 - DNA, 120 bp, Artificial Sequence
  ENSG00000198914_18 (sequence is synthesized)
ggcctggactcaacagccacgacccgcactcggacgaggacacgccgacgtcggacgacctggagcagttcgccaagcagttcaagcagcggcgcatcaagctgggcttcacgcaggccg

SEQ ID NO: 735572 - DNA, 120 bp, Artificial Sequence
  ENSG00000198914_19 (sequence is synthesized)
acgtggggttggcgctgggcacactctacggcaacgtgttctcgcagaccaccatctgccgcttcgaggccctgcagctgagcttcaagaacatgtgcaagctcaagccgctgctgaaca

SEQ ID NO: 735573 - DNA, 120 bp, Artificial Sequence
  ENSG00000198914_20 (sequence is synthesized)
agtggctggaggaggcggactcaagcaccggcagccccacaagcatcgacaagatcgcggcgcagggccgcaagcgcaagaagcggacctctatcgaggtgagcgtcaagggcgcgctgg

SEQ ID NO: 735574 - DNA, 120 bp, Artificial Sequence
  ENSG00000198914_21 (sequence is synthesized)
agagccacttcctcaagtgccccaagccctccgcgcaggagatcaccaacctggccgacagcctgcagctcgagaaggaggtggtgcgggtctggttctgcaatcggcgccaaaaggaga

SEQ ID NO: 735575 - DNA, 120 bp, Artificial Sequence
  ENSG00000198914_22 (sequence is synthesized)
agcgcatgacgccgcccgggatccaacagcagacgcccgacgacgtctactcgcaggtgggcaccgtgagcgccgacacgccgccgcctcaccacgggctgcagacgagcgttcagtgaa

SEQ ID NO: 735576 - DNA, 80 bp, Artificial Sequence
  ENSG00000198914_23 (sequence is synthesized)
tcagtgaagccagggcgcagagcgaagagggccgccgccgccgccgcctccgcagccgccgtcagcaccgccgccgcccc

SEQ ID NO: 735577 - DNA, 120 bp, Artificial Sequence
  ENSG00000198914_24 (sequence is synthesized)
cctgcacctgggccgctccgggctccagcccaggcccatccgccgccctcccctccacccagagacaggcatgcccgcccttggaggagaaaacgcgggagaaacggaccaaggaggcat

SEQ ID NO: 735578 - DNA, 120 bp, Artificial Sequence
  ENSG00000198914_25 (sequence is synthesized)
ttttgcagtccaaggaaggaggggccaaaaaataaaaagcataataaacacccagactgttttgtatacatatataacaaacaaaaccggaagagaaaaagggggcgatcatgagatctc

SEQ ID NO: 735579 - DNA, 120 bp, Artificial Sequence
  ENSG00000198914_26 (sequence is synthesized)
gttcatactgtggtggtgtttcgtttttgtttttgtttttaaagaagggtgaagatgcctgacgcacgaaaactgcactcgtgaggtttttccaccctgagatgacctacacggcagcgg

SEQ ID NO: 735580 - DNA, 120 bp, Artificial Sequence
  ENSG00000198914_27 (sequence is synthesized)
tggacagcacctgcctcgtcttctcctctttgaaaaaaagagagagagagagtcccctttcctttcactttctccctccaaaacagctgcctaaagagatccacggaaactttatttcct

SEQ ID NO: 735581 - DNA, 120 bp, Artificial Sequence
  ENSG00000198914_28 (sequence is synthesized)
gggagcgacctgagagaaaacagaggcaccaggttccatcaggggacgacaccgtgctctgggaccctgtttttcttggccatattaaagtcatttggaaacaaatcaactctgaaatgg

SEQ ID NO: 735582 - DNA, 120 bp, Artificial Sequence
  ENSG00000198914_29 (sequence is synthesized)
gaaggaggggggaaaaacagtctccaagaaaaaaataattatattgacagcttctgaaactaacagactgaatagcaaagccaaaagaaaagtatcctcaaagtaaccttggaaataaaa

SEQ ID NO: 735583 - DNA, 120 bp, Artificial Sequence
  ENSG00000198914_30 (sequence is synthesized)
ggatcgggaaggagcagagggagagggggaacgtccgctgaggagtggcgagaggccccggccgagtcgggtcgcgggcgggcgggcgaactgggagcagagcgggggcccagccagcga

SEQ ID NO: 735584 - DNA, 120 bp, Artificial Sequence
  ENSG00000198914_31 (sequence is synthesized)
ggccgccgagccaggcccggccgcgtacccaggctttgacggctgccattcagggtggacgatgcctaaagattccaccgctaatattttttttattaatattttttattttttatttct

SEQ ID NO: 735585 - DNA, 120 bp, Artificial Sequence
  ENSG00000198914_32 (sequence is synthesized)
ggactgactcagataaaggaatttagaaagactgagcaccagccgctgcacttctctggacttctctcctcaatccgttgccaactttgattgaatgggtgctgtggatgtgattatata

SEQ ID NO: 735586 - DNA, 120 bp, Artificial Sequence
  ENSG00000198914_33 (sequence is synthesized)
atactgccatttccaagcagtgtttttggtaggttttaataaacagacttttcaaaagacggcaatatagaattgttagatccgttgttgatctaaaaatatttgctttatattttcatt

SEQ ID NO: 735587 - DNA, 120 bp, Artificial Sequence
  ENSG00000198914_34 (sequence is synthesized)
aaatgacttcttttaatattttattcagaatacttatgaactgctgcaaaacggtaatttatttttccccagatcttgtattacgtgtttttttcagacgagcacaaatcaaaatgaaat

SEQ ID NO: 735588 - DNA, 120 bp, Artificial Sequence
  ENSG00000198914_35 (sequence is synthesized)
gaaaatatggacagttgttaggtaataagggtatcttttgatgtgatcatttgattgtaatttaatttgagtagtgattccgtaagagctgatcgagaaaataaatttgttagaatgaaa

SEQ ID NO: 735589 - DNA, 120 bp, Artificial Sequence
  ENSG00000198915_0 (sequence is synthesized)
tcatgatggctattgctgtgactggagccaagagcccagtgtgcaattcttccttgggaaggggctgcctggtggtggacacagctgttcagatacacaggtttgcagctgcctgtcgaa

SEQ ID NO: 735590 - DNA, 120 bp, Artificial Sequence
  ENSG00000198915_1 (sequence is synthesized)
gtgcctgcccctgctgttggggcaaggaggaagcaggtgcaagaacaagcgacctcagggctgggtgggggtggccggcaggggaccccgcagtggaagtgctgtcatcatcaccatttc

SEQ ID NO: 735591 - DNA, 120 bp, Artificial Sequence
  ENSG00000198915_2 (sequence is synthesized)
acagctgggaaggtggagggctggccagatgcacccaggaacaaggagtgggcctgctgcagggccggcattcctgcccgggaaaagccatgtagggaacctgcctctccacttggcact

SEQ ID NO: 735592 - DNA, 120 bp, Artificial Sequence
  ENSG00000198915_3 (sequence is synthesized)
gagccctggagaccctcctcgaagtgctccgtggctgggcagggtgggccctgctaggtttgagctttcgggggtaggggctcatggggcatcccccagacctgcagggtcttggtttgt

SEQ ID NO: 735593 - DNA, 120 bp, Artificial Sequence
  ENSG00000198915_4 (sequence is synthesized)
tggatgcaggagacctagccctgggccgtgtccccaggtgggtctccaggtaggcaggacagaaggaacccagagcaccccacctctcaggtcagtgcggctccacacggtccccctcag

SEQ ID NO: 735594 - DNA, 120 bp, Artificial Sequence
  ENSG00000198915_5 (sequence is synthesized)
gctctgctgactccccaaagggattctgagcatgtgcagaacctctgcttgcctgggacacccctgcatgctcctcctccaggcccccaccctcgaaggcgtggccttcccagcccctct

SEQ ID NO: 735595 - DNA, 120 bp, Artificial Sequence
  ENSG00000198915_6 (sequence is synthesized)
ctggctgctgaccagtgggctgggtccccaggatggctcctcaactcctaggcaggcctcctagcactgaggcaggtctctctgcaggctggacatggagtggccttgccctgtggggga

SEQ ID NO: 735596 - DNA, 120 bp, Artificial Sequence
  ENSG00000198915_7 (sequence is synthesized)
tcggctggggctgagtttgtggggtgtcagagtgcatcccccacatactacctcctgaccagagcagcctgcagtgggagaggccagtggctcggcaaatgccctctctgatgaccccaa

SEQ ID NO: 735597 - DNA, 120 bp, Artificial Sequence
  ENSG00000198915_8 (sequence is synthesized)
gagcttggggtgaggaggcccaactgaccaaggttaccacctgctggtcgccttttgaacccagaactgtgtgatcttggggaggttgtcccacagtgcattggcctcagatgcctgaga

SEQ ID NO: 735598 - DNA, 120 bp, Artificial Sequence
  ENSG00000198915_9 (sequence is synthesized)
cagtgctgagcagctgtgggcaacaaggggtttgtgagcccgccttcgtgacttcattgcacaaatggtcactgagtgccaccctgggccagcgataggatacacaggtgaatgatacag

SEQ ID NO: 735599 - DNA, 120 bp, Artificial Sequence
  ENSG00000198915_10 (sequence is synthesized)
ccacttctggctttgtgggtcaacagtctaggttaaacccagggaggcttcctggaggtggtgacacctaggctggacttggaactcctggggtttccttagttgagttccttcccactg

SEQ ID NO: 735600 - DNA, 120 bp, Artificial Sequence
  ENSG00000198915_11 (sequence is synthesized)
ggcctcagtttcaccatctgaaaaatgaaggattggctcacatcagtggttcctgggctggagtggagagcgcgttggggtacagaagcagtccaccccagagtttctgaccagcaggtc

SEQ ID NO: 735601 - DNA, 120 bp, Artificial Sequence
  ENSG00000198915_12 (sequence is synthesized)
tggggctaggcctgagaatgtgcattctaacttgtgtgaggcaccgctgctggcctgagtttgaagggagcattgtatgagtctgagccatgacctccctgtcctggagtgggggcagca

SEQ ID NO: 735602 - DNA, 120 bp, Artificial Sequence
  ENSG00000198915_13 (sequence is synthesized)
ctgagcctgggggcctggacattccacccagcgtcatcgtggggcctttggttgcgttcttgctctccttgccaaagactttctaagaattccaaggaaacctttaggtgtttggtggga

SEQ ID NO: 735603 - DNA, 120 bp, Artificial Sequence
  ENSG00000198915_14 (sequence is synthesized)
aagaattccaaggaaacctttaggtgtttggtgggaaaaccagtgacgtctgggccagatgctcttttttccctggtgggagggacagggacgtgctgtgtgtgtgtgtgtgtgtgtgtg

SEQ ID NO: 735604 - DNA, 120 bp, Artificial Sequence
  ENSG00000198915_15 (sequence is synthesized)
gggggtgtgggcaggtggtccgctctctccttgtaaggcccctacagggcagaggcccacggtcctgtcatggcactgaagtaatcatggcaacaatttgctctgtgcagtggggaaact

SEQ ID NO: 735605 - DNA, 120 bp, Artificial Sequence
  ENSG00000198915_16 (sequence is synthesized)
aaggccaaaatggcaggagggtctcgcttctccacctgacctcagccgctggcacctgtgctgccttcccttgagggccaggaggttgaggctggctctgtgtgcaggcaaggccacagg

SEQ ID NO: 735606 - DNA, 120 bp, Artificial Sequence
  ENSG00000198915_17 (sequence is synthesized)
ggcagttgctgcatcgtccagtccccacttggctcctcccaggcatggctggctgtctggggcactggggaaacaggcccagagggcttcagactcccctaggcttcacaagaactccca

SEQ ID NO: 735607 - DNA, 120 bp, Artificial Sequence
  ENSG00000198915_18 (sequence is synthesized)
gctgcagggtgtggtgagaccctgagccccatcacagcgggccatgctgtggaggacagtcccagtgtgggcaccgaggcctccaggaggcccagctgctcagacatctgcagctcaggg

SEQ ID NO: 735608 - DNA, 120 bp, Artificial Sequence
  ENSG00000198915_19 (sequence is synthesized)
gcactcagactcacaggccccaaagccagttccagatctctctctagccctgcccacagccctgcctcatactggtcagccacttggcccaagaccttcaccatgtggagtggccctgct

SEQ ID NO: 735609 - DNA, 120 bp, Artificial Sequence
  ENSG00000198915_20 (sequence is synthesized)
cgccactcctgctaccgcctgcctgagcaagctctccttgggctgtggcaagacccaccatccacgtggcagccaccgaaactatgccccagacgtccgttgtcttctccagcatccttg

SEQ ID NO: 735610 - DNA, 120 bp, Artificial Sequence
  ENSG00000198915_21 (sequence is synthesized)
ggcccagctgtagcggacaggtgcagcctggcatgggggagcgtggaggcggggccggtggcggctccggggacctcatcttccaagatggacacctcatctctgggtccctggaggccc

SEQ ID NO: 735611 - DNA, 120 bp, Artificial Sequence
  ENSG00000198915_22 (sequence is synthesized)
tgatggagcaccttgttcccacggtggactattaccccgataggacgtacatcttcacctttctcctgagctcccgggtctttatgccccctcatgacctgctggcccgcgtggggcaga

SEQ ID NO: 735612 - DNA, 120 bp, Artificial Sequence
  ENSG00000198915_23 (sequence is synthesized)
tctgcgtggagcagaagcagcagctggaagccgggcctgaaaaggccaagctgaagtctttctcagccaagatcgtgcagctcctgaaggagtggaccgaggccttcccctatgacttcc

SEQ ID NO: 735613 - DNA, 120 bp, Artificial Sequence
  ENSG00000198915_24 (sequence is synthesized)
aggatgagaaggccatggccgagctgaaagccatcacacaccgtgtcacccagtgtgatgaggagaatggcacagtgaagaaggccattgcccagatgacacagagcctgttgctgtcct

SEQ ID NO: 735614 - DNA, 120 bp, Artificial Sequence
  ENSG00000198915_25 (sequence is synthesized)
tggctgcccggagccagctccaggaactgcgagagaagctccggccaccggctgtagacaaggggcccatcctcaagaccaagccaccagccgcccagaaggacatcctgggcgtgtgct

SEQ ID NO: 735615 - DNA, 120 bp, Artificial Sequence
  ENSG00000198915_26 (sequence is synthesized)
gcgaccccctggtgctggcccagcagctgactcacattgagctggacagggtcagcagcatttaccctgaggacttgatgcagatcgtcagccacatggactccttggacaaccacaggt

SEQ ID NO: 735616 - DNA, 120 bp, Artificial Sequence
  ENSG00000198915_27 (sequence is synthesized)
gccgaggggacctgaccaagacctacagcctggaggcctatgacaactggttcaactgcctgagcatgctggtggccactgaggtgtgccgggtggtgaagaagaaacaccggacccgca

SEQ ID NO: 735617 - DNA, 120 bp, Artificial Sequence
  ENSG00000198915_28 (sequence is synthesized)
tgttggagttcttcattgatgtggcccgggagtgcttcaacatcgggaacttcaactccatgatggccatcatctctggcatgaacctcagtcctgtggcaaggctgaagaaaacttggt

SEQ ID NO: 735618 - DNA, 120 bp, Artificial Sequence
  ENSG00000198915_29 (sequence is synthesized)
ccaaggtcaagacagccaagtttgatgtcttggagcatcacatggacccgtccagcaacttctgcaactaccgtacagccctgcagggggccacgcagaggtcccagatggccaacagca

SEQ ID NO: 735619 - DNA, 120 bp, Artificial Sequence
  ENSG00000198915_30 (sequence is synthesized)
gccgtgaaaagatcgtcatccctgtgttcaacctcttcgttaaggacatctacttcctgcacaaaatccataccaaccacctgcccaacgggcacattaactttaagaaattctgggaga

SEQ ID NO: 735620 - DNA, 120 bp, Artificial Sequence
  ENSG00000198915_31 (sequence is synthesized)
tctccagacagatccatgagttcatgacatggacacaggtagagtgtcctttcgagaaggacaagaagattcagagttacctgctcacggcgcccatctacagcgaggaagctctcttcg

SEQ ID NO: 735621 - DNA, 120 bp, Artificial Sequence
  ENSG00000198915_32 (sequence is synthesized)
tcgcctcctttgaaagtgagggtcccgagaaccacatggaaaaagacagctggaagaccctcaggaccacccttctgaacagagcctgaggcggatgcagcccgcgacgccagaggaagc

SEQ ID NO: 735622 - DNA, 120 bp, Artificial Sequence
  ENSG00000198915_33 (sequence is synthesized)
acgtgcactaactgggtttaaattttgactgatgtgggttgagatgaggaggcctcactggttggggtccattttgtatataacttttatgagaaaaaaatggtaattatttcacgcatc

SEQ ID NO: 735623 - DNA, 120 bp, Artificial Sequence
  ENSG00000198915_34 (sequence is synthesized)
ctaatgaaatgtagatttttattttctacttttgattattaacatcttatgaaaaaaatattttaaaaaacccagccaaaaccaacgtgagccctgcctgctcggacgcctttccagcca

SEQ ID NO: 735624 - DNA, 120 bp, Artificial Sequence
  ENSG00000198915_35 (sequence is synthesized)
gtgtctctgacgtcggggttagtgccttagagggtactggggtctggtcttcctgctctgtggtttgggctgcggtgagtcccactccacctgggcgcctgccctcaggagcctgggctg

SEQ ID NO: 735625 - DNA, 120 bp, Artificial Sequence
  ENSG00000198915_36 (sequence is synthesized)
cgaggctccataggagggctggtggctgggaggtcgcgtccgcacacttctggaagtgagcctttgagtacgggctgtccaaagtttacattttcattttcctttcagggatttgtgggg

SEQ ID NO: 735626 - DNA, 120 bp, Artificial Sequence
  ENSG00000198915_37 (sequence is synthesized)
tcagggaggggcagggggcacctggcagcatattttctgtgacaatgtgtccagcaaatcattcttcaactacattttagaaaggaggaaatctaaaataaggtaagggagggaagcatg

SEQ ID NO: 735627 - DNA, 120 bp, Artificial Sequence
  ENSG00000198915_38 (sequence is synthesized)
gagttgtcagttttctgggctgtgactgaaagacacactgagctgtgatgaagaaaaatacatggccgactccagggtggtgacatttagagctagtcttgaaacctatcatctacagag

SEQ ID NO: 735628 - DNA, 120 bp, Artificial Sequence
  ENSG00000198915_39 (sequence is synthesized)
gggagggcagccaacagccctcttcccacctgggtaggcagcgccctaattggaattggaaacagaaaattcgccaggccatactgctggagcccattcagataaaactgcccaatactg

SEQ ID NO: 735629 - DNA, 120 bp, Artificial Sequence
  ENSG00000198915_40 (sequence is synthesized)
agaggtgttttctacacccagctagaggagcacactccattttcccatgtctgacttcgtggtgtgagccctgggccctactgaccatggcgcaggacagctgtccttcagaaagcacac

SEQ ID NO: 735630 - DNA, 120 bp, Artificial Sequence
  ENSG00000198915_41 (sequence is synthesized)
ggtcaatccacgtggaccgtctccctcgcaggaactccgcatccttgtccctctgcattcccagtttccgcaggagccttgatcaatggggaagcctgggtgaggatgggccaggtccca

SEQ ID NO: 735631 - DNA, 120 bp, Artificial Sequence
  ENSG00000198915_42 (sequence is synthesized)
attcccaaagctcctggaagagcctgaagacattgggaaaggctgggcctggggaggaggcagccctgggcccgctgcccatgcctctggtcctgggtggagcaggaatagttccactgt

SEQ ID NO: 735632 - DNA, 120 bp, Artificial Sequence
  ENSG00000198915_43 (sequence is synthesized)
attgtcacagtgtgtttgcactttctgaggttctagctagtacagattgtatattgatagtacatattgctttgtttatgtctttgagatgagaaaggcttaaaacttgagaatatatat

SEQ ID NO: 735633 - DNA, 120 bp, Artificial Sequence
  ENSG00000198915_44 (sequence is synthesized)
ttggaatacagccttagaacggtttctgtacacacccacgtgcacttcacgggtgatcagttctagtacctacttgaaacagtgtctgtctgctactttattttcccaatttgatacata

SEQ ID NO: 735634 - DNA, 120 bp, Artificial Sequence
  ENSG00000198915_45 (sequence is synthesized)
ccctgatttgatgttttggtatttgagatgaactctgagtatgaagctgtaccataatgcaggacgtcagttttggtgtgactggacatacttgcttcaataaaagaatacatcactccc

SEQ ID NO: 735635 - DNA, 120 bp, Artificial Sequence
  ENSG00000198915_46 (sequence is synthesized)
ggtgcttgcttggctcgcgggcagaggagccgccgctcgctggacgccggaccgggcaggacggcgcggggagccggcggccagaatgttcctggagccccaggaaactatgccccagac

SEQ ID NO: 735636 - DNA, 120 bp, Artificial Sequence
  ENSG00000198915_47 (sequence is synthesized)
gctgacctccagctcggcccacgaggatctgaaacagcagctggcttgcatcctggcgcagcgagcaccatggagccctaccaacgtcccaggctggggttagccctatggtggcgtggg

SEQ ID NO: 735637 - DNA, 120 bp, Artificial Sequence
  ENSG00000198915_48 (sequence is synthesized)
gcagagagggggagaatcccagcggaggaagactgctaggaggcctgggagagctgctgggaggcggggctcgagccgtgcctcctagaggacgtacatcttcacctttctcctgagctc

SEQ ID NO: 735638 - DNA, 120 bp, Artificial Sequence
  ENSG00000198917_0 (sequence is synthesized)
ggtgtgtgcggaacatggcggagcgcggcaggaagcggccgtgcggcccgggtgaacacggccaaaggattgagtggcgaaaatggaagcaacagaagaaagaggagaaaaaaaaatgga

SEQ ID NO: 735639 - DNA, 120 bp, Artificial Sequence
  ENSG00000198917_1 (sequence is synthesized)
aggatctcaagctgatgaaaaaactggagcggcagcgggcacaggaggaacaggcaaagcgcctggaagaggaggaggcagcggcagagaaggaggaccgcgggcggccctacacactga

SEQ ID NO: 735640 - DNA, 120 bp, Artificial Sequence
  ENSG00000198917_2 (sequence is synthesized)
gcgtagccctgccgggctccatcctggacaatgctcagtcgccggagcttcgcacctacttggccggtcagattgccagagcctgtgccatcttctgtgtggatgagatcgtggtgtttg

SEQ ID NO: 735641 - DNA, 120 bp, Artificial Sequence
  ENSG00000198917_3 (sequence is synthesized)
atgaggagggccaggatgccaagactgtggagggggaattcacaggagttgggaagaaggggcaggcgtgcgtacagctggcccggatcctgcagtacctggagtgtccacagtacctga

SEQ ID NO: 735642 - DNA, 120 bp, Artificial Sequence
  ENSG00000198917_4 (sequence is synthesized)
ggaaggcgttcttccccaagcaccaggatctacagtttgcagggctcctgaaccccctggacagcccccaccacatgcgtcaggatgaggaatccgagttccgagagggcatcgtggtgg

SEQ ID NO: 735643 - DNA, 120 bp, Artificial Sequence
  ENSG00000198917_5 (sequence is synthesized)
atcggcccacccggccaggccacggctcctttgtcaactgtggcatgaaaaaggaggtgaagattgacaagaacctggagcccgggcttcgggtgactgtgcgactgaaccagcagcagc

SEQ ID NO: 735644 - DNA, 120 bp, Artificial Sequence
  ENSG00000198917_6 (sequence is synthesized)
acccagactgcaagacctaccatggcaaagtggtatcatcgcaggaccctcgcaccaaagctggtctctactggggctacaccgtccgactggcttcctgcctcagtgctgtgtttgctg

SEQ ID NO: 735645 - DNA, 120 bp, Artificial Sequence
  ENSG00000198917_7 (sequence is synthesized)
aggcccccttccaagatgggtatgacctgaccatcgggacgtcagagcgcggctcagatgtggcctctgcccagcttcccaacttcaggcatgctcttgtggtgttcgggggcctccagg

SEQ ID NO: 735646 - DNA, 120 bp, Artificial Sequence
  ENSG00000198917_8 (sequence is synthesized)
gtctggaagctggagcggatgctgaccccaacctggaggtggctgaacccagtgtcctctttgacctgtacgtcaatacctgtcctggccagggtagccgtaccatccgcacggaggaag

SEQ ID NO: 735647 - DNA, 120 bp, Artificial Sequence
  ENSG00000198917_9 (sequence is synthesized)
ccatcctcatctccctggccgccctgcagcctggcctcatccaggcgggtgcccggcacacctgaaagttctaaggggccgaggacatcagtgaagcagcagtgaaaccaggggctctgc

SEQ ID NO: 735648 - DNA, 120 bp, Artificial Sequence
  ENSG00000198917_10 (sequence is synthesized)
aggtcacttgggacggacgccaccagacttgtctccaaaaatcaccacctttaatactccccggcctgcacacacccacagtctcactgggctccaccctcacttactgcccgccgtgat

SEQ ID NO: 735649 - DNA, 120 bp, Artificial Sequence
  ENSG00000198917_11 (sequence is synthesized)
ggccttgaggctgcctgcccgcgccaggatgtttggcacaaagagcagccccgaagcccgctcaatgctctcgatgggcaccaggaagcgctccagtgggatggcctcatccacaggtgc

SEQ ID NO: 735650 - DNA, 120 bp, Artificial Sequence
  ENSG00000198917_12 (sequence is synthesized)
gttgggcatcacgtaggtgcggagctcaatttgcccacctgctgcctccaggatcagcaccttgaagaagtgtgtgggcactgccacgtggttcttgccgatgacctggtactttacgta

SEQ ID NO: 735651 - DNA, 120 bp, Artificial Sequence
  ENSG00000198917_13 (sequence is synthesized)
ggatttcccatcagcctctgtcctgtgggcagacccaggcacacgtgggcagggggcctggatgaacccaaagccacctcttccaggcagccttccctgatctgtcctctaacttctgtc

SEQ ID NO: 735652 - DNA, 120 bp, Artificial Sequence
  ENSG00000198917_14 (sequence is synthesized)
aacctgcaggaccacgccctcactgtgagacttctgtagcctgcctggctcctccttgaggctggaactctctccagggtggttaactctttccctctgttttccttatgcccaacactg

SEQ ID NO: 735653 - DNA, 120 bp, Artificial Sequence
  ENSG00000198917_15 (sequence is synthesized)
ggtcaggcagagtgggcgacaataaacgctgctaggagaatcgagccttctgaatattcacattcgtctgaggggagacttaacgactgtccatctctccccacagaggtgagcaacaag

SEQ ID NO: 735654 - DNA, 120 bp, Artificial Sequence
  ENSG00000198917_16 (sequence is synthesized)
tgggcaaggaccatgacaggtgatatcccagcaccagcacaggtgccaggacaccggacgggggctccccctcagcagagtctcctcccttccaccaggccctaggaggcacctgctaat

SEQ ID NO: 735655 - DNA, 120 bp, Artificial Sequence
  ENSG00000198917_17 (sequence is synthesized)
gaccaggccctggggaagcatgtgacatcaaccaagaggtcacaggttttgcagagggggacacaggtcatttgcccacagcaccaaggaactaggtgatgaggcctggactccatcccg

SEQ ID NO: 735656 - DNA, 120 bp, Artificial Sequence
  ENSG00000198917_18 (sequence is synthesized)
agcctgtggattccagagtgagctgctcagcctggacctgttgcctctcagccccagccctctgcaggccagaaaaaccacggagcacacccagaggtgctcagttgcttccacctgaga

SEQ ID NO: 735657 - DNA, 120 bp, Artificial Sequence
  ENSG00000198917_19 (sequence is synthesized)
ggcagggctgcacaggagcaagagtggaggccctgggtcaggcagatctagattcaaactcccgagaagggtggagggaagtgctccaagcagagcagagactgaaggcgggagagcctg

SEQ ID NO: 735658 - DNA, 120 bp, Artificial Sequence
  ENSG00000198917_20 (sequence is synthesized)
gtgcaccgcggacctgcagggggaaggcatgagagctcggtgcactggggacctgcatggggaaggcgggagagctcggtgcactggggacctgcatggggaaggcgtgagagctcggtg

SEQ ID NO: 735659 - DNA, 120 bp, Artificial Sequence
  ENSG00000198917_21 (sequence is synthesized)
cactggggacctgcatggggaaggcgggagagctcggtgcacctcggacctgcagagggaaggtgggagagcttggtgcaccgcagacctgcagggggaaggcgggagagcttggtgcac

SEQ ID NO: 735660 - DNA, 120 bp, Artificial Sequence
  ENSG00000198917_22 (sequence is synthesized)
tgcagacctgcggggggaaggtgggagagcttggtgcactgcagacctgcggggggttccatattggcagaacaagattgggtgggcatgccaagaggtgacagcagggagaagcggggg

SEQ ID NO: 735661 - DNA, 120 bp, Artificial Sequence
  ENSG00000198917_23 (sequence is synthesized)
cagattcagggcctgctgctgcccatgggcagaggagagatggtcaggggtacccgacaggtctttggctgtggaggtggaatgaggggactcgaggcagggaagctgacaggcttgcca

SEQ ID NO: 735662 - DNA, 120 bp, Artificial Sequence
  ENSG00000198917_24 (sequence is synthesized)
agaaaccagatgagtagggaactggtattgacccagagcctggggcaagcctggccctgtgagtggcagtaggggcctcaggtgagtgggaggttctgccgcccccctggtttccacctt

SEQ ID NO: 735663 - DNA, 120 bp, Artificial Sequence
  ENSG00000198917_25 (sequence is synthesized)
acctgggcaggaagagtggccctgtgcagacatagacgttttggtagctgcgggtcaagctgcggctatatttctccaggttgttccaggcattctggttgaggtggggcacctggtagg

SEQ ID NO: 735664 - DNA, 120 bp, Artificial Sequence
  ENSG00000198917_26 (sequence is synthesized)
agagatagggcttagcaggactgtggctgggacccttcctcctctatcagagggccgccccaggtcctgaggggatggacaggctcagagatatccagtgagacaagcggggggaaactg

SEQ ID NO: 735665 - DNA, 120 bp, Artificial Sequence
  ENSG00000198917_27 (sequence is synthesized)
aggctcaaggaatgaaagtcactccctgaaacccagggctgatagagtgctagccaccaccctctgtccctcccacagcccaggtgtcaaagtcttttctcagctcccaagagtcgaatg

SEQ ID NO: 735666 - DNA, 120 bp, Artificial Sequence
  ENSG00000198917_28 (sequence is synthesized)
aaggaagagcctgtctccacctttcagagaggactgaggcctgtccccagccccacccagggtctcctgggaagaccagcccttccaactaccaacccgttccttttcccagtctgagcc

SEQ ID NO: 735667 - DNA, 120 bp, Artificial Sequence
  ENSG00000198917_29 (sequence is synthesized)
acaggaagagcctagcggggaatgccatgaatcgacctccatcctgagctctccaggcctgggacaatggaaagtggatagggggctgtcttcccagaaggaagctgggtcagaggttgg

SEQ ID NO: 735668 - DNA, 120 bp, Artificial Sequence
  ENSG00000198917_30 (sequence is synthesized)
tgccccatgggctccacccagagccccatggcagtctccatccattggtgccaggacctgctgggaacaggctgagagggtggttggcccagtgcacagtgcctggcactaacaacctga

SEQ ID NO: 735669 - DNA, 120 bp, Artificial Sequence
  ENSG00000198917_31 (sequence is synthesized)
tcgtgggccaggtgtctgcctcgaaactgcctgaaggcaggcagggtaggacaatgtctggaggctcacggttttatagactaggggtccccaacccctgggctacagaccggtaccaga

SEQ ID NO: 735670 - DNA, 120 bp, Artificial Sequence
  ENSG00000198917_32 (sequence is synthesized)
cagaaccgggccacacagcaggaggtgagcagcaggcgagcaagggaagcttcatctgtatttacagccacccccccattgatcccacagcagcctgagctccgcctcctgtcagatcag

SEQ ID NO: 735671 - DNA, 120 bp, Artificial Sequence
  ENSG00000198917_33 (sequence is synthesized)
ggctggagattgtcataggagctggaaccctatggtgaactgcgcatgtgaggaggttgcgcgcttcttttgaaaacctaatgcctgatctgtcgttgttgcccatcacctccagatagg

SEQ ID NO: 735672 - DNA, 79 bp, Artificial Sequence
  ENSG00000198917_34 (sequence is synthesized)
cctccagatggatcctacattactgtgagttgtatatttcactatatgttacaatgtaataataatagaaataaaatgt

SEQ ID NO: 735673 - DNA, 120 bp, Artificial Sequence
  ENSG00000198917_35 (sequence is synthesized)
tggcggagcgcggcaggaagcggccgtgcggcccgggtgaacacggccaaaggattgagtggcgaaaatggaagcaacagagatgttcttttatccagagaaagaggagaaaaaaaaatg

SEQ ID NO: 735674 - DNA, 120 bp, Artificial Sequence
  ENSG00000198917_36 (sequence is synthesized)
gccacagacactgagaccacccagtcctaccctgcgctgtccaggtgggaaagcaggcctgggagagcaagacctgtgtctgatgccaagacgcaggtctgtggcagagccggtactccg

SEQ ID NO: 735675 - DNA, 120 bp, Artificial Sequence
  ENSG00000198918_0 (sequence is synthesized)
ccctcctcttcctttctccgccatcgtggtgtgttcttgactccgctgctcgccatgtcttctcacaagactttcaggattaagcgattcctggccaagaaacaaaagcaaaatcgtccc

SEQ ID NO: 735676 - DNA, 120 bp, Artificial Sequence
  ENSG00000198918_1 (sequence is synthesized)
aataaaatcaggtacaactccaaaaggagacattggagaagaaccaagctgggtctataaggaattgcacatgagatggcacacatatttatgctgtctgaaggtcacgatcatgttacc

SEQ ID NO: 735677 - DNA, 120 bp, Artificial Sequence
  ENSG00000198918_2 (sequence is synthesized)
atatcaagctgaaaatgtcaccactatctggagatttcgacgtgttttcctctctgaatctgttatgaacacgttggttggctggattcagtaataaatatgtaaggcctttctttttaa

SEQ ID NO: 735678 - DNA, 120 bp, Artificial Sequence
  ENSG00000198918_3 (sequence is synthesized)
cttgactccgctgctcgccatggtaagtccatcggcccccatcggccccggggtggcttcccaaaacccgaggccgctgccaggaaatgcctgggccgcgcggagcgttgaggggcggga

SEQ ID NO: 735679 - DNA, 120 bp, Artificial Sequence
  ENSG00000198918_4 (sequence is synthesized)
gccttttaaaggctttttcaagaaaatatccagttcggccactgttgtctttcgtggcctggagggaagctagtgagccagcgagcaacctggagagggacgggctgcgctgcggccgcg

SEQ ID NO: 735680 - DNA, 120 bp, Artificial Sequence
  ENSG00000198918_5 (sequence is synthesized)
gattcaagggggctctttctttgcccggccgctgccgagtcgggcagggattccggtttcccttcgcttgtagcgaactcgttctggaggcggggggtgggaggtggcagccacccccga

SEQ ID NO: 735681 - DNA, 120 bp, Artificial Sequence
  ENSG00000198918_6 (sequence is synthesized)
aatcgtggcctgactgtgggctgcccgtggcatgcgcaacgtggagggtaatcaggagggtattgtgggctactggttttcgaaaagggtttagcttggcgtggagaagcgaaccgcatt

SEQ ID NO: 735682 - DNA, 120 bp, Artificial Sequence
  ENSG00000198918_7 (sequence is synthesized)
tttagatcccaggacttttgtttagaggacgtttattcagagacttgagcgtcaccccgtggaagcgcctagaacaaggggtgttttgcgaacctgtgtgtcattctggccttcttagta

SEQ ID NO: 735683 - DNA, 120 bp, Artificial Sequence
  ENSG00000198918_8 (sequence is synthesized)
aatggcagcagcgaaccagtcactctttactgggaaatgtaaaatgttgatttctagatatggaggcgataagtactggtattttattacttgtcaagtaatttattacttgacaaaatt

SEQ ID NO: 735684 - DNA, 120 bp, Artificial Sequence
  ENSG00000198918_9 (sequence is synthesized)
tacaactgctactgtggatgggggacggggtgtaatctttgccttctttgtattggctcccattattatgcaagggtatgttcgtccaggttggccaggcattaaacctgcatccgtgcc

SEQ ID NO: 735685 - DNA, 120 bp, Artificial Sequence
  ENSG00000198918_10 (sequence is synthesized)
tatttttaaatttaaaagtttatttttttagccagtgaaatttagcagtagagatagagttaggattaataccgaaatggtgagtaggttagatcttctgaatgtcagggactttcccta

SEQ ID NO: 735686 - DNA, 120 bp, Artificial Sequence
  ENSG00000198918_11 (sequence is synthesized)
agtcttaattaccctcccaataacacttgaaaagtacgtacccctgttttacaaagtagagcactgagattcgttgacttgcaaatggtaggtaggtggttctgtttgactcaaagctgt

SEQ ID NO: 735687 - DNA, 120 bp, Artificial Sequence
  ENSG00000198918_12 (sequence is synthesized)
gttcttcccaggaagccagattccctagccattcccagtgtggtcgtctgagtccttgggggaccacagggtaaattgaaaggtagcctctggctgtggagcagaaaggacctgggtttg

SEQ ID NO: 735688 - DNA, 120 bp, Artificial Sequence
  ENSG00000198918_13 (sequence is synthesized)
aatcctggttctgcacattgatgctctgattttgtgcatgtttcttaaccggattccacttattttatctgaacgatggaaactgtggtatctgcccccagagaagttgtgagggtcaga

SEQ ID NO: 735689 - DNA, 120 bp, Artificial Sequence
  ENSG00000198918_14 (sequence is synthesized)
gacttgcttggcttgatggcttagcattgagaagattttggggctggggtatgtgttaagcactcaaatgttggtttgaaggagttcttgactttgaatcattcgggcaggctctaatat

SEQ ID NO: 735690 - DNA, 120 bp, Artificial Sequence
  ENSG00000198918_15 (sequence is synthesized)
tttgtggaagtactgccattatcctgctgaaagaaaagccgtgttaatcatttttgattttgcctttatgagggtaaaatcatgacagattgacatggacaattctgggattgctgtttc

SEQ ID NO: 735691 - DNA, 120 bp, Artificial Sequence
  ENSG00000198919_0 (sequence is synthesized)
actcagctgtgcgctctgatttcgtgcgcttcctcgtccttcatgttggatggccagtttttcgtttgtgcgtcatcctctacctgagaaatggtcgcttgcccctagtctagacacgca

SEQ ID NO: 735692 - DNA, 120 bp, Artificial Sequence
  ENSG00000198919_1 (sequence is synthesized)
ttaaagggcagtatttaaagtcagttggcaagcagtggaataagatttttgtaaagaaaccttgtgcagcatggattctctaccagatgaattttttgtgaggcatcctgctgtggagga

SEQ ID NO: 735693 - DNA, 120 bp, Artificial Sequence
  ENSG00000198919_2 (sequence is synthesized)
tcagaggaaggaagaaactgagaataagctagaaaaatcatctggtcaactgaacaaacaggaaaatgacatacctactgatcttgtccctgttaacctactattagaagtgaagaagtt

SEQ ID NO: 735694 - DNA, 120 bp, Artificial Sequence
  ENSG00000198919_3 (sequence is synthesized)
attaaatgcaattaatactctaccaaaaggtgtggttcctcacattaagaagttcttacaagaagatttttccttccaaactatgcagagagaagttgcagctaacagccagaatggtga

SEQ ID NO: 735695 - DNA, 120 bp, Artificial Sequence
  ENSG00000198919_4 (sequence is synthesized)
ggaaattgttcctgctttgactttacgtttcttgattacacagctagaagcagcacttaggaacattcaagctggcaattataccgcacaccagattaatattggttattatttgacatt

SEQ ID NO: 735696 - DNA, 120 bp, Artificial Sequence
  ENSG00000198919_5 (sequence is synthesized)
actgtttttatatggagtagcactcactgaaagaggaaagaaagaggattatacagaagctgagaataaatttctggtgatgaagatgatgatccaagaaaatgaaatttgtgaaaactt

SEQ ID NO: 735697 - DNA, 120 bp, Artificial Sequence
  ENSG00000198919_6 (sequence is synthesized)
tatgtctttagtttattttggacgtggtttactgcgatgtgctcaaaagagatataatggaggactgctagaatttcataaaagcttacaagaaattggagacaaaaatgaccattggtt

SEQ ID NO: 735698 - DNA, 120 bp, Artificial Sequence
  ENSG00000198919_7 (sequence is synthesized)
tgacatagatcctacagaagatgaagatttacctacaacttttaaagatcttcttaataattttatcaagacaactgaaagcaatataatgaagcagacgatttgtagttacctagattg

SEQ ID NO: 735699 - DNA, 120 bp, Artificial Sequence
  ENSG00000198919_8 (sequence is synthesized)
tgaacgatcttgtgaagctgacattttgaagaacaccagttataagggattttttcagttaatgtgcagtaaaagttgctgtgtttatttccataaaatttgctggaaaaagttcaagaa

SEQ ID NO: 735700 - DNA, 120 bp, Artificial Sequence
  ENSG00000198919_9 (sequence is synthesized)
tttaaagtatccaggtgaaaatgatcagagttttagtgggaaaaaatgtttgaaggaaggatgtacaggtgacatggtaaggatgctgcaatgtgatgtacctggaattgttaaaatttt

SEQ ID NO: 735701 - DNA, 120 bp, Artificial Sequence
  ENSG00000198919_10 (sequence is synthesized)
gtttgaagttgtgagaaaggatgaatatatcaccattgaaaatttaggagcaagttatagaaagttgatatctctgaaaataactgatactgatataagaccgaagatcagtttaaaatt

SEQ ID NO: 735702 - DNA, 120 bp, Artificial Sequence
  ENSG00000198919_11 (sequence is synthesized)
taatacaaaagatgaaatgcctatcttcaagcttgattataattatttctatcatctgcttcatataattattatttctggtactgacattgttcgacaaatatttgatgaggctatgcc

SEQ ID NO: 735703 - DNA, 120 bp, Artificial Sequence
  ENSG00000198919_12 (sequence is synthesized)
acctcctcttttgaaaaaagagcttcttatacacaagaatgtgctggaatcctactacaaccatctttggaccaatcatcctttgggtggatcatggcatctgctttatcctcctaacaa

SEQ ID NO: 735704 - DNA, 120 bp, Artificial Sequence
  ENSG00000198919_13 (sequence is synthesized)
ggagttaccgcaatccaaacagtttgacttatgcctcctgttagctcttataaaacatttaaatgtgttccctgcacccaaaaaaggatggaatatggaaccgccatcttctgacatctc

SEQ ID NO: 735705 - DNA, 120 bp, Artificial Sequence
  ENSG00000198919_14 (sequence is synthesized)
taaatctgcagacatcctgagactgtgcaaatacagggatatcctccttagtgagattttgatgaatggtctcactgagtcacagttcaattcaatttggaaaaaagtttcagatattct

SEQ ID NO: 735706 - DNA, 120 bp, Artificial Sequence
  ENSG00000198919_15 (sequence is synthesized)
tctgcgccttgggatgatgcaagaggatattgacaaagtgaaggagaatcccattgagaatatctcccttgattaccatcagctatctgtctacctaggcataccagtaccagaaatcat

SEQ ID NO: 735707 - DNA, 120 bp, Artificial Sequence
  ENSG00000198919_16 (sequence is synthesized)
acagaggatgttatcctgctatcaacaaggaattgctctacagtcaataacaggcagtcagcgtattgaaatagaagagttacagaatgaggaagaagaactaagtccacctctcatgga

SEQ ID NO: 735708 - DNA, 120 bp, Artificial Sequence
  ENSG00000198919_17 (sequence is synthesized)
gtacaatataaatgtgaaatcacaccctgagatacagtttgcagaaattaataaagatgggacctcaatacccagtgaatcttcaacagaatctcttaaagatctccaggaagttaagag

SEQ ID NO: 735709 - DNA, 120 bp, Artificial Sequence
  ENSG00000198919_18 (sequence is synthesized)
taaacaaaggaaaaagaagaagactaagaataaaaagaataaagactcaaaagaagaccaagtcccatatgtggtagaaaaggaagagcagttgaggaaagaacaagcaaatccacactc

SEQ ID NO: 735710 - DNA, 120 bp, Artificial Sequence
  ENSG00000198919_19 (sequence is synthesized)
agtcagtagacttataaaagatgatgcaagtgatgttcaagaggattctgcaatggaagacaagttctatagcctggatgaattgcatattctggacatgatagagcagggctcagctgg

SEQ ID NO: 735711 - DNA, 120 bp, Artificial Sequence
  ENSG00000198919_20 (sequence is synthesized)
caaagtaactacagactatggagaaactgaaaaggaaaggcttgctcgtcaaaggcagctttataaattgcactatcagtgtgaagatttcaaaagacagttgagaacagtgacttttcg

SEQ ID NO: 735712 - DNA, 120 bp, Artificial Sequence
  ENSG00000198919_21 (sequence is synthesized)
gtggcaagaaaaccaaatgcagattaaaaagaaagacaaaattatcgcatctcttaatcaacaagttgcttttggaatcaataaggtttccaaattacagcgtcaaatccatgctaaaga

SEQ ID NO: 735713 - DNA, 120 bp, Artificial Sequence
  ENSG00000198919_22 (sequence is synthesized)
gcaactttctatgaaaagatctcagtgggaaatggaaaaacataatctggaaagcacaatgaaaacatacgtaagcaaactgaacgcagaaactagcagagctttaacagccgaggtgta

SEQ ID NO: 735714 - DNA, 120 bp, Artificial Sequence
  ENSG00000198919_23 (sequence is synthesized)
tttcttacagtgtcgtagggattttggtttgcttcatctagagcagactgaaaaggaatgtctcaatcagcttgccagggtgactcacatggcagcaagcaacctagaatcacttcaatt

SEQ ID NO: 735715 - DNA, 120 bp, Artificial Sequence
  ENSG00000198919_24 (sequence is synthesized)
aaaggctgcggtagacagttggaatgccattgtggcagatgttagaaacaagattgcattcctcaggacacagtacaatgaacaaataaacaaagtcaagcaaggatttgccttgagtac

SEQ ID NO: 735716 - DNA, 120 bp, Artificial Sequence
  ENSG00000198919_25 (sequence is synthesized)
cttgcctccagtccagcttcctcctccaccacccagtcctgagatactgatgcagcagttcttaggaagacctcttgtgaaagaatctttctttagacccatacttactgttcctcaaat

SEQ ID NO: 735717 - DNA, 120 bp, Artificial Sequence
  ENSG00000198919_26 (sequence is synthesized)
gcctgcagtttgcccgggagtcgtctctgcaactggccaacctagagcccccctgatgactggcatagcctgggctctgccagcgcctgtgggagacgctgtgcctcccagtgcaggtct

SEQ ID NO: 735718 - DNA, 120 bp, Artificial Sequence
  ENSG00000198919_27 (sequence is synthesized)
gcggagtgatccctccatcatgaattgggagagaattacagacaggctgaaaactgcctttccacagcaaaccagaaaggaacttacagatttcttacggaaattgaaggatgcttatgg

SEQ ID NO: 735719 - DNA, 120 bp, Artificial Sequence
  ENSG00000198919_28 (sequence is synthesized)
aaaatccttgtctgaactgacatttgatgaaattgtttgcaagatttcccagtttattgaccccaaaaagtctcagagtcaaggaaaatcagtgtcaaatgttaattgtgtttcacctag

SEQ ID NO: 735720 - DNA, 120 bp, Artificial Sequence
  ENSG00000198919_29 (sequence is synthesized)
tcattctccatcacagcctgatgctgcccagcccccaaaaccagcctggaggccactcacttcacagggtcctgccacatgggaaggagccagtaatccagatgaggaagaggaagaaga

SEQ ID NO: 735721 - DNA, 120 bp, Artificial Sequence
  ENSG00000198919_30 (sequence is synthesized)
agagccttgtgtgatctgtcatgagaatctgtctccagaaaatctttcagttttgccttgcgctcacaaattccatgctcagtgcattagaccatggttgatgcaacaggggacatgtcc

SEQ ID NO: 735722 - DNA, 120 bp, Artificial Sequence
  ENSG00000198919_31 (sequence is synthesized)
aacgtgcagactccacgttttgctaccagaagaattccctggtcaccccagccggcagttgcccaagatctgatacaaggtacccatgaagagattatgaactacttgaaggtggagact

SEQ ID NO: 735723 - DNA, 120 bp, Artificial Sequence
  ENSG00000198919_32 (sequence is synthesized)
gtacggtggtgtgttggagctggcttgtaatgtcttatgagtgacaatcgttagtttgaggaattttgtgagacagttgtcaaattgttgctagcttgaaatctgcggcaattggagtat

SEQ ID NO: 735724 - DNA, 120 bp, Artificial Sequence
  ENSG00000198919_33 (sequence is synthesized)
ttacaccatagaaatgctataagtgaagacctacctttcccttaagagctagttgttaaacctttaccagcataccactggaccttgtctaaaatttctttgtgttcccagtgtcttgcc

SEQ ID NO: 735725 - DNA, 120 bp, Artificial Sequence
  ENSG00000198919_34 (sequence is synthesized)
cagtagatacaagataaatattgccagaatcagatatcaggaagtagtaagaaaaggagttaatatgcaaactaaatcactcgctcaattgaataattgagatcttctgttcatttgttc

SEQ ID NO: 735726 - DNA, 120 bp, Artificial Sequence
  ENSG00000198919_35 (sequence is synthesized)
cttggaccttaatcatttgcattttggagaaaattttttctgctttaaaagtctgtaatttcagtttttgtgtcggggagagggaaaaactatttgtctgtagttgctttttgtgacaaa

SEQ ID NO: 735727 - DNA, 120 bp, Artificial Sequence
  ENSG00000198919_36 (sequence is synthesized)
gtgaatacccactgggctaagtttcatatctaaagcttgtcactaagaattttcatttttaggggtcaaaaacctattttgaaaatagtgttgtgtgaatgctgtaagtgttgtacatgt

SEQ ID NO: 735728 - DNA, 120 bp, Artificial Sequence
  ENSG00000198919_37 (sequence is synthesized)
ctctggtttcagaattaaaagaattcagagttaccttgtgagataaatgttctttgcttcatattcacagtttcacctccatttaaatttatggggaagaataaatgtttcctgactcag

SEQ ID NO: 735729 - DNA, 120 bp, Artificial Sequence
  ENSG00000198919_38 (sequence is synthesized)
aaacaattttgcctccatatttcagtgcaaatatattttgaagttacttttaaatatttatttaaaacctctgtttctgtaactgtatgttaaacgtattcttctgtaatgagaatagac

SEQ ID NO: 735730 - DNA, 120 bp, Artificial Sequence
  ENSG00000198919_39 (sequence is synthesized)
tggaacatgtgagggaaaaatatttaaaaaaagatggcagtcatctagacatgtaaaatgccaagaatgtcttagaattgcacaatttagaatttatagagcctttaatcaccttgtcta

SEQ ID NO: 735731 - DNA, 64 bp, Artificial Sequence
  ENSG00000198919_40 (sequence is synthesized)
gtcacatcttacatggatggcagcagacaagcttactatcacgagaacagcatgggaaagacct

SEQ ID NO: 735732 - DNA, 90 bp, Artificial Sequence
  ENSG00000198919_41 (sequence is synthesized)
gtgattaaattatttcccaccaggcccctcccacaacatggaataatgggagatacaagatatttgggtggagacacagagccaaaccat

SEQ ID NO: 735733 - DNA, 120 bp, Artificial Sequence
  ENSG00000198919_42 (sequence is synthesized)
atcacaccttaaggtcatggtcatatagctagttatcttgtaaaaccaatgtttcttagttcatacttacaactgcaatttcactttcatttagaaaagaataaatgtttcttaattgaa

SEQ ID NO: 735734 - DNA, 120 bp, Artificial Sequence
  ENSG00000198919_43 (sequence is synthesized)
gggtgtctatgcaaaggaagctcagttttcttttattatgagctgcttgtttgagtggtgtaaaactatgtgctcttcaatatagtgctaaagaagccagctaattttatcaaagcagca

SEQ ID NO: 735735 - DNA, 120 bp, Artificial Sequence
  ENSG00000198919_44 (sequence is synthesized)
gccaaagaagtcaggacaaatcttcaggacttgtgaaatgaactgaaagagcttgaagcagatggaattttaatagttacactatatatgctcttagtaggtttttttcttgtagtggaa

SEQ ID NO: 735736 - DNA, 120 bp, Artificial Sequence
  ENSG00000198919_45 (sequence is synthesized)
acataactgttagcatatttcttaggatgttttttcttgtctttttaaattcttatttcactcatcctttactctcccctcaagtattctacactttaatttcctgaaataaatttaagg

SEQ ID NO: 735737 - DNA, 90 bp, Artificial Sequence
  ENSG00000198919_46 (sequence is synthesized)
caagtattctacactttaatttcctgaaataaatttaaggaaaagggaaatagtaaagaagtaggaatacacatgtaactaacctgcaca

SEQ ID NO: 735738 - DNA, 120 bp, Artificial Sequence
  ENSG00000198919_47 (sequence is synthesized)
gctctgatttcgtgcgcttcctcgtccttcatgttggatggccagtttttcgtttgtgcgtcatcctctacctgagaaatggtcgcttgcccctagtctagacacggcatcctgctgtgg

SEQ ID NO: 735739 - DNA, 120 bp, Artificial Sequence
  ENSG00000198919_48 (sequence is synthesized)
agctctcattaatatttgagttagaagaacttattctgggcctttaatttgttgcatgtgctgtacttaaagcatcccagataattttagcttatattttcatagtgtttatacagagct

SEQ ID NO: 735740 - DNA, 120 bp, Artificial Sequence
  ENSG00000198919_49 (sequence is synthesized)
tgaattggaatggtcctttccttccttgcctcagtacttccttccataatctttcctgccataaccatttattttgccaccatttcttaaacacttatgtggcaggcattatgctagact

SEQ ID NO: 735741 - DNA, 120 bp, Artificial Sequence
  ENSG00000198919_50 (sequence is synthesized)
gtaatatgtttttttaatcccagttgaagtggatgtgggaaggtattagaaagtagaagaaagtatagtctaaaatagagaggaaagaaaggaagagaaaagtgggatatttcaaaacca

SEQ ID NO: 735742 - DNA, 120 bp, Artificial Sequence
  ENSG00000198919_51 (sequence is synthesized)
cgcagaggtagaatgaaattcgtccagaatggaatctccgtatttctttacaaataagtggtaacagttattatatagtcactaaattatccttagatctttcatcttataggcatgaat

SEQ ID NO: 735743 - DNA, 120 bp, Artificial Sequence
  ENSG00000198919_52 (sequence is synthesized)
atgttgctttttaaaaagtgtcttcctcctttgttacatccatgtgtgtaagtgagcatctgtgaacttttatcagtaacctacttattgacattatgtgttgttcctttattcatcagt

SEQ ID NO: 735744 - DNA, 120 bp, Artificial Sequence
  ENSG00000198919_53 (sequence is synthesized)
gattatttaaggacagaagactaggattaaaataaaaatgataaaaacaaaaataattgtttccatagaatctagaaagaaatacctataatattagaaaacaaaagatctcagtggtga

SEQ ID NO: 735745 - DNA, 120 bp, Artificial Sequence
  ENSG00000198919_54 (sequence is synthesized)
gtttagctcctgggaaatgatgagattgatgattctttctcctggaaaacctttcatcacagagattcatctcagctgaacactgaacagcttagcagaggccttctgtcctctcttatc

SEQ ID NO: 735746 - DNA, 120 bp, Artificial Sequence
  ENSG00000198919_55 (sequence is synthesized)
tcatcaccagaggattttcctcccttcttttcatccttgctgtgatctatgcaaacagctactggccaaagaagagcttagcagagggggaggactccaagtctgagctttgataaattc

SEQ ID NO: 735747 - DNA, 120 bp, Artificial Sequence
  ENSG00000198920_0 (sequence is synthesized)
aggcggccggaagcgcggccttgttgggggcccccgttgcccgcctcccagtagccgcgcctcaccctaggccaggaatggttttagggaagactgttgccggatgacaaggctgtcact

SEQ ID NO: 735748 - DNA, 120 bp, Artificial Sequence
  ENSG00000198920_1 (sequence is synthesized)
attgttctgtactacctgacattatgggaccaggccagccagcttcaacctgtgttcatctagcacctaggacccaacttgatgggaggagcgaccccaaagtacttcagacccagaacc

SEQ ID NO: 735749 - DNA, 120 bp, Artificial Sequence
  ENSG00000198920_2 (sequence is synthesized)
agctgcagtttaataggaatgttcctacacattcaagcaacttggcgatccgatattcttgcccacatgccattagaattgaaaaactgaagcactcatacaatgaatcataccattgta

SEQ ID NO: 735750 - DNA, 120 bp, Artificial Sequence
  ENSG00000198920_3 (sequence is synthesized)
aagatgcagattgtagagttggtcctgacctgggcagttctgtttcattttccgtcatatcccaagagagacttagctatgctgtccacctagccagaagagatgtgaaacgaagacaat

SEQ ID NO: 735751 - DNA, 120 bp, Artificial Sequence
  ENSG00000198920_4 (sequence is synthesized)
ttgaaaaacatataaaagaacatcatctcagaagtcagcctcaaagctctcagaagtgtggacatactaagtataaaatacccgaccacagggtggaaaggaaggaatcaaagagtcaag

SEQ ID NO: 735752 - DNA, 120 bp, Artificial Sequence
  ENSG00000198920_5 (sequence is synthesized)
cagcctgtcagtgtagccaccagccatccaaagtagaaatctccagctctggtgccaaagtatacctttactcatctcatccaggccagtcagatcttactgtgccaaattcgccaccca

SEQ ID NO: 735753 - DNA, 120 bp, Artificial Sequence
  ENSG00000198920_6 (sequence is synthesized)
cccatgatccgggacttcagcctcatcccaggataggtgaccacaaaaacataagtgaacagaaaagcctgctagaagtccagcgactccagaaagaactgagcagttgtatccacaaaa

SEQ ID NO: 735754 - DNA, 120 bp, Artificial Sequence
  ENSG00000198920_7 (sequence is synthesized)
ttgaagaggtaactaaaaaagatagactagaagaagctttggatccagatgaagaacgtcgaatccgtatcaggagacaggagcaagctgctcgctctgcccgaatgctctacgtcctcc

SEQ ID NO: 735755 - DNA, 120 bp, Artificial Sequence
  ENSG00000198920_8 (sequence is synthesized)
agcagcaggtaaaagaaatccaggaagaattggataaattgagtccacataaaattaaacacactaagaagtcatgggcaatgtctaagctggcggctgcccatcgaggagccattcggg

SEQ ID NO: 735756 - DNA, 120 bp, Artificial Sequence
  ENSG00000198920_9 (sequence is synthesized)
ccttacagatgtttgtcactcagtttactgaccgaggggagcatccacttcctgctcggtgtaaggaactgggcagccttattcgccagctttcactttgttctgtcaagctggatgcag

SEQ ID NO: 735757 - DNA, 120 bp, Artificial Sequence
  ENSG00000198920_10 (sequence is synthesized)
acccttctgttcctgatgtggttatagatattctgcaacaaattgaggctttggaatctctcctggaaaagaaactgtcaccaaaaaaggtgaaaaaatgtttcagtgaaattcggagca

SEQ ID NO: 735758 - DNA, 120 bp, Artificial Sequence
  ENSG00000198920_11 (sequence is synthesized)
gatttcctatcggtagccaaaaggccttggagagatggccaagtacatcaccaaagggtgagaggaggcccctcacagcaaaggacacattcccacaggaaacaagtcgaccttctgtag

SEQ ID NO: 735759 - DNA, 120 bp, Artificial Sequence
  ENSG00000198920_12 (sequence is synthesized)
caaagcagcttcttgccgataagtatcagcccgatacggagcttccggagacccagaggttgcagagtgagcttgatgtattagatgcggatatagttctggaagaaggaccatttattc

SEQ ID NO: 735760 - DNA, 120 bp, Artificial Sequence
  ENSG00000198920_13 (sequence is synthesized)
tagaccaaagtgcaagcttcaaagacgaggtgttagccgtggcaaaaacaaaagcagggaaaaagaagcctgtgactgagaatgtgccgtttaggaagaaagatactctggcgccagcaa

SEQ ID NO: 735761 - DNA, 120 bp, Artificial Sequence
  ENSG00000198920_14 (sequence is synthesized)
gacagcaaggactccgcaaagctgaaagaggtagacaaagccaacctcacagtaaaagcagagtgcagcagacaacagtttcatccagattaaaaatgaaccggcagcctgtgaaagacc

SEQ ID NO: 735762 - DNA, 120 bp, Artificial Sequence
  ENSG00000198920_15 (sequence is synthesized)
gcaaggcaccatggatacccccaaaccccacatccccaccagcgtctcctaaatgtgctgcatggctaaaggtgaaaactagccccagagatgccacaaaagagcctctccagcaagaag

SEQ ID NO: 735763 - DNA, 120 bp, Artificial Sequence
  ENSG00000198920_16 (sequence is synthesized)
atcctcaagaggaaagtcacctgacaggtgctgttgagcatgaagcagccaggctcgcttggcttgatgctgaaacttccaaaagattgaaggaactagaagagttaaaagccaaggaaa

SEQ ID NO: 735764 - DNA, 120 bp, Artificial Sequence
  ENSG00000198920_17 (sequence is synthesized)
ttgacagcatgcaaaaacagaggcttgattggcttgatgctgaaacttctagaagaacaaaggaactgaatgagctcaaagctgaagaaatgtatagactccaacaattgagtgtttctg

SEQ ID NO: 735765 - DNA, 120 bp, Artificial Sequence
  ENSG00000198920_18 (sequence is synthesized)
ccacccacttagcagacaaggtagaggaggcagttctggatcgtttgaagcctctcttggtcaaggcccagagagtcaattctactacagaagcaaatattcatttgaaagatggctcgt

SEQ ID NO: 735766 - DNA, 120 bp, Artificial Sequence
  ENSG00000198920_19 (sequence is synthesized)
tggaagattgtgccagtgagctctgggctgtgactcatgctaagatcttggggtctgaaaccttagccaccgttgaggacagcaaggatagcccagatctggagatcatgatgcgccgaa

SEQ ID NO: 735767 - DNA, 120 bp, Artificial Sequence
  ENSG00000198920_20 (sequence is synthesized)
tggaagagatggaaaaataccaggagtctgttcgtcaaagatataataaaatcgcatatgctgatcctcgactttggatgcaggaagaaaacaatgaccaaaaaatctcagcaataagtg

SEQ ID NO: 735768 - DNA, 120 bp, Artificial Sequence
  ENSG00000198920_21 (sequence is synthesized)
aaaagcctctatctcctcatccaatcagaatcacgaagacagtggatcgcaaggatccagccgtgaacatcatgttagaaaggccctgtaatggcaattccctggatgaaagtgtgggaa

SEQ ID NO: 735769 - DNA, 120 bp, Artificial Sequence
  ENSG00000198920_22 (sequence is synthesized)
cagaggaaggatcagagaaaagagaggcccctcttctctccctagccgaagattctcaacagaaagaaggccgagctcccctctttgtcccaccgggtatgcagcacagcatcggtgact

SEQ ID NO: 735770 - DNA, 120 bp, Artificial Sequence
  ENSG00000198920_23 (sequence is synthesized)
actgtagtcgttttgagcagtaccttcggatcatatctcatgaggctgtaggctccttcaacccgtggctgatagctgaaagcttttcagaagagctggtagatgaagctctgggtgctg

SEQ ID NO: 735771 - DNA, 120 bp, Artificial Sequence
  ENSG00000198920_24 (sequence is synthesized)
tggctgctgaacttcaggatatgtgcgaagattatgcagaagctgtgttcacctcagaattcttagaggctgctacataaaggctctctgaggcgaggccatttgtgtcacactggagaa

SEQ ID NO: 735772 - DNA, 120 bp, Artificial Sequence
  ENSG00000198920_25 (sequence is synthesized)
gggatggcaccaccctttgttttggcccacaggaaattttcatcctcagctgtccatccaggcccagaaggtgctgcccactgaaaggaaggcagtgccggggaggtcatcctcactttg

SEQ ID NO: 735773 - DNA, 120 bp, Artificial Sequence
  ENSG00000198920_26 (sequence is synthesized)
cattttcttttgtcatggcaatggttctggaaatgtatgatgcaatgtatcacacttatcagtgcccaggcaacacaacttgattatggcaatattttcagaatgtgtacttttcctatt

SEQ ID NO: 735774 - DNA, 120 bp, Artificial Sequence
  ENSG00000198920_27 (sequence is synthesized)
gaaataccatgttcattcctctggctcagtttggtgatgaaaatgttttgaaagataatcgatacgtatatttcacacaaggattcaggttgctgttgaacccttgctggcattgatacc

SEQ ID NO: 735775 - DNA, 120 bp, Artificial Sequence
  ENSG00000198920_28 (sequence is synthesized)
aacacaagtgcggctactagctggtcccatcacggggcccctgttttgcatctttggcgatttcctgtcaggacctctggccctactaggctgtagactcagggagagcacagtctggct

SEQ ID NO: 735776 - DNA, 120 bp, Artificial Sequence
  ENSG00000198920_29 (sequence is synthesized)
gtgctgccaaacctctcctctgctgcagtttattccaaacaggagccccctggctgtcagtgcacaataatagacacacatttcttcaacgttccattcctaggtgattttcacattttt

SEQ ID NO: 735777 - DNA, 120 bp, Artificial Sequence
  ENSG00000198920_30 (sequence is synthesized)
agttcctcagcatattttattgctgtgtgttgacacaatctggtataaaaaactttctctggattcagaggaagtttgaggaatcaggagaggaccaggccttctcctgtgcctgggtga

SEQ ID NO: 735778 - DNA, 120 bp, Artificial Sequence
  ENSG00000198920_31 (sequence is synthesized)
aggtacagacctcgctgtgtctccgatgaggtcagaagtgtctctatttcataccacaaaggaacccaagtgggagtagggaacagatggatggcgcgaagacctctgtgtctccccaga

SEQ ID NO: 735779 - DNA, 120 bp, Artificial Sequence
  ENSG00000198920_32 (sequence is synthesized)
gaaaggaagaaacttaagaaccatcatagcctggtcctccaacatcttacagatcatgttttccaagagaaaagcctgtgttttcagaaactctgaattcagaaaaagaaacggaatgtg

SEQ ID NO: 735780 - DNA, 120 bp, Artificial Sequence
  ENSG00000198920_33 (sequence is synthesized)
cgtaagaatcaggccactgcctggaaagactttctctcaattcgtagcctgaggctcagtgaaggaaacatgcagaaagaatgcctgagacgcccccagggaataagggaactctttata

SEQ ID NO: 735781 - DNA, 120 bp, Artificial Sequence
  ENSG00000198920_34 (sequence is synthesized)
acctgtccagtgccgtcatctgggatttttctctgaagtacaagaatttcaggtgatttaagctgcttgatcacacttatttgtgcaaaattgattttcatttaatgttaatgttttcct

SEQ ID NO: 735782 - DNA, 120 bp, Artificial Sequence
  ENSG00000198920_35 (sequence is synthesized)
gcttaattttatataacttcagaatgtaaagagcttcaaggtaaattacagggtgtttaacctggggagttaaatgtgtacacttgaattaataggagcaccggttgttgctagtataaa

SEQ ID NO: 735783 - DNA, 120 bp, Artificial Sequence
  ENSG00000198920_36 (sequence is synthesized)
gtaatttgtgtggcagtttgtactgtgctgagtttttaaaataaacccaatattttaaagtatgtgcctattttaaataacttacatctcctttttttcccacaggcaaagtgaaatgtg

SEQ ID NO: 735784 - DNA, 120 bp, Artificial Sequence
  ENSG00000198920_37 (sequence is synthesized)
atttacagaaaccactgagaatacttttatatgtgatatgactatagtggattatttgccaccccttccccccgagaaaaaaattagtgacaataaaagctaacatttattgagcaccta

SEQ ID NO: 735785 - DNA, 120 bp, Artificial Sequence
  ENSG00000198920_38 (sequence is synthesized)
agtagccgcgcctcaccctaggccaggtttacttagagtcattgagagttatatgccttcgggccacctgacagagtgaagcatactgctttctgactagtattaagacttgttaatgta

SEQ ID NO: 735786 - DNA, 120 bp, Artificial Sequence
  ENSG00000198920_39 (sequence is synthesized)
gactgcttgtccaaaaaccaccctgctggaacatgctagtttaccatggcaaagctctgttttgggaataacgccttgctggagacctttgagatttgaaatttggaatggaaagggctc

SEQ ID NO: 735787 - DNA, 120 bp, Artificial Sequence
  ENSG00000198920_40 (sequence is synthesized)
actttagtggctctctgtaacttagaggatgaaagctaaactcttcagcgtggcatgtaagacttcacgatccggcccgcctacatttccagagtcacctccaccttcactccttcatgc

SEQ ID NO: 735788 - DNA, 120 bp, Artificial Sequence
  ENSG00000198920_41 (sequence is synthesized)
tacactggggacgaagggatggaaggtgaacactgcctattcactatcttgaactggaaaccagtaactgttttttgggtgcatgaatgaagagcctttttttcattttcaagtgacttg

SEQ ID NO: 735789 - DNA, 120 bp, Artificial Sequence
  ENSG00000198920_42 (sequence is synthesized)
aattaataatggttatatttggacaagaggagatatatcgatgcatccttttctacaaaaaagatcaatggaaagtcatgggcaatgtctaagctggcggctgcccatcgaggagccatt

SEQ ID NO: 735790 - DNA, 120 bp, Artificial Sequence
  ENSG00000198920_43 (sequence is synthesized)
attaaatatttcaaacataaaatttgaaagaaaaggacagtgaacacttttgaaatcacctcctagattcagcaattgctaacaattttttctgtttttctacctactcaaccatctgtc

SEQ ID NO: 735791 - DNA, 120 bp, Artificial Sequence
  ENSG00000198920_44 (sequence is synthesized)
tttaaaatttttgcagaatcaccccaaagcaaattgcagtcaacctgatacttctaaatatttgagaatacttctcctaaaaatgaactctcctacttaatcatgatactattcttatac

SEQ ID NO: 735792 - DNA, 120 bp, Artificial Sequence
  ENSG00000198924_0 (sequence is synthesized)
ggagctcgctatgcttaacctggagatgattaaggccccgcttcctggcctcccagcctctaatgccaaaagataagggagaggctggcgtgtgaccccgttttgagtcaggtggacaga

SEQ ID NO: 735793 - DNA, 120 bp, Artificial Sequence
  ENSG00000198924_1 (sequence is synthesized)
gggctggccaccttcggaaccatgggtgcaatacggagtcagacctcaatacaagcccactctttcacatatttgaacttttttcacatatcaactttttttgttcactgtgcagggatt

SEQ ID NO: 735794 - DNA, 120 bp, Artificial Sequence
  ENSG00000198924_2 (sequence is synthesized)
gttcattgctgctggaggaagatcatggactgtcgcgggaaactgaagtggttgagtatccactagtcgtggatgagggcagtgacttcgcagttttttgcgaattacacatctctttga

SEQ ID NO: 735795 - DNA, 120 bp, Artificial Sequence
  ENSG00000198924_3 (sequence is synthesized)
ttatgttgtgactagttttgttagatagtcatttagtgtttgggatacctgttaagccctttgtccagggactgtggttggatttatgaattatttggacggttgtccacttgaaagaac

SEQ ID NO: 735796 - DNA, 120 bp, Artificial Sequence
  ENSG00000198924_4 (sequence is synthesized)
tgacagtagcttcataacaatgttacaaatctcgttctaagattaagctgttgaacctatatttgccattagcgcttaatttttgaagtattatttttatgaatcaagccctggaaaagg

SEQ ID NO: 735797 - DNA, 120 bp, Artificial Sequence
  ENSG00000198924_5 (sequence is synthesized)
acaagatatttgaatgaaatagcacccataatggagaacttcacagttgctactcctgtgataggtttatcttagtttcattgtggtataaatggaatagcaggtgttgtcaggtacaag

SEQ ID NO: 735798 - DNA, 120 bp, Artificial Sequence
  ENSG00000198924_6 (sequence is synthesized)
gtttgtagcttgccaatatgttcattaccaacactgcagattcccattgagttggtgggggttttgttacctttgttttttttctcagcaaaataattctataactttttgtttgtgaca

SEQ ID NO: 735799 - DNA, 120 bp, Artificial Sequence
  ENSG00000198924_7 (sequence is synthesized)
agaaatggactttcagtttacttaagattaatacttcttgaatgataaaatcattttgccatgttagaagacatttccgaagaagacatttgggaatacaaatctaaaagaaaaccaaaa

SEQ ID NO: 735800 - DNA, 120 bp, Artificial Sequence
  ENSG00000198924_8 (sequence is synthesized)
cgagttgatccaaataatggctctaaaaatattctaaaatctgttgaaaaagcaacagatggaaaataccagtcaaaacggagtagaaacagaaaaagagccgcagaagctaaagaggtg

SEQ ID NO: 735801 - DNA, 120 bp, Artificial Sequence
  ENSG00000198924_9 (sequence is synthesized)
aaggaccatgaagtgccccttggaaatgcaggttgtcagacttctgttgcttctagtcagaattcaagttgtggagatggtattcagcagacccaagacaaggaaactactccaggaaaa

SEQ ID NO: 735802 - DNA, 120 bp, Artificial Sequence
  ENSG00000198924_10 (sequence is synthesized)
ctctgtagaactcaaaaaagccaacacgtgtccccaaagatacgtccagtttatgatggatactgtccaaattgccagatgcctttttcctcattgatagggcagacacctcgatggcat

SEQ ID NO: 735803 - DNA, 120 bp, Artificial Sequence
  ENSG00000198924_11 (sequence is synthesized)
gtttttgaatgtttggattctccaccacgctctgaaacagagtgtcctgatggtcttctgtgtacctcaaccattccttttcattacaagagatacactcacttcctgctagctcaaagc

SEQ ID NO: 735804 - DNA, 120 bp, Artificial Sequence
  ENSG00000198924_12 (sequence is synthesized)
agggctggtgatcatccttttagcagcccatcacctgcgtcaggtggcagtttcagtgagactaagtcaggcgtcctttgtagccttgaggaaagatggtcttcgtatcagaaccaaact

SEQ ID NO: 735805 - DNA, 120 bp, Artificial Sequence
  ENSG00000198924_13 (sequence is synthesized)
gataactcggtttcaaatgatcccttattgatgacacagtattttaaaaagtctccgtctctgactgaagccagtgaaaagatttctactcatatccaaacatcccaacaagctctacaa

SEQ ID NO: 735806 - DNA, 120 bp, Artificial Sequence
  ENSG00000198924_14 (sequence is synthesized)
tttacagattttgttgagaatgacaaactagtgggagttgctttgcgtcttgcaaacaactcagaacacataaatttgccattgccagaaaatgacttcagtgactgtgaaatctcctat

SEQ ID NO: 735807 - DNA, 120 bp, Artificial Sequence
  ENSG00000198924_15 (sequence is synthesized)
tctccacttcaaagtgatgaagacactcatgatatcgatgaaaaaccggatgattcacaagaacaactgttttttaccgaaagctcaaaagatggcagcctcgaagaagatgatgacagc

SEQ ID NO: 735808 - DNA, 120 bp, Artificial Sequence
  ENSG00000198924_16 (sequence is synthesized)
tgtggtttttttaaaaaacgacatggtcccttactgaaggaccaggatgagagctgccccaaagtgaacagcttcttaactcgggataagtatgatgaaggattgtatagattcaatagt

SEQ ID NO: 735809 - DNA, 120 bp, Artificial Sequence
  ENSG00000198924_17 (sequence is synthesized)
ctaaatgatttgtctcaacctatttctcaaaataatgagagtactttgccttatgatctggcatgtactggtggtgattttgtgttgtttccacctgcattggcagggaagcttgctgct

SEQ ID NO: 735810 - DNA, 120 bp, Artificial Sequence
  ENSG00000198924_18 (sequence is synthesized)
aggcaactaaagcaaaacctgatgagccagaatttcactcagctcaatcaaataaacagaaacaggtaattgaagaatcatctgtttacaatcaagtttctcttccgttagttaagagtt

SEQ ID NO: 735811 - DNA, 120 bp, Artificial Sequence
  ENSG00000198924_19 (sequence is synthesized)
taatgttgaaaccttttgaaagtcaggtagaagggtatctttcttcccaaccaacccaaaatacaattagaaaattatcaagtgagaacttgaatgctaagaataatactaactcagcat

SEQ ID NO: 735812 - DNA, 120 bp, Artificial Sequence
  ENSG00000198924_20 (sequence is synthesized)
gtttctgcagaaaggcattagagggtgtgccagttggtaaagctacaattttaaatacagaaaacttgtctagtacacctgctccgaagtatttgaaaatattgccttctggtcttaagt

SEQ ID NO: 735813 - DNA, 120 bp, Artificial Sequence
  ENSG00000198924_21 (sequence is synthesized)
ataatgcaagacatccttctaccaaggtaatgaagcaaatggatataggtgtgtattttggactacctcccaaaagaaaggaagagaaattgctaggggaaagtgcattagaagggataa

SEQ ID NO: 735814 - DNA, 120 bp, Artificial Sequence
  ENSG00000198924_22 (sequence is synthesized)
acttaaatccagttccaagtcctaatcaaaagaggtcctcgcagtgcaagaggaaagcagaaaaatctttaagtgatttagaatttgatgcaagtactttacatgagagtcagctttctg

SEQ ID NO: 735815 - DNA, 120 bp, Artificial Sequence
  ENSG00000198924_23 (sequence is synthesized)
tggaactttctagtgagaggtcacagcgtcaaaaaaagagatgtagaaagtcaaattcactgcaggaaggagcgtgtcagaagagatcagatcaccttattaatacagaatctgaagcag

SEQ ID NO: 735816 - DNA, 120 bp, Artificial Sequence
  ENSG00000198924_24 (sequence is synthesized)
tcaatttaagtaaagtcaaagtcttcacaaaatcagctcatggtgggctgcaaaggggcaacaagaaaatcccagagtcatctaatgtaggaggatcaagaaaaaagacatgtccattct

SEQ ID NO: 735817 - DNA, 120 bp, Artificial Sequence
  ENSG00000198924_25 (sequence is synthesized)
ataagaaaatacctggaaccggctttacagttgatgcctttcagtatggcgtggttgaaggttgcacagcctattttctcacacattttcattctgatcattatgctggattgtctaaac

SEQ ID NO: 735818 - DNA, 120 bp, Artificial Sequence
  ENSG00000198924_26 (sequence is synthesized)
acttcacatttccagtttattgtagtgagataactggcaatttgttgaagaacaagcttcatgtgcaagaacaatatattcacccattgccactggacactgaatgtattgtgaatggtg

SEQ ID NO: 735819 - DNA, 120 bp, Artificial Sequence
  ENSG00000198924_27 (sequence is synthesized)
tcaaagttgttttgcttgatgccaatcactgtccaggtgctgtcatgatcctcttttatcttcctaatggtactgtcatattacacacgggagacttcagagcagatcccagcatggaac

SEQ ID NO: 735820 - DNA, 120 bp, Artificial Sequence
  ENSG00000198924_28 (sequence is synthesized)
gttctcttcttgcggaccagaaagtccatatgctgtacttagataccacatattgtagcccagaatacacctttccatctcagcaagaggttatccggtttgccatcaacactgcctttg

SEQ ID NO: 735821 - DNA, 120 bp, Artificial Sequence
  ENSG00000198924_29 (sequence is synthesized)
aggctgtaactctaaacccacatgctcttgttgtctgtggcacttactctattggaaaagagaaagtcttcctagccattgctgatgttttaggttcaaaagtgggcatgtcccaggaaa

SEQ ID NO: 735822 - DNA, 120 bp, Artificial Sequence
  ENSG00000198924_30 (sequence is synthesized)
aatataaaactctacagtgcctcaatataccagaaattaattcactcatcactaccgacatgtgcagttcattggttcaccttctcccaatgatgcaaattaattttaagggcttacaga

SEQ ID NO: 735823 - DNA, 120 bp, Artificial Sequence
  ENSG00000198924_31 (sequence is synthesized)
gtcatttgaagaagtgtggtgggaaatacaatcagattttggcatttcgacctacaggatggacacactctaacaagttcactagaatagcagatgttattccccagaccaaaggaaaca

SEQ ID NO: 735824 - DNA, 120 bp, Artificial Sequence
  ENSG00000198924_32 (sequence is synthesized)
tttcaatatatggaattccttacagtgaacacagcagctacctagaaatgaagcgctttgtccagtggctgaagccccagaaaatcatacctactgtaaatgtgggcacctggaaatcta

SEQ ID NO: 735825 - DNA, 120 bp, Artificial Sequence
  ENSG00000198924_33 (sequence is synthesized)
ggagcacaatggagaaatattttagagagtggaaattggaagctggatattgatgatacctccgaggattcagtagtagttaagttccttggatgtagcttgttagtagttaaatctata

SEQ ID NO: 735826 - DNA, 120 bp, Artificial Sequence
  ENSG00000198924_34 (sequence is synthesized)
gaaatgtgaaatacactttgtgtggaaaaacctcatgaagattgttcagatactttattttctcatttatgtttgaacaacatgttcgtggtgctgaatgcctctcagcatcatcaagga

SEQ ID NO: 735827 - DNA, 120 bp, Artificial Sequence
  ENSG00000198924_35 (sequence is synthesized)
taactgaaactgggtctccctgggacccttaatttcttgtcccctgccctccatgggcagttatattctgcatcaagccttagaagaggaagcaaaggcagattcagggaccaaaaggat

SEQ ID NO: 735828 - DNA, 120 bp, Artificial Sequence
  ENSG00000198924_36 (sequence is synthesized)
gattcagggaccaaaaggattaatgataattaataaagtagtttgaagcattatatatataagtaattatgtgtctttaaaattatgagatgaaacttttatatgacgtgtatacttaaa

SEQ ID NO: 735829 - DNA, 120 bp, Artificial Sequence
  ENSG00000198925_0 (sequence is synthesized)
gagtggcagacacccggcctagcgccgcgggtcgcgccgagccgagccgagccgagcggagccggcggagcctctggaatcacccgggtcgctgttcctgagcagctgcagagcatcgag

SEQ ID NO: 735830 - DNA, 120 bp, Artificial Sequence
  ENSG00000198925_1 (sequence is synthesized)
ggctggagaggagcacatactgtccatggagctggtggtcaaggtggacagggggcggtggtgatggcgcagtttgacactgaataccagcgcctagaggcctcctatagtgattcaccc

SEQ ID NO: 735831 - DNA, 120 bp, Artificial Sequence
  ENSG00000198925_2 (sequence is synthesized)
ccaggggaggaggacctgttggtgcacgtcgccgaggggagcaagtcaccttggcaccatattgaaaaccttgacctcttcttctctcgagtttataatctgcaccagaagaatggcttc

SEQ ID NO: 735832 - DNA, 120 bp, Artificial Sequence
  ENSG00000198925_3 (sequence is synthesized)
acatgtatgctcatcggggagatctttgagctcatgcagttcctctttgtggttgccttcactaccttcctggtcagctgcgtggactatgacatcctatttgccaacaagatggtgaac

SEQ ID NO: 735833 - DNA, 120 bp, Artificial Sequence
  ENSG00000198925_4 (sequence is synthesized)
cacagtcttcaccctactgaacccgtcaaggtcactctgccagacgcctttttgcctgctcaagtctgtagtgccaggattcaggaaaatggctcccttatcaccatcctggtcattgct

SEQ ID NO: 735834 - DNA, 120 bp, Artificial Sequence
  ENSG00000198925_5 (sequence is synthesized)
ggtgtcttctggatccaccggcttatcaagttcatctataacatttgctgctactgggagatccactccttctacctgcacgctctgcgcatccctatgtctgcccttccgtattgcacg

SEQ ID NO: 735835 - DNA, 120 bp, Artificial Sequence
  ENSG00000198925_6 (sequence is synthesized)
tggcaagaagtgcaggcccggatcgtgcagacgcagaaggagcaccagatctgcatccacaaacgtgagctgacagaactggacatctaccaccgcatcctccgtttccagaactacatg

SEQ ID NO: 735836 - DNA, 120 bp, Artificial Sequence
  ENSG00000198925_7 (sequence is synthesized)
gtggcactggttaacaaatccctcctgcctctgcgcttccgcctgcctggcctcggggaagctgtcttcttcacccgtggtctcaagtacaactttgagctgatcctcttctggggacct

SEQ ID NO: 735837 - DNA, 120 bp, Artificial Sequence
  ENSG00000198925_8 (sequence is synthesized)
ggctctctgtttctcaatgaatggagcctcaaggccgagtacaaacgtggggggcaacggctagagctggcccagcgcctcagcaaccgcatcctgtggattggcatcgctaacttcctg

SEQ ID NO: 735838 - DNA, 120 bp, Artificial Sequence
  ENSG00000198925_9 (sequence is synthesized)
ctgtgccccctcatcctcatatggcaaatcctctatgccttcttcagctatgctgaggtgctgaagcgggagccgggggccctgggagcacgctgctggtcactctatggccgctgctac

SEQ ID NO: 735839 - DNA, 120 bp, Artificial Sequence
  ENSG00000198925_10 (sequence is synthesized)
ctccgccacttcaacgagctggagcacgagctgcagtcccgcctcaaccgtggctacaagcccgcctccaagtacatgaattgcttcttgtcacctcttttgacactgctggccaagaat

SEQ ID NO: 735840 - DNA, 120 bp, Artificial Sequence
  ENSG00000198925_11 (sequence is synthesized)
ggagccttcttcgctggctccatcctggctgtgcttattgccctcaccatttatgacgaagatgtgttggctgtggaacatgtgctgaccaccgtcacactcctgggggtcaccgtgacc

SEQ ID NO: 735841 - DNA, 120 bp, Artificial Sequence
  ENSG00000198925_12 (sequence is synthesized)
gtgtgcaggtcctttatcccggaccagcacatggtgttctgccctgagcagctgctccgcgtgatcctcgctcacatccactacatgcctgaccactggcagggtaatgcccaccgctcg

SEQ ID NO: 735842 - DNA, 120 bp, Artificial Sequence
  ENSG00000198925_13 (sequence is synthesized)
cagacccgggacgagtttgcccagctcttccagtacaaggcagtgttcattttggaagagttgctgagccccattgtcacacccctcatcctcatcttctgcctgcgcccacgggccctg

SEQ ID NO: 735843 - DNA, 120 bp, Artificial Sequence
  ENSG00000198925_14 (sequence is synthesized)
gagattatagacttcttccgaaacttcaccgtggaggtcgttggtgtgggagatacctgctcctttgctcagatggatgttcgccagcatggtcatccccagtggctatctgctgggcag

SEQ ID NO: 735844 - DNA, 120 bp, Artificial Sequence
  ENSG00000198925_15 (sequence is synthesized)
actcatgcactttgccatcaccaaccctggctggcagccaccacgtgagagcacagccttcctaggcttcctcaaggagcaggttcagcgggatggagcagctgctagcctcgcccaagg

SEQ ID NO: 735845 - DNA, 120 bp, Artificial Sequence
  ENSG00000198925_16 (sequence is synthesized)
gggtctgctccctgaaaatgccctctttacgtctatccagtccttacaatctgagtctgagcccctgagccttatcgcaaatgtggtagctggctcatcctgccggggccctccactgcc

SEQ ID NO: 735846 - DNA, 120 bp, Artificial Sequence
  ENSG00000198925_17 (sequence is synthesized)
cagagacctgcagggctccaggcacagggctgaagtcgcctctgccctgcgctccttctccccgctgcaacccgggcaggcgcccacaggccgggctcacagcaccatgacaggctctgg

SEQ ID NO: 735847 - DNA, 120 bp, Artificial Sequence
  ENSG00000198925_18 (sequence is synthesized)
ggtggatgccaggacagccagctccgggagcagcgtgtgggaaggacagctgcagagcctggtgctgtcagaatatgcatccacagagatgagcctgcatgccctctatatgcaccagct

SEQ ID NO: 735848 - DNA, 120 bp, Artificial Sequence
  ENSG00000198925_19 (sequence is synthesized)
ccacaagcagcaggcccaggctgaacctgagcggcatgtatggcaccgccgggagagtgatgagagtggagaaagcgcccctgatgaagggggagagggcgcccgggccccccagtctat

SEQ ID NO: 735849 - DNA, 120 bp, Artificial Sequence
  ENSG00000198925_20 (sequence is synthesized)
ccctcgctctgctagctatccctgtgcagcaccccggcctggagctcctgagaccactgccctgcatgggggcttccagaggcgctacggtggcatcacagatcctggcacagtgcccag

SEQ ID NO: 735850 - DNA, 120 bp, Artificial Sequence
  ENSG00000198925_21 (sequence is synthesized)
ggttccctctcatttctctcggctgcctcttggagggtgggcagaagatgggcagtcggcatcaaggcaccctgagcccgtgcccgaagagggctcggaggatgagctaccccctcaggt

SEQ ID NO: 735851 - DNA, 120 bp, Artificial Sequence
  ENSG00000198925_22 (sequence is synthesized)
gcacaaggtatagacaaggctgagcagggttcctgtggcccaggatggaggccaccgctgccctgccatcccgtctgcctgccatgggacggctcctctgagtgttccctggccccacgt

SEQ ID NO: 735852 - DNA, 120 bp, Artificial Sequence
  ENSG00000198925_23 (sequence is synthesized)
gtgtggtgtttgtgtgtctgtgcctggccaagggaggtgccaacactgggcttgccacagccccaggagaggaatttggggcctaggaaccgagggcacacgggactctagcctcatccc

SEQ ID NO: 735853 - DNA, 120 bp, Artificial Sequence
  ENSG00000198925_24 (sequence is synthesized)
caggacccccttggctcagagtgtggtgctagaaactggcccccagcccagccccagtactgccacctttacacctacccctgcaagtccccagagggctgcccacgatagaagctgcca

SEQ ID NO: 735854 - DNA, 120 bp, Artificial Sequence
  ENSG00000198925_25 (sequence is synthesized)
agcagggagaacctgtgccaactgtggagtggggaggttgggcctggaccctcaacccctgcaaccttccctagccccctcaatagatgagcaggtcaggctgtggcccttacctcaccc

SEQ ID NO: 735855 - DNA, 120 bp, Artificial Sequence
  ENSG00000198925_26 (sequence is synthesized)
gcagttctcgcccagtgctgcagccggctcacctctctccgcttcttgcacatcactggcctgtgtgtgctgcttgctcctgttctgttcgcttgctcccgttccgttcggcttttgctt

SEQ ID NO: 735856 - DNA, 120 bp, Artificial Sequence
  ENSG00000198925_27 (sequence is synthesized)
tgcgttagggtgaagaccctagcgtccagctcccctcaacgctatattttgacactaaaaaagaaggtttctaaattgtaggagcaggatggaaatactttgctgcccttgccatctttt

SEQ ID NO: 735857 - DNA, 120 bp, Artificial Sequence
  ENSG00000198925_28 (sequence is synthesized)
aggatgggcccccaggagactgaggtcttcctgggccctcattgctgcttatcgtaccccccatcacctgcacatgggacagaccgggctggagggtgaccttggctgtgtgcgtcccag

SEQ ID NO: 735858 - DNA, 120 bp, Artificial Sequence
  ENSG00000198925_29 (sequence is synthesized)
caaaagagctctggcccgcatctcgctgtgccctgaagggggatgaagggcgatgcctcgcccgaggctttgggctgctgcactgcatgctgggactgctcctactctctgtcccacccc

SEQ ID NO: 735859 - DNA, 120 bp, Artificial Sequence
  ENSG00000198925_30 (sequence is synthesized)
tcacccagctgtggtccggctttgggagagtggtgaattgcgctgcccgaactcggagcggagcagggtagggaccgtgtacagcttgataacccttaataaaaagggagtttgaccaga

SEQ ID NO: 735860 - DNA, 120 bp, Artificial Sequence
  ENSG00000198925_31 (sequence is synthesized)
agtcccgtccctgaagccgagaattggccgttgtgtctccgccccccgtgcttattggccagcctggctgcgggtgacagtgagtggcagacacccggcctagcgccgcgggtcgcgccg

SEQ ID NO: 735861 - DNA, 120 bp, Artificial Sequence
  ENSG00000198925_32 (sequence is synthesized)
ggccgcgcgcgaggttgtccgctgttgggagctgccagcccttggcctggggccgggcgaccctggggcgaggtggactccggtccacggtcgccgcggctgggtgtggggaggcaagcc

SEQ ID NO: 735862 - DNA, 120 bp, Artificial Sequence
  ENSG00000198925_33 (sequence is synthesized)
tgggtgtggggaggcaagccaacccacccgggctatcagctgtaaggctgactcgatccctgcaacatccgcaggaacccctgagcccaggcccagccggccggggctccacgggccctg

SEQ ID NO: 735863 - DNA, 120 bp, Artificial Sequence
  ENSG00000198925_34 (sequence is synthesized)
gtccacactgaccctgtgagtggtgacttccctgaggggcagggctctcactagcccagggaatcccaccggggccaggctgggccaagatccacggcccccaggggctgcacggacagc

SEQ ID NO: 735864 - DNA, 120 bp, Artificial Sequence
  ENSG00000198925_35 (sequence is synthesized)
agacacccggcctagcgccgcgggtcgcgccgagccgagccgagccgagcggagccggcggagcctctggaatcacccgggtcgctgttcctgagcaccttggcaccatattgaaaacct

SEQ ID NO: 735865 - DNA, 120 bp, Artificial Sequence
  ENSG00000198925_36 (sequence is synthesized)
agtgagtggcagacacccggcctagcgccgcgggtcgcgccgagccgagccgagccgagcggagccggcggagcctctggaatcacccgggtcgctgttcctgagctgcagagcatcgag

SEQ ID NO: 735866 - DNA, 120 bp, Artificial Sequence
  ENSG00000198925_37 (sequence is synthesized)
ctagcgccgcgggtcgcgccgagccgagccgagccgagcggagccggcggagcctctggaatcacccgggtcgctgttcctgaggaacccctgagcccaggcccagccggccggggctcc

SEQ ID NO: 735867 - DNA, 120 bp, Artificial Sequence
  ENSG00000198925_38 (sequence is synthesized)
ctgccagacgcctttttgcctgctcaagtctgtagtgccaggtaagggctgcaagtcaagaggacaccatagccttgagttctgctagcaggtgggtaatagagtggagtctgaggcagc

SEQ ID NO: 735868 - DNA, 120 bp, Artificial Sequence
  ENSG00000198925_39 (sequence is synthesized)
cttgagaccctggagttggaagagtggcccggtttagcacagccagaggaagtgctcgtagtcctgggctggaagggtgcttcttccccactgcagccttcctgccccatgcttggcctc

SEQ ID NO: 735869 - DNA, 120 bp, Artificial Sequence
  ENSG00000198925_40 (sequence is synthesized)
agtgagtggcagacacccggcctagcgccgcgggtcgcgccgagccgagccgagccgagcggagccggcggagcctctggaatcacccgggtcgctgttcctgaggcagttcctctttgt

SEQ ID NO: 735870 - DNA, 120 bp, Artificial Sequence
  ENSG00000198925_41 (sequence is synthesized)
actgtccatggagctgcaccttggcaccatattgaaaaccttgacctcttcttctctcgagtttataatctgcaccagaagaatggcttcacatgtatgctcatcggggagatctttgag

SEQ ID NO: 735871 - DNA, 120 bp, Artificial Sequence
  ENSG00000198929_0 (sequence is synthesized)
accgtcgccttttcttcttcgtcccgggcggtgcgttccactgctctggggccggcgccgcgcccagtcccgcttcgggccgcaagccccaccgctcccctccccgggcaggggcgccgc

SEQ ID NO: 735872 - DNA, 120 bp, Artificial Sequence
  ENSG00000198929_1 (sequence is synthesized)
gcagcccgctcccgccgccacctcctcccctgccgccctcctagccggcaggaattgcgcgaccacagcgccgctcgcgtcgcccgcatcagctcagcccgctgccgctcggccctcggc

SEQ ID NO: 735873 - DNA, 80 bp, Artificial Sequence
  ENSG00000198929_2 (sequence is synthesized)
tgcccagcgctcccaggccccgccacgcgtcgccgcgcccagctccagtctcccctccccggggtctcgccagccccttc

SEQ ID NO: 735874 - DNA, 120 bp, Artificial Sequence
  ENSG00000198929_3 (sequence is synthesized)
ctgcagccgccgcctccgaaggagcgggtccgccgcgggtaaccatgcctagcaaaaccaagtacaaccttgtggacgatgggcacgacctgcggatccccttgcacaacgaggacgcct

SEQ ID NO: 735875 - DNA, 120 bp, Artificial Sequence
  ENSG00000198929_4 (sequence is synthesized)
tccagcacggcatctgctttgaggccaagtacgtaggaagcctggacgtgccaaggcccaacagcagggtggagatcgtggctgccatgcgccggatacggtatgagtttaaagccaaga

SEQ ID NO: 735876 - DNA, 120 bp, Artificial Sequence
  ENSG00000198929_5 (sequence is synthesized)
acatcaagaagaagaaagtgagcattatggtttcagtggatggagtgaaagtgattctgaagaagaagaaaaagaaaaaggaatggacgtgggatgagagcaagatgctggtgatgcagg

SEQ ID NO: 735877 - DNA, 120 bp, Artificial Sequence
  ENSG00000198929_6 (sequence is synthesized)
accccatctacaggatcttctatgtctctcatgattcccaagacttgaagatcttcagctatatcgctcgagatggtgccagcaatatcttcaggtgtaacgtctttaaatccaagaaga

SEQ ID NO: 735878 - DNA, 120 bp, Artificial Sequence
  ENSG00000198929_7 (sequence is synthesized)
agagccaagctatgagaatcgttcggacggtggggcaggcctttgaggtctgccacaagctgagcctgcagcacacgcagcagaatgcagatggccaggaagatggagagagcgagagga

SEQ ID NO: 735879 - DNA, 120 bp, Artificial Sequence
  ENSG00000198929_8 (sequence is synthesized)
acagcaacagctcaggagacccaggccgccagctcactggagccgagagggcctccacggccactgcagaggagactgacatcgatgcggtggaggtcccacttccagggaatgatgtcc

SEQ ID NO: 735880 - DNA, 120 bp, Artificial Sequence
  ENSG00000198929_9 (sequence is synthesized)
tggaattcagccgaggtgtgactgatctagatgctgtagggaaggaaggaggctctcacacaggctccaaggtttcgcacccccaggagcccatgctgacagcctcacccaggatgctgc

SEQ ID NO: 735881 - DNA, 120 bp, Artificial Sequence
  ENSG00000198929_10 (sequence is synthesized)
tcccttcttcttcctcgaagcctccaggcctgggcacagagacaccgctgtccactcaccaccagatgcagctcctccagcagctcctccagcagcagcagcagcagacacaagtggctg

SEQ ID NO: 735882 - DNA, 120 bp, Artificial Sequence
  ENSG00000198929_11 (sequence is synthesized)
tggcccaggtacacttgctgaaggaccagttggctgctgaggctgcggcgcggctggaggcccaggctcgcgtgcatcagcttttgctgcagaacaaggacatgctccagcacatctccc

SEQ ID NO: 735883 - DNA, 120 bp, Artificial Sequence
  ENSG00000198929_12 (sequence is synthesized)
gtgcaagagctggaactgaagctgtcaggacagaacgccatgggctcccaggacagcttgctggagatcaccttccgctccggagccctgcccgtgctctgtgaccccacgacccctaag

SEQ ID NO: 735884 - DNA, 120 bp, Artificial Sequence
  ENSG00000198929_13 (sequence is synthesized)
ccagaggacctgcattcgccgccgctgggcgcgggcttggctgactttgcccaccctgcgggcagccccttaggtaggcgcgactgcttggtgaagctggagtgctttcgctttcttccg

SEQ ID NO: 735885 - DNA, 120 bp, Artificial Sequence
  ENSG00000198929_14 (sequence is synthesized)
cccgaggacaccccgcccccagcgcagggcgaggcgctcctgggcggtctggagctcatcaagttccgagagtcaggcatcgcctcggagtacgagtccaacacggacgagagcgaggag

SEQ ID NO: 735886 - DNA, 120 bp, Artificial Sequence
  ENSG00000198929_15 (sequence is synthesized)
cgcgactcgtggtcccaggaggagctgccgcgcctgctgaatgtcctgcagaggcaggaactgggcgacggcctggatgatgagatcgccgtgtaggtgccgagggcgaggagatggagg

SEQ ID NO: 735887 - DNA, 120 bp, Artificial Sequence
  ENSG00000198929_16 (sequence is synthesized)
cggcggcgtggctggaggggccgtgtctggctgctgcccgggtaggggatgcccagtgaatgtgcactgccgaggagaatgccagccagggcccgggagagtgtgaggtttcaggaaagt

SEQ ID NO: 735888 - DNA, 120 bp, Artificial Sequence
  ENSG00000198929_17 (sequence is synthesized)
attgagattctgctttggagggtaaagtggggaagaaatcggattcccagaggtgaatcagctcctctcctacttgtgactagagggtggtggaggtaaggccttccagagcccatggct

SEQ ID NO: 735889 - DNA, 120 bp, Artificial Sequence
  ENSG00000198929_18 (sequence is synthesized)
tcaggagagggtctctctccaggactgccaggctgctggaggacctgcccctacctgctgcatcgtcaggctcccacgctttgtccgtgatgcccccctaccccctcactctccccgtct

SEQ ID NO: 735890 - DNA, 120 bp, Artificial Sequence
  ENSG00000198929_19 (sequence is synthesized)
ccatggtcccgaccaggaagggaagccatcggtaccttctcaggtactttgtttctggatatcacgatgctgcgagttgcctaaccctccccctacctttatgagaggaattccttctcc

SEQ ID NO: 735891 - DNA, 120 bp, Artificial Sequence
  ENSG00000198929_20 (sequence is synthesized)
aggcccttgctgagattgtagagattgagtgctctggaccgcaaaagccaggctagtccttgtagggtgagcatggaattggaatgtgtcacagtggataagcttttagaggaactgaat

SEQ ID NO: 735892 - DNA, 120 bp, Artificial Sequence
  ENSG00000198929_21 (sequence is synthesized)
ccaaacattttctccagccggacattgaatgttgctacaaagggagccttgaagctttaacatggttcaggcccttggtgtgagagcccagggggaggacagcttgtctgctgctccaaa

SEQ ID NO: 735893 - DNA, 120 bp, Artificial Sequence
  ENSG00000198929_22 (sequence is synthesized)
tcacttagatctgattcctgttttgaaagtcctgccctgccttcctcctgcctgtagcccagcccatctaaatggaagctgggaattgcccctcacctcccctgtgtcctgtccagctga

SEQ ID NO: 735894 - DNA, 120 bp, Artificial Sequence
  ENSG00000198929_23 (sequence is synthesized)
agcttttgcagcactttacctctctgaaagccccagaggaccagagcccccagccttacctctcaacctgtcccctccactgggcagtggtggtcagtttttactgcaaaaaaaaaaaaa

SEQ ID NO: 735895 - DNA, 120 bp, Artificial Sequence
  ENSG00000198929_24 (sequence is synthesized)
cagccattgccacccttggcccatctctctgcgtgcgtgccttgagcacacatataaaaagtgccatgtgcaattgtcttatcttttatgatctaggctttgcctagggatcactactcc

SEQ ID NO: 735896 - DNA, 120 bp, Artificial Sequence
  ENSG00000198929_25 (sequence is synthesized)
ttaacgggctggctggggcaatgaggaaaagctcctttgctcctgtaaggccataagtggctgttaacagattttcaaatgcctgaagagattgctgagacctgctagagtcatatgttc

SEQ ID NO: 735897 - DNA, 120 bp, Artificial Sequence
  ENSG00000198929_26 (sequence is synthesized)
ggggaattaagtctttatcctagacaacaaggtacagatgcaaactgcagtgttattggagggtcaatcggcaaggatatgattatcccaaaatggagttcatcgaccctagctttcctt

SEQ ID NO: 735898 - DNA, 120 bp, Artificial Sequence
  ENSG00000198929_27 (sequence is synthesized)
tagattatatataaataaaagtgcagtcctcttctaatggccacagttggttttcttgtagcccagaaagtccaaattaaaggaaataaattcagttttatgttagccttccttggtgca

SEQ ID NO: 735899 - DNA, 120 bp, Artificial Sequence
  ENSG00000198929_28 (sequence is synthesized)
tcagggtgtcagtggaaataggatcaggtggtgtgtgtgtgtgtgttttgtgtgtgtgtgtacacatgtgtttatatatacatgtgtgagggaaagtgtgtacatatatgtaggattgta

SEQ ID NO: 735900 - DNA, 120 bp, Artificial Sequence
  ENSG00000198929_29 (sequence is synthesized)
accagacggaaaagaacgaggatctccagggtgtttgaatcagcaacagatttgtgttttctaacatgcatttagttggagaggcatggttctgtttgttttgttttgatctaatttgcc

SEQ ID NO: 735901 - DNA, 120 bp, Artificial Sequence
  ENSG00000198929_30 (sequence is synthesized)
attggaaataggtacagttacacagagaaggaagaaccaggaaagtgagatccatgaaactaaatgagcagctgtcagaatccagtgtggctgagcctacctagcttatgaaatctaacc

SEQ ID NO: 735902 - DNA, 120 bp, Artificial Sequence
  ENSG00000198929_31 (sequence is synthesized)
cagggttccctgagtccaagaccacttagattattaagattttgaacgtccagaggagtgaaaagtctgttttctgacgtaagccggagctgaggataaagccagaggccagtggattag

SEQ ID NO: 735903 - DNA, 120 bp, Artificial Sequence
  ENSG00000198929_32 (sequence is synthesized)
gtgtatggaatgtggatggagagggcttgtgtgggatgtggccagggagtgggtgaggaaggccgcttctaaatggcctgtaaaaacttgagattggatagacgaaaggaaatggagaaa

SEQ ID NO: 735904 - DNA, 120 bp, Artificial Sequence
  ENSG00000198929_33 (sequence is synthesized)
ttaaagaattggagaaactagttatctgtgttgctgactttgggacccatccaagactcctgcccttggggtgttccatggtggtttcttcctgcctgggcgccaccctttccccagttc

SEQ ID NO: 735905 - DNA, 120 bp, Artificial Sequence
  ENSG00000198929_34 (sequence is synthesized)
aggccctccctggaggactagtttgtgtattggtatcctccccagtggacccaaaccagcgcatacttggtgtgtggagatgggagacaaaggacagatctaggagccttgaaggatcac

SEQ ID NO: 735906 - DNA, 120 bp, Artificial Sequence
  ENSG00000198929_35 (sequence is synthesized)
cagccaccgaccctccatcagggccaactgggcaggaaagggaacattgcagacctgatttcccgacgatgtcaccctgtcctccctccttgcttcttgctctgctaactcaactctgcc

SEQ ID NO: 735907 - DNA, 120 bp, Artificial Sequence
  ENSG00000198929_36 (sequence is synthesized)
ttcctctttttcattcttctactctgccctatatggaggacaaatggacaccaggggtgctaaccttattggtgcctgccccagcctaccccaggtgccagcagactctcgtgcacagga

SEQ ID NO: 735908 - DNA, 120 bp, Artificial Sequence
  ENSG00000198929_37 (sequence is synthesized)
ggctcccacagttatggagccaggaaagaatttctctgcactggatggactgtatattgagattaaaaattatattccttatattcctgcttatatcaatgctctctctgtaaaacctct

SEQ ID NO: 735909 - DNA, 120 bp, Artificial Sequence
  ENSG00000198929_38 (sequence is synthesized)
tcctagcctcatttctctcaactgatcttgtttaggcgttgtattccttttatttactctttgcttgactgcttcctcctaaccctctacccactagcactctacttcctaaagctgttg

SEQ ID NO: 735910 - DNA, 120 bp, Artificial Sequence
  ENSG00000198929_39 (sequence is synthesized)
tgtcattaactctgttggatcaactctctgggaaaagattctgttaatgtaagtgcacttactccctggatgttgtcactagtctagtggcttttgctaaataaacctttcttatttcta

SEQ ID NO: 735911 - DNA, 120 bp, Artificial Sequence
  ENSG00000198929_40 (sequence is synthesized)
ctatgaccaaatgtatggggctttttcccacacaccaagcaagcaagcagttctgcagagggcacacagtgtcctctaactcagtttgattctgatactatctacctggaaacagcatca

SEQ ID NO: 735912 - DNA, 120 bp, Artificial Sequence
  ENSG00000198929_41 (sequence is synthesized)
gatcccacagtttgagggctcaatcccacaagactttcccccatttcagacaccaatcacaagtaatagtttgtcacctacacctctgaccaagtggctataaattggtgttcccactac

SEQ ID NO: 735913 - DNA, 120 bp, Artificial Sequence
  ENSG00000198929_42 (sequence is synthesized)
cctctccttggactcaactgatttgctagagcaactgacagaactcaggaaaacacctacatttactggtttattttaaaggatattataagggataccaatgaacaccagatggaagag

SEQ ID NO: 735914 - DNA, 120 bp, Artificial Sequence
  ENSG00000198929_43 (sequence is synthesized)
atgcatagggcagggtctgtgggaagggtggcagagctcccatgccctcccaacgtgcaccaccctccaggaacctctaaatgttcagctgcccggcagctccccacacccagtcctttt

SEQ ID NO: 735915 - DNA, 120 bp, Artificial Sequence
  ENSG00000198929_44 (sequence is synthesized)
gagtttttaatggaggctttattatgtaggcatgattgattacatcattggccactggtgattagtttaacttttagcccctcatctcctggaggttggggcgtgggactgaaaaatcct

SEQ ID NO: 735916 - DNA, 120 bp, Artificial Sequence
  ENSG00000198929_45 (sequence is synthesized)
atcctctaatcataccttggtctgtcctgtgagcagcccccatcccgaagcttccaggggttccccaaccactaatcatctaataagcatacaaaaaacactcttaccactctggagatc

SEQ ID NO: 735917 - DNA, 120 bp, Artificial Sequence
  ENSG00000198929_46 (sequence is synthesized)
tcaagggtttggggagctatatgtcaggaaacagggatgaagaccaaacatgtatttcactgtatcacacctgttctcacccctccccagatcttctctcaattaatatgagacaaaaaa

SEQ ID NO: 735918 - DNA, 120 bp, Artificial Sequence
  ENSG00000198929_47 (sequence is synthesized)
atgagtctgacttcttgaccaaaatatcagttctgtccttagcagctttatggaggacagatttagtttaaattccttaggcattatgcccctgtggctccactcaatcagaaatagggt

SEQ ID NO: 735919 - DNA, 120 bp, Artificial Sequence
  ENSG00000198929_48 (sequence is synthesized)
caacggcaaggtcagggcctccaatctgggcaagagggaggcagccacggtatccacaagtgtaattctctgagtgctggttgctgggaggggcacaccctgggccagcaagtcacttgg

SEQ ID NO: 735920 - DNA, 120 bp, Artificial Sequence
  ENSG00000198929_49 (sequence is synthesized)
ccaagggtggccaactgtgaggtagcactgccctttactccctaaaaaaatgtgaatctctttggagcaaactcctcttcagaaatttgagcacttgttttctgagcaagggaatcagct

SEQ ID NO: 735921 - DNA, 120 bp, Artificial Sequence
  ENSG00000198929_50 (sequence is synthesized)
aatgcttttgactccccatccatcttcctgcatcctcgtcccacctctcctgcccccactcacctggctctgtctttacccacaccatggttttggtacaagaacacccttttccccata

SEQ ID NO: 735922 - DNA, 120 bp, Artificial Sequence
  ENSG00000198929_51 (sequence is synthesized)
agctacattggtccaggccataaaaattcattagttccctttcttcaggggccttctgaaatgctccctggagaactctttattcacttctttgcacaagaatcacatatgtgtgaacac

SEQ ID NO: 735923 - DNA, 120 bp, Artificial Sequence
  ENSG00000198929_52 (sequence is synthesized)
tggtattggccttctaactcagtttcttcaaaccagggtcctggtctggttgcccctgtctcctcccactgagttttatctccacataagtattgctcaccaagaacagagctgttgaca

SEQ ID NO: 735924 - DNA, 120 bp, Artificial Sequence
  ENSG00000198929_53 (sequence is synthesized)
ccactgggcctcaagcatgctgaatgcattgctgccaactgctctgccttaagaaggttggaaactgatgagggtgccacaaattgttcacctcagcccttctgggctggttggaggagg

SEQ ID NO: 735925 - DNA, 120 bp, Artificial Sequence
  ENSG00000198929_54 (sequence is synthesized)
ccctctcatgaatcagtcagcaaatgtttgacccctaccaggtggtcctggtaatatgtggtatgaatcatggtcctagatgtctgccatagcaaataaaaaaggaagacagggaaagaa

SEQ ID NO: 735926 - DNA, 120 bp, Artificial Sequence
  ENSG00000198929_55 (sequence is synthesized)
gctgtcgcctacagagtggcttgatgacagctgcctcactaatttaaaaagccatgtgtagtgcttcctatttctcactatgtttgggtgagtgggagagggagaaagattatatgggct

SEQ ID NO: 735927 - DNA, 120 bp, Artificial Sequence
  ENSG00000198929_56 (sequence is synthesized)
tcgttgtgacactgttcttagccagtgggtcaatagatgagttttggttttgttttttagaagacaggatgagaagagagtgcccccttccacctccaacatggcatgccatgctaggtg

SEQ ID NO: 735928 - DNA, 120 bp, Artificial Sequence
  ENSG00000198929_57 (sequence is synthesized)
ctgaaggagttctctaagcagggatggagcaccgtgcgtgtgtgtgtgtatatgtgcacgtgtgtgtgtacgtgtgtgtgtgtggcaggtctagagggtcgatggctctttcctgcctct

SEQ ID NO: 735929 - DNA, 120 bp, Artificial Sequence
  ENSG00000198929_58 (sequence is synthesized)
tgcccttggtatgggtaccttagtgatgcatcatggccctcccttaggacacacagcttcgcagtgccagtgaacccactccttttggctcctcctctggaatgataagcccagatgccc

SEQ ID NO: 735930 - DNA, 120 bp, Artificial Sequence
  ENSG00000198929_59 (sequence is synthesized)
atgctgcccgtgaagggcttcttcttgaactgaatgtggagggcatctctggtcccggccatctgccagtgactctcatgtgcattcatgtccctctcttctctctgtcctgtcttctct

SEQ ID NO: 735931 - DNA, 120 bp, Artificial Sequence
  ENSG00000198929_60 (sequence is synthesized)
tagtacagttcagtattgctatttaaagatttctcctctacctgctgccacttctgtttgttcaggaacaaggaattggttatttatgcttcgcaatcatgtatgctgtagttagaggaa

SEQ ID NO: 735932 - DNA, 120 bp, Artificial Sequence
  ENSG00000198929_61 (sequence is synthesized)
cagtgctaacaaaactccgcatccccaccccaggccctctatttagcatatgtccctgtggcttctcccagtccccagcacgctggcatgcactgcccaagtccctgccatgtgcatgct

SEQ ID NO: 735933 - DNA, 120 bp, Artificial Sequence
  ENSG00000198929_62 (sequence is synthesized)
gagacagcggcgcctgcctctgcttctgtgtccagtgtgtggtggggcaaattgctctggttctctccactgccatttccatgtgcctgctactccctaacttcagcctggccctgccct

SEQ ID NO: 735934 - DNA, 120 bp, Artificial Sequence
  ENSG00000198930_0 (sequence is synthesized)
acttccctgggttcacagcaggggtggaactggattcttcctggatggggatccagatggaggtggagctgcaccccttgtagagaatggctgcgggtcccaggccaggagctccctgca

SEQ ID NO: 735935 - DNA, 120 bp, Artificial Sequence
  ENSG00000198930_1 (sequence is synthesized)
gggcgggagctcccacgatcgtattgacctctggaagaagacagacactttcccacgggagctcctctccagccagagctacacttggcaaacctttggtcctaaatgatttattcactg

SEQ ID NO: 735936 - DNA, 120 bp, Artificial Sequence
  ENSG00000198930_2 (sequence is synthesized)
aattgaagaaatacggtttacatatcttccaagtatatatgtagggttgatttgggaagcagagcacagcagcccaaatttgcttgtaatgtcggcgactacagcctgctggcctgcctt

SEQ ID NO: 735937 - DNA, 120 bp, Artificial Sequence
  ENSG00000198930_3 (sequence is synthesized)
actggagtagactgtacagagacactggtctggtgaagatgtccaggaaaccacgagcctccagcccattttccaacaaccacccatcaacaccaaagaggttcccaagacaacccagaa

SEQ ID NO: 735938 - DNA, 120 bp, Artificial Sequence
  ENSG00000198930_4 (sequence is synthesized)
gggaaaagggacccgtcaaggaagttccaggaacaaaaggctctccctaaaagaccaccgcttcaaaaaaacctgaggaatggagtgggccaacactatccagccactctgaccagccga

SEQ ID NO: 735939 - DNA, 120 bp, Artificial Sequence
  ENSG00000198930_5 (sequence is synthesized)
acgaggaactcaatcaaaatgcgccatagcaggaccacaagggcaaggagaccaccgccttctccagtgcttccttgggcagccagtaattcccaggcaaggccagagacttcaagtcta

SEQ ID NO: 735940 - DNA, 120 bp, Artificial Sequence
  ENSG00000198930_6 (sequence is synthesized)
tctgaaaagtctccagaagtctaaccccagataaatagccaacagggtgtagagtacgttttacaccccaaagggtatgccccatggtgatggaaataaaatgaacatgttgtaaaatga

SEQ ID NO: 735941 - DNA, 120 bp, Artificial Sequence
  ENSG00000198930_7 (sequence is synthesized)
ccagcctgtaccatttctctatgaaacccctgttctcacccctcctccatcctcttccccaaaccagtgccctcctgtgatctccctgttggctttccaggttcccaagacaacccagaa

SEQ ID NO: 735942 - DNA, 120 bp, Artificial Sequence
  ENSG00000198930_8 (sequence is synthesized)
cttcctggatggggatccagatggaggtggagggttgatttgggaagcagagcacagcagcccaaatttgcttgtaatgtcggcgactacagtttctagcctgctggcctgccttcactg

SEQ ID NO: 735943 - DNA, 120 bp, Artificial Sequence
  ENSG00000198931_0 (sequence is synthesized)
gggctgccgctggctcttcgcacgcggccatggccgactccgagctgcagctggttgagcagcggatccgcagcttccccgacttccccaccccaggcgtggtattcagggacatctcgc

SEQ ID NO: 735944 - DNA, 120 bp, Artificial Sequence
  ENSG00000198931_1 (sequence is synthesized)
ccgtcctgaaggaccccgcctccttccgcgccgccatcggcctcctggcgcgacacctgaaggcgacccacgggggccgcatcgactacatcgcaggcctagactcccgaggcttcctct

SEQ ID NO: 735945 - DNA, 120 bp, Artificial Sequence
  ENSG00000198931_2 (sequence is synthesized)
ttggcccctccctggcccaggagcttggactgggctgcgtgctcatccgaaagcgggggaagctgccaggccccactctgtgggcctcctattccctggagtacgggaaggctgagctgg

SEQ ID NO: 735946 - DNA, 120 bp, Artificial Sequence
  ENSG00000198931_3 (sequence is synthesized)
gctgctgggccgcctgcaggctgaggtcctggagtgcgtgagcctggtggagctgacctcgcttaagggcagggagaagctggcacctgtacccttcttctctctcctgcagtatgagtg

SEQ ID NO: 735947 - DNA, 120 bp, Artificial Sequence
  ENSG00000198931_4 (sequence is synthesized)
accacagggcctcccagcccaacatctccagctggatcccagggaaatatcagccttgggcaactgcagtgaccaggggcaccggctgcccacagggaacacattcctttgctggggttc

SEQ ID NO: 735948 - DNA, 120 bp, Artificial Sequence
  ENSG00000198931_5 (sequence is synthesized)
agcgcctctcctggggctggaagtgccaaagcctggggcaaagctgtgtttcagccacactgaacccaattacacacagcgggagaacgcagtaaacagctttcccacaagagccgtctc

SEQ ID NO: 735949 - DNA, 120 bp, Artificial Sequence
  ENSG00000198931_6 (sequence is synthesized)
ctgtcctcctgttccccagggcagggagccccaggacaacaccagacttcagctgtactgtgggcatgtgctgcttggcgtgatgcccagcagaacctgtcctggttctcacctcaggag

SEQ ID NO: 735950 - DNA, 120 bp, Artificial Sequence
  ENSG00000198931_7 (sequence is synthesized)
acacagccaggtaacagcaaggtggggttggagtcagggtctagggtggcagctgccaagctgtgcaacaaagctgttttctgcgggaggctgaggaccacacaccacttcccactccag

SEQ ID NO: 735951 - DNA, 120 bp, Artificial Sequence
  ENSG00000198931_8 (sequence is synthesized)
tcgcccgggaagggttgtgagattgagcccccgaggccgccgcgctgtgcaggcgtccttcccgcaggttccgggtccccagcccaggacaggcgtgaccgagttgccgggtcagttggt

SEQ ID NO: 735952 - DNA, 120 bp, Artificial Sequence
  ENSG00000198931_9 (sequence is synthesized)
ctccctggagtgcccaagctgaatccacagggcccagctgccttgcttcttgttccttctgcgagctggtattgagcgcctgccacgagccaggccttccctggtgaagatcacggaatg

SEQ ID NO: 735953 - DNA, 120 bp, Artificial Sequence
  ENSG00000198931_10 (sequence is synthesized)
agctggttgagcagcggatccgcagcttccccgacttccccaccccaggcgtggtattcaggtgcacgcacaggccgccctcgtggcgccccgacctgcgggcctacggatgggagcgcg

SEQ ID NO: 735954 - DNA, 120 bp, Artificial Sequence
  ENSG00000198931_11 (sequence is synthesized)
tggcccgcgacctccgggcgggcggggcgggaaccctcgtctttcgcccccggggccctgccctccttcggccccggcgtcaccaggcctgtccttgggtccagggacatctcgcccgtc

SEQ ID NO: 735955 - DNA, 120 bp, Artificial Sequence
  ENSG00000198931_12 (sequence is synthesized)
gaagggcagggccaggccaccgtggccactctcccccagttctaaaaggccttcccaggcgtgtcaagtggagctgctgtggttacagtggccttgggagctcagagaggttgagacata

SEQ ID NO: 735956 - DNA, 120 bp, Artificial Sequence
  ENSG00000198932_0 (sequence is synthesized)
gcactttcgcgccgtatccctccgccccccttcccgacaccctcgcggagagcggttcttgccgcatcctgcgcagcccctgcccagtttggtgcagaggcgtggggggcgggactcgtc

SEQ ID NO: 735957 - DNA, 120 bp, Artificial Sequence
  ENSG00000198932_1 (sequence is synthesized)
tttgccattcggatcgctgggaaagcggtgggaatccaactgaagagcagccagaggagagctgaagagaggagggggaggccgatgacctgggctctgggcctctgaaggtctggcgta

SEQ ID NO: 735958 - DNA, 120 bp, Artificial Sequence
  ENSG00000198932_2 (sequence is synthesized)
ttctgacaggacacagtgagcatctgtagaggagaggcttgaaataaaggaggagcacgaatattccctggatttctggaggcctgctttaaggctggccagttctgcaagaaaggcaag

SEQ ID NO: 735959 - DNA, 120 bp, Artificial Sequence
  ENSG00000198932_3 (sequence is synthesized)
gaggaggagactggctcacacctctggaggacccccttctgtcagctgtggggcttgacactacttgaacaagaaaaggagggggaaactgcaccacataagtgaagatccacctccagt

SEQ ID NO: 735960 - DNA, 120 bp, Artificial Sequence
  ENSG00000198932_4 (sequence is synthesized)
ggctgctctgctggtggtggggttgctgctgacaaccaccctcaacgggtctgcacccatccaggaaatctctgtcttcctcaagcttggttgtgcctgttctacactctatctgtatta

SEQ ID NO: 735961 - DNA, 120 bp, Artificial Sequence
  ENSG00000198932_5 (sequence is synthesized)
ttgaattactgactgagactgtgtttgggaaggaggctgagtgactactggactggatattgactctaactcttgtttccaagcttatatcctcaatcacctaaagatcagagtgtgaag

SEQ ID NO: 735962 - DNA, 120 bp, Artificial Sequence
  ENSG00000198932_6 (sequence is synthesized)
aaacaaacctgtgacagatctgtggttgaggtttagactgggggaggagtatagtactggactttctttgtaacttgtaccatgactggggcagagattgagtctggtgcccaggtcaag

SEQ ID NO: 735963 - DNA, 120 bp, Artificial Sequence
  ENSG00000198932_7 (sequence is synthesized)
cctgaaaagaagcctggggaagaggttgtaggtggggctgagatagagaatgatgtccctctggtggtcagacccaaggttaggacccaggcccagataatgcctggggcaaggcccaag

SEQ ID NO: 735964 - DNA, 120 bp, Artificial Sequence
  ENSG00000198932_8 (sequence is synthesized)
aataagtccaaggttatgcctggagcaagcaccaaagttgagacaagtgcagtgggtggggcacgccctaagagtaaggccaaggcaatacctgtttcacgatttaaggaagaagcccag

SEQ ID NO: 735965 - DNA, 120 bp, Artificial Sequence
  ENSG00000198932_9 (sequence is synthesized)
atgtgggctcagcccaggtttggtgctgaaagattgtctaagacagagagaaactcccagaccaatatcatagcctctccacttgtcagtactgattctgtcttggttgctaaaacaaag

SEQ ID NO: 735966 - DNA, 120 bp, Artificial Sequence
  ENSG00000198932_10 (sequence is synthesized)
tacctgtctgaggatagagaactggttaatacagacactgagagctttcctagaaggaaggcccattaccaagcaggattccagccttcttttaggtcaaaggaggagaccaatatgggg

SEQ ID NO: 735967 - DNA, 120 bp, Artificial Sequence
  ENSG00000198932_11 (sequence is synthesized)
tcctggtgctgtcctaggcctacatccaaacaagaagcctctcctaattctgatttcaaatgggtagacaaatctgtgagttccttgttctggagtggagatgaggtcactgcaaaattt

SEQ ID NO: 735968 - DNA, 120 bp, Artificial Sequence
  ENSG00000198932_12 (sequence is synthesized)
catcctgggaatagggtaaaagacagtaacagatccatgcacatggccaatcaagaggctaataccatgtctaggtcccaaactaaccaggagctctatattgcatctagttctggttct

SEQ ID NO: 735969 - DNA, 120 bp, Artificial Sequence
  ENSG00000198932_13 (sequence is synthesized)
gaggatgagtctgttaagacaccctggttctgggccagagataaaaccaatacctggtctgggcccagggaagatcccaatagcaggtccaggtttaggtctaagaaagaagtctatgtt

SEQ ID NO: 735970 - DNA, 120 bp, Artificial Sequence
  ENSG00000198932_14 (sequence is synthesized)
gaatcaagttctggatctgagcatgaagaccatttggagtcctggtttggggctggaaaggaggccaaattcaggtccaaaatgagagctgggaaggaggccaataacagggccaggcac

SEQ ID NO: 735971 - DNA, 120 bp, Artificial Sequence
  ENSG00000198932_15 (sequence is synthesized)
agggccaagcgagaagcttgcattgatttcatgcctgggtctatagatgtaattaaaaaagagtcctgtttctggcctgaagaaaatgctaataccttttcaaggcccatgatcaagaaa

SEQ ID NO: 735972 - DNA, 120 bp, Artificial Sequence
  ENSG00000198932_16 (sequence is synthesized)
gaggccagggccagagcaatgacaaaggaagaggccaaaaccaaggcccgagccagggccaagcaagaagccaggtcagaggaggaagccctcattgggacctggttctgggctacagac

SEQ ID NO: 735973 - DNA, 120 bp, Artificial Sequence
  ENSG00000198932_17 (sequence is synthesized)
gagtccagcatggcagatgaagccagcatagagtccagtctacaagtggaggatgagtccataattgggagttggttctggactgaagaagaggccagtatggggactggggctagcagt

SEQ ID NO: 735974 - DNA, 120 bp, Artificial Sequence
  ENSG00000198932_18 (sequence is synthesized)
aaatccagaccaaggactgatggggagcgtattggtgattccttatttggggctagggaaaagaccagtatgaaaactggggctgaggccacctctgaatctatactagcagctgatgat

SEQ ID NO: 735975 - DNA, 120 bp, Artificial Sequence
  ENSG00000198932_19 (sequence is synthesized)
gaacaggtcattattggttcctggttctgggctggtgaagaggtcaaccaagaggctgaggaagagaccatttttgggtcgtggttctgggtcattgatgcggccagtgtggaatctggt

SEQ ID NO: 735976 - DNA, 120 bp, Artificial Sequence
  ENSG00000198932_20 (sequence is synthesized)
gttggggtcagctgtgagtccaggacaaggtctgaggaagaagaggtcattggtccctggttttggtctggagaacaagttgatatagaggctggaatcggagaagaggccaggccagga

SEQ ID NO: 735977 - DNA, 120 bp, Artificial Sequence
  ENSG00000198932_21 (sequence is synthesized)
gctgaagaagagacaatattcgggtcctggttttgggctgaaaaccagacctatatggattgtagggctgaaactagctgtgacaccatgcaaggggctgaggaggaggagcccattatt

SEQ ID NO: 735978 - DNA, 120 bp, Artificial Sequence
  ENSG00000198932_22 (sequence is synthesized)
gggtcctggttttggaccagagtagaagcttgtgtggagggtgatgtcaacagcaagtctagcctggaggacaaggaagaggccatgataccatgttttggagccaaagaagaggtcagt

SEQ ID NO: 735979 - DNA, 120 bp, Artificial Sequence
  ENSG00000198932_23 (sequence is synthesized)
atgaagcatgggactggtgtcagatgcagatttatggcaggggctgaggagaccaataataagtcttgcttctgggcagaaaaagaaccctgtatgtatcctgccggtggaggaagttgg

SEQ ID NO: 735980 - DNA, 120 bp, Artificial Sequence
  ENSG00000198932_24 (sequence is synthesized)
tatgggctacagaagagagtaatatagatgggactggagaaaaggccaagttactgactgaagaggagaccataatcaattcctggttctggaaagaagatgaagccatttcagaggcta

SEQ ID NO: 735981 - DNA, 120 bp, Artificial Sequence
  ENSG00000198932_25 (sequence is synthesized)
ctgacagagaagagtccaggccagaagctgaggagggggacattattggttcttggttctgggctggagaagaggacagactagagccagctgctgagactagagaagaagacaggctag

SEQ ID NO: 735982 - DNA, 120 bp, Artificial Sequence
  ENSG00000198932_26 (sequence is synthesized)
cagctgagaaagaaggtattgttgggtcctggtttggggccagagaagagaccattagaagagaggctgggtcttgcagcaaatccagtcctaaagctgaagaggaagaagtcattattg

SEQ ID NO: 735983 - DNA, 120 bp, Artificial Sequence
  ENSG00000198932_27 (sequence is synthesized)
ggtcctggttctgggaagaagaggccagtccggaggcagtggcaggagtcggctttgagtcaaagcctgggactgaggaggaagaaatcactgttgggtcctggttctggcctgaagaag

SEQ ID NO: 735984 - DNA, 120 bp, Artificial Sequence
  ENSG00000198932_28 (sequence is synthesized)
aagccagtatacaggctggatctcaggcagtagaggaaatggagtcagagactgaagaggaaaccatttttgggtcctggttctgggatggaaaagaagtcagtgaagaagcaggaccat

SEQ ID NO: 735985 - DNA, 120 bp, Artificial Sequence
  ENSG00000198932_29 (sequence is synthesized)
gctgtgtatccaagccagaggatgatgaagagatgattgttgagtcctggttctggtctagagacaaagccattaaggaaactggaactgtggccacctgtgagtccaagccagaaaatg

SEQ ID NO: 735986 - DNA, 120 bp, Artificial Sequence
  ENSG00000198932_30 (sequence is synthesized)
aggaaggggccattgttgggtcttggtttgaggctgaagatgaggtagataacaggactgacaatggaagcaactgtgggtccaggacattagctgatgaagatgaggccatagtggggt

SEQ ID NO: 735987 - DNA, 120 bp, Artificial Sequence
  ENSG00000198932_31 (sequence is synthesized)
cctggttctgggcaggagatgaggcccattttgaatcaaatcctagccccgtgttcagggccatttgcaggtccacgtgttcagttgaacaggagcctgatccttcacgcaggcctcaga

SEQ ID NO: 735988 - DNA, 120 bp, Artificial Sequence
  ENSG00000198932_32 (sequence is synthesized)
gttgggaggaggtcactgttcagttcaagcctggtccatggggtagggtcggcttcccatctataagcccctttagatttccgaaagaggcagcatctttattctgtgaaatgtttgggg

SEQ ID NO: 735989 - DNA, 120 bp, Artificial Sequence
  ENSG00000198932_33 (sequence is synthesized)
gcaaacccaggaacatggtacttagcccagaaggggaagatcaggaatctttgcttcagcctgatcagcctagtcctgagttcccatttcagtatgatccttcctacaggtcagtccagg

SEQ ID NO: 735990 - DNA, 120 bp, Artificial Sequence
  ENSG00000198932_34 (sequence is synthesized)
aaattcgagagcatcttagggccaaggagagtacagagcctgagagttcatcctgtaactgcatacaatgtgagctgaaaattggttctgaagagtttgaagaactccttttattaatgg

SEQ ID NO: 735991 - DNA, 120 bp, Artificial Sequence
  ENSG00000198932_35 (sequence is synthesized)
aaaaaattcgggatccttttattcatgaaatatctaaaatcgcaatgggtatgagaagtgcttctcaatttacccgagatttcattcgagattcaggtgttgtctcacttattgaaacct

SEQ ID NO: 735992 - DNA, 120 bp, Artificial Sequence
  ENSG00000198932_36 (sequence is synthesized)
tgcttaattatccgtcctcccgagttagaacaagttttttggaaaatatgattcgcatggccccaccttatccgaatctaaacataattcagacatacatatgtaaagtgtgtgaggaaa

SEQ ID NO: 735993 - DNA, 120 bp, Artificial Sequence
  ENSG00000198932_37 (sequence is synthesized)
cccttgcttatagcgtggattccccggaacagctgtctggaataaggatgattagacatctcactactactactgactatcacacactggttgccaattatatgtctgggtttctctcct

SEQ ID NO: 735994 - DNA, 120 bp, Artificial Sequence
  ENSG00000198932_38 (sequence is synthesized)
tattagctacaggcaatgccaaaacaaggtttcatgttttgaaaatgctactgaatttgtctgaaaatcttttcatgacaaaagaactactcagtgctgaagcagtgtcagaatttatag

SEQ ID NO: 735995 - DNA, 120 bp, Artificial Sequence
  ENSG00000198932_39 (sequence is synthesized)
gcctctttaacagggaagagacaaatgacaatattcaaattgttcttgcaatatttgagaatattggcaacaatatcaaaaaagaaacagtgttctctgatgatgatttcaatattgagc

SEQ ID NO: 735996 - DNA, 120 bp, Artificial Sequence
  ENSG00000198932_40 (sequence is synthesized)
cgcttatttctgcattccacaaagttgagaaatttgctaaggaactgcaaggcaaaacagacaatcaaaatgaccctgaaggggaccaagaaaattagtaatggttaattgctggcctca

SEQ ID NO: 735997 - DNA, 120 bp, Artificial Sequence
  ENSG00000198932_41 (sequence is synthesized)
gattgtccttatgttcctgagttatgatccttgagtaatgctttgattttaatagttggttctgtgttgcaacatatatctttagtgctgacactaactttgtccaactctgtctgtaag

SEQ ID NO: 735998 - DNA, 120 bp, Artificial Sequence
  ENSG00000198932_42 (sequence is synthesized)
ctggagcatttttctgatgccagctgaatattagagctgaaaacacatttgttgatatttgtcttgtccacattgtgatgttcagtatttgagcttatagtgaactgagcaatcataaat

SEQ ID NO: 735999 - DNA, 120 bp, Artificial Sequence
  ENSG00000198932_43 (sequence is synthesized)
aagccacccttctgattgtcgttctactgtatatatatatatatttgagtgttgtttgtgtttcaataaagtcctatgttaaagttggcagaaatcacccttcttcttgaaattaaaata

SEQ ID NO: 736000 - DNA, 120 bp, Artificial Sequence
  ENSG00000198932_44 (sequence is synthesized)
cagacccaatgataacacatgaacacacatagagataattaatatatgaataatatgttcctttcaaaagtttttttctcagctttaaacgcaaaaattaccaggggctgctatgtaggg

SEQ ID NO: 736001 - DNA, 120 bp, Artificial Sequence
  ENSG00000198932_45 (sequence is synthesized)
catacttcagagaaaaagtagctacttcggttggactctgaagtttgggaaagatattggtggtgtaaaaaaaaaaaaaagcatggagttaggaaaaattttcctatgggagtgaggtat

SEQ ID NO: 736002 - DNA, 120 bp, Artificial Sequence
  ENSG00000198932_46 (sequence is synthesized)
cctgtttgcctagagtgagtgagaggaatatattgagcaacatagaggatgacataagttttaaagagctgaggatttgcattttacagctcaaagtacaactgctgcttccatactacc

SEQ ID NO: 736003 - DNA, 120 bp, Artificial Sequence
  ENSG00000198932_47 (sequence is synthesized)
taaagggcaaaagaataagacaggaaagcatagggatttgattgagtcaggaagacaatttaatcatgatggtaccatggtaagtgttaaggcaacatcatacagccattaaacatgatg

SEQ ID NO: 736004 - DNA, 120 bp, Artificial Sequence
  ENSG00000198932_48 (sequence is synthesized)
atgtatagggttttaggaaaagccctgacatttttgatatttcatataatagagaacactggtgtcatacatgggaagtatgatcccatttgaaaaataaatgtgaataaattgaccaaa

SEQ ID NO: 736005 - DNA, 120 bp, Artificial Sequence
  ENSG00000198932_49 (sequence is synthesized)
agacacaccaagggacggtttggtatccatccgctgctccctccagcgcggctcttcgcgacctcgcgatcctgtcctccgcccggccccgcagccgcccgccggtgccatatattatag

SEQ ID NO: 736006 - DNA, 120 bp, Artificial Sequence
  ENSG00000198932_50 (sequence is synthesized)
cagcgccagaaatgtggtggtcgtcgccacgttagggtccgcggggtcctcctgaggcagcctggtgccaacccgcaggccccggctggggctcgtcctggccccgcccacctctgggtc

SEQ ID NO: 736007 - DNA, 120 bp, Artificial Sequence
  ENSG00000198932_51 (sequence is synthesized)
ggccaggccggaccaagggctgaggggctggctccagaggcaccgtcagatcgtctggaggagaaccgcgctgaccgcttcccagccagctttgcaggcgcccgcgcgcagccctcgacg

SEQ ID NO: 736008 - DNA, 120 bp, Artificial Sequence
  ENSG00000198932_52 (sequence is synthesized)
ggccagttctgcaagaaaggcaaggaggaggagactggctcacacctctggaggttggtgagaagggggagggggcaattcaggggacagttggagaaagagagcatggcaggtggcttt

SEQ ID NO: 736009 - DNA, 120 bp, Artificial Sequence
  ENSG00000198932_53 (sequence is synthesized)
gagaccagtgggtgcagacccacttctactctgctggatttgcacagtgccagcatcctttttatttcttgcaggggacatgagataggtgtaggttgtgttgtgactcagaaagacctg

SEQ ID NO: 736010 - DNA, 120 bp, Artificial Sequence
  ENSG00000198933_0 (sequence is synthesized)
gagagaagtacacacgcaccccctcactgcctactcctgctttcgggagcctgagtcattcctgccccctcgtagggttccccatttcccggtgcgcgggcaccctgagacagccttggg

SEQ ID NO: 736011 - DNA, 120 bp, Artificial Sequence
  ENSG00000198933_1 (sequence is synthesized)
aattcgttcgcgtccccttccacctgggtccccttccccagtttgcgccccgtaacactcagccaaggacttcctgtgggtcccaggtcaggggccaaggggtcctggaccgctgccaca

SEQ ID NO: 736012 - DNA, 120 bp, Artificial Sequence
  ENSG00000198933_2 (sequence is synthesized)
gccccggtgcgcccgggggaggcgcttccttttcctgaactctgggatcctgcgggaggaagtggggaagttgggcgggggtgcagccgagggcgtgccgactgtggaggggccgaccct

SEQ ID NO: 736013 - DNA, 120 bp, Artificial Sequence
  ENSG00000198933_3 (sequence is synthesized)
cgcgcagctctgggccttccttggggaggagctggggtgccagaggcccaggctgaggagcttggcggcgaggtatttggggaagtaaggcctggggtggagaagcgcggaggaatgggc

SEQ ID NO: 736014 - DNA, 120 bp, Artificial Sequence
  ENSG00000198933_4 (sequence is synthesized)
cgggcccggctgggaaggcagccctctcccatccacaggtctccctgggttctggcaggagcctgcccctgctgccggcctggcttacttgtccctacttgtcaacaccctggcagcggg

SEQ ID NO: 736015 - DNA, 120 bp, Artificial Sequence
  ENSG00000198933_5 (sequence is synthesized)
gtcttcacctggttccagccccttttccccaaggcggcagagaggatggggctgaggagtctgggaaggggccatgggagtccctgctgagctcggggcaggaagtttctgggttgcatc

SEQ ID NO: 736016 - DNA, 120 bp, Artificial Sequence
  ENSG00000198933_6 (sequence is synthesized)
ttagccggccccagggagtgcagagccagggagaggggtaccagggacaaaccctagacagacggccctgtccacggttgctcctgctctcctaggaggccccgtgtgggccgcggcccg

SEQ ID NO: 736017 - DNA, 120 bp, Artificial Sequence
  ENSG00000198933_7 (sequence is synthesized)
gccctcaccatggagtccatgttcgaggacgacatcagcatcctgacgcaggaggccctggggcctagtgaggtgtggctggacagtcccggagacccctcgcttgggggcgacatgtgc

SEQ ID NO: 736018 - DNA, 120 bp, Artificial Sequence
  ENSG00000198933_8 (sequence is synthesized)
tccgcctcccactttgccctcatcactgcttacggagacatcaaggaacggctggggggcctggagagggagaacgccaccctccgacgccgcctcaaagtctacgagatcaagtaccca

SEQ ID NO: 736019 - DNA, 120 bp, Artificial Sequence
  ENSG00000198933_9 (sequence is synthesized)
ctgatcagtgactttggagaggagcatggcttttctctgtatgaaatcaaggatggctccctgctggaggtggagaaggtcagcctgcagcaacggctcaaccagttccagcatgagtta

SEQ ID NO: 736020 - DNA, 120 bp, Artificial Sequence
  ENSG00000198933_10 (sequence is synthesized)
cagaagaacaaggagcaggaagaacagcttggagagatgatccaggcctacgagaaactctgcgtggagaagagtgacttggagacagagctgagggagatgagggccctggtggagacg

SEQ ID NO: 736021 - DNA, 120 bp, Artificial Sequence
  ENSG00000198933_11 (sequence is synthesized)
cacctgcgtcagatctgtggtttggagcagcagctgcggcaacagcaaggcctccaggatgcagccttctccaacctgagcccaccgccagcccccgcccctccctgcactgatttagac

SEQ ID NO: 736022 - DNA, 120 bp, Artificial Sequence
  ENSG00000198933_12 (sequence is synthesized)
ctgcactacctggcactgagagggggatctggcttgagtcatgcaggctggccgggctccacacccagtgtgagtgacctggagcggcggcggctagaagaggctttggaggccgcgcag

SEQ ID NO: 736023 - DNA, 120 bp, Artificial Sequence
  ENSG00000198933_13 (sequence is synthesized)
ggagaggcccggggggctcagctccgggaggagcagctccaggccgagtgcgagcggctgcagggggagctgaagcagctgcaggagacccgggcccaggatctggcctccaaccagtcg

SEQ ID NO: 736024 - DNA, 120 bp, Artificial Sequence
  ENSG00000198933_14 (sequence is synthesized)
gagcgagacatggcgtgggtgaaaagagttggggatgatcaggtgaatttggcgctggcctacaccgagctgacggaggagctgggccggcttcgggagttgagttccctacaggggaga

SEQ ID NO: 736025 - DNA, 120 bp, Artificial Sequence
  ENSG00000198933_15 (sequence is synthesized)
atcttgaggactctgttgcaggaacaggcccggagtggcggccagaggcactcgccgctgtcacaacgccactccccggccccccagtgcccctccccctccccgcctgcccgagcggct

SEQ ID NO: 736026 - DNA, 80 bp, Artificial Sequence
  ENSG00000198933_16 (sequence is synthesized)
gctctcccgtgcccccgtgcccctcgccgcagcagcgccgctctccggcctcaccctcctgcccgtcgcccgtcccgcag

SEQ ID NO: 736027 - DNA, 80 bp, Artificial Sequence
  ENSG00000198933_17 (sequence is synthesized)
gccaccgccgccgcccccgccgggcgagaggacgctggccgagcgcgcctacgccaagccgcccagccaccacgtgaagg

SEQ ID NO: 736028 - DNA, 120 bp, Artificial Sequence
  ENSG00000198933_18 (sequence is synthesized)
cgtgaaggccggcttccagggccgccgcagctactctgagctggcggagggcgcggcctacgcgggcgcctccccgccctggctgcaggccgaagcggccactctccccaagccccgggc

SEQ ID NO: 736029 - DNA, 120 bp, Artificial Sequence
  ENSG00000198933_19 (sequence is synthesized)
ctacggcagcgagctctacggccctggcaggcccctcagcccgcggcgcgccttcgagggcatccggctgcgcttcgagaagcagccgtcggaggaggacgagtgggctgtgcccaccag

SEQ ID NO: 736030 - DNA, 120 bp, Artificial Sequence
  ENSG00000198933_20 (sequence is synthesized)
cccgcccagcccggaggtgggcaccatccgctgcgcctccttctgcgcgggcttccccatccccgagtcgcccgccgccaccgcctacgcccacgccgagcacgcgcagtcctggccgtc

SEQ ID NO: 736031 - DNA, 120 bp, Artificial Sequence
  ENSG00000198933_21 (sequence is synthesized)
catcaacttgctgatggagacggtgggctccgacatccgcagctgccccctctgccagctgggtttccctgtcgggtacccggatgatgccctcatcaaacacattgactcccacctgga

SEQ ID NO: 736032 - DNA, 120 bp, Artificial Sequence
  ENSG00000198933_22 (sequence is synthesized)
gaacagcaagatctagggcaccagccccacccactggctgtttctccgtcctctcctatcacccccaaacactcactttgaatgctgcatgaatctcgtggggggtccctgcccttgcga

SEQ ID NO: 736033 - DNA, 120 bp, Artificial Sequence
  ENSG00000198933_23 (sequence is synthesized)
cccccagatacctccacttgctaccgagtcaacgtgtgtgccatcttccctggtccaggcaccactcagctctggctcttcctgggaggtcagccgaggctccccccatgctcctggttt

SEQ ID NO: 736034 - DNA, 120 bp, Artificial Sequence
  ENSG00000198933_24 (sequence is synthesized)
ctgcttaggaggtggggacttgggctgggatggggacggcatacccctcccaggcctctccctctgcctttctgttcttaatcagggttggatccaagaaggtgtccagtgcttgggcct

SEQ ID NO: 736035 - DNA, 120 bp, Artificial Sequence
  ENSG00000198933_25 (sequence is synthesized)
ggggtggggggaaggtgttagaggactccaggagctcctgcacccctccccaaatgtccatctttctcagacggggctctgtctggggagcacccacaggctgcctttggggtcccagag

SEQ ID NO: 736036 - DNA, 120 bp, Artificial Sequence
  ENSG00000198933_26 (sequence is synthesized)
cctgctctgtgcactgaccccagttcctccatcctgtggccagcctagggctcatggcatgggcccccactgggggagggaggcatcttgtttcttgtggttccctgcaggccagtcctg

SEQ ID NO: 736037 - DNA, 120 bp, Artificial Sequence
  ENSG00000198933_27 (sequence is synthesized)
tcctcctttccctgttctgcccactctggggaatagggaggggaggagaggagaggagagggaggatcctggaggactgggaagatctagcctaaagaggcttctctgagggccagggcc

SEQ ID NO: 736038 - DNA, 120 bp, Artificial Sequence
  ENSG00000198933_28 (sequence is synthesized)
ctacagcatgcccctacggccaggggactgtctgccagcctcccaggcccatgccctcctggtgcccctggcactgaggcacagatcgtcaaggcaggtaccccctcaacccttcttcca

SEQ ID NO: 736039 - DNA, 120 bp, Artificial Sequence
  ENSG00000198933_29 (sequence is synthesized)
ctggagcccctgacaccacaggtgccctggagcccttgtgtgactcagcctctgttagctgggtgggtgtcatcagcccctgcctcccaggccagaacctgagaacgggcccagggtgct

SEQ ID NO: 736040 - DNA, 120 bp, Artificial Sequence
  ENSG00000198933_30 (sequence is synthesized)
gtggagatcaacttcaaaagagctaaccccttcccacactccacccacccacctacatttcctctgtgaaatctacctcagagttgtaccctcagaaggacgggtaagcaggaggccagg

SEQ ID NO: 736041 - DNA, 120 bp, Artificial Sequence
  ENSG00000198933_31 (sequence is synthesized)
gggtccccagggctgaggtggggagccttctacggcgaaagcctgccaccccacaatgaatccaccctgctccactgcgcgcctctcccaggtctcagctctgggtggggagcagtggcc

SEQ ID NO: 736042 - DNA, 120 bp, Artificial Sequence
  ENSG00000198933_32 (sequence is synthesized)
gctaccgacagcgcatgtcccgctcttatccaactcttccaggccccacctccctgcacccctcccctctatagagcaggggagtgaaggggtatgtcaggcggggaaggggccaaggac

SEQ ID NO: 736043 - DNA, 120 bp, Artificial Sequence
  ENSG00000198933_33 (sequence is synthesized)
acgtcattgtaccctgagcgtccccagggagtggaaatggggaagggggcctggagaggggaggcaggggcccctgtgctctctgaacaagttgaaagtccaaataaaacttacctgttc

SEQ ID NO: 736044 - DNA, 120 bp, Artificial Sequence
  ENSG00000198933_34 (sequence is synthesized)
gacagggcgaggagcagagcgcggtaccaggggggtgggggcactggtgcccgtttggggagggagcaggcggagggggtaagctgcgattacaagcaggaaccggcagcagctgaggcc

SEQ ID NO: 736045 - DNA, 120 bp, Artificial Sequence
  ENSG00000198934_0 (sequence is synthesized)
acagtgagactagcattcactgctggccagtgcctgcctttttcaccacctctaatttcagcttcagcagttgcttggaactttggttctggcagcagcagcaacatcattaccgctagc

SEQ ID NO: 736046 - DNA, 120 bp, Artificial Sequence
  ENSG00000198934_1 (sequence is synthesized)
ggcagttttgtgccgaggcacctacacacctcccgtcctctctgccagatcgcgggcctgtcggtgtctgctcctacacgccaacgccggtgggcaggaccatgtctctggtaagccaga

SEQ ID NO: 736047 - DNA, 120 bp, Artificial Sequence
  ENSG00000198934_2 (sequence is synthesized)
attcgcgccgccgccgccgccgcgttgcaaaggctactgcgcacaacagcagctggggcgaaatgcaggcccctaatgcccccggtctccccgctgatgtgccaggctcagacgtccccc

SEQ ID NO: 736048 - DNA, 120 bp, Artificial Sequence
  ENSG00000198934_3 (sequence is synthesized)
agggtcccagcgattcccagatcctccagggcctctgcgcctctgagggcccaagcacctccgttctgcccacctccgctgagggcccaagcacctttgtgccgcccaccatctctgagg

SEQ ID NO: 736049 - DNA, 120 bp, Artificial Sequence
  ENSG00000198934_4 (sequence is synthesized)
cctcaagcgcctccgggcagcccaccatctctgagggacctggcacctccgtgctgcccacccccagtgagggcctaagcacctccgggcctcccaccatctctaaggggctgtgcacct

SEQ ID NO: 736050 - DNA, 120 bp, Artificial Sequence
  ENSG00000198934_5 (sequence is synthesized)
ctgtgacgcttgccgcctctgagggccggaacacctccaggccgcccacttcctctgaggaacctagcacctccgtgccgcccaccgcctctgaggtaccgagcacctccctgccgccca

SEQ ID NO: 736051 - DNA, 120 bp, Artificial Sequence
  ENSG00000198934_6 (sequence is synthesized)
cccctggtgagggaacgagcacctccgtgccgcccacagcctatgagggaccaagcacctccgtggtgcccacccctgatgagggaccaagcacctccgtgctgcctacacctggtgagg

SEQ ID NO: 736052 - DNA, 120 bp, Artificial Sequence
  ENSG00000198934_7 (sequence is synthesized)
gaccaggcacctccgtgccgctcgccgccactgagggcctgagcacctccgtgcaggccactcctgatgagggaccgagcacctccgtgccgcccaccgccactgagggcctaagcaccc

SEQ ID NO: 736053 - DNA, 120 bp, Artificial Sequence
  ENSG00000198934_8 (sequence is synthesized)
ccgtgccacccacccgtgatgagggaccgagcacctccgtgccggccactcctggtgagggaccgagcacctccgtgctgcccgccgcctctgacggacaaagcatctccttggtgccca

SEQ ID NO: 736054 - DNA, 120 bp, Artificial Sequence
  ENSG00000198934_9 (sequence is synthesized)
cccgcggtaagggatcaagcacctccgtgccccccaccgccaccgagggcctgagcacctccgtgcagcccactgctggtgagggatcgagcacctccgtgccgcccacccctggtgggg

SEQ ID NO: 736055 - DNA, 120 bp, Artificial Sequence
  ENSG00000198934_10 (sequence is synthesized)
gactgagcacctccgtgccgcccaccgccactgaggagttgagcacctccgtgccgcccactcccggtgagggaccaagcacttccgtactgccaatccccggtgagggactgagcacct

SEQ ID NO: 736056 - DNA, 120 bp, Artificial Sequence
  ENSG00000198934_11 (sequence is synthesized)
ctgtgccgcccaccgcctctgatggatcggacacctccgtgccgcccactcctggtgagggcgcaagcaccttagtgcagcccaccgcccctgacggaccgggaagctccgtgctgccta

SEQ ID NO: 736057 - DNA, 120 bp, Artificial Sequence
  ENSG00000198934_12 (sequence is synthesized)
accctggtgagggcccgagcacattgtttagctctagtgcttctgtggaccggaacccctccaagtgttcccttgttttgccaagccctagggtaaccaaggcctccgtggactcagatt

SEQ ID NO: 736058 - DNA, 120 bp, Artificial Sequence
  ENSG00000198934_13 (sequence is synthesized)
ctgagggtcctaagggtgcagaaggccctatagaattcgaggtcctgagagactgtgagagccccaactccattagtattatgggcctcaatacttcccgggttgcaattaccctgaagc

SEQ ID NO: 736059 - DNA, 120 bp, Artificial Sequence
  ENSG00000198934_14 (sequence is synthesized)
cccaagaccctatggaacagaacgtagctgagctgttgcagttcctgctggtgaaggatcagagcaagtaccctatccgggagtctgaaatgcgggaatatattgttaaagaatatcgca

SEQ ID NO: 736060 - DNA, 120 bp, Artificial Sequence
  ENSG00000198934_15 (sequence is synthesized)
cccacctggagtgcatttttaggtttgaattgagagaacttgaccctgaggcacacacctacattctgttaaacaaactgggacctgtgccctttgaagggttagaagagagcccaaatg

SEQ ID NO: 736061 - DNA, 120 bp, Artificial Sequence
  ENSG00000198934_16 (sequence is synthesized)
ggccaaagatgggcctcctgatgatgattctaggccaaatattcctgaatggcaaccaagccaaggaggctgagatttgggaaatgctctggaggatgggggtgcagcgggaaaggaggc

SEQ ID NO: 736062 - DNA, 120 bp, Artificial Sequence
  ENSG00000198934_17 (sequence is synthesized)
tttccatttttgggaacccaaagagacttctgtctgtggagtttgtatggcagcgttacttagactacaggccagtaactgactgtaaaccagtggagtatgagtttttctggggcccaa

SEQ ID NO: 736063 - DNA, 120 bp, Artificial Sequence
  ENSG00000198934_18 (sequence is synthesized)
gatcccacctagaaaccaccaagatgaaaattctgaagttcatggcgaaaatatataacaaagatcctatggattggccagagaaatacaacgaagctctggaagaagatgctgccagag

SEQ ID NO: 736064 - DNA, 120 bp, Artificial Sequence
  ENSG00000198934_19 (sequence is synthesized)
cctttgctgagggttggcaggctctccctcactttaggaggcccttttttgaggaagctgctgcagaggtaccatcccctgattcagaggtttccagctattcctcaaaatatgccccac

SEQ ID NO: 736065 - DNA, 120 bp, Artificial Sequence
  ENSG00000198934_20 (sequence is synthesized)
attcatggcctgagtcaagattggagagcaaggcaaggaagctggtgcagttatttctgcttatggattcaactaagctgcctataccaaagaaaggaattctgtactacattggccgag

SEQ ID NO: 736066 - DNA, 120 bp, Artificial Sequence
  ENSG00000198934_21 (sequence is synthesized)
agtgcagcaaagtgttccctgacctcctgaatcgtgctgcccgcaccctgaaccatgtctatgggacagaactagtggtacttgatcccaggaatcactcctatactctgtacaaccgaa

SEQ ID NO: 736067 - DNA, 120 bp, Artificial Sequence
  ENSG00000198934_22 (sequence is synthesized)
gggagatggaagaaactgaggagatcgtagacagtccaaacaggcctggcaacaactttttgatgcaggtcctaagcttcatctttattatgggcaaccatgccagggagtctgcagtct

SEQ ID NO: 736068 - DNA, 120 bp, Artificial Sequence
  ENSG00000198934_23 (sequence is synthesized)
gggcctttctgcggggcttaggggttcaagctgggagaaagcatgtgattacctgcagatacttgagtcagcgctatatagacagtttacgggttcctgacagtgatccagtgcaatatg

SEQ ID NO: 736069 - DNA, 120 bp, Artificial Sequence
  ENSG00000198934_24 (sequence is synthesized)
agtttgtatggggtcctagagcccgtttggaaacctctaagatgaaagccttgcgatatgtggccagaatccacagaaaggaaccacaggactggccacagcagtacagggaggcaatgg

SEQ ID NO: 736070 - DNA, 120 bp, Artificial Sequence
  ENSG00000198934_25 (sequence is synthesized)
aagatgaggccaatagagctgatgttgggcacaggcaaatctttgttcacaacttcaggtagaggaatgcatggcagtcagaggggccttgcaaggaggggcctttgagcctcagttctc

SEQ ID NO: 736071 - DNA, 120 bp, Artificial Sequence
  ENSG00000198934_26 (sequence is synthesized)
atgtattggggggtgggggtgggtacatattgtatttggtatttgtgttccagttatatttatgtcttttcatatttagttctggtgtggtgtctggaaatgtttcaactgttttaatat

SEQ ID NO: 736072 - DNA, 120 bp, Artificial Sequence
  ENSG00000198934_27 (sequence is synthesized)
attgtctgattgggtaaatgtgattgaccacttgctgtctctgttgtattttggtatgagttttgatagctctataaaatgttttggaaatctttccatcttgttgcattatctagaaaa

SEQ ID NO: 736073 - DNA, 120 bp, Artificial Sequence
  ENSG00000198934_28 (sequence is synthesized)
gaatatagcatatagctatagatataggcttttccttgaaagcttgaaaaaaattcgccagtaaaataatctagcttaaagtgataaactaacaaacaaatataacaacaactgaaaagg

SEQ ID NO: 736074 - DNA, 120 bp, Artificial Sequence
  ENSG00000198934_29 (sequence is synthesized)
cactctaaattgtggctggcttccctttctgtctgctattgtatgaagaatactgatgtttacctgtatttgctttgctgtactaaaatgtaatgaaaaataaaagattaataaatgaaa

SEQ ID NO: 736075 - DNA, 120 bp, Artificial Sequence
  ENSG00000198937_0 (sequence is synthesized)
agtgatgactgggggatcccggcaagtaacatgactaaaaagaagcgggagaatctgggcgtcgctctagagatcgatgggctagaggagaagctgtcccagtgtcggagagacctggag

SEQ ID NO: 736076 - DNA, 120 bp, Artificial Sequence
  ENSG00000198937_1 (sequence is synthesized)
gccgtgaactccagactccacagccgggagctgagcccagaggccaggaggtccctggagaaggagaaaaacagcctaatgaacaaagcctccaactacgagaaggaactgaagtttctt

SEQ ID NO: 736077 - DNA, 120 bp, Artificial Sequence
  ENSG00000198937_2 (sequence is synthesized)
cttccccacaaccagcacaggcttccacttggccccttgatcaggatcaagcaggcacttcaagcctcaataggaccaaggtgctggggtgttcccctcccaacctagtgttcaagcatg

SEQ ID NO: 736078 - DNA, 120 bp, Artificial Sequence
  ENSG00000198937_3 (sequence is synthesized)
gcttcctggcggcccaggccttgcctccctggcctgctggggggttccgggtctccagaaggacatggtgctggtccctcccttagcccaagggagaggcaataaagaacacaaagctgt

SEQ ID NO: 736079 - DNA, 120 bp, Artificial Sequence
  ENSG00000198938_0 (sequence is synthesized)
atgacccaccaatcacatgcctatcatatagtaaaacccagcccatgacccctaacaggggccctctcagccctcctaatgacctccggcctagccatgtgatttcacttccactccata

SEQ ID NO: 736080 - DNA, 120 bp, Artificial Sequence
  ENSG00000198938_1 (sequence is synthesized)
acgctcctcatactaggcctactaaccaacacactaaccatataccaatgatggcgcgatgtaacacgagaaagcacataccaaggccaccacacaccacctgtccaaaaaggccttcga

SEQ ID NO: 736081 - DNA, 120 bp, Artificial Sequence
  ENSG00000198938_2 (sequence is synthesized)
tacgggataatcctatttattacctcagaagtttttttcttcgcaggatttttctgagccttttaccactccagcctagcccctaccccccaattaggagggcactggcccccaacaggc

SEQ ID NO: 736082 - DNA, 120 bp, Artificial Sequence
  ENSG00000198938_3 (sequence is synthesized)
tatcaatcacctgagctcaccatagtctaatagaaaacaaccgaaaccaaataattcaagcactgcttattacaattttactgggtctctattttaccctcctacaagcctcagagtact

SEQ ID NO: 736083 - DNA, 120 bp, Artificial Sequence
  ENSG00000198938_4 (sequence is synthesized)
tcgagtctcccttcaccatttccgacggcatctacggctcaacattttttgtagccacaggcttccacggacttcacgtcattattggctcaactttcctcactatctgcttcatccgcc

SEQ ID NO: 736084 - DNA, 120 bp, Artificial Sequence
  ENSG00000198938_5 (sequence is synthesized)
aactaatatttcactttacatccaaacatcactttggcttcgaagccgccgcctgatactggcattttgtagatgtggtttgactatttctgtatgtctccatctattgatgagggtctt

SEQ ID NO: 736085 - DNA, 120 bp, Artificial Sequence
  ENSG00000198939_0 (sequence is synthesized)
gggctgtaagcgccggtcgcggctgtgtcggtcgccgctgctcccgctcctgctgggagaggtttcaggagtcagtgaccttcaaggatgtgtccatagatttctcttgggaagagtgga

SEQ ID NO: 736086 - DNA, 120 bp, Artificial Sequence
  ENSG00000198939_1 (sequence is synthesized)
ttcaagcagattctgctcagaggatgaccgtgtatggggaggtgatgctggagaactacaggaacccggtctcactgggaaatcacctttccaaacccaatgggacttcccagctggaac

SEQ ID NO: 736087 - DNA, 120 bp, Artificial Sequence
  ENSG00000198939_2 (sequence is synthesized)
gagaactgagtctgatgcaaaaagaaccgcctgagggtggctttcgagattttcttggatattgctgtcagattaatctgacatttagtcctctcattatcctgtcccagtcaaggggag

SEQ ID NO: 736088 - DNA, 120 bp, Artificial Sequence
  ENSG00000198939_3 (sequence is synthesized)
aaagtattgactgagtgctgtgctcagctcttccacagccagcatctcacttacttgacacaaaacatctatagactgggagacaagacttgaaaccaaagagccaactccgaagccggg

SEQ ID NO: 736089 - DNA, 120 bp, Artificial Sequence
  ENSG00000198939_4 (sequence is synthesized)
tattactgaagatttatgccatggggtaacaatggaaagggaaggtatctggcattctactctaggggaaacctgggaacctaataattggttagagggacaacaggatagtcatctgag

SEQ ID NO: 736090 - DNA, 120 bp, Artificial Sequence
  ENSG00000198939_5 (sequence is synthesized)
ccaagtgggagttacccataaggaaaccttcactgagatgagagtatgtggaggtaatgaatttgaaagatgttccagtcaggattcaatccttgatacacagcaaagcattcctatggt

SEQ ID NO: 736091 - DNA, 120 bp, Artificial Sequence
  ENSG00000198939_6 (sequence is synthesized)
aaaaaggccccataactgtaattcacatggagaagatgccacacaaaattctgagttaattaaaactcaaagaatgtttgtaggaaagaagatctatgaatgtaatcagtgcagcaaaac

SEQ ID NO: 736092 - DNA, 120 bp, Artificial Sequence
  ENSG00000198939_7 (sequence is synthesized)
cttcagtcagagctcatcccttcttaagcaccagaggattcatactggggagaaaccctataagtgtaatgtatgtgggaaacacttcattgaacgatcctcccttactgtacatcaaag

SEQ ID NO: 736093 - DNA, 120 bp, Artificial Sequence
  ENSG00000198939_8 (sequence is synthesized)
aattcatactggagagaaaccctataaatgtaatgaatgtgggaaagcctttagtcagagcatgaatcttactgtccatcaacgaactcacaccggagagaaaccctatcagtgtaaaga

SEQ ID NO: 736094 - DNA, 88 bp, Artificial Sequence
  ENSG00000198939_9 (sequence is synthesized)
aacgaactcacaccggagagaaaccctatcagtgtaaagagtgtggcaaagccttccataagaattcatctcttattcagcatgaaag

SEQ ID NO: 736095 - DNA, 120 bp, Artificial Sequence
  ENSG00000198939_10 (sequence is synthesized)
agaactcatacaggagaaaaaccctatgaatgtaatgaatgtggaaaagccttcagtcaaagcatgcatcttattgtacatcagagaagccatactggagaaaaaccctatgagtgtagt

SEQ ID NO: 736096 - DNA, 120 bp, Artificial Sequence
  ENSG00000198939_11 (sequence is synthesized)
caatgtggaaaagcctttagtaagagctcaactcttaccctacatcagcgaaatcacactggagaaaaaccttacaaatgtaacaaatgcgggaaatcctttagccaaagtacatatctt

SEQ ID NO: 736097 - DNA, 120 bp, Artificial Sequence
  ENSG00000198939_12 (sequence is synthesized)
atagaacatcagagacttcattctggagtaaaaccttttgaatgtaacgagtgtggaaaagctttcagtaagaattcatctctaactcaacatcggagaattcacactggagagaaacct

SEQ ID NO: 736098 - DNA, 120 bp, Artificial Sequence
  ENSG00000198939_13 (sequence is synthesized)
tatgagtgtatggtgtgtggaaaacatttcactggacgatcatcccttaccgtgcatcaggtcattcacactggagagaaaccttatgagtgcaatgaatgtggaaaggcattcagccag

SEQ ID NO: 736099 - DNA, 120 bp, Artificial Sequence
  ENSG00000198939_14 (sequence is synthesized)
agtgcttaccttattgaacatcaaagaattcatactggtgagaaaccctatgaatgtgatcagtgtggaaaagccttcattaagaattcatcccttacagtgcatcagagaactcataca

SEQ ID NO: 736100 - DNA, 120 bp, Artificial Sequence
  ENSG00000198939_15 (sequence is synthesized)
ggagagaaaccctatcagtgtaatgaatgcggaaaagccttcagccggagtacaaaccttacacgacatcaaagaactcatacgtgaggaatgttttcactggcccttacctcatgatta

SEQ ID NO: 736101 - DNA, 120 bp, Artificial Sequence
  ENSG00000198939_16 (sequence is synthesized)
actcttcagtaataatcatatgagacatacaatgtagaaacctaataaatgtaatgattgtgggaatctttcagttgaagtacaatatgtcatatcagataataccactgcagagaatcc

SEQ ID NO: 736102 - DNA, 120 bp, Artificial Sequence
  ENSG00000198939_17 (sequence is synthesized)
atctaaaagtagagaaatcttgattcagaatgtataatttcctttatatcagaaggtttaaatagctaatataaacaatgaagagtcatgctgaagataagttctgttatatcataccgc

SEQ ID NO: 736103 - DNA, 120 bp, Artificial Sequence
  ENSG00000198939_18 (sequence is synthesized)
acattctcctttggctatcagagactttacactggagagaaaaatgtgagagtgtttaactggacagcccagagacctggtatgtagtcctaatctgccactgccttggacaacttgcct

SEQ ID NO: 736104 - DNA, 120 bp, Artificial Sequence
  ENSG00000198939_19 (sequence is synthesized)
acttccaccaggttatggttctttatttggtaaatgaatgattttggagttagaaatcttgtaggagctctgttagctctaaaatgctacaactctataaatataatgaatgctgggaaa

SEQ ID NO: 736105 - DNA, 120 bp, Artificial Sequence
  ENSG00000198939_20 (sequence is synthesized)
cccggtctcactgggaaatcacctttccaaacccaatgggacttcccagctggaacgagaactgagtctgatgcaaaaagaaccgcctgagggtggctttcgagatggagtctcgctgtg

SEQ ID NO: 736106 - DNA, 120 bp, Artificial Sequence
  ENSG00000198939_21 (sequence is synthesized)
cccggtctcactgggaaatcacctttccaaacccaatgggacttcccagctggaacgagaactgagtctgatgcaaaaagaaccgcctgagggtggctttcgagccgggcatggttgcgt

SEQ ID NO: 736107 - DNA, 120 bp, Artificial Sequence
  ENSG00000198944_0 (sequence is synthesized)
acctgtaaggcgagcgcggcgcgggggatggaagcaggcgcccattggacagaatacaaaggcagaaacctaccccgaaggccggggcccggcggggcgctgggggtgggcgctccccgc

SEQ ID NO: 736108 - DNA, 80 bp, Artificial Sequence
  ENSG00000198944_1 (sequence is synthesized)
ggcccccggcgcccttcgccccgagacgccccggcccagcggcactggcgcgaccgaggtccagcttcggggacacgccc

SEQ ID NO: 736109 - DNA, 80 bp, Artificial Sequence
  ENSG00000198944_2 (sequence is synthesized)
caccatggcgctggccgccgccgccgccgctgcggctgccggggtgagccaggcggcggtgctgggcttcctgcaggagc

SEQ ID NO: 736110 - DNA, 120 bp, Artificial Sequence
  ENSG00000198944_3 (sequence is synthesized)
tgagccaggcggcggtgctgggcttcctgcaggagcacggcgggaaggtgcgcaactccgagctgctgagccgcttcaagccgctgctcgatgccggcgacccgcggggccgcgccgccc

SEQ ID NO: 736111 - DNA, 120 bp, Artificial Sequence
  ENSG00000198944_4 (sequence is synthesized)
gcagggaccgcttcaagcagttcgtcaacaacgtggcggtggtgaaggagctcgacggcgtcaagttcgtggtgctgaggaagaagccccggcccccggagcccgagcccgcacccttcg

SEQ ID NO: 736112 - DNA, 120 bp, Artificial Sequence
  ENSG00000198944_5 (sequence is synthesized)
cccgggggcagcggcccagccgtcgaaacccacttcgacggtcttgccgcggagcgcctctgccccgggagctccgcccttggtccgggtgccgcggccagtggagccgccaggggacct

SEQ ID NO: 736113 - DNA, 120 bp, Artificial Sequence
  ENSG00000198944_6 (sequence is synthesized)
acctgggtctgccaacagagccacaggacaccccgggggggccggcctccgagcccgctcagccgcccggggagcggtccgccgacccaccgcttccagcccttgagctagcccaggcca

SEQ ID NO: 736114 - DNA, 120 bp, Artificial Sequence
  ENSG00000198944_7 (sequence is synthesized)
ccgagagaccctccgcagacgcggccccaccgcctagggccccttctgaggcggcatcgccctgctctgatccgccagacgcggagcccgggcccggggcagcgaaagggccgccgcagc

SEQ ID NO: 736115 - DNA, 120 bp, Artificial Sequence
  ENSG00000198944_8 (sequence is synthesized)
cagcagaagccctgtatgctgccggtgcgctgcgtcccggcccccgccacgctccgcctccgggcggaggagcccggcctgcgccggcagctgtcggaggagccgagcccgcggagctcc

SEQ ID NO: 736116 - DNA, 120 bp, Artificial Sequence
  ENSG00000198944_9 (sequence is synthesized)
tgctgctgaggcggctctcggtggaagagtccggtctgggcctcggcctgggcccgggccgctccccgcacctgaggcgcctgtcgcgcgccggcccgcgtctgctgagccctgacgccg

SEQ ID NO: 736117 - DNA, 120 bp, Artificial Sequence
  ENSG00000198944_10 (sequence is synthesized)
ctgagccctgacgccgaggagttgcccgccgcgccgccgccgtccgcggtgcccctggagccgtccgagcacgagtggctcgtgcggactgccgggggccgctggacccaccagctgcac

SEQ ID NO: 736118 - DNA, 120 bp, Artificial Sequence
  ENSG00000198944_11 (sequence is synthesized)
accgcggcttggcggccaagcgcgacttcatgtctggcttcacggccctgcattgggccgccaagagcggcgacggcgagatggcgctgcagctggtggaggtcgcgcggcgcagtggcg

SEQ ID NO: 736119 - DNA, 120 bp, Artificial Sequence
  ENSG00000198944_12 (sequence is synthesized)
caccagtcgacgtgaacgcacgctcccacggcggctacacgccgctgcacctggctgcactgcacggccacgaggacgctgccgtgctgctggtggtgcgtctgggtgcccaggtgcacg

SEQ ID NO: 736120 - DNA, 120 bp, Artificial Sequence
  ENSG00000198944_13 (sequence is synthesized)
tgcgtgatcacagcgggcgtcgcgcctaccagtacctgcggcccggctcctcgtacgcgctgcgccgccttcttggcgatccaggcctgcgaggcaccacggagccagatgcgaccggtg

SEQ ID NO: 736121 - DNA, 120 bp, Artificial Sequence
  ENSG00000198944_14 (sequence is synthesized)
agtggcagtcttgctgccaggcgccccgtacaggtggccgccaccatcctcagttccaccaccagtgcatttctgggcgtcctggctgacgacctcatgctccaggacctggcccgaggc

SEQ ID NO: 736122 - DNA, 120 bp, Artificial Sequence
  ENSG00000198944_15 (sequence is synthesized)
ttgaagaagtcgagctccttcagcaagttcttgagcgcctcgcccatggctccacgtaaaaagacaaagatccgcggtggtctgccagccttctcagaaatctctcgtcgacctactccg

SEQ ID NO: 736123 - DNA, 120 bp, Artificial Sequence
  ENSG00000198944_16 (sequence is synthesized)
gggcctttagctggtctagtgcccagtttgcctccaacaacctgaaggtccctggggctaccacctggttgatctatcgtggcctgctcgtcgcagtccaaacccgcccaagactgcagc

SEQ ID NO: 736124 - DNA, 120 bp, Artificial Sequence
  ENSG00000198944_17 (sequence is synthesized)
ccaatcaacgcctggagcctcattctgtttccagctttgtccagggcagcctgttttacccagatgggcctgcacctccagcttctttctgaagcatgacccatctccagagatgggatt

SEQ ID NO: 736125 - DNA, 120 bp, Artificial Sequence
  ENSG00000198944_18 (sequence is synthesized)
tgagaaatcagtgagagcttcctataaagaactccaggagacaggcctgaactctagagggaacttgaaatccagggtcaaaggttaaggggcagcagctggtctggcccctgaaagcct

SEQ ID NO: 736126 - DNA, 120 bp, Artificial Sequence
  ENSG00000198944_19 (sequence is synthesized)
tcacctgatgcctctgcagctacacaatcccaagacagagctagagcaagggtctctttaaatgttgaaagatgttaggttgtcagctttaagatatgtggtggttttgtaatttgatgc

SEQ ID NO: 736127 - DNA, 120 bp, Artificial Sequence
  ENSG00000198944_20 (sequence is synthesized)
ttttattctgtttttaaattgaaatgaggtaatgcaactttcgtaataaccttttggaattatatttttccacttttaggcaaagtgcttagacattttcaattttttttttgctaaata

SEQ ID NO: 736128 - DNA, 120 bp, Artificial Sequence
  ENSG00000198944_21 (sequence is synthesized)
ctttggaattctatttaaaaaatagatgatcaagatctaaaggaaattaatcccaaccaacaaacttaaaagtttatctacctcgttttaggcaatcaagattctggagagtcttgaaca

SEQ ID NO: 736129 - DNA, 120 bp, Artificial Sequence
  ENSG00000198944_22 (sequence is synthesized)
cagaataacgattgtgaccattatgaatgtaactaatttcagttgtactgtgaatgctaaatatttgcaaacaagtacatcttgaaagtaaaggtgacttagagaaaagagacattttga

SEQ ID NO: 736130 - DNA, 120 bp, Artificial Sequence
  ENSG00000198944_23 (sequence is synthesized)
cagatacttttaatttgtggttgtctccatcatgaaatagaaacgtgtttggcacttgtgggtggctattttgatttggcatgactacttaattttttaaaaaaattgtggtttgtgaat

SEQ ID NO: 736131 - DNA, 120 bp, Artificial Sequence
  ENSG00000198944_24 (sequence is synthesized)
tgcacctttgtgccatgtttctgaatctggttttcaaatccagtggagcctttcagtgaaataggtgactattaaaaaagtaatagtattacagaaaaatgagcgattaaatagtaatgg

SEQ ID NO: 736132 - DNA, 120 bp, Artificial Sequence
  ENSG00000198944_25 (sequence is synthesized)
atacaattaaggagcaactattttatatgactgttctgtacaaacaaaaagtatgtaatacccattttaaaaaaccatttgaaagtagacaacttattccaaaatagcaaatgcagaatc

SEQ ID NO: 736133 - DNA, 120 bp, Artificial Sequence
  ENSG00000198944_26 (sequence is synthesized)
tctgctcagtgagcttggatgagtggcttaacttctctgggcctttgttcctatctgtaaatgagaaagtttgtagatattgccaagatttcccaggctcaatacagtgtaattatttta

SEQ ID NO: 736134 - DNA, 120 bp, Artificial Sequence
  ENSG00000198944_27 (sequence is synthesized)
tgttttaaagatatgaaatctgtttactcaaccaattttttaaatgtcatattgtgataatgctctgcttttgcaaattgtgtttgcatgtcattagttatatcaaatagttttgtggca

SEQ ID NO: 736135 - DNA, 120 bp, Artificial Sequence
  ENSG00000198944_28 (sequence is synthesized)
tggggtagtggagcttccctccccacccccatatgtatcagtgaagcctttgaaattacttaaggcagtctttcatggaatgttttgattgagcaatgaaataaacagtcctccattttg

SEQ ID NO: 736136 - DNA, 120 bp, Artificial Sequence
  ENSG00000198945_0 (sequence is synthesized)
acatgcgcattgcgcccgcagccctggaccatttgtcaggactactcgtgagacggagaaaaaaaaaagagaaaatttggggaacccttaggagaaatcttgagagtggacagcaattgt

SEQ ID NO: 736137 - DNA, 120 bp, Artificial Sequence
  ENSG00000198945_1 (sequence is synthesized)
gaagatcgccagagagttctgtgtttcatcaccgccgaaaggttaaaaaataaatcatgactgaatctgcctctagcacaagtggtcaagagtttgatgtgttcagtgttatggactgga

SEQ ID NO: 736138 - DNA, 120 bp, Artificial Sequence
  ENSG00000198945_2 (sequence is synthesized)
aagatggagtgggcacgttaccaggaagtgacttaaagtttcgggtaaatgagtttggagccctggaagttattacagatgagaatgagatggaaaatgttaaaaaagcaactgctacca

SEQ ID NO: 736139 - DNA, 120 bp, Artificial Sequence
  ENSG00000198945_3 (sequence is synthesized)
ccacttggatggtaccaactgctcaagaagccccgacctctcccccgagctccaggcccgtatttccacctgcctactggacatctccacctggatgtcccacagtcttttcagagaaga

SEQ ID NO: 736140 - DNA, 120 bp, Artificial Sequence
  ENSG00000198945_4 (sequence is synthesized)
ctgggatgcctttcaggttgaaggatccagtgaaagtagaagggcttcagttctgtgagaactgttgtcagtatggcaacgtagatgagtgtctttctggaggaaactattgcagccaga

SEQ ID NO: 736141 - DNA, 120 bp, Artificial Sequence
  ENSG00000198945_5 (sequence is synthesized)
attgtgctcggcacatcaaagataaagatcagaaggaagaaagggacgtagaagaagacaatgaggaagaagatcctaagtgtagtcggaagaaaaaaccaaaattatctctgaaagctg

SEQ ID NO: 736142 - DNA, 120 bp, Artificial Sequence
  ENSG00000198945_6 (sequence is synthesized)
acaccaaggaggatggagaagagagagatgatgaaatggagaacaaacaagatgtaagaatcctgaggggttcgcagagagcacggaggaaaagacgaggggattcggctgtactaaagc

SEQ ID NO: 736143 - DNA, 120 bp, Artificial Sequence
  ENSG00000198945_7 (sequence is synthesized)
agggtttgcctcctaaaggaaagaaagcgtggtgctgggcatcctacctggaagaggagaaagcggtggcagtgccggcgaagctgttcaaggagcatcaatcctttccatataacaaaa

SEQ ID NO: 736144 - DNA, 120 bp, Artificial Sequence
  ENSG00000198945_8 (sequence is synthesized)
atggattcaaagttggcatgaaattagaaggcgtggatcctgagcatcagtctgtgtactgtgtcctcaccgtcgcggaggtttgtggataccggataaagcttcactttgatgggtatt

SEQ ID NO: 736145 - DNA, 120 bp, Artificial Sequence
  ENSG00000198945_9 (sequence is synthesized)
ctgattgctatgacttctgggtgaatgcagacgctctggatatccacccagttgggtggtgtgagaaaaccggccacaaactccatcctccaaaagggtataaagaagaagaattcaatt

SEQ ID NO: 736146 - DNA, 120 bp, Artificial Sequence
  ENSG00000198945_10 (sequence is synthesized)
ggcagacctatcttaagacatgtaaagctcaagctgctcctaagtcattatttgaaaatcagaatataacagtgatcccatcgggctttcgagttggtatgaagcttgaggcagtagaca

SEQ ID NO: 736147 - DNA, 120 bp, Artificial Sequence
  ENSG00000198945_11 (sequence is synthesized)
aaaagaatccctcattcatctgtgttgctacggtaacagatatggtggacaatcgtttcctggtacattttgacaactgggatgagagctatgactattggtgtgaagcatcaagtccac

SEQ ID NO: 736148 - DNA, 120 bp, Artificial Sequence
  ENSG00000198945_12 (sequence is synthesized)
atattcatccagttggttggtgtaaggaacatagaagaacccttattactccaccaggttatccaaatgtgaaacatttttcttgggataaatacttagaagaaaccaattctttacctg

SEQ ID NO: 736149 - DNA, 120 bp, Artificial Sequence
  ENSG00000198945_13 (sequence is synthesized)
ctcctgcaagagctttcaaagtgaaacctcctcatggattccagaaaaaaatgaagcttgaggttgtagacaaaaggaaccctatgtttattagagtagcaactgtggcagacacagatg

SEQ ID NO: 736150 - DNA, 120 bp, Artificial Sequence
  ENSG00000198945_14 (sequence is synthesized)
atcaccgggtaaaagttcactttgatggctggaacaattgctatgattactggatagatgcagattctcctgatattcaccctgtaggctggtgttcaaaaacaggacatccccttcagc

SEQ ID NO: 736151 - DNA, 120 bp, Artificial Sequence
  ENSG00000198945_15 (sequence is synthesized)
ctcctttgagccccttagaattaatggaagcttcagaacatggtggatgctcaaccccgggatgtaaagggattggccatttcaagagagcgagacatctgggccctcacagtgctgcca

SEQ ID NO: 736152 - DNA, 120 bp, Artificial Sequence
  ENSG00000198945_16 (sequence is synthesized)
actgtccctattcagaaatcaatttgaataaagaccgtatttttccagaccgcttaagtggtgagatgcctccggctagtccgtcatttccaagaaataaaaggacagatgcaaatgaaa

SEQ ID NO: 736153 - DNA, 120 bp, Artificial Sequence
  ENSG00000198945_17 (sequence is synthesized)
atcagagaccagcatgctgatgatgtcaaagaagactttgaagagagaacagaaagtgaaatgagaacatcacatgaagccagaggtgcccgggaagaacccaccgtccagcaggcacag

SEQ ID NO: 736154 - DNA, 120 bp, Artificial Sequence
  ENSG00000198945_18 (sequence is synthesized)
cgtcggtcagctgtctttctgtcctttaagtccccaattccatgtctgcccttgcgctgggagcagcaaagcaaacttcttccaactgtcgcaggaatccctgccagtaaagtttccaaa

SEQ ID NO: 736155 - DNA, 120 bp, Artificial Sequence
  ENSG00000198945_19 (sequence is synthesized)
tggagcacagacgaggtgtcagaatttatacagagcttacctgggtgtgaagaacatggaaaggtatttaaagatgaacaaattgatggagaagcatttctacttatgactcaaacagac

SEQ ID NO: 736156 - DNA, 120 bp, Artificial Sequence
  ENSG00000198945_20 (sequence is synthesized)
attgttaaaattatgagcattaaactgggccctgctctcaaaattttcaattccatcctgatgttcaaagctgcagagaagaattctcacaatgaactttgaagatggtgaattctgaat

SEQ ID NO: 736157 - DNA, 120 bp, Artificial Sequence
  ENSG00000198945_21 (sequence is synthesized)
accatcagcattctgctttaaagctcatgttttattcaaagcacaaggacggttataactcctaagtgagaagtctccaaaactcaaaagagcaacactatcggattatttatattactc

SEQ ID NO: 736158 - DNA, 120 bp, Artificial Sequence
  ENSG00000198945_22 (sequence is synthesized)
aagagacaatatatatgaattcttatgaaagtgcttgagcttttaaccaggtactgtctaacaacagtcatcttttggttctgttcactgagctaaatttatctttgtaaatctttttga

SEQ ID NO: 736159 - DNA, 120 bp, Artificial Sequence
  ENSG00000198945_23 (sequence is synthesized)
gtctggggggtggggggaaggggggcttcattaattatttatggtaatggggggcagagtaagaacttttggcattttgtaaacattgttgaattctctttcatgtacactgtttctttt

SEQ ID NO: 736160 - DNA, 120 bp, Artificial Sequence
  ENSG00000198945_24 (sequence is synthesized)
tcaatactttcagaaacctttttatataatcaaatttcaatttaaaccaaattagtcgaaacctggctaagtttagccagtaggactgttatctgtattgttaattttgtgccatatttt

SEQ ID NO: 736161 - DNA, 120 bp, Artificial Sequence
  ENSG00000198945_25 (sequence is synthesized)
gaattgcaacattatgctaagtataactttgcaagtcatgatattgcctaactgcttgtcataattgtcagggctgaatagttgtaagaatgacttttctttgaatcagtatttttcctt

SEQ ID NO: 736162 - DNA, 120 bp, Artificial Sequence
  ENSG00000198945_26 (sequence is synthesized)
ttgcacgcattatgaaatgttaaacaaattacttttcaccagcatctttactataattaccaaaaacatgtatataaaagaatgaaattgaaaaataaaatatataaacataaataaatt

SEQ ID NO: 736163 - DNA, 120 bp, Artificial Sequence
  ENSG00000198945_27 (sequence is synthesized)
aggtagtgtattttgagtggcatcagtctcactcatcttggtgccccggtgtttacaagagccagatggtgtcagaggagtacgcagttgtatgcagttatggttggggggaatgtttgt

SEQ ID NO: 736164 - DNA, 120 bp, Artificial Sequence
  ENSG00000198945_28 (sequence is synthesized)
gagggtcttgaactatttatgagatgatcttgagcttctaattttcattgatgaaattgtggtggtttacagagactaagagctcattctgtcaacagaaacactaatctgtacagagcg

SEQ ID NO: 736165 - DNA, 120 bp, Artificial Sequence
  ENSG00000198945_29 (sequence is synthesized)
ctgtctcaggtcatgcattgtcctccaaacccaaaggtttttttcagggttggctagagagcgagtattgtgattttgctgaaaagacaaggtgtgaaggagcaacttcagttgacacaa

SEQ ID NO: 736166 - DNA, 120 bp, Artificial Sequence
  ENSG00000198945_30 (sequence is synthesized)
aatttgaaatgctcacagatcagggaggtgatttcccaaagtaattgcccaagaacctccgttttggaaggattcctttttctgtagaatactttgcctcgatatataagcatacagatg

SEQ ID NO: 736167 - DNA, 120 bp, Artificial Sequence
  ENSG00000198945_31 (sequence is synthesized)
cactttaaatgaaaacccttgattataaattgatagctggtagtgtttcttttgcaagaatgcatttctaaggcaaaaggtaaattattttgtccgtcttttgatgtactttctgattcc

SEQ ID NO: 736168 - DNA, 120 bp, Artificial Sequence
  ENSG00000198945_32 (sequence is synthesized)
aggattggatatttattcaaggactattttaaaaatagaaagtaagtttgtagcatgctgtctgaattctggggtaagttccacctcttctttagttgctttcgttttttatgatgtagg

SEQ ID NO: 736169 - DNA, 120 bp, Artificial Sequence
  ENSG00000198945_33 (sequence is synthesized)
acttcctttgatatccctgttggaagtccattagcagtcctttgcatttgccaattcaaggtaaaacagggtcagtgacatctgcagtgtcccagtcatttatttgcatgaatctgctta

SEQ ID NO: 736170 - DNA, 120 bp, Artificial Sequence
  ENSG00000198945_34 (sequence is synthesized)
aataagttttttgttgctgttttttcttttttatgttttgttcagaatttgtacattcaagttgtacttgttatatctgacatgaatgaaataaaatcttaattacagatgctttttaca

SEQ ID NO: 736171 - DNA, 120 bp, Artificial Sequence
  ENSG00000198945_35 (sequence is synthesized)
agggctgggggcgtcggtctgtccgtcgcgctcagagggaggtgggggtaactagccgctttccagggcgcggggaccgcggctctaccccacccttccacgggagacggagaaccctta

SEQ ID NO: 736172 - DNA, 120 bp, Artificial Sequence
  ENSG00000198945_36 (sequence is synthesized)
gtactggcggctgttgtcacagatagtggcaccaaaggattctttgtagaaaactttgacagcagcctttaaagtcattattcctacaactctgaggcggtgaccgggctattgaaaaga

SEQ ID NO: 736173 - DNA, 120 bp, Artificial Sequence
  ENSG00000198945_37 (sequence is synthesized)
tgcacctgaaacaggatctgcgggcagctgcatttgccacccggctttattgctgctttccagcggcgaaggcgcagcagcagtaacagggaagccagagcgagcctccccggcagcggc

SEQ ID NO: 736174 - DNA, 120 bp, Artificial Sequence
  ENSG00000198945_38 (sequence is synthesized)
atatgatttttaaattatgtgaatacagcagtggatgctgggcctttgagcaggaggtgcagagagtgtgcagttcttgtggttgtcaagtgtgtgcttatctctaattaaatctgtgtg

SEQ ID NO: 736175 - DNA, 120 bp, Artificial Sequence
  ENSG00000198945_39 (sequence is synthesized)
cgcgcgccgcccctgcggccccctccgcccgtgtggcctttgtgccgggcgcgcaccggagagcgagcgagcgggcgggcgagcgcgagaagtacaaaacccttaggagaaatcttgaga

SEQ ID NO: 736176 - DNA, 120 bp, Artificial Sequence
  ENSG00000198945_40 (sequence is synthesized)
aaagtgctttctgatagctctctaactattcactggtgccaatttcttgaactttaaagtcataattttcctttctttttgtaggagaacaaacaagatgtaagaatcctgaggggttcg

SEQ ID NO: 736177 - DNA, 120 bp, Artificial Sequence
  ENSG00000198947_0 (sequence is synthesized)
gggatcactcactttccccctacaggactcagatctgggaggcaattaccttcggagaaaaacgaataggaaaaactgaagtgttactttttttaaagctgctgaagtttgttggtttct

SEQ ID NO: 736178 - DNA, 120 bp, Artificial Sequence
  ENSG00000198947_1 (sequence is synthesized)
cattgtttttaagcctactggagcaataaagtttgaagaacttttaccaggttttttttatcgctgccttgatatacacttttcaaaatgctttggtgggaagaagtagaggactgttat

SEQ ID NO: 736179 - DNA, 120 bp, Artificial Sequence
  ENSG00000198947_2 (sequence is synthesized)
gaaagagaagatgttcaaaagaaaacattcacaaaatgggtaaatgcacaattttctaagtttgggaagcagcatattgagaacctcttcagtgacctacaggatgggaggcgcctccta

SEQ ID NO: 736180 - DNA, 120 bp, Artificial Sequence
  ENSG00000198947_3 (sequence is synthesized)
gacctcctcgaaggcctgacagggcaaaaactgccaaaagaaaaaggatccacaagagttcatgccctgaacaatgtcaacaaggcactgcgggttttgcagaacaataatgttgattta

SEQ ID NO: 736181 - DNA, 120 bp, Artificial Sequence
  ENSG00000198947_4 (sequence is synthesized)
gtgaatattggaagtactgacatcgtagatggaaatcataaactgactcttggtttgatttggaatataatcctccactggcaggtcaaaaatgtaatgaaaaatatcatggctggattg

SEQ ID NO: 736182 - DNA, 120 bp, Artificial Sequence
  ENSG00000198947_5 (sequence is synthesized)
caacaaaccaacagtgaaaagattctcctgagctgggtccgacaatcaactcgtaattatccacaggttaatgtaatcaacttcaccaccagctggtctgatggcctggctttgaatgct

SEQ ID NO: 736183 - DNA, 120 bp, Artificial Sequence
  ENSG00000198947_6 (sequence is synthesized)
ctcatccatagtcataggccagacctatttgactggaatagtgtggtttgccagcagtcagccacacaacgactggaacatgcattcaacatcgccagatatcaattaggcatagagaaa

SEQ ID NO: 736184 - DNA, 120 bp, Artificial Sequence
  ENSG00000198947_7 (sequence is synthesized)
ctactcgatcctgaagatgttgataccacctatccagataagaagtccatcttaatgtacatcacatcactcttccaagttttgcctcaacaagtgagcattgaagccatccaggaagtg

SEQ ID NO: 736185 - DNA, 120 bp, Artificial Sequence
  ENSG00000198947_8 (sequence is synthesized)
gaaatgttgccaaggccacctaaagtgactaaagaagaacattttcagttacatcatcaaatgcactattctcaacagatcacggtcagtctagcacagggatatgagagaacttcttcc

SEQ ID NO: 736186 - DNA, 120 bp, Artificial Sequence
  ENSG00000198947_9 (sequence is synthesized)
cctaagcctcgattcaagagctatgcctacacacaggctgcttatgtcaccacctctgaccctacacggagcccatttccttcacagcatttggaagctcctgaagacaagtcatttggc

SEQ ID NO: 736187 - DNA, 120 bp, Artificial Sequence
  ENSG00000198947_10 (sequence is synthesized)
agttcattgatggagagtgaagtaaacctggaccgttatcaaacagctttagaagaagtattatcgtggcttctttctgctgaggacacattgcaagcacaaggagagatttctaatgat

SEQ ID NO: 736188 - DNA, 120 bp, Artificial Sequence
  ENSG00000198947_11 (sequence is synthesized)
gtggaagtggtgaaagaccagtttcatactcatgaggggtacatgatggatttgacagcccatcagggccgggttggtaatattctacaattgggaagtaagctgattggaacaggaaaa

SEQ ID NO: 736189 - DNA, 120 bp, Artificial Sequence
  ENSG00000198947_12 (sequence is synthesized)
ttatcagaagatgaagaaactgaagtacaagagcagatgaatctcctaaattcaagatgggaatgcctcagggtagctagcatggaaaaacaaagcaatttacatagagttttaatggat

SEQ ID NO: 736190 - DNA, 120 bp, Artificial Sequence
  ENSG00000198947_13 (sequence is synthesized)
ctccagaatcagaaactgaaagagttgaatgactggctaacaaaaacagaagaaagaacaaggaaaatggaggaagagcctcttggacctgatcttgaagacctaaaacgccaagtacaa

SEQ ID NO: 736191 - DNA, 120 bp, Artificial Sequence
  ENSG00000198947_14 (sequence is synthesized)
caacataaggtgcttcaagaagatctagaacaagaacaagtcagggtcaattctctcactcacatggtggtggtagttgatgaatctagtggagatcacgcaactgctgctttggaagaa

SEQ ID NO: 736192 - DNA, 120 bp, Artificial Sequence
  ENSG00000198947_15 (sequence is synthesized)
caacttaaggtattgggagatcgatgggcaaacatctgtagatggacagaagaccgctgggttcttttacaagacatccttctcaaatggcaacgtcttactgaagaacagtgccttttt

SEQ ID NO: 736193 - DNA, 120 bp, Artificial Sequence
  ENSG00000198947_16 (sequence is synthesized)
agtgcatggctttcagaaaaagaagatgcagtgaacaagattcacacaactggctttaaagatcaaaatgaaatgttatcaagtcttcaaaaactggccgttttaaaagcggatctagaa

SEQ ID NO: 736194 - DNA, 120 bp, Artificial Sequence
  ENSG00000198947_17 (sequence is synthesized)
aagaaaaagcaatccatgggcaaactgtattcactcaaacaagatcttctttcaacactgaagaataagtcagtgacccagaagacggaagcatggctggataactttgcccggtgttgg

SEQ ID NO: 736195 - DNA, 120 bp, Artificial Sequence
  ENSG00000198947_18 (sequence is synthesized)
gataatttagtccaaaaacttgaaaagagtacagcacagatttcacaggctgtcaccaccactcagccatcactaacacagacaactgtaatggaaacagtaactacggtgaccacaagg

SEQ ID NO: 736196 - DNA, 120 bp, Artificial Sequence
  ENSG00000198947_19 (sequence is synthesized)
gaacagatcctggtaaagcatgctcaagaggaacttccaccaccacctccccaaaagaagaggcagattactgtggattctgaaattaggaaaaggttggatgttgatataactgaactt

SEQ ID NO: 736197 - DNA, 120 bp, Artificial Sequence
  ENSG00000198947_20 (sequence is synthesized)
cacagctggattactcgctcagaagctgtgttgcagagtcctgaatttgcaatctttcggaaggaaggcaacttctcagacttaaaagaaaaagtcaatgccatagagcgagaaaaagct

SEQ ID NO: 736198 - DNA, 120 bp, Artificial Sequence
  ENSG00000198947_21 (sequence is synthesized)
gagaagttcagaaaactgcaagatgccagcagatcagctcaggccctggtggaacagatggtgaatgagggtgttaatgcagatagcatcaaacaagcctcagaacaactgaacagccgg

SEQ ID NO: 736199 - DNA, 120 bp, Artificial Sequence
  ENSG00000198947_22 (sequence is synthesized)
tggatcgaattctgccagttgctaagtgagagacttaactggctggagtatcagaacaacatcatcgctttctataatcagctacaacaattggagcagatgacaactactgctgaaaac

SEQ ID NO: 736200 - DNA, 120 bp, Artificial Sequence
  ENSG00000198947_23 (sequence is synthesized)
tggttgaaaatccaacccaccaccccatcagagccaacagcaattaaaagtcagttaaaaatttgtaaggatgaagtcaaccggctatcagatcttcaacctcaaattgaacgattaaaa

SEQ ID NO: 736201 - DNA, 120 bp, Artificial Sequence
  ENSG00000198947_24 (sequence is synthesized)
attcaaagcatagccctgaaagagaaaggacaaggacccatgttcctggatgcagactttgtggcctttacaaatcattttaagcaagtcttttctgatgtgcaggccagagagaaagag

SEQ ID NO: 736202 - DNA, 120 bp, Artificial Sequence
  ENSG00000198947_25 (sequence is synthesized)
ctacagacaatttttgacactttgccaccaatgcgctatcaggagaccatgagtgccatcaggacatgggtccagcagtcagaaaccaaactctccatacctcaacttagtgtcaccgac

SEQ ID NO: 736203 - DNA, 120 bp, Artificial Sequence
  ENSG00000198947_26 (sequence is synthesized)
tatgaaatcatggagcagagactcggggaattgcaggctttacaaagttctctgcaagagcaacaaagtggcctatactatctcagcaccactgtgaaagagatgtcgaagaaagcgccc

SEQ ID NO: 736204 - DNA, 120 bp, Artificial Sequence
  ENSG00000198947_27 (sequence is synthesized)
tctgaaattagccggaaatatcaatcagaatttgaagaaattgagggacgctggaagaagctctcctcccagctggttgagcattgtcaaaagctagaggagcaaatgaataaactccga

SEQ ID NO: 736205 - DNA, 120 bp, Artificial Sequence
  ENSG00000198947_28 (sequence is synthesized)
aaaattcagaatcacatacaaaccctgaagaaatggatggctgaagttgatgtttttctgaaggaggaatggcctgcccttggggattcagaaattctaaaaaagcagctgaaacagtgc

SEQ ID NO: 736206 - DNA, 120 bp, Artificial Sequence
  ENSG00000198947_29 (sequence is synthesized)
agacttttagtcagtgatattcagacaattcagcccagtctaaacagtgtcaatgaaggtgggcagaagataaagaatgaagcagagccagagtttgcttcgagacttgagacagaactc

SEQ ID NO: 736207 - DNA, 120 bp, Artificial Sequence
  ENSG00000198947_30 (sequence is synthesized)
aaagaacttaacactcagtgggatcacatgtgccaacaggtctatgccagaaaggaggccttgaagggaggtttggagaaaactgtaagcctccagaaagatctatcagagatgcacgaa

SEQ ID NO: 736208 - DNA, 120 bp, Artificial Sequence
  ENSG00000198947_31 (sequence is synthesized)
tggatgacacaagctgaagaagagtatcttgagagagattttgaatataaaactccagatgaattacagaaagcagttgaagagatgaagagagctaaagaagaggcccaacaaaaagaa

SEQ ID NO: 736209 - DNA, 120 bp, Artificial Sequence
  ENSG00000198947_32 (sequence is synthesized)
gcgaaagtgaaactccttactgagtctgtaaatagtgtcatagctcaagctccacctgtagcacaagaggccttaaaaaaggaacttgaaactctaaccaccaactaccagtggctctgc

SEQ ID NO: 736210 - DNA, 120 bp, Artificial Sequence
  ENSG00000198947_33 (sequence is synthesized)
actaggctgaatgggaaatgcaagactttggaagaagtttgggcatgttggcatgagttattgtcatacttggagaaagcaaacaagtggctaaatgaagtagaatttaaacttaaaacc

SEQ ID NO: 736211 - DNA, 120 bp, Artificial Sequence
  ENSG00000198947_34 (sequence is synthesized)
actgaaaacattcctggcggagctgaggaaatctctgaggtgctagattcacttgaaaatttgatgcgacattcagaggataacccaaatcagattcgcatattggcacagaccctaaca

SEQ ID NO: 736212 - DNA, 120 bp, Artificial Sequence
  ENSG00000198947_35 (sequence is synthesized)
gatggcggagtcatggatgagctaatcaatgaggaacttgagacatttaattctcgttggagggaactacatgaagaggctgtaaggaggcaaaagttgcttgaacagagcatccagtct

SEQ ID NO: 736213 - DNA, 120 bp, Artificial Sequence
  ENSG00000198947_36 (sequence is synthesized)
gcccaggagactgaaaaatccttacacttaatccaggagtccctcacattcattgacaagcagttggcagcttatattgcagacaaggtggacgcagctcaaatgcctcaggaagcccag

SEQ ID NO: 736214 - DNA, 120 bp, Artificial Sequence
  ENSG00000198947_37 (sequence is synthesized)
aaaatccaatctgatttgacaagtcatgagatcagtttagaagaaatgaagaaacataatcaggggaaggaggctgcccaaagagtcctgtctcagattgatgttgcacagaaaaaatta

SEQ ID NO: 736215 - DNA, 120 bp, Artificial Sequence
  ENSG00000198947_38 (sequence is synthesized)
caagatgtctccatgaagtttcgattattccagaaaccagccaattttgagcagcgtctacaagaaagtaagatgattttagatgaagtgaagatgcacttgcctgcattggaaacaaag

SEQ ID NO: 736216 - DNA, 120 bp, Artificial Sequence
  ENSG00000198947_39 (sequence is synthesized)
agtgtggaacaggaagtagtacagtcacagctaaatcattgtgtgaacttgtataaaagtctgagtgaagtgaagtctgaagtggaaatggtgataaagactggacgtcagattgtacag

SEQ ID NO: 736217 - DNA, 120 bp, Artificial Sequence
  ENSG00000198947_40 (sequence is synthesized)
aaaaagcagacggaaaatcccaaagaacttgatgaaagagtaacagctttgaaattgcattataatgagctgggagcaaaggtaacagaaagaaagcaacagttggagaaatgcttgaaa

SEQ ID NO: 736218 - DNA, 120 bp, Artificial Sequence
  ENSG00000198947_41 (sequence is synthesized)
ttgtcccgtaagatgcgaaaggaaatgaatgtcttgacagaatggctggcagctacagatatggaattgacaaagagatcagcagttgaaggaatgcctagtaatttggattctgaagtt

SEQ ID NO: 736219 - DNA, 120 bp, Artificial Sequence
  ENSG00000198947_42 (sequence is synthesized)
gcctggggaaaggctactcaaaaagagattgagaaacagaaggtgcacctgaagagtatcacagaggtaggagaggccttgaaaacagttttgggcaagaaggagacgttggtggaagat

SEQ ID NO: 736220 - DNA, 120 bp, Artificial Sequence
  ENSG00000198947_43 (sequence is synthesized)
aaactcagtcttctgaatagtaactggatagctgtcacctcccgagcagaagagtggttaaatcttttgttggaataccagaaacacatggaaacttttgaccagaatgtggaccacatc

SEQ ID NO: 736221 - DNA, 120 bp, Artificial Sequence
  ENSG00000198947_44 (sequence is synthesized)
acaaagtggatcattcaggctgacacacttttggatgaatcagagaaaaagaaaccccagcaaaaagaagacgtgcttaagcgtttaaaggcagaactgaatgacatacgcccaaaggtg

SEQ ID NO: 736222 - DNA, 120 bp, Artificial Sequence
  ENSG00000198947_45 (sequence is synthesized)
gactctacacgtgaccaagcagcaaacttgatggcaaaccgcggtgaccactgcaggaaattagtagagccccaaatctcagagctcaaccatcgatttgcagccatttcacacagaatt

SEQ ID NO: 736223 - DNA, 120 bp, Artificial Sequence
  ENSG00000198947_46 (sequence is synthesized)
aagactggaaaggcctccattcctttgaaggaattggagcagtttaactcagatatacaaaaattgcttgaaccactggaggctgaaattcagcagggggtgaatctgaaagaggaagac

SEQ ID NO: 736224 - DNA, 120 bp, Artificial Sequence
  ENSG00000198947_47 (sequence is synthesized)
ttcaataaagatatgaatgaagacaatgagggtactgtaaaagaattgttgcaaagaggagacaacttacaacaaagaatcacagatgagagaaagcgagaggaaataaagataaaacag

SEQ ID NO: 736225 - DNA, 120 bp, Artificial Sequence
  ENSG00000198947_48 (sequence is synthesized)
cagctgttacagacaaaacataatgctctcaaggatttgaggtctcaaagaagaaaaaaggctctagaaatttctcatcagtggtatcagtacaagaggcaggctgatgatctcctgaaa

SEQ ID NO: 736226 - DNA, 120 bp, Artificial Sequence
  ENSG00000198947_49 (sequence is synthesized)
tgcttggatgacattgaaaaaaaattagccagcctacctgagcccagagatgaaaggaaaataaaggaaattgatcgggaattgcagaagaagaaagaggagctgaatgcagtgcgtagg

SEQ ID NO: 736227 - DNA, 120 bp, Artificial Sequence
  ENSG00000198947_50 (sequence is synthesized)
caagctgagggcttgtctgaggatggggccgcaatggcagtggagccaactcagatccagctcagcaagcgctggcgggaaattgagagcaaatttgctcagtttcgaagactcaacttt

SEQ ID NO: 736228 - DNA, 120 bp, Artificial Sequence
  ENSG00000198947_51 (sequence is synthesized)
gcacaaattcacactgtccgtgaagaaacgatgatggtgatgactgaagacatgcctttggaaatttcttatgtgccttctacttatttgactgaaatcactcatgtctcacaagcccta

SEQ ID NO: 736229 - DNA, 120 bp, Artificial Sequence
  ENSG00000198947_52 (sequence is synthesized)
ttagaagtggaacaacttctcaatgctcctgacctctgtgctaaggactttgaagatctctttaagcaagaggagtctctgaagaatataaaagatagtctacaacaaagctcaggtcgg

SEQ ID NO: 736230 - DNA, 120 bp, Artificial Sequence
  ENSG00000198947_53 (sequence is synthesized)
attgacattattcatagcaagaagacagcagcattgcaaagtgcaacgcctgtggaaagggtgaagctacaggaagctctctcccagcttgatttccaatgggaaaaagttaacaaaatg

SEQ ID NO: 736231 - DNA, 120 bp, Artificial Sequence
  ENSG00000198947_54 (sequence is synthesized)
tacaaggaccgacaagggcgatttgacagatctgttgagaaatggcggcgttttcattatgatataaagatatttaatcagtggctaacagaagctgaacagtttctcagaaagacacaa

SEQ ID NO: 736232 - DNA, 120 bp, Artificial Sequence
  ENSG00000198947_55 (sequence is synthesized)
attcctgagaattgggaacatgctaaatacaaatggtatcttaaggaactccaggatggcattgggcagcggcaaactgttgtcagaacattgaatgcaactggggaagaaataattcag

SEQ ID NO: 736233 - DNA, 120 bp, Artificial Sequence
  ENSG00000198947_56 (sequence is synthesized)
caatcctcaaaaacagatgccagtattctacaggaaaaattgggaagcctgaatctgcggtggcaggaggtctgcaaacagctgtcagacagaaaaaagaggctagaagaacaaaagaat

SEQ ID NO: 736234 - DNA, 120 bp, Artificial Sequence
  ENSG00000198947_57 (sequence is synthesized)
atcttgtcagaatttcaaagagatttaaatgaatttgttttatggttggaggaagcagataacattgctagtatcccacttgaacctggaaaagagcagcaactaaaagaaaagcttgag

SEQ ID NO: 736235 - DNA, 120 bp, Artificial Sequence
  ENSG00000198947_58 (sequence is synthesized)
cagggaattctcaaacaattaaatgaaactggaggacccgtgcttgtaagtgctcccataagcccagaagagcaagataaacttgaaaataagctcaagcagacaaatctccagtggata

SEQ ID NO: 736236 - DNA, 120 bp, Artificial Sequence
  ENSG00000198947_59 (sequence is synthesized)
aaggtttccagagctttacctgagaaacaaggagaaattgaagctcaaataaaagaccttgggcagcttgaaaaaaagcttgaagaccttgaagagcagttaaatcatctgctgctgtgg

SEQ ID NO: 736237 - DNA, 120 bp, Artificial Sequence
  ENSG00000198947_60 (sequence is synthesized)
ttatctcctattaggaatcagttggaaatttataaccaaccaaaccaagaaggaccatttgacgttaaggaaactgaaatagcagttcaagctaaacaaccggatgtggaagagattttg

SEQ ID NO: 736238 - DNA, 120 bp, Artificial Sequence
  ENSG00000198947_61 (sequence is synthesized)
tctaaagggcagcatttgtacaaggaaaaaccagccactcagccagtgaagaggaagttagaagatctgagctctgagtggaaggcggtaaaccgtttacttcaagagctgagggcaaag

SEQ ID NO: 736239 - DNA, 120 bp, Artificial Sequence
  ENSG00000198947_62 (sequence is synthesized)
cagcctgacctagctcctggactgaccactattggagcctctcctactcagactgttactctggtgacacaacctgtggttactaaggaaactgccatctccaaactagaaatgccatct

SEQ ID NO: 736240 - DNA, 120 bp, Artificial Sequence
  ENSG00000198947_63 (sequence is synthesized)
tccttgatgttggaggtacctgctctggcagatttcaaccgggcttggacagaacttaccgactggctttctctgcttgatcaagttataaaatcacagagggtgatggtgggtgacctt

SEQ ID NO: 736241 - DNA, 120 bp, Artificial Sequence
  ENSG00000198947_64 (sequence is synthesized)
gaggatatcaacgagatgatcatcaagcagaaggcaacaatgcaggatttggaacagaggcgtccccagttggaagaactcattaccgctgcccaaaatttgaaaaacaagaccagcaat

SEQ ID NO: 736242 - DNA, 120 bp, Artificial Sequence
  ENSG00000198947_65 (sequence is synthesized)
caagaggctagaacaatcattacggatcgaattgaaagaattcagaatcagtgggatgaagtacaagaacaccttcagaaccggaggcaacagttgaatgaaatgttaaaggattcaaca

SEQ ID NO: 736243 - DNA, 120 bp, Artificial Sequence
  ENSG00000198947_66 (sequence is synthesized)
caatggctggaagctaaggaagaagctgagcaggtcttaggacaggccagagccaagcttgagtcatggaaggagggtccctatacagtagatgcaatccaaaagaaaatcacagaaacc

SEQ ID NO: 736244 - DNA, 120 bp, Artificial Sequence
  ENSG00000198947_67 (sequence is synthesized)
aagcagttggccaaagacctccgccagtggcagacaaatgtagatgtggcaaatgacttggccctgaaacttctccgggattattctgcagatgataccagaaaagtccacatgataaca

SEQ ID NO: 736245 - DNA, 120 bp, Artificial Sequence
  ENSG00000198947_68 (sequence is synthesized)
gagaatatcaatgcctcttggagaagcattcataaaagggtgagtgagcgagaggctgctttggaagaaactcatagattactgcaacagttccccctggacctggaaaagtttcttgcc

SEQ ID NO: 736246 - DNA, 120 bp, Artificial Sequence
  ENSG00000198947_69 (sequence is synthesized)
tggcttacagaagctgaaacaactgccaatgtcctacaggatgctacccgtaaggaaaggctcctagaagactccaagggagtaaaagagctgatgaaacaatggcaagacctccaaggt

SEQ ID NO: 736247 - DNA, 120 bp, Artificial Sequence
  ENSG00000198947_70 (sequence is synthesized)
gaaattgaagctcacacagatgtttatcacaacctggatgaaaacagccaaaaaatcctgagatccctggaaggttccgatgatgcagtcctgttacaaagacgtttggataacatgaac

SEQ ID NO: 736248 - DNA, 120 bp, Artificial Sequence
  ENSG00000198947_71 (sequence is synthesized)
ttcaagtggagtgaacttcggaaaaagtctctcaacattaggtcccatttggaagccagttctgaccagtggaagcgtctgcacctttctctgcaggaacttctggtgtggctacagctg

SEQ ID NO: 736249 - DNA, 120 bp, Artificial Sequence
  ENSG00000198947_72 (sequence is synthesized)
aaagatgatgaattaagccggcaggcacctattggaggcgactttccagcagttcagaagcagaacgatgtacatagggccttcaagagggaattgaaaactaaagaacctgtaatcatg

SEQ ID NO: 736250 - DNA, 120 bp, Artificial Sequence
  ENSG00000198947_73 (sequence is synthesized)
agtactcttgagactgtacgaatatttctgacagagcagcctttggaaggactagagaaactctaccaggagcccagagagctgcctcctgaggagagagcccagaatgtcactcggctt

SEQ ID NO: 736251 - DNA, 120 bp, Artificial Sequence
  ENSG00000198947_74 (sequence is synthesized)
ctacgaaagcaggctgaggaggtcaatactgagtgggaaaaattgaacctgcactccgctgactggcagagaaaaatagatgagacccttgaaagactccgggaacttcaagaggccacg

SEQ ID NO: 736252 - DNA, 120 bp, Artificial Sequence
  ENSG00000198947_75 (sequence is synthesized)
gatgagctggacctcaagctgcgccaagctgaggtgatcaagggatcctggcagcccgtgggcgatctcctcattgactctctccaagatcacctcgagaaagtcaaggcacttcgagga

SEQ ID NO: 736253 - DNA, 120 bp, Artificial Sequence
  ENSG00000198947_76 (sequence is synthesized)
gaaattgcgcctctgaaagagaacgtgagccacgtcaatgaccttgctcgccagcttaccactttgggcattcagctctcaccgtataacctcagcactctggaagacctgaacaccaga

SEQ ID NO: 736254 - DNA, 120 bp, Artificial Sequence
  ENSG00000198947_77 (sequence is synthesized)
tggaagcttctgcaggtggccgtcgaggaccgagtcaggcagctgcatgaagcccacagggactttggtccagcatctcagcactttctttccacgtctgtccagggtccctgggagaga

SEQ ID NO: 736255 - DNA, 120 bp, Artificial Sequence
  ENSG00000198947_78 (sequence is synthesized)
gccatctcgccaaacaaagtgccctactatatcaaccacgagactcaaacaacttgctgggaccatcccaaaatgacagagctctaccagtctttagctgacctgaataatgtcagattc

SEQ ID NO: 736256 - DNA, 120 bp, Artificial Sequence
  ENSG00000198947_79 (sequence is synthesized)
tcagcttataggactgccatgaaactccgaagactgcagaaggccctttgcttggatctcttgagcctgtcagctgcatgtgatgccttggaccagcacaacctcaagcaaaatgaccag

SEQ ID NO: 736257 - DNA, 120 bp, Artificial Sequence
  ENSG00000198947_80 (sequence is synthesized)
cccatggatatcctgcagattattaattgtttgaccactatttatgaccgcctggagcaagagcacaacaatttggtcaacgtccctctctgcgtggatatgtgtctgaactggctgctg

SEQ ID NO: 736258 - DNA, 120 bp, Artificial Sequence
  ENSG00000198947_81 (sequence is synthesized)
aatgtttatgatacgggacgaacagggaggatccgtgtcctgtcttttaaaactggcatcatttccctgtgtaaagcacatttggaagacaagtacagataccttttcaagcaagtggca

SEQ ID NO: 736259 - DNA, 120 bp, Artificial Sequence
  ENSG00000198947_82 (sequence is synthesized)
agttcaacaggattttgtgaccagcgcaggctgggcctccttctgcatgattctatccaaattccaagacagttgggtgaagttgcatcctttgggggcagtaacattgagccaagtgtc

SEQ ID NO: 736260 - DNA, 120 bp, Artificial Sequence
  ENSG00000198947_83 (sequence is synthesized)
cggagctgcttccaatttgctaataataagccagagatcgaagcggccctcttcctagactggatgagactggaaccccagtccatggtgtggctgcccgtcctgcacagagtggctgct

SEQ ID NO: 736261 - DNA, 120 bp, Artificial Sequence
  ENSG00000198947_84 (sequence is synthesized)
gcagaaactgccaagcatcaggccaaatgtaacatctgcaaagagtgtccaatcattggattcaggtacaggagtctaaagcactttaattatgacatctgccaaagctgctttttttct

SEQ ID NO: 736262 - DNA, 120 bp, Artificial Sequence
  ENSG00000198947_85 (sequence is synthesized)
ggtcgagttgcaaaaggccataaaatgcactatcccatggtggaatattgcactccgactacatcaggagaagatgttcgagactttgccaaggtactaaaaaacaaatttcgaaccaaa

SEQ ID NO: 736263 - DNA, 120 bp, Artificial Sequence
  ENSG00000198947_86 (sequence is synthesized)
aggtattttgcgaagcatccccgaatgggctacctgccagtgcagactgtcttagagggggacaacatggaaactcccgttactctgatcaacttctggccagtagattctgcgcctgcc

SEQ ID NO: 736264 - DNA, 120 bp, Artificial Sequence
  ENSG00000198947_87 (sequence is synthesized)
tcgtcccctcagctttcacacgatgatactcattcacgcattgaacattatgctagcaggctagcagaaatggaaaacagcaatggatcttatctaaatgatagcatctctcctaatgag

SEQ ID NO: 736265 - DNA, 120 bp, Artificial Sequence
  ENSG00000198947_88 (sequence is synthesized)
agcatagatgatgaacatttgttaatccagcattactgccaaagtttgaaccaggactcccccctgagccagcctcgtagtcctgcccagatcttgatttccttagagagtgaggaaaga

SEQ ID NO: 736266 - DNA, 120 bp, Artificial Sequence
  ENSG00000198947_89 (sequence is synthesized)
ggggagctagagagaatcctagcagatcttgaggaagaaaacaggaatctgcaagcagaatatgaccgtctaaagcagcagcacgaacataaaggcctgtccccactgccgtcccctcct

SEQ ID NO: 736267 - DNA, 120 bp, Artificial Sequence
  ENSG00000198947_90 (sequence is synthesized)
gaaatgatgcccacctctccccagagtccccgggatgctgagctcattgctgaggccaagctactgcgtcaacacaaaggccgcctggaagccaggatgcaaatcctggaagaccacaat

SEQ ID NO: 736268 - DNA, 120 bp, Artificial Sequence
  ENSG00000198947_91 (sequence is synthesized)
aaacagctggagtcacagttacacaggctaaggcagctgctggagcaaccccaggcagaggccaaagtgaatggcacaacggtgtcctctccttctacctctctacagaggtccgacagc

SEQ ID NO: 736269 - DNA, 120 bp, Artificial Sequence
  ENSG00000198947_92 (sequence is synthesized)
agtcagcctatgctgctccgagtggttggcagtcaaacttcggactccatgggtgaggaagatcttctcagtcctccccaggacacaagcacagggttagaggaggtgatggagcaactc

SEQ ID NO: 736270 - DNA, 120 bp, Artificial Sequence
  ENSG00000198947_93 (sequence is synthesized)
aacaactccttccctagttcaagaggaagaaatacccctggaaagccaatgagagaggacacaatgtaggaagtcttttccacatggcagatgatttgggcagagcgatggagtccttag

SEQ ID NO: 736271 - DNA, 120 bp, Artificial Sequence
  ENSG00000198947_94 (sequence is synthesized)
tatcagtcatgacagatgaagaaggagcagaataaatgttttacaactcctgattcccgcatggtttttataatattcatacaacaaagaggattagacagtaagagtttacaagaaata

SEQ ID NO: 736272 - DNA, 120 bp, Artificial Sequence
  ENSG00000198947_95 (sequence is synthesized)
aatctatatttttgtgaagggtagtggtattatactgtagatttcagtagtttctaagtctgttattgttttgttaacaatggcaggttttacacgtctatgcaattgtacaaaaaagtt

SEQ ID NO: 736273 - DNA, 120 bp, Artificial Sequence
  ENSG00000198947_96 (sequence is synthesized)
ataagaaaactacatgtaaaatcttgatagctaaataacttgccatttctttatatggaacgcattttgggttgtttaaaaatttataacagttataaagaaagattgtaaactaaagtg

SEQ ID NO: 736274 - DNA, 85 bp, Artificial Sequence
  ENSG00000198947_97 (sequence is synthesized)
caaaacaaactttgaggcagcgcattgttttgcatccttttggcgtgatatccatatgaaattcatggctttttctttttttgca

SEQ ID NO: 736275 - DNA, 120 bp, Artificial Sequence
  ENSG00000198947_98 (sequence is synthesized)
tgatatccatatgaaattcatggctttttctttttttgcatattaaagataagacttcctctaccaccacaccaaatgactactacacactgctcatttgagaactgtcagctgagtggg

SEQ ID NO: 736276 - DNA, 120 bp, Artificial Sequence
  ENSG00000198947_99 (sequence is synthesized)
tggggcaggcttgagttttcatttcatatatctatatgtctataagtatataaatactatagttatatagataaagagatacgaatttctatagactgactttttccattttttaaatgt

SEQ ID NO: 736277 - DNA, 120 bp, Artificial Sequence
  ENSG00000198947_100 (sequence is synthesized)
gtcacatcctaatagaaagaaattacttctagtcagtcatccaggcttacctgcttggtctagaatggatttttcccggagccggaagccaggaggaaactacaccacactaaaacattg

SEQ ID NO: 736278 - DNA, 120 bp, Artificial Sequence
  ENSG00000198947_101 (sequence is synthesized)
tctacagctccagatgtttctcattttaaacaactttccactgacaacgaaagtaaagtaaagtattggatttttttaaagggaacatgtgaatgaatacacaggacttattatatcaga

SEQ ID NO: 736279 - DNA, 120 bp, Artificial Sequence
  ENSG00000198947_102 (sequence is synthesized)
gtgagtaatcggttggttggttgattgattgattgattgatacattcagcttcctgctgctagcaatgccacgatttagatttaatgatgcttcagtggaaatcaatcagaaggtattct

SEQ ID NO: 736280 - DNA, 120 bp, Artificial Sequence
  ENSG00000198947_103 (sequence is synthesized)
gaccttgtgaacatcagaaggtattttttaactcccaagcagtagcaggacgatgatagggctggagggctatggattcccagcccatccctgtgaaggagtaggccactctttaagtga

SEQ ID NO: 736281 - DNA, 120 bp, Artificial Sequence
  ENSG00000198947_104 (sequence is synthesized)
aggattggatgattgttcataatacataaagttctctgtaattacaactaaattattatgccctcttctcacagtcaaaaggaactgggtggtttggtttttgttgcttttttagattta

SEQ ID NO: 736282 - DNA, 120 bp, Artificial Sequence
  ENSG00000198947_105 (sequence is synthesized)
ttgtcccatgtgggatgagtttttaaatgccacaagacataatttaaaataaataaactttgggaaaaggtgtaaaacagtagccccatcacatttgtgatactgacaggtatcaaccca

SEQ ID NO: 736283 - DNA, 120 bp, Artificial Sequence
  ENSG00000198947_106 (sequence is synthesized)
gaagcccatgaactgtgtttccatcctttgcatttctctgcgagtagttccacacaggtttgtaagtaagtaagaaagaaggcaaattgattcaaatgttacaaaaaaacccttcttggt

SEQ ID NO: 736284 - DNA, 120 bp, Artificial Sequence
  ENSG00000198947_107 (sequence is synthesized)
ggattagacaggttaaatatataaacaaacaaacaaaaattgctcaaaaaagaggagaaaagctcaagaggaaaagctaaggactggtaggaaaaagctttactctttcatgccatttta

SEQ ID NO: 736285 - DNA, 120 bp, Artificial Sequence
  ENSG00000198947_108 (sequence is synthesized)
tttctttttgatttttaaatcattcattcaatagataccaccgtgtgacctataattttgcaaatctgttacctctgacatcaagtgtaattagcttttggagagtgggctgacatcaag

SEQ ID NO: 736286 - DNA, 120 bp, Artificial Sequence
  ENSG00000198947_109 (sequence is synthesized)
tgtaattagcttttggagagtgggttttgtccattattaataattaattaattaacatcaaacacggcttctcatgctatttctacctcactttggttttggggtgttcctgataattgt

SEQ ID NO: 736287 - DNA, 120 bp, Artificial Sequence
  ENSG00000198947_110 (sequence is synthesized)
gcacacctgagttcacagcttcaccacttgtccattgcgttattttctttttcctttataattctttctttttccttcataattttcaaaagaaaacccaaagctctaaggtaacaaatt

SEQ ID NO: 736288 - DNA, 120 bp, Artificial Sequence
  ENSG00000198947_111 (sequence is synthesized)
accaaattacatgaagatttggtttttgtcttgcatttttttcctttatgtgacgctggaccttttctttacccaaggatttttaaaactcagatttaaaacaaggggttactttacatc

SEQ ID NO: 736289 - DNA, 120 bp, Artificial Sequence
  ENSG00000198947_112 (sequence is synthesized)
ctactaagaagtttaagtaagtaagtttcattctaaaatcagaggtaaatagagtgcataaataattttgttttaatctttttgtttttcttttagacacattagctctggagtgagtct

SEQ ID NO: 736290 - DNA, 120 bp, Artificial Sequence
  ENSG00000198947_113 (sequence is synthesized)
gtcataatatttgaacaaaaattgagagctttattgctgcattttaagcataattaatttggacattatttcgtgttgtgttctttataaccaccaagtattaaactgtaaatcataatg

SEQ ID NO: 736291 - DNA, 120 bp, Artificial Sequence
  ENSG00000198947_114 (sequence is synthesized)
taactgaagcataaacatcacatggcatgttttgtcattgttttcaggtactgagttcttacttgagtatcataatatattgtgttttaacaccaacactgtaacatttacgaattattt

SEQ ID NO: 736292 - DNA, 120 bp, Artificial Sequence
  ENSG00000198947_115 (sequence is synthesized)
ttttaaacttcagttttactgcattttcacaacatatcagacttcaccaaatatatgccttactattgtattatagtactgctttactgtgtatctcaataaagcacgcagttatgttac

SEQ ID NO: 736293 - DNA, 120 bp, Artificial Sequence
  ENSG00000198947_116 (sequence is synthesized)
gtgcaaaaagattgtgtgtttgtctgcttttgtgaggctggtcagagattctgtgcctgctttatctgtgcttggctatgactctacctccaggtttaccataccccatagaatgtgtaa

SEQ ID NO: 736294 - DNA, 120 bp, Artificial Sequence
  ENSG00000198947_117 (sequence is synthesized)
gctttcagctgtgagcttgggcggcggcggcggcggcgctccactttcggggagcccggcggctctgggaagctcactcctccactcgtacccacactcgaccgcggagcccttgcagcc

SEQ ID NO: 736295 - DNA, 120 bp, Artificial Sequence
  ENSG00000198947_118 (sequence is synthesized)
acactagcaatggcaaagctttgtgcggaggcattgctggctgctctgaactaaaagcatccgtggggaccgaaagaggtttttgcacaccttattaaggaactccaggatggcattggg

SEQ ID NO: 736296 - DNA, 120 bp, Artificial Sequence
  ENSG00000198947_119 (sequence is synthesized)
gaatttaaagtataataaaaaaaaaattgaggtctgcaacaggcaaagccactaaagaaactcagatatttttcattgtaatgttgaaaaagttatgaaatttcactaagcccgtgtcta

SEQ ID NO: 736297 - DNA, 120 bp, Artificial Sequence
  ENSG00000198947_120 (sequence is synthesized)
ccaggactcccccctgagccagcctcgtagtcctgcccagatcttgatttccttagagagtgaggaaagaggggagctagagagaatcctagcagatcttgaggaagaaaacagatatac

SEQ ID NO: 736298 - DNA, 120 bp, Artificial Sequence
  ENSG00000198947_121 (sequence is synthesized)
acagaagttcctgctcttcgctacaatgagggaaaaaagtggcaacatcgatagaggctagaggcagagaaattctaggcagacaagggtgggacctagcaaaaccccaccttcaagctg

SEQ ID NO: 736299 - DNA, 120 bp, Artificial Sequence
  ENSG00000198947_122 (sequence is synthesized)
aacttctatccctgtttgctcgctctctcccagttgactctttctgaataatgtctttctacctattgaatgttgccttttcccaaaattacttatgaccctccctgccccccatcatat

SEQ ID NO: 736300 - DNA, 120 bp, Artificial Sequence
  ENSG00000198947_123 (sequence is synthesized)
ccctataaagaccccagactcagtaggtagaaagggagacgcagcttgactggagagaggcaacttgacttcagagggacagctggactttggaggagtgatggcttaacttcggagaag

SEQ ID NO: 736301 - DNA, 120 bp, Artificial Sequence
  ENSG00000198947_124 (sequence is synthesized)
agctggctggagactgccagatgtcagggaagattacctgcccgtcctgcctcctcttcagctcccctctccactgtgagacatttccatccctaaataaaattctccacctccaccatc

SEQ ID NO: 736302 - DNA, 76 bp, Artificial Sequence
  ENSG00000198947_125 (sequence is synthesized)
atgctttggtgggaagaagtagaggactgttatgaaagagaagatgttcaaaagaaaacattcacaaaaaactttt

SEQ ID NO: 736303 - DNA, 120 bp, Artificial Sequence
  ENSG00000198947_126 (sequence is synthesized)
tgcatattccaggcctcctctctttgaggttcctcccacatccacacgcctggctactgtttagtgcggagtacaaagtggccgtttattattattgactggtgaggcctgtgctccaaa

SEQ ID NO: 736304 - DNA, 120 bp, Artificial Sequence
  ENSG00000198947_127 (sequence is synthesized)
attcattctgtcaacagaatgtaagcaaagttggcattttaaagcagggctctttcagtttctgggttttctcaggattgctatgcaacaggatcagtgctgtagtgcccggttcaagct

SEQ ID NO: 736305 - DNA, 120 bp, Artificial Sequence
  ENSG00000198947_128 (sequence is synthesized)
catctcgccaaacaaagtgccctactatatcaagagctgatagccagcaaccacacttcaagaaatggaagacagctgtgaatgcttcattcaggcccaagtaaatataggaagaggtgt

SEQ ID NO: 736306 - DNA, 120 bp, Artificial Sequence
  ENSG00000198947_129 (sequence is synthesized)
agtggtgtatagcgtactgcgtttaaagaaaaaacactctgaaataatgggaagaaggaagttatgatatattagtcaggcagtagatataccttaagctgaaatgaaatacaggtatca

SEQ ID NO: 736307 - DNA, 120 bp, Artificial Sequence
  ENSG00000198947_130 (sequence is synthesized)
gtgaaagcaaatgagaagtgagatgatttatatttattgaactaatgtccggtatctctttgacagagttgaataataatcagttgtcggtgtcctttctgtagtgttccacattggatg

SEQ ID NO: 736308 - DNA, 120 bp, Artificial Sequence
  ENSG00000198947_131 (sequence is synthesized)
ggtgaagaagtcctgatagtcgattattgatcacataacaaggtcaatttatcataactgaagtgcgatcgatttgtgggtgcaaagaagaaacaaattctggaaccgaataatgtttat

SEQ ID NO: 736309 - DNA, 120 bp, Artificial Sequence
  ENSG00000198947_132 (sequence is synthesized)
attgcttttctctttggaaacaaagcagaaaggggcctttctgcttgtaagataaacatttcttcaatacactatggaagcgctttgaaataaagattccgaatggttcaaaagcaaaaa

SEQ ID NO: 736310 - DNA, 120 bp, Artificial Sequence
  ENSG00000198947_133 (sequence is synthesized)
gttttttcaagaagcaggattcaaggtttaacttcaaatacaaatttgaatcaacactaaattttaggagtgcataatgaaagagaagatgttcaaaagaaaacattcacaaaatgggta

SEQ ID NO: 736311 - DNA, 120 bp, Artificial Sequence
  ENSG00000198947_134 (sequence is synthesized)
ttctaaggtctgtgcaggccaaggttatggcctagctgagaagagggctcagaggagcctagctaaagtttggtcaaggggagcgtcttggtggagcctcactcctgttcaagtaaagaa

SEQ ID NO: 736312 - DNA, 120 bp, Artificial Sequence
  ENSG00000198947_135 (sequence is synthesized)
gacacattattcatccttctgaacagttttgggaagcagcatattgagaacctcttcagtgacctacaggatgggaggcgcctcctagacctcctcgaaggcctgacagggcaaaaactg

SEQ ID NO: 736313 - DNA, 120 bp, Artificial Sequence
  ENSG00000198947_136 (sequence is synthesized)
atgcgaaaggggagctgttggaattcaaatagactttctggttcccagcagtcggcagtaatagaatgctttcaggaagatgacagaatcaggagaaagatgctgttttgcactatcttg

SEQ ID NO: 736314 - DNA, 120 bp, Artificial Sequence
  ENSG00000198947_137 (sequence is synthesized)
taatgcgatatgataaaatgctgtttaatatgtcttaaaaatatattttagatagcaagcaaaatcaaagtttagcctagagaaatctttctggattcttctgtgactgactagggatgc

SEQ ID NO: 736315 - DNA, 120 bp, Artificial Sequence
  ENSG00000198947_138 (sequence is synthesized)
ctttcataaacttgccttaacttacatattatttaactataaattaacaattttatgacattaattcatgttgattcctttcatatattgttcagttacctcaaggctaggccttagcaa

SEQ ID NO: 736316 - DNA, 120 bp, Artificial Sequence
  ENSG00000198947_139 (sequence is synthesized)
gcttgcacaattgtgtagagtagaatagagtaaaatagaatagaataatataatagataccatacttaggactatgtctatattctcactgttatcaaaaagttattctttatagtcatc

SEQ ID NO: 736317 - DNA, 120 bp, Artificial Sequence
  ENSG00000198947_140 (sequence is synthesized)
aatccctgtcatatattataagatatttaaatttcccagatatttgtgtattaccttatctaaaaggtgtccagcctttctcagtatttacatgtggtagcagatgctttgttgttgtta

SEQ ID NO: 736318 - DNA, 120 bp, Artificial Sequence
  ENSG00000198947_141 (sequence is synthesized)
ttcccttctgagatggtataattttgaccttcacaaataggaagttttattaatttaatataaagtgtttcatctttagggaaattgtcaaggctttaatttttcaacttcaacaattat

SEQ ID NO: 736319 - DNA, 120 bp, Artificial Sequence
  ENSG00000198947_142 (sequence is synthesized)
aaaacatgcatctttgtatatgattggcaacagtttgtaaaataatttctaacaggcagagtaaataaaatgggcaagctaaggaagcagtgattatgaatgaaaagtaattttatccat

SEQ ID NO: 736320 - DNA, 120 bp, Artificial Sequence
  ENSG00000198947_143 (sequence is synthesized)
gggaagatcacatctaaatgtgtatattagctctgctttttctctccaggattcaaatcatgaagttcaaaatccattgtatttttacaaatacgacattacctcagttacaagctaatg

SEQ ID NO: 736321 - DNA, 120 bp, Artificial Sequence
  ENSG00000198947_144 (sequence is synthesized)
tttgctgttggggttggaacttttggagatcaacaaaagatatatatatattctggaaaaaaaatctattttttaggctgcttgaaaaagggaagacaattttgtcaccagttcttctta

SEQ ID NO: 736322 - DNA, 120 bp, Artificial Sequence
  ENSG00000198947_145 (sequence is synthesized)
gagttaactacttataaattggaaagctattttaaattacttattagctttataagacatgctgttgtcagcattataatagactattctaaattgtttcaagaaatgggaaatatgaaa

SEQ ID NO: 736323 - DNA, 120 bp, Artificial Sequence
  ENSG00000198947_146 (sequence is synthesized)
actgaaagataatatataattgtagaaaattagctaaatgtcttttttcaagtatacttctttgaaggtaaattgtttgctgtgatttttgagggaaattctcttagtagtagaaaatta

SEQ ID NO: 736324 - DNA, 120 bp, Artificial Sequence
  ENSG00000198947_147 (sequence is synthesized)
attagagaacattaaactctaattttcaaacatcatgttacatatttgaccactgaaagtatgaatcacctttagcattttattagctaattaaaaatgattattgatctgattctcaca

SEQ ID NO: 736325 - DNA, 120 bp, Artificial Sequence
  ENSG00000198947_148 (sequence is synthesized)
aaatgtctgaggtctcatctggtgagtaaaagctgcagataaatgcaacagccattcagaagaatgataaattccacaagcattcagaagcaggcttccctaaagatgaaagagaagatg

SEQ ID NO: 736326 - DNA, 120 bp, Artificial Sequence
  ENSG00000198947_149 (sequence is synthesized)
gagatgaaaggaaaataaagatgaactaatgacttatcggtatatggacgacttcttactcatgttagcccattcatttcatcagagcatcttcacacatcagtgttcactctctataga

SEQ ID NO: 736327 - DNA, 120 bp, Artificial Sequence
  ENSG00000198947_150 (sequence is synthesized)
tttatttgcatattgtctaaatatgtttttttctgttattattttacactttttattttgcttcattctctgttgagttcctcaaacctttaaaaaggaaataaataacttattcactta

SEQ ID NO: 736328 - DNA, 120 bp, Artificial Sequence
  ENSG00000198947_151 (sequence is synthesized)
acatggaaacgtgagtagtagcaaaagcagaacacactcttgtttgatgtatatttgaactcctctcagctgaacaccctccttcactcccaaatgcaaacagtctcttctatttctttc

SEQ ID NO: 736329 - DNA, 120 bp, Artificial Sequence
  ENSG00000198947_152 (sequence is synthesized)
tttttatttacattagctgaaaagagaaaaataagctgatgtccagttgccactttcccacgtcacttgacaatttctttttccaaaagttaaactttatctcacagggggaaaaaaaaa

SEQ ID NO: 736330 - DNA, 120 bp, Artificial Sequence
  ENSG00000198948_0 (sequence is synthesized)
gcgcagctcgcaacgctgtgaggcgccggcggaggcggctcgcccgcagtaggcgctaccgggcgtccggcgcagagtgcggcgcagcggccgctgtcgggctggccatggcgaggggtg

SEQ ID NO: 736331 - DNA, 120 bp, Artificial Sequence
  ENSG00000198948_1 (sequence is synthesized)
gaggggtgcacggcggccacctgagtggcgcggcggtgtcaggttcttgctcaagtaccaactctatggacccaggacaggtttgtcccatgacctgctgtgaacagtgtgttgtctgat

SEQ ID NO: 736332 - DNA, 120 bp, Artificial Sequence
  ENSG00000198948_2 (sequence is synthesized)
agaagattcggttggcaaaccatctctctattgccttacagagcaagcaaagaagatggatcgattgaagagccatctgactgtgtgctttctaccttctgtgccctttttaatcctagt

SEQ ID NO: 736333 - DNA, 120 bp, Artificial Sequence
  ENSG00000198948_3 (sequence is synthesized)
atccactctagccaccgctaagagtgtgactaacagcactttaaatggcactaacgtggtcttgggctctgtgcccgtaatcattgccagaactgaccatatcatagtcaaggaagggaa

SEQ ID NO: 736334 - DNA, 120 bp, Artificial Sequence
  ENSG00000198948_4 (sequence is synthesized)
cagtgccttgattaactgtagtgtttatggcatccctgacccacagttcaagtggtataattccattggcaagctgctgaaagaagaagaggatgagaaggagagaggaggaggaaaatg

SEQ ID NO: 736335 - DNA, 120 bp, Artificial Sequence
  ENSG00000198948_5 (sequence is synthesized)
gcaaatgcacgacagcggcctcctgaacatcaccaaggtatccttctcagaccgaggtaaatacacgtgtgtggcttctaacatctacggcaccgtgaacaacacggtgaccttgcgcgt

SEQ ID NO: 736336 - DNA, 120 bp, Artificial Sequence
  ENSG00000198948_6 (sequence is synthesized)
catcttcacttctggagacatgggtgtctactacatggtcgtgtgcctggtggccttcaccatcgtcatggtcctcaatatcacccgcctgtgcatgatgagcagccatctaaagaagac

SEQ ID NO: 736337 - DNA, 120 bp, Artificial Sequence
  ENSG00000198948_7 (sequence is synthesized)
tgagaaggccatcaatgagttctttaggaccgaaggtgcagagaagctgcagaaggcatttgagatcgccaagcgcatccccatcatcacctccgccaaaactctagagcttgccaaagt

SEQ ID NO: 736338 - DNA, 120 bp, Artificial Sequence
  ENSG00000198948_8 (sequence is synthesized)
cacccagttcaaaaccatggagttcgcccgctacatcgaagagcttgccaggagcgtgcctctgccgcctctcattatgaactgcaggactatcatggaggagattatggaggtggttgg

SEQ ID NO: 736339 - DNA, 120 bp, Artificial Sequence
  ENSG00000198948_9 (sequence is synthesized)
gctggaggagcaggggcagaattttgtgaggcatactccagagggccaggaggccgcagacagggatgaggtctacacaatccccaactctctgaagcggagcgactcccctgccgctga

SEQ ID NO: 736340 - DNA, 120 bp, Artificial Sequence
  ENSG00000198948_10 (sequence is synthesized)
ctcggacgcctcatcgctgcacgagcaacctcagcaaattgccatcaaggtgtcagttcacccgcagtccaaaaaagagcatgcagatgaccaagagggtggacagtttgaagtcaaaga

SEQ ID NO: 736341 - DNA, 120 bp, Artificial Sequence
  ENSG00000198948_11 (sequence is synthesized)
tgtagaggagacagaactgtcggcggaacattcccccgaaactgcagaaccttctaccgatgtcacgtccaccgagctaacatctgaagagccaacacctgttgaggtaccagataaggt

SEQ ID NO: 736342 - DNA, 120 bp, Artificial Sequence
  ENSG00000198948_12 (sequence is synthesized)
actgccgccagcttacctggaagccacagagccagcagtgacacatgacaaaaacacctgcattatttacgaaagccatgtctaataccaaccccgaaaagctatgcatatcaagaaaat

SEQ ID NO: 736343 - DNA, 120 bp, Artificial Sequence
  ENSG00000198948_13 (sequence is synthesized)
caggggctgctccttgtaatacagatgtagtacgcacttgccgctaagccttaccaggagactctcatcccttaggtaggagtgatgccactttaaaaggagaaacacctgcctgcagtg

SEQ ID NO: 736344 - DNA, 120 bp, Artificial Sequence
  ENSG00000198948_14 (sequence is synthesized)
aatgggactggaatttccccagtagagaagggtgcgagaaacatcagggtgcagaattgataccagacagaaggtgtctatgtgataatgagtttcagaggctgatctctgccaaatacc

SEQ ID NO: 736345 - DNA, 120 bp, Artificial Sequence
  ENSG00000198948_15 (sequence is synthesized)
ttaattggtgatgccttcttggcaaagagtacaccactgtaagatattctgagttcaagaaccctgtccagtgccccctgcattgcttttccttttaaaaagtataggtctgctacaata

SEQ ID NO: 736346 - DNA, 120 bp, Artificial Sequence
  ENSG00000198948_16 (sequence is synthesized)
gcaaatgcacgtacgtgggttttttgcagtttcttctcagttttaattttgcttttcctttataatggggtcattgttattaatactaattgttctttctggtttagtcctcattgccac

SEQ ID NO: 736347 - DNA, 120 bp, Artificial Sequence
  ENSG00000198948_17 (sequence is synthesized)
ttttgtccttatgtttccctagaacacgtacctcagagactttggtatcagtcaccagtaccagggctgatatctacaagtcacattacatttgtcatgttccaaagtagttacgaggct

SEQ ID NO: 736348 - DNA, 120 bp, Artificial Sequence
  ENSG00000198948_18 (sequence is synthesized)
tgttatttttttttcattccccaggcctatttccatagatagctttttttgtttgtttccaacgaagctgctgttaaacgaaactgagaaaaactttgccccggaatagcactttaatag

SEQ ID NO: 736349 - DNA, 120 bp, Artificial Sequence
  ENSG00000198948_19 (sequence is synthesized)
tcaaaaatgtgtttacctgtctgattgagtgagccttttggtgagctcagctgagatgtagagggagattgtaaaaggttaaatatacccacaccacccatgaaagtcactgtttaagtt

SEQ ID NO: 736350 - DNA, 120 bp, Artificial Sequence
  ENSG00000198948_20 (sequence is synthesized)
acatcatcctccaaataaagactgattctttacctggaaaatatattgcttccaaagacatcagattcagtggattcctgtaggttatagaatattggcttccaaacaggcttgcaggga

SEQ ID NO: 736351 - DNA, 120 bp, Artificial Sequence
  ENSG00000198948_21 (sequence is synthesized)
ccatatgctgttggatgacatataaccaggtccacttttatgaactgcatagctgacttggttgtccttaaagaggaaagcgaaaggttagggtaatagcaaagggaactgtgccatcag

SEQ ID NO: 736352 - DNA, 120 bp, Artificial Sequence
  ENSG00000198948_22 (sequence is synthesized)
attttatgccaaaactgttgaataattatgcagtcctgcaagaaagtggttatatgtgaggtgcgtgatgttatggaaagaagacaaaattagtcatccaaaggcttaatacccactgtg

SEQ ID NO: 736353 - DNA, 120 bp, Artificial Sequence
  ENSG00000198948_23 (sequence is synthesized)
ccaataaccagctgcctggctttggacaagtctggacctcaggtcccttatctgtagaaggggcagatgacatgagctctgagcactgttgaaatggtatcactgtcacacagaaccaaa

SEQ ID NO: 736354 - DNA, 120 bp, Artificial Sequence
  ENSG00000198948_24 (sequence is synthesized)
ccaatattcacatccttgctccttttcacaatgactttaaagatttttgctttcatctcttggtccacctaacattttcatgcttcattacttaaataagaatgttggttttgagaaata

SEQ ID NO: 736355 - DNA, 120 bp, Artificial Sequence
  ENSG00000198948_25 (sequence is synthesized)
gcattttaaacaaattgtggatcttctccttccaaaaaaaccattaggaccacatctgcaattaagatttaatattggtgagaatgagtggttttatttaattttcccttaaaagcaaag

SEQ ID NO: 736356 - DNA, 120 bp, Artificial Sequence
  ENSG00000198948_26 (sequence is synthesized)
gtccaagattgcatggatcacattggtgatgagagcagacccagatgtttagtcctcactctgtcaccatctgaggaggtgaccttggacaactcccttcctctctctgggatttaatct

SEQ ID NO: 736357 - DNA, 120 bp, Artificial Sequence
  ENSG00000198948_27 (sequence is synthesized)
ttttcatctgtaaaatatgcaggtagtactcgagggtctacaggatcccttctagttgaaacatttatagttcacagaaagtttgcagtcttccaggataaccaacccccgttgcatgag

SEQ ID NO: 736358 - DNA, 120 bp, Artificial Sequence
  ENSG00000198948_28 (sequence is synthesized)
acaagcaaaaaatgggtccatgaaattggatacttttgccatccaaactttacaacaaacattatctggctctgtaattgagagcagtgggcttggttttaaacctagccttgattagtt

SEQ ID NO: 736359 - DNA, 120 bp, Artificial Sequence
  ENSG00000198948_29 (sequence is synthesized)
tgtttatagataactgttgtggaaggtgatagaactagtcatggagtttgatgagacatctcttgaaaaggactgaactgttgacttctggttagaagtgctttgggcagtcacataaag

SEQ ID NO: 736360 - DNA, 120 bp, Artificial Sequence
  ENSG00000198948_30 (sequence is synthesized)
aaatgagcagtgagaaatcaggagaaattatgactcctgttgggctttctggactagcattgtatgtttttgggttgcagaaaagttttaacaccacctcttagaatataaaaattttcc

SEQ ID NO: 736361 - DNA, 120 bp, Artificial Sequence
  ENSG00000198948_31 (sequence is synthesized)
agttgtcatggaggtccacagattcattaccatgggtttatatgcccaaagcaacaacagaggacttaagttcattttgtgatactgtatggatgttaccccatcctattcagttgtcat

SEQ ID NO: 736362 - DNA, 120 bp, Artificial Sequence
  ENSG00000198948_32 (sequence is synthesized)
tccacccaaacccatgtgtaggtttccacatggaaaggagaaggcatccattccacctagacattgaatagtgataataagctaaaagtgggcagattttcagtggagcaagagcagaaa

SEQ ID NO: 736363 - DNA, 120 bp, Artificial Sequence
  ENSG00000198948_33 (sequence is synthesized)
tatgcggccaaagaatgtttcctgattggttttgctgctttagactgcagtggggagagcttatgtagattttcaaaactttctccctctttaaggcatcataatgctctcggttttgat

SEQ ID NO: 736364 - DNA, 120 bp, Artificial Sequence
  ENSG00000198948_34 (sequence is synthesized)
aacaactgacataaagggaggttgacttaaaatgggaatttctccttccaaaaatgctacactcttcctatccatcctacagcttctttatgaaatgagaggccctcctgctagaatatg

SEQ ID NO: 736365 - DNA, 120 bp, Artificial Sequence
  ENSG00000198948_35 (sequence is synthesized)
aaatgcagaagacctcatgactttcagctgatttttcaaagataaagtgaactgttcagcttcatagaaattcatgcgagtgtgactgaacgtgtgtgcatacacactcgtgcacattgg

SEQ ID NO: 736366 - DNA, 120 bp, Artificial Sequence
  ENSG00000198948_36 (sequence is synthesized)
actcatttgggcagttttaaaagcttcacactaaatccaaagcctcgtcctttgggtcgtatgtagtcgtttgtaaaatcaatttctggcttctgagtcatcctggtcatatctctagca

SEQ ID NO: 736367 - DNA, 120 bp, Artificial Sequence
  ENSG00000198948_37 (sequence is synthesized)
atgtttttcttgaaattctgaaaatgattcacatatgtgtgtacatttaattcacttagatgatctgtaaacttggatggtatttattctaaatggggaaaacaattttatatggaaaaa

SEQ ID NO: 736368 - DNA, 120 bp, Artificial Sequence
  ENSG00000198948_38 (sequence is synthesized)
tctatgtaatttataatggttttgttttatatattatattttcatatctctagggcacatctatcctcatctttttgtataccatacttagcaaaaagaaatactaatacttgactaaaa

SEQ ID NO: 736369 - DNA, 120 bp, Artificial Sequence
  ENSG00000198948_39 (sequence is synthesized)
tctctaggaaccaaacgtgatacatgtgatatatagcttctagaaatcgctctaaaaatctctgaatgtctcatccatcccaagcattattgtgctgtgtcattatgtccagaatgattt

SEQ ID NO: 736370 - DNA, 120 bp, Artificial Sequence
  ENSG00000198948_40 (sequence is synthesized)
gtcttggatgcttatgagcatttgtttttcacaactaaggttgaaagacctgacatctcacacaatggggttctggaattcccctttcctcctttatctgtttttattgtttgtttcatt

SEQ ID NO: 736371 - DNA, 120 bp, Artificial Sequence
  ENSG00000198948_41 (sequence is synthesized)
tttaattgcaccagtctatgttgtcgaaactttgttttgaagggcaaatgtgagataacaagaaagcaatgtgatggaaagactggatgaatttacctatggctatgtaaattattttaa

SEQ ID NO: 736372 - DNA, 120 bp, Artificial Sequence
  ENSG00000198948_42 (sequence is synthesized)
tggactgataagatgtttcaagtctcatgcttggatctttatttattggtgatctaggatctgctcagctctttagcacatgaagaaaatcaggtacaaaggacatttgcatgtttggaa

SEQ ID NO: 736373 - DNA, 120 bp, Artificial Sequence
  ENSG00000198948_43 (sequence is synthesized)
cagcatgctctaagccccgtgcagccaacacaaattaacttgactgtagaaacaccaattccagctgctggaagaaatggtttagaaaggcaaaccagataccttttattctgccctagg

SEQ ID NO: 736374 - DNA, 120 bp, Artificial Sequence
  ENSG00000198948_44 (sequence is synthesized)
aaatacagtgttgatcagtgctaaaactcttcagtggcagtcactgtggttcttttaactggggatttcctttcagtgtttcatttggtaccaaaacagaacatttaccttacatttcag

SEQ ID NO: 736375 - DNA, 120 bp, Artificial Sequence
  ENSG00000198948_45 (sequence is synthesized)
atactctgttttctcagcattgttcagatactttcctttaccgctcttcacgtacccttttggcattgagtaattctataaatgtttctatccttggtttttaaaccaagttattcatac

SEQ ID NO: 736376 - DNA, 120 bp, Artificial Sequence
  ENSG00000198948_46 (sequence is synthesized)
tcttaaaatatctaccaaatctcattgtattttcacatattttgagcatcaagatactggtcattttaaaaaatccttcagtaaatagcacagtttattttcctaatgacatttttaggg

SEQ ID NO: 736377 - DNA, 120 bp, Artificial Sequence
  ENSG00000198948_47 (sequence is synthesized)
tttcttcattgatcaaccaggtttgggttacacaaatcaattgtgggggaaaaatcaaataaaacaattgcttattatattttccaaaggactgagcatttatcttttattcacgaagat

SEQ ID NO: 736378 - DNA, 120 bp, Artificial Sequence
  ENSG00000198948_48 (sequence is synthesized)
atcatatgaggatgataatgatctttaacagattttttagagatagaatttataaagaggctgatactaagaatactacaatcaaaattgaagctagagaatgtaaaaatagaaagtaaa

SEQ ID NO: 736379 - DNA, 120 bp, Artificial Sequence
  ENSG00000198948_49 (sequence is synthesized)
tagttctaagaatattctggcataaattatttttatttagccaataaaatagcctccaaatgtatatctcagacaccatagagctgctaacaatgagaatcaaggaagatgcttgcactt

SEQ ID NO: 736380 - DNA, 120 bp, Artificial Sequence
  ENSG00000198948_50 (sequence is synthesized)
agatttcgtttgttgtatttcagtagttctggatgtcctttgttaaaattggaaaatggaaaaatgtctcgacagaaatgtcaatctggtgattctgtgaactgtaaaatgttcactttt

SEQ ID NO: 736381 - DNA, 120 bp, Artificial Sequence
  ENSG00000198948_51 (sequence is synthesized)
aaaaataaagttgtaaacaagttactcatataagttggtattacagtagcaaaaacagaaaaccatgtgatccatcctgtattttgattgatgctttaataaagggtttgcacagctgtg

SEQ ID NO: 736382 - DNA, 120 bp, Artificial Sequence
  ENSG00000198948_52 (sequence is synthesized)
ccgtaatgtctggtgatgttccccagcctgtgggaggcagatgagattgaaaccagggtgtacatgagtgacctggagcccgtaagtaacagtaacacagagcagagagcgctagatgag

SEQ ID NO: 736383 - DNA, 120 bp, Artificial Sequence
  ENSG00000198948_53 (sequence is synthesized)
gtggagctcagaggagcatgggaagttgaatgagacagtaaggagcattctggaagctataatgggtagttaggagaatgccagagtgattctgatgcagtccttccaaatgccggcaga

SEQ ID NO: 736384 - DNA, 120 bp, Artificial Sequence
  ENSG00000198948_54 (sequence is synthesized)
gcccaagctgtgaccagtgacgcagactggaagtcccgtttactgggagagaagaggttaaggaacacccaggtgaacaattaggtcctccacaatgaagacaggtaatgtggaggaaag

SEQ ID NO: 736385 - DNA, 120 bp, Artificial Sequence
  ENSG00000198948_55 (sequence is synthesized)
gcacatggcctgggcctttgggctccccactgtgaggcctctcacggtgggacccaggctttgggtagctggctccatgctctagcaaagcctcacttagcagtggggaggtcccaagaa

SEQ ID NO: 736386 - DNA, 120 bp, Artificial Sequence
  ENSG00000198948_56 (sequence is synthesized)
gagaagcgagatacccatataaagcaagcctgcttagccttccagggtccttcaaatcttaccaaatgaaagccagcttgctccacctactgtcaagccagcatctcattctccccattc

SEQ ID NO: 736387 - DNA, 120 bp, Artificial Sequence
  ENSG00000198948_57 (sequence is synthesized)
ttggatttctcatcatgcaatagcaaagtcacagttattcctactgagatcacaatgatgctgccagagcctcccctgagcttgagagccctcctcttctaagcagcatttggagcatcc

SEQ ID NO: 736388 - DNA, 120 bp, Artificial Sequence
  ENSG00000198948_58 (sequence is synthesized)
tccattgtatagtgggaaagtggatatctggctttccttccttcctgaggaaattatgaacaagaagaacaaactccaagctaaatacaagtcacgacttttccagaatccaaaagtaaa

SEQ ID NO: 736389 - DNA, 120 bp, Artificial Sequence
  ENSG00000198948_59 (sequence is synthesized)
ttagcaggtctttctgcagggctgagctatcgctagggaacccacggtgactgaatcaaagggaagaaagacccaagacctggatctcccttttacatggaccctaaagcaaaggaaaat

SEQ ID NO: 736390 - DNA, 120 bp, Artificial Sequence
  ENSG00000198948_60 (sequence is synthesized)
gaggagaagaagccactaacattgcaggatcgtgtagcgaaacttctgtaggtacttaataattttagagtactctactttttaattaaaaaatcaacttatggttcattagaaaaaacg

SEQ ID NO: 736391 - DNA, 120 bp, Artificial Sequence
  ENSG00000198948_61 (sequence is synthesized)
tggaaattacaaataatatttttaaagaaaatgaaaaaaaaattcctggaaccccaccactcagaaagtcaccagggaacggcccgctgggtttttttccagactcttccatctgtggac

SEQ ID NO: 736392 - DNA, 120 bp, Artificial Sequence
  ENSG00000198948_62 (sequence is synthesized)
tgtcttgtttttctaaggcaggagagaatatatatccttaaggattcaaagaagcaattaattcatttttttccctcattgacacagaagacaaaggacaaacacagaagtctttttaaa

SEQ ID NO: 736393 - DNA, 120 bp, Artificial Sequence
  ENSG00000198948_63 (sequence is synthesized)
ggcttcttggaattttgtaatataatacatccaatacattatagagacaaatgtaaaatggattttcctaaataatatattcaatttttaagggagttttgttttctttcatggagatgg

SEQ ID NO: 736394 - DNA, 120 bp, Artificial Sequence
  ENSG00000198948_64 (sequence is synthesized)
ctggaataaacaatatagccattgtttatcattaaatgtccatttaattcattggccgtggatttaaagaccacacttctgaaagaaacctcagtgcaagtctcagccactggctgggat

SEQ ID NO: 736395 - DNA, 120 bp, Artificial Sequence
  ENSG00000198948_65 (sequence is synthesized)
tcctggagacctggctgcagtttctaggctgaggcagggagggagggaggatgcaataacaaggaaggatgtgggacaacaggagactgcttggtttttaataaatgcatttctgaccaa

SEQ ID NO: 736396 - DNA, 120 bp, Artificial Sequence
  ENSG00000198948_66 (sequence is synthesized)
atcgctagggaacccacggtgactgaatcaaagggaagaaagacccaagacctggatctcccttttacatggaccctaaagcaaaggtcctgtaggtgaaaaatgttgaagagcctctca

SEQ ID NO: 736397 - DNA, 120 bp, Artificial Sequence
  ENSG00000198948_67 (sequence is synthesized)
ctcagactgagtgaatatgagaagaactagatggaaaaggcatcctcactaccgatagcaaggtcagacagtgttaggatttgtgccggaacatgtgtgtgtacatggcatgcacatgca

SEQ ID NO: 736398 - DNA, 120 bp, Artificial Sequence
  ENSG00000198951_0 (sequence is synthesized)
atcaggttaccggattcgagtcagaagcggcggcaggtctgaacgcttcggtaggataagtgcggtgggagggggctctgcggttttggggagcccagggcgggaacccggacccggctg

SEQ ID NO: 736399 - DNA, 120 bp, Artificial Sequence
  ENSG00000198951_1 (sequence is synthesized)
gaagtccggagcctggccgcagccccgcccctccgctctttcttggtgaccttaagccagtggctgcctttttctgagcccgggcggggccgaaggcggcccgtaggccctcgggactcc

SEQ ID NO: 736400 - DNA, 120 bp, Artificial Sequence
  ENSG00000198951_2 (sequence is synthesized)
cagcactgcagagggtgtgaggtctgacatccaagacacgttgtttcgtatttctgaaggaagaactgaagctccgggaagtgatggctggggatggggcgggcaacttggggaccgagt

SEQ ID NO: 736401 - DNA, 120 bp, Artificial Sequence
  ENSG00000198951_3 (sequence is synthesized)
gtacgatccacgcctaaggttgagggcggccgagctagccaggcagccgtgaccccagtgcttttcagacgtttcttagcttccagagcccaacacatacagctgatacacgcagaccag

SEQ ID NO: 736402 - DNA, 120 bp, Artificial Sequence
  ENSG00000198951_4 (sequence is synthesized)
atctggtcaggtcctcggaagctgagtccagagcgatgctgctgaagacagtgctcttgctgggacatgtggcccaggtgctgatgctggacaatgggctcctgcagacaccacccatgg

SEQ ID NO: 736403 - DNA, 120 bp, Artificial Sequence
  ENSG00000198951_5 (sequence is synthesized)
gctggctggcctgggaacgcttccgctgcaacattaactgtgatgaggacccaaagaactgcataagtgaacagctcttcatggagatggctgaccggatggcacaggatggatggcggg

SEQ ID NO: 736404 - DNA, 120 bp, Artificial Sequence
  ENSG00000198951_6 (sequence is synthesized)
acatgggctacacatacctcaacattgatgactgctggatcggtggtcgcgatgccagtggccgcctgatgccggatcccaagcgcttccctcatggcattcctttcctggctgactacg

SEQ ID NO: 736405 - DNA, 120 bp, Artificial Sequence
  ENSG00000198951_7 (sequence is synthesized)
ttcactccctgggcctgaagttgggtatctacgcggacatgggcaacttcacctgcatgggttacccaggcaccacactggacaaggtggtccaggatgctcagaccttcgccgagtgga

SEQ ID NO: 736406 - DNA, 120 bp, Artificial Sequence
  ENSG00000198951_8 (sequence is synthesized)
aggtagacatgctcaagctggatggctgcttctccacccccgaggagcgggcccaggggtaccccaagatggctgctgccctgaatgccacaggccgccccatcgccttctcctgcagct

SEQ ID NO: 736407 - DNA, 120 bp, Artificial Sequence
  ENSG00000198951_9 (sequence is synthesized)
ggccagcctatgaaggcggcctccccccaagggtgaactacagtctgctggcggacatctgcaacctctggcgtaactatgatgacatccaggactcctggtggagcgtgctctccatcc

SEQ ID NO: 736408 - DNA, 120 bp, Artificial Sequence
  ENSG00000198951_10 (sequence is synthesized)
tgaattggttcgtggagcaccaggacatactgcagccagtggccggccctgggcactggaatgaccctgacatgctgctcattgggaactttggtctcagcttagagcaatcccgggccc

SEQ ID NO: 736409 - DNA, 120 bp, Artificial Sequence
  ENSG00000198951_11 (sequence is synthesized)
agatggccctgtggacggtgctggcagcccccctcttgatgtccacagacctgcgtaccatctccgcccagaacatggacattctgcagaatccactcatgatcaaaatcaaccaggatc

SEQ ID NO: 736410 - DNA, 120 bp, Artificial Sequence
  ENSG00000198951_12 (sequence is synthesized)
ccttaggcatccagggacgcaggattcacaaggaaaaatctctcatcgaagtgtacatgcggcctctgtccaacaaggctagcgccttagtcttcttcagctgcaggaccgatatgcctt

SEQ ID NO: 736411 - DNA, 120 bp, Artificial Sequence
  ENSG00000198951_13 (sequence is synthesized)
atcgctaccactcctcccttggccagctgaacttcaccgggtctgtgatatatgaggcccaggacgtctactcaggtgacatcatcagtggcctccgagatgaaaccaacttcacagtga

SEQ ID NO: 736412 - DNA, 120 bp, Artificial Sequence
  ENSG00000198951_14 (sequence is synthesized)
tcatcaacccttcaggggtagtgatgtggtacctgtatcccatcaagaacctggagatgtcccagcagtgaggagctgggacatgtgacaggctgtggtggcaccactgagcctagacca

SEQ ID NO: 736413 - DNA, 120 bp, Artificial Sequence
  ENSG00000198951_15 (sequence is synthesized)
ccaggttctatgccctgtccaagcgtaaaccctcttggaaacttcttttggggcaattttcctgtggccttcctggcctctacttccatgtgcgcagccccacagacgttgctgagcaac

SEQ ID NO: 736414 - DNA, 120 bp, Artificial Sequence
  ENSG00000198951_16 (sequence is synthesized)
tcgccagcctcctgagctccatgcccatcaggactctagcctctgaccttgctgttgactctgaaatcaggatttggaagttttcgaattaggagtagagagatctgacctcttgccagg

SEQ ID NO: 736415 - DNA, 120 bp, Artificial Sequence
  ENSG00000198951_17 (sequence is synthesized)
aatgcccatggatcatgtgattggcttttctacccatagagggccttgcagcctgataccacctgggagtgagggtcacaaaggagaccttggctccctcaggtcaccaataaacctgtt

SEQ ID NO: 736416 - DNA, 120 bp, Artificial Sequence
  ENSG00000198951_18 (sequence is synthesized)
ctttaatcaagtagttgtaatatggacctggggtacctttagttagggactctggtggcactacacggggtgctggattcaaatctcacctctatggatgatgtctggcatcgtctggcc

SEQ ID NO: 736417 - DNA, 120 bp, Artificial Sequence
  ENSG00000198951_19 (sequence is synthesized)
cctccttttccaaagtgaccagaagattgtacttcctagagatgccagacttgcctcacacccaggagctgcccctgctgtgcctggtatgctggcagtggtgatggtgacaacacaatg

SEQ ID NO: 736418 - DNA, 120 bp, Artificial Sequence
  ENSG00000198951_20 (sequence is synthesized)
aggccaagtagcaatgctcccaggtcctgcagcttgtgctctgcccagcagtgcccctggcccagcacctcagcctgctcttctctctggtggctccaccccaacccctacttcttttcc

SEQ ID NO: 736419 - DNA, 120 bp, Artificial Sequence
  ENSG00000198951_21 (sequence is synthesized)
tttatttctctcccaacctggctgcaaaggaggttcatattccccagatgtgtccacaaacctgtccaggagttgtgtcttaaaattgatttcctgtccctcttcctaaggacaggggta

SEQ ID NO: 736420 - DNA, 120 bp, Artificial Sequence
  ENSG00000198951_22 (sequence is synthesized)
acagtcaaagtgaaggaatgatgggttcttgcctgtcttgctttggtccgtatttcccaagccctcctcttttagccaaggctacagggcacttgtcttccctggtggctctcccctttg

SEQ ID NO: 736421 - DNA, 120 bp, Artificial Sequence
  ENSG00000198951_23 (sequence is synthesized)
gagagagctagtggcagagcaacctagctaggtcctccttgggctttgaatgcaggagcacccagtgccccaggccttgcactgtgctgcccaaggagtattttctgggtggatctccca

SEQ ID NO: 736422 - DNA, 120 bp, Artificial Sequence
  ENSG00000198951_24 (sequence is synthesized)
tactcctcagggttctgaggtccttgtatttagggtatggtgtaaaaacttacatatgcacattttgttacatcatttaagatgattgaagctttactggttaagtatagggtcaccaga

SEQ ID NO: 736423 - DNA, 120 bp, Artificial Sequence
  ENSG00000198951_25 (sequence is synthesized)
gaaagttcctttccccagttgatgtcttgaggctgttgagaaacttaggacagaagcctacctcatcccaggcctgcccctccgtgcatagctctgcctttgggtcttgttcatagtgct

SEQ ID NO: 736424 - DNA, 120 bp, Artificial Sequence
  ENSG00000198951_26 (sequence is synthesized)
gttcaggcaaaatggaatagtctcaggtgggaacaccttctcttgctagctccaggaaggctttgtgggaaatgagttgagaccatggacttgggagttgggggccagagttgagcctgg

SEQ ID NO: 736425 - DNA, 120 bp, Artificial Sequence
  ENSG00000198951_27 (sequence is synthesized)
acttgaccaattaattcccttacctttcagcccaagatagctacatgtctttacttgctgtataagttttccttttgtcctgggggtgcctgattgatcctatctcttcacccttcattc

SEQ ID NO: 736426 - DNA, 120 bp, Artificial Sequence
  ENSG00000198951_28 (sequence is synthesized)
tttcaacaaacatgccatctatctcccaggacatttattcccttctattcaaggccagttaggaatgcaattatttttttttttcagttaaatacagacttgtttggacgcaaggtaccc

SEQ ID NO: 736427 - DNA, 120 bp, Artificial Sequence
  ENSG00000198951_29 (sequence is synthesized)
tttctctttttaaaaactttttatcatgaaaactttcaaatacaaaaataaaatggtagagtgaacctccatgtacccagcatccagctccagtaaccatcaacgtgtaccattatttca

SEQ ID NO: 736428 - DNA, 120 bp, Artificial Sequence
  ENSG00000198951_30 (sequence is synthesized)
gccccgccctcactggaacgcttcggacttatcaggttaccggattcgagtcagaagcggcggcaggtctgaacgcttcgcttccagagcccaacacatacagctgatacacgcagacca

SEQ ID NO: 736429 - DNA, 120 bp, Artificial Sequence
  ENSG00000198952_0 (sequence is synthesized)
gtcgcgggcagccgcctcacagcgatggcggccgagcagggccggtggcggcggcggctgcggctacggccggagacggcagtgttggcggtagtggtgggtggcaggggcctgtgaccg

SEQ ID NO: 736430 - DNA, 120 bp, Artificial Sequence
  ENSG00000198952_1 (sequence is synthesized)
ggagctgcccccggacccgggcaccatgagccaaggcccccccacaggggagagcagcgagcccgaagcaaaagtcctccacactaagcggctttaccgggctgtggtggaggctgtgca

SEQ ID NO: 736431 - DNA, 120 bp, Artificial Sequence
  ENSG00000198952_2 (sequence is synthesized)
tcgacttgacctcatcctttgcaacaaaactgcttatcaagaagtattcaaaccagaaaacattagcctgaggaacaagctgcgtgagctctgcgtcaagcttatgttcctgcacccagt

SEQ ID NO: 736432 - DNA, 120 bp, Artificial Sequence
  ENSG00000198952_3 (sequence is synthesized)
ggactatgggagaaaggctgaggagctgctgtggagaaaggtatactatgaagttatccagcttatcaagactaacaaaaagcacatccacagccggagcactttggaatgtgcctacag

SEQ ID NO: 736433 - DNA, 120 bp, Artificial Sequence
  ENSG00000198952_4 (sequence is synthesized)
gacgcacctggttgctggtattggcttctaccagcatctccttctctatatccagtcccactaccagctggaactgcagtgctgcatcgactggacccatgtcactgaccccctcatagg

SEQ ID NO: 736434 - DNA, 120 bp, Artificial Sequence
  ENSG00000198952_5 (sequence is synthesized)
atgcaagaagccagtgtctgcctcagggaaggagatggattgggcacagatggcatgtcaccgatgtctggtgtatctgggggatttgtcccgatatcagaatgaattagctggcgtaga

SEQ ID NO: 736435 - DNA, 120 bp, Artificial Sequence
  ENSG00000198952_6 (sequence is synthesized)
taccgagctgctagccgagagattttactaccaagccctgtcagtagctcctcagattggaatgcccttcaatcagctgggcaccctggcaggcagcaagtactataatgtggaagccat

SEQ ID NO: 736436 - DNA, 120 bp, Artificial Sequence
  ENSG00000198952_7 (sequence is synthesized)
gtattgctacctgcgctgcatccagtcagaagtgtcctttgagggagcctatgggaacctcaagcggctgtatgacaaggcagccaaaatgtaccaccaactgaagaagtgtgagactcg

SEQ ID NO: 736437 - DNA, 120 bp, Artificial Sequence
  ENSG00000198952_8 (sequence is synthesized)
gaaactgtctcctggcaaaaagcgatgtaaagacattaaaaggttgctagtgaactttatgtatctgcaaagcctcctacagcccaaaagcagctccgtggactcagagctgacctcact

SEQ ID NO: 736438 - DNA, 120 bp, Artificial Sequence
  ENSG00000198952_9 (sequence is synthesized)
ttgccagtcagtcctggaggacttcaacctctgcctcttctacctgccctcctcacccaacctcagcctggccagtgaggatgaggaggagtatgagagtggatatgctttcctcccgga

SEQ ID NO: 736439 - DNA, 120 bp, Artificial Sequence
  ENSG00000198952_10 (sequence is synthesized)
ccttctcatctttcaaatggtcatcatctgccttatgtgtgtgcacagcttggagagagcaggatccaagcagtacagtgcagccattgccttcaccctggccctcttttcccacctcgt

SEQ ID NO: 736440 - DNA, 120 bp, Artificial Sequence
  ENSG00000198952_11 (sequence is synthesized)
caatcatgtcaacatacggctgcaggctgagctggaagagggcgagaatcccgtcccggcattccagagtgatggcacagatgaaccagagtccaaggaacctgtggagaaagaggagga

SEQ ID NO: 736441 - DNA, 120 bp, Artificial Sequence
  ENSG00000198952_12 (sequence is synthesized)
gccagatcctgagcctcctcctgtaacaccccaagtgggtgagggcagaaagagccgtaagttctctcgcctctcctgtctccgccgtcgccgccacccacccaaagttggtgatgacag

SEQ ID NO: 736442 - DNA, 120 bp, Artificial Sequence
  ENSG00000198952_13 (sequence is synthesized)
tgacctgagtgaaggctttgaatcggactcaagccatgactcagcccgggccagtgagggctcagacagtggctctgacaagagtcttgaaggtgggggaacggcctttgatgctgaaac

SEQ ID NO: 736443 - DNA, 120 bp, Artificial Sequence
  ENSG00000198952_14 (sequence is synthesized)
agactcggaaatgaatagccaggagtcccgatcagacttggaagatatggaggaagaggaggggacacggtcaccaaccctggagccccctcggggcagatcagaggctcccgattccct

SEQ ID NO: 736444 - DNA, 120 bp, Artificial Sequence
  ENSG00000198952_15 (sequence is synthesized)
caatggcccactgggccccagtgaggctagcattgccagcaatctacaagccatgtccacccagatgttccagactaagcgctgcttccgactggcccccacctttagcaacctgctcct

SEQ ID NO: 736445 - DNA, 120 bp, Artificial Sequence
  ENSG00000198952_16 (sequence is synthesized)
ccagcccaccaccaaccctcatacctcggccagccacaggccttgcgtcaatggggatgtagacaagccttcagagccagcctctgaggagggctctgagtcggaggggagtgagtccag

SEQ ID NO: 736446 - DNA, 120 bp, Artificial Sequence
  ENSG00000198952_17 (sequence is synthesized)
tggacgctcctgtcggaatgagcgcagcatccaggagaagcttcaggtcctgatggccgaaggtctgcttcctgctgtgaaagtcttcctggactggcttcggaccaaccccgacctcat

SEQ ID NO: 736447 - DNA, 120 bp, Artificial Sequence
  ENSG00000198952_18 (sequence is synthesized)
atcttcttgaaggttgtgaactgcctgacctcccctctagccttctgctcccagaggacatggctcttcgtaacctgcccccgctccgagctgcccacagacgctttaactttgacacgg

SEQ ID NO: 736448 - DNA, 120 bp, Artificial Sequence
  ENSG00000198952_19 (sequence is synthesized)
atcggcccctgctcagcaccttagaggagtcagtggtgcgcatctgctgcatccgcagctttggtcatttcatcgcccgcctgcaaggcagcatcctgcagttcaacccagaggttggca

SEQ ID NO: 736449 - DNA, 120 bp, Artificial Sequence
  ENSG00000198952_20 (sequence is synthesized)
tcttcgtcagcattgcccagtctgagcaggagagcctgctgcagcaggcccaggcacagttccgaatggcacaggaggaagctcgtcggaacaggctcatgagagacatggctcagctac

SEQ ID NO: 736450 - DNA, 120 bp, Artificial Sequence
  ENSG00000198952_21 (sequence is synthesized)
gacttcagctcgaagtgtctcagctggagggcagcctgcagcagcccaaggcccagtcagccatgtctccctacctcgtccctgacacccaggccctctgccaccatctccctgtcatcc

SEQ ID NO: 736451 - DNA, 120 bp, Artificial Sequence
  ENSG00000198952_22 (sequence is synthesized)
gccaactggccaccagtggccgcttcattgtcatcatcccaaggacagtgatcgatggcctggatttgctgaagaaggaacacccaggggcccgggatgggattcggtacctggaggcag

SEQ ID NO: 736452 - DNA, 120 bp, Artificial Sequence
  ENSG00000198952_23 (sequence is synthesized)
agtttaaaaaaggaaacaggtacattcgctgccagaaagaggtgggaaagagctttgagcggcataagctgaagaggcaggatgcagatgcctggactctctataagatcctagacagct

SEQ ID NO: 736453 - DNA, 120 bp, Artificial Sequence
  ENSG00000198952_24 (sequence is synthesized)
gcaaacagctgactctggcccagggggcaggtgaggaggatccgagtggcatggtgaccatcatcacaggccttccactggacaaccccagcgtgctttcaggccccatgcaggcagccc

SEQ ID NO: 736454 - DNA, 120 bp, Artificial Sequence
  ENSG00000198952_25 (sequence is synthesized)
tgcaggccgctgcccacgccagtgtggacatcaagaatgttctggacttctacaagcagtggaaggaaattggttgatactgacccccaggccctgcagtggggctgactccagatctct

SEQ ID NO: 736455 - DNA, 120 bp, Artificial Sequence
  ENSG00000198952_26 (sequence is synthesized)
cctgccctccctggcagccaggaccagcacctgtagtcaccccaccacacgcagactcatgcacgcacacaggagggaggcctagctgctcagaggctgcagggagggcccaggagccgg

SEQ ID NO: 736456 - DNA, 120 bp, Artificial Sequence
  ENSG00000198952_27 (sequence is synthesized)
ctgggagggtggggtccctttgttgccaagacgttaggaaagcgaggaaagtgcttggattaggagagtcttgtgggcccctggccagccttcctgcctcagctcccctgctgtctccag

SEQ ID NO: 736457 - DNA, 120 bp, Artificial Sequence
  ENSG00000198952_28 (sequence is synthesized)
gggcaggtggtaggcatgggtacctgcatttcactggaatgggttcttggatctctgaggggaaggaacagcaaaagaggcccttcttcctcacccaagatgcagggtggttggggccag

SEQ ID NO: 736458 - DNA, 120 bp, Artificial Sequence
  ENSG00000198952_29 (sequence is synthesized)
gagtttggaccctctaggtcttgggggaagagctgggtaatacctggtgtctgagtgattctctgcagacccttcccctcctcaaggatcacccatcctcctttcagccccctttatggg

SEQ ID NO: 736459 - DNA, 120 bp, Artificial Sequence
  ENSG00000198952_30 (sequence is synthesized)
gaccaggcagctctggagccagccacaggggctgttagagaagcaaggcctggagtggcctgcaccgagtagcagggtcagggttcgtgtgctcctcctcctgctgcaggggctgcacat

SEQ ID NO: 736460 - DNA, 120 bp, Artificial Sequence
  ENSG00000198952_31 (sequence is synthesized)
cccattgccccacttctgctttgtgtctccctctgtctagcttccagggcagggagcaggccccacctagggctgcaggcagtctggcctgtgccagcacggtctcctgtgcccaccagc

SEQ ID NO: 736461 - DNA, 120 bp, Artificial Sequence
  ENSG00000198952_32 (sequence is synthesized)
cccacaggtgctgtgctttgtgctcttggctgctgtgctgggacagaatgggatgccaggaagagaagaaagggggtgcagtctgaggccaccaccccccttcctatctaagggagggct

SEQ ID NO: 736462 - DNA, 120 bp, Artificial Sequence
  ENSG00000198952_33 (sequence is synthesized)
gaagacaaggggccggcattcagtgggcagcagaaaggagaggctccttgaagctgctcagtcagaggcccccgtccctccttttgccttccgcaggactgaagacctgaaggggctggc

SEQ ID NO: 736463 - DNA, 120 bp, Artificial Sequence
  ENSG00000198952_34 (sequence is synthesized)
ttttggagtgttgaggtgaatatctgggagcagagatcatgaatagctcagggcagtgaatggcgcaccaagagcagggctgtgtgtgggaggctgcagccaggattgcctcagctcctc

SEQ ID NO: 736464 - DNA, 120 bp, Artificial Sequence
  ENSG00000198952_35 (sequence is synthesized)
cccctcaggctgggaggatagcacaggctaggggctcggggtggagggtctcagctctgctgcccccaccccagtactagcctagcttcccaagctgtggcttagaggatagttggcttc

SEQ ID NO: 736465 - DNA, 120 bp, Artificial Sequence
  ENSG00000198952_36 (sequence is synthesized)
ctgcctctctcctctaaaatagcaagtctgggaaatcctggggtgagtggagtcaccccactcccagttgctggcagagactgagactaaagcatcacttaataaaccccccaagcccaa

SEQ ID NO: 736466 - DNA, 120 bp, Artificial Sequence
  ENSG00000198952_37 (sequence is synthesized)
tggctgtctgcttcccctcccctgcagggcctggaacatcatgacctgcatcgggttggtaatggaagttgttcagagtgcagtggaagaatattttttcttccatgcctctcctcccct

SEQ ID NO: 736467 - DNA, 120 bp, Artificial Sequence
  ENSG00000198952_38 (sequence is synthesized)
ctccttacagctcattttttccctcataggcacaggaggaagctcgtcggaacaggctcatgagagacatggctcagctacgacttcagctcgaagtgtctcagctggagggcagcctgc

SEQ ID NO: 736468 - DNA, 120 bp, Artificial Sequence
  ENSG00000198952_39 (sequence is synthesized)
tagaacctcaggccacctgccttgctcctccacgagcattcctagggagaacgggtagggctggataattctgaggctccacacgtagcctgccagggccctcctgcaggcctcaccttg

SEQ ID NO: 736469 - DNA, 120 bp, Artificial Sequence
  ENSG00000198952_40 (sequence is synthesized)
cgaggagtacgaagttgccgcagcacctgagcttttcctctgcagatgggtcagcctctttgggccttgcgatgctcaggcttggtgttttccctcaatgcacctttgcctgctccccat

SEQ ID NO: 736470 - DNA, 120 bp, Artificial Sequence
  ENSG00000198952_41 (sequence is synthesized)
atgtctccagggccagcttccagggcccactgctgctcactgccctcccagcccccagctgcccctgtcccctggagatcctggtgtttgggctgtgctaatgctgggtcttggcccatc

SEQ ID NO: 736471 - DNA, 120 bp, Artificial Sequence
  ENSG00000198954_0 (sequence is synthesized)
attgaggaaagccaggcagtagaggccgctatggcgaacgttccgtgggcagaggtctgcgagaaattccaggcggcgctcgctctgtcgcgggtggaactgcataaaaatccggagaag

SEQ ID NO: 736472 - DNA, 120 bp, Artificial Sequence
  ENSG00000198954_1 (sequence is synthesized)
gaaccatacaagtccaaatacagcgcccgggcgctactggaagaggtcaaggcgctgctcggccctgcgcctgaggacgaggatgagcggcctgaggccgaggacggcccgggtgccggt

SEQ ID NO: 736473 - DNA, 120 bp, Artificial Sequence
  ENSG00000198954_2 (sequence is synthesized)
gaccacgccctggggctgccggctgaggtggtggagcccgaggggcccgtcgcccagcgagcggtgaggctggcagtcatcgagttccacctcggggtgaaccacatcgacacggaggag

SEQ ID NO: 736474 - DNA, 120 bp, Artificial Sequence
  ENSG00000198954_3 (sequence is synthesized)
ctgtcggcgggggaggagcacctggtgaaatgcctgcggctgctgcgcaggtaccggctctcgcacgactgcatctctctctgcatccaggcgcagaataacctgggtatcttgtggtct

SEQ ID NO: 736475 - DNA, 120 bp, Artificial Sequence
  ENSG00000198954_4 (sequence is synthesized)
gaaagagaagaaattgaaactgcacaggcttacctagagtcatcagaagcactatataatcagtatatgaaagaggttgggagtcctcctcttgatcctactgagcgttttcttcctgaa

SEQ ID NO: 736476 - DNA, 120 bp, Artificial Sequence
  ENSG00000198954_5 (sequence is synthesized)
gaagagaaacttactgaacaagagagatcaaaaagatttgaaaaggtttatactcataacctatattacctagctcaagtctaccagcatctggaaatgtttgagaaggctgctcactat

SEQ ID NO: 736477 - DNA, 120 bp, Artificial Sequence
  ENSG00000198954_6 (sequence is synthesized)
tgccatagtacactaaaacgccagcttgagcacaatgcctaccatcctatagagtgggctatcaatgctgctaccttgtcacagttttacatcaataagctatgctttatggaggccagg

SEQ ID NO: 736478 - DNA, 120 bp, Artificial Sequence
  ENSG00000198954_7 (sequence is synthesized)
cactgtttatcagctgctaatgtcatttttggtcaaactggaaagatctcagccacagaagacactcctgaagctgaaggagaagtgccagagctttatcatcaaagaaagggggaaata

SEQ ID NO: 736479 - DNA, 120 bp, Artificial Sequence
  ENSG00000198954_8 (sequence is synthesized)
gcaaggtgctggatcaaatactgtttgactctcatgcagaatgcccaactctccatgcaggacaacataggagagcttgatcttgataaacagtctgaacttagagctttaaggaaaaaa

SEQ ID NO: 736480 - DNA, 120 bp, Artificial Sequence
  ENSG00000198954_9 (sequence is synthesized)
gaactagatgaggaggaaagcattcggaaaaaagctgtgcagtttggaaccggtgaactgtgtgatgccatctctgcagtagaagagaaagtgagctacttgagacctttagattttgaa

SEQ ID NO: 736481 - DNA, 120 bp, Artificial Sequence
  ENSG00000198954_10 (sequence is synthesized)
gattgatggttatgtcactgaccatattgaagttgtccaagaccacagtgctctgtttaaggtgcttgcattctttgaaactgacatggagagacggtgcaagatgcataaacgcagaat

SEQ ID NO: 736482 - DNA, 120 bp, Artificial Sequence
  ENSG00000198954_11 (sequence is synthesized)
agccatgctagagcccctaactgtagacctgaatccacagtattatctgttggtcaacagacagatccagtttgaaattgcacatgcttactatgatatgatggatttgaaggttgccat

SEQ ID NO: 736483 - DNA, 120 bp, Artificial Sequence
  ENSG00000198954_12 (sequence is synthesized)
tgctgacaggctaagggatcctgattcacacattgtaaaaaaaataaataatcttaataagtcagcactgaagtactaccagctcttcttagactccctgagagacccaaataaagtatt

SEQ ID NO: 736484 - DNA, 120 bp, Artificial Sequence
  ENSG00000198954_13 (sequence is synthesized)
ccctgagcatataggggaagatgttcttcgccctgccatgttagctaagtttcgagttgcccgtctctatggcaaaatcattactgcagatcccaagaaagagctggaaaatttggcaac

SEQ ID NO: 736485 - DNA, 120 bp, Artificial Sequence
  ENSG00000198954_14 (sequence is synthesized)
atcattggaacattacaaatttattgttgattactgtgaaaagcatcctgaggccgcccaggaaatagaagttgagctagaacttagtaaagagatggttagtcttctcccaacaaaaat

SEQ ID NO: 736486 - DNA, 120 bp, Artificial Sequence
  ENSG00000198954_15 (sequence is synthesized)
ggagagattcagaaccaagatggccctgacttaatccttgtttttaaagaaaggaaatgtgcaatattgaagtgatctttttccctagtcagacaggcccaattccattgtgatgtttac

SEQ ID NO: 736487 - DNA, 120 bp, Artificial Sequence
  ENSG00000198954_16 (sequence is synthesized)
ctttatagccaggtgagtgcagtttgaacttgagatacagtcaactgagtgtttgctaggatcctaaggaacataaagttaattaaaaacttacacctaattatgtaaattgccttgtta

SEQ ID NO: 736488 - DNA, 120 bp, Artificial Sequence
  ENSG00000198954_17 (sequence is synthesized)
aagacatgtgatttgtattttagatgcttgtttcctattaaaatacagacatttctaccctcagtttctaaatgtagactatttgttggctagtacttgatagattccttgtaagaaaaa

SEQ ID NO: 736489 - DNA, 120 bp, Artificial Sequence
  ENSG00000198954_18 (sequence is synthesized)
atgctgggtaatgtacctggtaacaagcctgttaatatattaagattgaaaaagtaacttctatagttactccttctaaaatatttgacttcctaaattccccccacccaaaatctttcc

SEQ ID NO: 736490 - DNA, 120 bp, Artificial Sequence
  ENSG00000198954_19 (sequence is synthesized)
cttttgaaaatactaaaaactaagttatgttattataaagtgtaaaatggtttgtcttaattataggagaaaaaggccttgttagaaataaaataaactgacttatttcactaatgaaaa

SEQ ID NO: 736491 - DNA, 120 bp, Artificial Sequence
  ENSG00000198954_20 (sequence is synthesized)
cgtgtccaccctcgtcgcccacaccaatatcgcttgctgctgcttcacttagacgtggcgatgcattggtgtccgagaccctcctacatcgtcatgcgctttcctctccaccagtccaac

SEQ ID NO: 736492 - DNA, 120 bp, Artificial Sequence
  ENSG00000198954_21 (sequence is synthesized)
ccggctctcgcacgactgcatctctctctgcatccaggcgcagggtggctcacaacatggcagttggcttccttaagaaggagcaggcaattgaccgggcgcggtggctgacgcctgtaa

SEQ ID NO: 736493 - DNA, 82 bp, Artificial Sequence
  ENSG00000198954_22 (sequence is synthesized)
agcaaggtgctggatcaaatactgtttgactctcatgcagaatgcccaactctccatgcagaggctgcgtgagccgagattg

SEQ ID NO: 736494 - DNA, 120 bp, Artificial Sequence
  ENSG00000198954_23 (sequence is synthesized)
atactacacgtgtccagctattctcaagatggcttctgaatttgccataatggaaagatacatttaatgctgcaattttaaagttatagccaaccatttaaagcctttcagctatgcttt

SEQ ID NO: 736495 - DNA, 120 bp, Artificial Sequence
  ENSG00000198954_24 (sequence is synthesized)
gccatagtacactaaaacgccagcttgagcacaatgcctaccatcctatagagtgggctatcaatgctgctaccttgtcacagttttacatcaataagaagaatgaagaggagctgcagg

SEQ ID NO: 736496 - DNA, 120 bp, Artificial Sequence
  ENSG00000198954_25 (sequence is synthesized)
acaagttccaacatctcttttccatcttcatccactcctgccatgggtgtgcagaggatgcacagagcggcagaccctctgctcaccctccccgtggcccagtgcactcctgttctggat

SEQ ID NO: 736497 - DNA, 120 bp, Artificial Sequence
  ENSG00000198954_26 (sequence is synthesized)
acgcatgaagcccactgtcttggaagcagcagtgcacatgtccccatcattcttccatcaagcctggaatggactttttttttcgtttttttgagaaggagccttgctttgtcgcccagg

SEQ ID NO: 736498 - DNA, 61 bp, Artificial Sequence
  ENSG00000198954_27 (sequence is synthesized)
gtcttgaactcctgacctgcccagctggaatggacatttttaaggtgagtatgatttcaac

SEQ ID NO: 736499 - DNA, 120 bp, Artificial Sequence
  ENSG00000198954_28 (sequence is synthesized)
cagctggaatggacatttttaaggtgagtatgatttcaacaaagtcatcctttctcaattttaaattttgtttcaggtgttttaagtcaatgtcaatggttgaaaactattggatagagg

SEQ ID NO: 736500 - DNA, 120 bp, Artificial Sequence
  ENSG00000198954_29 (sequence is synthesized)
agatctgggaacttacacagactgcacatgaatgcttagggaaagaattctcctttgtccatgcttttgctgtaagctgtgctcttttgtgtttaacctcgtcatatacaacatggactg

SEQ ID NO: 736501 - DNA, 120 bp, Artificial Sequence
  ENSG00000198954_30 (sequence is synthesized)
tctgccaagggcctcttggtgatctgcaaggcgttctcagatggctgtctctgagggcctggtccctcctttagcttgtcaaaggacacagagatgggtcactggagctggctctccttg

SEQ ID NO: 736502 - DNA, 120 bp, Artificial Sequence
  ENSG00000198954_31 (sequence is synthesized)
ctgccctcgggtggagctcaacagtgaccccatggttaggccatctggaaacaggctgctgacacccgggacttctgtgctgccaggaagaacaaggcaggaggatgcgtccctgcaccc

SEQ ID NO: 736503 - DNA, 120 bp, Artificial Sequence
  ENSG00000198954_32 (sequence is synthesized)
aggctgccctccaaacctgtggaatgcagcccctggtcatagaggaggcccaactgttgctgacacgtatgggaatccagaggctgggctccccttcatacagccagggccccactcaga

SEQ ID NO: 736504 - DNA, 120 bp, Artificial Sequence
  ENSG00000198954_33 (sequence is synthesized)
cctgagccaacccatcatatgccagatgggacagagtgctcacatgggccacttgccggaccctctgacacttttaggaagcaggtattttcaccatggccacacccaatgctagtaagt

SEQ ID NO: 736505 - DNA, 120 bp, Artificial Sequence
  ENSG00000198954_34 (sequence is synthesized)
gcctgtgatggttaattttatgtgtcagcgtggctaggctctggtgcccagttgttggtcaaacattgttctagatgttgctatgagggtatttttttgaatgagagtaacatttaaata

SEQ ID NO: 736506 - DNA, 120 bp, Artificial Sequence
  ENSG00000198954_35 (sequence is synthesized)
agtagactctgagtaaagcagattacctcccacagtgtgggtgggcctcacccaatcagttgaaggccttaagagaaaagactgaggtcccccgaggagaaaagaattcgtctctagacc

SEQ ID NO: 736507 - DNA, 120 bp, Artificial Sequence
  ENSG00000198954_36 (sequence is synthesized)
accttaggatttaaggccacaacataaacttctgctagaatttccagcctcctggcctgccctgaagatttcagacttgcctgaccagatcatcgcatgagccgattccttaaagtctct

SEQ ID NO: 736508 - DNA, 120 bp, Artificial Sequence
  ENSG00000198954_37 (sequence is synthesized)
cctgctgtttttctggaaaacctgactactacagtgcctgaggtgggacccgattaccccattctgccttccagctgctggcggtgcgtgtgtttgcccggaagggtgatccagggcttc

SEQ ID NO: 736509 - DNA, 120 bp, Artificial Sequence
  ENSG00000198954_38 (sequence is synthesized)
atcaggcaaagcattggggatggaagttccggcgactctcatggcctcgcctggtgaggggcacccctggggcaaaccccgtttcctactgattccatgtcagcactgcttttcctgctg

SEQ ID NO: 736510 - DNA, 68 bp, Artificial Sequence
  ENSG00000198954_39 (sequence is synthesized)
gtttcctactgattccatgtcagcactgcttttcctgctggcagaaatcaaatcaagccagttccacc

SEQ ID NO: 736511 - DNA, 120 bp, Artificial Sequence
  ENSG00000198954_40 (sequence is synthesized)
gtgctggatcaaatactgtttgactctcatgcagaatgcccaactctccatgcagtttttaatataatcggaagaaagaaagaagttttcaaaggtgtttaagattatgatacccttcta

SEQ ID NO: 736512 - DNA, 120 bp, Artificial Sequence
  ENSG00000198959_0 (sequence is synthesized)
agtgccagccgccagtggtcgcacttggagggtctcgccgccagtggaaggagccaccgcccccgcccgaccatggccgaggagctggtcttagagaggtgtgatctggagctggagacc

SEQ ID NO: 736513 - DNA, 120 bp, Artificial Sequence
  ENSG00000198959_1 (sequence is synthesized)
aatggccgagaccaccacacggccgacctgtgccgggagaagctggtggtgcgacggggccagcccttctggctgaccctgcactttgagggccgcaactacgaggccagtgtagacagt

SEQ ID NO: 736514 - DNA, 120 bp, Artificial Sequence
  ENSG00000198959_2 (sequence is synthesized)
ctcaccttcagtgtcgtgaccggcccagcccctagccaggaggccgggaccaaggcccgttttccactaagagatgctgtggaggagggtgactggacagccaccgtggtggaccagcaa

SEQ ID NO: 736515 - DNA, 120 bp, Artificial Sequence
  ENSG00000198959_3 (sequence is synthesized)
gactgcaccctctcgctgcagctcaccaccccggccaacgcccccatcggcctgtatcgcctcagcctggaggcctccactggctaccagggatccagctttgtgctgggccacttcatt

SEQ ID NO: 736516 - DNA, 120 bp, Artificial Sequence
  ENSG00000198959_4 (sequence is synthesized)
ttgctcttcaacgcctggtgcccagcggatgctgtgtacctggactcggaagaggagcggcaggagtatgtcctcacccagcagggctttatctaccagggctcggccaagttcatcaag

SEQ ID NO: 736517 - DNA, 120 bp, Artificial Sequence
  ENSG00000198959_5 (sequence is synthesized)
aacataccttggaattttgggcagtttgaagatgggatcctagacatctgcctgatccttctagatgtcaaccccaagttcctgaagaacgccggccgtgactgctcccgccgcagcagc

SEQ ID NO: 736518 - DNA, 120 bp, Artificial Sequence
  ENSG00000198959_6 (sequence is synthesized)
cccgtctacgtgggccgggtggtgagtggcatggtcaactgcaacgatgaccagggtgtgctgctgggacgctgggacaacaactacggggacggcgtcagccccatgtcctggatcggc

SEQ ID NO: 736519 - DNA, 120 bp, Artificial Sequence
  ENSG00000198959_7 (sequence is synthesized)
agcgtggacatcctgcggcgctggaagaaccacggctgccagcgcgtcaagtatggccagtgctgggtcttcgccgccgtggcctgcacagtgctgaggtgcctgggcatccctacccgc

SEQ ID NO: 736520 - DNA, 120 bp, Artificial Sequence
  ENSG00000198959_8 (sequence is synthesized)
gtcgtgaccaactacaactcggcccatgaccagaacagcaaccttctcatcgagtacttccgcaatgagtttggggagatccagggtgacaagagcgagatgatctggaacttccactgc

SEQ ID NO: 736521 - DNA, 120 bp, Artificial Sequence
  ENSG00000198959_9 (sequence is synthesized)
tgggtggagtcgtggatgaccaggccggacctgcagccggggtacgagggctggcaggccctggacccaacgccccaggagaagagcgaagggacgtactgctgtggcccagttccagtt

SEQ ID NO: 736522 - DNA, 120 bp, Artificial Sequence
  ENSG00000198959_10 (sequence is synthesized)
cgtgccatcaaggagggcgacctgagcaccaagtacgatgcgccctttgtctttgcggaggtcaatgccgacgtggtagactggatccagcaggacgatgggtctgtgcacaaatccatc

SEQ ID NO: 736523 - DNA, 120 bp, Artificial Sequence
  ENSG00000198959_11 (sequence is synthesized)
aaccgttccctgatcgttgggctgaagatcagcactaagagcgtgggccgagacgagcgggaggatatcacccacacctacaaatacccagaggggtcctcagaggagagggaggccttc

SEQ ID NO: 736524 - DNA, 120 bp, Artificial Sequence
  ENSG00000198959_12 (sequence is synthesized)
acaagggcgaaccacctgaacaaactggccgagaaggaggagacagggatggccatgcggatccgtgtgggccagagcatgaacatgggcagtgactttgacgtctttgcccacatcacc

SEQ ID NO: 736525 - DNA, 120 bp, Artificial Sequence
  ENSG00000198959_13 (sequence is synthesized)
aacaacaccgctgaggagtacgtctgccgcctcctgctctgtgcccgcaccgtcagctacaatgggatcttggggcccgagtgtggcaccaagtacctgctcaacctcaacctggagcct

SEQ ID NO: 736526 - DNA, 120 bp, Artificial Sequence
  ENSG00000198959_14 (sequence is synthesized)
ttctctgagaagagcgttcctctttgcatcctctatgagaaataccgtgactgccttacggagtccaacctcatcaaggtgcgggccctcctcgtggagccagttatcaacagctacctg

SEQ ID NO: 736527 - DNA, 120 bp, Artificial Sequence
  ENSG00000198959_15 (sequence is synthesized)
ctggctgagagggacctctacctggagaatccagaaatcaagatccggatccttggggagcccaagcagaaacgcaagctggtggctgaggtgtccctgcagaacccgctccctgtggcc

SEQ ID NO: 736528 - DNA, 120 bp, Artificial Sequence
  ENSG00000198959_16 (sequence is synthesized)
ctggaaggctgcaccttcactgtggagggggccggcctgactgaggagcagaagacggtggagatcccagaccccgtggaggcaggggaggaagttaaggtgagaatggacctgctgccg

SEQ ID NO: 736529 - DNA, 120 bp, Artificial Sequence
  ENSG00000198959_17 (sequence is synthesized)
ctccacatgggcctccacaagctggtggtgaacttcgagagcgacaagctgaaggctgtgaagggcttccggaatgtcatcattggccccgcctaagggacccctgctcccagcctgctg

SEQ ID NO: 736530 - DNA, 120 bp, Artificial Sequence
  ENSG00000198959_18 (sequence is synthesized)
agagcccccaccttgatcccaatccttatcccaagctagtgagcaaaatatgccccttcttgggccccagaccccagggcagggtgggcagcctatgggggctctcggaaatggaatgtg

SEQ ID NO: 736531 - DNA, 120 bp, Artificial Sequence
  ENSG00000198959_19 (sequence is synthesized)
cccctggcccatctcagcctcctgagcctgtgggtccccactcaccccctttgctgtgaggaatgctctgtgccagaaacagtgggagccctgaccttggctgactggggctggggtgag

SEQ ID NO: 736532 - DNA, 120 bp, Artificial Sequence
  ENSG00000198959_20 (sequence is synthesized)
attgaccacccaccatattgtttgatctacttcatagctccttggagcaggcaaaaaagggacagcatgccccttggctggatcagggaatccagctccctagactgcatcccgtacctc

SEQ ID NO: 736533 - DNA, 120 bp, Artificial Sequence
  ENSG00000198959_21 (sequence is synthesized)
ttcccatgactgcacccagctccaggggcccttgggacagccagagctgggtggggacagtgataggcccaaggtcccctccacatcccagcagcccaagcttaatagccctccccctca

SEQ ID NO: 736534 - DNA, 120 bp, Artificial Sequence
  ENSG00000198959_22 (sequence is synthesized)
acctcaccattgtgaagcacctactatgtgctgggtgcctcccacacttgctggggctcacggggcctccaacccatttaatcaccatgggaaactgttgtgggcgctgcttccaggata

SEQ ID NO: 736535 - DNA, 120 bp, Artificial Sequence
  ENSG00000198959_23 (sequence is synthesized)
aggagactgaggcttagagagaggaggcagccccctccacaccagtggcctcgtggttattagcaaggctgggtaatgtgaaggcccaagagcagagtctgggcctctgactctgagtcc

SEQ ID NO: 736536 - DNA, 120 bp, Artificial Sequence
  ENSG00000198959_24 (sequence is synthesized)
actgctccatttataaccccagcctgacctgagactgtcggagaggctgtctggggcctttatcaaaaaaagactcagccaagacaaggaggtagagaggggactgggggactgggagtc

SEQ ID NO: 736537 - DNA, 120 bp, Artificial Sequence
  ENSG00000198959_25 (sequence is synthesized)
agagccctggctgggttcaggtcccacgtctggccaggcactgccttctcctctctgggcctttgtttccttgttggtcagaggagtgattgaaccagctcatctccaaggatcctctcc

SEQ ID NO: 736538 - DNA, 120 bp, Artificial Sequence
  ENSG00000198959_26 (sequence is synthesized)
actccatgtttgcaatgcttttatatggcccagccttgtaaataaccacaaggtccactccctgctccacgaagccttaagccataggcccaggatatttctgagagtgaaaccatgact

SEQ ID NO: 736539 - DNA, 120 bp, Artificial Sequence
  ENSG00000198959_27 (sequence is synthesized)
gtgaccaccttctgtccccagccctgtcctggttccttcctatgcccaggtaccacccttcagaccccagttctaggggagaagagccctggacacccctgctctacccatgagcctgcc

SEQ ID NO: 736540 - DNA, 120 bp, Artificial Sequence
  ENSG00000198959_28 (sequence is synthesized)
cgctgcaatgcctagacttcccaacagccttagctgccagtgctggtcactaaccaacaaggttggcaccccagctaccccttctttgcagggctaaggcccccaaacatagcccctgcc

SEQ ID NO: 736541 - DNA, 120 bp, Artificial Sequence
  ENSG00000198959_29 (sequence is synthesized)
ccggaggaagcttggggaacccatgagttgtcagctttgactttatctcctgctctttctacatgactgggcctcccttgggctggaagaattggggattctctattggaggtgagatca

SEQ ID NO: 736542 - DNA, 120 bp, Artificial Sequence
  ENSG00000198959_30 (sequence is synthesized)
cagcctccagggccccccaaatcccagggaaggacttggagagaatcatgctgttgcatttagaactttctgctttgcacaggaaagagtcacacaattaatcaacatgtatattttctc

SEQ ID NO: 736543 - DNA, 120 bp, Artificial Sequence
  ENSG00000198959_31 (sequence is synthesized)
tatacatagagctctatttctctacggttttataaaagccttgggttccaaccaggcagtagatgtgcttctgaaccgcaaggagcaaacactgaaataaaatagtttatttttcacact

SEQ ID NO: 736544 - DNA, 120 bp, Artificial Sequence
  ENSG00000198959_32 (sequence is synthesized)
caaactaggtctggtctgttcctttatgagtttggagggagatgggtaggtgagctcgctcacacctggacccccacttcctgcctaggagtctttcctgagcctcagccctgtccctgc

SEQ ID NO: 736545 - DNA, 120 bp, Artificial Sequence
  ENSG00000198959_33 (sequence is synthesized)
gtttaaactttactggcattcaaggtcctacacaggctggctccatctccggccccttccaccaacagtctgtttttgggccacaattaacttcctgtatccccagaacaccctgcgtag

SEQ ID NO: 736546 - DNA, 120 bp, Artificial Sequence
  ENSG00000198959_34 (sequence is synthesized)
ttgtctacctcttggcttttgtgtatgtagttccctgagcctggagtgcccctccttttctttccctgcttggcaaactcctactcatcctataatgcttaacaccaaagtcacctcttc

SEQ ID NO: 736547 - DNA, 120 bp, Artificial Sequence
  ENSG00000198959_35 (sequence is synthesized)
tgtgaaaccttccttgatatcttttcgggtccccagagtcctggaatatggaccaattcaaacatttatcacagtaaattttacttccacgttggcctatctgtccccttctccatccta

SEQ ID NO: 736548 - DNA, 120 bp, Artificial Sequence
  ENSG00000198959_36 (sequence is synthesized)
tctgaagccctcgaggcagggaccacgtatctcttaaatacactaataaatgctgaattggtaaatgaatgtttcctaactcaactcccacaagacctgtgctgtcccatagaaataata

SEQ ID NO: 736549 - DNA, 120 bp, Artificial Sequence
  ENSG00000198959_37 (sequence is synthesized)
catgagccacaaatgcaagccacatatgtaatttagaattttctagtgaccacattgaaaacagtaaaaaagccataggtggaattagctttaataatgtattttatttaatccaatata

SEQ ID NO: 736550 - DNA, 120 bp, Artificial Sequence
  ENSG00000198959_38 (sequence is synthesized)
tccaaaacattatttcaacatgtaatcaatataagaattagtaaggtatttgaccttcttatttttgtactcaatctttgaaatgtggtgtgtgttttatactgacagcaggtctcaatt

SEQ ID NO: 736551 - DNA, 120 bp, Artificial Sequence
  ENSG00000198959_39 (sequence is synthesized)
tgaactagctgcatttcaagtgctcggtagccagtctggctagtactggatgaagcaggtctagactgcgattccgtggatgtgcagacttggtcattcatctcattccccaccatcgaa

SEQ ID NO: 736552 - DNA, 120 bp, Artificial Sequence
  ENSG00000198959_40 (sequence is synthesized)
gcactcatgagtatctgttgaatgaatagatgatggggacagtccccacccttgggaagtcatgtagaaagacatgacatgcacataaaaaataaatcaaaataaaaacatgacatcacg

SEQ ID NO: 736553 - DNA, 120 bp, Artificial Sequence
  ENSG00000198959_41 (sequence is synthesized)
ggggcacgaagagcactggagtaggaatcaggacatccctgccctggtcctgccccctgccaccaacactctcaatgcgctatgtggcctagagcctgtgaccaccctctccggtccttt

SEQ ID NO: 736554 - DNA, 120 bp, Artificial Sequence
  ENSG00000198959_42 (sequence is synthesized)
agccatccctccagtggttgttaggatcaagggctatcattggagagactgcatgggctcagggctgagaacttgggcactggagcccacgttctcaaaaactcaggatttttaacttga

SEQ ID NO: 736555 - DNA, 120 bp, Artificial Sequence
  ENSG00000198959_43 (sequence is synthesized)
gttaaaaaccccctccctcccaccacttgctctgtgaccttgagcaaatgacttctttctgaacctcagtttcctcgtctggaaaatggggacaacatcaagaccttcctcctagagtgg

SEQ ID NO: 736556 - DNA, 120 bp, Artificial Sequence
  ENSG00000198959_44 (sequence is synthesized)
gtgtgacatgaagctactcagcacagaacctagcccagtgtcactctcggcaaatattagccagtaataactggatcctaacagtaatatcagtgtcaagaaagaaagcatgttctaaaa

SEQ ID NO: 736557 - DNA, 120 bp, Artificial Sequence
  ENSG00000198959_45 (sequence is synthesized)
tgtagagggggaatatcgagcaatttaaaaccaaaaaagtaaaataaatctaaaacaaaaatcttcaaaatttaaggccagaaaatgtcgatgattgttgccaggctgatgatggtgctt

SEQ ID NO: 736558 - DNA, 120 bp, Artificial Sequence
  ENSG00000198959_46 (sequence is synthesized)
gttgccaggctgatgatggtgcttatgagaatgggttagcatcacatgctggctaagaacgtagactcaagacatgaggattgcttgaggccgggagtttgagaccagcctgggcaatat

SEQ ID NO: 736559 - DNA, 120 bp, Artificial Sequence
  ENSG00000198959_47 (sequence is synthesized)
aataaaataaaataaaaattagcaggcatggttgtgtgtctggagtcttggctactcagaaggctgaggcaggaagatcgcttgacccctggaggttggctgcaatgagctatgattgca

SEQ ID NO: 736560 - DNA, 84 bp, Artificial Sequence
  ENSG00000198959_48 (sequence is synthesized)
cacaaattctgaagtcaaggcctgggttcaaatcctagctctgcttcttaccagctgtgtgtccttaggtaaatcacttaactc

SEQ ID NO: 736561 - DNA, 120 bp, Artificial Sequence
  ENSG00000198959_49 (sequence is synthesized)
ttcttaccagctgtgtgtccttaggtaaatcacttaactcctctgaaccacagttccattgtatgtaaaatgggcacaacggtagtacctttatactgggatggttgtgaggattaaatg

SEQ ID NO: 736562 - DNA, 120 bp, Artificial Sequence
  ENSG00000198959_50 (sequence is synthesized)
gtacctttatactgggatggttgtgaggattaaatgagttaatatgtgtgaggtagctgagcgtggtggtggtgcacctgtagtcttagctgtttgggaggctgaggcagggggatcact

SEQ ID NO: 736563 - DNA, 77 bp, Artificial Sequence
  ENSG00000198959_51 (sequence is synthesized)
ctctaaataaataaatgaatgtgggaagtgcttaaaatgattttgggtgcataatagaaaatacttatgtgatgata

SEQ ID NO: 736564 - DNA, 120 bp, Artificial Sequence
  ENSG00000198959_52 (sequence is synthesized)
acttgtatttatttactgctcctccctgcctcctacaaacagaccccaggtctgttttcttaaatgctaaactacatgaatccttaaaatgctaaactgctaaggtcctccagcctcagt

SEQ ID NO: 736565 - DNA, 120 bp, Artificial Sequence
  ENSG00000198959_53 (sequence is synthesized)
gttcttttcagaaacatggggctaagaaccacacttcagtgggtagctttgttcctgccatcttctttctcatccccatatcactgtgcggcttttgctctgcaacgacccttggtctta

SEQ ID NO: 736566 - DNA, 120 bp, Artificial Sequence
  ENSG00000198959_54 (sequence is synthesized)
cctctgcccagcaggtgataagatctgggaacagagaggaaacagaggggaaacagagaggggaggtcatctccccgggctcacacagccagtgagtggccagacagggcctgaggcaag

SEQ ID NO: 736567 - DNA, 120 bp, Artificial Sequence
  ENSG00000198959_55 (sequence is synthesized)
tctcccaatctgagcacttactggcagaggtgattcttcatctgtgcaacgggtacagcatcacgagcctcgtggagggaaatgaccttatgtccatgagaggcattcttcagtgagtgt

SEQ ID NO: 736568 - DNA, 120 bp, Artificial Sequence
  ENSG00000198959_56 (sequence is synthesized)
ggaccatattgttggactctaagatctggattattagtccagatgcctgcacagtacatatcagctgtgtgacctaggacaacgttatttcacctgctggagactcagttttctcatctg

SEQ ID NO: 736569 - DNA, 120 bp, Artificial Sequence
  ENSG00000198959_57 (sequence is synthesized)
taagttgggtggtaatacacgtacaagccttttagggttgtcatgtaggtgaagtaggagcccgccgtgggaagtgcagtgcctggtgcagcaagcagatgtcggctctgatcctcccca

SEQ ID NO: 736570 - DNA, 120 bp, Artificial Sequence
  ENSG00000198959_58 (sequence is synthesized)
ggatgaagggcccgcggctcacacaccctgagtcccgagcgcaccaggctcttccgggacactcgctcagctcatcctcccacagccttaggagtgcctgtgccacgcagatccaaacat

SEQ ID NO: 736571 - DNA, 120 bp, Artificial Sequence
  ENSG00000198959_59 (sequence is synthesized)
cgaggacctgggaggtggagtggctcacgcggggtcacccattagaagaggcaaaggcaggattagaaccaaggcccgtgggagtccaagtgcgtcctctacccgctgctcagtgtccac

SEQ ID NO: 736572 - DNA, 120 bp, Artificial Sequence
  ENSG00000198959_60 (sequence is synthesized)
tctccagctcctcgctgggaaccctggagccacagtggggagttcagggatccgcccagccattcccccgctgtgtgaccccaagcacattccttcccctctctgtgcctcttggagttg

SEQ ID NO: 736573 - DNA, 120 bp, Artificial Sequence
  ENSG00000198959_61 (sequence is synthesized)
gttttggaaaaagtgccagggaagccccgtgggcctctgtctctccgggaacccttcccgctcagggctcacagtggatccggaagcacaggagaccaagagaccagagataccaggatg

SEQ ID NO: 736574 - DNA, 120 bp, Artificial Sequence
  ENSG00000198959_62 (sequence is synthesized)
caacatgctaggtagtgacctaaccacttagcatgtgtgatttcaccccacagacacttacatggcgctgactctggggcaggccctgtcctaagcactttataaatatcaacccactta

SEQ ID NO: 736575 - DNA, 120 bp, Artificial Sequence
  ENSG00000198960_0 (sequence is synthesized)
acgtgaccaagagccgcctagagcacaagtcctgctagtcgcctccgtctgggtaccagccccctattactctgcaggcgtgtgaagaaagaaggaaactagctcggaccgtgcaggttt

SEQ ID NO: 736576 - DNA, 120 bp, Artificial Sequence
  ENSG00000198960_1 (sequence is synthesized)
gtaggtctgttggcctgtaggtttcggcacaagtttcagcgagagaaggagaaaactgccttggttggaaccttgcagattcatcacaagagagctacaagagcctggaagaagctgaag

SEQ ID NO: 736577 - DNA, 120 bp, Artificial Sequence
  ENSG00000198960_2 (sequence is synthesized)
actgctaccctccatccttactcaccctggacctgagagacctcttcaatcaggtggagcaaggccctctcctgtcctgccccaaggctggcacagacttgagcatgggccgggctcggg

SEQ ID NO: 736578 - DNA, 120 bp, Artificial Sequence
  ENSG00000198960_3 (sequence is synthesized)
aagtgggttggatggcggcaggactgatgattggggctggtgcctgctactgcgtttacaaactgaccataggaagagatgacagtgagaagctggaggaggagggggaagaggagtggg

SEQ ID NO: 736579 - DNA, 120 bp, Artificial Sequence
  ENSG00000198960_4 (sequence is synthesized)
acgatgaccaggagctggatgaggaggagcctgatatttggtttgattttgaaactatggctcggccctggactgaggatggggattggactgaacctggggccccaggtggcactgagg

SEQ ID NO: 736580 - DNA, 120 bp, Artificial Sequence
  ENSG00000198960_5 (sequence is synthesized)
acaggccctcagggggaggcaaggccaaccgagcacacccaataaaacagcggccattcccctatgaacataaaaatacttggagtgctcaaaattgtaaaaatggcagttgtgttctgg

SEQ ID NO: 736581 - DNA, 120 bp, Artificial Sequence
  ENSG00000198960_6 (sequence is synthesized)
acctctccaagtgtcttttcattcagggaaaactgttgtttgccgagcccaaggatgcgggctttccatttagccaggatatcaatagccatttggccagcctctcaatggctagaaaca

SEQ ID NO: 736582 - DNA, 120 bp, Artificial Sequence
  ENSG00000198960_7 (sequence is synthesized)
tgccccggataacttaaatgcgagtattgaaagtcagggccagattaagatgtacatcaatgaagtgtgtcgggagactgtgtcacgttgctgcaactcatttctgcagcaggccggatt

SEQ ID NO: 736583 - DNA, 120 bp, Artificial Sequence
  ENSG00000198960_8 (sequence is synthesized)
aaatttgttaataagcatgacagttattaataacatgcttgccaagtccgcttcagacttgaagtttcctttgatatcagagggaagtggatgtgctaaggttcaggttttgaaaccgct

SEQ ID NO: 736584 - DNA, 120 bp, Artificial Sequence
  ENSG00000198960_9 (sequence is synthesized)
gatgggtttgtctgaaaagccagtcttggcgggggagttagtcggtgcccagatgctcttctcattcatgtccctctttatcagaaatggaaacagagagattctcctggaaacccctgc

SEQ ID NO: 736585 - DNA, 120 bp, Artificial Sequence
  ENSG00000198960_10 (sequence is synthesized)
cccataaacggccctctcgaacacaatgggacggaatccacccacaacgcgcttggtttgcagatgtcaaagaatctgcagagggtgctactgaagatccagccttagccaatcaccacc

SEQ ID NO: 736586 - DNA, 120 bp, Artificial Sequence
  ENSG00000198960_11 (sequence is synthesized)
tcattgggtgaaagttccagggctcaatccaggaccacactcttattggccaggcaggggctcccacagagctttgagtaacttcttggttgtgcagtctgcaggcaatgttggcattgt

SEQ ID NO: 736587 - DNA, 120 bp, Artificial Sequence
  ENSG00000198960_12 (sequence is synthesized)
aaattcctcccttgcagcctccttcatgtggtgaggggatcacttcagctgcctgctgtggacaaagaacatcaaattacagcatcacgagtgctattgttgcctgtggtggtctccctg

SEQ ID NO: 736588 - DNA, 120 bp, Artificial Sequence
  ENSG00000198960_13 (sequence is synthesized)
tccaagcgggaccgctttgcagagaccagaggcatatcgcggcttgagctgaaaatgcatttgttgcagcttaggttgaattatttttcgtttgctctttcttctacacgcgcctgatgg

SEQ ID NO: 736589 - DNA, 120 bp, Artificial Sequence
  ENSG00000198960_14 (sequence is synthesized)
atagtgaacctattcatcaaaaaagtgcactgctcttctgtctattgtaccgacttaacctcttccacccaagtccgcatctgtgtgtatcatcaataaagttgtgtgctttgattggca

SEQ ID NO: 736590 - DNA, 120 bp, Artificial Sequence
  ENSG00000198960_15 (sequence is synthesized)
cacgtgaccaagagccgcctagagcacaagtcctgctagtcgcctccgtctgggtaccagccccctattactctgcaggcgtgtgaagaaagaaggaaactagctcggaccgtgcagatt

SEQ ID NO: 736591 - DNA, 120 bp, Artificial Sequence
  ENSG00000198960_16 (sequence is synthesized)
gaaagaaggaaactagctcggaccgtgcaggtttgtaggtctgttggcctgtaggtttcggcacaagtttcagcgagagaaggagaaaactgccttggttggaaccttgcaggtcagtgt

SEQ ID NO: 736592 - DNA, 120 bp, Artificial Sequence
  ENSG00000198960_17 (sequence is synthesized)
gaaggtgggattagcccaggaccatgggtgggggtggcggaggaggggggctgggatatgagagggccaggtccgagtcgccctctcctggccccttctttctccacacccactcccatt

SEQ ID NO: 736593 - DNA, 120 bp, Artificial Sequence
  ENSG00000198960_18 (sequence is synthesized)
tcagtgcagggaaaggggtgtggcggcctttgctggggaaatggcggacgacaagtggggcggaggaggcctgcgtccggaaagtcagtagagtatgagaaatattttaaactcaagtgt

SEQ ID NO: 736594 - DNA, 120 bp, Artificial Sequence
  ENSG00000198960_19 (sequence is synthesized)
gtcctcagttcatccactacactttcatttctccattgccgcctacctgtctttgcatttgtccttctgccagactctatcctctatcaccgtggagggaccactgacaacagaagacaa

SEQ ID NO: 736595 - DNA, 120 bp, Artificial Sequence
  ENSG00000198960_20 (sequence is synthesized)
gggaaaacgaaggaatttatctgactttggtagaggttaatgagagaaactgcccttaatctttgggggtggaggtctggtgtaggagactacctgagaggtactcacactgtcaccctc

SEQ ID NO: 736596 - DNA, 120 bp, Artificial Sequence
  ENSG00000198960_21 (sequence is synthesized)
ctagctatcatagcagagacccatctcctgcccttccctgtggacccaggaagagaaatgggggctcctgaggtcgatagaggaagacagaaaagaaaagaacaaagaaattgtatcctg

SEQ ID NO: 736597 - DNA, 120 bp, Artificial Sequence
  ENSG00000198960_22 (sequence is synthesized)
aggggtgtggcggcctttgctggggaaatggcggacgacaagtggggcggaggaggcctgcgtccggaaagtcagtagaattcatcacaagagagctacaagagcctggaagaagctgaa

SEQ ID NO: 736598 - DNA, 120 bp, Artificial Sequence
  ENSG00000198961_0 (sequence is synthesized)
accgccgccgccgccgccacagccgccagccgcttcgcgttcggcgggggaggagttggaggcggagaagaaggcggtggtggcgggtggaggttcgagcgctgttctcgctccggagcc

SEQ ID NO: 736599 - DNA, 120 bp, Artificial Sequence
  ENSG00000198961_1 (sequence is synthesized)
gctgcacatttcggaatcttctgcggcttgtccatagtgtgaataaaaactaaatcacatctataattctactgaactggtcacacagacgctgccatatatgtcacagtacactgaaaa

SEQ ID NO: 736600 - DNA, 120 bp, Artificial Sequence
  ENSG00000198961_2 (sequence is synthesized)
ggagccagcagcaatggaccaagaatctggtaaggctgtctggcccaaaccagcaggagggtatcagacaattacaggcaggagatatggaagaagacatgcttatgtcagttttaaacc

SEQ ID NO: 736601 - DNA, 120 bp, Artificial Sequence
  ENSG00000198961_3 (sequence is synthesized)
atgtatgaccagacatgaaagaagcttaggtcgggctggtgatgactatgaagtgttggaactagatgatgttccaaaggaaaattcctcaggttccagtcctttggatcaagttgattc

SEQ ID NO: 736602 - DNA, 120 bp, Artificial Sequence
  ENSG00000198961_4 (sequence is synthesized)
ttctttacccagtgaacctatatttgaaaaaagtgaaacagaaattcccacttgtggttcagcattgaatcaaaccactgagagcagtcaatcctttgttgcagtacatcacagtgagga

SEQ ID NO: 736603 - DNA, 120 bp, Artificial Sequence
  ENSG00000198961_5 (sequence is synthesized)
aggcagggataccttaggaagcagtacaaatcttcataatcactctgagggagagtatattccaggagcttgtagtgcttcaagtgtccaaaatggaattgcattggttcatacagactc

SEQ ID NO: 736604 - DNA, 120 bp, Artificial Sequence
  ENSG00000198961_6 (sequence is synthesized)
ttatgatccagatggcaaacatggagaagataatgaccatcttcaactttctgcagaagtcgtggaaggtagtagataccaggaatcattaggcaatacagtatttgagttggaaaacag

SEQ ID NO: 736605 - DNA, 120 bp, Artificial Sequence
  ENSG00000198961_7 (sequence is synthesized)
agaggcagaggcatacactggtctttcaccaccagttccctcatttaactgtgaagtaagagatgagtttgaagagttagattctgtaccattagtgaaaagttctgctggtgatactga

SEQ ID NO: 736606 - DNA, 120 bp, Artificial Sequence
  ENSG00000198961_8 (sequence is synthesized)
gtttgtccatcagaatagccaggaaattcagaggtcttctcaagatgaaatggttagtacgaaacaacaaaataatactagccaggaaagacagacagaacattcacctgaagatgcagc

SEQ ID NO: 736607 - DNA, 120 bp, Artificial Sequence
  ENSG00000198961_9 (sequence is synthesized)
ctgtggtccagggcatatttgtagtgaacaaaataccaatgatagggaaaagaaccatggaagttctcctgaacaggtagtgaggccaaaagttagaaaactgataagttcaagccaggt

SEQ ID NO: 736608 - DNA, 120 bp, Artificial Sequence
  ENSG00000198961_10 (sequence is synthesized)
ggaccaagaaacaggttttaataggcatgaggcgaaacaaagaagtgttcaaagatggagagaggctttggaagttgaggaaagtggctcagatgacctcttaataaaatgtgaagaata

SEQ ID NO: 736609 - DNA, 120 bp, Artificial Sequence
  ENSG00000198961_11 (sequence is synthesized)
tgatggagagcatgactgtatgttcttggatccaccatactcaagagttattacacaaagggaaacagaaaataaccaaatgacatcagaaagtggagccacagcaggaaggcaagaggt

SEQ ID NO: 736610 - DNA, 120 bp, Artificial Sequence
  ENSG00000198961_12 (sequence is synthesized)
ggataacaccttttggaatggctgtggagattattaccaactctatgacaaagatgaagatagttctgaatgcagtgatggggaatggtctgcttctttgcctcatcgattttctggtac

SEQ ID NO: 736611 - DNA, 120 bp, Artificial Sequence
  ENSG00000198961_13 (sequence is synthesized)
agaaaaagatcaatcctcaagtgatgaaagctgggagactctgccaggaaaagatgagaatgaacctgagctacaaagtgatagcagtggccctgaagaagaaaaccaagaattatctct

SEQ ID NO: 736612 - DNA, 120 bp, Artificial Sequence
  ENSG00000198961_14 (sequence is synthesized)
tcaggaaggggaacagacatccttggaagagggagaaattccttggttacagtacaatgaagtcaatgaaagcagcagtgatgagggaaatgaacctgccaatgaatttgcacagccagc

SEQ ID NO: 736613 - DNA, 120 bp, Artificial Sequence
  ENSG00000198961_15 (sequence is synthesized)
tttcatgttggatggtaacaataacctggaggatgactccagtgtgagtgaagacttagatgtggattggagcctatttgatggctttgcagatggactaggagttgctgaagctatttc

SEQ ID NO: 736614 - DNA, 120 bp, Artificial Sequence
  ENSG00000198961_16 (sequence is synthesized)
atatgtggatcctcagttccttacctacatggcactagaagaacgcttagcccaggctatggagactgctctggcccatttagagtctcttgcagtggatgttgaggtggccaatccacc

SEQ ID NO: 736615 - DNA, 120 bp, Artificial Sequence
  ENSG00000198961_17 (sequence is synthesized)
agctagtaaggaaagcattgatggtcttccagagacccttgttcttgaagatcacactgctattggtcaggaacaatgctgtccaatctgttgcagtgagtatattaaggatgatatagc

SEQ ID NO: 736616 - DNA, 120 bp, Artificial Sequence
  ENSG00000198961_18 (sequence is synthesized)
aacagagttgccctgtcaccatttctttcacaaaccttgtgtctcaatttggctacaaaagtcgggaacatgccctgtgtgccgccgtcatttcccacctgcggttattgaagcatctgc

SEQ ID NO: 736617 - DNA, 120 bp, Artificial Sequence
  ENSG00000198961_19 (sequence is synthesized)
agctccttcctctgagcctgatcctgatgccccaccttcaaatgacagtattgcagaagcaccctaaaccttgacagttgaaatgagatcagtgtatcaaagtaaatctgcaaattcctt

SEQ ID NO: 736618 - DNA, 120 bp, Artificial Sequence
  ENSG00000198961_20 (sequence is synthesized)
tatatgccatagtttagaaagaatattaacctttctaaactaaatttaggtttgcagaaagtattaaacatttttaagctgaatgttgagacagtgcatccattttctttagttgaatat

SEQ ID NO: 736619 - DNA, 120 bp, Artificial Sequence
  ENSG00000198961_21 (sequence is synthesized)
gtttgtattaattgtaaagccaagcttatcagttgactctctccagaataaataatcatctgtgtggcatacgttattggctttgtctgtaatactgccactaagtgattataattaagc

SEQ ID NO: 736620 - DNA, 120 bp, Artificial Sequence
  ENSG00000198961_22 (sequence is synthesized)
tgtcctgtttgcatcaaatgtaaagactgtgttcacaaccgtagtaaaatttggtttcattggaaatgaaacaaattctaaagtatgctttttcactagtccctttgattttgctatatc

SEQ ID NO: 736621 - DNA, 120 bp, Artificial Sequence
  ENSG00000198961_23 (sequence is synthesized)
ataacctcttggttcatatgctgagaaatttttcagaaagtccatttttgtttaaaattagaacttttcagaatgccaaatgaaggctaaaattttggccagaacattacaaaagtttta

SEQ ID NO: 736622 - DNA, 120 bp, Artificial Sequence
  ENSG00000198961_24 (sequence is synthesized)
aatcgtagacgtaactccccctgaaataaagttaggtagtaaaatccttaatgaaaccagtggatgtgcttaacgtaaggttagtaaagcatacaaagaatctagtgtgctcagggcttg

SEQ ID NO: 736623 - DNA, 120 bp, Artificial Sequence
  ENSG00000198961_25 (sequence is synthesized)
gtacaatgagctgaattagatggccttatgaaactctttctaacctcttacccaacctgtttctccttggttaaaattatacttgaaggcccagaacactcatggcacatttgtttaata

SEQ ID NO: 736624 - DNA, 120 bp, Artificial Sequence
  ENSG00000198961_26 (sequence is synthesized)
ttgcttatagttagtttaaggtaattttgcttctacagtattttggaaggtctgaaaacttgcacagggtcatctttgtaattatataaccccaaactaagatgcacaatgtctccttca

SEQ ID NO: 736625 - DNA, 120 bp, Artificial Sequence
  ENSG00000198961_27 (sequence is synthesized)
ggtgatcacacacagtggacgagtatgtgcaaacatggacataatagttcacttacaaatgtgatttgatgttaacactagagaatgatgactgtagaacatttgagcaagtaaaatagt

SEQ ID NO: 736626 - DNA, 120 bp, Artificial Sequence
  ENSG00000198961_28 (sequence is synthesized)
aaagcacatagtgagtgtatgtccgtctaactggtacattgataatttagtttgggcacataaaaggaatatttatatggcttcccaaatgcagagttacatcttattcgtgtatttctc

SEQ ID NO: 736627 - DNA, 120 bp, Artificial Sequence
  ENSG00000198961_29 (sequence is synthesized)
tgagtatttatatcccgtctccttttttcattcttaaaaataaatgaattttcactgttggcacatatgaggcttaaatataaggaacataacacttgcattctaatttttgcatatatt

SEQ ID NO: 736628 - DNA, 120 bp, Artificial Sequence
  ENSG00000198961_30 (sequence is synthesized)
gtaaatgtgtctggtatttacagcaaaatactgtgtatccttttatgggtaaaacaaaagtgaacattgcatgcatgtaatgtgatgaatttgtaatttaggagttctttggggcttctg

SEQ ID NO: 736629 - DNA, 120 bp, Artificial Sequence
  ENSG00000198961_31 (sequence is synthesized)
tgacttgggaaatgcttacattcaggccttaatgttgcattagctagcatgttttccctctgatgtatatagtcactgttgtataaactaatctttgcttgttttctactctgtgatctt

SEQ ID NO: 736630 - DNA, 120 bp, Artificial Sequence
  ENSG00000198961_32 (sequence is synthesized)
tccatatcatatttcattaatgatcagttagtgtcaaggagtcaaaacagattaaaattaatttcatgtgtatatggtggaaatttgtggctagtgtgatttttgtttgtttccttttaa

SEQ ID NO: 736631 - DNA, 120 bp, Artificial Sequence
  ENSG00000198961_33 (sequence is synthesized)
gtactgttgatcagttgtgacacttactggttaaacttacgttgctaaagatttctctataataagccacacattatatttagactatattaagggaccttggttttcttctagatagca

SEQ ID NO: 736632 - DNA, 120 bp, Artificial Sequence
  ENSG00000198961_34 (sequence is synthesized)
gctgtcccaaagaaaatatttcttctttgtctgttaagatttagctattatctgccagttgttaagaggttttggttccaaactcaaccagcaatgttgagagctgaacttaagatagct

SEQ ID NO: 736633 - DNA, 120 bp, Artificial Sequence
  ENSG00000198961_35 (sequence is synthesized)
gttgtactttttgctttccatctgttactgtccttcattcttggctccctactatctataaacagctgctgtgaagaagaaaagttgaataagagttggcttaaattttaaaaaagaaaa

SEQ ID NO: 736634 - DNA, 120 bp, Artificial Sequence
  ENSG00000198961_36 (sequence is synthesized)
agaaaattgaggttttaggattttcatggtaacaagctctggtataagctaaggctggcaagttcagatactaaaatattatttgatcatatcttggatccttttgaaaaagttaagact

SEQ ID NO: 736635 - DNA, 120 bp, Artificial Sequence
  ENSG00000198961_37 (sequence is synthesized)
gatcatatcttggatccttttgaaaaagttaagactatatgaaggtaaattagaaataagtatgaatattaataaaatagcatttatcttatttctctattttatgttgtgacttaacct

SEQ ID NO: 736636 - DNA, 120 bp, Artificial Sequence
  ENSG00000198961_38 (sequence is synthesized)
tatgaatgctgatatttaaaggtagatctatgtggtattctttgtgtttcttaattgtttaactcttaagattatttgtgatctggatttatgtatttgttagatacatacgaattgtta

SEQ ID NO: 736637 - DNA, 120 bp, Artificial Sequence
  ENSG00000198961_39 (sequence is synthesized)
aaatggaatgcaagtttttcaaaagcccaggtctaaatgtaatggttggtttattgttctataaccccagcccatcattttctgtgtaaatcataaacaataaacagaatatactcggtg

SEQ ID NO: 736638 - DNA, 120 bp, Artificial Sequence
  ENSG00000198961_40 (sequence is synthesized)
gcattttccccgattgtcagtgaggctcggcacgcagacaccccgctcgagccgcagcagtcgctctactcccgggatcagcacctttccgccagggctgctctcagttagcgatgtcag

SEQ ID NO: 736639 - DNA, 120 bp, Artificial Sequence
  ENSG00000198961_41 (sequence is synthesized)
cactaagataatgatattttaaaggatgtatcaaaaaagctagcagatgaaatggaataataaaaaaaaattaccaaggaattcaagaacggaggaataaaggaacaaaggacaggaatc

SEQ ID NO: 736640 - DNA, 120 bp, Artificial Sequence
  ENSG00000198961_42 (sequence is synthesized)
ttctgcggcttgtccatagtgtgaataaaaactaaatcacatctataattctactgaactggtcacacagacgctgccatatatgtcacagtacactgaaaaggagccagcaggtaagga

SEQ ID NO: 736641 - DNA, 120 bp, Artificial Sequence
  ENSG00000198963_0 (sequence is synthesized)
atctctcccctctctttctctctcgctgctcccttcctccctgtaactgaacagtgaaaattcacattgtggatccgctaacaggcacagatgtcatgtgaaaacgcacatgctctgcca

SEQ ID NO: 736642 - DNA, 120 bp, Artificial Sequence
  ENSG00000198963_1 (sequence is synthesized)
tccacaccgcctttctttcttttctttctgtttccttttttcccccttgttccttctccctcttctttgtaactaacaaaaccaccaccaactcctcctcctgctgctgcccttcctcct

SEQ ID NO: 736643 - DNA, 120 bp, Artificial Sequence
  ENSG00000198963_2 (sequence is synthesized)
cctcctcagtccaagtgatcacaaaagaaatcttctgagccggaggcggtggcattttttaaaaagcaagcacattggagagaaagaaaaagaaaaacaaaaccaaaacaaaacccaggc

SEQ ID NO: 736644 - DNA, 120 bp, Artificial Sequence
  ENSG00000198963_3 (sequence is synthesized)
accagacagccagaacatttttttttcacccttcctgaaaacaaacaaacaaacaaacaatcatcaaaacagtcaccaccaacatcaaaactgttaacatagcggcggcggcggcaaacg

SEQ ID NO: 736645 - DNA, 120 bp, Artificial Sequence
  ENSG00000198963_4 (sequence is synthesized)
tcaccctgcagccacggcgtccgcctaaagggatggttttctcggcagagcagctcttcgccgaccaccttcttcactcgtgctgagcgggatttttgggctctccggggttcgggctgg

SEQ ID NO: 736646 - DNA, 120 bp, Artificial Sequence
  ENSG00000198963_5 (sequence is synthesized)
gagcagcttcatgactacgcggagcgggagagcggccacaccatgcgagcacaaattgaagtgataccatgcaaaatttgtggcgataagtcctctgggatccactacggagtcatcaca

SEQ ID NO: 736647 - DNA, 120 bp, Artificial Sequence
  ENSG00000198963_6 (sequence is synthesized)
tgtgaaggctgcaagggattctttaggaggagccagcagaacaatgcttcttattcctgcccaaggcagagaaactgtttaattgacagaacgaacagaaaccgttgccaacactgccga

SEQ ID NO: 736648 - DNA, 120 bp, Artificial Sequence
  ENSG00000198963_7 (sequence is synthesized)
ctgcagaagtgtcttgccctaggaatgtcaagagatgctgtgaagtttgggaggatgtccaagaagcaaagggacagcctgtatgctgaggtgcagaagcaccagcagcggctgcaggaa

SEQ ID NO: 736649 - DNA, 120 bp, Artificial Sequence
  ENSG00000198963_8 (sequence is synthesized)
cagcggcagcagcagagtggggaggcagaagcccttgccagggtgtacagcagcagcattagcaacggcctgagcaacctgaacaacgagaccagcggcacttatgccaacgggcacgtc

SEQ ID NO: 736650 - DNA, 120 bp, Artificial Sequence
  ENSG00000198963_9 (sequence is synthesized)
attgacctgcccaagtctgagggttattacaacgtcgattccggtcagccgtcccctgatcagtcaggacttgacatgactggaatcaaacagataaagcaagaacctatctatgacctc

SEQ ID NO: 736651 - DNA, 120 bp, Artificial Sequence
  ENSG00000198963_10 (sequence is synthesized)
acatccgtacccaacttgtttacctatagctctttcaacaatgggcagttagcaccagggataaccatgactgaaatcgaccgaattgcacagaacatcattaagtcccatttggagaca

SEQ ID NO: 736652 - DNA, 120 bp, Artificial Sequence
  ENSG00000198963_11 (sequence is synthesized)
tgtcaatacaccatggaagagctgcaccagctggcgtggcagacccacacctatgaagaaattaaagcatatcaaagcaagtccagggaagcactgtggcaacaatgtgccatccagatc

SEQ ID NO: 736653 - DNA, 120 bp, Artificial Sequence
  ENSG00000198963_12 (sequence is synthesized)
actcacgccatccaatacgtggtggagtttgcaaagcggataacaggcttcatggagctctgtcaaaatgatcaaattctacttctgaagtcaggttgcttggaagtggttttagtgaga

SEQ ID NO: 736654 - DNA, 120 bp, Artificial Sequence
  ENSG00000198963_13 (sequence is synthesized)
atgtgccgtgccttcaacccattaaacaacactgttctgtttgaaggaaaatatggaggaatgcaaatgttcaaagccttaggttctgatgacctagtgaatgaagcatttgactttgca

SEQ ID NO: 736655 - DNA, 120 bp, Artificial Sequence
  ENSG00000198963_14 (sequence is synthesized)
aagaatttgtgttccttgcagctgaccgaggaggagatcgctttgttctcatctgctgttctgatatctccagaccgagcctggcttatagaaccaaggaaagtccagaagcttcaggaa

SEQ ID NO: 736656 - DNA, 120 bp, Artificial Sequence
  ENSG00000198963_15 (sequence is synthesized)
aaaatttattttgcacttcaacatgtgattcagaagaatcacctggatgatgagaccttggcaaagttaatagccaagataccaaccatcacggcagtttgcaacttgcacggggagaag

SEQ ID NO: 736657 - DNA, 120 bp, Artificial Sequence
  ENSG00000198963_16 (sequence is synthesized)
ctgcaggtatttaagcaatctcatccagagatagtgaatacactgtttcctccgttatacaaggagctctttaatcctgactgtgccaccggctgcaaatgaaggggacaagagaactgt

SEQ ID NO: 736658 - DNA, 120 bp, Artificial Sequence
  ENSG00000198963_17 (sequence is synthesized)
ctcatagtcatggaatgcatcaccattaagacaaaagcaatgtgttcatgaagacttaagaaaaatgtcactactgcaacattaggaatgtcctgcacttaatagaattatttttcaccg

SEQ ID NO: 736659 - DNA, 120 bp, Artificial Sequence
  ENSG00000198963_18 (sequence is synthesized)
ctacagtttgaagaatgtaaatatgcacctgagtggggctcttttatttgtttgtttgtttttgaaatgaccataaatatacaaatataggacactgggtgttatcctttttttaatttt

SEQ ID NO: 736660 - DNA, 120 bp, Artificial Sequence
  ENSG00000198963_19 (sequence is synthesized)
attcgggtatgttttgggagacaactgtttatagaattttattgtagatatatacaagaaaagagcggtactttacatgattacttttcctgttgattgttcaaatataatttaagaaaa

SEQ ID NO: 736661 - DNA, 120 bp, Artificial Sequence
  ENSG00000198963_20 (sequence is synthesized)
ttccacttaataggcttacctatttctatgtttttaggtagttgatgcatgtgtaaatttgtagctgtcttggaaagtactgtgcatgtatgtaataagtatataatatgtgagaatatt

SEQ ID NO: 736662 - DNA, 120 bp, Artificial Sequence
  ENSG00000198963_21 (sequence is synthesized)
atatatgactattacttatacatgcacatgcactgtggcttaaataccatacctactagcaatggaggttcagtcaggctctcttctatgatttaccttctgtgttatatgttaccttta

SEQ ID NO: 736663 - DNA, 120 bp, Artificial Sequence
  ENSG00000198963_22 (sequence is synthesized)
tgttagacaatcaggattttgttttcccagccagagttttcatctatagtcaatggcaggacggtaccaactcagagttaagtctacaaaggaataaacataatgtgtggcctctatata

SEQ ID NO: 736664 - DNA, 120 bp, Artificial Sequence
  ENSG00000198963_23 (sequence is synthesized)
caaactctatttctgtcaatgacatcaaagccttgtcaagatggttcatattgggaaggagacagtattttaagccattttcctgtttcaagaattaggccacagataacattgcaaggt

SEQ ID NO: 736665 - DNA, 120 bp, Artificial Sequence
  ENSG00000198963_24 (sequence is synthesized)
ccaagacttttttgaccaaacagtagatattttctatttttcaccagaacacataaaaacactttttttcttttggatttctggttgtgaaacaagcttgatttcagtgcttattgtgtc

SEQ ID NO: 736666 - DNA, 120 bp, Artificial Sequence
  ENSG00000198963_25 (sequence is synthesized)
ttcaactgaaaaatacaatctgtggattatgactaccagcaatttttttctaggaaagttaaaagaataaatcagaacccagggcaacaatgccatttcatgtaaacattttctctctca

SEQ ID NO: 736667 - DNA, 120 bp, Artificial Sequence
  ENSG00000198963_26 (sequence is synthesized)
ccatgttttggcaagaaaaggtagaaagagaagacccagagtgaagaagtaattctttatattcctttctttaatgtatttgttaggaaaagtggcaataaagggggaggcatattataa

SEQ ID NO: 736668 - DNA, 120 bp, Artificial Sequence
  ENSG00000198963_27 (sequence is synthesized)
aatgctataatataaaaatgtagcaaaaacttgacagactagaaaaaaaaagatctgtgttattctagggaactaatgtaccccaaagccaaaactaattcctgtgaagtttacagttac

SEQ ID NO: 736669 - DNA, 120 bp, Artificial Sequence
  ENSG00000198963_28 (sequence is synthesized)
atcatccatttaccctagaattatttttttagcaacttttagaaataaagaatacaactgtgacattaggatcagagattttagacttccttgtacaaattctcacttctccacctgctc

SEQ ID NO: 736670 - DNA, 120 bp, Artificial Sequence
  ENSG00000198963_29 (sequence is synthesized)
accaatgaaattaatcataagaaaagcatatattccaagaaatttgttctgcctgtgtcctggaggcctatacctctgttattttctgatacaaaataaaacttaaaaaaaagaaaacaa

SEQ ID NO: 736671 - DNA, 120 bp, Artificial Sequence
  ENSG00000198963_30 (sequence is synthesized)
gctaagagagaagtttgtgtataagacaatgaaaattatggtctcctgtaagtatatcccagccaccaactcctaaagaactgcccttttctccatattaaacacacacacacttacaca

SEQ ID NO: 736672 - DNA, 120 bp, Artificial Sequence
  ENSG00000198963_31 (sequence is synthesized)
cacacacatacaaacccctgctttgtaaagtttccatcagtggaaactttgatttctttttttaatctcttatgctctcctgaagttcatggttgagcaccatctccaagataccacaga

SEQ ID NO: 736673 - DNA, 120 bp, Artificial Sequence
  ENSG00000198963_32 (sequence is synthesized)
actcttgattgatgatcaaaacagtagtgtcatcttttccttttagaaaacggaacattttctcacctcatgattgatgaattctaaaccaatggggaaaaacaaaaaggctttaaaata

SEQ ID NO: 736674 - DNA, 120 bp, Artificial Sequence
  ENSG00000198963_33 (sequence is synthesized)
atgaatctgtttctcaactactgttatattcaattaatttaactacattgaaccaaattacctttggttctaagaagacagctgtagactgcttattatgctgctacagggactcaattc

SEQ ID NO: 736675 - DNA, 120 bp, Artificial Sequence
  ENSG00000198963_34 (sequence is synthesized)
tttttggtgtaaatgtcactcctgctagctctttgtataaagaattaattcccagagtcatatttccttctaatggaaagattactctactgattgctaggaaaacagggtaatggaagg

SEQ ID NO: 736676 - DNA, 120 bp, Artificial Sequence
  ENSG00000198963_35 (sequence is synthesized)
cactcaattaaaccaagccgtttccaaatgcaatgtatgttttatgattggcttgtgataggcgatgcttcatgtgtctacttggtgtttccctttgagctttgaacttatgtcaaactt

SEQ ID NO: 736677 - DNA, 120 bp, Artificial Sequence
  ENSG00000198963_36 (sequence is synthesized)
tgttttcattgttctgttggcctagtgttttccattgtcagcctgtaattcctgctcagttgcagagggaattatttatttcctccaatttaccttagaggatttaaattggctcaattg

SEQ ID NO: 736678 - DNA, 120 bp, Artificial Sequence
  ENSG00000198963_37 (sequence is synthesized)
atgaagtggctcagaattttttcctcccttttcccatgggtgatataggaaaaagattgttccccacatttaccttgggaggtactgctttgaatttgtgttgtttccactagcgttaag

SEQ ID NO: 736679 - DNA, 120 bp, Artificial Sequence
  ENSG00000198963_38 (sequence is synthesized)
catttcactgggacggcatggaccttttgaagctgggaggaaggaaacagagctagcatctgaaccagagcaaaacaatggcaaccaggacatactcatcccacttagttgagagaagag

SEQ ID NO: 736680 - DNA, 120 bp, Artificial Sequence
  ENSG00000198963_39 (sequence is synthesized)
ctatgactgcatgtcaaggtattttgtacctacaatcccagaacttggttccttccccatgaggactaacaaatgttcacaacaatcatgatcaagtgtgcactggaagaaaaaatccac

SEQ ID NO: 736681 - DNA, 120 bp, Artificial Sequence
  ENSG00000198963_40 (sequence is synthesized)
aatctgggcttctcacttcgtgcttcataaatgacaatcactgcttgatgcagatgttgcactgtatccactcagggatgtttccttaaaaaaaaaaaatacatcaagaaggaggaaaaa

SEQ ID NO: 736682 - DNA, 120 bp, Artificial Sequence
  ENSG00000198963_41 (sequence is synthesized)
attaaaaacaggaaaatgacaacaaaatgtgaatggtataaattaaatatgttgctgagagcacctctctgacaaggctttcagaccaacaagcagtaacttcatgtcataaactagatt

SEQ ID NO: 736683 - DNA, 120 bp, Artificial Sequence
  ENSG00000198963_42 (sequence is synthesized)
gacttatttggacttgctgaaaagttgcacccaagtaaggacaacttggtctcattttctaaactctgctaagagccaaataatctagctgtcccattcagaggaatttttatctccctg

SEQ ID NO: 736684 - DNA, 120 bp, Artificial Sequence
  ENSG00000198963_43 (sequence is synthesized)
caaatccaaactttctatacaaatcctgaacaaggaaaatacagaaatctaactggcattagataaaatggacaagggaggtgaaaccgggtgaattcaaacttcagtgtatttgtggtc

SEQ ID NO: 736685 - DNA, 120 bp, Artificial Sequence
  ENSG00000198963_44 (sequence is synthesized)
cataaaaagaaagggaaattttggagggaaaataggacaggaaaggattccaaatctggtttgacacccgtatatgcccgtactgtccatgactcaactaatctctttgcccctttttct

SEQ ID NO: 736686 - DNA, 90 bp, Artificial Sequence
  ENSG00000198963_45 (sequence is synthesized)
tactgtccatgactcaactaatctctttgcccctttttctgtggctccttttttgttttgagacagatcttgttcaacagatcttggctc

SEQ ID NO: 736687 - DNA, 120 bp, Artificial Sequence
  ENSG00000198963_46 (sequence is synthesized)
cacccgccttggcctcccaaagtgcaaggattacaggcctgagccactgcgccctgccttcagtggctcttttatcccccaaagactgaaagctgaaggtggagatgttctccacaaaca

SEQ ID NO: 736688 - DNA, 120 bp, Artificial Sequence
  ENSG00000198963_47 (sequence is synthesized)
cacaaacataccctttctgaatttcccttgttttagcactgtgttcagggctctggactaaagtacctctgagtaggtaaaatcagagaatataacgatctcctgagtgattagatttct

SEQ ID NO: 736689 - DNA, 120 bp, Artificial Sequence
  ENSG00000198963_48 (sequence is synthesized)
ttggtagattccaagagatcttaaatcataataaactctgaatattaacaagaggtgccagggaggtgtcagtacatttcctatcatagctgccttgttcaaagcataatctcagagcag

SEQ ID NO: 736690 - DNA, 120 bp, Artificial Sequence
  ENSG00000198963_49 (sequence is synthesized)
tcaagctaaactgtttgtagaaaaccatgaagatcaactcatgctcactctctacaatgcaatgtgtacgaggcttgaaggcaaaaacaattcttgggtcccaaggacaacctaaaactt

SEQ ID NO: 736691 - DNA, 120 bp, Artificial Sequence
  ENSG00000198963_50 (sequence is synthesized)
accagcttttttcaaaaacaacaatcagatgcaaataatggcagtgttgttctatgttctttgtttctgttcattatagaagcaaggaaaaattctatttctattggaaattagaagaaa

SEQ ID NO: 736692 - DNA, 120 bp, Artificial Sequence
  ENSG00000198963_51 (sequence is synthesized)
taatttcttcctgactctttttttttctataaacttttatttccaaggaagctgctacaatttgcagtcaattcaggccatggacgtctgtgccctaacagaagcaccgttcaatagaac

SEQ ID NO: 736693 - DNA, 120 bp, Artificial Sequence
  ENSG00000198963_52 (sequence is synthesized)
agcaataaccttaaagtgtgcatctgtagtgaaactctgcacaaagtcccctgcataaagaagagaggaaagcctaccatctgctttagacgaagtgttatttgatgttctgtttccaac

SEQ ID NO: 736694 - DNA, 120 bp, Artificial Sequence
  ENSG00000198963_53 (sequence is synthesized)
tgtcagtataagcagcaactagagtaaaggcctgatgtgggaaactatggggggtctttcaaaaaaaagctgacactctattcatttttgggtctcaggaccagagggtacagggtagag

SEQ ID NO: 736695 - DNA, 120 bp, Artificial Sequence
  ENSG00000198963_54 (sequence is synthesized)
ggtagtttaccatttaaagcaggggttgaaaattcgaaagcctaaaagggccagggggcttaatgcaaatgggtgaagcagcccaggggcaagctggccaggaaatgccctgtggaaaaa

SEQ ID NO: 736696 - DNA, 120 bp, Artificial Sequence
  ENSG00000198963_55 (sequence is synthesized)
gggacatccacgatttacctgaaactgaatgctgctagagcttctgaattttataaaatctctgaaattatacatgatggcagttgattcagagcttagtgcagaccaaacaaatacatc

SEQ ID NO: 736697 - DNA, 120 bp, Artificial Sequence
  ENSG00000198963_56 (sequence is synthesized)
actgagcagaagagggcccatagatcgtcagcttgcagcctctggtttaaagcaaaatcgcatctggggccagctcaactgcagcaagtctggtcagattcaaccctggacgatattaga

SEQ ID NO: 736698 - DNA, 120 bp, Artificial Sequence
  ENSG00000198963_57 (sequence is synthesized)
atgatattagttttggaaggaggggatggagatcttccccttctaatactcaattttgttttggtatttgattgtcacaactagaggatataacaggaggtcagtttaaaaaatagcaaa

SEQ ID NO: 736699 - DNA, 120 bp, Artificial Sequence
  ENSG00000198963_58 (sequence is synthesized)
cagtctaaaaatgaaaactattcaatttagtgatggcttataaaagacactccaacttgtcttgcccaaactcccttcttcatagagccagggggctggatttcttgccactttttttct

SEQ ID NO: 736700 - DNA, 120 bp, Artificial Sequence
  ENSG00000198963_59 (sequence is synthesized)
gaaaggcaaatgcatgacttttattcttttgggtctcagtgtgtttcttgaactgtgtgacttcaatatctgtgacaagtttttattttcccttagttgtatgtgaagaatttattctat

SEQ ID NO: 736701 - DNA, 120 bp, Artificial Sequence
  ENSG00000198963_60 (sequence is synthesized)
agtcgtgatcatgtagtcctccattgtttggaagtgcagaccatggattcctatgcagcagatgggggttgtctgtttgtgcacttttttcctaagctgctgaaattcctccgatgtgaa

SEQ ID NO: 736702 - DNA, 120 bp, Artificial Sequence
  ENSG00000198963_61 (sequence is synthesized)
tgggccatagtaatctttgcctcctgcgtgactgtaagcatggcctccagtggatcagagaaagcagctcagtgattgttctcatggccaaaaataaagcacaagggttaccggaattga

SEQ ID NO: 736703 - DNA, 120 bp, Artificial Sequence
  ENSG00000198963_62 (sequence is synthesized)
atgagccctgttcagggcagcacggggcatctgcaccccagctgggcagcatgatccttgtattcaactatactcttctggcagtagttggtggcaagcattcgcgtgcctctgtcacaa

SEQ ID NO: 736704 - DNA, 120 bp, Artificial Sequence
  ENSG00000198963_63 (sequence is synthesized)
ccatacgtagaaacacattaggtatgtctggaaagctacaaatcccacatccaagcacagtaccgtctgcttcatctgattaacacacacacaagaaagaaaaattacacccacagaaaa

SEQ ID NO: 736705 - DNA, 120 bp, Artificial Sequence
  ENSG00000198963_64 (sequence is synthesized)
ctgagtatgtattgtagaaatgtagaggaaaaataaaaatattttttcaaatgtaattacttttaatatatgcttgtggaaggtctaatacaatgtatgctgtctctgtaatttttgctg

SEQ ID NO: 736706 - DNA, 120 bp, Artificial Sequence
  ENSG00000198963_65 (sequence is synthesized)
taaataactggagacggtgagtacactgatttttctatgtctctgtttaagcataagactttgtaacaatttttttagagggggaaaatcaacaaagagcaaatatgtacttgcttcctt

SEQ ID NO: 736707 - DNA, 120 bp, Artificial Sequence
  ENSG00000198963_66 (sequence is synthesized)
tctgcgtgttatgtacttctcagttttttaatggaaactggttgtaacagtttaagcatcttgacgggtcattggtgttaagtgtatgcttctttttgtaatatgactgagaaagggaca

SEQ ID NO: 736708 - DNA, 120 bp, Artificial Sequence
  ENSG00000198963_67 (sequence is synthesized)
gggctgtcaattaaatctgctccaaagaatttgtattgaagattggcctaagacctgcaaactccatctataactagaaaatacgaaaaaggaaaattaaaaaaaaaagttgcctgagtt

SEQ ID NO: 736709 - DNA, 120 bp, Artificial Sequence
  ENSG00000198963_68 (sequence is synthesized)
aagtcatctttccttgtagcaaatggctttgtccaaatcctttctgcatggaatagcttaaggaaaacaaactccgctttctgatgaacaagatatttttgtacacatttatttcttgtt

SEQ ID NO: 736710 - DNA, 120 bp, Artificial Sequence
  ENSG00000198963_69 (sequence is synthesized)
aataacctgaggtcagaccactcatttgctgaagccataactgaccttcaccaaataaatgttgtaaagaacctaggggagggttggggagagactgagagggaggaaaatccaaggtgt

SEQ ID NO: 736711 - DNA, 120 bp, Artificial Sequence
  ENSG00000198963_70 (sequence is synthesized)
catgagctatagcaacacaggcaggagcaagttgttgaaactgatgcttttcctgcatcccaaatatgactttaaaaggctagtattttatgatgatcgatttataatgataaaaagata

SEQ ID NO: 736712 - DNA, 120 bp, Artificial Sequence
  ENSG00000198963_71 (sequence is synthesized)
tttagatttaaatgagacattccaatatttttgaaatccctaacaatgcttccttgcttttaggattgagagaaatgattttcatatacttccaacattcagagatttaatgtttttacc

SEQ ID NO: 736713 - DNA, 120 bp, Artificial Sequence
  ENSG00000198963_72 (sequence is synthesized)
ttagctccagcctacgcttgtaaagtgaagagtgattctaagtcccgtgaaaccgtgggctgcctggggcttggctgtgcccactaacctactgcgcctggggggcagcatgggaggggt

SEQ ID NO: 736714 - DNA, 120 bp, Artificial Sequence
  ENSG00000198963_73 (sequence is synthesized)
acagtttgcatctcattagcatgcacaccactgttggcaatgcataaaagttgcattgccacaagtatgtaaaataaaaatattcactctaaaaagaataataattctacttttttaaaa

SEQ ID NO: 736715 - DNA, 120 bp, Artificial Sequence
  ENSG00000198963_74 (sequence is synthesized)
gaataatgtctcttatagtcaccattgatttttctggagtttaattacattattaccatgtattcttattggcctgtagaggaaaaaggcaaaccacaaataaacccagtgacatatata

SEQ ID NO: 736716 - DNA, 120 bp, Artificial Sequence
  ENSG00000198963_75 (sequence is synthesized)
gttttaaaatctacaattttctgatctctctctccttgtttaatatataagccctaatttctgtgtatgtgagtaaaactgcagcctgagtcatttaggaagtaagtattgagttttttt

SEQ ID NO: 736717 - DNA, 120 bp, Artificial Sequence
  ENSG00000198963_76 (sequence is synthesized)
aatcataaatatactagaataaaacagcactccctaacaattaaaaaagagttttatattactttagaatgtaataggtttttgtccttattttatgtcctgtaaattattagttcaata

SEQ ID NO: 736718 - DNA, 120 bp, Artificial Sequence
  ENSG00000198963_77 (sequence is synthesized)
ctgttagcattcccggataatgcacacatgatttctgaatgttttctgtaaatgacaatcaatgtttatgaagtttcctcctttaatgctgaacaaaattaaaagaagaaaaagaaaaaa

SEQ ID NO: 736719 - DNA, 120 bp, Artificial Sequence
  ENSG00000198964_0 (sequence is synthesized)
agcccgggaggctcgcggtggcaagtcgaaagcgttcgcaccagcggggcagcggctgcgggcggcaggcggcgggcaggtcgggagtgagaaggaccggcctgggctgactgctctccc

SEQ ID NO: 736720 - DNA, 120 bp, Artificial Sequence
  ENSG00000198964_1 (sequence is synthesized)
ctcgcgcctagggagccggtcggagagcgcgattggggtgcggagccccgacgctgccctgccccggatttcattccgcggcgggggctccgcgagcggaattccggcggctgccgtgac

SEQ ID NO: 736721 - DNA, 120 bp, Artificial Sequence
  ENSG00000198964_2 (sequence is synthesized)
tccagtgcaacgtgacgacagcatgtacgatccctgaatgggcccgtgggcatatttagtcattcatttttgatcaggagaaagaagacagccatcatttgaaaggtaaagcttcagcga

SEQ ID NO: 736722 - DNA, 120 bp, Artificial Sequence
  ENSG00000198964_3 (sequence is synthesized)
ctgaaggagtgtggactttttgaatttcaagaacagtaaagttggaacacagcagagggtgtgtaataaaatacagattggaaagaagactgatgaagaaaaataacagcatgattcagg

SEQ ID NO: 736723 - DNA, 120 bp, Artificial Sequence
  ENSG00000198964_4 (sequence is synthesized)
cacaccattgagttctttgggatgcccgaaagtgtctggttgggaaacatgaaatagaagacgagaacctgcctcagcaagcgtacctgagaatacttttaaaggaacctgttgataaat

SEQ ID NO: 736724 - DNA, 120 bp, Artificial Sequence
  ENSG00000198964_5 (sequence is synthesized)
gcaaaacagtggctgttgcaggtgatggaactgtactggaacaatgggagaagctggtagcttataggaagccaagatgaccagaatgtttttaaataatccaaggaagaatcctgctca

SEQ ID NO: 736725 - DNA, 120 bp, Artificial Sequence
  ENSG00000198964_6 (sequence is synthesized)
aaaatgaggtgaattaatacttgggcgctcaggaaccctggacagctacatgaggtgtttaaaaactgccctgaccatcttgccaaacaagtctctgctcatgaggccccacaggatgaa

SEQ ID NO: 736726 - DNA, 120 bp, Artificial Sequence
  ENSG00000198964_7 (sequence is synthesized)
cgagccgaggcaggacagtgtcctgccctgtcggaacagtgactgctgacctgccaagagagagctggggactgcctgctgtctgccagtacaatgaaggaagtggtttattggtcaccc

SEQ ID NO: 736727 - DNA, 120 bp, Artificial Sequence
  ENSG00000198964_8 (sequence is synthesized)
aagaaggtggcagactggctgctggagaatgctatgccagaatactgtgagcctctggagcatttcacaggccaggacttgatcaacctaacccaagaggatttcaaaaaaccccccttg

SEQ ID NO: 736728 - DNA, 120 bp, Artificial Sequence
  ENSG00000198964_9 (sequence is synthesized)
tgccgagtctcctctgacaatgggcagcggctcctggacatgatagaaaccctgaaaatggagcaccatttggaagcacacaagaacggccatgccaatgggcacctcaacattggcgta

SEQ ID NO: 736729 - DNA, 120 bp, Artificial Sequence
  ENSG00000198964_10 (sequence is synthesized)
gacatccccacccccgacggcagcttcagcatcaagattaaacccaacgggatgccaaatgggtataggaaagagatgataaagatccccatgccagaactggagcgctctcagtacccc

SEQ ID NO: 736730 - DNA, 120 bp, Artificial Sequence
  ENSG00000198964_11 (sequence is synthesized)
atggagtggggcaagacttttctggcctttctttatgcactttcctgtttcgttctcaccacagtgatgatctcggtcgtccacgaacgagtacctcctaaggaggtgcagcctccacta

SEQ ID NO: 736731 - DNA, 120 bp, Artificial Sequence
  ENSG00000198964_12 (sequence is synthesized)
ccggacacattttttgaccattttaaccgggtgcagtgggccttttctatttgtgaaattaatggcatgatccttgtaggactctggttaattcagtggctgctcttaaaatacaagtct

SEQ ID NO: 736732 - DNA, 120 bp, Artificial Sequence
  ENSG00000198964_13 (sequence is synthesized)
attattagcagaagatttttctgcatagttggcacgctgtacctgtatcggtgtattacaatgtatgtaactacactcccagtacctggtatgcatttcaactgttctccgaagcttttc

SEQ ID NO: 736733 - DNA, 120 bp, Artificial Sequence
  ENSG00000198964_14 (sequence is synthesized)
ggagactgggaagcccaactgcgaagaataatgaagctcattgctggaggtggcttgtctatcactggctctcacaacatgtgtggggactatctgtacagcggccacacggtcatgcta

SEQ ID NO: 736734 - DNA, 120 bp, Artificial Sequence
  ENSG00000198964_15 (sequence is synthesized)
tacactgtggacgtggtggtggcatattacatcaccacgagactcttctggtggtatcacactatggccaatcagcaagtgctaaaggaagcttcccagatgaacctcctggccagggtg

SEQ ID NO: 736735 - DNA, 120 bp, Artificial Sequence
  ENSG00000198964_16 (sequence is synthesized)
tggtggtacaggccatttcagtactttgaaaagaatgtccaaggaattgtacctcgatcttaccattggcctttcccctggccagtagtccacctcagtaggcaagttaaatacagccgg

SEQ ID NO: 736736 - DNA, 120 bp, Artificial Sequence
  ENSG00000198964_17 (sequence is synthesized)
ctggtgaatgacacataacagctgtacaaagtggggaaaagacaaattgtccgaagtgctaagaactccatgagagaagatgccataaaataaacacctccctaatcctattatctttca

SEQ ID NO: 736737 - DNA, 120 bp, Artificial Sequence
  ENSG00000198964_18 (sequence is synthesized)
atggttaccttgacttaacctattgagttacctggtcagcactgtgatctttttttctctccaaaggacctgcgttggacaacaataaagaaaaatttaacctatcatgcactgtacaca

SEQ ID NO: 736738 - DNA, 120 bp, Artificial Sequence
  ENSG00000198964_19 (sequence is synthesized)
tttcctgttcataagtttgggatttacataacccgcaaccaccatgttcctttgtatatgatgcagcagcataaatgtaagcttttatatcataagttctggtctttccagtcacatctg

SEQ ID NO: 736739 - DNA, 120 bp, Artificial Sequence
  ENSG00000198964_20 (sequence is synthesized)
gaaataaagcgtattattttcttgggaaaacatacttttcatatctcttgccccaaagattgggctgtaagccattttctagcaaatgtctctatgaaggtttctaagtacctgaatggg

SEQ ID NO: 736740 - DNA, 120 bp, Artificial Sequence
  ENSG00000198964_21 (sequence is synthesized)
gtttgattctgaaatctttctacctgttgcaccgatattcaaataaaaatgatagacacagaaaggtttggtaactttgggttttgtaaaatcagcaaaggcagtgtttcaaaaagtgca

SEQ ID NO: 736741 - DNA, 120 bp, Artificial Sequence
  ENSG00000198964_22 (sequence is synthesized)
aaaaaaaagattctgttataaagtgattttctaagtatttcctaactttatttttcaaaatgatgttatgaacaccaaatttaaagatttttaacatgtcagagagaagagagttaaaat

SEQ ID NO: 736742 - DNA, 120 bp, Artificial Sequence
  ENSG00000198964_23 (sequence is synthesized)
ttaaaaatgcatcttgggagagaaatttgtctatgtttctagtgcctttcttgtcttgattgtatggtcagtaggcaatcttaaatgtttttatttaaaataaagtattccttgaaaata

SEQ ID NO: 736743 - DNA, 120 bp, Artificial Sequence
  ENSG00000198964_24 (sequence is synthesized)
taaatatatgtatacactactaaattttgcatttatagctaaattgaatcagaagactgcttatggttttaaaattgcaatgacttaaataatgaggttgttaattagagtcagagcctg

SEQ ID NO: 736744 - DNA, 120 bp, Artificial Sequence
  ENSG00000198964_25 (sequence is synthesized)
ttcacatattgtgatcaggtagcaatgacatgtaccacttaaattattttatcgtcgatttggtagttcaattttaactactcaatgaaaacagccatgaatatcttttcttaaagagag

SEQ ID NO: 736745 - DNA, 120 bp, Artificial Sequence
  ENSG00000198964_26 (sequence is synthesized)
ttttgaaaatgatcacttacctaaaacttgaaagctatgaattagttatccatactctcatgacaattttgttggtgaacaacaaaaaagagatctatttctttaaaagatatttgtgca

SEQ ID NO: 736746 - DNA, 120 bp, Artificial Sequence
  ENSG00000198964_27 (sequence is synthesized)
gaaactgcatgtaactctaagttttactcctaacatacatatgtttggggaagtattctattctatacttgccaatgtggagaacaaaatagttttttaagaatgaagaagtatatatat

SEQ ID NO: 736747 - DNA, 120 bp, Artificial Sequence
  ENSG00000198964_28 (sequence is synthesized)
ccattctgtattttacgtgcagcagaattatcttccgtaggatttttttgtgtattcacaaggtgatatttgtattgtaaaacaataatggtgaaggaaataaaaaggcttttaaaattt

SEQ ID NO: 736748 - DNA, 120 bp, Artificial Sequence
  ENSG00000198964_29 (sequence is synthesized)
tgtttgttttaaatctttgtaaagttattattccagagagtatactggtatcttacagcttacctagatcataaattaatcaaaatgcactttttaataaaaactgatacttaaaataaa

SEQ ID NO: 736749 - DNA, 120 bp, Artificial Sequence
  ENSG00000198964_30 (sequence is synthesized)
gatgcactggctctctttgtaaggcacagcctgtgttattgtcatatgtcaccgtgatcctttaggatttttgtagtctttttttttttccatctaccaatgaagaacactacaaatgta

SEQ ID NO: 736750 - DNA, 120 bp, Artificial Sequence
  ENSG00000198964_31 (sequence is synthesized)
ctctggttaattcagtggctgctcttaaaatacaagtaagtcaagtaaaagctctaagattcaatgattatgggatttgcactccaaacatctacttattatttataaatgaaatttatc

SEQ ID NO: 736751 - DNA, 120 bp, Artificial Sequence
  ENSG00000198964_32 (sequence is synthesized)
aacttgttgggatcaaaacatactatttttttttcttttttaaacacataccctgttggactaacttactgtctggaagctttaaaagaaaatgttgtttgttgcctgttttatgcaaga

SEQ ID NO: 736752 - DNA, 120 bp, Artificial Sequence
  ENSG00000198964_33 (sequence is synthesized)
ttcatacaggatgatgaataagatggttagagatgatgctctgttttcacttaataagaaagaaaactctcagacatcttcagacagtacaggctattgaacaacagatcaaccacctag

SEQ ID NO: 736753 - DNA, 120 bp, Artificial Sequence
  ENSG00000198964_34 (sequence is synthesized)
tcttggttggtgttactaacccattaaataaatcgacagttggcctaagcactataaattggctgcatagcttttcccacacagagtcagacatctagagccttagcaatatgtatttaa

SEQ ID NO: 736754 - DNA, 120 bp, Artificial Sequence
  ENSG00000198964_35 (sequence is synthesized)
agatgtttcacacagaattcagaacacctgttccagagtggcttgggttgttgggaaaacaataccaaagggtatgcctttgggtaggtgggaagtggatggacctgaatggattcccac

SEQ ID NO: 736755 - DNA, 120 bp, Artificial Sequence
  ENSG00000198964_36 (sequence is synthesized)
tacttaaaacaatatgtgactgttgcattcaaatttctcagagttttaagtaggcaactcccacttagttccaggtgtatccaaggtggctttcatatctgaagctctaaactcaacatg

SEQ ID NO: 736756 - DNA, 120 bp, Artificial Sequence
  ENSG00000198964_37 (sequence is synthesized)
gaccccctcagactggctgtttactggggttgcctacattgtcccttcactgatgtttgattttctccttagttaaaggaacgccttatggtttccatgaatgagggttggaaattggtt

SEQ ID NO: 736757 - DNA, 120 bp, Artificial Sequence
  ENSG00000198964_38 (sequence is synthesized)
tgttaaagagctgagtttctctccagtggagtgtgtttcatgatccaccatgtggttaaatattaaggaattcatcttacagcaagaaaacaaaatgcacactgagagttcatgctgaat

SEQ ID NO: 736758 - DNA, 120 bp, Artificial Sequence
  ENSG00000198964_39 (sequence is synthesized)
gttctttgacagaaatgataaggtttttcctagtatgttttataacaactcttttttttaacctgataaattatatatctacaaattgaaataaaagcagttcctgacactttcccaggg

SEQ ID NO: 736759 - DNA, 120 bp, Artificial Sequence
  ENSG00000198964_40 (sequence is synthesized)
atggacggtcttaactggtataaagaaagccatttaactgatcagtgtttatttacagatggtttgacagtcctagagtttaagctgaatctgaaatagaattgttggtctgggctgcat

SEQ ID NO: 736760 - DNA, 120 bp, Artificial Sequence
  ENSG00000198964_41 (sequence is synthesized)
ttaatttggtggaagacgtttttttctgttcctttggttttaagaggctaataaataggaataggctttagaaatacaagatacttggagtttattaaatgcattatttttgctgccaaa

SEQ ID NO: 736761 - DNA, 120 bp, Artificial Sequence
  ENSG00000198964_42 (sequence is synthesized)
cagagtcgtcatgatcttcctaagcatcgtccaccctgtccttctactggggtccatcgctggtttcctgtctctctccctgtgacctctcttcagtgtatctggcccaccagacagaat

SEQ ID NO: 736762 - DNA, 120 bp, Artificial Sequence
  ENSG00000198964_43 (sequence is synthesized)
tttcttttttgccgtggtagagggccacaccctgcattccaaaaaccctctgctgccgggccacacccgccaaccccgctcttggagcctctgaggtccggctgggcgtctagctcgcag

SEQ ID NO: 736763 - DNA, 120 bp, Artificial Sequence
  ENSG00000198964_44 (sequence is synthesized)
ttgaccccccgggagaggatcggcgcatccggccgcccgccagctccagacgccgggctccgcagcgccgctgtcctagcaccagggcccggcaagcaggggaacgggaccgccgggacc

SEQ ID NO: 736764 - DNA, 120 bp, Artificial Sequence
  ENSG00000198964_45 (sequence is synthesized)
agccgcgcccggggtctgcgcgccgctcagcgcgctcgcctttccgcccgcgccagggctggctgcgcgcaccctgagcgcgaggagccgcgcgcaaacttggtgccccaggaactttcc

SEQ ID NO: 736765 - DNA, 120 bp, Artificial Sequence
  ENSG00000198964_46 (sequence is synthesized)
agtttgcttctggcccgggcgagaacctgtcctctgggcaagccaggggtcggtacaggactcctataccccaaggcgaggcggaggcaggtgccgagcggtggccagagtccggcgccc

SEQ ID NO: 736766 - DNA, 120 bp, Artificial Sequence
  ENSG00000198964_47 (sequence is synthesized)
attaaacataggttttgattttttttgtacttaaatttttcctcctttcattcttaatgtctcccctgcatatctgtatgtatatatgtttatatatacgtaaatccacatgggatttcc

SEQ ID NO: 736767 - DNA, 120 bp, Artificial Sequence
  ENSG00000198965_0 (sequence is synthesized)
atgccccaaattcttatattcacatacctgaatatgttttacttctttccccctttgcagatcttggcagaaaacctcaccatggtcaccgaattcctgttgctgggtttttccagcctt

SEQ ID NO: 736768 - DNA, 120 bp, Artificial Sequence
  ENSG00000198965_1 (sequence is synthesized)
ggtgaaattcagctggccctctttgtagtttttctttttctgtatctagtcattcttagtggcaatgtcaccattatcagtgtcatccacctggataaaagcctccacacaccaatgtac

SEQ ID NO: 736769 - DNA, 120 bp, Artificial Sequence
  ENSG00000198965_2 (sequence is synthesized)
ttcttccttggcattctctcaacatctgagaccttctacacctttgtcattctacccaagatgctcatcaatctactttctgtggccaggacaatctccttcaactgttgtgctcttcaa

SEQ ID NO: 736770 - DNA, 120 bp, Artificial Sequence
  ENSG00000198965_3 (sequence is synthesized)
atgttcttcttccttggttttgccattaccaactgcctgctattgggtgtgatgggttatgatcgctatgctgccatttgtcaccctctgcattaccccactcttatgagctggcaggtg

SEQ ID NO: 736771 - DNA, 120 bp, Artificial Sequence
  ENSG00000198965_4 (sequence is synthesized)
cttacagtagtaaatttagttttcagcctccctttttgtagcgccaacaaagtcaatcattacttctgtgacatctcagcagtcattcttctggcttgtaccaacacagatgttaacgaa

SEQ ID NO: 736772 - DNA, 120 bp, Artificial Sequence
  ENSG00000198965_5 (sequence is synthesized)
tttgtgatattcatttgtggagttcttgtacttgtggttccctttctgtttatctgtgtttcttatctctgcattctgaggactatcctgaagattccctcagctgagggcagacggaaa

SEQ ID NO: 736773 - DNA, 120 bp, Artificial Sequence
  ENSG00000198965_6 (sequence is synthesized)
gcgttttccacctgcgcctctcacctcagtgttgttattgttcattatggctgtgcttccttcatctacctgaggcctacagcaaactatgtgtccaacaaagacaggctggtgacggtg

SEQ ID NO: 736774 - DNA, 120 bp, Artificial Sequence
  ENSG00000198965_7 (sequence is synthesized)
acatacacgattgtcactccattactaaaccccatggtttatagcctcagaaacaaggatgtccaacttgctatcagaaaagtgttgggcaagaaaggttctctaaaactatataattga

SEQ ID NO: 736775 - DNA, 120 bp, Artificial Sequence
  ENSG00000198965_8 (sequence is synthesized)
agtaaaattaccaagcaggcattgatgctaatgtgaaccagaaaaaaagctccttaattatactcattaggcctgtagctgatccagcccatacagaagaggcacaatgaccactgttct

SEQ ID NO: 736776 - DNA, 120 bp, Artificial Sequence
  ENSG00000198967_0 (sequence is synthesized)
atggggcagaccaacgtaacctcctggagggattttgtcttcctgggcttctccagttctggggagttgcagctccttctctttgccttgttcctctctctgtatctagtcactctgacc

SEQ ID NO: 736777 - DNA, 120 bp, Artificial Sequence
  ENSG00000198967_1 (sequence is synthesized)
agcaatgtcttcattatcatagccatcaggctggatagccatctgcacacccccatgtacctcttcctttccttcctatccttctctgagacctgctacactttgggcatcatccctaga

SEQ ID NO: 736778 - DNA, 120 bp, Artificial Sequence
  ENSG00000198967_2 (sequence is synthesized)
atgctctctggcctggctgggggggaccaggctatctcctatgtgggctgtgctgcccagatgttcttttctgcctcatgggcctgtactaactgcttccttctggctgccatgggcttt

SEQ ID NO: 736779 - DNA, 120 bp, Artificial Sequence
  ENSG00000198967_3 (sequence is synthesized)
tttggactgggaatgacactagttattttccacctctcattctgcagctcccatgaaatccagcactttttttgtgacacgccacctgtgctgagcctagcctgtggagatacaggcccg

SEQ ID NO: 736780 - DNA, 120 bp, Artificial Sequence
  ENSG00000198967_4 (sequence is synthesized)
agtgagctgaggatctttatcctcagtcttttggtcctcttggtctccttcttcttcatcaccatctcctacgcctacatcttggcagcaatactgaggatcccctctgctgaggggcag

SEQ ID NO: 736781 - DNA, 120 bp, Artificial Sequence
  ENSG00000198967_5 (sequence is synthesized)
aagaaggccttctccacttgtgcctcgcaccttacagtggtcattattcattatggctgtgcttccttcgtgtacctgaggcccaaagccagctactctcttgagagagatcagcttatt

SEQ ID NO: 736782 - DNA, 120 bp, Artificial Sequence
  ENSG00000198967_6 (sequence is synthesized)
gccatgacctatactgtagtgacccccctccttaatcccattgtttatagtctaaggaatagggctatacagacagctctgaggaatgctttcagagggagattgctgggtaaaggatga

SEQ ID NO: 736783 - DNA, 120 bp, Artificial Sequence
  ENSG00000198967_7 (sequence is synthesized)
agagtaggagatttcaagatgcatctcaagtctttctcctgtggtctatcctgctgggaggcagtctagtgcatgggagctaaaaggcaggacttgctttgtgagcctcttcaggtcagc

SEQ ID NO: 736784 - DNA, 120 bp, Artificial Sequence
  ENSG00000198967_8 (sequence is synthesized)
gtgagtctgttcagttgcaacaggaacaagagaaaaagaatccatatcatccaccttttaaagaagttaggcatctactggcaaggtggaagaaatcaacaaatctatcagggatatacc

SEQ ID NO: 736785 - DNA, 120 bp, Artificial Sequence
  ENSG00000198967_9 (sequence is synthesized)
ataggacactttcttctgtgtaggctgggcatagaccaagaacccaagccaaagggccaggtattcaaggcctcaggccaaagctgtcctacccccaatcttctgggaaagccttatcct

SEQ ID NO: 736786 - DNA, 120 bp, Artificial Sequence
  ENSG00000198967_10 (sequence is synthesized)
gcctcttgcccttccccctgactgcttggaatgcagaggcggggcttcctgctctgctcactgtgcacaactcaaaatgagcccaaaatctgaattttaactttcagcctcctagatgcc

SEQ ID NO: 736787 - DNA, 120 bp, Artificial Sequence
  ENSG00000198967_11 (sequence is synthesized)
acccctagttactgaaacccattgagaattaaaaatttaattaagataatcaagaattttttaattgagctgaacaaaatgagggaagtttggagtgttcaagttcaaggcagggctggc

SEQ ID NO: 736788 - DNA, 120 bp, Artificial Sequence
  ENSG00000198967_12 (sequence is synthesized)
tggagcccatcagggatactgtagagatttctaaaatcattacataattagactatttgacctgtaatgttcttccaagatttgaaacctggggaatatcagcttgacaggttagtttaa

SEQ ID NO: 736789 - DNA, 120 bp, Artificial Sequence
  ENSG00000198967_13 (sequence is synthesized)
agctttgttaaatgaacaggtgggtcatttttactcccactgggtgtctttcatctttttatgtttttattttttttaatttcaactattatttcatatacagtggggcacatgtgctta

SEQ ID NO: 736790 - DNA, 120 bp, Artificial Sequence
  ENSG00000198967_14 (sequence is synthesized)
tacattcctcattgtgctattgacagtagcaaaaacatggaatcatctttttatatagttgtcctcactatctctgactctgttactttgccctttttgttttgattgattttccaagct

SEQ ID NO: 736791 - DNA, 120 bp, Artificial Sequence
  ENSG00000198967_15 (sequence is synthesized)
gggtgcactctatttcagaaaatatatttacttcctatttttttttataactgttaatgttccctggtagcttcagaatcttgagtgtcaaagacctttctcatttgggtcgcttatcaa

SEQ ID NO: 736792 - DNA, 120 bp, Artificial Sequence
  ENSG00000198967_16 (sequence is synthesized)
attggatactgttcttttgaatctattgcagaactatctattctgcctattccactttccacatataatgtggttatatatagcggcggacattattagagaaagtgtaatgaactcaca

SEQ ID NO: 736793 - DNA, 120 bp, Artificial Sequence
  ENSG00000198967_17 (sequence is synthesized)
agaccgtcaggcaggagtttgaatccaaactcttcaacttactagctgtgtgactctaggtaagttatttaacatttttttcagcttccgagtcttatctttacaatggttggtgactaa

SEQ ID NO: 736794 - DNA, 120 bp, Artificial Sequence
  ENSG00000198967_18 (sequence is synthesized)
acaggatcatgcatacaaagaatttagcacaacccttggatcatagcgatcgtccaataaattccagttgctactattaaaatgtgtgaaggaaaaagatattggcttttagtttaggta

SEQ ID NO: 736795 - DNA, 120 bp, Artificial Sequence
  ENSG00000198967_19 (sequence is synthesized)
gagtttactctaggtggaggatcagagaagacttcatgtcttaaatagtatctgaacttgttcctaaaggatgggtgagctttgaatgcactgactggggagaaagtacattctcagaag

SEQ ID NO: 736796 - DNA, 120 bp, Artificial Sequence
  ENSG00000198967_20 (sequence is synthesized)
agagaatgtaatagccaaaggcttgatggtaagacaatataagcctagtttaatgtgtgtgagttattcagaggggctggaaacaactcacaaatgatgctgagaagttagtttgagtca

SEQ ID NO: 736797 - DNA, 120 bp, Artificial Sequence
  ENSG00000198967_21 (sequence is synthesized)
tgacttacttgttgaaataatttgaataccttgcttcagacatggtccttttgtctataggagataaggcacagtaaaacgttgaacagagagaggcatctgggaagggattcaggaaga

SEQ ID NO: 736798 - DNA, 120 bp, Artificial Sequence
  ENSG00000198967_22 (sequence is synthesized)
ttaatccagcagcaaaggggatgatagatttcagtagagagaaaccagaggcaaggagatcagcaagaaacccatggatatcagcttaaaaaaaggcaaagaggcttgaatatggatagt

SEQ ID NO: 736799 - DNA, 120 bp, Artificial Sequence
  ENSG00000198967_23 (sequence is synthesized)
gacattcagagactgaaggaaatcacaaacatgagattttgagaaggtagaattcacaggatttggcagtgagatagaagtggggcatggcttgagagacaaggaaagaccttaggccga

SEQ ID NO: 736800 - DNA, 120 bp, Artificial Sequence
  ENSG00000198967_24 (sequence is synthesized)
gaagatatttttcagacagaaatccatattttttcatgctttcaggaaagaaatacatcctctaattggaatttgatgaaaacaatttgagaggaaggaagctagagctcagagaagaga

SEQ ID NO: 736801 - DNA, 120 bp, Artificial Sequence
  ENSG00000198967_25 (sequence is synthesized)
caatattggaagaagtaatgcctcattgcactgaggccatgtgagcaaattcatttcaccagttcattcagtctgcccagcataacattgactaaatgcacagtgacgaatggttagtaa

SEQ ID NO: 736802 - DNA, 120 bp, Artificial Sequence
  ENSG00000198967_26 (sequence is synthesized)
ggatgtttcaagtattgctaagtaatacttagaggtctaacttccacatgtagtagtcttaagtatggaagggtataaaatcacttggagggatttttccaaataggtgtttttggaatc

SEQ ID NO: 736803 - DNA, 120 bp, Artificial Sequence
  ENSG00000198967_27 (sequence is synthesized)
tatctaatttgtttctaccttgaaacaattgatttgggatagggacaacataatagtcttcaaaatctcgtttggtgattcaaatttcctctcttgattaagtatgtgactacgcgctta

SEQ ID NO: 736804 - DNA, 120 bp, Artificial Sequence
  ENSG00000198967_28 (sequence is synthesized)
gaaagggcaaactcttcttccaggtacacacatttgacccactaaatgactaataatttgatttaggccttgaaaatttttggcagggttagcattgggggaatggaatcacatccacct

SEQ ID NO: 736805 - DNA, 120 bp, Artificial Sequence
  ENSG00000198967_29 (sequence is synthesized)
ttgcttgtgattattttcagcacaaatagttttagactatccatatgtggtaagtgtgatattaaacaatgctaattttcgatggcctatatcttttctaactgtactatttttggtaac

SEQ ID NO: 736806 - DNA, 120 bp, Artificial Sequence
  ENSG00000198967_30 (sequence is synthesized)
ttataatcaggcaatttagacatttgtgaacattaattttgaaaatactttctgcttgttatattccatagtatttgactatttaagaaaagaatcactaaaatacctgtatgttgttag

SEQ ID NO: 736807 - DNA, 120 bp, Artificial Sequence
  ENSG00000198967_31 (sequence is synthesized)
tatcaatgataactttttagctttaaccaactttttgtttaaaaaaggctcctatgacaggatttgtcctgcacagattcatttctatgcagaggaagggactgagacttaagatggtaa

SEQ ID NO: 736808 - DNA, 120 bp, Artificial Sequence
  ENSG00000198967_32 (sequence is synthesized)
tcaagtggcaacatgaatggattggtaagtggggactatttgtgcagaacgctagcagttttatacacagcaattaagatatctaagaattctcaccagcaaatgacaccattacctttt

SEQ ID NO: 736809 - DNA, 120 bp, Artificial Sequence
  ENSG00000198967_33 (sequence is synthesized)
atagatcaaatcagaatgtcggcatataaacctgttcagaataaacctggcctgaaaatttttgaagatagcatcacctcttctttttttaaaattaattcttaattttataaataattc

SEQ ID NO: 736810 - DNA, 120 bp, Artificial Sequence
  ENSG00000198967_34 (sequence is synthesized)
tattaactgttactttaacaggatattgaagtattatttttattacattaaaacttaagagaaaatacgggagcttggaggacaagagaaagccctgctatgctggaattttgtctttct

SEQ ID NO: 736811 - DNA, 120 bp, Artificial Sequence
  ENSG00000198967_35 (sequence is synthesized)
gagagtaataacatctacaataattttgaagtatggaaaaaaaacaagaagaaaacaggtgttatgctgatctgtgtgttgtttcattgtacaaactaaaatattcatgttccccagaaa

SEQ ID NO: 736812 - DNA, 120 bp, Artificial Sequence
  ENSG00000198967_36 (sequence is synthesized)
atcaaatatctttattttcaaatttaaatttaaacacattccaaagtttaaaaaaattgtttgaaaattgccttggattttatttatctactataccatggcccttctttacagtaaaat

SEQ ID NO: 736813 - DNA, 120 bp, Artificial Sequence
  ENSG00000198967_37 (sequence is synthesized)
tagctgcccactcttatatgagtacagttcccagaaatatagaagctcaacattttacttaactttgccccaaaaaatatttttaaaaagaattactttattctataatcggaataaagc

SEQ ID NO: 736814 - DNA, 120 bp, Artificial Sequence
  ENSG00000198967_38 (sequence is synthesized)
aaaatgataaagacgtgcaaaacagaacaaataaaaatagaaactttgacacccctcagcagtgactagttgcatacaaaatagcttccactcctccaactctattaacctttctatctc

SEQ ID NO: 736815 - DNA, 120 bp, Artificial Sequence
  ENSG00000198967_39 (sequence is synthesized)
atagcttccactcctccaactctattaacctttctatctcccacccttgagattttttaagatcctacaataaatgtaatatgcacacaaacacaagcacacacacacacacacacacac

SEQ ID NO: 736816 - DNA, 120 bp, Artificial Sequence
  ENSG00000198967_40 (sequence is synthesized)
tgtactctttgccccccagtaaatttcccacgacactaagattttctacgatccacgaggagctgcttattagttgccaaagtaggaattggtgaagccaacgtagtcatagccagagag

SEQ ID NO: 736817 - DNA, 120 bp, Artificial Sequence
  ENSG00000198967_41 (sequence is synthesized)
atggcttcgaccccgtgggtccatatattgctgcatatgtgtggcacagaatgacacttgctctggggtaagggcctgaaaagtataaaaagagaaaaatacagttatagggattcaaaa

SEQ ID NO: 736818 - DNA, 120 bp, Artificial Sequence
  ENSG00000198967_42 (sequence is synthesized)
tagctggttccttggggcttcccatattacgccataaatgcaggagatggagagtctctggaagacgcaagccctatttctattacacacaatttttatctcataaatttataatttcta

SEQ ID NO: 736819 - DNA, 120 bp, Artificial Sequence
  ENSG00000198967_43 (sequence is synthesized)
atgagtaacttaacttttaatctcagccctttcttgaaaaagagagcttactcactttgattattctgtaaatctcattccctaaagttgttttattaaatagaaggaattatatgccta

SEQ ID NO: 736820 - DNA, 120 bp, Artificial Sequence
  ENSG00000198967_44 (sequence is synthesized)
acaacatttgttgaccacttgatctatttcatcttcctggctgctttgagatgtggggactagcatgttttatgagtaaggtaaaatactcaagaaggtagaataactcaccagtggtta

SEQ ID NO: 736821 - DNA, 120 bp, Artificial Sequence
  ENSG00000198967_45 (sequence is synthesized)
cactgccagaaagtggtagagctgggacttgaacctatgatcctcttatgccaaagagttcctctattcactgtgctgtttgattaccaagtggatccctaaagactccaataagttagc

SEQ ID NO: 736822 - DNA, 120 bp, Artificial Sequence
  ENSG00000198967_46 (sequence is synthesized)
gtgtgggtgggtggctccagatagtgtctggaagaccacatcattttctttttgtaacagctttgtcgaggtatgattgataaagaattgcacctttaatgtgtacagtttgatgagttt

SEQ ID NO: 736823 - DNA, 120 bp, Artificial Sequence
  ENSG00000198967_47 (sequence is synthesized)
agacaattggatgagtttgtgcaaaacgataccatcatgtatgtgaccctttgtaatctggtttctgcttaattgttttccctttcactttctgttactatcttcttaccttatgcttta

SEQ ID NO: 736824 - DNA, 120 bp, Artificial Sequence
  ENSG00000198967_48 (sequence is synthesized)
ggtattaggaaaatctgttttctcaagttcctttgcacacacacttgcctttgcctgaaacacttaggctttcctttgatgacttgatgagttcctgcacgtccttcaacactcaccctg

SEQ ID NO: 736825 - DNA, 120 bp, Artificial Sequence
  ENSG00000198967_49 (sequence is synthesized)
tgttaatcatagatgatactttccctgatgcaagtattttaaggagaggaatgaagaaagctcttggaatcagagagaagagagattacttctggttgtaataaaattccccacatcttt

SEQ ID NO: 736826 - DNA, 120 bp, Artificial Sequence
  ENSG00000198967_50 (sequence is synthesized)
gttcccatgacagatgtgtttgcttctgttacagtgtttttaacttgtaaagttctgtcttccccactacacctgaatttagggactgtgtcttactaaagtttgcactcctcatgcctg

SEQ ID NO: 736827 - DNA, 120 bp, Artificial Sequence
  ENSG00000203326_0 (sequence is synthesized)
agacgcgcgcaaacccggaagcagatcgcgtggagtgaaggtccctcagcggcgcgattgacatctaaagactcttggtacatgaggaagaaacccggaaaaggaaagcagaggagtcag

SEQ ID NO: 736828 - DNA, 120 bp, Artificial Sequence
  ENSG00000203326_1 (sequence is synthesized)
attataggaacctggtctccctgggtatctcttccaaatgcacaatgaaggagttctcatcaacagcacaaggcaatacagaagtgatccacacagggacattgcaaagacatgaacgtc

SEQ ID NO: 736829 - DNA, 120 bp, Artificial Sequence
  ENSG00000203326_2 (sequence is synthesized)
atcacattggagatttttccttccaggaaattgagaaagatattcataactttgagtttcagtggcaagaagatgaaagaaatggccatgaagcacccatgacaaaaatcaaaaaattga

SEQ ID NO: 736830 - DNA, 120 bp, Artificial Sequence
  ENSG00000203326_3 (sequence is synthesized)
tgggtagtacagagcaatatgatcacaggcatgctggaaacaagcctattaaatatcagcttggatcaagctttcattcacatctgtctgaactccacatatttcagcccaaagggaaaa

SEQ ID NO: 736831 - DNA, 120 bp, Artificial Sequence
  ENSG00000203326_4 (sequence is synthesized)
ttaataatcaagtggagaagtctatcaacgatgcttcctcggtttcaacagcccaaagaatttcttgtaggcccaaaacccatatatctaataactatggggataattttctgaattatt

SEQ ID NO: 736832 - DNA, 120 bp, Artificial Sequence
  ENSG00000203326_5 (sequence is synthesized)
cattactcacacaaagacaggaagtacgcatgagagaaaaatctttccaatgtattgagagtggcaaagcctttaattatagctcactcttaaggaaacatcagattattcatctaggag

SEQ ID NO: 736833 - DNA, 120 bp, Artificial Sequence
  ENSG00000203326_6 (sequence is synthesized)
aggaaacatcagattattcatctaggagagaaacaatataaatgtgatgtatgtgacaaggtctttattcggaagcgataccttgcacgccatcgtagatgtcacactggtgagaaacct

SEQ ID NO: 736834 - DNA, 78 bp, Artificial Sequence
  ENSG00000203326_7 (sequence is synthesized)
tttcagacacaattcagcccttcaaagacataggagaattcatactggagagaaaccacataagtgtaatgagtgtgg

SEQ ID NO: 736835 - DNA, 120 bp, Artificial Sequence
  ENSG00000203326_8 (sequence is synthesized)
ttcatactggagagaaaccacataagtgtaatgagtgtggcaagacctttagtcagaagtcataccttgcatgccatcgtagcattcatactggaaagaaaccttacgaatgtgaagaat

SEQ ID NO: 736836 - DNA, 90 bp, Artificial Sequence
  ENSG00000203326_9 (sequence is synthesized)
agcattcatactggaaagaaaccttacgaatgtgaagaatgtgacaaagctttcagtttcaaatcaaaccttgaaagtcataggataact

SEQ ID NO: 736837 - DNA, 120 bp, Artificial Sequence
  ENSG00000203326_10 (sequence is synthesized)
agaaaccttacaagtgtgaagaatgtgatgaagctttccgtttcaaatcaagtcttgaaagacataggagaattcataatggagagaaactgtacaaatgtaatgagtgtggcaagacct

SEQ ID NO: 736838 - DNA, 120 bp, Artificial Sequence
  ENSG00000203326_11 (sequence is synthesized)
taatgagtgtggcaagaccttcagtcaggagttatcccttacctgccattgtagacttcatagtggagagaaaccttgcaagtgtggagaatgtgacaaggcttacagtttcaaataaaa

SEQ ID NO: 736839 - DNA, 120 bp, Artificial Sequence
  ENSG00000203326_12 (sequence is synthesized)
aaaatcttgaaatacgtcagaaaattcatactggagagaaatgttataagtgtaatgattgtggcaagatcttcagtcatacgtcatccattgtataccatcataaatttcatagtggag

SEQ ID NO: 736840 - DNA, 120 bp, Artificial Sequence
  ENSG00000203326_13 (sequence is synthesized)
agaaaccttacaaatgtgaagaatgtgatgaagctttcagtttcaaatcaaaccttgaaagacataggagaattcacactggtgagaaaccttacaggtgtaataggtgtggcaagacct

SEQ ID NO: 736841 - DNA, 83 bp, Artificial Sequence
  ENSG00000203326_14 (sequence is synthesized)
gaaactttcagatacaaatcaaatcttgaaagacataggagaattcataatggagagaaaccgtacaagtgtaatgagtgtgg

SEQ ID NO: 736842 - DNA, 90 bp, Artificial Sequence
  ENSG00000203326_15 (sequence is synthesized)
taatgagtgtggcaagaccttcagtcagaagtcatgccttacacgccatcatagacttcatactggaaataaatcttataaggagttaac

SEQ ID NO: 736843 - DNA, 120 bp, Artificial Sequence
  ENSG00000203326_16 (sequence is synthesized)
gtggcaagaccttcagtaaggagttaacacatgccatcatagacgtcatactggagagaaaccttagaagtgcaatgagtgtggcaaaacctttcataggcagtcagcgcttatttacca

SEQ ID NO: 736844 - DNA, 120 bp, Artificial Sequence
  ENSG00000203326_17 (sequence is synthesized)
tcaagcaatccatggcagagggaaactttacaaatgtaatgattgtcaccacgtcttcagtaatgctacaactattgcaaatcattggagaatccataataaagagagaccttacaagtg

SEQ ID NO: 736845 - DNA, 120 bp, Artificial Sequence
  ENSG00000203326_18 (sequence is synthesized)
agaatccataataaagagagaccttacaagtgtgataaatgtgacaaatttttcagacatcgttcataccttgcagttcacgggcgaactcatgctggagagaaaccttacaaatgtgaa

SEQ ID NO: 736846 - DNA, 89 bp, Artificial Sequence
  ENSG00000203326_19 (sequence is synthesized)
aatgtgaagaatgtgataaagctttcagattcaaatcaaaccttgaaagtcataggagaattcatactataagatgttcagtcaaaatt

SEQ ID NO: 736847 - DNA, 120 bp, Artificial Sequence
  ENSG00000203326_20 (sequence is synthesized)
taatgaatgtggcaaggtttttaatcgcaaagcaaagcttgcatgtcatcatagacttcatactggagagaacgcttgcaagtgtaataaatgtggcgaggtttttaatcaacaagcaca

SEQ ID NO: 736848 - DNA, 120 bp, Artificial Sequence
  ENSG00000203326_21 (sequence is synthesized)
tcaacaagcacaccttgcacgtcatcatagaactcatactggagagaaacattacaagtgtaatgagtgtggcaagacctactctcacaattcagtccttgtaattcataagacaattca

SEQ ID NO: 736849 - DNA, 120 bp, Artificial Sequence
  ENSG00000203326_22 (sequence is synthesized)
accttacaagtgtaatgagtgtggcaaaaccttccatcacaattcagtccttgtaattcataaaacaattcatactggagagaaacaagcgtaatgaatgtggcgaggttttcaatcaac

SEQ ID NO: 736850 - DNA, 120 bp, Artificial Sequence
  ENSG00000203326_23 (sequence is synthesized)
catagaattcatactggagagaaaccttagaaatgtgaagaatgtgacaaagtttacagtcgcaaatcaaacctcgaaagacaggagaattcatactggagagaaaccataaaaatgtaa

SEQ ID NO: 736851 - DNA, 120 bp, Artificial Sequence
  ENSG00000203326_24 (sequence is synthesized)
caggagaattcatactggagagaaaccataaaaatgtaagagtttttgacaaggctttcggacgtgattcacacctggcacaacatcccagagttcacactggagagaaaccttacaagt

SEQ ID NO: 736852 - DNA, 120 bp, Artificial Sequence
  ENSG00000203326_25 (sequence is synthesized)
tttagtgggcagtcaacacttattcaccatcaggcaatccgtagtgtagggaaacttgactaacgtaatgattctcacaacgtcttcagtaatgctacaaccattgtaaatcactggaga

SEQ ID NO: 736853 - DNA, 120 bp, Artificial Sequence
  ENSG00000203326_26 (sequence is synthesized)
agccataatgaagagagatcttacaaatgtaataattgtggcaaatttttcagacatcgttcatacattgccgttcattggcgaactcatgctggagagaaatcttacaatgtcatgatt

SEQ ID NO: 736854 - DNA, 120 bp, Artificial Sequence
  ENSG00000203326_27 (sequence is synthesized)
gtggcaaggtcttcagtcaagcttcatcttttgcaaaacaggagaattcatacaggagagaaacctcacaagtgtgatgatcgtggcaaagcctttacttcacattctcacctcattaga

SEQ ID NO: 736855 - DNA, 120 bp, Artificial Sequence
  ENSG00000203326_28 (sequence is synthesized)
catcagagaatccatactggacagaaatcttacaaatgtcatcagtgtggcaaggtcttcagtccgacttcactccttgcagaatatcagaaaattcatttttcaggtaattgttcccaa

SEQ ID NO: 736856 - DNA, 120 bp, Artificial Sequence
  ENSG00000203326_29 (sequence is synthesized)
tgcaatgaatatagcaaaccatcaagcattgattgacattagagtcagttcagcattgacttgagtttgagttgacttaacattgagttcaagccttaattgacattaaagtgtttatgt

SEQ ID NO: 736857 - DNA, 86 bp, Artificial Sequence
  ENSG00000203326_30 (sequence is synthesized)
cccagcactttggtaggccaaggtgggtaaacaacagacctgagccacttttcccagcctgttttttgtttctttaacaaaaactg

SEQ ID NO: 736858 - DNA, 120 bp, Artificial Sequence
  ENSG00000203326_31 (sequence is synthesized)
acttttcccagcctgttttttgtttctttaacaaaaactgatagggatttttatgggtatcgtattgaatctagattacattgggttatataatcatttaacatattaatttttccaaac

SEQ ID NO: 736859 - DNA, 120 bp, Artificial Sequence
  ENSG00000203326_32 (sequence is synthesized)
catcaatatgggttgtgtctctatatatgtttttaatcattttgatcaatttttgttgatttcaaggtacaaacgtctcacctttttacgtttattcctaagtatttcttattttaagtt

SEQ ID NO: 736860 - DNA, 120 bp, Artificial Sequence
  ENSG00000203326_33 (sequence is synthesized)
ctccagcaaatggaagtgtgttaaaattttcttttaaaattgtttattattaaaatatggaaattcaactaatttttggtgctgatactgtattgtgcaaatccactgaatatgtttgtt

SEQ ID NO: 736861 - DNA, 120 bp, Artificial Sequence
  ENSG00000203326_34 (sequence is synthesized)
agttccagtactattttggttgagtctgtgattttctacacagaaggtcatgtcgtctacaaacaaatgtaattttacttctttctttctgatttggatgagtttgatttcttttgctat

SEQ ID NO: 736862 - DNA, 120 bp, Artificial Sequence
  ENSG00000203326_35 (sequence is synthesized)
ttaattgctctggctaggacaggcagtattgattgaatagaaggggtgagagcattcttgcatcatgtgagatcgtacaggaaagcattccattttccctgcttggttatttactcattt

SEQ ID NO: 736863 - DNA, 120 bp, Artificial Sequence
  ENSG00000203326_36 (sequence is synthesized)
gtcatttcatggatgttctttctattgttgaggtaaatttccttttctattttgtttaggatttctatgatgactggattttgaattttgtggaacgctttttctccatctactaaggtg

SEQ ID NO: 736864 - DNA, 120 bp, Artificial Sequence
  ENSG00000203326_37 (sequence is synthesized)
atgtggttttaatctttcattctgttctagtggtatataacattgatttgcttgaatatgttgaaccatccttgcatcccagaaataactggcacttgaatatctacatttttttaatat

SEQ ID NO: 736865 - DNA, 120 bp, Artificial Sequence
  ENSG00000203326_38 (sequence is synthesized)
cctcttgaatacagttttctaggacaagggatcttcaagaagttctggaaaaatacatattatgagaaaattgtgcatgaatttcacaatttttgcaccaaaataaactagtgctagtct

SEQ ID NO: 736866 - DNA, 120 bp, Artificial Sequence
  ENSG00000203326_39 (sequence is synthesized)
gttataacatgtctgaacaggctctagtttgatgccctcaaaaggataagacatgagtataaaaagagactccatcaaagcaatataaattctgatgaaatttaaacaagaagaaacatt

SEQ ID NO: 736867 - DNA, 120 bp, Artificial Sequence
  ENSG00000203326_40 (sequence is synthesized)
gtggctcaggcctgtaatcccagcattttcagaggctgagacaggtgggccacatgagcccaggtattcaagaccagcctgggaaacgtggggaaatccccttttctacaaaaaatacaa

SEQ ID NO: 736868 - DNA, 85 bp, Artificial Sequence
  ENSG00000203326_41 (sequence is synthesized)
cgtctcagttattgtgaagtctgtgcagggaggatggcatgaacctgggaggtcaagattgcagtgagctatgatcatgccactg

SEQ ID NO: 736869 - DNA, 120 bp, Artificial Sequence
  ENSG00000203326_42 (sequence is synthesized)
atcatgccactgcactccagcatgggtgatggagagagatactgtcttaaaaaaagaatacttgtggtaacgtttgggtagaggaataatgaaatcattgatgctttataaaaaggttat

SEQ ID NO: 736870 - DNA, 120 bp, Artificial Sequence
  ENSG00000203326_43 (sequence is synthesized)
aaggttatggggacaatgcccaaaagaaataaacagtttgtaaacggataacttattttgagttagggcaagacaatgttgacagtgatgcatgaagcagcaggcagaccttccacatca

SEQ ID NO: 736871 - DNA, 120 bp, Artificial Sequence
  ENSG00000203326_44 (sequence is synthesized)
tttttacagaaaaaaaaattaatcttgttcatgctgcaatgaagaggactgacagcaaacagcagaaacatagtcagaatttagagaacagcctggttaacatggtgaaacaccatctct

SEQ ID NO: 736872 - DNA, 120 bp, Artificial Sequence
  ENSG00000203326_45 (sequence is synthesized)
caaaactccatctcaaaaaaaaaaaaattgtcaagttccttctcttccattctttgccatcgtggtgtgtgcttgactctgcttcttgccacatcttctcagaagactttcaggattaag

SEQ ID NO: 736873 - DNA, 120 bp, Artificial Sequence
  ENSG00000203326_46 (sequence is synthesized)
ccacatcttctcagaagactttcaggattaagcgattcctggccaagaaacaaaagcaaaaccatcccactcccctgtggattcagatcaaaactggtaataaaatcaggtacgactcca

SEQ ID NO: 736874 - DNA, 120 bp, Artificial Sequence
  ENSG00000203326_47 (sequence is synthesized)
aaaggagacattggagaagaaccaagctgggtctataaggaattgcatgtgagatggcacacatatttatgctgtctgagcatcacaatcacgttaccatatcaagctgaaaatgtcacc

SEQ ID NO: 736875 - DNA, 120 bp, Artificial Sequence
  ENSG00000203326_48 (sequence is synthesized)
actatctggacagttggacatgttttattgggaatatgttttttctctgtaaatttgttataaacgcattggttggctgtgttcagtaataaacgtgagacttttcatttcaaaacaaaa

SEQ ID NO: 736876 - DNA, 120 bp, Artificial Sequence
  ENSG00000203326_49 (sequence is synthesized)
attacaggcatgagccaccgcgcctggtctgaagtggtattttttagaaacgaactaaaccttttttcagcttaatgacccagggatgtatttctgaaggacttgggagctctctttgaa

SEQ ID NO: 736877 - DNA, 120 bp, Artificial Sequence
  ENSG00000203326_50 (sequence is synthesized)
tatttctgaaggacttgggagctctctttgaaaggcaaaatacaagggagacagtacctgtatctcagtaggaaattaagtaattcaaacatcaaataattccaatttaaagctatggcc

SEQ ID NO: 736878 - DNA, 120 bp, Artificial Sequence
  ENSG00000203326_51 (sequence is synthesized)
aagtggggatgtgtcctttcgtatctttgtattttctctttttttagatagagtatctctctctctgtccccaagggtggggtgcaatggtgtgatcatggctcactgcaatcttgaatt

SEQ ID NO: 736879 - DNA, 120 bp, Artificial Sequence
  ENSG00000203326_52 (sequence is synthesized)
cctgggctcaagtgattgtcccacctcagcctcccctcgtagtggtacaggtgcatgccaccatgccaggatacttttttagtttctttttttagagacaggttcttgctgtgcggttga

SEQ ID NO: 736880 - DNA, 120 bp, Artificial Sequence
  ENSG00000203326_53 (sequence is synthesized)
acgcgcgcaaacccggaagcagatcgcgtggagtgaaggtccctcagcggcgcaaatgctgaccttggagttgggaatcttctaagtctgaagcttcctgcctgacagggtctattgaca

SEQ ID NO: 736881 - DNA, 120 bp, Artificial Sequence
  ENSG00000203326_54 (sequence is synthesized)
caagaagctgggattacaggcgccaacccccgtacctaactattggcttttgtttttaaactttttgcatatgtgtgtccttagggctaatatgagtcttctgtggacaacaagtagttg

SEQ ID NO: 736882 - DNA, 120 bp, Artificial Sequence
  ENSG00000203326_55 (sequence is synthesized)
gttcctgttgattgagtcagtctttgccttctgagtgcagagttaaatatttgcatttgaaatattactgatgcagaagaccttaccattgcctttttgttacatattatctgtatttct

SEQ ID NO: 736883 - DNA, 120 bp, Artificial Sequence
  ENSG00000203485_0 (sequence is synthesized)
agtgggcgccggctgcccgcagcccctgacccggccccggacggagcgccggccgcaccaccgccctctggccgttgcctcaccggctcggcaagatgtcggtgaaggagggcgcacagc

SEQ ID NO: 736884 - DNA, 120 bp, Artificial Sequence
  ENSG00000203485_1 (sequence is synthesized)
ggctcggcaagatgtcggtgaaggagggcgcacagcgcaagtgggcagcgctgaaggagaagctggggccacaggattcggaccccacggaggccaacctggagagcgcggaccccgagc

SEQ ID NO: 736885 - DNA, 120 bp, Artificial Sequence
  ENSG00000203485_2 (sequence is synthesized)
tgtgcatccggctgctccagatgccctctgtggtcaactactccggcctgcgcaagcgcctggagggcagcgacggcggctggatggtgcagttcctggagcagagcggcctggacctgc

SEQ ID NO: 736886 - DNA, 120 bp, Artificial Sequence
  ENSG00000203485_3 (sequence is synthesized)
tgctggaggcgctggcgcggctgtcgggccgcggcgttgcacgtatctccgacgccctgctgcagctcacctgcgtcagctgcgtgcgcgccgtcatgaactcgcggcagggcatcgagt

SEQ ID NO: 736887 - DNA, 120 bp, Artificial Sequence
  ENSG00000203485_4 (sequence is synthesized)
acatcctcagcaaccagggctacgtgcgccagctctcccaggccctggacacatccaacgtgatggtgaagaagcaggtgtttgagctactggctgccctgtgcatctactctcccgagg

SEQ ID NO: 736888 - DNA, 120 bp, Artificial Sequence
  ENSG00000203485_5 (sequence is synthesized)
gccacgtgctgaccctggacgccctggaccactacaagacggtgtgcagccagcagtaccgcttcagcattgtcatgaacgagctctccggcagcgacaacgtgccctacgtggtcaccc

SEQ ID NO: 736889 - DNA, 120 bp, Artificial Sequence
  ENSG00000203485_6 (sequence is synthesized)
tgcttagcgtgatcaacgccgtcatcttgggccccgaggacctgcgcgcgcgcacccagctgcggaacgagtttatcgggctgcagctgctggacgtcctggctcgcctgcgagacctgg

SEQ ID NO: 736890 - DNA, 120 bp, Artificial Sequence
  ENSG00000203485_7 (sequence is synthesized)
aggatgccgacctgctgatccagctggaggctttcgaggaggctaaggccgaggacgaggaggagctgctgcgagtctctggcggggtcgacatgagcagccaccaggaggtctttgcct

SEQ ID NO: 736891 - DNA, 120 bp, Artificial Sequence
  ENSG00000203485_8 (sequence is synthesized)
ccctgttccacaaggtgagctgctccccggtgtctgcccagctcctgtcggtgctgcagggcctcctgcacctggagcccaccctccgctccagccagctgctctgggaggccctggaga

SEQ ID NO: 736892 - DNA, 120 bp, Artificial Sequence
  ENSG00000203485_9 (sequence is synthesized)
gcctcgtgaaccgggccgtgctcctggccagcgatgcccaggaatgcaccctggaggaagtggttgagcggctcctgtctgtcaaggggcgacccagaccgagccccctggtcaaggccc

SEQ ID NO: 736893 - DNA, 120 bp, Artificial Sequence
  ENSG00000203485_10 (sequence is synthesized)
ataaaagcgtccaggccaacctagaccagagccagaggggcagctccccgcaaaacactacaacccccaagcccagcgtggagggccagcagccagcagcagctgctgcctgcgagcccg

SEQ ID NO: 736894 - DNA, 120 bp, Artificial Sequence
  ENSG00000203485_11 (sequence is synthesized)
ccagcagcagctgctgcctgcgagcccgtggaccacgcccagagtgagagcatcctgaaagtttcgcagcccagagccctggagcagcaggcgtccaccccacccccacccccaccccca

SEQ ID NO: 736895 - DNA, 120 bp, Artificial Sequence
  ENSG00000203485_12 (sequence is synthesized)
cctcccccaccaccccccctgcccagtgtgggggctaaggccctcccaacagcacccccgcccccacccctgccaggcctgggggccatggcccccccagcacctcctctaccaccaccc

SEQ ID NO: 736896 - DNA, 120 bp, Artificial Sequence
  ENSG00000203485_13 (sequence is synthesized)
caccacccctgccaggctcctgtgagttcctgcccccaccacctccaccactcccgggcttgggatgcccgcccccacccccacccctgctgcctggtatgggctggggccctcctccac

SEQ ID NO: 736897 - DNA, 120 bp, Artificial Sequence
  ENSG00000203485_14 (sequence is synthesized)
ccccacctccactactgccctgcacctgcagcccccccgtggcgggaggcatggaggaggtcatcgtggcccaggtggaccatggcttgggctcagcatgggtccccagccatcggcggg

SEQ ID NO: 736898 - DNA, 120 bp, Artificial Sequence
  ENSG00000203485_15 (sequence is synthesized)
tgaacccacccacactgcgcatgaagaagctgaactggcagaagctgccatccaacgtggcacgtgagcacaactctatgtgggcgtccctgagcagccccgacgccgaggctgtggagc

SEQ ID NO: 736899 - DNA, 120 bp, Artificial Sequence
  ENSG00000203485_16 (sequence is synthesized)
ccgacttctccagcatcgagcgactattctccttccctgcagccaagcccaaggagcccaccatggtggccccccgggccaggaaggagcccaaggagatcactttcctcgatgccaaga

SEQ ID NO: 736900 - DNA, 120 bp, Artificial Sequence
  ENSG00000203485_17 (sequence is synthesized)
agagcctgaacctcaacatcttcctgaagcaatttaagtgctccaacgaggaggtcgctgctatgatccgggctggagataccaccaagtttgatgtggaggttctcaaacaactcctta

SEQ ID NO: 736901 - DNA, 120 bp, Artificial Sequence
  ENSG00000203485_18 (sequence is synthesized)
agctccttcccgagaagcacgagattgaaaacctgcgggcattcacagaggagcgagccaagctggccagcgccgaccacttctacctcctcctgctggccattccctgctaccagctgc

SEQ ID NO: 736902 - DNA, 120 bp, Artificial Sequence
  ENSG00000203485_19 (sequence is synthesized)
gaatcgagtgcatgctgctgtgtgagggcgcggccgccgtgctggacatggtgcggcccaaggcccagctggtgctggctgcctgcgaaagcctgctcaccagccgccagctgcccatct

SEQ ID NO: 736903 - DNA, 120 bp, Artificial Sequence
  ENSG00000203485_20 (sequence is synthesized)
tctgccagctgatcctgagaattgggaacttcctcaactacggcagccacaccggtgacgccgacggcttcaagatcagcacattgctgaagctcacggagaccaagtcccagcagaacc

SEQ ID NO: 736904 - DNA, 120 bp, Artificial Sequence
  ENSG00000203485_21 (sequence is synthesized)
gcgtgacgctgctgcaccacgtgctggaggaagcggaaaagagccaccccgacctcctgcagctgccccgggacctggaacagccctcgcaagcagcagggatcaacctggagatcatcc

SEQ ID NO: 736905 - DNA, 120 bp, Artificial Sequence
  ENSG00000203485_22 (sequence is synthesized)
gctcagaggccagctccaacctgaagaagcttctggagaccgagcggaaggtgtctgcctccgtggccgaggtccaggagcagtacaccgagcgcctccaggccagcatctcggccttcc

SEQ ID NO: 736906 - DNA, 120 bp, Artificial Sequence
  ENSG00000203485_23 (sequence is synthesized)
gggcactggatgagctgtttgaggccatcgagcagaagcaacgggagctggccgactacctgtgtgaggacgcccagcagctgtccctggaggacacgttcagcaccatgaaggctttcc

SEQ ID NO: 736907 - DNA, 120 bp, Artificial Sequence
  ENSG00000203485_24 (sequence is synthesized)
gggaccttttcctccgcgccctgaaggagaacaaggaccggaaggagcaggcggcgaaggcagagaggaggaagcagcagctggcggaggaggaggcgcggcggcctcggggagaggacg

SEQ ID NO: 736908 - DNA, 120 bp, Artificial Sequence
  ENSG00000203485_25 (sequence is synthesized)
ggaagcctgtcaggaaggggcccgggaagcaggaggaggtgtgtgtcatcgatgccctgctggctgacatcaggaagggcttccagctgcggaagacagcccggggccgcggggacaccg

SEQ ID NO: 736909 - DNA, 120 bp, Artificial Sequence
  ENSG00000203485_26 (sequence is synthesized)
acgggggcagcaaggcagcctccatggatcccccaagagccacagagcctgtggccaccagtaaccctgcaggagatcccgtgggcagcacgcgctgtcccgcctctgagcccggccttg

SEQ ID NO: 736910 - DNA, 120 bp, Artificial Sequence
  ENSG00000203485_27 (sequence is synthesized)
atgctacaacagccagcgagtcccggggctgggaccttgtagacgccgtgacccccggccctcagcccaccctggagcagttggaggagggtggtccacggcccctggagaggcgttctt

SEQ ID NO: 736911 - DNA, 120 bp, Artificial Sequence
  ENSG00000203485_28 (sequence is synthesized)
cctggtatgtggatgccagcgatgtcctaaccactgaggatccccagtgcccccagcccttggagggggcctggccggtgactctgggagatgctcaggccctgaagcccctcaagttct

SEQ ID NO: 736912 - DNA, 120 bp, Artificial Sequence
  ENSG00000203485_29 (sequence is synthesized)
ccagcaaccagccccctgcagccggaagttcaaggcaagatgccaaggatcccacgtccttgctgggcgtcctccaggccgaggccgacagcacaagtgaggggctggaggacgctgtcc

SEQ ID NO: 736913 - DNA, 120 bp, Artificial Sequence
  ENSG00000203485_30 (sequence is synthesized)
acagccgtggtgccagaccccctgcagcaggcccaggtggggatgaggacgaggacgaggaggacacggccccagagtccgcactggacacatccctggacaagtccttctccgaggatg

SEQ ID NO: 736914 - DNA, 120 bp, Artificial Sequence
  ENSG00000203485_31 (sequence is synthesized)
ccgggaagcgaaggaagaagcgtccctccaggagccaggaagaggttccccctgattctgatgataataaaacaaagaaactgtgtgtgatccagtaaggcctcaggcccaggcccaagg

SEQ ID NO: 736915 - DNA, 120 bp, Artificial Sequence
  ENSG00000203485_32 (sequence is synthesized)
ccaagtgagagagcccaggccacaggacatgctgccattctgccaagagaggctcttctgggggccaggctgggactgggccccggaaaccaaaactccgtgccttacccagccggggcc

SEQ ID NO: 736916 - DNA, 120 bp, Artificial Sequence
  ENSG00000203485_33 (sequence is synthesized)
ctcctggagccttcttggggtgttgtggctgggaacccgacaggcaccagtgccctgccaggcctggtgccctcctggaccgcctgcacgtgccagcctcccacctgcttcctaaaggca

SEQ ID NO: 736917 - DNA, 120 bp, Artificial Sequence
  ENSG00000203485_34 (sequence is synthesized)
accctggcccacacccgcatgcgcccggtgcagcctgccaagggccagtcggggggtgctgcgtcctgccagtgtccaccacagctctgcctgcccttcagcccagcaaggtttaatcaa

SEQ ID NO: 736918 - DNA, 120 bp, Artificial Sequence
  ENSG00000203485_35 (sequence is synthesized)
aatgcaatgctttgcaagtctttactgcttggaggtggctgagttgggggccctgggcaggggtaagctggcaggcagtgccatggcaggccagggtcccctcccatggggtctggcccc

SEQ ID NO: 736919 - DNA, 120 bp, Artificial Sequence
  ENSG00000203485_36 (sequence is synthesized)
cgttccagcatgtccagcccctgaagttggagtggggggcggtctgcctttgctgccactgccaggcctctgccctgcagctgaaacttggccatcacatcaacagaaaacccctcccag

SEQ ID NO: 736920 - DNA, 120 bp, Artificial Sequence
  ENSG00000203485_37 (sequence is synthesized)
tgccagctgcccagcgtgggcaggccctggggacaatacaggtccacctgaggggctgcagggtgacacccagcagccgctgccccctcactgcccacccagcgagggcagcctacccga

SEQ ID NO: 736921 - DNA, 120 bp, Artificial Sequence
  ENSG00000203485_38 (sequence is synthesized)
gcctgccccctgccaggtgtgtgccctgaggctggcggctggatgcgtggccaataaaaagcagacctagcccggtgtgcgactgtcgtgttcagaggctgcgggagtgggcggtggacg

SEQ ID NO: 736922 - DNA, 120 bp, Artificial Sequence
  ENSG00000203485_39 (sequence is synthesized)
tgggctcccacaaacatggtgagcgctggacaggccccgtgtgaacactcactgttgaggggcccccaggccccgtgtgaacactcactgttgaggggtccctgggcccccaggcaccgt

SEQ ID NO: 736923 - DNA, 120 bp, Artificial Sequence
  ENSG00000203485_40 (sequence is synthesized)
gtgagcattcactgttgagggtcccccagtcccccaggccaggggctgtccctggagccctcaggaggcagtaagaaacatctagaagagggcagacccagtggtgaaccgcatccaaca

SEQ ID NO: 736924 - DNA, 120 bp, Artificial Sequence
  ENSG00000203485_41 (sequence is synthesized)
gtggtgagatgggtgcagctctacaggggcgtaatttacaaaccaccagactccctggttatgtgtgtgctgcggtggtgtttgctctccagcagatcaagtttgtgcaatgatccattt

SEQ ID NO: 736925 - DNA, 120 bp, Artificial Sequence
  ENSG00000203485_42 (sequence is synthesized)
tgagaatctctccgtcaccccaagaagtcctctcgcacccatcagtccgaccccttccccgtgctcctccccagccctggcagccactcacctgcactccagacgctccagatgtcatgc

SEQ ID NO: 736926 - DNA, 120 bp, Artificial Sequence
  ENSG00000203485_43 (sequence is synthesized)
atgtctcctggcttccttcggctgttttcacgcgccatcctcacggcaggctgtatcaggacttcattccatttcatggctgaagcacattccattgcatgcagggaccacattttgttt

SEQ ID NO: 736927 - DNA, 120 bp, Artificial Sequence
  ENSG00000203485_44 (sequence is synthesized)
cacattttgtttgtctgctcttctgtccatggacatctgggttgcttccagtttggggcttctgtgaatcctgctgctgtggacatttgcgtagtcctcgtgtggatgctgctgtggacg

SEQ ID NO: 736928 - DNA, 60 bp, Artificial Sequence
  ENSG00000203485_45 (sequence is synthesized)
tggatgctgctgtggacgtctgcgtagtctgcgtagtctcgtgtggatgctgctgtgaac

SEQ ID NO: 736929 - DNA, 87 bp, Artificial Sequence
  ENSG00000203485_46 (sequence is synthesized)
gtcctcgtgtggatgctgctgtggacatctgcgtagtctcgtgtggatgctgctgtgaacgtctgcgtaggtctcgtgtggatgctg

SEQ ID NO: 736930 - DNA, 61 bp, Artificial Sequence
  ENSG00000203485_47 (sequence is synthesized)
gtagtctcatgtggatgctgcgagttttcgttgctctggggtagattcgtagcggaggaac

SEQ ID NO: 736931 - DNA, 120 bp, Artificial Sequence
  ENSG00000203485_48 (sequence is synthesized)
gagttttcgttgctctggggtagattcgtagcggaggaacaactgggcgacacgctaagtttatgtttaactttttaagtaactgcctaactgttttccaaagcagctgcaccatttttc

SEQ ID NO: 736932 - DNA, 120 bp, Artificial Sequence
  ENSG00000203485_49 (sequence is synthesized)
attcccatccatgctattgtttttcagttaaatagctccactcctccccctccccaccctccacagaactgccagtaaaactggactatggagtattgggtggggtcacctacaaggtca

SEQ ID NO: 736933 - DNA, 120 bp, Artificial Sequence
  ENSG00000203485_50 (sequence is synthesized)
tctgcagcaagtgagaccatcgcccctcctgcctggagaggtgggactggggaccctgtgacaggaggagctgcccttcctggagcctggtttttctttttcctctgtgctccatgagaa

SEQ ID NO: 736934 - DNA, 120 bp, Artificial Sequence
  ENSG00000203485_51 (sequence is synthesized)
gtcagtttagtgggctacagccagcaaaggaaccaaaaccaacaggagctctgggggtgccttgcatggcgaggctccgtggctgcacgcgtgtatgcaggtggctgtgggtgtctgtgt

SEQ ID NO: 736935 - DNA, 120 bp, Artificial Sequence
  ENSG00000203485_52 (sequence is synthesized)
gtcctgggccactgtgtgcgatggtcccactgggaggtgtggcccccaaagagtggaacccacaggtggacacacccatgcaccctcgttcttgcccaaggtcacacatcgagacagcag

SEQ ID NO: 736936 - DNA, 120 bp, Artificial Sequence
  ENSG00000203485_53 (sequence is synthesized)
ggcccagatggatggccccaagctcggtggctcccgtgctgcccacacctggggacaggcccactgtggggggtaaggggtggaggtgttctaattcgggctgagccgtgtgactggcag

SEQ ID NO: 736937 - DNA, 120 bp, Artificial Sequence
  ENSG00000203485_54 (sequence is synthesized)
gggccccagctgttgggcctgggcaggactgtttttagaaaagccccaactccctgcccctacccgggcccgtggctatttatagtccgggcctggagaagtcagtgagtcactagcgtt

SEQ ID NO: 736938 - DNA, 120 bp, Artificial Sequence
  ENSG00000203485_55 (sequence is synthesized)
cgcctctgcagggtcagtccaagcccccttagtgaggtggtctagcatgtcccccagtcccccaagcctctatctgacatctgctagcccagagccccaggggtccccaggaagggctca

SEQ ID NO: 736939 - DNA, 120 bp, Artificial Sequence
  ENSG00000203485_56 (sequence is synthesized)
gagctggtggccccccccaggccttggcagcacctccttgtctgatgggactttgtggttcctggtggacatttaacattgtcggtttctctcatctggaaacaaacctccatgacgctc

SEQ ID NO: 736940 - DNA, 120 bp, Artificial Sequence
  ENSG00000203485_57 (sequence is synthesized)
accaccgtcctcagggcctgtccctgtggccgtcaccctcccgcaactcagggcctcaccccgggtggtgcccgcgcggggctctcacgggactgtcacgtgcccttgcccccaggccag

SEQ ID NO: 736941 - DNA, 120 bp, Artificial Sequence
  ENSG00000203485_58 (sequence is synthesized)
aactgcagttccagtaaccctgtggctttcctgctctgtctgttggtggagggctatcttcactctaagtgtgtcaatggcgtggggccttctggggcatgtccccaggaagtctgtgag

SEQ ID NO: 736942 - DNA, 120 bp, Artificial Sequence
  ENSG00000203485_59 (sequence is synthesized)
gagaccgggacagtcgcaagggcagatgctgccagggacaagtacactgcaacccccctcctgttggacagtgtcctcccaccccgaggccatgggtgggtctatggagaagcagattac

SEQ ID NO: 736943 - DNA, 120 bp, Artificial Sequence
  ENSG00000203485_60 (sequence is synthesized)
tcctgccggctccccctcctgctcccaaggccaggcccacctgccctttggctcccagccacctcacctaagcagcacctccagatggcagggaggtggctccctcggagtaaccccagg

SEQ ID NO: 736944 - DNA, 120 bp, Artificial Sequence
  ENSG00000203485_61 (sequence is synthesized)
ggtccagccagaagccaggtctcaggctagaatccagctcactgtccctggcagctgcccacagaaactagggttgcagcagccatagaaaggacagaatgagctcatatcctttgcaca

SEQ ID NO: 736945 - DNA, 120 bp, Artificial Sequence
  ENSG00000203485_62 (sequence is synthesized)
ccgtggatggagctggaggccgtgatcctaagtgaaccaacccagaaacagaaaatgaaatgccaataagagggaactacagggtggttcacgtggacgcaagatggagacagggacacg

SEQ ID NO: 736946 - DNA, 120 bp, Artificial Sequence
  ENSG00000203485_63 (sequence is synthesized)
ggctccagggcgagagttgaaaaactacctacagggtacagtgttcgtcgctacttggtgtcaggcccactagaacaagggtccccaaccgccaggctgcggaccggtacctggcctatt

SEQ ID NO: 736947 - DNA, 120 bp, Artificial Sequence
  ENSG00000203485_64 (sequence is synthesized)
ggaaccgggccacgcagcaggaagtgagcggtgggcgggcattcctgcctgagctgcacctcatgtcagatcagcactgcattagattctccagcgcacgcacgcgcgcaagggatccag

SEQ ID NO: 736948 - DNA, 120 bp, Artificial Sequence
  ENSG00000203485_65 (sequence is synthesized)
ggatccaggctgcgcgctcctcatgacaatctaatgcctgatgatcgggggtggaacagttttatccctaaaccattcccgtcaccccagtctatggaaaaattgtcttccacaaaacca

SEQ ID NO: 736949 - DNA, 120 bp, Artificial Sequence
  ENSG00000203485_66 (sequence is synthesized)
tgccaaaaaggctggggaccactgccctagaaggcaaatcgcctacgttacacagtgtaccatgtggcaaacacgcacatgtacccccgagtctaaaataaaaattttttaaaaaagaaa

SEQ ID NO: 736950 - DNA, 120 bp, Artificial Sequence
  ENSG00000203485_67 (sequence is synthesized)
tcacgtctgtcaggcacactgtaggtgtccactcccgtcggtggagggtttgcagcccccaggccctgtcctgtgatccttccggtgctgggctgagcctggggaggagccagggagtgc

SEQ ID NO: 736951 - DNA, 120 bp, Artificial Sequence
  ENSG00000203485_68 (sequence is synthesized)
aggggcactggcaagcaggaccacaccccaccgccagggcatctgggggctccgaaccaagagcccctctccagccctggctgcccctgcaggcctgctcaccagccgccagctgcccat

SEQ ID NO: 736952 - DNA, 120 bp, Artificial Sequence
  ENSG00000203485_69 (sequence is synthesized)
gggtgcctgctgtacgctggacctggacctactgggccccaggcaggacatcctttagaccctctgggaggctccagcccctgcctgctggatcgccaggccccggggctgcgagagcct

SEQ ID NO: 736953 - DNA, 120 bp, Artificial Sequence
  ENSG00000203499_0 (sequence is synthesized)
gtcgctaggaaacgagcgagcccgacgccaggggcggagctctggcctcctcgccgagttgggggaggcaggtgcgacaggagaatggacagtaagaaggggagacccaaagctgcagct

SEQ ID NO: 736954 - DNA, 120 bp, Artificial Sequence
  ENSG00000203499_1 (sequence is synthesized)
gggaagtggcagacgctccaccctgggcccaagacaagagctgctgctgggaagcccggggagaaccgcccgccgcagaggaaagcgggctggcaggcgagggagcccgcgtcggctgag

SEQ ID NO: 736955 - DNA, 120 bp, Artificial Sequence
  ENSG00000203499_2 (sequence is synthesized)
cacaggcccccacagggccggccgaggaccgagcggccagagcgatccagggcgccttccggcagctccgggccaggagggagctcgcccgccgccgggaggagcgccgggagtacctgg

SEQ ID NO: 736956 - DNA, 120 bp, Artificial Sequence
  ENSG00000203499_3 (sequence is synthesized)
ctggagcagatggagacgccgcagaaggaggcctacctggctccggtgcgccgggagcaggaggccgcgcggcggctgcgcgagcaggaggaggcggcgcagcgggagcggcgggaggag

SEQ ID NO: 736957 - DNA, 120 bp, Artificial Sequence
  ENSG00000203499_4 (sequence is synthesized)
ctgcagcgtcgccgccgcctgctggacgccgccttcgacggggacgtgggcgagatccgggcggtgctgaaggaggtggagcagctgctgacgcgcgagggcgtgggccacgacgaggca

SEQ ID NO: 736958 - DNA, 120 bp, Artificial Sequence
  ENSG00000203499_5 (sequence is synthesized)
ggcgaggcgcggcggctgcagcgacgcgtggctctggcggagtgcgaggacagctacgggaacacgccgctgtcggaggcggccgcaggcgggcagcccctggccatccagctgcgggcc

SEQ ID NO: 736959 - DNA, 120 bp, Artificial Sequence
  ENSG00000203499_6 (sequence is synthesized)
gagctcggcgccagccccaacagcaagggcgctttcggtccgacgccgctgtaccgtgcagcctttgggggccacctggcagctgtggaggtgctcctgaagctcggagcagacccccgg

SEQ ID NO: 736960 - DNA, 120 bp, Artificial Sequence
  ENSG00000203499_7 (sequence is synthesized)
tacgcagaggacgggagcacccctgagcgggtggcctcactggacacagtggtgagcgtgctgcgctcgtgggacctgagcctcacggaggccatgctccagaacatggaggctgagcag

SEQ ID NO: 736961 - DNA, 120 bp, Artificial Sequence
  ENSG00000203499_8 (sequence is synthesized)
cagcgccgggcccaggaggcccagaggcacaaggaggccgaggctgagcggtgtggaagtatgaccctcaaggtccaacagctgaccagggagcagcagcagtgtcacaaggagctgcaa

SEQ ID NO: 736962 - DNA, 120 bp, Artificial Sequence
  ENSG00000203499_9 (sequence is synthesized)
caggcctactgtgagcttagccggaggatctcagagcacgaccagtgtgagtggaggtgcatggacaagaccaagctcacgctgcaggccatcaaggacacagaggcccaggtggacagg

SEQ ID NO: 736963 - DNA, 120 bp, Artificial Sequence
  ENSG00000203499_10 (sequence is synthesized)
ctgcggcaggaggcccagaaggccgaggaggcgctggctatggccaggctggagcttcgggagcagacgcaggagggggaggaagaggcgcctgggctgaagtgccaggtcaccgagctg

SEQ ID NO: 736964 - DNA, 120 bp, Artificial Sequence
  ENSG00000203499_11 (sequence is synthesized)
cacgatgtgctgatgaaagatgtaggcaaccgcatccgtgccgatggccggtggcctcttgttattgaccctttgggccaggcggccaccttcctgcgctaccaggataccaactatgtg

SEQ ID NO: 736965 - DNA, 120 bp, Artificial Sequence
  ENSG00000203499_12 (sequence is synthesized)
gacacggtgaacccggagcccctgaggccggagacgatgtggctggctctgctgggggctctgcggtatgggaagccgctggtgttcgacctgcgagaggaagacctgttcccagtcgtg

SEQ ID NO: 736966 - DNA, 120 bp, Artificial Sequence
  ENSG00000203499_13 (sequence is synthesized)
cagcggcagctggaggcggtgcaggagaggtacctgtcgctgctgcggcccacggacgggcctgagtatagccccacgcagttccaggagcagcggctggagcacttccgcctctttttc

SEQ ID NO: 736967 - DNA, 120 bp, Artificial Sequence
  ENSG00000203499_14 (sequence is synthesized)
gtcaccaaggtccagtggccgccagctgagcagctgcaggtgctgctcccagtgcgcgtgcagctgccaggcacaggcctctagtgctggccccagtcccaataaaacgtgtgccccggg

SEQ ID NO: 736968 - DNA, 120 bp, Artificial Sequence
  ENSG00000203499_15 (sequence is synthesized)
agtcctagtcccagaagctcaggagcagagggacagccacctgccaggggagtgccgaattggacacacagagaccggaaagggcctgggggagggacgtggcacaagggaagcccgggg

SEQ ID NO: 736969 - DNA, 120 bp, Artificial Sequence
  ENSG00000203499_16 (sequence is synthesized)
agaaccgcccgccgcagaggaaagcgggctggcaggcgagggagcccgcgtcggctgagagcccacaggcccccacagggacacctggtcgccatcacatggacacgctatttttgcact

SEQ ID NO: 736970 - DNA, 120 bp, Artificial Sequence
  ENSG00000203499_17 (sequence is synthesized)
gggcttgttctgcgtgggtgggacctgctctagatccatcttggaaaatgagctcatgccgttggtgtaaccaccattcctgcccccatgccactctgccccggggcctgctggctgacg

SEQ ID NO: 736971 - DNA, 120 bp, Artificial Sequence
  ENSG00000203499_18 (sequence is synthesized)
tccatggtgcagtcgtgatgtccacgagcctgtctgtgccctcgctgcggccgactctctctaggagcgtccccacaggatgcagaacctccctttgagctcggtgttccctgctcctca

SEQ ID NO: 736972 - DNA, 120 bp, Artificial Sequence
  ENSG00000203499_19 (sequence is synthesized)
gtaggcaaccgcatccgtgccgatggccggtcagttctccgggccagacgtgggcgatttggggtttggacagacagcagtgacctgatgggtgtccccaggtggcctcttgttattgac

SEQ ID NO: 736973 - DNA, 120 bp, Artificial Sequence
  ENSG00000203499_20 (sequence is synthesized)
ggggctgggacatacagcccagggcggggtccggcgtcgggcttgcctgtcagctgcactctgctaccccgacaggggaggaagaggcgcctgggctgaagtgccaggtcaccgagctgc

SEQ ID NO: 736974 - DNA, 120 bp, Artificial Sequence
  ENSG00000203499_21 (sequence is synthesized)
gggagcccgcgtcggctgagagcccacaggcccccacagatggagtttcgctctgttgccaggctggagtgcactggggcttggctcactgctacctccgcctcccaggttcaggcaatt

SEQ ID NO: 736975 - DNA, 120 bp, Artificial Sequence
  ENSG00000203499_22 (sequence is synthesized)
tacaggcgtgagccaccaggcctggctccttttccactttcatggaccctcgtgattgcattggatctccccgggtaatctgggatgttcttcctggcctaaggtcagctgattagcaac

SEQ ID NO: 736976 - DNA, 120 bp, Artificial Sequence
  ENSG00000203499_23 (sequence is synthesized)
gcctaaggtcagctgattagcaaccttagttcatctgcagtctccattctctttttgctgaatcacgtcaagtattcacaagttccagggggcaggaggtggacatctttgggggacatt

SEQ ID NO: 736977 - DNA, 120 bp, Artificial Sequence
  ENSG00000203499_24 (sequence is synthesized)
attccgcccaccagaaaacccaggagcagccacagccccaagacgaggcagggaaggagtgctgctgtctgccggtgaagatgaactgcttctgaccctcccgagcgaggatattgagaa

SEQ ID NO: 736978 - DNA, 120 bp, Artificial Sequence
  ENSG00000203499_25 (sequence is synthesized)
gaaagaatttgccaagatgctagtcacacaccaagtacagaggctatgttggtcggctgcagcaaaaagaccactcgcggcgtggcagctctcactggccctgctgcctcttcaagttga

SEQ ID NO: 736979 - DNA, 120 bp, Artificial Sequence
  ENSG00000203499_26 (sequence is synthesized)
ctgcagtccatcacccacggtcattattaatttgtttttgcaaaggccaggcaggtgaatctaatggagatggaaaccaccacacctgcttccctggtctctgatgttggtgttaacctc

SEQ ID NO: 736980 - DNA, 120 bp, Artificial Sequence
  ENSG00000203499_27 (sequence is synthesized)
tgcaattcctcaagcaaagcactccttctatcaggctcactgtcttgctggagggaggaagttccacaggctctcacttggttctttctgccgtaacaacccttactcctccggccaagg

SEQ ID NO: 736981 - DNA, 120 bp, Artificial Sequence
  ENSG00000203499_28 (sequence is synthesized)
agccaatgtgagcattcagctggcagctaagaatgtgtatcccaataaacagggcagacctacagacccactggacccactagagatggacttgggccacagtgccttccatgacttcag

SEQ ID NO: 736982 - DNA, 120 bp, Artificial Sequence
  ENSG00000203499_29 (sequence is synthesized)
cctctatgttggtgacacaaccctggcaaatggccacagactcctttggggacagagtaggagcgtaactggtgggagtggttggcatgctttgtattgggagagccgcacgccctaggg

SEQ ID NO: 736983 - DNA, 120 bp, Artificial Sequence
  ENSG00000203499_30 (sequence is synthesized)
cttccagcctcctcttcagtttggcagctgtgagtctgaatttcactcaaatctggaaactgggtgagagactgtggcagctgctgtccggctggcagagcctgacgtgtctctgatcat

SEQ ID NO: 736984 - DNA, 120 bp, Artificial Sequence
  ENSG00000203499_31 (sequence is synthesized)
actcactgggtcagcaacaccctactgaccttgtccagaatcccacatcccagttgatatcagggcaatcagtttcctggctgttttccccaatatcaacccgggcttacagaagacagt

SEQ ID NO: 736985 - DNA, 86 bp, Artificial Sequence
  ENSG00000203499_32 (sequence is synthesized)
ctgttttccccaatatcaacccgggcttacagaagacagtcaccacagagctcctgccaggagttcactcattcgtgcatttcttc

SEQ ID NO: 736986 - DNA, 75 bp, Artificial Sequence
  ENSG00000203499_33 (sequence is synthesized)
ggtgatctgacccagcctcattcatacatttcttattgttgttgtttgagacagggtctttctctgtcacccagg

SEQ ID NO: 736987 - DNA, 120 bp, Artificial Sequence
  ENSG00000203499_34 (sequence is synthesized)
ttgttgttgtttgagacagggtctttctctgtcacccaggatggagtgcagtgttgtgatcatgcctcagtgcagcgatcatggctcagtgcagcctcaaactcttgggctcaagcagtg

SEQ ID NO: 736988 - DNA, 87 bp, Artificial Sequence
  ENSG00000203499_35 (sequence is synthesized)
tcaaactcttgggctcaagcagtgctccaacacagcaccatgccccggctatttttttattttgtagagatggggtctcactatgtt

SEQ ID NO: 736989 - DNA, 120 bp, Artificial Sequence
  ENSG00000203499_36 (sequence is synthesized)
gctgggattaaaggcgtgagccaccgtaccttgcccttggtggaatctttagggttttctattcatacatataaaatcatatcattggcaaacagagataattttacttcctcctttcca

SEQ ID NO: 736990 - DNA, 120 bp, Artificial Sequence
  ENSG00000203499_37 (sequence is synthesized)
ttggcaaacagagataattttacttcctcctttccaatttggatgccttagatttcttttccttgcctaactgctctgtctagaactcccagcactatgctgaatagagtggcaagagca

SEQ ID NO: 736991 - DNA, 120 bp, Artificial Sequence
  ENSG00000203499_38 (sequence is synthesized)
ggcatttgccttgttcctaaccttagagaaaaatccttcagccttttaccattgaggatgatgtttgctgttagtttttcataaatgatctatatcaggctgaataaatttctatttcta

SEQ ID NO: 736992 - DNA, 120 bp, Artificial Sequence
  ENSG00000203618_0 (sequence is synthesized)
gtcttcccttatccccagacgcctagcgggcagggttgggctgaatcaaatgggagccctccagacataaggaggccagaggctgcaaggagcggggtcgtgaccgcttacaccccttct

SEQ ID NO: 736993 - DNA, 120 bp, Artificial Sequence
  ENSG00000203618_1 (sequence is synthesized)
ccacagcccggcccgacctggagggcccccggggcactgggcggtgagccacctcctggcaactctcggtgccgtcccctgccctcgctcgaggcctcttctccccagcaccgctgtggt

SEQ ID NO: 736994 - DNA, 120 bp, Artificial Sequence
  ENSG00000203618_2 (sequence is synthesized)
gtgccgggatcctgagcctaggcctcccgatgttcccacccgcatgatcccttcccgccacacgatgctccgttttcttccgttgtgaatgccgcgtcctgtcctggtgacaggagaaca

SEQ ID NO: 736995 - DNA, 120 bp, Artificial Sequence
  ENSG00000203618_3 (sequence is synthesized)
atgttggtgaacgtcgcagcgggtgtccgagtgctccgtgtgcccctgagagcgggtgggagcggaagcctgagcggcctgcggcctccggcgatagtgtgctatctgccgctgcagcgc

SEQ ID NO: 736996 - DNA, 120 bp, Artificial Sequence
  ENSG00000203618_4 (sequence is synthesized)
gcgtccgcgcggcctctgggctatttctggccaggccgcagcactgtggtcggtgcgggcgtggcaggggcggggcggccttatcgctcggctctcccgcctacgcctcccgctgcagag

SEQ ID NO: 736997 - DNA, 120 bp, Artificial Sequence
  ENSG00000203618_5 (sequence is synthesized)
taagccgggctgccgtcttctcgccatgggctccgggccgcgcggggcgctgagcttactgctcctgctgctggccccgccgagccgcccggccgcaggttgcccggcgccctgtagctg

SEQ ID NO: 736998 - DNA, 120 bp, Artificial Sequence
  ENSG00000203618_6 (sequence is synthesized)
gtgctgaccggcaacaacctgacggcgctgccgccggggctgctggacgcgctgcccgcgctgcgcaccgcacacctgggcgccaacccctggcgctgcgactgccgccttgtgccgctg

SEQ ID NO: 736999 - DNA, 120 bp, Artificial Sequence
  ENSG00000203618_7 (sequence is synthesized)
gagcgtgcgccctaccgcgacctgcgttgcgtggcgcccccagcgctgcgcggccgcctgctgccctatctggccgaggacgagctgcgcgccgcttgcgctcccggcccgctctgctgg

SEQ ID NO: 737000 - DNA, 120 bp, Artificial Sequence
  ENSG00000203618_8 (sequence is synthesized)
cgcttgcgctcccggcccgctctgctggggggcgctggcggcgcagcttgcgctgctgggccttgggctgctgcacgcgttgctgctggtgctgctgctgtgccgcctgcggaggctgcg

SEQ ID NO: 737001 - DNA, 120 bp, Artificial Sequence
  ENSG00000203618_9 (sequence is synthesized)
tgtcgctgaccgacccgctggtggccgagcgagccggaaccgacgagtcctgaggagagaaccggtgcgtcctgaggagagaaccggcgctgggcaacacgggcctgcaaactcgacagg

SEQ ID NO: 737002 - DNA, 120 bp, Artificial Sequence
  ENSG00000203618_10 (sequence is synthesized)
accctgcccgaggggccctcgcgccaacctggaccggtccccgcctcctccgctgcccaatctctcagacccaccccacctgcaggcccagaccacgtgggacagaactcctgcccaccc

SEQ ID NO: 737003 - DNA, 120 bp, Artificial Sequence
  ENSG00000203618_11 (sequence is synthesized)
taccccgagggaggcgaacccgcacttccaggcttgggaggaccatggggcacaatgcggtccagaccctgctgcgtctcccttccaaactctggtgctgaataaacccttctgatctgg

SEQ ID NO: 737004 - DNA, 120 bp, Artificial Sequence
  ENSG00000203661_0 (sequence is synthesized)
atggccaacatcaccaggatggccaaccacactggaaagttggatttcatcctcatgggactcttcagacgatccaaacatccagctctacttagtgtggtcatctttgtggttttcctg

SEQ ID NO: 737005 - DNA, 120 bp, Artificial Sequence
  ENSG00000203661_1 (sequence is synthesized)
aaggcgttgtctggaaatgctgtcctgatccttctgatacactgtgacgcccacctccacagccccatgtactttttcatcagtcaattgtctctcatggacatggcgtacatttctgtc

SEQ ID NO: 737006 - DNA, 120 bp, Artificial Sequence
  ENSG00000203661_2 (sequence is synthesized)
actgtgcccaagatgctcctggaccaggtcatgggtgtgaataaggtctcagcccctgagtgtgggatgcagatgttcctctatctgacactagcaggttcggaatttttccttctagcc

SEQ ID NO: 737007 - DNA, 120 bp, Artificial Sequence
  ENSG00000203661_3 (sequence is synthesized)
accatggcctatgaccgctacgtggccatctgccatcctctccgttaccctgtcctcatgaaccatagggtctgtcttttcctggcatcgggctgctggttcctgggctcagtggatggc

SEQ ID NO: 737008 - DNA, 120 bp, Artificial Sequence
  ENSG00000203661_4 (sequence is synthesized)
ttcatgctcactcccatcaccatgagcttccccttctgcagatcctgggagattcatcatttcttctgtgaagtccctgctgtaacgatcctgtcctgctcagacacctcactctatgag

SEQ ID NO: 737009 - DNA, 120 bp, Artificial Sequence
  ENSG00000203661_5 (sequence is synthesized)
accctcatgtacctatgctgtgtcctcatgctcctcatccctgtgacgatcatttcaagctcctatttactcatcctcctcaccgtccacaggatgaactcagcagagggccggaaaaag

SEQ ID NO: 737010 - DNA, 120 bp, Artificial Sequence
  ENSG00000203661_6 (sequence is synthesized)
gcctttgccacctgctcctcccacctgactgtggtcatcctcttctatggggctgccgtctacacctacatgctccccagctcctaccacacccctgagaaggacatgatggtatctgtc

SEQ ID NO: 737011 - DNA, 120 bp, Artificial Sequence
  ENSG00000203661_7 (sequence is synthesized)
ttctataccatcctcactccggtgctgaaccctttaatctatagtcttaggaataaggatgtcatgggggctctgaagaaaatgttaactgtgagattcgtcctttaggaaattataaag

SEQ ID NO: 737012 - DNA, 120 bp, Artificial Sequence
  ENSG00000203661_8 (sequence is synthesized)
taggaaatttggatataaagatttattttccttttctctacccatcagatacttaggattttatccctgttattccttagactctcatacaatgatgcctcatctcatattcatctcatt

SEQ ID NO: 737013 - DNA, 120 bp, Artificial Sequence
  ENSG00000203661_9 (sequence is synthesized)
ttgaggaattctttcactgtgtggaaactctattttatagtctttgtccatccaaaattcttttacaattgtgttatactaatgtaacatttttggaagttgataactgttctctaattt

SEQ ID NO: 737014 - DNA, 120 bp, Artificial Sequence
  ENSG00000203661_10 (sequence is synthesized)
aaaaatattcttaacctcaggaaatacttaatatttagagacaaaaaggtcatgaggtgttcaaatgatgagagggaaagagggagggagatagagaggggcaatgaaacaaactgagtt

SEQ ID NO: 737015 - DNA, 120 bp, Artificial Sequence
  ENSG00000203661_11 (sequence is synthesized)
caatgttgctgccacacatgagtatgggtaaagggtatataggtattaattgtactattgttttttaatgatttttgtgaagttgaaatcatttacaaataattaaataccaggcttttc

SEQ ID NO: 737016 - DNA, 120 bp, Artificial Sequence
  ENSG00000203661_12 (sequence is synthesized)
tccctttttgaaaatattctcctttctgcttggtggcagtgtgacatcttagaaatcatgctcatttcattatatctaatcattaccaagaaaatccagtcatcgccccttctttattga

SEQ ID NO: 737017 - DNA, 120 bp, Artificial Sequence
  ENSG00000203661_13 (sequence is synthesized)
gggctacatttttctgcatggtccaattctgatggcgtctagtggatttatctctccgaaataattactgccatgtggtgtattgaggatgtaggaccacataagtgactgcagaaaaaa

SEQ ID NO: 737018 - DNA, 120 bp, Artificial Sequence
  ENSG00000203661_14 (sequence is synthesized)
tatgacacctgagtggaaggagttttaaggaaggttacctgcccagggtgattcctgagctgagatttcaaacatgtaacttgttatacaaacaagcagagggatggcatcaacattcaa

SEQ ID NO: 737019 - DNA, 120 bp, Artificial Sequence
  ENSG00000203661_15 (sequence is synthesized)
tccttcatttatttaacaagcattttgtactattttataattaaaaatagttaaataagattaaattttgaatagcacatggcttttaccaaggagtttgaaaaatacatgtagttgttt

SEQ ID NO: 737020 - DNA, 120 bp, Artificial Sequence
  ENSG00000203661_16 (sequence is synthesized)
atgcaaacaaatgtaagaaaataaataagctgttttgatactcgtgtgaagggtgcagctcataaggacacactaattctatctgtgacatctgagttcaaacaaggagctgagaggaga

SEQ ID NO: 737021 - DNA, 120 bp, Artificial Sequence
  ENSG00000203661_17 (sequence is synthesized)
ctccggggctcagtgctgaatagtgacgaaaagttaccctcagatgagtgtgtgatgttggagccaggggaacttgctgagacacgctgcaagggaaaaggcacagcatgagcaaagaca

SEQ ID NO: 737022 - DNA, 120 bp, Artificial Sequence
  ENSG00000203661_18 (sequence is synthesized)
gggctgagcaagcgagagagatcaatgcccagtagatctttcttatttcatgttaggcttatttcttgcccttgtgtggcccagggttttacaaacaatagtgaaatgatcagatttgta

SEQ ID NO: 737023 - DNA, 120 bp, Artificial Sequence
  ENSG00000203661_19 (sequence is synthesized)
ttttagaaatgttatttgtgtggtgatcaattggagatgtgcaagaccaaaaacatagagaccaggtacatgagaatggtaatctaaatgatgttgatctaagtggagtcgaccatgcct

SEQ ID NO: 737024 - DNA, 120 bp, Artificial Sequence
  ENSG00000203661_20 (sequence is synthesized)
ttacccgagaataggctgataggagggcatttgaggtggggcctgctgaacctgttacctaaaagcatacatgtggtagctgcatgctataacttcctaattggctatgtacaacttgcg

SEQ ID NO: 737025 - DNA, 120 bp, Artificial Sequence
  ENSG00000203663_0 (sequence is synthesized)
tgggagtcttgtaatgcagccactgtggataaaagtgaattactgttcttaatttacccttttgtctcccttcaggatggattgtaggaattccccatggaaaattacaatcaaacatca

SEQ ID NO: 737026 - DNA, 120 bp, Artificial Sequence
  ENSG00000203663_1 (sequence is synthesized)
actgatttcatcttattggggctgttcccacaatcaagaattggccttttcgtattcaccctcatttttctcattttcctaatggctctaattggaaatctatccatgattcttctcatc

SEQ ID NO: 737027 - DNA, 120 bp, Artificial Sequence
  ENSG00000203663_2 (sequence is synthesized)
tttttggacatccatctccacacacctatgtatttcctacttagtcagctctccctcattgacctaaattacatctccaccattgttccaaagatggtttatgattttctgtatggaaac

SEQ ID NO: 737028 - DNA, 120 bp, Artificial Sequence
  ENSG00000203663_3 (sequence is synthesized)
aagtctatctccttcactggatgtgggattcagagtttcttcttcttgactttagcagttgcagaagggctgctcctgacatcaatggcctatgatcgttatgtggccatttgctttcct

SEQ ID NO: 737029 - DNA, 120 bp, Artificial Sequence
  ENSG00000203663_4 (sequence is synthesized)
tcttggatgataagctctatcaactcttgtgctcacacagtatatgcactctgtatcccatattgcaagtccagagccatcaatcattttttctgtgatgttccagctatgttgacgcta

SEQ ID NO: 737030 - DNA, 120 bp, Artificial Sequence
  ENSG00000203663_5 (sequence is synthesized)
gcctgcacagacacttgggtctatgagagcacagtgtttttgagcagcaccatctttcttgtgcttcctttcactggtattgcatgttcctatggccgggttctccttgctgtctaccgc

SEQ ID NO: 737031 - DNA, 120 bp, Artificial Sequence
  ENSG00000203663_6 (sequence is synthesized)
atgcactctgcagaagggaggaagaaggcctattcaacctgtagcacccacctcactgtagtgtccttctactatgcaccctttgcttatacctatgtacgtccaagatccctgcgatct

SEQ ID NO: 737032 - DNA, 120 bp, Artificial Sequence
  ENSG00000203663_7 (sequence is synthesized)
ccaacagaggacaagattctggctgttttctacaccatcctcaccccaatgctcaaccccatcatctacagcctgagaaacaaggaggtgatgggggccctgacacaagtgattcagaaa

SEQ ID NO: 737033 - DNA, 120 bp, Artificial Sequence
  ENSG00000203663_8 (sequence is synthesized)
atcttctcagtgaaaatgtagacatacgttctgtgttagagtcaaagcgctaggttcatatcaacttagtagtgtacagcagtgaagaaaaacattattacatgcccagtgtgtcaaaca

SEQ ID NO: 737034 - DNA, 120 bp, Artificial Sequence
  ENSG00000203663_9 (sequence is synthesized)
aggtctctgaaatctcgtgtgtagggaagaaaaatgaatatatgcatttctttaagcaatattcttaatgcttactcagaaaaatgaatttgttcctatgatgactgtaggactgccgtc

SEQ ID NO: 737035 - DNA, 120 bp, Artificial Sequence
  ENSG00000203663_10 (sequence is synthesized)
agctaagcaaaggcactgagtgtttggaaatgaggaaataataaagtaatgcgtagacatggtgacaacagtccacaggctaaaatattggacccataacagacccttcctgaacccaaa

SEQ ID NO: 737036 - DNA, 120 bp, Artificial Sequence
  ENSG00000203663_11 (sequence is synthesized)
ttgtcttttaatttagtcttgacaatattataatacatattaatacatattctaagacatctattttgattttgtttgtgtgtggtttttgtttgtttgtttgtttgtctttttaatgga

SEQ ID NO: 737037 - DNA, 90 bp, Artificial Sequence
  ENSG00000203663_12 (sequence is synthesized)
tgtggtttttgtttgtttgtttgtttgtctttttaatggattttggctcttgttgcccaggctctaatgcaatggcgcaatctcagctcc

SEQ ID NO: 737038 - DNA, 120 bp, Artificial Sequence
  ENSG00000203663_13 (sequence is synthesized)
gtgagccaccatgccctgcctgttttttttttaatcaaatataggtcatatattttctactaaattgtgggcaacagggtttcattaacatgtagaaatcaaaacaataaaggtccaaac

SEQ ID NO: 737039 - DNA, 120 bp, Artificial Sequence
  ENSG00000203663_14 (sequence is synthesized)
ttaacatgtagaaatcaaaacaataaaggtccaaactaatcatatcattcagcataataattacataatagttgtttatctcccattattataaaaataagacaaaaataacaaattagt

SEQ ID NO: 737040 - DNA, 120 bp, Artificial Sequence
  ENSG00000203663_15 (sequence is synthesized)
ttatttactctcaactggtatgtatgtcttcttctttttcttaaagtaatgttttactaataagtttacctgaggataaataattatgtttgtggagcagccaatttggctttagaaaaa

SEQ ID NO: 737041 - DNA, 120 bp, Artificial Sequence
  ENSG00000203663_16 (sequence is synthesized)
caagagtttctgtataagaagttctatagaagttacagtctatagaccctcttagactatagttgacttagtggagtgtggagtaggttatttgaatcatttcccagtcacgtcacaaca

SEQ ID NO: 737042 - DNA, 120 bp, Artificial Sequence
  ENSG00000203663_17 (sequence is synthesized)
actattcagcttggattgggatcagctcctctgctccactatttttatacctgcttaggcatgtgcttaaaaggatcaacattatttcataaaggttatctgcttaggtccattctctga

SEQ ID NO: 737043 - DNA, 120 bp, Artificial Sequence
  ENSG00000203663_18 (sequence is synthesized)
gtgaaaggccattgctctccagaagagcccattcctgagagactcttttatctctgaggagagaaggcaagaaggaaggtagaatgagcaagtaagaagagcctcatattatccaagtga

SEQ ID NO: 737044 - DNA, 120 bp, Artificial Sequence
  ENSG00000203663_19 (sequence is synthesized)
cagcagtggtgaatgactgaatggtccttgagcaacacagatttgaactgtgcaggtccacatatatgtggattttgttctgcctccaccactcctgagacaacaagtacaacctctcct

SEQ ID NO: 737045 - DNA, 120 bp, Artificial Sequence
  ENSG00000203663_20 (sequence is synthesized)
cctcttcctccgcctcagcccactcaacgtgaagacaacaatgatgaagaactttatgacaaacctctatccctaaataaatagtaaacatattttctctttctgatgattttctcaata

SEQ ID NO: 737046 - DNA, 120 bp, Artificial Sequence
  ENSG00000203663_21 (sequence is synthesized)
agatattcttttttagctcactttactgtaagagtagagtatataagacatataagatacaaagttgtgttaattgaatgcttatgttatttgtaaggcttgctgtcaatagtaggatat

SEQ ID NO: 737047 - DNA, 120 bp, Artificial Sequence
  ENSG00000203663_22 (sequence is synthesized)
cagtagttaggttttggggagttcaaagttaaatgcatattctactgcttggcggtcagtgaccctaatttccgcgttgtcctagagtcatctgtactacaattggaataatcattttca

SEQ ID NO: 737048 - DNA, 120 bp, Artificial Sequence
  ENSG00000203663_23 (sequence is synthesized)
aacaagaacattaacatttgaataggagatacaaatatggatctggatatactcatttcaattaagcatttagagtttactagagtactgaataatttaaattttgacttatagaatggc

SEQ ID NO: 737049 - DNA, 120 bp, Artificial Sequence
  ENSG00000203663_24 (sequence is synthesized)
aaatgtttatgactttcttctcctctaatttaaattaagtagaattttctcatcattaggactgtatgagaatgtcataataatatgagaaaaggtagtagttgcctgatgttgaaagat

SEQ ID NO: 737050 - DNA, 69 bp, Artificial Sequence
  ENSG00000203663_25 (sequence is synthesized)
taatatgagaaaaggtagtagttgcctgatgttgaaagatttacctaatctcacatacaacagaacaga

SEQ ID NO: 737051 - DNA, 120 bp, Artificial Sequence
  ENSG00000203666_0 (sequence is synthesized)
gggaggcgggctgcgaatgggaagcgggaggaggaggccgggccgcgggctggttctatcacccccttgggagcccagctcttcacctagctctccggcgcttttcaaaatctgcagtta

SEQ ID NO: 737052 - DNA, 120 bp, Artificial Sequence
  ENSG00000203666_1 (sequence is synthesized)
acaacaaaaatcgagcaacgccacgtcgcacaaacaggacaggagggggcgaggggccaggctcgccgcggggcgctgagcaggccgggacaccgcggccgaggttatcgttaggcatct

SEQ ID NO: 737053 - DNA, 120 bp, Artificial Sequence
  ENSG00000203666_2 (sequence is synthesized)
cccaggcgaccggctccgcagcaagatggcggacgagaaggacagggaagagataatagtagcagaatttcacaaaaaaatcaaagaggcatttgaagtctttgaccatgagtcgaataa

SEQ ID NO: 737054 - DNA, 120 bp, Artificial Sequence
  ENSG00000203666_3 (sequence is synthesized)
tacagtggatgtgagagagattggaacaattatcaggtcattaggatgctgtcctacggaaggagagctgcatgatctgattgcagaggtagaggaagaagaacccactggatacattcg

SEQ ID NO: 737055 - DNA, 120 bp, Artificial Sequence
  ENSG00000203666_4 (sequence is synthesized)
attcgaaaaatttcttccggtgatgacagaaatactactagaaagaaaatacagaccaattccagaagatgtccttcttcgagcttttgaggttttagattcagctaaacgtgggtttct

SEQ ID NO: 737056 - DNA, 120 bp, Artificial Sequence
  ENSG00000203666_5 (sequence is synthesized)
agaaggtgagcctttttctcaagaggaaatggaagaaatgttgtctgctgcaattgatccagaatcaaattcaattaattacaaggactatataacaatgatggtgatagatgaaaatta

SEQ ID NO: 737057 - DNA, 120 bp, Artificial Sequence
  ENSG00000203666_6 (sequence is synthesized)
aatgttctaaagataatttctgattgaaagaacaattttagaaattgcttgttcttgttaatttcacatcttatcttaggattcctatatgtgatatttaataccttgtgacataactat

SEQ ID NO: 737058 - DNA, 120 bp, Artificial Sequence
  ENSG00000203666_7 (sequence is synthesized)
tttaagacactttgtttttaaagatgatcgtaacactttaaaccaaatttagtatgtctagccttacagaatgataaattactatttatttaaaaactattcttaaaacattttaacatt

SEQ ID NO: 737059 - DNA, 120 bp, Artificial Sequence
  ENSG00000203666_8 (sequence is synthesized)
agaatggattgttgtttattttctacaataaaactcaggtcaccttcgaattaattaagctgacaaaatgaaaatgacttaattacccaaggtttggcatgtaaagatcttaagaggggg

SEQ ID NO: 737060 - DNA, 120 bp, Artificial Sequence
  ENSG00000203666_9 (sequence is synthesized)
cagaacgaaccactcgaaaacgagtagcagtgtaatgaaggcttcttttttaaacaataacaaatgcttcatcaatctgagtgtggaaggtgatttatcaaaataaatattactaattta

SEQ ID NO: 737061 - DNA, 120 bp, Artificial Sequence
  ENSG00000203666_10 (sequence is synthesized)
tcggactttactgatcgaacatctaatggaaggtggaagaagagaccatcacacaatgacggtgttatggggaacacaggagataatagtagcagaatttcacaaaaaaatcaaagaggc

SEQ ID NO: 737062 - DNA, 120 bp, Artificial Sequence
  ENSG00000203666_11 (sequence is synthesized)
gcagttaacaacaaaaatcgagcaacgccacgtcgcacaaacaggacaggagggggcgaggggtgtgtgcgcgcgcgtgctgtccccaaatggatgagaaataagggaaaggaggggttg

SEQ ID NO: 737063 - DNA, 120 bp, Artificial Sequence
  ENSG00000203666_12 (sequence is synthesized)
gggaccgtgtgatgaagcaacatgctaggcccgggacaagtccggctccggcctcgggtctggagggacaaggccgggggccgggtggcagacggggcctctggtcttcccccagcgcga

SEQ ID NO: 737064 - DNA, 120 bp, Artificial Sequence
  ENSG00000203666_13 (sequence is synthesized)
gggtcgtggcgcgaaacggggacagggcgcgcgctcggagcctcctccccgccccgccccgcccaagggtcttcctcccccgggattcagagcggcccctcctccaggccaggctcgccg

SEQ ID NO: 737065 - DNA, 120 bp, Artificial Sequence
  ENSG00000203666_14 (sequence is synthesized)
cggctgcttccttaactcttgatctcctctctgtatcttgctttgtctagctgttctcttctctccatattcatccaaacatttgcttagaagtacccagaagcatggcgttgaatgtgg

SEQ ID NO: 737066 - DNA, 120 bp, Artificial Sequence
  ENSG00000203666_15 (sequence is synthesized)
tacaccttgaacgaagggtgaagaaacgaggcagagtgacttagtagcaagtgacagcacacagtttaaattttaatattagcccatttacaaacaacagcttatataatagtcattcac

SEQ ID NO: 737067 - DNA, 120 bp, Artificial Sequence
  ENSG00000203666_16 (sequence is synthesized)
atacctcaacactcaccatcccctccccactttttttctggagacagggtttcactgtcaccccagctggaatgcaggtggcatgatcacagctcactgtagcatcgacctcctggactc

SEQ ID NO: 737068 - DNA, 120 bp, Artificial Sequence
  ENSG00000203666_17 (sequence is synthesized)
ctgggaccacaggtgcatgccaccacgcccagctaatgtttttttttattttttgtagagacagggtctggctatgttgcttaggctggtctcaaactcctgggttcaagcgatcctgcc

SEQ ID NO: 737069 - DNA, 120 bp, Artificial Sequence
  ENSG00000203666_18 (sequence is synthesized)
cagcctcccaaagtgttaggattacagatgtgagccactgtgcccagccaacattcaccccattcaagtgtgcaattcaatggattctagtatcttcacagtgctgtgcaactatcactc

SEQ ID NO: 737070 - DNA, 120 bp, Artificial Sequence
  ENSG00000203666_19 (sequence is synthesized)
ttctagtatcttcacagtgctgtgcaactatcactcctatctacttacaaagcatttccatcatcttaaaaagaatccccatgtccaatagcagttccccttcccccaccgtcatcctcg

SEQ ID NO: 737071 - DNA, 120 bp, Artificial Sequence
  ENSG00000203666_20 (sequence is synthesized)
ggcaaccgctaatcttcctgtgtgtctgtggatttgcctcttcagggcatttcacataaacacaatcatacaatatgtggccttctgtgtctggcttctttcatttagtgtaaggctttt

SEQ ID NO: 737072 - DNA, 120 bp, Artificial Sequence
  ENSG00000203666_21 (sequence is synthesized)
gaggttcatccatgttgtaatgtatatccttagttcattcttttttgttaagctcacaaataaaaagcctcactttttatttgaggcaaggagactggctacagggattacagttccagc

SEQ ID NO: 737073 - DNA, 120 bp, Artificial Sequence
  ENSG00000203666_22 (sequence is synthesized)
agtcaaaacgcaactccaagtggcactatttggaccgtaggttttgcttcattttggctggaaaagggtattcaggatgtacttctcccagccggacaagaaaaagggcaaagaaaactg

SEQ ID NO: 737074 - DNA, 120 bp, Artificial Sequence
  ENSG00000203666_23 (sequence is synthesized)
gaagagacgtctcgtctacacaaactgctctttggacacagcatcaacctgaccacacccgtgctggccagtctgcaggttgctgacccgccgttaagggacacaggccatactacactt

SEQ ID NO: 737075 - DNA, 120 bp, Artificial Sequence
  ENSG00000203666_24 (sequence is synthesized)
gctagaaaaactgaggcaggaaaaagaggtgcaaggcactgggggaagagcaggtacctatagctttaaagctcagtgttgaaggggtaatccttgcaggaggcacagctcaccaagaca

SEQ ID NO: 737076 - DNA, 120 bp, Artificial Sequence
  ENSG00000203666_25 (sequence is synthesized)
cagaccctcccgttcctgttgtagctgactacagtggtcacatcaggctgctcagttgaaagtcgaagtcctccaagttttcagcagtgcgttccagcatcaccaccgaaatgatgatag

SEQ ID NO: 737077 - DNA, 120 bp, Artificial Sequence
  ENSG00000203666_26 (sequence is synthesized)
gaattaccaccaaattcctatgcatgggaaaccagatcagaacctgggctgcgtttttatttgtttattttttttactgtgcttggctgtgattgctttggtgctgggatcccccagacc

SEQ ID NO: 737078 - DNA, 120 bp, Artificial Sequence
  ENSG00000203666_27 (sequence is synthesized)
tgtcacgagagctgaggggactacaggcagtcaccaccttgcctttggattggcagccctggattaacttctcctgaggtgggtgcaggtggcactcactgtggttaaccactgttttta

SEQ ID NO: 737079 - DNA, 120 bp, Artificial Sequence
  ENSG00000203666_28 (sequence is synthesized)
agccaggtttctttttttctgtctgtcatatatatatatatatatttagagacagggtctcactctatcactcaggcctggagtgtagtggcatgatcataactcactgcagcctcgagt

SEQ ID NO: 737080 - DNA, 120 bp, Artificial Sequence
  ENSG00000203666_29 (sequence is synthesized)
attacaggctgagacaccacacctggtcttaagccaggtttctttaccatctcttggagatggctgcagttggagattccaaaagctttcagagcccttcatccaccagctcctccatgt

SEQ ID NO: 737081 - DNA, 120 bp, Artificial Sequence
  ENSG00000203666_30 (sequence is synthesized)
ggccacccatgtgacatgaagttggtgtcactaggtaccacgttgtctgtcccatccaacaggaaaaatagcctgttggccagtgaataaggtaggaatccaggtggtcccctgagggtc

SEQ ID NO: 737082 - DNA, 120 bp, Artificial Sequence
  ENSG00000203666_31 (sequence is synthesized)
ttctgacaggctcctttatcaggctcttctcatggtatgagcaccgcagcttgctgacagtggcaacgttctcaagcttcacagactccgtcacttggcctggaggggaattctaggtgt

SEQ ID NO: 737083 - DNA, 120 bp, Artificial Sequence
  ENSG00000203666_32 (sequence is synthesized)
ccagccccaggacaggcattttggcaccatgattgagcacgatatggtgagccatcctcacaggattaagaagaattctggacagaaatatagttgtaagtaagcatcagtcagcctgca

SEQ ID NO: 737084 - DNA, 120 bp, Artificial Sequence
  ENSG00000203666_33 (sequence is synthesized)
ctttgacccacttccttgtaaccaacagtgacgtagcactaggtaacatttgcatccccgttgttcctatagatacaatttctgaccttagaatcacaaggcttttgtttaaaatagatg

SEQ ID NO: 737085 - DNA, 120 bp, Artificial Sequence
  ENSG00000203666_34 (sequence is synthesized)
ggatctctgacattagaatcataagatttttgtttaagacttgcttaagatgtttttcagatcctgaattccagcaaaacagccgacaccaaccagtttgaagacccccacagaggaatg

SEQ ID NO: 737086 - DNA, 120 bp, Artificial Sequence
  ENSG00000203666_35 (sequence is synthesized)
tgatcagcatgaaaatacagcttcgtctccctctcccatgactccaccctgcacacttcgaccaatcaaccatctccacactccagtctccactcccaaacccttaaaaaccccagcccc

SEQ ID NO: 737087 - DNA, 120 bp, Artificial Sequence
  ENSG00000203666_36 (sequence is synthesized)
aaactcctcagggagatggatttgacgtttcctcccatttcctccttcggtggccctacgatgaaacctctttctctgctacaaccctatgcctcggcgtattcactttctggtcccatc

SEQ ID NO: 737088 - DNA, 120 bp, Artificial Sequence
  ENSG00000203666_37 (sequence is synthesized)
cagcgatggacccatcgtggttaccgtggctggccaagcctgctgtgcttcacagaccccactcaggatcacaccacttcgttccactgtttggagatgccatgtttgcttatcccttca

SEQ ID NO: 737089 - DNA, 120 bp, Artificial Sequence
  ENSG00000203666_38 (sequence is synthesized)
tcagctgatgagcatttgtgctgttttcactttttggctattacgaaaatgttgctacgagcatccatgatattcgcccatttaaaaaagtgtttttcaccattactgctgtgggaaatt

SEQ ID NO: 737090 - DNA, 120 bp, Artificial Sequence
  ENSG00000203666_39 (sequence is synthesized)
tctccctggctctgtcctttctttgtagcccagccttcccccaggttttggctctccctctctggctcaatgtcagctccttgtctcacctcctagagcaattccactctcccacctcct

SEQ ID NO: 737091 - DNA, 120 bp, Artificial Sequence
  ENSG00000203666_40 (sequence is synthesized)
gctgcggcatttccaaagcctctgcttagcaagggaccacccattctgcacctctccccttagggctgcaagcacctgcacaaacttggtggttatcctatgcctcaactcaatcaaatt

SEQ ID NO: 737092 - DNA, 120 bp, Artificial Sequence
  ENSG00000203666_41 (sequence is synthesized)
ctctcagttttccatcagcaatctttttaagccaaagggaaggcaaggacttgatcttcacatcacatgaatcatgacacctgccttagaaggcagaagcaactgtagttggaatagcaa

SEQ ID NO: 737093 - DNA, 120 bp, Artificial Sequence
  ENSG00000203666_42 (sequence is synthesized)
ttgtttttcaacatatgggatgatatcaaggctctttcctccccatatgtcctgccctgttagtggctggggctgagggttttcccaggaagccagattgtcctcacaagttcctcagga

SEQ ID NO: 737094 - DNA, 120 bp, Artificial Sequence
  ENSG00000203666_43 (sequence is synthesized)
ccctagggcttccacagatagtaggactgttatcagaaagaagtctcgatccagacgccgagagagggttcttggatatcgcccaagaaagaattcagggggagtccatagagtgaagtg

SEQ ID NO: 737095 - DNA, 89 bp, Artificial Sequence
  ENSG00000203666_44 (sequence is synthesized)
gcccaagaaagaattcagggggagtccatagagtgaagtgaaagcaagtttgttaagaaaacaaaggagtccgagggctgctggttgcc

SEQ ID NO: 737096 - DNA, 120 bp, Artificial Sequence
  ENSG00000203666_45 (sequence is synthesized)
gggattacaggcgtgagtcaccacgccgggccggttgcccatttttatgattatttcttgattatatgctaaacaagggctggattattcatgagggaaaggggtgggcaattcctggaa

SEQ ID NO: 737097 - DNA, 120 bp, Artificial Sequence
  ENSG00000203666_46 (sequence is synthesized)
tggattattcatgagggaaaggggtgggcaattcctggaacggagggttcctcccccttttagaccgtgtaggataacttcttgacattgccctggcatttgtaaactgtcatggcgcag

SEQ ID NO: 737098 - DNA, 120 bp, Artificial Sequence
  ENSG00000203666_47 (sequence is synthesized)
taattagcatataatgagcagtgaggtcgaccagaggccactctcatcaccattttgggtttggtgggttttggccacttctctactgcaacctgttttatcagtaaggtctttatgacc

SEQ ID NO: 737099 - DNA, 84 bp, Artificial Sequence
  ENSG00000203666_48 (sequence is synthesized)
accattttgggtttggtgggttttggccacttctctactgcaacctgttttatcagtaaggtctttatgacctgtatcttgtgg

SEQ ID NO: 737100 - DNA, 120 bp, Artificial Sequence
  ENSG00000203666_49 (sequence is synthesized)
tactcagcccctcatcactctgattcaaatgcctctgacatgaccacgcagatttgagaaacaggccctcagccaaccagactctggctctacgacacacttaatactgtgaaaagaaga

SEQ ID NO: 737101 - DNA, 120 bp, Artificial Sequence
  ENSG00000203666_50 (sequence is synthesized)
ttacgggtcatagtcacaaataccaggggtgcaaaacttcagattagaagacacttgtcagactcagaggctcatccaactccacggagatcattatcaccacaagttcttcagacaggt

SEQ ID NO: 737102 - DNA, 120 bp, Artificial Sequence
  ENSG00000203666_51 (sequence is synthesized)
gtggaggttttctaagggatatttttattttctggattgcaattttgtttaggaagagatgaaagtgaggatcaactactttgaggattgtacaactttgtaaattgcacaaatatgacg

SEQ ID NO: 737103 - DNA, 120 bp, Artificial Sequence
  ENSG00000203666_52 (sequence is synthesized)
gcatatttatatctgcctgcatttgtgaaaacaaacttgtcaaggagcttatttctggaaagggtcaatgattctagaaaaaaaaaaaagataaatatgagacccttcagtaaaaagaaa

SEQ ID NO: 737104 - DNA, 120 bp, Artificial Sequence
  ENSG00000203666_53 (sequence is synthesized)
gcgtctacctcctcatgggttcagatgctttgtgattctgcacctgccttctctctctgtgccgttcctcttccatctctcttccatctgtatgtcttgctttaaaactcccaaggaaaa

SEQ ID NO: 737105 - DNA, 120 bp, Artificial Sequence
  ENSG00000203666_54 (sequence is synthesized)
cagaagatgtccttcttcgagcttttgaggttttagattcagctaaacgtgggtttcttactaaggacgagctgatcaagtatatgactgaagaaggtggtgtcgttatcacccccattc

SEQ ID NO: 737106 - DNA, 120 bp, Artificial Sequence
  ENSG00000203666_55 (sequence is synthesized)
caaacttgtgctttaaccactcagttatcttccttccatctttcatcaaatactggggcttcaagttaatcctctggtaatttcaaaagttttaatctaaataaataaccttgttcatga

SEQ ID NO: 737107 - DNA, 120 bp, Artificial Sequence
  ENSG00000203666_56 (sequence is synthesized)
tactaaggacgagctgatcaagtatatgactgaagaagagacaggtaagctaaggtggggagctgtgaagtgacttgctcaagatctcagagctcgtgagaggcagccagcatgtggatc

SEQ ID NO: 737108 - DNA, 120 bp, Artificial Sequence
  ENSG00000203666_57 (sequence is synthesized)
gaatggctctggtttcctcttgcgcccggcccagtttttccgttttagcttcggttgtcataggctgtgctgtcgctttctctgggaaaggacgagataatagtagcagaatttcacaaa

SEQ ID NO: 737109 - DNA, 120 bp, Artificial Sequence
  ENSG00000203666_58 (sequence is synthesized)
ccagccccaccttcgagggttctttcaaaagttcggactgatgttcaacttcacatcttgtctcaaggcaatcctctctgtttagtctcatagagttggctttgtggaatgtaattcatt

SEQ ID NO: 737110 - DNA, 120 bp, Artificial Sequence
  ENSG00000203666_59 (sequence is synthesized)
tttatctttagcacaaatttgtctgtttcttttaaggccaccagaaagcacaacatagactccccacagaaatctcattttatctcctaagttgcagaataaacgtaccttgtttgcaaa

SEQ ID NO: 737111 - DNA, 120 bp, Artificial Sequence
  ENSG00000203666_60 (sequence is synthesized)
ggctacgtcaaggagtcggtcctgagagcagcgaggcaggagtgaggtcgagtgggcaggcgtgagagccgagcacaggggcagaaaggaagactctgcacccagaaagcggaaaggaga

SEQ ID NO: 737112 - DNA, 82 bp, Artificial Sequence
  ENSG00000203666_61 (sequence is synthesized)
gcagaaaggaagactctgcacccagaaagcggaaaggagatggagtttcgctccgttgcaacctccacctcccgggttcaag

SEQ ID NO: 737113 - DNA, 120 bp, Artificial Sequence
  ENSG00000203666_62 (sequence is synthesized)
ggccgtgcatgctagaatcaccagccagagatgaggatgaaccgcgtgccttcaggacagggcggagacggaggaggaaaggagtgtggtgatcctcggaacatcagcagacaggctgtt

SEQ ID NO: 737114 - DNA, 120 bp, Artificial Sequence
  ENSG00000203666_63 (sequence is synthesized)
atgataggaacacattgcagcggggaaggaggatggctgagatatgaaatacccttcaaggtggacgcatacccaggggcatgtcattcggtggcaggggccagcacggacatgcagcac

SEQ ID NO: 737115 - DNA, 120 bp, Artificial Sequence
  ENSG00000203666_64 (sequence is synthesized)
tgaggcgtgtgctagcgcccagtgcgtcgacccaggcacggacttgtttggagcatacaggacagctctgcgttaagacctgtaagccattaaagaagtacagtctggtgaatgaaccct

SEQ ID NO: 737116 - DNA, 120 bp, Artificial Sequence
  ENSG00000203666_65 (sequence is synthesized)
tttttccgttttagcttcggttgtcataggctgtgctgtcgctttctctgggaaaggacggtgaagactggacgggagaaaccgggagggcaggcgcggccgttctgcagcagccgggcc

SEQ ID NO: 737117 - DNA, 120 bp, Artificial Sequence
  ENSG00000203666_66 (sequence is synthesized)
tgttaacagttatgcgaaagttataggggatactttaaaatcagtcattctggtgaaagttatttactgttcctgctattttggcttggggatggtttctgttctgtgggggttaagagg

SEQ ID NO: 737118 - DNA, 120 bp, Artificial Sequence
  ENSG00000203667_0 (sequence is synthesized)
gcttctgcttccgcgaccccggcggtgcagggcgggtggagtcgcggagtagtcctcatggccgccccgccggagcccggtgagcccgaggagaggaagtcccttaagctcctaggattt

SEQ ID NO: 737119 - DNA, 120 bp, Artificial Sequence
  ENSG00000203667_1 (sequence is synthesized)
ttagatgttgaaaatactccctgcgcccggcattcaatattgtatggttcattaggatctgttgtggctggctttggacattttttgttcactagtagaattagaagatcatgtgatgtt

SEQ ID NO: 737120 - DNA, 120 bp, Artificial Sequence
  ENSG00000203667_2 (sequence is synthesized)
ggagtaggagggtttatcttggtgactttgggatgctggtttcattgtaggtataattatgcaaagcaaagaatccaggaaagaattgccagagaagaaattaaaaagaagatattatat

SEQ ID NO: 737121 - DNA, 120 bp, Artificial Sequence
  ENSG00000203667_3 (sequence is synthesized)
gaaggtacccacctcgatcctgaaagaaaacacaacggcagcagcagcaattgaacaatcttgagcatagaagtcaatgtaaacgaagttaagatcaaccacataaaacatttcatgtgc

SEQ ID NO: 737122 - DNA, 120 bp, Artificial Sequence
  ENSG00000203667_4 (sequence is synthesized)
aataagctctcaatcaagtaaataaagtttaagttgtagtcatttttttcccacacttgtgtggaatgaaaacttgccagtttattctggccctgtgtctactgccaggatagcattctt

SEQ ID NO: 737123 - DNA, 120 bp, Artificial Sequence
  ENSG00000203667_5 (sequence is synthesized)
acgtgttacatatagtggacttgtcatccttaaaatgtgaacagaatttattggcagtgtggcaaagaattataaaacatagtgtttaatgtacttggagtttccttgtagtagtaagta

SEQ ID NO: 737124 - DNA, 120 bp, Artificial Sequence
  ENSG00000203667_6 (sequence is synthesized)
tagagtttgatgataagtaaacgtcccttaacaaaaacctcaaccttattactatcccattaaaaaacagcaaatacttactgagttcttgtaagagctaatgtcattgtaagatttaaa

SEQ ID NO: 737125 - DNA, 120 bp, Artificial Sequence
  ENSG00000203667_7 (sequence is synthesized)
actaagggcttttatcactttgcaaattattttttaaatgcattcatcatttgacagtgttctctcatttcttaaaatgcgagtcatcttccaaaagagttgtttttaactgccctaaac

SEQ ID NO: 737126 - DNA, 120 bp, Artificial Sequence
  ENSG00000203667_8 (sequence is synthesized)
atttttggggaagtatgcagggtttaaatttttaagtataattagttctgaattaaaatatgcacatggaacttgtctggcagactgatgcaatagtaaaacaactgcagaattactatt

SEQ ID NO: 737127 - DNA, 120 bp, Artificial Sequence
  ENSG00000203667_9 (sequence is synthesized)
tttgaaagtcaatcagctgctcccattaaaatattatttaaaatacaatacccacagcatctaactaaatcctcaggatttattctccgggagaaattatccctttctaggaaaatgaag

SEQ ID NO: 737128 - DNA, 120 bp, Artificial Sequence
  ENSG00000203667_10 (sequence is synthesized)
ttatttctggttttaattcatacaatactttaagaaaatctgttaaatataacaaaacacaagctagatgcttaagaaatgcttaaagaaatattggggcgaaggtaacagcagtcaaca

SEQ ID NO: 737129 - DNA, 120 bp, Artificial Sequence
  ENSG00000203667_11 (sequence is synthesized)
ggattgtggccattactggtcctattattttgatgtaccatggaaggcacagaaatcgagcaaggaagaaaatattagttattttgatctacatctttttctaaagaaaagtggagcttg

SEQ ID NO: 737130 - DNA, 120 bp, Artificial Sequence
  ENSG00000203667_12 (sequence is synthesized)
cctccagttcaattcacaagagcattttccctcccatgcccaccttttcttgtggctgtcgctaggaaggatgcagaggctgtgtggtttaccaaatgccttaacttagcagtgaatgac

SEQ ID NO: 737131 - DNA, 120 bp, Artificial Sequence
  ENSG00000203667_13 (sequence is synthesized)
aactgtcaaacacatgttgagggaaaatttttactgattcacaaaaaggaagacagtttgcccactcttagtggcacaaatcaaagctgcatgcactacattatccaaattagtcgtaac

SEQ ID NO: 737132 - DNA, 75 bp, Artificial Sequence
  ENSG00000203667_14 (sequence is synthesized)
cataggatgttcaaccatgttttcagaggccgcactgcatgaatgcgggaaaatgttgatgatcactaatcaata

SEQ ID NO: 737133 - DNA, 120 bp, Artificial Sequence
  ENSG00000203667_15 (sequence is synthesized)
tgcatgaatgcgggaaaatgttgatgatcactaatcaataatctgatatttaacaaaatatggacaggccacttatgctcagttttaccttagttattccttggtatccacaggcccaag

SEQ ID NO: 737134 - DNA, 87 bp, Artificial Sequence
  ENSG00000203667_16 (sequence is synthesized)
agttttaccttagttattccttggtatccacaggcccaagtccctttaaataaaataccctcatatttccatataatctacatacat

SEQ ID NO: 737135 - DNA, 120 bp, Artificial Sequence
  ENSG00000203667_17 (sequence is synthesized)
gggcttctgcttccgcgaccccggcggtgcagggcgggtggagtcgcggagtagtcctcatggccgccccgccggagcccggtgagcccgaggagaggaaggtagaattagaagatcatg

SEQ ID NO: 737136 - DNA, 120 bp, Artificial Sequence
  ENSG00000203667_18 (sequence is synthesized)
tgacaactggaaagctccccaccaaaccctccagccttggttacttcttaatgatgtggtttggcacaatgaaaatgtcataggctttgtggtgaaactgacttctgcctccactcctgc

SEQ ID NO: 737137 - DNA, 120 bp, Artificial Sequence
  ENSG00000203667_19 (sequence is synthesized)
caacacttattattagcctcttaagtccccgagcctgtttcagaggtaatctcacacaaaggctagagaattaaaaaacatgtagagagcctggcactaatacctacctcccccaccagc

SEQ ID NO: 737138 - DNA, 120 bp, Artificial Sequence
  ENSG00000203667_20 (sequence is synthesized)
agctcttaattatgagatcaaccactattattttagaccagagttttgttggggattgggtttgtttcagaaggcactattttaaataagatgtgtagcttctatttagatatttgcctt

SEQ ID NO: 737139 - DNA, 120 bp, Artificial Sequence
  ENSG00000203667_21 (sequence is synthesized)
taaagtcagctgagctattttcctattgtttgcaaatttacttttatttaaaaaaataaaatttcctaaagcagtgtttccccaatatgacagtcatcagaaaaaaccacctagagtttt

SEQ ID NO: 737140 - DNA, 120 bp, Artificial Sequence
  ENSG00000203667_22 (sequence is synthesized)
ctaaacatagattccagtgattgtaaatcagaatctgagagtgggactagaaaatacttaattctatcctgtggtacaagctggtctcacacttgcatctttgcacctaagactagatca

SEQ ID NO: 737141 - DNA, 120 bp, Artificial Sequence
  ENSG00000203667_23 (sequence is synthesized)
aactggtactaatcctctggccccagcatcccatccttggggaaatagtctagtttagaggtagtcctggactggagcgctaagtccagcattcctcacctgcataacactacccacatg

SEQ ID NO: 737142 - DNA, 120 bp, Artificial Sequence
  ENSG00000203667_24 (sequence is synthesized)
atcatatgtcccctgggctctcaagctgataggaaaaagtcgtcttgctaaatgaaatcccccaacctcttggtaatgtgaagaactgtactgcaaagctttgaagcaatcctatgttag

SEQ ID NO: 737143 - DNA, 120 bp, Artificial Sequence
  ENSG00000203667_25 (sequence is synthesized)
gcatgcgggtgggaacggggccagacagagggaaaaaatggaatagaatgatccgagagtaaataattcttgctttattatgaaccaagtcacattttgtctcttccaacagatgcttga

SEQ ID NO: 737144 - DNA, 120 bp, Artificial Sequence
  ENSG00000203667_26 (sequence is synthesized)
gccaaaaaagcaaacataggcagaaatacaattgagaatatcttcatgtttcaacctttaatctgacttgccttttactatcctttccccatttcttctaatctcttttgccttacaata

SEQ ID NO: 737145 - DNA, 120 bp, Artificial Sequence
  ENSG00000203667_27 (sequence is synthesized)
tattaccttctaggtatcacctcatcctatagaatcccttctagtttaatgtcctgccccaaacaatactaacccattgaagataactatgaaacctttaaatggacagtggttcctttt

SEQ ID NO: 737146 - DNA, 120 bp, Artificial Sequence
  ENSG00000203667_28 (sequence is synthesized)
cagtgtgactgttacttttaaatgtctgtcttgccgccctagagtgacagacatcccagttaaacatattaggaataagaaatacataaatccaatgaagactgtagaaaaagaatttta

SEQ ID NO: 737147 - DNA, 120 bp, Artificial Sequence
  ENSG00000203667_29 (sequence is synthesized)
gcacttgaaggaacttcagtcatttaacccaacccattcatgttatagattgagaccatagaaataaaagtagcctataggatacaaaagttagcggcagatctgagataaaaatccagc

SEQ ID NO: 737148 - DNA, 120 bp, Artificial Sequence
  ENSG00000203667_30 (sequence is synthesized)
tctttggatccccgcgtttttcaccacacttagctgtcgttcccatgtattacgaacaaagaatcaaatataatcaagtgcagcctcacttcacaggcaagaaaacagactagagtttaa

SEQ ID NO: 737149 - DNA, 120 bp, Artificial Sequence
  ENSG00000203667_31 (sequence is synthesized)
tatattgcccatgtttatcttaaggtgaaacatttactcttacaaccacagttgatgttaacctagttaataaaatatgaaaggtaattactaggggaattttaaacggcactacataag

SEQ ID NO: 737150 - DNA, 120 bp, Artificial Sequence
  ENSG00000203667_32 (sequence is synthesized)
caaacatgactcaaattactttttccatttctgcttcccaaattattggagttactgaagcaagctatgctgctttcaattccaatgataggcatattcccaaataaactcatttaaaga

SEQ ID NO: 737151 - DNA, 120 bp, Artificial Sequence
  ENSG00000203667_33 (sequence is synthesized)
gctcataaaatgaattatcctatttccaagtcagttgattagcaaattaagatacagctccaagttaccctactgcttaagggttttccggtccaatttgtaaggttttcggatttaaag

SEQ ID NO: 737152 - DNA, 120 bp, Artificial Sequence
  ENSG00000203667_34 (sequence is synthesized)
attcagactgcataccaaaggtggacaaagacaacgcaagctgatttaggttgtcacgtggcacatactctagtttaaaccctcaactacaagaaaagaaatggtgtattgtcatttttg

SEQ ID NO: 737153 - DNA, 120 bp, Artificial Sequence
  ENSG00000203667_35 (sequence is synthesized)
ggacggggaggggcgcggccagccgggcttctgcttccgcgaccccggcggtgcagggcgggtggagtcgcggagtagtcctcatggccgccccgccggagcccggtgagcccgaggaga

SEQ ID NO: 737154 - DNA, 80 bp, Artificial Sequence
  ENSG00000203668_0 (sequence is synthesized)
ccgcgggcgctgaggggccggcgccggcggggacactgagccccgcgcccctcttcagccccggcacctacgagcgcctg

SEQ ID NO: 737155 - DNA, 120 bp, Artificial Sequence
  ENSG00000203668_1 (sequence is synthesized)
tacgagcgcctggcgctgctgctgggctccattgggctgctgggcgtcggcaacaacctgctggtgctcgtcctctactacaagttccagcggctccgcactcccactcacctcctcctg

SEQ ID NO: 737156 - DNA, 120 bp, Artificial Sequence
  ENSG00000203668_2 (sequence is synthesized)
gtcaacatcagcctcagcgacctgctggtgtccctcttcggggtcacctttaccttcgtgtcctgcctgaggaacggctgggtgtgggacaccgtgggctgcgtgtgggacgggtttagc

SEQ ID NO: 737157 - DNA, 120 bp, Artificial Sequence
  ENSG00000203668_3 (sequence is synthesized)
ggcagcctcttcgagaagagttccagtcacaaatgcatatatgatgcattttgacatttactgctaagatgaaatgcagaaatgaaaccacacatccattttagtattctcagatgtgat

SEQ ID NO: 737158 - DNA, 120 bp, Artificial Sequence
  ENSG00000203668_4 (sequence is synthesized)
tagatgtacttgctcatgtttttatgctactgacttataagaaaaaaaatattttaaaagggtaaccgttaaacagctaggacctgcaacttcagtgcttctgggataactggaacatca

SEQ ID NO: 737159 - DNA, 120 bp, Artificial Sequence
  ENSG00000203668_5 (sequence is synthesized)
gaaggacagattttattacagcataatcacacctcatttctttcatcagcagttgtcaccagacgctgttacttcctaaaatggcggacaatcttcccacagagtttgatgtggttataa

SEQ ID NO: 737160 - DNA, 120 bp, Artificial Sequence
  ENSG00000203668_6 (sequence is synthesized)
tagggacaggtttgcccgaatccatccttgcagctgcatgttcaagaagtggtcagagggttctgcatattgattcaagaagctactatggaggaaactgggctagtttcagcttttcag

SEQ ID NO: 737161 - DNA, 120 bp, Artificial Sequence
  ENSG00000203668_7 (sequence is synthesized)
gattgctatcctggttgaaggagtatcagcaaaacaatgacattggggaagaaagtactgttgtatggcaggacctgatccatgaaacagaagaagccatcactcttcgcaagaaggatg

SEQ ID NO: 737162 - DNA, 120 bp, Artificial Sequence
  ENSG00000203668_8 (sequence is synthesized)
aaactattcaacacacagaagctttttgctacgccagtcaggatatggaggacaacgttgaagagattggtgctctgcagaaaaatccttctttgggggtgtctaataccttcactgaag

SEQ ID NO: 737163 - DNA, 120 bp, Artificial Sequence
  ENSG00000203668_9 (sequence is synthesized)
ttctggattctgcattacctgaagaaagccagttatcgtattttaatagcgacgaaatgcctgcaaaacacactcagaaaagtgatacagagatttcactagaagtaactgatgtagagg

SEQ ID NO: 737164 - DNA, 120 bp, Artificial Sequence
  ENSG00000203668_10 (sequence is synthesized)
aatcagtggagaaggaaaagtattgtggagataaaacttgtatgcacacagtttcagataaagatggagataaagatgaaagcaaatctacagtagaagataaggccgatgaaccaatta

SEQ ID NO: 737165 - DNA, 120 bp, Artificial Sequence
  ENSG00000203668_11 (sequence is synthesized)
gaaataggattacttactctcaaatagttaaagaaggcaggaggtttaatattgatttggtgtcaaaactgctgtattctcaaggattgctaattgatcttttaatcaaatcagatgtta

SEQ ID NO: 737166 - DNA, 120 bp, Artificial Sequence
  ENSG00000203668_12 (sequence is synthesized)
gtcgttatgtagaatttaaaaatgtcactaggattcttgcatttcgggaaggaaaggtagaacaagttccttgttccagagcagatgtctttaatagcaaggaactcaccatggttgaaa

SEQ ID NO: 737167 - DNA, 120 bp, Artificial Sequence
  ENSG00000203668_13 (sequence is synthesized)
agaggatgctaatgaaatttctcacattttgtttagagtatgaacaacatcctgatgaataccaagctttcaggcagtgttcattttcagaatacttaaaaactaaaaaactaactccca

SEQ ID NO: 737168 - DNA, 120 bp, Artificial Sequence
  ENSG00000203668_14 (sequence is synthesized)
accttcaacattttgtactgcactcaattgcaatgacatcagaatcatcttgcactacaatagatggtcttaacgcaactaaaaacttccttcagtgtctcggacggtttggcaacaccc

SEQ ID NO: 737169 - DNA, 120 bp, Artificial Sequence
  ENSG00000203668_15 (sequence is synthesized)
cctttttatttcccttgtatggccaaggagaaattccccagggtttctgtaggatgtgtgcagtttttggtggaatctattgtcttcgtcataaagtacaatgctttgtagtcgacaaag

SEQ ID NO: 737170 - DNA, 120 bp, Artificial Sequence
  ENSG00000203668_16 (sequence is synthesized)
aatctggacgatgtaaagcaattatagatcactttggtcaaagaataaatgctaaatattttattgtggaagacagttacctttctgaggaaacatgctcaaatgtgcagtataagcaga

SEQ ID NO: 737171 - DNA, 120 bp, Artificial Sequence
  ENSG00000203668_17 (sequence is synthesized)
tctctagggcagtactcattacagatcagtctatactaaagacagatttagatcagcagacttccattctgatagttcctccagcagagccaggagcttgtgctgtacgggtcacagaat

SEQ ID NO: 737172 - DNA, 120 bp, Artificial Sequence
  ENSG00000203668_18 (sequence is synthesized)
tatgttcttcaaccatgacatgcatgaaggacacctatctggtacatttgacatgttcatcttctaaaacagcaagagaagacttagaatcagtggtgaagaaattattcactccgtata

SEQ ID NO: 737173 - DNA, 120 bp, Artificial Sequence
  ENSG00000203668_19 (sequence is synthesized)
ctgaaacagaaataaacgaggaagaacttacaaagccaagactcttgtgggctctttattttaatatgagagattcctcgggaatcagcagaagctcgtataatggcttgccttccaatg

SEQ ID NO: 737174 - DNA, 120 bp, Artificial Sequence
  ENSG00000203668_20 (sequence is synthesized)
tttatgtctgctctgggcctgactgtggcctgggaaatgagcatgctgtcaagcaagctgaaacacttttccaggagatctttccaactgaagaattctgccctccacctccaaatccag

SEQ ID NO: 737175 - DNA, 120 bp, Artificial Sequence
  ENSG00000203668_21 (sequence is synthesized)
aagacattatctttgatggtgatgataagcagccagaggctcctggaaccaataatgtagtaatggccaaactagaatcctctgaggaaagcaaaaacctagaaagcccagagaagcacc

SEQ ID NO: 737176 - DNA, 120 bp, Artificial Sequence
  ENSG00000203668_22 (sequence is synthesized)
ttcaaaattagaaaagagcaatctcgaaatgctgttttggacctccttcatggcatcagaattttctcatttaaaggacagtttcccatatgagtaattagaagtggttatatatgatga

SEQ ID NO: 737177 - DNA, 120 bp, Artificial Sequence
  ENSG00000203668_23 (sequence is synthesized)
atgctatgcagatgttgtctttaactctcagacattcagcattgaatatctttgttaacctatcaatgagtgatttattgattattgaacattttgtttagaatgggctatatgacccag

SEQ ID NO: 737178 - DNA, 120 bp, Artificial Sequence
  ENSG00000203668_24 (sequence is synthesized)
aatcttaaaacagagttagctttattttagtattgggtatatatgtaagggttccatattagcaactcagcttaaaggtaatgtatttgctaatgatcttcagattttatctttgtctac

SEQ ID NO: 737179 - DNA, 120 bp, Artificial Sequence
  ENSG00000203668_25 (sequence is synthesized)
agaacaattagtaatacccaagtaatattttaattacttttgcagctgttacagttgctgcggcctgttcgaatagtgaaacatacacaaatggtaaattatgtggatcttttgcatata

SEQ ID NO: 737180 - DNA, 120 bp, Artificial Sequence
  ENSG00000203668_26 (sequence is synthesized)
atataaatgtatagacatggtggtaggaatagcaactaatacaaatgccaatatgataataaaatacatttgtctataatcgtttaaagattagctttgcatgatcctttatgcactgtg

SEQ ID NO: 737181 - DNA, 120 bp, Artificial Sequence
  ENSG00000203668_27 (sequence is synthesized)
aaggtctgaagtttataatactcacttgacccttgtaactgatgaggcaatgatgccaccacagtattctaatttacaaaaagaattggagttcaattagtggttgtaaagctcattttg

SEQ ID NO: 737182 - DNA, 120 bp, Artificial Sequence
  ENSG00000203668_28 (sequence is synthesized)
gggaggttgattgcaaaggaaatttgaaagataagatttattcttatttaatacttcagaaaatttctgcagagccctgccctggcacttaaaatagcttccaataagtaacttagacca

SEQ ID NO: 737183 - DNA, 120 bp, Artificial Sequence
  ENSG00000203668_29 (sequence is synthesized)
aaaggaaaaatgaagtgccccaggagaagatacttcagaagggctgttctgaaattcctaaggaggaattcttaggaattcctaaggagaaacagagtgaggcctttttaacctgagatt

SEQ ID NO: 737184 - DNA, 120 bp, Artificial Sequence
  ENSG00000203668_30 (sequence is synthesized)
acagatacttataaaaccctctataaatagattacccaaggtttttcagtgagaatgaaacataccaccttgttggctctaccactttaattaatatcactataacataactgataggaa

SEQ ID NO: 737185 - DNA, 120 bp, Artificial Sequence
  ENSG00000203668_31 (sequence is synthesized)
tgtgtcccacttaacaaattgtgaagtaacaattttctgtaatctctcttgcctcttagctgttatccagagtatagaaactttttttctcccagagccacccaacgtcataaaactggt

SEQ ID NO: 737186 - DNA, 120 bp, Artificial Sequence
  ENSG00000203668_32 (sequence is synthesized)
agtactctaatggtgaaaacctgtggagctgtcagaagacatgaacttgcttttcctctagtccagtttccattcttcagtcagagtatgatgatccctgtgacagtttttgctctgaaa

SEQ ID NO: 737187 - DNA, 120 bp, Artificial Sequence
  ENSG00000203668_33 (sequence is synthesized)
tagtatttatcatgtgtttggtacctagtattatgctttctcatgacagtttctcaacaatcctgtgaggcaaattcgcatgtaccctctgtattagtgtgttctcatgctgttgataaa

SEQ ID NO: 737188 - DNA, 71 bp, Artificial Sequence
  ENSG00000203668_34 (sequence is synthesized)
tgtaccctctgtattagtgtgttctcatgctgttgataaagacacacctgagatggtaatttgtaaagaaa

SEQ ID NO: 737189 - DNA, 120 bp, Artificial Sequence
  ENSG00000203668_35 (sequence is synthesized)
tggaaggtgaaaggcacgtcttacatggcggtggacaagagagaatgagaactaagtgaaaagggaaacccttttaaaaccatcagatatcgtgagacttatttactaccatgagaacag

SEQ ID NO: 737190 - DNA, 75 bp, Artificial Sequence
  ENSG00000203668_36 (sequence is synthesized)
ccttcaaagaagaaataagagaattattagtaatttgctcagaatctggtatgtggaagagccaacatggggacc

SEQ ID NO: 737191 - DNA, 120 bp, Artificial Sequence
  ENSG00000203668_37 (sequence is synthesized)
tgctcagaatctggtatgtggaagagccaacatggggacccagccttttgtgattctaaaacctttgatctttctactaacattcactgttagagagtgtaggcgctgcaggagaaagag

SEQ ID NO: 737192 - DNA, 120 bp, Artificial Sequence
  ENSG00000203668_38 (sequence is synthesized)
aaagtgcccacgaaaattagtctagcattgccgggggtaaaaagcacacactggtcctgcagcttattgaatcagagaaatgtgaagataagatgaactaaacaaacatattttagagca

SEQ ID NO: 737193 - DNA, 120 bp, Artificial Sequence
  ENSG00000203668_39 (sequence is synthesized)
tggatctcgaagcagaatttggctaaattttaacaaaatgttcttcagtaacacatctcatgatctgaagattgtgttacaaaaaatattatcaggccaaaatttgttcggaatacacta

SEQ ID NO: 737194 - DNA, 120 bp, Artificial Sequence
  ENSG00000203668_40 (sequence is synthesized)
atttttgctcctctatatgtgaggaaaatgagactagacagatttaagtaattgacaacttacttaaagtagcaaagtcatggattgtattgacttttaaaaatatagtaaaagtcatat

SEQ ID NO: 737195 - DNA, 120 bp, Artificial Sequence
  ENSG00000203668_41 (sequence is synthesized)
ttaaactttatcctaaagtttaaatctaacagaacaactgaaatacttgaaatagacctataaaatagtaattaaaatgagaaatacataagatgataaataaaatgaaggtgaaggtat

SEQ ID NO: 737196 - DNA, 120 bp, Artificial Sequence
  ENSG00000203668_42 (sequence is synthesized)
tccagatctaccgaaaagattttcagtatcacagattattcataagaaattgagaaaaggaacaatcagaagttgcaaaagatggtatagccgaatataatggaaataggaaaaattagt

SEQ ID NO: 737197 - DNA, 120 bp, Artificial Sequence
  ENSG00000203668_43 (sequence is synthesized)
cgaaaataaaggttgatttagaaatgaagaaaatgaatatatttcttaatacaaaataagtgggaaatgagaagttataccaataaaaagcatttaaaaatttaggggatattgtaaccc

SEQ ID NO: 737198 - DNA, 120 bp, Artificial Sequence
  ENSG00000203668_44 (sequence is synthesized)
agtataattttctgacaggttggactttgaccctaatggacttactggtgaactttttcaaatgtttaaataatgtctatccatgtatcatgaaggacagtatgcttcaaattgtctttt

SEQ ID NO: 737199 - DNA, 120 bp, Artificial Sequence
  ENSG00000203668_45 (sequence is synthesized)
gaggcagacatgttctcagtactaaaagacatttttagaaggattttattctcaacagatgcaaaatgcaaaataaaatattggcaaacaatacagcaacaaataatttactatcactca

SEQ ID NO: 737200 - DNA, 120 bp, Artificial Sequence
  ENSG00000203668_46 (sequence is synthesized)
ggattataaggctggtgttaagcagaacagccattaaatcagcatcaaaagaacaaatagtaaaatccaaagtattaattacagataacttttcaaaaattcatcattcacccttgattt

SEQ ID NO: 737201 - DNA, 120 bp, Artificial Sequence
  ENSG00000203668_47 (sequence is synthesized)
aattatttctctggcaatgatttaatagacttctcggagtctgttaagtacttaaaccaagaactaccattattcctactgggaaaacataaacatttctcaagtggaaagtaaacagtg

SEQ ID NO: 737202 - DNA, 120 bp, Artificial Sequence
  ENSG00000203668_48 (sequence is synthesized)
ttggcactatttttatatatggttaaagagacctgtcattgcaataaaagccagcattcacaaaatgaggaagataaggaaagtagcataaatattttctattaacatggctttacaact

SEQ ID NO: 737203 - DNA, 120 bp, Artificial Sequence
  ENSG00000203668_49 (sequence is synthesized)
gctaaaacttatagtataaaaatgtactaacaaagactaattcaagaagttgcaggatacacaatttttaaaaatctcatttctacatcttagcagtgacaaactgcaatttaaaaagtg

SEQ ID NO: 737204 - DNA, 120 bp, Artificial Sequence
  ENSG00000203668_50 (sequence is synthesized)
tgtttggttattaatatatatgagacttttaaagaaagttatataactacatagagataaattaagaaagatgcctaaatagaagcaagtttaaagagctatatttttaaacatgaacaa

SEQ ID NO: 737205 - DNA, 120 bp, Artificial Sequence
  ENSG00000203668_51 (sequence is synthesized)
actcccatgggagccatgccagtgtagtggaaaagtagtacatggggagatggggagtttttttgaaaaccagaattacagttctcatttcactacttaccagttgtatactcttgggaa

SEQ ID NO: 737206 - DNA, 120 bp, Artificial Sequence
  ENSG00000203668_52 (sequence is synthesized)
agtcactcctagtatctatttcaccatctacagaagagaaatacttcacagaattattgtggggattaagttagataatgtgttttaaaatataaagctacatccaaagaaatgccaata

SEQ ID NO: 737207 - DNA, 120 bp, Artificial Sequence
  ENSG00000203668_53 (sequence is synthesized)
tgtgacattagtatgaaatttactacagttccatttaacattccaactggttgctgtgtggaatatggcataattgtaataaattatttaggaaagcaagcaaagatgtaagttttttta

SEQ ID NO: 737208 - DNA, 120 bp, Artificial Sequence
  ENSG00000203668_54 (sequence is synthesized)
atttagggggaaaaaatgggagccttgctctccaaatccttaaaacatgctattaagcaacctttctgaatattctgtggtgccaagtagaaagtttaactgaaattaataagccaatgg

SEQ ID NO: 737209 - DNA, 120 bp, Artificial Sequence
  ENSG00000203668_55 (sequence is synthesized)
aaagaaagaaatattaataactgctggtggaaagactagctagatgtcagtgtggaaagattagatccactttacatgtgatattccaaatgaattaaaatgttaagtataaaaagaaaa

SEQ ID NO: 737210 - DNA, 120 bp, Artificial Sequence
  ENSG00000203668_56 (sequence is synthesized)
atactacaagtctcacaccaatagtggtataaaggaacttcatggcaattggcaaggtagatcaactaagagaaaaagttttaaatgtgtagtaaataggaaaaagacaaaacaagatgg

SEQ ID NO: 737211 - DNA, 120 bp, Artificial Sequence
  ENSG00000203668_57 (sequence is synthesized)
aatttaaaagaagctatttgcattacacatggatgcactcagtttttgtaaaactatatgcatatccataagggtttgtactcttaggcaaatttataaagcgatcgtgtataaatgata

SEQ ID NO: 737212 - DNA, 120 bp, Artificial Sequence
  ENSG00000203668_58 (sequence is synthesized)
taaaaaatcaatttgaatggtattcaaatttcctaatattaaaaatgcaactttgacttagttcatgctattgtattagcaaaactgttttaattgcatgtgtccttatagcagcagcat

SEQ ID NO: 737213 - DNA, 120 bp, Artificial Sequence
  ENSG00000203668_59 (sequence is synthesized)
tgtgtattagtagccttttaagagaactgtgtagaagactataaaaagggctttataactgatcttttgacatactcactttgagtggcatatgcccaggaaaatatttaaaagaaagaa

SEQ ID NO: 737214 - DNA, 120 bp, Artificial Sequence
  ENSG00000203668_60 (sequence is synthesized)
aagctatttgtacaaagttttctagcagttccactcagataactttaagggggaaaaaagcccaacgattggaaatggttaagtaaattttggtgtattgctagtgctatcacagaatgt

SEQ ID NO: 737215 - DNA, 120 bp, Artificial Sequence
  ENSG00000203668_61 (sequence is synthesized)
tatatagccattcaataatattgatatatgtcaaattgtatgcaaaaaagtgagattcaaaaatgttaataagaacataaattgtgtttactgatacatgtgaaaatttaggtctacatt

SEQ ID NO: 737216 - DNA, 120 bp, Artificial Sequence
  ENSG00000203668_62 (sequence is synthesized)
gaaaagaatcagaagataacatgtaattcagtttaacattaggggttctttatttttcttctgttaaatattgatgtatgcaataaaaaataaaagattaattggtaaagtggtttactg

SEQ ID NO: 737217 - DNA, 120 bp, Artificial Sequence
  ENSG00000203685_0 (sequence is synthesized)
gcgcacggagcacggcggccgcctgagctcggcgcggagcccggagcccgcagccgacagtctcctgctcccgtacgctgggcgccagctccggccgtgctgcccggctgcctgagagcg

SEQ ID NO: 737218 - DNA, 120 bp, Artificial Sequence
  ENSG00000203685_1 (sequence is synthesized)
catggagccctcgcacaaagacgccgagacggcggcggcggcggcggcggtggcggcggcggacccccggggggcgtcctcgtccagcggggtggtggtgcaggtccgcgagaagaaggg

SEQ ID NO: 737219 - DNA, 120 bp, Artificial Sequence
  ENSG00000203685_2 (sequence is synthesized)
caggtccgcgagaagaagggccccctgcgcgccgccatcccctacatgcccttccccgtggccgtcatctgcctcttcctcaacactttcgtgccgggactggggacattcgtctcggcc

SEQ ID NO: 737220 - DNA, 120 bp, Artificial Sequence
  ENSG00000203685_3 (sequence is synthesized)
ttcactgtgctgtgcggggcccgcaccgacctcccggacaggcatgtgtgctgcgtcttctggctgaacattgcagcagccctcatccaaatcctcactgccatcgtcatggtgggctgg

SEQ ID NO: 737221 - DNA, 120 bp, Artificial Sequence
  ENSG00000203685_4 (sequence is synthesized)
atcatgagcatcttctggggcatggacatggtcatccttgccatttcccaaggctacaaggagcagggcatcccacagcagctgtgagcccacgggagccgctggggagatccagggggg

SEQ ID NO: 737222 - DNA, 120 bp, Artificial Sequence
  ENSG00000203685_5 (sequence is synthesized)
ccctgtgagggctgcaccaggcagctttgggcacaaggacctttacatgttcttttctgccattttctggactgggggtggaaagggggtatttttaaaaatattatttattttgaaaac

SEQ ID NO: 737223 - DNA, 120 bp, Artificial Sequence
  ENSG00000203685_6 (sequence is synthesized)
gcatctgcttttctcagcaggttgtgagggctgccagcccctcctgctctggaaagcactgtgggcgcaggcaccagagcatcagagagtggggtggagatgagaacgcccacagagagg

SEQ ID NO: 737224 - DNA, 120 bp, Artificial Sequence
  ENSG00000203685_7 (sequence is synthesized)
ctgggatgctccggcaggctccaactggccttgctgtacccactgcccaccgcaaaggcacgccacgtctgctgggccgggccacaccgggccctgtctgggtgagcaggggctcaccaa

SEQ ID NO: 737225 - DNA, 120 bp, Artificial Sequence
  ENSG00000203685_8 (sequence is synthesized)
ggggacaggactgtggtagacccgtcctgtgggaccccacctgcctcaaaatctggtgccccgagtgtttactgtgtggtctcctgggggcagcaccagggtgtgggtgaggatggccag

SEQ ID NO: 737226 - DNA, 120 bp, Artificial Sequence
  ENSG00000203685_9 (sequence is synthesized)
gctccaccctagcgtggaaaggcccactgtgcccacagctggcctgaggcctcggggagaagaccagtcccacaggcgtctcctgggcctgcctccctgaccgcaccccccgcctcctcg

SEQ ID NO: 737227 - DNA, 120 bp, Artificial Sequence
  ENSG00000203685_10 (sequence is synthesized)
cagctgaaatctgagggctgggtgtgtcgtgacctgtgttttcctgggaaggagaggagtagctccttccctggggtgaaactgccagatgtttatacacaaagttattagactgaagca

SEQ ID NO: 737228 - DNA, 120 bp, Artificial Sequence
  ENSG00000203685_11 (sequence is synthesized)
ggagtgggcagactagcaggctttcacccaatacttaacagcatttctggcccacattcctttttctgaagtcattggggccagatgtgtctccgaattgagaaattttagatttgagaa

SEQ ID NO: 737229 - DNA, 120 bp, Artificial Sequence
  ENSG00000203685_12 (sequence is synthesized)
agacaatgcgatccatttatcgtacactttctaacttcccggcagagtgtggaacatctcgcctaccatcaggcacgtgaatatttctgcagagaaacatgtgactagtcccattaactg

SEQ ID NO: 737230 - DNA, 120 bp, Artificial Sequence
  ENSG00000203685_13 (sequence is synthesized)
ggagctatacaaactgtaaatagcctcacctcagttcagtctaattttgccactaagtaacttagggaaaaacttaccatttgagagcttttagggtttcagaattgcaagaacaattgt

SEQ ID NO: 737231 - DNA, 120 bp, Artificial Sequence
  ENSG00000203685_14 (sequence is synthesized)
atggggttgtggaccttgatctgaaaatcctgcttgcaaacagatgtgttagagggtgaaattgtcggcattacacaaggactccttcagttgccaaaagaccatgggcctctttaagga

SEQ ID NO: 737232 - DNA, 120 bp, Artificial Sequence
  ENSG00000203685_15 (sequence is synthesized)
gcccctctgtaagtgattgggacagggctagatccctaatgggggctaggggtggggagaatctagcagaagttgtccaggatactgtggatcaagtatcaatctgaaattaagagaaat

SEQ ID NO: 737233 - DNA, 120 bp, Artificial Sequence
  ENSG00000203685_16 (sequence is synthesized)
tagatactaagaggatggacatttacatgtctgtttcctttcctttcattttcattctaacataggaaatgctaacagatggggctggcccaaagtcaagcttctgactccacttgacac

SEQ ID NO: 737234 - DNA, 120 bp, Artificial Sequence
  ENSG00000203685_17 (sequence is synthesized)
agtgccattgggcatgtccctctctgaagggcttgtttgtctatcagagactgtcagaactccatgagggcaggagaagggattttgcaggatgaaagtgcttgggaagtagtggccacc

SEQ ID NO: 737235 - DNA, 120 bp, Artificial Sequence
  ENSG00000203685_18 (sequence is synthesized)
gttctgggggtttcagcccacctaccccatccaccgggctttctaatcacagtcctgcctgagaagcgggccctgctgcccaccccttatcatggatcccttagctactgtccgtcttcc

SEQ ID NO: 737236 - DNA, 120 bp, Artificial Sequence
  ENSG00000203685_19 (sequence is synthesized)
attgctgcctggggctgggctgccgtttttgaacacctggcagtgtctttgtcgcgtcctgtcctctcttcttacagaccccaacccaggcctttgccttcttctctcctgtttggaagc

SEQ ID NO: 737237 - DNA, 120 bp, Artificial Sequence
  ENSG00000203685_20 (sequence is synthesized)
ctctgtatcttcaaggtgtgggaacagatttggttttctctaaaaagctagaaccttctgctgtgtgcagcaggcatcctccaggctggtgctggctgctctcgaggaagctgcgtcaga

SEQ ID NO: 737238 - DNA, 120 bp, Artificial Sequence
  ENSG00000203685_21 (sequence is synthesized)
gtggagctgcccctctactcagataaaatagcttcagctgcaggaagccgccccctcccatgcccaccagcccacagcccttcaccccacacagcccccagagtttgcccgacaccccct

SEQ ID NO: 737239 - DNA, 120 bp, Artificial Sequence
  ENSG00000203685_22 (sequence is synthesized)
gagtgatgacaggtctcaggagggggccgcccccacaaatgggaggcggaagcttattttccccgcttgggctgggggcggctgctgagggggtgaagaagagatagcaatttatgtcgc

SEQ ID NO: 737240 - DNA, 120 bp, Artificial Sequence
  ENSG00000203685_23 (sequence is synthesized)
atgtttagtgacacaatccagatgcaggtgggactttcttgagtggcaggtgtcaccctgggtcccgtgtgggatggtttaatacaggggtttgtgtgtttgtgtgtgtggagggccact

SEQ ID NO: 737241 - DNA, 120 bp, Artificial Sequence
  ENSG00000203685_24 (sequence is synthesized)
gcgcccccagatcctcctctcccccgagggctgcgtctctaaacctgggaaaacatcagcctcaggaggaggcccctttccgggtaactgatgtgtgggagaagccaagaggcccctgcc

SEQ ID NO: 737242 - DNA, 120 bp, Artificial Sequence
  ENSG00000203685_25 (sequence is synthesized)
tgtctcctgaatgaggctgtgagggttgccatgtgggcgggaccggttcaaaatagcgcccccgcccctctaaattagaccgtggtctcagcatgatcatcttcagtagataagggacag

SEQ ID NO: 737243 - DNA, 120 bp, Artificial Sequence
  ENSG00000203685_26 (sequence is synthesized)
tggctgatttactccaaatagttccagctggccactcagaccagggccagagttaacttctcaaacaccagccagctgaaaattagggttctcgtgcaggcaagtgcatggttgacacac

SEQ ID NO: 737244 - DNA, 120 bp, Artificial Sequence
  ENSG00000203685_27 (sequence is synthesized)
agccctttggtgacaaagctgggctttgcctgcatagtgcagacaaggctgttggttcagaggctgcagggcacattccaggttggggccttttgtcggtcggaattcaataggacattc

SEQ ID NO: 737245 - DNA, 120 bp, Artificial Sequence
  ENSG00000203685_28 (sequence is synthesized)
cctggctgtgggtgtttagggcaggaattacaggcttgcagagaaagtcagaggcaatgagatgctcccagtaccaaactgtgacactgggatcagggtggtcattcccttgggtcagag

SEQ ID NO: 737246 - DNA, 120 bp, Artificial Sequence
  ENSG00000203685_29 (sequence is synthesized)
tgggaccctagagccagagtgagctgtgggtggcctgggtgtgtcctgtggacggcggagactgttgatttggatgttgagctctgagtcagtttcagaaccaaggatctcaggctgaga

SEQ ID NO: 737247 - DNA, 120 bp, Artificial Sequence
  ENSG00000203685_30 (sequence is synthesized)
aggccaggtccccatgggagcggcaggagtctgatggctctgctgccagagcctaccccagcctgccacgccgctgaccttcccatggtaaggaaggggcaggcagcatggttcccaccc

SEQ ID NO: 737248 - DNA, 120 bp, Artificial Sequence
  ENSG00000203685_31 (sequence is synthesized)
tcagctgccccagacccacacatccagccccaagagcagcctcacccaggcacagtgcagggcattttagctcctgggaggggagatgcctttgtgagtttcagatgtcagaggagaagc

SEQ ID NO: 737249 - DNA, 120 bp, Artificial Sequence
  ENSG00000203685_32 (sequence is synthesized)
ccccacagcctgtgccgtccacacactcactacagcactcccagaagaaggagcagaatcgcatgcagcccagagcaggtcctgtggaggggtcctcacccctcaggagtaatagggtga

SEQ ID NO: 737250 - DNA, 120 bp, Artificial Sequence
  ENSG00000203685_33 (sequence is synthesized)
ttatgtcacatgtttagtgatacaatcccacctgtgtctggattgtgtcactaaacatgcaacataaattaccatctcttctccatcccctcagcagccgcccccaccccaagctgggaa

SEQ ID NO: 737251 - DNA, 120 bp, Artificial Sequence
  ENSG00000203685_34 (sequence is synthesized)
aataagcttctccctcccatatgtgggggcggccccctcctgagacctgtcatcacttagggggagttgggcaaaacctcctaggaaggtcctggacgcctccaccctgccccacaaggc

SEQ ID NO: 737252 - DNA, 120 bp, Artificial Sequence
  ENSG00000203685_35 (sequence is synthesized)
tccgtactcccacctgcctgggcagccctcacacccatgctccctcctttaggcaggcccagaaaggtgccccttcctgagggtgttgggggatggcggcagagagacagctggtattag

SEQ ID NO: 737253 - DNA, 120 bp, Artificial Sequence
  ENSG00000203685_36 (sequence is synthesized)
gagcttccccatcctaatgtgcaggaccaagttgcccgctctgccagccaggggctccagccatgctggcacaggcatctcagaggtgtgagatgaactccgcctcatgcaggatgccca

SEQ ID NO: 737254 - DNA, 120 bp, Artificial Sequence
  ENSG00000203685_37 (sequence is synthesized)
gggctcggaagcagtaaggaggatgctacagaaaggaactgcagaaagaaaaaaagccacatggttaacttttcccctggagggcaaaggggtccggctctcaaaaagaaaagccaggca

SEQ ID NO: 737255 - DNA, 120 bp, Artificial Sequence
  ENSG00000203685_38 (sequence is synthesized)
cagatcccaacaccaagtgtaaggcagcacaaagtgggtctgaaaccccaggaccgggtcaaaggccttccgaaggcccgaggttcttgaggaggggaagctgatagggccctggtcttt

SEQ ID NO: 737256 - DNA, 120 bp, Artificial Sequence
  ENSG00000203685_39 (sequence is synthesized)
ctgcaccagcgtggctctttaaaatacaaaacacccacaaagccaaaaaccctgaaacatgttctttagctaaccccttccctgcccagatgcctgcaattctgagaattcacttcagtt

SEQ ID NO: 737257 - DNA, 120 bp, Artificial Sequence
  ENSG00000203685_40 (sequence is synthesized)
ttgccagatccaacccctaggcttgagggtggagagccaggcctcctcagggtcccttctaggctcccaggcccaccttaggctttaattgcattggctgtttcttatggtgttagtgaa

SEQ ID NO: 737258 - DNA, 120 bp, Artificial Sequence
  ENSG00000203685_41 (sequence is synthesized)
ttttgcaaagaaagccctgagcattgcataaatgcttgggggcgtgtcatttaaatggaagttctccaatagtggctgaaggcagagtttactgttatccctccctcttgctggctttgc

SEQ ID NO: 737259 - DNA, 120 bp, Artificial Sequence
  ENSG00000203685_42 (sequence is synthesized)
tggagggcttttatcagagagattggaggtgggagagcacttttaaagcacaccccaccccctgcacccgagcggcacctaagcttcccagagaccatgaccttgtatgtggctggaggc

SEQ ID NO: 737260 - DNA, 120 bp, Artificial Sequence
  ENSG00000203685_43 (sequence is synthesized)
ctcaggcttagggagcagcctgaagcctttgctgtcaaccctcccaggaaagaagccgggcctcaggctgaggaaaaacagagtttcctctccagagggctcaatgagcagccaggtagt

SEQ ID NO: 737261 - DNA, 120 bp, Artificial Sequence
  ENSG00000203685_44 (sequence is synthesized)
ggcctcgggcagtcctcaccagggggacacctccctgctttgcattaactcatcagcaagctcatcgagagctaacgtgggcccagcagtcctgtgcttggaaatgatgccgtcacctcc

SEQ ID NO: 737262 - DNA, 120 bp, Artificial Sequence
  ENSG00000203685_45 (sequence is synthesized)
acactcctgctgttccagcctctgcaggtgaagctgcaaggtgagcagaggcaggcgtggggacacactcttcaaggactgcactgccccttctccctcctgagagctctgtgcactggg

SEQ ID NO: 737263 - DNA, 120 bp, Artificial Sequence
  ENSG00000203685_46 (sequence is synthesized)
tttggggatgaggcgccagcctggtcaggggaggtgactgtggtccttctgaccagcttggatctttaaaataatcacaaaaaagctcagcctgagcaggtgggtgcaaggctcaggggc

SEQ ID NO: 737264 - DNA, 120 bp, Artificial Sequence
  ENSG00000203685_47 (sequence is synthesized)
ctgtgtttttcatcaatcagttttcttcctgcaagattcttagagctggatgttcacgggatcatggggcatggaggtggtcacgctcagacagtcatgcaccaccctcaatcccaggcc

SEQ ID NO: 737265 - DNA, 120 bp, Artificial Sequence
  ENSG00000203685_48 (sequence is synthesized)
ctgcagagataggaagaatcccaaccagagggattcttccccaaacgttcccttgtggcccaagagtgagttccggcctgagtgctgttatgactgccggcgtctctccgactgcctctc

SEQ ID NO: 737266 - DNA, 120 bp, Artificial Sequence
  ENSG00000203685_49 (sequence is synthesized)
gcctcagtttaaccatctataggttaggaacaaagaagggcttaggcagccatcgtttccccatttctgtcagagccaagggcttggaggcccagccccatccgggcaagggctgtccgc

SEQ ID NO: 737267 - DNA, 120 bp, Artificial Sequence
  ENSG00000203685_50 (sequence is synthesized)
tcctgcccaggcctcacctcctcgctgcagctggcaagattctttctagcagaacagaaacactggcccccaattccactctcccctcctgatgctaccgcagagggcagaaaggtgccc

SEQ ID NO: 737268 - DNA, 120 bp, Artificial Sequence
  ENSG00000203685_51 (sequence is synthesized)
tgtagcgtccaccatgtgtgtgtcctgagtttccagtgcaagtcatctggatttgcatttagctagggaaactcggccctcaaaccctctccctctctgcctgaatttgccaaaatgcca

SEQ ID NO: 737269 - DNA, 120 bp, Artificial Sequence
  ENSG00000203685_52 (sequence is synthesized)
accatccgggcaggtgtggatgccacagtccatccccattgcatttcacccccacatggacagaggcacacactcgcacacattcccagcacctttgactgctgggggatgcaggccagg

SEQ ID NO: 737270 - DNA, 120 bp, Artificial Sequence
  ENSG00000203685_53 (sequence is synthesized)
gtctgcctggagcctcagggttgggacttatctccaaaggagcccacaccccctcttccaggatgggcactggctggcagcacttttttccctcatcacatccctgacccctgcccagcc

SEQ ID NO: 737271 - DNA, 120 bp, Artificial Sequence
  ENSG00000203685_54 (sequence is synthesized)
cacatgcacatgctgtttcctgtctccagggccctagcctgtggatctcttcctcccatgcactcctagggtgaatgggctcagcaccaaacctggctgtgcccattccccacaacccca

SEQ ID NO: 737272 - DNA, 120 bp, Artificial Sequence
  ENSG00000203685_55 (sequence is synthesized)
gcttggcctcctgtgggaaggagaaggcagacctgcccagaggagaggggcagtgttcccacccacctgctccagcacaggaaccagggaggaaagaagggagagggaggttccattcac

SEQ ID NO: 737273 - DNA, 120 bp, Artificial Sequence
  ENSG00000203685_56 (sequence is synthesized)
cgttttctgggttagcgcttgattggatgtttcaagcaagggacaaggtgatggtggctgtaataggctcctcgtgggcaccgtcaccccagaaggcctgggcacccatgagaacctgtg

SEQ ID NO: 737274 - DNA, 120 bp, Artificial Sequence
  ENSG00000203685_57 (sequence is synthesized)
gccagcccttttcattggctgagttccctgctgttgtgcgtggtgccattttttttttaaacaacatatataaaaacaaaacaactggttctgtgtgtatcaacttaatttgcatatgaa

SEQ ID NO: 737275 - DNA, 120 bp, Artificial Sequence
  ENSG00000203685_58 (sequence is synthesized)
tgagtgttgtgttgtgatttgcagtgttttgacaccgtgattggctttgtttgggtctctcttctttctgtgaaattaactgctgtgcgttttcactgttcttagagaagaccctgagct

SEQ ID NO: 737276 - DNA, 120 bp, Artificial Sequence
  ENSG00000203685_59 (sequence is synthesized)
cctggggttttcttgtctcacttctaccctgacctgctgggagcccaccccaccccagtccagccatgagggtatttccagcctattccaatgactgaaacccttcttggaagaaaacgt

SEQ ID NO: 737277 - DNA, 120 bp, Artificial Sequence
  ENSG00000203685_60 (sequence is synthesized)
ctaatgtcggggacgtagggacgcttccagacttgccctggccggaaccctgcagcctggggccccagcccgcctgcagctcagctttccccaacaccctcaggacccagccccagcccc

SEQ ID NO: 737278 - DNA, 120 bp, Artificial Sequence
  ENSG00000203685_61 (sequence is synthesized)
ggcagaccttccctgggagctgcttaggtggtctccacagcgccctctaggggccaagcagggttccagattctccagccttctgccagctttaaaacccttcactcaagcagcattact

SEQ ID NO: 737279 - DNA, 120 bp, Artificial Sequence
  ENSG00000203685_62 (sequence is synthesized)
gtacatgcaatgaaaaatactatatatgacagtcaaaacctgtgtacatatttccatgtacatatttatacatacacacaccttcctattataaatatataaagcatgacatctctttgg

SEQ ID NO: 737280 - DNA, 120 bp, Artificial Sequence
  ENSG00000203685_63 (sequence is synthesized)
cattccaagtttgtgtttttttaaatccttggaaatacggctttggaaacctttttcttcctttccctcttttctatgttgtaataaacattcatgtgacctttctggtagtttctcaaa

SEQ ID NO: 737281 - DNA, 120 bp, Artificial Sequence
  ENSG00000203685_64 (sequence is synthesized)
ctctgttttcaggctgtgttttctcttcttctctctctcctcttcctcctgctgcctcccactctgtgctgctgcagtttcccaaggctacaaggagcagggcatcccacagcagctgtg

SEQ ID NO: 737282 - DNA, 120 bp, Artificial Sequence
  ENSG00000203690_0 (sequence is synthesized)
ggagatgaggcgggaggacttggggacagctgtggggacacggcccagatgctctggtcccagcagaagtgactggcggggaccaggatgctggagggtcagctcgaggccgggtagccc

SEQ ID NO: 737283 - DNA, 120 bp, Artificial Sequence
  ENSG00000203690_1 (sequence is synthesized)
aaggagggcacccacccagaagacccgtgcccgggagctggggctgccatggagaagacacctgcagcagccgaggtccccagggaggacagcaatgccggggagatgccgtcattacag

SEQ ID NO: 737284 - DNA, 120 bp, Artificial Sequence
  ENSG00000203690_2 (sequence is synthesized)
cagcagatcaccagcctccaccaagagctcgggagacagcagtcgctgtgggctgatattcacagaaaactccagagtcatatggatgccttgaggaagcagaaccgggagctccgagaa

SEQ ID NO: 737285 - DNA, 120 bp, Artificial Sequence
  ENSG00000203690_3 (sequence is synthesized)
gagctgagaggcctgcagcggcagcagtgggaagccgggaagaaacccgcagcgtccccacacgcggggcgagaatcacacactctggcattggaacctgcttttggaaaaatttcacat

SEQ ID NO: 737286 - DNA, 120 bp, Artificial Sequence
  ENSG00000203690_4 (sequence is synthesized)
ctgtcagctgatgaagacacaacgcccaaatacgctggccgcaagagtcagagtgccactctcctgggacaaagatggtcatctaaccacttagctcctccaaagccaatgagtttaaag

SEQ ID NO: 737287 - DNA, 120 bp, Artificial Sequence
  ENSG00000203690_5 (sequence is synthesized)
acagaaagaattaactcggggaaaacaccaccacaggaagatagagagaaaagtcctcccgggagacgtcaagacagaagtccagcacccactggaaggccgactcccggtgcagaaaga

SEQ ID NO: 737288 - DNA, 120 bp, Artificial Sequence
  ENSG00000203690_6 (sequence is synthesized)
cggggggtgtctgaagacggaaagattatgcatccatcttcccgaagtccgcaaaactccggtggcagaaaatcaccagtgcaggcttcccaggccaccacgctgcaggagcagacggca

SEQ ID NO: 737289 - DNA, 120 bp, Artificial Sequence
  ENSG00000203690_7 (sequence is synthesized)
gcagccagaggagctgacagaagctcatcagtcttagggagttctgaaggcggatttctcagccgcgttcaagctgacgagttcgccagttctgccccagacagtgcagagcggcagaat

SEQ ID NO: 737290 - DNA, 120 bp, Artificial Sequence
  ENSG00000203690_8 (sequence is synthesized)
ggcagatgactgccggcggtccggtttcccgagtgaatttccaggagctctgcacgccgctccctccagacaggacatggggccctgacctggaggccaggcgtttctagcattgttgac

SEQ ID NO: 737291 - DNA, 120 bp, Artificial Sequence
  ENSG00000203690_9 (sequence is synthesized)
tgccagtttattcccagtaaataaagcaatacgcttttcaggaggaagatttgttttaaatacttaaaaaaaaacccaaaactatagcctcaaatatcttccagccaccacattttagcc

SEQ ID NO: 737292 - DNA, 120 bp, Artificial Sequence; identical to SEQ ID NO: 538571
  ENSG00000203690_10 (sequence is synthesized)

SEQ ID NO: 737293 - DNA, 120 bp, Artificial Sequence; identical to SEQ ID NO: 538572
  ENSG00000203690_11 (sequence is synthesized)

SEQ ID NO: 737294 - DNA, 120 bp, Artificial Sequence
  ENSG00000203690_12 (sequence is synthesized)
tttgctgagggaactctgcctcagtaaaagcgaattcatgtcttgcaagcgggtaaagcatttggataaatgaacaacagggaatgctacttgcagtaacagtttgaattcactgaaatg

SEQ ID NO: 737295 - DNA, 120 bp, Artificial Sequence
  ENSG00000203690_13 (sequence is synthesized)
cttttgtctttagcgcagtggttgtagtggtttgtcaggggagaaggaaacccacatcatttgagcacctgaccttgccatccccgtaggcaggtccatgagacataagtgatgctcctc

SEQ ID NO: 737296 - DNA, 120 bp, Artificial Sequence
  ENSG00000203690_14 (sequence is synthesized)
cttggctaagtgcatggaggaaccaatcgctgaagctcatgaaaccacgaagatgaggacacaagaactaggtaacgcgctgtgccctctgctagcgcgatccttcctttctccccacaa

SEQ ID NO: 737297 - DNA, 120 bp, Artificial Sequence
  ENSG00000203690_15 (sequence is synthesized)
ccagcggtcacccacctctgcctgcccctatgtctctggctcccccaccctccctcccaggtcttcagcactttcctcttctcgtgactcatcttgcatctacttcttgtgtatcttgca

SEQ ID NO: 737298 - DNA, 120 bp, Artificial Sequence; identical to SEQ ID NO: 538577
  ENSG00000203690_16 (sequence is synthesized)

SEQ ID NO: 737299 - DNA, 120 bp, Artificial Sequence
  ENSG00000203690_17 (sequence is synthesized)
agcccggttcaagaggagggagtacccggatggcaccgtcaagactgtgtattgcagcggctgtcaggaaaccaagtatgcctccgggagggttaagatcaaagatgaagctggaaatgt

SEQ ID NO: 737300 - DNA, 120 bp, Artificial Sequence
  ENSG00000203690_18 (sequence is synthesized)
cgtcctggacgagaagcagatgagccctcaacacgcagcatcacatgggaaatgccaattgcagatttttgctaaaacagacaaaaactaataacatattagctgccctaaatgatcttg

SEQ ID NO: 737301 - DNA, 120 bp, Artificial Sequence
  ENSG00000203690_19 (sequence is synthesized)
gagagccaccaaaactttaggactacccaagtcatctagaaattgcaaaggaaaagacattctctcccctatttaggaaacttggttagagcagcacacgtcggagaacaggaggctcac

SEQ ID NO: 737302 - DNA, 120 bp, Artificial Sequence
  ENSG00000203690_20 (sequence is synthesized)
aaaagaacgattttcagtgcccccagcaaggctgcaccctccttgatcatcacaggggccatttctgccttgtgatggacccaggaggtctctgcagagcaagtgccgttggaccagctg

SEQ ID NO: 737303 - DNA, 120 bp, Artificial Sequence
  ENSG00000203690_21 (sequence is synthesized)
attcacaaagtgctgagcccctcttccccgtgtggcccaccccaggcacggctcattcctccagaattatagaagctcagcctggcctgctcccctctggtcaccgacacccctgtcctc

SEQ ID NO: 737304 - DNA, 120 bp, Artificial Sequence
  ENSG00000203690_22 (sequence is synthesized)
gctgggacaagagggagacaattctagtcactacaaggacacccaaggggtgtctgagtcagggctccaatagtgcagttatcgtggcctctcgcagcccggggagcacgtcgcctcttg

SEQ ID NO: 737305 - DNA, 120 bp, Artificial Sequence
  ENSG00000203690_23 (sequence is synthesized)
aaactcgagatttcttaaatcccaatataaaaatgataaccagttacttacttcttttgttgttttgcaggccacctagaaatacaaaatgccaattcacctaatttttatactgaaatg

SEQ ID NO: 737306 - DNA, 120 bp, Artificial Sequence
  ENSG00000203690_24 (sequence is synthesized)
tagatgcccccaacatgattttggaaagatataatttcttgaaaatcttatcagaagatgcatagttaatttttttccattatgtactcatgtttttatgaaatacaataccatatttta

SEQ ID NO: 737307 - DNA, 120 bp, Artificial Sequence
  ENSG00000203690_25 (sequence is synthesized)
gggccagggattattttaaccttaaaattgtgcatgcatcattgtagccctcaatatttggtaatgctatttaaagtgactcaagaagcatgtgctatctggctttgaaggaaaaaaaaa

SEQ ID NO: 737308 - DNA, 120 bp, Artificial Sequence
  ENSG00000203690_26 (sequence is synthesized)
gcggggcgagaatcacacactctggtaccaaaggcgcatttgtgtttttgtatcatttgcgtcgtgtaaatatagcgtccccgtaaagatgtgggctttgttgctgggtgacgtggtatc

SEQ ID NO: 737309 - DNA, 120 bp, Artificial Sequence
  ENSG00000203690_27 (sequence is synthesized)
tctcacgttccaggtggtgggagggcttgctatctttccatcagctccatttcccacaagtaaagattaaagaactggatacatcaggcatctcacctgacactccagcagacagaagca

SEQ ID NO: 737310 - DNA, 120 bp, Artificial Sequence
  ENSG00000203690_28 (sequence is synthesized)
ctccctgggggagcatggtgctccctggagtcctgcgtttttccaaggacatgggtgcatgcctttcaaacaagatcctaaaccacagcacttcctgctgtagggcagattccaagtcct

SEQ ID NO: 737311 - DNA, 120 bp, Artificial Sequence
  ENSG00000203690_29 (sequence is synthesized)
gccagctgcttccctctgagctcactcacggcagcaaatgtctggctggggccgagtggactcgggggctttgtttccgtgggtgccacccacggaggtgatatgtgtggcgctctcgcc

SEQ ID NO: 737312 - DNA, 120 bp, Artificial Sequence
  ENSG00000203690_30 (sequence is synthesized)
acatgccatggcccgtgcgtctgggggctcgcagcctcccacgatccctgcttctgcactgcggtcttgcacctgctgcttgtcagcgtggactcctctgaacaggggctgtgccgcttg

SEQ ID NO: 737313 - DNA, 120 bp, Artificial Sequence
  ENSG00000203690_31 (sequence is synthesized)
cttgggggccacagtgcaggatgctattttgtctccaacacatttttccttgttaaaattagctcctctttagaaccttctgctggccagtgtgtctcttcccatcccagctttgtgtca

SEQ ID NO: 737314 - DNA, 120 bp, Artificial Sequence
  ENSG00000203690_32 (sequence is synthesized)
ccctcacactcgggaggcaaatctcgtgagtcctgagccagcaactgatactgggtcgatgtggatggagaagactgcccccccaactcctgaagatgatttatcccctcgcttctttcc

SEQ ID NO: 737315 - DNA, 120 bp, Artificial Sequence
  ENSG00000203690_33 (sequence is synthesized)
caaagcaactgctgagcagataacactttattccctgaaggaagatcagaaatctactccaagcatttgtcacaagtaggaaaatagtcctttcagatcctatgagtacaaaacatcgaa

SEQ ID NO: 737316 - DNA, 120 bp, Artificial Sequence
  ENSG00000203690_34 (sequence is synthesized)
agtcccaggacgtactgcataggtccagcctcctgtgagacacggacttctctcacgcttctgcattgacctgagttaatcacacgcgtgctggacaatgtacgagtaaatagataactg

SEQ ID NO: 737317 - DNA, 120 bp, Artificial Sequence
  ENSG00000203690_35 (sequence is synthesized)
aatgggtggcttatccacgcctccaaaccctgaatttttaagcagcagaaaaggtagaacattattttcattatgcatttttgaattgagtttcaagtactttatttcactgttgactat

SEQ ID NO: 737318 - DNA, 120 bp, Artificial Sequence
  ENSG00000203690_36 (sequence is synthesized)
tctacaacgtcagccataccgtccctgaattcctcaagagcgtggctgtaaaatggggaatgagagcgtggatgcctcatgtgtccttctgtaggaagcgggggtagaatcctctagatt

SEQ ID NO: 737319 - DNA, 120 bp, Artificial Sequence
  ENSG00000203690_37 (sequence is synthesized)
tacactggcagcatggaaaattcagattcagatgaagttccacttaggtctcataagagtactcaatttgttattcgaaatagacctagtaatttattaacctaattatgtttctataga

SEQ ID NO: 737320 - DNA, 120 bp, Artificial Sequence
  ENSG00000203690_38 (sequence is synthesized)
taaaactttgaatttctgcagacatgtctttaatgctataaaagcaaataaattgaattgggttttaaaaagcaaacaacttgaattgggttttaaaaatcaattactttcccgagctcc

SEQ ID NO: 737321 - DNA, 120 bp, Artificial Sequence
  ENSG00000203690_39 (sequence is synthesized)
gtaattggtatatttctgcagagtctttaaaagaattgatctaccttgtagtgctgagctcagggctgttgggtgagccctggggtcttgctggaaattgtggatggctgaagatggctt

SEQ ID NO: 737322 - DNA, 120 bp, Artificial Sequence
  ENSG00000203690_40 (sequence is synthesized)
agtggatggaggccttttcttttcagatgaatgctaaagcaatgcaaggctgtttgtcaggcacaactggcaaaacaaatccattattaaaaagctactttgcatttggctgaaagaatg

SEQ ID NO: 737323 - DNA, 120 bp, Artificial Sequence
  ENSG00000203690_41 (sequence is synthesized)
cctgggagtcttgccgacacccctagccctccaccccacacacagcccacatgccggtctccaggggccgtggctggagattccgaatcctaccggccacttcccctgagtacactccca

SEQ ID NO: 737324 - DNA, 120 bp, Artificial Sequence
  ENSG00000203690_42 (sequence is synthesized)
gctgaaggcgtctggctgggcctgggcggactcgggggctttgttcccttttctccgtttgcccgcccatggcgttgctgccacgctgatggagcgccctctcatccggcacctgcccgg

SEQ ID NO: 737325 - DNA, 120 bp, Artificial Sequence
  ENSG00000203690_43 (sequence is synthesized)
cctctttcctgagcccagctctgtccatgcagatgtgggtgctttctgcattgggggtcccaccgggaggagccaacagtacccctggtagagttgggaaagaactccttcctcacgtta

SEQ ID NO: 737326 - DNA, 120 bp, Artificial Sequence
  ENSG00000203690_44 (sequence is synthesized)
ctgccagaaaatgaccatagcagcttcacaaaccccgcaggaacctgtcttcctaaagaaatggagcccatgaggtggccgagcctcaggtgtggtccttatgcacagcacagcccaagc

SEQ ID NO: 737327 - DNA, 120 bp, Artificial Sequence
  ENSG00000203690_45 (sequence is synthesized)
ctgtgggcacaactcgccctgggctgcctggcacctggactctttcctatcctcggcccaggcctgtgtggccctgtagggccaaacccgacactgtcttcctcctgggtccgctccctg

SEQ ID NO: 737328 - DNA, 120 bp, Artificial Sequence
  ENSG00000203690_46 (sequence is synthesized)
ggcctcctgcaccccagactgcttcatggcctctgcagggagcttcacagaggtgagactggtgccatctgtctgcttcagaccaccccaggctctgcgtaccctcacagtcccctctgc

SEQ ID NO: 737329 - DNA, 120 bp, Artificial Sequence
  ENSG00000203690_47 (sequence is synthesized)
gctcctctacggggtggggaagcccttcccatcaggtcagcaccagcctggccaccttgtttctgctgccccctcctcttcaggcccccagaccagactttagttacttgctgctgccgg

SEQ ID NO: 737330 - DNA, 120 bp, Artificial Sequence
  ENSG00000203690_48 (sequence is synthesized)
aggcatcatctcagctgacagtgacgccatcctggggaagaccccccggatcccgggctctcctggaagcctgtgatgctccttcaccacagcccctgtcccttcataggtcccataagc

SEQ ID NO: 737331 - DNA, 120 bp, Artificial Sequence
  ENSG00000203690_49 (sequence is synthesized)
cagtggtgcagggatctggcctttctctcctgtgtctgcctcctgcagaaccatgagcagcttcagggccgaggcagtgcctttccatccgtgaatctcctgagccatcagaatactcga

SEQ ID NO: 737332 - DNA, 120 bp, Artificial Sequence
  ENSG00000203690_50 (sequence is synthesized)
gagagagtgatgcccaagaaatactgactgagtgtattcatgaaagaattaatgttcttacaggatcacttgttgttgaactgacctgacatgtgtatagtgatctcatgaacaagaggg

SEQ ID NO: 737333 - DNA, 120 bp, Artificial Sequence
  ENSG00000203690_51 (sequence is synthesized)
aagctgtgcatccattcacttcaattggatttagcaatcgcagtaggataatgatatttccacaatgtatatgctctgtccctttaaatttaactttttgctttttagacagaagctcat

SEQ ID NO: 737334 - DNA, 120 bp, Artificial Sequence
  ENSG00000203690_52 (sequence is synthesized)
ggagccggtgtcatgagatggttgcatcttcccatcttctcaacaagaacagaaaattaagatgattccaaatgtctctttatttcctgaagttcagcctttcaaacagagacttttttt

SEQ ID NO: 737335 - DNA, 120 bp, Artificial Sequence
  ENSG00000203690_53 (sequence is synthesized)
tatagatttaagttggttgcatttagcacaaacaagattaatgttttttatgacttaagagttcccctagtcagagtttcattttttatcattttgatttacagttctcagttgacatta

SEQ ID NO: 737336 - DNA, 120 bp, Artificial Sequence
  ENSG00000203690_54 (sequence is synthesized)
atagactcgaaggcaagaatagcaaacatacttctaagccctagctaggggccgacttgtaacatgctatattttacaaaaaaaaaaagtcaataaaataaaattattttctctacgcca

SEQ ID NO: 737337 - DNA, 120 bp, Artificial Sequence
  ENSG00000203690_55 (sequence is synthesized)
gggacacggcccagatgctctggtcccagcagaagtgactggcggggaccaggtgaggtgatgaggtctgttagtggggctgagggaaggggtcttccccagactgagggggtcacaagt

SEQ ID NO: 737338 - DNA, 120 bp, Artificial Sequence
  ENSG00000203690_56 (sequence is synthesized)
ttggggccgaggacactggggtatcccctcggaggagcgggaaagaagaagctttctcagggctgtgaggaccgcggacccttgcccacttccacagaaactgtcccaatccccgcgggg

SEQ ID NO: 737339 - DNA, 120 bp, Artificial Sequence
  ENSG00000203697_0 (sequence is synthesized)
gtgccttatagctcccctcccagtggagcaggtgtctgagagtacagtgcagccctgcccttctgtccaccctacagagcccacggccatggcagcccaggcagctggtgtatctaggca

SEQ ID NO: 737340 - DNA, 120 bp, Artificial Sequence
  ENSG00000203697_1 (sequence is synthesized)
gcgggcagccactcaaggtcttggctccaaccaaaacgctttgaagtacttgggccaggatttcaagaccctgaggcaacagtgcttggactcaggggtcctatttaaggaccctgagtt

SEQ ID NO: 737341 - DNA, 120 bp, Artificial Sequence
  ENSG00000203697_2 (sequence is synthesized)
cccagcatgtccatcagctttgggctacaaggatcttggaccaggctctccgcaaactcaaggcatcatctggaagcggcccacggagttgtgtcccagccctcagtttatcgttggtgg

SEQ ID NO: 737342 - DNA, 120 bp, Artificial Sequence
  ENSG00000203697_3 (sequence is synthesized)
agccacgcgcacagacatttgtcagggtggtctaggtgactgctggcttctggctgccattgcctccctgaccctgaatgaagagctgctttaccgggtggtccccagggaccaggactt

SEQ ID NO: 737343 - DNA, 120 bp, Artificial Sequence
  ENSG00000203697_4 (sequence is synthesized)
ccaggagaactatgcgggaatctttcactttcagttctggcagtacggagagtgggtggaggtggtcattgacgacaggctgcccaccaagaatggacagctgctcttcctacactcgga

SEQ ID NO: 737344 - DNA, 120 bp, Artificial Sequence
  ENSG00000203697_5 (sequence is synthesized)
acaaggcaatgaattctggagtgccctgctggagaaagcctatgccaagcttaatggttgttatgaggctctcgctggaggttccacagtggaggggtttgaggatttcacaggtggcat

SEQ ID NO: 737345 - DNA, 120 bp, Artificial Sequence
  ENSG00000203697_6 (sequence is synthesized)
ctctgagttttatgacctgaagaaaccaccagccaatctatatcagatcatccggaaggccctctgtgcggggtctctgctgggctgctccattgatgtctccagtgcagccgaagccga

SEQ ID NO: 737346 - DNA, 120 bp, Artificial Sequence
  ENSG00000203697_7 (sequence is synthesized)
agccatcaccagccagaagctggttaagagtcatgcgtactctgtcactggagtcgaagaggtgaatttccagggccatccagagaagctgatcagactcaggaatccatggggtgaagt

SEQ ID NO: 737347 - DNA, 120 bp, Artificial Sequence
  ENSG00000203697_8 (sequence is synthesized)
ggagtggtcgggagcctggagcgatgatgcaccagagtggaatcacatagacccccggcggaaggaagaactggacaagaaagttgaggatggagaattctggatgtcactttcagattt

SEQ ID NO: 737348 - DNA, 120 bp, Artificial Sequence
  ENSG00000203697_9 (sequence is synthesized)
cgtgaggcagttctctcggttggagatctgcaacctgtccccggactctctgagtagcgaggaggtgcacaaatggaacctggtcctgttcaacggccactggacccggggctccacagc

SEQ ID NO: 737349 - DNA, 120 bp, Artificial Sequence
  ENSG00000203697_10 (sequence is synthesized)
gtactggaccaatccccagttcaaaatccgtttggatgaagtggatgaggaccaggaggagagcatcggtgaaccctgctgtacagtgctgctgggcctgatgcagaaaaatcgcaggtg

SEQ ID NO: 737350 - DNA, 120 bp, Artificial Sequence
  ENSG00000203697_11 (sequence is synthesized)
gcggaagcggataggacaaggcatgcttagcatcggctatgccgtctaccaggttcccaaggagctggagagtcacacggacgcacacttgggccgggatttcttcctggcctaccagcc

SEQ ID NO: 737351 - DNA, 120 bp, Artificial Sequence
  ENSG00000203697_12 (sequence is synthesized)
ctcagcccgcaccagcacctacgtcaacctgcgggaggtctctggccgggcccggctgccccctggggagtacctggtggtgccatccacatttgaacccttcaaagacggcgagttctg

SEQ ID NO: 737352 - DNA, 120 bp, Artificial Sequence
  ENSG00000203697_13 (sequence is synthesized)
cttgagagtgttctcagagaagaaggcccaggccctagaaattggggatgtggtagctggaaacccatatgagccacatcccagtgaggtggatcaggaagatgaccagttcaggaggct

SEQ ID NO: 737353 - DNA, 120 bp, Artificial Sequence
  ENSG00000203697_14 (sequence is synthesized)
gtttgagaagttggcagggaaggattctgagattactgccaatgcactcaagatacttttgaatgaggcgttttccaagagaacagacataaaattcgatggattcaacatcaacacttg

SEQ ID NO: 737354 - DNA, 120 bp, Artificial Sequence
  ENSG00000203697_15 (sequence is synthesized)
cagggaaatgatcagtctgttggatagcaatggaacgggcactttgggggcggtggaattcaagacgctctggctgaagattcagaagtatctggagatctattgggaaactgattataa

SEQ ID NO: 737355 - DNA, 120 bp, Artificial Sequence
  ENSG00000203697_16 (sequence is synthesized)
ccactcgggcaccatcgatgcccacgagatgaggacagccctcaggaaggcaggtttcaccctcaacagccaggtgcagcagaccattgccctgcggtatgcgtgcagcaagcttggcat

SEQ ID NO: 737356 - DNA, 120 bp, Artificial Sequence
  ENSG00000203697_17 (sequence is synthesized)
caactttgacagcttcgtggcttgtatgatccgcctggagaccctcttcaaactattcagccttctggacgaagacaaggatggcatggttcagctctctctggccgagtggctgtgctg

SEQ ID NO: 737357 - DNA, 120 bp, Artificial Sequence
  ENSG00000203697_18 (sequence is synthesized)
cgtgttggtctgacccggggtttcggacatcagtgacactccctgccccactgcttgcttcttgtcaccccttctctacaattttgtgaacatttatgctccagtggcattcactggttg

SEQ ID NO: 737358 - DNA, 120 bp, Artificial Sequence
  ENSG00000203697_19 (sequence is synthesized)
ttcatacctttcttgccctgggtctatttcagcagcactgagctatgagctatgtaagccgacccggtgggcccagtggagggaaagcaatcaattaaagttgtgagccagaatggtttc

SEQ ID NO: 737359 - DNA, 120 bp, Artificial Sequence
  ENSG00000203697_20 (sequence is synthesized)
caagctcacaagagaaagaaatctataaggcatgtagaatttggactcaatcatgttggtctttaatgtgcctagagcaatggaacgggcactttgggggcggtggaattcaagacgctc

SEQ ID NO: 737360 - DNA, 120 bp, Artificial Sequence
  ENSG00000203697_21 (sequence is synthesized)
tggctgaagattcagaagtatctggtaactctcttttccttctgggcatcctctcctctgttctaatcctcccttacactcattcctggtccattgtattctgaccacatccttaatcat

SEQ ID NO: 737361 - DNA, 120 bp, Artificial Sequence
  ENSG00000203697_22 (sequence is synthesized)
ggtcaaaactattgagtcctgggcacattggtcatgaaggaacaagaaggcaatgagagactctcatgccaaccactgccctgaaagccctgctgttcagacagcaaaggggccagcact

SEQ ID NO: 737362 - DNA, 120 bp, Artificial Sequence
  ENSG00000203697_23 (sequence is synthesized)
ggccaagctcttatgcttgctctgaaaccttcttgggaggagtcaatagggtctccttttgaaagtgtccctggccttttgagaaagcagtgtggtggagggagatggttctggcagggg

SEQ ID NO: 737363 - DNA, 120 bp, Artificial Sequence
  ENSG00000203697_24 (sequence is synthesized)
aactattcagccttctggacgaagacaaggatggcatggttcagctctctctggccgagtaaataggaagaaacacaagacaccatgcaagtcccagactcatctgagaccttctggaac

SEQ ID NO: 737364 - DNA, 120 bp, Artificial Sequence
  ENSG00000203697_25 (sequence is synthesized)
aagtcccagactcatctgagaccttctggaacacggaagctgacattttgagatggggtttcaccacattacccaggctggtcttgaactctgggactcaagcaatctgcccacctcagc

SEQ ID NO: 737365 - DNA, 120 bp, Artificial Sequence
  ENSG00000203697_26 (sequence is synthesized)
gatggccctctatgaaccaggaagggggccctcacagacaccagatctgccagtgctttgatcttggacttctcagccttcgaaactatgagaaataaatttctgttgtttataaggcac

SEQ ID NO: 737366 - DNA, 120 bp, Artificial Sequence
  ENSG00000203697_27 (sequence is synthesized)
gagttgtgtcccagccctcagtttatcgttggtggagccacgcgcacagacatttgtcagggtggtctagaaacgagatggatgagaattggcctggtgggcttcagaagcaactaggag

SEQ ID NO: 737367 - DNA, 120 bp, Artificial Sequence
  ENSG00000203697_28 (sequence is synthesized)
gaactctgaaataatctgaacaagtttcttcagctgtgaagagtttgcttgcttttttttctttttctttttccttttcctctccactgaaaacttagaaggtgactgctggcttctggc

SEQ ID NO: 737368 - DNA, 120 bp, Artificial Sequence
  ENSG00000203697_29 (sequence is synthesized)
ccctgggatgtcagctccttgagtgtttatgggagacagtgctgagtcctccactctacctgtgacccaggctccctctgccctcaggtttcaccctcaacagccaggtgcagcagacca

SEQ ID NO: 737369 - DNA, 120 bp, Artificial Sequence
  ENSG00000203697_30 (sequence is synthesized)
atctctaaggagaaatgaagaaaagcaaatcctgctctctctacttttcacctcctgctccccatgttccctgcctggtttgctgttgatctgttgattgacttagactgtaagcgcatg

SEQ ID NO: 737370 - DNA, 120 bp, Artificial Sequence
  ENSG00000203697_31 (sequence is synthesized)
gggcagggccagtcactttcttctcatgacagagctcactgcagggctgtgctcggtgctagggaagcagcattagaataaaaccccacctggatgcagtgctgggtcttgacaagttct

SEQ ID NO: 737371 - DNA, 120 bp, Artificial Sequence
  ENSG00000203697_32 (sequence is synthesized)
ctcttctttcatcacccatccaacccaaagctcccggttcaggcagctgtgaccagagtgctgaacagagaggaaggaaaggggtccacatcctgcccttgttgcttgatttagactctg

SEQ ID NO: 737372 - DNA, 120 bp, Artificial Sequence
  ENSG00000203697_33 (sequence is synthesized)
ggaagggcatttccctcttctgagcttcagtttcctagtcctccagatggggttcaaccttccaaccttactgggtcactgcaagccttggaacacagagtgtgtagggaagcactttgt

SEQ ID NO: 737373 - DNA, 120 bp, Artificial Sequence
  ENSG00000203697_34 (sequence is synthesized)
aaactgtgtagcattatataaatgggagtattatttttatggcccattctcttcctccagtactgttaaggagtaaacaaaaaatgtatggattgcagtaatgttgcatttgggagaaat

SEQ ID NO: 737374 - DNA, 120 bp, Artificial Sequence
  ENSG00000203697_35 (sequence is synthesized)
taaaatatgctcaccattagcaagctcttagaaaatgtggaggaaatttgcatggatcattttgggagctcagaactgtagggggtgcacaaggtatctggatgcaccaaatcacagtcc

SEQ ID NO: 737375 - DNA, 120 bp, Artificial Sequence
  ENSG00000203697_36 (sequence is synthesized)
catccatgctgccaactagctgtcaggaagacatggatagttcctgccctttggtagtgatggaagtataggcgattacagatttttttttccatctcctatgggatccacagatatccg

SEQ ID NO: 737376 - DNA, 120 bp, Artificial Sequence
  ENSG00000203697_37 (sequence is synthesized)
gctttaaaatccataaacttgagccctaaaacaaacaaacaaacaaaacacagcaacaaaaaaacaaaacaaaacaaaacaaacaacccccccccccaaaaaaaaagtggaagtggggat

SEQ ID NO: 737377 - DNA, 120 bp, Artificial Sequence
  ENSG00000203697_38 (sequence is synthesized)
tctgagaaggtggaattgaataagtaatcctactgtaaagaaaagtgataatcaatggctcttggtcacctgtgaatgccttgttattttccaagttagactcttctttaaaggatgtaa

SEQ ID NO: 737378 - DNA, 120 bp, Artificial Sequence
  ENSG00000203697_39 (sequence is synthesized)
ggaaaaatcccatgcccttccacttcttttttcctcccgggcacatcattattgaaattgttgaggccctagagtggagacacctgtcaggcgtgccttctgcaattttgctctgccact

SEQ ID NO: 737379 - DNA, 120 bp, Artificial Sequence
  ENSG00000203697_40 (sequence is synthesized)
ggactctgtcatagacttgctgcatatccttggatgatccttttaatctctccgtgccttggcttgtgtacttactattctgagagatttaaaaaaagccatctttgaaatgaaggagtc

SEQ ID NO: 737380 - DNA, 120 bp, Artificial Sequence
  ENSG00000203697_41 (sequence is synthesized)
aaacaaatcccaaggaggcagaagaagctgatggctgcgggtgcatttccagcaccggaggaggaaactctacctgactcagaagggaatgtggcaacgtggactctgggttgaatggga

SEQ ID NO: 737381 - DNA, 120 bp, Artificial Sequence
  ENSG00000203697_42 (sequence is synthesized)
gagatcgatgtcacagtgagttcagcagcacgtcctgtctgcagatcacacagtgtgttcagaaaagagtattaaatggatccaggctgggaaaagcaaaataaaaaccactgggctgta

SEQ ID NO: 737382 - DNA, 120 bp, Artificial Sequence
  ENSG00000203705_0 (sequence is synthesized)
ggtctaaagcggcagccgccggggcgcaatgcgagcggctggcgtaggcttggtggactgtcactgccacctctccgccccggactttgaccgcgatttggatgatgtgttggagaaagc

SEQ ID NO: 737383 - DNA, 120 bp, Artificial Sequence
  ENSG00000203705_1 (sequence is synthesized)
caagaaggccaatgttgtggcccttgtggcagttgccgaacattcaggagaatttgaaaagattatgcaactttcagaaaggtataatgggtttgtcctgccatgcttgggtgttcatcc

SEQ ID NO: 737384 - DNA, 120 bp, Artificial Sequence
  ENSG00000203705_2 (sequence is synthesized)
agttcaaggacttccaccagaagaccaaagaagtgtcacactaaaggatttggatgtagctttgcccattattgagaattataaggatcggttgttggcaattggagaggttggactaga

SEQ ID NO: 737385 - DNA, 120 bp, Artificial Sequence
  ENSG00000203705_3 (sequence is synthesized)
tttctcccccagatttgctggcactggtgaacagaaggaagagcaaagacaagtcctaatcagacagatccagttagccaaaagactaaatttgcctgtaaatgtgcactcacgctctgc

SEQ ID NO: 737386 - DNA, 120 bp, Artificial Sequence
  ENSG00000203705_4 (sequence is synthesized)
tggaagacctaccatcaaccttttacaagagcaaggtgctgagaaggtactgctgcatgcatttgatggtcggccatctgtagccatggaaggagtaagagctgggtacttcttctcaat

SEQ ID NO: 737387 - DNA, 120 bp, Artificial Sequence
  ENSG00000203705_5 (sequence is synthesized)
tcccccttctatcataagaagtggacagaagcagaaacttgtgaaacaattgcctttaacttctatatgcttagaaacagattcacctgcactaggaccagaaaaacaggtacggaatga

SEQ ID NO: 737388 - DNA, 120 bp, Artificial Sequence
  ENSG00000203705_6 (sequence is synthesized)
gccctggaacatttctatttcagcagaatatattgcccaggtgaaagggatctcagtggaagaagttatagaagtgacgacacagaatgcattaaaactgtttcctaagctccgacactt

SEQ ID NO: 737389 - DNA, 120 bp, Artificial Sequence
  ENSG00000203705_7 (sequence is synthesized)
gctccagaaatagcttcaaaaccatccattacaaaatcgaatcaactgcagggggcagcatttgaaaaatagaaatgttctgatgaagaatctgaactgaagaagctgttttatagggtt

SEQ ID NO: 737390 - DNA, 120 bp, Artificial Sequence
  ENSG00000203705_8 (sequence is synthesized)
atagaagattgtaattgtagagaaatatttctcttagaaataaaactgggcttggatcctgaaaccctgggttctgattctagccttgtgctgcttttcaattagccgagttctggcagg

SEQ ID NO: 737391 - DNA, 120 bp, Artificial Sequence
  ENSG00000203705_9 (sequence is synthesized)
atattgggaaaatactgctacttcttacattgcccttttatatagaaccaccacctgaactgaaaccattgctactgggaagggtggctcccacaggaagagtataagcactactgtgat

SEQ ID NO: 737392 - DNA, 71 bp, Artificial Sequence
  ENSG00000203705_10 (sequence is synthesized)
ctcccacaggaagagtataagcactactgtgatgaggatggagtaagctaaagtatacttttttttttttt

SEQ ID NO: 737393 - DNA, 89 bp, Artificial Sequence
  ENSG00000203705_11 (sequence is synthesized)
taaagtgtgttcttaccacctatttttcttcccataggagttagccagtgaagggagaatgtctggttttctatgctgtcagaaatctc

SEQ ID NO: 737394 - DNA, 120 bp, Artificial Sequence
  ENSG00000203705_12 (sequence is synthesized)
gaagggagaatgtctggttttctatgctgtcagaaatctcttttctaggtttgtaaaattgaacttttagtacttcgaattatttctctttaagataaaaatgcatacgatttttacact

SEQ ID NO: 737395 - DNA, 120 bp, Artificial Sequence
  ENSG00000203705_13 (sequence is synthesized)
gatcttagatttttgacttatgaggccagtggtttaaacaatcattattgaataccaagcccaaaagtttagttaatacaccaattgtaagttctggtctgaattttgtcaacatattta

SEQ ID NO: 737396 - DNA, 120 bp, Artificial Sequence
  ENSG00000203705_14 (sequence is synthesized)
gaatgtaaatggcattattaaaaatgtatctgatttctctgtgaacagtaatatttcatatttttaagtttaaaaatgttagtgtaagccaggcacagtggcattcacctgtagtgccaa

SEQ ID NO: 737397 - DNA, 120 bp, Artificial Sequence
  ENSG00000203705_15 (sequence is synthesized)
ccactcaggaggctgagatgggagaccttttaagcctgagtttgagtcaggcctgggcaacatagatgtgagcacctatctctaaaaatgtaaataaataaaaatctcaaaaaaattaaa

SEQ ID NO: 737398 - DNA, 120 bp, Artificial Sequence
  ENSG00000203705_16 (sequence is synthesized)
aatctcaagtgtaaaaacagttctgtagatagatggtagtgatggtagcacatcaatgtgaaggtatttaatgccactgaactgtacacttataacgaattaggataaattttatgttat

SEQ ID NO: 737399 - DNA, 120 bp, Artificial Sequence
  ENSG00000203705_17 (sequence is synthesized)
gtgtatttactacaattttttaaaaatcgtatatgtagtttaacaggtgtggtcaatatcaaaacttaggtatttaatcttgttaaattatataagcagaaaatgctggaaaaagtacct

SEQ ID NO: 737400 - DNA, 120 bp, Artificial Sequence
  ENSG00000203705_18 (sequence is synthesized)
gtcatagaaaaaaataaacttcctaaatcaaagtgattttatgaaatgatcttcaataaatattttgaaatgaattcatttatggaagaatcaaaactaggtcagattgtccaaaccaga

SEQ ID NO: 737401 - DNA, 120 bp, Artificial Sequence
  ENSG00000203705_19 (sequence is synthesized)
ctaagaaactgaatagggtattttatgaggtatttaatgactcatcagcaccattttaaatgaaattcctacatttaacaggagattatattaaaactggacttttaagctctcttccaa

SEQ ID NO: 737402 - DNA, 120 bp, Artificial Sequence
  ENSG00000203705_20 (sequence is synthesized)
agttgctatcattgttattttttgtgatgccacaactacattgacatatacagtccaagattagctgcttattcatctaaaataatggtgatttcttatgcttgttttaggatttggatg

SEQ ID NO: 737403 - DNA, 120 bp, Artificial Sequence
  ENSG00000203705_21 (sequence is synthesized)
agatgttcttgaagtctgaaagaggaaggggagctagtcaaggagactgacaagtagccaccaatgagagagtggtattgcagaagtgaagggtggaaagcatttcaagaaggaaggagt

SEQ ID NO: 737404 - DNA, 120 bp, Artificial Sequence
  ENSG00000203705_22 (sequence is synthesized)
catgcttgggtgttcatccagttcaaggacttccaccagaagaccaaagaagtgtcacactaaaggtaacagtcatacaaaacaggaaccattaaaaacaaacaaacgaaagaattattt

SEQ ID NO: 737405 - DNA, 120 bp, Artificial Sequence
  ENSG00000203705_23 (sequence is synthesized)
gactcagtaatcctcctctttctaatttatattctcaggaaataatccaaaagaaggaaacattaccttctttaacaaagatgtttgttgcaacattattcgtaatagagaaaaagtaga

SEQ ID NO: 737406 - DNA, 120 bp, Artificial Sequence
  ENSG00000203705_24 (sequence is synthesized)
gaaaatgaggattataaagtattatagcacatggaaaatacttactgtataatatagggagaaaagcaggataccaaatagcatattcactatgagtgacatctacataagcatatattc

SEQ ID NO: 737407 - DNA, 120 bp, Artificial Sequence
  ENSG00000203705_25 (sequence is synthesized)
ataaggaaaagactgcagagaaaacacagaaatgatagtaattgtgatgatctgttagaattatctgtaacttttttcacatttttttggtactgtagtcatgttgctttggcaaaaaag

SEQ ID NO: 737408 - DNA, 120 bp, Artificial Sequence
  ENSG00000203710_0 (sequence is synthesized)
atgggggcctcttctccaagaagcccggagcctgtcgggccgccggcgcccggtctccccttctgctgcggaggatccctgctggcggttgtggtgctgcttgcgctgccggtggcctgg

SEQ ID NO: 737409 - DNA, 120 bp, Artificial Sequence
  ENSG00000203710_1 (sequence is synthesized)
ggtcaatgcaatgccccagaatggcttccatttgccaggcctaccaacctaactgatgaatttgagtttcccattgggacatatctgaactatgaatgccgccctggttattccggaaga

SEQ ID NO: 737410 - DNA, 120 bp, Artificial Sequence
  ENSG00000203710_2 (sequence is synthesized)
ccgttttctatcatctgcctaaaaaactcagtctggactggtgctaaggacaggtgcagacgtaaatcatgtcgtaatcctccagatcctgtgaatggcatggtgcatgtgatcaaaggc

SEQ ID NO: 737411 - DNA, 120 bp, Artificial Sequence
  ENSG00000203710_3 (sequence is synthesized)
atccagttcggatcccaaattaaatattcttgtactaaaggataccgactcattggttcctcgtctgccacatgcatcatctcaggtgatactgtcatttgggataatgaaacacctatt

SEQ ID NO: 737412 - DNA, 120 bp, Artificial Sequence
  ENSG00000203710_4 (sequence is synthesized)
tgtgacagaattccttgtgggctaccccccaccatcaccaatggagatttcattagcaccaacagagagaattttcactatggatcagtggtgacctaccgctgcaatcctggaagcgga

SEQ ID NO: 737413 - DNA, 120 bp, Artificial Sequence
  ENSG00000203710_5 (sequence is synthesized)
gggagaaaggtgtttgagcttgtgggtgagccctccatatactgcaccagcaatgacgatcaagtgggcatctggagcggccccgcccctcagtgcattatacctaacaaatgcacgcct

SEQ ID NO: 737414 - DNA, 120 bp, Artificial Sequence
  ENSG00000203710_6 (sequence is synthesized)
ccaaatgtggaaaatggaatattggtatctgacaacagaagcttattttccttaaatgaagttgtggagtttaggtgtcagcctggctttgtcatgaaaggaccccgccgtgtgaagtgc

SEQ ID NO: 737415 - DNA, 120 bp, Artificial Sequence
  ENSG00000203710_7 (sequence is synthesized)
caggccctgaacaaatgggagccggagctaccaagctgctccagggtatgtcagccacctccagatgtcctgcatgctgagcgtacccaaagggacaaggacaacttttcacctgggcag

SEQ ID NO: 737416 - DNA, 120 bp, Artificial Sequence
  ENSG00000203710_8 (sequence is synthesized)
gaagtgttctacagctgtgagcccggctacgacctcagaggggctgcgtctatgcgctgcacaccccagggagactggagccctgcagcccccacatgtgaagtgaaatcctgtgatgac

SEQ ID NO: 737417 - DNA, 120 bp, Artificial Sequence
  ENSG00000203710_9 (sequence is synthesized)
ttcatgggccaacttcttaatggccgtgtgctatttccagtaaatctccagcttggagcaaaagtggattttgtttgtgatgaaggatttcaattaaaaggcagctctgctagttactgt

SEQ ID NO: 737418 - DNA, 120 bp, Artificial Sequence
  ENSG00000203710_10 (sequence is synthesized)
gtcttggctggaatggaaagcctttggaatagcagtgttccagtgtgtgaacaaatcttttgtccaagtcctccagttattcctaatgggagacacacaggaaaacctctggaagtcttt

SEQ ID NO: 737419 - DNA, 120 bp, Artificial Sequence
  ENSG00000203710_11 (sequence is synthesized)
ccctttgggaaaacagtaaattacacatgcgacccccacccagacagagggacgagcttcgacctcattggagagagcaccatccgctgcacaagtgaccctcaagggaatggggtttgg

SEQ ID NO: 737420 - DNA, 120 bp, Artificial Sequence
  ENSG00000203710_12 (sequence is synthesized)
agcagccctgcccctcgctgtggaattctgggtcactgtcaagccccagatcattttctgtttgccaagttgaaaacccaaaccaatgcatctgactttcccattgggacatctttaaag

SEQ ID NO: 737421 - DNA, 120 bp, Artificial Sequence
  ENSG00000203710_13 (sequence is synthesized)
tacgaatgccgtcctgagtactacgggaggccattctctatcacatgtctagataacctggtctggtcaagtcccaaagatgtctgtaaacgtaaatcatgtaaaactcctccagatcca

SEQ ID NO: 737422 - DNA, 120 bp, Artificial Sequence
  ENSG00000203710_14 (sequence is synthesized)
gtgaatggcatggtgcatgtgatcacagacatccaggttggatccagaatcaactattcttgtactacagggcaccgactcattggtcactcatctgctgaatgtatcctctcgggcaat

SEQ ID NO: 737423 - DNA, 120 bp, Artificial Sequence
  ENSG00000203710_15 (sequence is synthesized)
gctgcccattggagcacgaagccgccaatttgtcaacgaattccttgtgggctaccccccaccatcgccaatggagatttcattagcaccaacagagagaattttcactatggatcagtg

SEQ ID NO: 737424 - DNA, 120 bp, Artificial Sequence
  ENSG00000203710_16 (sequence is synthesized)
gtgacctaccgctgcaatcctggaagcggagggagaaaggtgtttgagcttgtgggtgagccctccatatactgcaccagcaatgacgatcaagtgggcatctggagcggcccggcccct

SEQ ID NO: 737425 - DNA, 120 bp, Artificial Sequence
  ENSG00000203710_17 (sequence is synthesized)
cagtgcattatacctaacaaatgcacgcctccaaatgtggaaaatggaatattggtatctgacaacagaagcttattttccttaaatgaagttgtggagtttaggtgtcagcctggcttt

SEQ ID NO: 737426 - DNA, 120 bp, Artificial Sequence
  ENSG00000203710_18 (sequence is synthesized)
gtcatgaaaggaccccgccgtgtgaagtgccaggccctgaacaaatgggagccggagctaccaagctgctccagggtatgtcagccacctccagatgtcctgcatgctgagcgtacccaa

SEQ ID NO: 737427 - DNA, 120 bp, Artificial Sequence
  ENSG00000203710_19 (sequence is synthesized)
agggacaaggacaacttttcacccgggcaggaagtgttctacagctgtgagcccggctacgacctcagaggggctgcgtctatgcgctgcacaccccagggagactggagccctgcagcc

SEQ ID NO: 737428 - DNA, 120 bp, Artificial Sequence
  ENSG00000203710_20 (sequence is synthesized)
cccacatgtgaagtgaaatcctgtgatgacttcatgggccaacttcttaatggccgtgtgctatttccagtaaatctccagcttggagcaaaagtggattttgtttgtgatgaaggattt

SEQ ID NO: 737429 - DNA, 120 bp, Artificial Sequence
  ENSG00000203710_21 (sequence is synthesized)
caattaaaaggcagctctgctagttactgtgtcttggctggaatggaaagcctttggaatagcagtgttccagtgtgtgaacaaatcttttgtccaagtcctccagttattcctaatggg

SEQ ID NO: 737430 - DNA, 120 bp, Artificial Sequence
  ENSG00000203710_22 (sequence is synthesized)
agacacacaggaaaacctctggaagtctttccctttgggaaaacagtaaattacacatgcgacccccacccagacagagggacgagcttcgacctcattggagagagcaccatccgctgc

SEQ ID NO: 737431 - DNA, 120 bp, Artificial Sequence
  ENSG00000203710_23 (sequence is synthesized)
acaagtgaccctcaagggaatggggtttggagcagccctgcccctcgctgtggaattctgggtcactgtcaagccccagatcattttctgtttgccaagttgaaaacccaaaccaatgca

SEQ ID NO: 737432 - DNA, 120 bp, Artificial Sequence
  ENSG00000203710_24 (sequence is synthesized)
tctgactttcccattgggacatctttaaagtacgaatgccgtcctgagtactacgggaggccattctctatcacatgtctagataacctggtctggtcaagtcccaaagatgtctgtaaa

SEQ ID NO: 737433 - DNA, 120 bp, Artificial Sequence
  ENSG00000203710_25 (sequence is synthesized)
cgtaaatcatgtaaaactcctccagatccagtgaatggcatggtgcatgtgatcacagacatccaggttggatccagaatcaactattcttgtactacagggcaccgactcattggtcac

SEQ ID NO: 737434 - DNA, 120 bp, Artificial Sequence
  ENSG00000203710_26 (sequence is synthesized)
tcatctgctgaatgtatcctctcgggcaatgctgcccattggagcacgaagccgccaatttgtcaacgaattccttgtgggctaccccccaccatcgccaatggagatttcattagcacc

SEQ ID NO: 737435 - DNA, 120 bp, Artificial Sequence
  ENSG00000203710_27 (sequence is synthesized)
aacagagagaattttcactatggatcagtggtgacctaccgctgcaatcctggaagcggagggagaaaggtgtttgagcttgtgggtgagccctccatatactgcaccagcaatgacgat

SEQ ID NO: 737436 - DNA, 120 bp, Artificial Sequence
  ENSG00000203710_28 (sequence is synthesized)
caagtgggcatctggagcggcccggcccctcagtgcattatacctaacaaatgcacgcctccaaatgtggaaaatggaatattggtatctgacaacagaagcttattttccttaaatgaa

SEQ ID NO: 737437 - DNA, 120 bp, Artificial Sequence
  ENSG00000203710_29 (sequence is synthesized)
gttgtggagtttaggtgtcagcctggctttgtcatgaaaggaccccgccgtgtgaagtgccaggccctgaacaaatgggagccggagctaccaagctgctccagggtatgtcagccacct

SEQ ID NO: 737438 - DNA, 120 bp, Artificial Sequence
  ENSG00000203710_30 (sequence is synthesized)
ccagatgtcctgcatgctgagcgtacccaaagggacaaggacaacttttcacccgggcaggaagtgttctacagctgtgagcccggctatgacctcagaggggctgcgtctatgcgctgc

SEQ ID NO: 737439 - DNA, 120 bp, Artificial Sequence; identical to SEQ ID NO: 737428
  ENSG00000203710_31 (sequence is synthesized)

SEQ ID NO: 737440 - DNA, 120 bp, Artificial Sequence
  ENSG00000203710_32 (sequence is synthesized)
caattaaaaggcagctctgctagttattgtgtcttggctggaatggaaagcctttggaatagcagtgttccagtgtgtgaacaaatcttttgtccaagtcctccagttattcctaatggg

SEQ ID NO: 737441 - DNA, 120 bp, Artificial Sequence
  ENSG00000203710_33 (sequence is synthesized)
agacacacaggaaaacctctggaagtctttccctttggaaaagcagtaaattacacatgcgacccccacccagacagagggacgagcttcgacctcattggagagagcaccatccgctgc

SEQ ID NO: 737442 - DNA, 120 bp, Artificial Sequence; identical to SEQ ID NO: 737431
  ENSG00000203710_34 (sequence is synthesized)

SEQ ID NO: 737443 - DNA, 120 bp, Artificial Sequence; identical to SEQ ID NO: 737432
  ENSG00000203710_35 (sequence is synthesized)

SEQ ID NO: 737444 - DNA, 120 bp, Artificial Sequence; identical to SEQ ID NO: 737433
  ENSG00000203710_36 (sequence is synthesized)

SEQ ID NO: 737445 - DNA, 120 bp, Artificial Sequence
  ENSG00000203710_37 (sequence is synthesized)
tcatctgctgaatgtatcctctcaggcaatactgcccattggagcacgaagccgccaatttgtcaacgaattccttgtgggctacccccaaccatcgccaatggagatttcattagcacc

SEQ ID NO: 737446 - DNA, 120 bp, Artificial Sequence
  ENSG00000203710_38 (sequence is synthesized)
aacagagagaattttcactatggatcagtggtgacctaccgctgcaatcttggaagcagagggagaaaggtgtttgagcttgtgggtgagccctccatatactgcaccagcaatgacgat

SEQ ID NO: 737447 - DNA, 120 bp, Artificial Sequence
  ENSG00000203710_39 (sequence is synthesized)
caagtgggcatctggagcggccccgcccctcagtgcattatacctaacaaatgcacgcctccaaatgtggaaaatggaatattggtatctgacaacagaagcttattttccttaaatgaa

SEQ ID NO: 737448 - DNA, 120 bp, Artificial Sequence
  ENSG00000203710_40 (sequence is synthesized)
gttgtggagtttaggtgtcagcctggctttgtcatgaaaggaccccgccgtgtgaagtgccaggccctgaacaaatgggagccagagttaccaagctgctccagggtgtgtcagccgcct

SEQ ID NO: 737449 - DNA, 120 bp, Artificial Sequence
  ENSG00000203710_41 (sequence is synthesized)
ccagaaatcctgcatggtgagcataccccaagccatcaggacaacttttcacctgggcaggaagtgttctacagctgtgagcctggctatgacctcagaggggctgcgtctctgcactgc

SEQ ID NO: 737450 - DNA, 120 bp, Artificial Sequence
  ENSG00000203710_42 (sequence is synthesized)
acaccccagggagactggagccctgaagccccgagatgtgcagtgaaatcctgtgatgacttcttgggtcaactccctcatggccgtgtgctatttccacttaatctccagcttggggca

SEQ ID NO: 737451 - DNA, 120 bp, Artificial Sequence
  ENSG00000203710_43 (sequence is synthesized)
aaggtgtcctttgtctgtgatgaagggtttcgcttaaagggcagttccgttagtcattgtgtcttggttggaatgagaagcctttggaataacagtgttcctgtgtgtgaacatatcttt

SEQ ID NO: 737452 - DNA, 120 bp, Artificial Sequence
  ENSG00000203710_44 (sequence is synthesized)
tgtccaaatcctccagctatccttaatgggagacacacaggaactccctctggagatattccctatggaaaagaaatatcttacacatgtgacccccacccagacagagggatgaccttc

SEQ ID NO: 737453 - DNA, 120 bp, Artificial Sequence
  ENSG00000203710_45 (sequence is synthesized)
aacctcattggggagagcaccatccgctgcacaagtgaccctcatgggaatggggtttggagcagccctgcccctcgctgtgaactttctgttcgtgctggtcactgtaaaaccccagag

SEQ ID NO: 737454 - DNA, 120 bp, Artificial Sequence
  ENSG00000203710_46 (sequence is synthesized)
cagtttccatttgccagtcctacgatcccaattaatgactttgagtttccagtcgggacatctttgaattatgaatgccgtcctgggtattttgggaaaatgttctctatctcctgccta

SEQ ID NO: 737455 - DNA, 120 bp, Artificial Sequence
  ENSG00000203710_47 (sequence is synthesized)
gaaaacttggtctggtcaagtgttgaagacaactgtagacgaaaatcatgtggacctccaccagaacccttcaatggaatggtgcatataaacacagatacacagtttggatcaacagtt

SEQ ID NO: 737456 - DNA, 120 bp, Artificial Sequence
  ENSG00000203710_48 (sequence is synthesized)
aattattcttgtaatgaagggtttcgactcattggttccccatctactacttgtctcgtctcaggcaataatgtcacatgggataagaaggcacctatttgtgagatcatatcttgtgag

SEQ ID NO: 737457 - DNA, 120 bp, Artificial Sequence
  ENSG00000203710_49 (sequence is synthesized)
ccacctccaaccatatccaatggagacttctacagcaacaatagaacatcttttcacaatggaacggtggtaacttaccagtgccacactggaccagatggagaacagctgtttgagctt

SEQ ID NO: 737458 - DNA, 120 bp, Artificial Sequence
  ENSG00000203710_50 (sequence is synthesized)
gtgggagaacggtcaatatattgcaccagcaaagatgatcaagttggtgtttggagcagccctccccctcggtgtatttctactaataaatgcacagctccagaagttgaaaatgcaatt

SEQ ID NO: 737459 - DNA, 120 bp, Artificial Sequence
  ENSG00000203710_51 (sequence is synthesized)
agagtaccaggaaacaggagtttctttaccctcactgagatcatcagatttagatgtcagcccgggtttgtcatggtagggtcccacactgtgcagtgccagaccaatggcagatggggg

SEQ ID NO: 737460 - DNA, 120 bp, Artificial Sequence
  ENSG00000203710_52 (sequence is synthesized)
cccaagctgccacactgctccagggtgtgtcagccgcctccagaaatcctgcatggtgagcataccctaagccatcaggacaacttttcacctgggcaggaagtgttctacagctgtgag

SEQ ID NO: 737461 - DNA, 120 bp, Artificial Sequence
  ENSG00000203710_53 (sequence is synthesized)
cccagctatgacctcagaggggctgcgtctctgcactgcacgccccagggagactggagccctgaagcccctagatgtacagtgaaatcctgtgatgacttcctgggccaactccctcat

SEQ ID NO: 737462 - DNA, 120 bp, Artificial Sequence
  ENSG00000203710_54 (sequence is synthesized)
ggccgtgtgctacttccacttaatctccagcttggggcaaaggtgtcctttgtttgcgatgaagggttccgattaaaaggcaggtctgctagtcattgtgtcttggctggaatgaaagcc

SEQ ID NO: 737463 - DNA, 120 bp, Artificial Sequence
  ENSG00000203710_55 (sequence is synthesized)
ctttggaatagcagtgttccagtgtgtgaacaaatcttttgtccaaatcctccagctatccttaatgggagacacacaggaactccctttggagatattccctatggaaaagaaatatct

SEQ ID NO: 737464 - DNA, 120 bp, Artificial Sequence
  ENSG00000203710_56 (sequence is synthesized)
tacgcatgcgacacccacccagacagagggatgaccttcaacctcattggggagagctccatccgctgcacaagtgaccctcaagggaatggggtttggagcagccctgcccctcgctgt

SEQ ID NO: 737465 - DNA, 120 bp, Artificial Sequence
  ENSG00000203710_57 (sequence is synthesized)
gaactttctgttcctgctgcctgcccacatccacccaagatccaaaacgggcattacattggaggacacgtatctctatatcttcctgggatgacaatcagctacatttgtgaccccggc

SEQ ID NO: 737466 - DNA, 120 bp, Artificial Sequence
  ENSG00000203710_58 (sequence is synthesized)
tacctgttagtgggaaagggcttcattttctgtacagaccagggaatctggagccaattggatcattattgcaaagaagtaaattgtagcttcccactgtttatgaatggaatctcgaag

SEQ ID NO: 737467 - DNA, 120 bp, Artificial Sequence
  ENSG00000203710_59 (sequence is synthesized)
gagttagaaatgaaaaaagtatatcactatggagattatgtgactttgaagtgtgaagatgggtatactctggaaggcagtccctggagccagtgccaggcggatgacagatgggaccct

SEQ ID NO: 737468 - DNA, 120 bp, Artificial Sequence
  ENSG00000203710_60 (sequence is synthesized)
cctctggccaaatgtacctctcgtacacatgatgctctcatagttggcactttatctggtacgatcttctttattttactcatcattttcctctcttggataattctaaagcacagaaaa

SEQ ID NO: 737469 - DNA, 120 bp, Artificial Sequence
  ENSG00000203710_61 (sequence is synthesized)
ggcaataatgcacatgaaaaccctaaagaagtggctatccatttacattctcaaggaggcagcagcgttcatccccgaactctgcaaacaaatgaagaaaatagcagggtccttccttga

SEQ ID NO: 737470 - DNA, 120 bp, Artificial Sequence
  ENSG00000203710_62 (sequence is synthesized)
cttaagaggcttgaacacaggtgttaactcctgattgaaatgaacaaagataggagaagattagggggaaaatctgtatccttgctggaaaccagggcagtgcacatataaagagtatgc

SEQ ID NO: 737471 - DNA, 120 bp, Artificial Sequence
  ENSG00000203710_63 (sequence is synthesized)
tgttcactggatgggaaagaaaaaaacttagaagtgtagtagtcaaagcacacaaacaaccctaacccagagtagacattgctggaagaaagggaagaccatgtagcagctgtgtgagag

SEQ ID NO: 737472 - DNA, 120 bp, Artificial Sequence
  ENSG00000203710_64 (sequence is synthesized)
aatgaatcttaatgataacagcatgatcccttgctagggctgccatcaaaaagtacaggccttcctcgttttattgtacttcgcagatgttatgctttttacaaattgaacgcttgtggg

SEQ ID NO: 737473 - DNA, 120 bp, Artificial Sequence
  ENSG00000203710_65 (sequence is synthesized)
aacgctgtgtaagcatgttcgtcggcatcatttatccaacagcgtgtgttgacttcgtgtctctgtgtagcattttgattattctcacagtatcccagatgttttcattattatcatgtc

SEQ ID NO: 737474 - DNA, 120 bp, Artificial Sequence
  ENSG00000203710_66 (sequence is synthesized)
tgtgatagtgatctgtcatcagtgatctttgatgttactattgtcattgtttggggtccctacgaactgcacccatataagacagaaaacttaatcaataaatgtgcgtgctttgactgc

SEQ ID NO: 737475 - DNA, 120 bp, Artificial Sequence
  ENSG00000203710_67 (sequence is synthesized)
agccctccccacactctgggcgcggagcacaatgattggtcactcctattttcgctgagcttttcctcttatttcagttttcttcgagatcaaatctggtttgtagatgtgcttggggag

SEQ ID NO: 737476 - DNA, 120 bp, Artificial Sequence
  ENSG00000203710_68 (sequence is synthesized)
gatctgagcttcataaagtctttgaagtgacttcacagagacgcagacatgtgcacttgaagatgctgccccttccctggtacctagcaaagctcctgcctctttgtgtgcgtcactgtg

SEQ ID NO: 737477 - DNA, 120 bp, Artificial Sequence
  ENSG00000203710_69 (sequence is synthesized)
aaacccccacccttctgcctcgtgctaaacgcacacagtatctagtcaggggaaaagactgcatttaggagatagaaaatagtttggattacttaaaggaataaggtgttgcctggaatt

SEQ ID NO: 737478 - DNA, 120 bp, Artificial Sequence
  ENSG00000203710_70 (sequence is synthesized)
tctggtttgtaaggtggtcactgttcttttttaaaatatttgtaatatggaatgggctcagtaagaagagcttggaaaatgcagaaagttatgaaaaataagtcacttataattatgcta

SEQ ID NO: 737479 - DNA, 120 bp, Artificial Sequence
  ENSG00000203710_71 (sequence is synthesized)
cctactgataaccactcctaatattttgattcattttctgcctatcttctttcacatatgtgtttttttacatacgtacttttcccccttagtttgtttccttttattttatagagcaga

SEQ ID NO: 737480 - DNA, 120 bp, Artificial Sequence
  ENSG00000203710_72 (sequence is synthesized)
accctagtcttttaaacagtttagagtgaaatatatgctatatcagtttttactttctctagggagaaaaattaatttactagaaaggcatgaaatgatcatgggaagagtggttaagac

SEQ ID NO: 737481 - DNA, 81 bp, Artificial Sequence
  ENSG00000203710_73 (sequence is synthesized)
tagaaaggcatgaaatgatcatgggaagagtggttaagactactgaagagaaatatttggaaaataagatttcgatatctt

SEQ ID NO: 737482 - DNA, 120 bp, Artificial Sequence
  ENSG00000203710_74 (sequence is synthesized)
tttctaaactttaattcaaaagcactttgtgctgtgttctatataaaaaacataataaaaattgaaatgaaagaataattgttattataaaagtactagcttacttttgtatggattcag

SEQ ID NO: 737483 - DNA, 120 bp, Artificial Sequence
  ENSG00000203710_75 (sequence is synthesized)
aatatactaaattaactttttaaaacacaacttttaaaaaatgtatcaaaataataaacgtgttctgatatttttaaaataagtgaccttgtgttctttaaccagtccacatctttagag

SEQ ID NO: 737484 - DNA, 120 bp, Artificial Sequence
  ENSG00000203710_76 (sequence is synthesized)
aacaaaaatgtgttatgatattatgggccatgctaatgacctctagaaaacatcagaatatttctggatatttaataatagctttatatatgactaatgctcatttctatgtaattctgt

SEQ ID NO: 737485 - DNA, 120 bp, Artificial Sequence
  ENSG00000203710_77 (sequence is synthesized)
ttaatagttgctttaaaggtgaattttgccacatttactttgacagcagtataaggagtgagatagacatgaacctgaatttcaatttaaaatcatggaagagagggaaaaaaaaccagc

SEQ ID NO: 737486 - DNA, 120 bp, Artificial Sequence
  ENSG00000203710_78 (sequence is synthesized)
ttaagaaaaatcaactgataaactgcaagaaaaaaatgcaacttacatcacaaaagctaattgctttattatttagagagtacttaaaaattaaagaccaaacttctctccacccaacaa

SEQ ID NO: 737487 - DNA, 120 bp, Artificial Sequence
  ENSG00000203710_79 (sequence is synthesized)
aaatgggcaaaggacatacagctaggtcaccaagaaagaagggcaaataggtggtgagtatatgtaaagatacttgataggacttttgcttagttgaatctttagcaaatctcttttatt

SEQ ID NO: 737488 - DNA, 120 bp, Artificial Sequence
  ENSG00000203710_80 (sequence is synthesized)
tcttgggattttgaagaagtaatttttaaaggaggactagaaactaagtgattgggaattggcctttttagaattaaaatttcccattacaagaaaaaaaaatcctgtgttctttttttt

SEQ ID NO: 737489 - DNA, 120 bp, Artificial Sequence
  ENSG00000203710_81 (sequence is synthesized)
aatcctgtgttcttttttttttccagaatggagtaggtcagtgagcaatgtgattaataaatatttcaatgtctgtgacttttgatttattttggagacagggtcttgctctgttaccca

SEQ ID NO: 737490 - DNA, 120 bp, Artificial Sequence
  ENSG00000203710_82 (sequence is synthesized)
atctaggcttactgcaacctcacctgtcactttttaattgcaagaaagctgaaaggtttttttctattatatcagttataatgataaatactgtatatactaactatgagtaaaatacta

SEQ ID NO: 737491 - DNA, 120 bp, Artificial Sequence
  ENSG00000203710_83 (sequence is synthesized)
tattgcctaacttgtattattaagcaattctgctaacctgtgaccttacattttcatctgaaaagcaggggctggacaccaattgccctatgaagctattgctagtcctaacattctttg

SEQ ID NO: 737492 - DNA, 120 bp, Artificial Sequence
  ENSG00000203710_84 (sequence is synthesized)
ttttgtttgcttttttggcacacttaagtgtgtactatgaagtttatgatgctttaatgaaattttctgtctctaccattgtaatgagaaaggaataaaatactttattttgcaaatcta

SEQ ID NO: 737493 - DNA, 120 bp, Artificial Sequence
  ENSG00000203710_85 (sequence is synthesized)
acagccttactaccttctagtcacatgtcagaaaggacaactaaactattaccatctgctctttaacggcttcaacacagatgtttagctcctgactgaaatgagcaaaggtatgacaag

SEQ ID NO: 737494 - DNA, 120 bp, Artificial Sequence
  ENSG00000203710_86 (sequence is synthesized)
tggaaaccaaggcagagcatatatgaaaagtgtggcattcattgggtgggaaggaagaaaatgggggaagagtatagtcaaagcacacaaacagccttaacgcagaggggacattgctgg

SEQ ID NO: 737495 - DNA, 120 bp, Artificial Sequence
  ENSG00000203710_87 (sequence is synthesized)
aagaaagggaaggccattgagtaactgtgtgagagaaatcttaacggtcatagcacaagtagtttgctagggctgctgtaacagagtactccaaaacgggtggcttaacacaaatgaagt

SEQ ID NO: 737496 - DNA, 120 bp, Artificial Sequence
  ENSG00000203710_88 (sequence is synthesized)
ttttaaaattctgttccggaggctgaaagtgcaaaatcaaggtgttggcagagccatgctcccctctaaaacctgtaaggatggatccttctttgcttcttccagcttctggagccccag

SEQ ID NO: 737497 - DNA, 120 bp, Artificial Sequence
  ENSG00000203710_89 (sequence is synthesized)
gccttccttggcgtgtggcagcagaactcccgtttctgtctctgtcctcacatggccgtcttccctctgggtctgtgtcctcacatgctgttttcctgtctgtgtatggctgtgtcgaaa

SEQ ID NO: 737498 - DNA, 120 bp, Artificial Sequence
  ENSG00000203710_90 (sequence is synthesized)
gtgctctcttttaataaggacaccaatcataatggattagcgcccacactaacgacctcatcttaactggattgcctctccaaagaccatatttccaaataagatcacattaataagcac

SEQ ID NO: 737499 - DNA, 120 bp, Artificial Sequence
  ENSG00000203710_91 (sequence is synthesized)
ttgcaagctaacaaggaatataaaatgtgtataatcctgggtttagtgatggtgtgaggaaatcagcaatttcaaacccagttggtgggaggataagtgggaacaaactttgtagaaggc

SEQ ID NO: 737500 - DNA, 120 bp, Artificial Sequence
  ENSG00000203710_92 (sequence is synthesized)
caataaactggctgggcactgccctacggtagagtaggacacagtattcagttcttccaagatcagacgagattgggcgcatttagggtggtatggttgtagatcagtatccagttcttt

SEQ ID NO: 737501 - DNA, 120 bp, Artificial Sequence
  ENSG00000203710_93 (sequence is synthesized)
atccagttctttttattatttctgaatctgtaagtatcatgtttattatatgtaatattgtatatttgtactttgtctttgttagttcttccagagcttttgttcttattatttaataaa

SEQ ID NO: 737502 - DNA, 120 bp, Artificial Sequence
  ENSG00000203722_0 (sequence is synthesized)
actggagtttagggctgcattcagacgggctgcattcagacagcctgcgagccgccaggtgatccacgggctgggcttcgcttctgctgtcccctgcgatccaactccccaatggcagcg

SEQ ID NO: 737503 - DNA, 120 bp, Artificial Sequence
  ENSG00000203722_1 (sequence is synthesized)
gccgccagccccgcgttccttctacgcctcccgcttctgctcctgctgtccagctggtgcaggaccgggctggccgaccctcactctctttgctatgacatcaccgtcatccctaagttc

SEQ ID NO: 737504 - DNA, 120 bp, Artificial Sequence
  ENSG00000203722_2 (sequence is synthesized)
agacctggaccacggtggtgtgcggttcaaggccaggtggatgaaaagacttttcttcactatgactgtggcagcaagacagtcacacccgtcagtcccctggggaagaaactaaatgtc

SEQ ID NO: 737505 - DNA, 120 bp, Artificial Sequence
  ENSG00000203722_3 (sequence is synthesized)
acaacggcctggaaagcacagaacccagtactgagagaggtggtggacatacttacagagcaactgcttgacattcagctggagaattacatacccaaggaacccctcaccctgcaggcc

SEQ ID NO: 737506 - DNA, 120 bp, Artificial Sequence
  ENSG00000203722_4 (sequence is synthesized)
tcttcctcctctttgactcagaaaacagaatgtggacaacggttcatcctggagccagaaagatgaaagaaaagtgggagaatgacaaggatatgaccatgtccttccattacatctcaa

SEQ ID NO: 737507 - DNA, 120 bp, Artificial Sequence
  ENSG00000203722_5 (sequence is synthesized)
tgggagactgcacaggatggcttgaggacttcttgatgggcatggacagcaccctggagccaagtgcaggagcaccacccaccatgtcctcaggcacagcccaacccagggccacggcca

SEQ ID NO: 737508 - DNA, 120 bp, Artificial Sequence
  ENSG00000203722_6 (sequence is synthesized)
ccaccctcatcctttgctgcctcctcatcatgtgtctcctcatatgctccaggcacagtctgacccaaagccatggccaccaccctcagtccctgcagcctcctcctcatcctcccctgc

SEQ ID NO: 737509 - DNA, 120 bp, Artificial Sequence
  ENSG00000203722_7 (sequence is synthesized)
ttcatcctacctggctgctgaggagagtcctttggagtgacagctaccaaatagcgaagcgccccttgtctggtggacacgtgactcgcgtgactttacctatcattggagacgactcac

SEQ ID NO: 737510 - DNA, 120 bp, Artificial Sequence
  ENSG00000203722_8 (sequence is synthesized)
actccttaccctgccctcttgccttgtatacaataaataacggcgcagccaggtattcggagccactacaggtctccatatcttgatggttccctgggcccagctgtcttttcttccgtc

SEQ ID NO: 737511 - DNA, 120 bp, Artificial Sequence
  ENSG00000203722_9 (sequence is synthesized)
gcaccctggagccaagtgcaggaggtaacaggagaaaaagaaatggggatctccaatgagatcagaaatggggatctcaagaaactaattcttgagttcagcttcaatcatcccagtgta

SEQ ID NO: 737512 - DNA, 120 bp, Artificial Sequence
  ENSG00000203722_10 (sequence is synthesized)
cacgtttatgttaaaatgacctcctcgtggggtgctcctcctgggggtgctggcgtgcctgtgctctcccaccctcctcttccttctccctcctgactcctcttcctcactgcacttgct

SEQ ID NO: 737513 - DNA, 120 bp, Artificial Sequence
  ENSG00000203722_11 (sequence is synthesized)
tctgttccccacactgtggatttctcaccagcctcgaaactgcaggtgtcactattttcaggcctttctccttagtgttccctcttgagaatcacttttcctttcctcctctggtctgtt

SEQ ID NO: 737514 - DNA, 120 bp, Artificial Sequence
  ENSG00000203724_0 (sequence is synthesized)
ctcccaaggccggcggcggcatggcggccaggcagatctgggcacggacgggtgccgcgctctgcaggcaaccttccgccgccccgccgccagcacctctctgggtaagagctgggttcc

SEQ ID NO: 737515 - DNA, 120 bp, Artificial Sequence
  ENSG00000203724_1 (sequence is synthesized)
gacagcagctcagcttaaccctctgccctgctaacgagggaaactgcggcggctccgcgcccagcacgcccggtaggccggagagagcggcgaggccttcggtgagcgaagagttaaccg

SEQ ID NO: 737516 - DNA, 120 bp, Artificial Sequence
  ENSG00000203724_2 (sequence is synthesized)
cggcggagcgacagatcgcggagctgcacgctgccgcctgcgcggctggccagctaaactatgtggatccagctactggctatgtggtgctcacacagattgcccacttgcaaagaggtg

SEQ ID NO: 737517 - DNA, 120 bp, Artificial Sequence
  ENSG00000203724_3 (sequence is synthesized)
aatgttgtggctctgcgtgcagacattgtccatatggtcaagtcaatgttaaagatccatctaaaaagaagcaattcaattcatatttttatgtttgacaagaatttcatctctgttccc

SEQ ID NO: 737518 - DNA, 120 bp, Artificial Sequence
  ENSG00000203724_4 (sequence is synthesized)
taactgtgcttgtattttttaaaaaataaagccccaattcagaattgctggattattagtacttgaacactagtttaatcctaaatacatatattaaaagaacatcaataaaatgaaaaa

SEQ ID NO: 737519 - DNA, 120 bp, Artificial Sequence
  ENSG00000203727_0 (sequence is synthesized)
agtgcctgcgagctccgctgctgcttggggaattcactttgctgcttgttcgcttctcccttcctcaggcttcttctgatggttttccgtctcctgcccgagcctttcctttaaaaggaa

SEQ ID NO: 737520 - DNA, 120 bp, Artificial Sequence
  ENSG00000203727_1 (sequence is synthesized)
aactttactgcgatacccttttccccttggaggagaggattaaaagttccaagaactggtgccgcccgtgccatttgggcgctgggaaggtgctcggcggcggggttcccggtcccacca

SEQ ID NO: 737521 - DNA, 120 bp, Artificial Sequence
  ENSG00000203727_2 (sequence is synthesized)
tgtgcaccaacatagtttacgagtggctcaaagcgctgcagcttccgcagtacgcggagtccttcgtggataacggctacgatgacctggaggtgtgcaagcagatcggggacccggacc

SEQ ID NO: 737522 - DNA, 120 bp, Artificial Sequence
  ENSG00000203727_3 (sequence is synthesized)
tggatgccatcggggtgctggcgcccgcgcaccgccgccgtatcctggaggccgtgcgccggctgcgggagcaggacgccaacgccgccggcctctacttcacgcttgagccgcagccgg

SEQ ID NO: 737523 - DNA, 120 bp, Artificial Sequence
  ENSG00000203727_4 (sequence is synthesized)
accggccgccggggggagccgtgcggcggcccggcccagggcacccgcggggactctcgcggccacacgaccgccccccgcagcagggagctggtgagctaccccaaactgaagctgaag

SEQ ID NO: 737524 - DNA, 120 bp, Artificial Sequence
  ENSG00000203727_5 (sequence is synthesized)
agctggtgagctaccccaaactgaagctgaagatcatgatcagggataagctcgtccgtgacggcatccacctgagcaagcccccgtactcccgcaaggtcccaatggctggcatcctag

SEQ ID NO: 737525 - DNA, 120 bp, Artificial Sequence
  ENSG00000203727_6 (sequence is synthesized)
agtacttaatgaattggccgaagtcatcacagagccgctagatatcatttttgagacctcgtggaggactgatgaggtgcctgaagactggaaaagggcatatttagaaccttctttcaa

SEQ ID NO: 737526 - DNA, 120 bp, Artificial Sequence
  ENSG00000203727_7 (sequence is synthesized)
aaagggaaatggatgatgaccctggaaatactcatcagcttaactttttgcttggacaaattctggaataatcaacttagtaaactgggtaactggcttataacagctagaaataaggca

SEQ ID NO: 737527 - DNA, 120 bp, Artificial Sequence
  ENSG00000203727_8 (sequence is synthesized)
gtgaactatcacgcataaagaagtattgagttcatttttttaagaagatatcatgatgagatacagtcttatgcatttcttggcattctcccttccattcttaatgaaaacagatgaggt

SEQ ID NO: 737528 - DNA, 120 bp, Artificial Sequence
  ENSG00000203727_9 (sequence is synthesized)
tggctaaggcatttgagtcataacttagtttaagtacaatataacaaaaaggtagatttctgacagtaagtagtaattatattatttccaaatttgcttttaacttgagaacagtagctt

SEQ ID NO: 737529 - DNA, 120 bp, Artificial Sequence
  ENSG00000203727_10 (sequence is synthesized)
taatttttatattcaagcatacattctacttcatttcatataggaccatgtttttataagataagatacataattctatgtagaatagtttggtgaaggaattcttattttaaggtgctt

SEQ ID NO: 737530 - DNA, 120 bp, Artificial Sequence
  ENSG00000203727_11 (sequence is synthesized)
ttatatagttattttgtatattggtacaatgttaaaggtgatgaattaaggaacatcaccaagagaggacaatttcttctaacttctctttttaaatttaatctggctgaggtttagtat

SEQ ID NO: 737531 - DNA, 120 bp, Artificial Sequence
  ENSG00000203727_12 (sequence is synthesized)
taggactaatacaagtgtcttgctctgacatgcatcaagcaagagctagctattttacttcatagctagtttcttgcactctgtggagactgccagggccgcagctcacagcctgttctg

SEQ ID NO: 737532 - DNA, 120 bp, Artificial Sequence
  ENSG00000203727_13 (sequence is synthesized)
agctgcagtgctttatcccaccttgctctccaggcttctgacttcaggcctgtgggggccgggaggtgggcagcggcagtggcctgaggagccctgtagaactacggctgaaaaagaaag

SEQ ID NO: 737533 - DNA, 120 bp, Artificial Sequence
  ENSG00000203727_14 (sequence is synthesized)
aaagtagattgaggtggggggaggaaattaacaggaatctagagtttttctaattcttatcgtcttatcgttcttgtgtttggatgctggtagtttttttttttttagacagagtctcgc

SEQ ID NO: 737534 - DNA, 89 bp, Artificial Sequence
  ENSG00000203727_15 (sequence is synthesized)
tggcacaatcttggctcacagtgactttcggcctcttggtagctgggattacaggcacgcatcaccacacccagctaatttttttgtat

SEQ ID NO: 737535 - DNA, 80 bp, Artificial Sequence
  ENSG00000203727_16 (sequence is synthesized)
atgatccactcgccgtggcctccagtagcgctgggattacaggcgtgagccatcacacccggcctggatgctggtagttt

SEQ ID NO: 737536 - DNA, 120 bp, Artificial Sequence
  ENSG00000203727_17 (sequence is synthesized)
aggcgtgagccatcacacccggcctggatgctggtagttttattttctgcttagaaaacgcaaccatgttgatgggaccaaaaacttagttgaaagaagccatggcaaaagatgttgacg

SEQ ID NO: 737537 - DNA, 120 bp, Artificial Sequence
  ENSG00000203727_18 (sequence is synthesized)
tacaactggctcctgaggctgtcaattgtttagagctcccaagtagtactgcattacggaatctactacttagaagaatgtacaagatgtaagttcccatcggcaccgtcatggtaagaa

SEQ ID NO: 737538 - DNA, 120 bp, Artificial Sequence
  ENSG00000203727_19 (sequence is synthesized)
gaataagaaactctcaaaggaaaagaaacttacattcactttttcctggtccattttggttcctaagaatagataggccattaagaaggatattaggtttctaaggacaattttaacaca

SEQ ID NO: 737539 - DNA, 120 bp, Artificial Sequence
  ENSG00000203727_20 (sequence is synthesized)
atactgctttaaaaatctgaagtttaaatagtttagctatttctgtaggttaattcaggcactgactaaaatcagtctcattatcatatacaaatgtaaggaagttaaattttaaaagca

SEQ ID NO: 737540 - DNA, 120 bp, Artificial Sequence
  ENSG00000203727_21 (sequence is synthesized)
tgtataggttgtccttaaattatacaaaagcttttagtttcatcaggattatattccagttaacctttcatcttttttttttttccaaatgaactagggtctttaaaattcctaagtaga

SEQ ID NO: 737541 - DNA, 120 bp, Artificial Sequence
  ENSG00000203727_22 (sequence is synthesized)
ttcttttgagtggtaggggagtctgtatagattacagatataatttattgtgataacaaatggcttcctgtttgacctcatttccaggtgtcgcatccgtggctgatttatttcacagat

SEQ ID NO: 737542 - DNA, 120 bp, Artificial Sequence
  ENSG00000203727_23 (sequence is synthesized)
gtacatttgcatgtacttgttgaactttgctaggaaggactcaatttttgaaaaatctgttattttcactgtgggccttatgaggcaatctactgcaatggaaaaagggttccttggtca

SEQ ID NO: 737543 - DNA, 120 bp, Artificial Sequence
  ENSG00000203727_24 (sequence is synthesized)
tttcaagttttattttctattagagtaatatctaacttcaattattttgccaggtttaaaccttctctctgtgtctgtggttagaatttgaaaataacaatgctctgcttaaagtaagag

SEQ ID NO: 737544 - DNA, 120 bp, Artificial Sequence
  ENSG00000203727_25 (sequence is synthesized)
tcacagtcagcaaaaaaagccaatggattttaaaaagacatcttagttaaagctagaggaagaaaacttcaaataagcaaagaagtattgaaggatgcccacgaattcctttgcattaaa

SEQ ID NO: 737545 - DNA, 120 bp, Artificial Sequence
  ENSG00000203727_26 (sequence is synthesized)
gtaattttttcagcgtttttcctctgtatctaaacaccaataatatacttaatttttgaatataaaagaagtagcaattgactaagaataaatatgttataaaaactaggggattatctt

SEQ ID NO: 737546 - DNA, 120 bp, Artificial Sequence
  ENSG00000203727_27 (sequence is synthesized)
gatttacatttcctagagtattaaaagagattaattacagactttcacttgataatattgaggagtctggagggtcatagcaaaattttctttagttcatcttaaaatttagggaggtaa

SEQ ID NO: 737547 - DNA, 120 bp, Artificial Sequence
  ENSG00000203727_28 (sequence is synthesized)
aaaaagattttattcacataaaagatttcttggcatagggaaggcgtaatgttaagggcttcttccttacccaagtgggagctgaaccagtaattgtggggaaaactgaatttatagcaa

SEQ ID NO: 737548 - DNA, 120 bp, Artificial Sequence
  ENSG00000203727_29 (sequence is synthesized)
caaaggatagtagtttctcaactgggagcatacgagcaatttctcagttcagagatatttatagcatcttggtgttatgcaataaacaatgacaacaacaagcattgagctttcactttg

SEQ ID NO: 737549 - DNA, 120 bp, Artificial Sequence
  ENSG00000203727_30 (sequence is synthesized)
gagttactcagatctgagtttaaattctaaaattattctagtagtattttcctgcggtgaatctgttaaggatgtaagctatagtgtagcttggggaatcatcttgaacagttatgaaac

SEQ ID NO: 737550 - DNA, 120 bp, Artificial Sequence
  ENSG00000203727_31 (sequence is synthesized)
tcattaaagcttcttttcccttgtctgtaaaatgggaaaaataaatacctctatagctcttaagaggcttaagagttctatggcttacacccacatacagtccttggctcagtgctaggc

SEQ ID NO: 737551 - DNA, 120 bp, Artificial Sequence
  ENSG00000203727_32 (sequence is synthesized)
atgtagcaggtgctgactgcctctctcccttcccttctttactctcagttgtcttatttcttcttatgcagaagagattaccttaaagctgactagaaaactcagacataaattgacatt

SEQ ID NO: 737552 - DNA, 120 bp, Artificial Sequence
  ENSG00000203727_33 (sequence is synthesized)
tccttatcattgcctgaaacccactgaataagtcccctttgatttctctcaggaaggataaaaaaggctacagtacctgctcataggagttcagtaaatgtttattgattgaatgaaaag

SEQ ID NO: 737553 - DNA, 120 bp, Artificial Sequence
  ENSG00000203727_34 (sequence is synthesized)
tcataggagttcagtaaatgtttattgattgaatgaaaagaatttgatttaaggaaacaataacactccatcctgggcaacagagcaagatcccgtctcaaaacaaaacaaaacaaaaca

SEQ ID NO: 737554 - DNA, 120 bp, Artificial Sequence
  ENSG00000203727_35 (sequence is synthesized)
ggaaataggcacatggacagattatatgaaggtatttcattagctttcttctctttatggcagcttcagattgatgaatttgaggtacaaatgagtgagtgacatatgtatattttcctc

SEQ ID NO: 737555 - DNA, 120 bp, Artificial Sequence
  ENSG00000203727_36 (sequence is synthesized)
tgattttatgactgatttacaaattaggagtgcaaatgggctgttccccgatagcatcttctgggaagaatccaaccaagatacaaagcagatgatggtggatcggcaaactcttttcta

SEQ ID NO: 737556 - DNA, 120 bp, Artificial Sequence
  ENSG00000203727_37 (sequence is synthesized)
tgaaaagaaaaaccagatataccagggactggaaagcacctgcttgaaaattgatatgagcatgtctgaatttttcccttataagagcctgagtattgtaacaggtctcttgcacagggg

SEQ ID NO: 737557 - DNA, 120 bp, Artificial Sequence
  ENSG00000203727_38 (sequence is synthesized)
gttgaaaaataaaaaaagaagttaacataattaaaatgcttggacaaaacatttgctttatatagattcttacaagtaatatttgattaggtatcaaaataggtttaggcaggtggaagt

SEQ ID NO: 737558 - DNA, 120 bp, Artificial Sequence
  ENSG00000203727_39 (sequence is synthesized)
tctgaatttcaaggcaaataaggcatgaagggtggaacattgcatctagggaaaataagagaaataagtgaaagtctgaccctacattgccaattctcagaccaagtacaaagtattagg

SEQ ID NO: 737559 - DNA, 120 bp, Artificial Sequence
  ENSG00000203727_40 (sequence is synthesized)
aattttttatatcagctgacatcttgtgcttacagtaaagccatatagatgcacacatagtgactttattaaatcaaatgagttgtgcagagcagagcaaatctattaggctttctcttt

SEQ ID NO: 737560 - DNA, 120 bp, Artificial Sequence
  ENSG00000203727_41 (sequence is synthesized)
tagagttttctaattttactcttattagctccctcagttgtcatcaattacatattcctacatcagatattttacactatcagattctttgattaaaaaatcatcttcagctttacatta

SEQ ID NO: 737561 - DNA, 120 bp, Artificial Sequence
  ENSG00000203727_42 (sequence is synthesized)
ttaatctctgaggacataaaatcaaataactttctagtccatgatcattaatccctactattttagatatttccataaaaggcttaaagggaaaaaaaaatggtaggtagttcagaaaaa

SEQ ID NO: 737562 - DNA, 120 bp, Artificial Sequence
  ENSG00000203727_43 (sequence is synthesized)
tgtttaaactcctggaaattaagtgttattttttattactgcagttgagagataccttttcagaggaaaacaagaggctaaattccatgttaagagctaagtagtatttttttcttaaca

SEQ ID NO: 737563 - DNA, 120 bp, Artificial Sequence
  ENSG00000203727_44 (sequence is synthesized)
attttgccaaaatttcttctactggaccaaaaggaaataaatctacaataaatctactttctaaatattatttaagatgggaaatgtcttttataggtatattctgtataatacccttaa

SEQ ID NO: 737564 - DNA, 120 bp, Artificial Sequence
  ENSG00000203727_45 (sequence is synthesized)
ttagatgaattatcccttatcattccaaaaatgaaatgctgtgttaaatatctccagggcaaagtggtatgttgactgggacaaacgttagaaattgtattgttcattgcacttgttgcc

SEQ ID NO: 737565 - DNA, 120 bp, Artificial Sequence
  ENSG00000203727_46 (sequence is synthesized)
ctgttccccaagcttgtcaatgtttagagatactattcgggttgctaaagccattattcatagaaaatttctgcccctacagaagtgtgtgcatgggccttggaaaatctacatgtgtat

SEQ ID NO: 737566 - DNA, 120 bp, Artificial Sequence
  ENSG00000203727_47 (sequence is synthesized)
atctgagtagcgaagcacagattcactctaattgaaagcagcagtttggttttgtaaatgtaattgcaattgacactttcttttccctttcagttattattttttttaaaggacgttatg

SEQ ID NO: 737567 - DNA, 120 bp, Artificial Sequence
  ENSG00000203727_48 (sequence is synthesized)
agaaggcactatgaaaagcctaattggaatagcattatgaaccatgtaatgcatgcccatgcacactgtgatttgcaaacatatgtccgctcttcaataaatgttacggctttcacagcg

SEQ ID NO: 737568 - DNA, 120 bp, Artificial Sequence
  ENSG00000203727_49 (sequence is synthesized)
tcccgcaaggtattattatgccgctaccttcaagaagtaatttgcgtgctgtttattggagctgtgaatttaatcatctcaatcccacgctattacaggatgactataagaagatgtatt

SEQ ID NO: 737569 - DNA, 120 bp, Artificial Sequence
  ENSG00000203727_50 (sequence is synthesized)
gacatttctttggacacataattttgcctccattgtgtgttgttttgccagaatactgaaggcagtgtttgtatgatggcacatccaaataaaaagcaggtcctccttttgggacagtga

SEQ ID NO: 737570 - DNA, 120 bp, Artificial Sequence
  ENSG00000203730_0 (sequence is synthesized)
atatataggcccagaactcgagaggcctgtgagggagaggagagcagagaggtcctgagtattgctcttcacgcttcagtcggacaggcctgtattccatgggaaagtccattggccatt

SEQ ID NO: 737571 - DNA, 120 bp, Artificial Sequence
  ENSG00000203730_1 (sequence is synthesized)
tttaactggggctatttcttttctcttatggactatatcaggccacagtggtctccaagggcatgatactcaaaggttgtctcctgtatcctttgtgctctcccaggaataagcaaagat

SEQ ID NO: 737572 - DNA, 120 bp, Artificial Sequence
  ENSG00000203730_2 (sequence is synthesized)
gtgccaggctgtggaaaatagcctatggaggattactaaagatagtgactggctccctcttaacattttatgtggttctctgtcttgatggcgggatggtgctcatgaggaagcaagtgc

SEQ ID NO: 737573 - DNA, 120 bp, Artificial Sequence
  ENSG00000203730_3 (sequence is synthesized)
catcaaggttcatgtaccccaaagagtggcagcacctcaccatgttcatcctcctcactcttaatggctgtgtggacttcatgagcaagaatgtgctgcctcagaggtgtgtgggcctag

SEQ ID NO: 737574 - DNA, 120 bp, Artificial Sequence
  ENSG00000203730_4 (sequence is synthesized)
aaaaaggtaccctggtcctgatcatctacgagctcctgctgctgatggtgtcacatgttaaagattcagaaggggtggagctgcacgtttattctctgctcatcttggtggtgttcctgc

SEQ ID NO: 737575 - DNA, 120 bp, Artificial Sequence
  ENSG00000203730_5 (sequence is synthesized)
tgttgctggtgttgactgcagagctgtgggctcccaacatgtgtcatctccagctgatggagacctttctgattctgatgatgggctcctggctgatgcaggcaggctttattctataca

SEQ ID NO: 737576 - DNA, 120 bp, Artificial Sequence
  ENSG00000203730_6 (sequence is synthesized)
gacccgtctctggctacccatggcaggacgatgacatcagtgacatcatgtttgtcaccaccttcttctgctggcatgtgatgatcaatgcctcattcctgttgggaatctatggcttct

SEQ ID NO: 737577 - DNA, 120 bp, Artificial Sequence
  ENSG00000203730_7 (sequence is synthesized)
cttccttttggtatcattgtttcagacccagcttgaagctgactgggcccaaagaagctccatattatgcaagcactccaggacccctctacaagttgctacaggaagtggagcagtcag

SEQ ID NO: 737578 - DNA, 120 bp, Artificial Sequence
  ENSG00000203730_8 (sequence is synthesized)
agaaagaggaccaggctctcctccttccaaagagctccccctgagacagggcctacagtggctggcacatcgtccacctcatcttcctcctgttggctcctcagccacgagcatggtacc

SEQ ID NO: 737579 - DNA, 120 bp, Artificial Sequence
  ENSG00000203730_9 (sequence is synthesized)
tcctcctgttggctcctcagccacgagcatggtaccctccttggtaaaggtaatggccttgaaggctagcagttggtcccgtctgctggttcattttcttttcttctcttttcttttttt

SEQ ID NO: 737580 - DNA, 120 bp, Artificial Sequence
  ENSG00000203730_10 (sequence is synthesized)
agcctcccgagtagctgcaattacaggagcctgccaccatgcccgtgctggtgcattttctgtccctgagcctctaattactgagaagataaggggagagggattgagaaagagacgctg

SEQ ID NO: 737581 - DNA, 120 bp, Artificial Sequence
  ENSG00000203730_11 (sequence is synthesized)
ctgagaagataaggggagagggattgagaaagagacgctgatgggatttgcgggagggagggaaaaggacgaggagaacacttcttcttagtgtgcaagaaaagccactgggggaagaga

SEQ ID NO: 737582 - DNA, 120 bp, Artificial Sequence
  ENSG00000203730_12 (sequence is synthesized)
atgcaacaaaaggaagagctgtgaagggaggagaacagagtctagcagttatgctgtcattagcgtcatcaggcacaagggattgccttttacctgagggaataaagacttctcacaact

SEQ ID NO: 737583 - DNA, 120 bp, Artificial Sequence
  ENSG00000203730_13 (sequence is synthesized)
caaaactggacccattcaaatctcatcttgataaagaaaagtgggtactttacgtgctcaccaaagtggtgccaccatgtggaaatagcatgatagaatttataattaattcatacaggc

SEQ ID NO: 737584 - DNA, 120 bp, Artificial Sequence
  ENSG00000203730_14 (sequence is synthesized)
tgaaattatgctcgctttgcctccttctctctccgcagctttcaagaattggcttcatttcaaactttacatataaagtgagactttttaaatacttaataacatttcaaatttccataa

SEQ ID NO: 737585 - DNA, 120 bp, Artificial Sequence
  ENSG00000203730_15 (sequence is synthesized)
tttaaatttgtatagaattcaactgctatagcatttttatagcattcaaatgcttggtacttccctgacttctcattttattactcttattctagcccaaactttccttttcaccatgac

SEQ ID NO: 737586 - DNA, 120 bp, Artificial Sequence
  ENSG00000203730_16 (sequence is synthesized)
cacccttgcacatgcaatttagcagataccattcttgggtctttgcaaatttcttttccttgcaaatcacagccagtcatcctacagtcacatatttaccatgttattcgattcccagaa

SEQ ID NO: 737587 - DNA, 120 bp, Artificial Sequence
  ENSG00000203730_17 (sequence is synthesized)
taaacctacatccacccccacaccgcaccaagtatccccaaggtggccttctccagaactcttactgattcccttgttttggaactcttgggcacttacattaaatctgctttgttagtt

SEQ ID NO: 737588 - DNA, 120 bp, Artificial Sequence
  ENSG00000203730_18 (sequence is synthesized)
tgctcatacaggtgacccactttcttttatactgctgctgaaatcattttctttcagaaggttcttcctcacccactaaagtacaggctcctaaagggaaaagactttgccttatccaag

SEQ ID NO: 737589 - DNA, 120 bp, Artificial Sequence
  ENSG00000203730_19 (sequence is synthesized)
ttaccaaatttcctatgtatactccagctatggatcatggttatgtttaataaagccttctttgcttccagagtcttccctaatcctgtttcttctaaatgtattgctggacaggttgga

SEQ ID NO: 737590 - DNA, 120 bp, Artificial Sequence
  ENSG00000203730_20 (sequence is synthesized)
ggttttgtgaatctctctgggtgacaacaacagtcctgaacactgagtcactgccttagtaatgcacccactctcttccttgttttggggtataataaaatccagtaacttgtttctgaa

SEQ ID NO: 737591 - DNA, 120 bp, Artificial Sequence
  ENSG00000203733_0 (sequence is synthesized)
gcagaagcaaactggcaatgtgggtcaagaattaaccaacaggaatgccaggataacatctcctgagacatgtctctaaattacatcaaaaacttctatgaaggatgtgttaaacctcca

SEQ ID NO: 737592 - DNA, 120 bp, Artificial Sequence
  ENSG00000203733_1 (sequence is synthesized)
actgtgattggtcaattccacacccttttctttggatcgatccgaatattcttcctcggggtgctaggctttgcagtttatgggaatgaggccttgcacttcatttgcgatccagacaaa

SEQ ID NO: 737593 - DNA, 120 bp, Artificial Sequence
  ENSG00000203733_2 (sequence is synthesized)
agagaagtaaacctcttctgttacaatcagttcaggccaatcactccacaagtaagtttttctgcattacaactagttattgtcctggttcctggagctcttttccacctttatgctgca

SEQ ID NO: 737594 - DNA, 120 bp, Artificial Sequence
  ENSG00000203733_3 (sequence is synthesized)
gaattagtctagcggcaatagcattctggcttcagatttacctctttggtttccaagtaaaatctctttacctgtgtgatgctagatctcttggggaaaacatgattataagatgcatgg

SEQ ID NO: 737595 - DNA, 120 bp, Artificial Sequence
  ENSG00000203733_4 (sequence is synthesized)
ttccagaacactttgaaaaaaccatttttctcattgcaataaatacatttacaacaattacaattttattatttgttgctgagatttttgagatcatatttagaagattatactttccat

SEQ ID NO: 737596 - DNA, 120 bp, Artificial Sequence
  ENSG00000203733_5 (sequence is synthesized)
tcagacaatgaccaaataattacctattgtcatgctgcagttatttatcatttttatttagttttatcttactcagtgagtacaatttcaaaacaaacttacttcaatgtgtctgaaatt

SEQ ID NO: 737597 - DNA, 120 bp, Artificial Sequence
  ENSG00000203733_6 (sequence is synthesized)
tttgtctactataaaatatagtgcctggttgtaaggtaaggattcttgaagaaatatttcattttaattttgatcacttttattagaaaatatacacagaactactgttaatttattttt

SEQ ID NO: 737598 - DNA, 120 bp, Artificial Sequence
  ENSG00000203734_0 (sequence is synthesized)
agttggcgcactcgattttcactgcgcggttccaagaggagacagccgccactgtaccgggcctcatagccacttcctagaggtgatcttaattgcacacctattgaaataaacctgtag

SEQ ID NO: 737599 - DNA, 120 bp, Artificial Sequence
  ENSG00000203734_1 (sequence is synthesized)
tttctagaagtggaagaaaatttgctgagacgtcagctggggattcttcctggagaactccagaaatggagagcttccacaccagatttagtgcctggacaccttttagcaacaagtcat

SEQ ID NO: 737600 - DNA, 120 bp, Artificial Sequence
  ENSG00000203734_2 (sequence is synthesized)
taaatagacagctctttcaggaaagagtggctcttataagtcattggtttgacctctggactaacaagcaacgtcaagaattcttattcgcaatttttttaagatgcactaaatcacaat

SEQ ID NO: 737601 - DNA, 120 bp, Artificial Sequence
  ENSG00000203734_3 (sequence is synthesized)
taaggtttgtccaagactggttttcagaaaggatgcaagtggccaaagtggacttctctacagtgttaccacgcttcatttctctatatatcttttcctttttgagtccgaaagatttgt

SEQ ID NO: 737602 - DNA, 120 bp, Artificial Sequence
  ENSG00000203734_4 (sequence is synthesized)
gtgccgctgcccaagtcagctggccctggaagtttttaactgaacaggattgcttatggatgcccaaatgcgttaagttcggatggtttctgccctatactccaacagataatgagtatg

SEQ ID NO: 737603 - DNA, 120 bp, Artificial Sequence
  ENSG00000203734_5 (sequence is synthesized)
gtgcttggaagcgccattacattgcttgtgtgtcccacttagactggctgacacctagggaggctgctgctacttatgggacgctgaatgaacccaaaacagaagatgaggaactactgg

SEQ ID NO: 737604 - DNA, 120 bp, Artificial Sequence
  ENSG00000203734_6 (sequence is synthesized)
agagacaaagagaaaagtgcctgaggaaaagaatttgggagaaaattgcactacgtaagaaggagttattcaaagttcgacccccttgggtgagtggaacttgctgctctagcgtgctaa

SEQ ID NO: 737605 - DNA, 120 bp, Artificial Sequence
  ENSG00000203734_7 (sequence is synthesized)
agcccagatgccaaccacgcctctcccagactgtaagggagcgagtgggattacatgaagctttggagaaacagcttgttttgacatcgttagaaaccttgcccaagcgaagcaatattt

SEQ ID NO: 737606 - DNA, 120 bp, Artificial Sequence
  ENSG00000203734_8 (sequence is synthesized)
ctggaagccattcctaccctttattatcaaagaaaaattggcatggagttcataaaaatgatgacagatcttcatatgctctccggccacacttcatgttaatatcatcccggattcctg

SEQ ID NO: 737607 - DNA, 120 bp, Artificial Sequence
  ENSG00000203734_9 (sequence is synthesized)
cgtatgagatggtgatggagagtgtgaaggctggtgttgtttctgtggtatatgaacacagcgtaaccttggaaagccttctgtatcttatagaaaaagctctggatgggcagaaggcac

SEQ ID NO: 737608 - DNA, 120 bp, Artificial Sequence
  ENSG00000203734_10 (sequence is synthesized)
agagcatcggaatatttagcgatggagacagcagagaaatcaatttactccaaggctataaaattggtgttaaaaatttactgaggcctgaagtgagagatttctgggagaaattaggaa

SEQ ID NO: 737609 - DNA, 120 bp, Artificial Sequence
  ENSG00000203734_11 (sequence is synthesized)
gctatgtggccactgaagaagaagggggtcacgtggacttcttcgtgccccttggagcatcagaggcaggaattgaagttctttcccagctgtctcaactaactggcacgttctttacgg

SEQ ID NO: 737610 - DNA, 120 bp, Artificial Sequence
  ENSG00000203734_12 (sequence is synthesized)
cccccactgggattgcaactggctcttaccagcacattcttagtgattggctgggatcccaatggggaaaggccccctcttccatctacttctgcgaatcgaagctacagacgtggtcca

SEQ ID NO: 737611 - DNA, 120 bp, Artificial Sequence
  ENSG00000203734_13 (sequence is synthesized)
gcttcacagacttcctagaagaaaccttgaaaacagtaaggaagcagctgtatcctttcttcaaggaactgcagaagagcatcagtggcaggatgatagggcagtttatgtttgacacca

SEQ ID NO: 737612 - DNA, 120 bp, Artificial Sequence
  ENSG00000203734_14 (sequence is synthesized)
tgggtatgaccaacattctaaacaaccaagatactgcgcaagctctggcagatggattgatggagttgtcaaaagaagattctgaaagaaatgttgtagaagacaattcttgggacacaa

SEQ ID NO: 737613 - DNA, 120 bp, Artificial Sequence
  ENSG00000203734_15 (sequence is synthesized)
agtccaggctcagcaaaaatgatttaaattttgaagcactgattaatctggagagaatactccagaaggactcagcagaaaagcgagctagagttgtcagagaactcttacagagtgaga

SEQ ID NO: 737614 - DNA, 120 bp, Artificial Sequence
  ENSG00000203734_16 (sequence is synthesized)
gaaaatacgtgcagatactggaaattgtgagagatgtttatgtcgcaccactgaaagcagcattgtcatcaaacagagcgattctgagtgctgccaatatccagatcattttctgtgaca

SEQ ID NO: 737615 - DNA, 120 bp, Artificial Sequence
  ENSG00000203734_17 (sequence is synthesized)
ttctacagattttaagtctcaacaggcagtttctagataacctgagagacagactgcaggaatggggcccagctcactgtgtgggagaaatagtcacgaagtttggaagccagttaaaca

SEQ ID NO: 737616 - DNA, 120 bp, Artificial Sequence
  ENSG00000203734_18 (sequence is synthesized)
taccctgtcattctgaaaactattgagaagtgcagagaaatgataccagcattccgaactttcctgaagaggcatgataagaccattgttaccaaaatgctgagcctgccagagctgctg

SEQ ID NO: 737617 - DNA, 120 bp, Artificial Sequence
  ENSG00000203734_19 (sequence is synthesized)
ctgtacccatcccgaagatttgaagaataccttaatcttctctacgctgtcaggcttcatacccctgcagagcatgttgaccgtggggacttgaccactgcaattgaccaaatcaaaaaa

SEQ ID NO: 737618 - DNA, 120 bp, Artificial Sequence
  ENSG00000203734_20 (sequence is synthesized)
tataaaggttatatagatcagatgaagcaaaacatcactatgaaggatcatctgtcagatatacagagaatcatctggggatgccctactctatcagaagtaaacagatatctgattagg

SEQ ID NO: 737619 - DNA, 120 bp, Artificial Sequence
  ENSG00000203734_21 (sequence is synthesized)
gtacaagatgtagcccaacttcattgctgtgatgaagaaataagtttctctttaaggctctatgaacacatccatgatctcagccttttcctcttcaatgatgccctgctcgtttctagt

SEQ ID NO: 737620 - DNA, 120 bp, Artificial Sequence
  ENSG00000203734_22 (sequence is synthesized)
cggggcacatctcacactccatttgagaggacttcaaaaacaacctaccagttcattgcatcagtggcccttcatcggttactcatagaaaatattccagattccaagtatgtcaagaat

SEQ ID NO: 737621 - DNA, 120 bp, Artificial Sequence
  ENSG00000203734_23 (sequence is synthesized)
gcatttattcttcagggtccaaaatataaatggatttgtgctacagaaatagaggatgataagttcctatggctgtcagtacttcgaaatgcaatcaaaagcagtatggagaagtgagac

SEQ ID NO: 737622 - DNA, 120 bp, Artificial Sequence
  ENSG00000203734_24 (sequence is synthesized)
cgaacttgaaaacttcaggggtgccaattctccccagcaaagacagacaacatgtattttctgttccaaaatatccagtaagaaacagaataactgtcatggatgatgagataaactaag

SEQ ID NO: 737623 - DNA, 120 bp, Artificial Sequence
  ENSG00000203734_25 (sequence is synthesized)
atgacccataggatctttccaacttttaaactttatcacttgtgctcacttatgtagaatgtataagtacattttgagtccaaaattttgaactacttcttttggtagctgtatttcatg

SEQ ID NO: 737624 - DNA, 120 bp, Artificial Sequence
  ENSG00000203734_26 (sequence is synthesized)
gataatattatttagagtaatttgatgtgatgaaacctaagacagagcaagcacattgtgtaaagctttgttttatgatctaatgaaaaaagcagaatgaaagtgtttcttaagtgatca

SEQ ID NO: 737625 - DNA, 120 bp, Artificial Sequence
  ENSG00000203734_27 (sequence is synthesized)
gtctagaaagatattttaatttgttggtgatttaccatttttaacattttcatgaaacaattattgatttaaaatatggataagagggctgggcatgatgactcacgcctgtaatcccag

SEQ ID NO: 737626 - DNA, 120 bp, Artificial Sequence
  ENSG00000203734_28 (sequence is synthesized)
cctgtagtccctgctacttgcgacgctgaggcaggagaagaatcacttgtacccgggagtcggaggttgtagtaagctgagatggctccattgcacttcagcctgggtgacaagagcgaa

SEQ ID NO: 737627 - DNA, 120 bp, Artificial Sequence
  ENSG00000203734_29 (sequence is synthesized)
aaaaaaaagaaaaaaaaaaggacaagaaatacaaatggcaatttactcaaaaacttgtcacacttatccttagtatgaatgtactcctctagagagcattaaagatataccactacaaag

SEQ ID NO: 737628 - DNA, 120 bp, Artificial Sequence
  ENSG00000203734_30 (sequence is synthesized)
accactacaaagtactaaaaagttttctataatttttaagtgttatttattggaaggctaaattctaagaagctttaacaaatatttttgacattgttaaattagaaggctatttttaaa

SEQ ID NO: 737629 - DNA, 120 bp, Artificial Sequence
  ENSG00000203734_31 (sequence is synthesized)
aagcatattttaaaaaacaaaactaaatggaaacagcaaaacttgcttgtaatgaaatacagctgagtaaaaatgtttctttgaaaacaaagacactcagaaaaacaggtgttgagtagt

SEQ ID NO: 737630 - DNA, 120 bp, Artificial Sequence
  ENSG00000203734_32 (sequence is synthesized)
ttcctgggcctttaatgctttaaatttattatttaacaactaaagccatactgaaagccacttggaaacttcagctgatgtatatttttacctagatattgtcaggtaaaaattgtatta

SEQ ID NO: 737631 - DNA, 120 bp, Artificial Sequence
  ENSG00000203734_33 (sequence is synthesized)
atcttggaagcttgaggttgtcagtttcccttgttcttcaaattcttgtttacagtaacaaagtctatcggtgcagtttaggactgtgaatctatagtatttaaacattttttctttcag

SEQ ID NO: 737632 - DNA, 120 bp, Artificial Sequence
  ENSG00000203734_34 (sequence is synthesized)
aaatgaaaatacaaaatcttctatttcttaaaactttaaatcttgttaaaaagatgaacaaaagttaaaatattatgctgttttattggtgtaaaaccacacttctgattctgccaagat

SEQ ID NO: 737633 - DNA, 120 bp, Artificial Sequence
  ENSG00000203734_35 (sequence is synthesized)
agttggcgcactcgattttcactgcgcggttccaagaggagacagccgccactgtaccgggcctcatagccacttcctagaggtaaagaaaaagtcaacctccttggctgatgaatcacg

SEQ ID NO: 737634 - DNA, 120 bp, Artificial Sequence
  ENSG00000203734_36 (sequence is synthesized)
gcagtttctaagtagcatttcctggaacgttcttaatgcttcccattttcccagcaaagtaaaaaacaacttttgtttaaattcagatttgggtgaaagcaggtgatcttaattgcacac

SEQ ID NO: 737635 - DNA, 120 bp, Artificial Sequence
  ENSG00000203737_0 (sequence is synthesized)
actctctgggactctcagctgtgacagaagcactgacactgtctactgaagcaggttctgaaacactcatgtgcggtgtttaacagatgctgggcagggcatctgcttgctgtagccaag

SEQ ID NO: 737636 - DNA, 120 bp, Artificial Sequence
  ENSG00000203737_1 (sequence is synthesized)
tctgcaggtgtctttaaatttccaagccatgaatgaatccaggtggactgaatggaggatcctgaacatgagcagtggcattgtgaatgtgtccgagcgtcactcctgcccacttggatt

SEQ ID NO: 737637 - DNA, 120 bp, Artificial Sequence
  ENSG00000203737_2 (sequence is synthesized)
tggccactacagtgtggtggatgtctgcatcttcgagacagtggttattgtgttgctgacatttctgatcattgctgggaatctaacagttatctttgtctttcattgtgctccactgtt

SEQ ID NO: 737638 - DNA, 120 bp, Artificial Sequence
  ENSG00000203737_3 (sequence is synthesized)
acatcattatactaccagctatttcattcagacgatggcatatgctgatcttttcgttggagttagctgcttggttcctactctgtcacttctccactactccacaggtgtccacgagtc

SEQ ID NO: 737639 - DNA, 120 bp, Artificial Sequence
  ENSG00000203737_4 (sequence is synthesized)
attgacttgccaggtttttggatatatcatctcagttctaaaaagtgtttctatggcatgtcttgcttgcatcagtgtggatcgttatcttgcaataaccaagcctctttcctacaatca

SEQ ID NO: 737640 - DNA, 120 bp, Artificial Sequence
  ENSG00000203737_5 (sequence is synthesized)
actggtcaccccttgtcgcttgagaatttgcattattttgatctggatctactcctgcctaattttcttgccttccttttttggctgggggaaacctggttaccatggtgacatttttga

SEQ ID NO: 737641 - DNA, 120 bp, Artificial Sequence
  ENSG00000203737_6 (sequence is synthesized)
accagtgcctattttactggctttattgtttgtttactttatgctcctgctgcctttgttgtctgcttcacttacttccacattttcaaaatttgccgtcagcacaccaaagagataaat

SEQ ID NO: 737642 - DNA, 120 bp, Artificial Sequence
  ENSG00000203737_7 (sequence is synthesized)
gaccgaagagcccgattccctagtcatgaggtagattcttccagagagactggacacagccctgaccgtcgctacgccatggttttgtttaggataaccagtgtattttatatgctgtgg

SEQ ID NO: 737643 - DNA, 120 bp, Artificial Sequence
  ENSG00000203737_8 (sequence is synthesized)
ctcccctatataatttactttcttctagaaagctcccgggtcttggacaatccaactctgtccttcttaacaacctggcttgcaataagtaatagtttttgtaactgtgtaatatacagc

SEQ ID NO: 737644 - DNA, 120 bp, Artificial Sequence
  ENSG00000203737_9 (sequence is synthesized)
ctctccaacagcgttttccggctaggcctccgaagactgtctgagacaatgtgcacatcctgtatgtgtgtgaaggatcaggaagcacaagaacccaaacctaggaaacgggctaattct

SEQ ID NO: 737645 - DNA, 120 bp, Artificial Sequence
  ENSG00000203737_10 (sequence is synthesized)
tgctccatttgaagagagctacatagtaaatcaaatgtaatctgacagtggttttggatcatattctagattcatctggaaatttgccatcagagaaatatttacttgaatagttgactg

SEQ ID NO: 737646 - DNA, 120 bp, Artificial Sequence
  ENSG00000203737_11 (sequence is synthesized)
taaaatgaagtatgagactaaaggtttctctctttttttttctttttcatggaagaaactaaagggaaggatgtatagagggttagctcatgaaataattatagcatgtgagtattagtg

SEQ ID NO: 737647 - DNA, 120 bp, Artificial Sequence
  ENSG00000203737_12 (sequence is synthesized)
tgcagtaataggaaaaattaagcactgagatgaaaaagaatatctcaaatcttctgcaggacatgagcaagccccttggctcagcatttctgtctttctgtctgactgtaccctgcctct

SEQ ID NO: 737648 - DNA, 120 bp, Artificial Sequence
  ENSG00000203740_0 (sequence is synthesized)
ggtttaaaatgacagtctcaagttcatttagaaagagaaggctaattcaaagaaacagcaaggcaagcttcctttctctgtaggaatcattattatccccctttgtcatggcccaccggg

SEQ ID NO: 737649 - DNA, 120 bp, Artificial Sequence
  ENSG00000203740_1 (sequence is synthesized)
gagcccattttgcctttagatcccgctggcagaagaccgacgatgaactctgtagacatagcatgtcttttatccttcacaaagccattcgcaatgacttctttcagagctatctctacc

SEQ ID NO: 737650 - DNA, 120 bp, Artificial Sequence
  ENSG00000203740_2 (sequence is synthesized)
tgctggaaaaaattcccctggtgaaattgtacgctttaacaagccaagtcatcaatggtgagatgcagttctatgccagagctaaacttttctaccaagaagtaccagccacagaagagg

SEQ ID NO: 737651 - DNA, 120 bp, Artificial Sequence
  ENSG00000203740_3 (sequence is synthesized)
gtatgatgggaaatttcattgaactgtccagcccagacatccaggcctctcagaaatttcttaggaaatttgttggggggcctgggagagctggaacagactgcgccttggactgcggct

SEQ ID NO: 737652 - DNA, 120 bp, Artificial Sequence
  ENSG00000203740_4 (sequence is synthesized)
ttgcctgttttcaacagtgtggagctggtggatatgatggaatcctttctccttgaagcccagaactacctgcaggtcaaaggtgacaaagtagaaagctaccactgctacagcctgcag

SEQ ID NO: 737653 - DNA, 120 bp, Artificial Sequence
  ENSG00000203740_5 (sequence is synthesized)
gaattcacaccccccttcaggagatatgatgtcatctggattcagtgggtctctgggcacctgactgataaggaccttcttgcatttctttcccggtgccgagatggcctgaaagaaaat

SEQ ID NO: 737654 - DNA, 120 bp, Artificial Sequence
  ENSG00000203740_6 (sequence is synthesized)
ggcatcatcatattgaaggacaatgtggcccgggagggctgtatccttgatctctctgacagcagtgtgactcgggacatggacatcctccggagcctaataaggaagagtgggctggtg

SEQ ID NO: 737655 - DNA, 120 bp, Artificial Sequence
  ENSG00000203740_7 (sequence is synthesized)
gtgctgggccaggagaagcaggatggcttcccagagcagtgcatccccgtgtggatgttcgcactgcacagcgacagacactcctgaaaaagcagtgggaatgaacgactggactgggca

SEQ ID NO: 737656 - DNA, 120 bp, Artificial Sequence
  ENSG00000203740_8 (sequence is synthesized)
atctgatacatatctgtcattttgggatttcttttcattggattcctggttaattacgtcatctttcatcgtgcatcttctcttgattgtaaccctcattgggctggaatatagcttcaa

SEQ ID NO: 737657 - DNA, 120 bp, Artificial Sequence
  ENSG00000203747_0 (sequence is synthesized)
attcttggtgctgggtggatccaaatccaggagatggggcaagcatcctgggatggctgagggcacactctggcagattctgtgtgtgtcctcagatgctcagccacagacctttgaggg

SEQ ID NO: 737658 - DNA, 120 bp, Artificial Sequence
  ENSG00000203747_1 (sequence is synthesized)
agtaaagggggcagacccacccaccttgcctccaggctctttccttcctggtcctgttctatggtggggctcccttgccagacttcagactgagaagtcagatgaagtttcaagaaaagg

SEQ ID NO: 737659 - DNA, 120 bp, Artificial Sequence
  ENSG00000203747_2 (sequence is synthesized)
aaattggtgggtgacagagatgggtggaggggctggggaaaggctgtttacttcctcctgtctagtcggtttggtccctttagggctccggatatctttggtgacttgtccactccagtg

SEQ ID NO: 737660 - DNA, 120 bp, Artificial Sequence
  ENSG00000203747_3 (sequence is synthesized)
tggcatcatgtggcagctgctcctcccaactgctctgctacttctagtttcagctggcatgcggactgaagatctcccaaaggctgtggtgttcctggagcctcaatggtacagggtgct

SEQ ID NO: 737661 - DNA, 120 bp, Artificial Sequence
  ENSG00000203747_4 (sequence is synthesized)
cgagaaggacagtgtgactctgaagtgccagggagcctactcccctgaggacaattccacacagtggtttcacaatgagagcctcatctcaagccaggcctcgagctacttcattgacgc

SEQ ID NO: 737662 - DNA, 120 bp, Artificial Sequence
  ENSG00000203747_5 (sequence is synthesized)
tgccacagtcgacgacagtggagagtacaggtgccagacaaacctctccaccctcagtgacccggtgcagctagaagtccatatcggctggctgttgctccaggcccctcggtgggtgtt

SEQ ID NO: 737663 - DNA, 120 bp, Artificial Sequence
  ENSG00000203747_6 (sequence is synthesized)
caaggaggaagaccctattcacctgaggtgtcacagctggaagaacactgctctgcataaggtcacatatttacagaatggcaaaggcaggaagtattttcatcataattctgacttcta

SEQ ID NO: 737664 - DNA, 120 bp, Artificial Sequence
  ENSG00000203747_7 (sequence is synthesized)
cattccaaaagccacactcaaagacagcggctcctacttctgcagggggctttttgggagtaaaaatgtgtcttcagagactgtgaacatcaccatcactcaaggtttggcagtgtcaac

SEQ ID NO: 737665 - DNA, 120 bp, Artificial Sequence
  ENSG00000203747_8 (sequence is synthesized)
catctcatcattctttccacctgggtaccaagtctctttctgcttggtgatggtactcctttttgcagtggacacaggactatatttctctgtgaagacaaacattcgaagctcaacaag

SEQ ID NO: 737666 - DNA, 120 bp, Artificial Sequence
  ENSG00000203747_9 (sequence is synthesized)
ctctggatttgcaaccccatcatcctcaggcctctctacaagcagcaggaaacatagaactcagagccagatcccttatccaactctcgacttttccttggtctccagtggaagggaaaa

SEQ ID NO: 737667 - DNA, 120 bp, Artificial Sequence
  ENSG00000203747_10 (sequence is synthesized)
gcccatgatcttcaagcagggaagccccagtgagtagctgcattcctagaaattgaagtttcagagctacacaaacactttttctgtcccaaccgttccctcacagcaaagcaacaatac

SEQ ID NO: 737668 - DNA, 120 bp, Artificial Sequence
  ENSG00000203747_11 (sequence is synthesized)
aggctagggatggtaatcctttaaacatacaaaaattgctcgtgttataaattacccagtttagaggggaaaaaaaaacaattattcctaaataaatggataagtagaattaatggttga

SEQ ID NO: 737669 - DNA, 120 bp, Artificial Sequence
  ENSG00000203747_12 (sequence is synthesized)
ggcaggaccatacagagtgtgggaactgctggggatctagggaattcagtgggaccaatgaaagcatggctgagaaatagcaggtagtccaggatagtctaagggaggtgttcccatctg

SEQ ID NO: 737670 - DNA, 120 bp, Artificial Sequence
  ENSG00000203747_13 (sequence is synthesized)
agcccagagataagggtgtcttcctagaacattagccgtagtggaattaacaggaaatcatgagggtgacgtagaattgagtcttccaggggactctatcagaactggaccatctccaag

SEQ ID NO: 737671 - DNA, 120 bp, Artificial Sequence
  ENSG00000203747_14 (sequence is synthesized)
tatataacgatgagtcctcttaatgctaggagtagaaaatggtcctaggaaggggactgaggattgcggtggggggtggggtggaaaagaaagtacagaacaaaccctgtgtcactgtcc

SEQ ID NO: 737672 - DNA, 120 bp, Artificial Sequence
  ENSG00000203747_15 (sequence is synthesized)
caagttgctaagtgaacagaactatctcagcatcagaatgagaaagcctgagaagaaagaaccaaccacaagcacacaggaaggaaagcgcaggaggtgaaaatgctttcttggccaggg

SEQ ID NO: 737673 - DNA, 120 bp, Artificial Sequence
  ENSG00000203747_16 (sequence is synthesized)
tagtaagaattagaggttaatgcagggactgtaaaaccaccttttctgcttcaatatctaattcctgtgtagctttgttcattgcatttattaaacaaatgttgtataaccaatactaaa

SEQ ID NO: 737674 - DNA, 120 bp, Artificial Sequence
  ENSG00000203747_17 (sequence is synthesized)
tgtactactgagcttcgctgagttaagttatgaaactttcaaatccttcatcatgtcagttccaatgaggtggggatggagaagacaattgttgcttatgaaagaaagctttagctgtct

SEQ ID NO: 737675 - DNA, 120 bp, Artificial Sequence
  ENSG00000203747_18 (sequence is synthesized)
ctgttttgtaagctttaagcgcaacatttcttggttccaataaagcattttacaagatcttgcatgctactcttagatagaagatgggaaaaccatggtaataaaatatgaatgataaaa

SEQ ID NO: 737676 - DNA, 120 bp, Artificial Sequence
  ENSG00000203747_19 (sequence is synthesized)
ggagccccggctcctaggctgacagaccagcccagatccagtggcccggaggggcctgagctaaatccgcaggacctgggtaacacgaggaagtcggtttggtccctttagggctccgga

SEQ ID NO: 737677 - DNA, 120 bp, Artificial Sequence
  ENSG00000203747_20 (sequence is synthesized)
cctcatgttctctctttgtgaagtctgattacttggtgacatgatcgtgagaataagctctggcgatataagaatttcctctcttgaaggccatgctcagtaaattacttggtgacatga

SEQ ID NO: 737678 - DNA, 120 bp, Artificial Sequence
  ENSG00000203747_21 (sequence is synthesized)
tcgtgagaataagctctggcgatacaagaatttcctctcttgaaggccatgctcagtaataaagttggtctcaccgaggccctgtgacaccttagaaaccacgaattgccaggctgagca

SEQ ID NO: 737679 - DNA, 120 bp, Artificial Sequence
  ENSG00000203747_22 (sequence is synthesized)
ataccagtcccgcccttcccctccctggtgtttacattgagttctccttcacaatttctgcagccactccgtggccaccgtcaccttattcctgactgccacaagagtctttcaatattc

SEQ ID NO: 737680 - DNA, 120 bp, Artificial Sequence
  ENSG00000203747_23 (sequence is synthesized)
attgtgagagtaaccaacgtggggttacgggggagaatctggagagaagagaagaggttaacaaccctcccacttcctggccacccccctccaccttttctgggctccggatatctttgg

SEQ ID NO: 737681 - DNA, 120 bp, Artificial Sequence
  ENSG00000203756_0 (sequence is synthesized)
actactgcgtctcacacttagtctccaggagtaattgaaaagctcacggtgacaattgtgtcttcttccagatgtcatcgctataaggagtggggctttcatcacctccttgacgtagga

SEQ ID NO: 737682 - DNA, 120 bp, Artificial Sequence
  ENSG00000203756_1 (sequence is synthesized)
tgtgtacatggctctccaggtcagagttgctccaagcaaggttgttttgcagaagtttcttctatgtgtcattcttttctacactgtgtactatgtgtccctgagcatgggctgcgtgat

SEQ ID NO: 737683 - DNA, 120 bp, Artificial Sequence
  ENSG00000203756_2 (sequence is synthesized)
tttgtttgtggattgttttttgttccagttgtggaagaatgggtttgggattatgctatttcagtcactattcttcatgttgccatcacttcaactgttatgttggaattccccttgaca

SEQ ID NO: 737684 - DNA, 120 bp, Artificial Sequence
  ENSG00000203756_3 (sequence is synthesized)
tcacattggtgggctgctttaggtatatcaaaattgcttgtttagattctctaatgcacagaaataatgttaaatagaataactgtggaaatatattttattttctcatagattttacaa

SEQ ID NO: 737685 - DNA, 120 bp, Artificial Sequence
  ENSG00000203756_4 (sequence is synthesized)
gtttctaatttaagtatgagacagtaattactcatacagccagagaggattccaagtccctgcctatttgccgcactatctaaaaacaatcaactcatctttcaaatctgaccaaactac

SEQ ID NO: 737686 - DNA, 120 bp, Artificial Sequence
  ENSG00000203757_0 (sequence is synthesized)
cccaggcagactgaggagtccctgtgtttttggcaaaggtagctctactagaaatatggagagcggaaaccaatcaacagtgactgaatttatcttcactggattccctcagcttcagga

SEQ ID NO: 737687 - DNA, 120 bp, Artificial Sequence
  ENSG00000203757_1 (sequence is synthesized)
tggtagtctcctgtacttctttcctttacttttcatctatacttttattatcattgataacttattaatcttctctgctgtaaggctggacacccatctccacaaccccatgtataattt

SEQ ID NO: 737688 - DNA, 120 bp, Artificial Sequence
  ENSG00000203757_2 (sequence is synthesized)
tatcagtatattttcctttctggagatctggtacaccacagccaccattcccaagatgctctccaacctcatcagtgaaaagaaggccatctcaatgactggctgcatcttgcagatgta

SEQ ID NO: 737689 - DNA, 120 bp, Artificial Sequence
  ENSG00000203757_3 (sequence is synthesized)
tttcttccactcacttgaaaactcagaggggatcttgctgaccaccatggccattgacagatacgttgccatctgcaaccctcttcgctatcaaatgatcatgaccccccggctctgtgc

SEQ ID NO: 737690 - DNA, 120 bp, Artificial Sequence
  ENSG00000203757_4 (sequence is synthesized)
tcaactctctgcaggttcctgcctcttcggtttccttatcctgcttcccgagattgtgatgatttccacactgcctttctgtgggcccaaccaaatccatcagatcttctgtgacttggt

SEQ ID NO: 737691 - DNA, 120 bp, Artificial Sequence
  ENSG00000203757_5 (sequence is synthesized)
ccctgtgctaagcctggcctgtacagacacgtccatgattctgattgaggatgtgattcatgctgtgaccatcatcattaccttcctaatcattgccctgtcctatgtaagaattgtcac

SEQ ID NO: 737692 - DNA, 120 bp, Artificial Sequence
  ENSG00000203757_6 (sequence is synthesized)
tgtgatattgaggattccctcttctgaagggaggcaaaaggctttttctacctgtgcaggccacctcatggtcttcccgatattctttggcagtgtatcactcatgtacttgcgtttcag

SEQ ID NO: 737693 - DNA, 120 bp, Artificial Sequence
  ENSG00000203757_7 (sequence is synthesized)
ttactgtacttgctccattcttcaatcccatcatttatagcctgagaaacaaggacatgaacaatgcgattaaaaaactgttctgtcttcaaaaagtgttgaacaagcctggaggttaat

SEQ ID NO: 737694 - DNA, 66 bp, Artificial Sequence
  ENSG00000203757_8 (sequence is synthesized)
ttctgtcttcaaaaagtgttgaacaagcctggaggttaatacagagccacaggttcccttccgttg

SEQ ID NO: 737695 - DNA, 120 bp, Artificial Sequence
  ENSG00000203757_9 (sequence is synthesized)
ctctgcctcccaaaatgctgggattacagctgtgagccaccgcatctggccctttccattgctttaatgtttgtctaacatattagaacatgagattactctatacctagtgctttgtca

SEQ ID NO: 737696 - DNA, 120 bp, Artificial Sequence
  ENSG00000203757_10 (sequence is synthesized)
tattagaacatgagattactctatacctagtgctttgtcacactgaaatttctgtcatcctaattattttccctatacctagaaaaatatttatactctctgtgtcatcgttataaaagt

SEQ ID NO: 737697 - DNA, 120 bp, Artificial Sequence
  ENSG00000203757_11 (sequence is synthesized)
tgctgtgcatatcatgaggaaccttattatgtggctgaataactgtagtttctttcttctgaaatgctgtggttaaagaaaatttgtttgccactttagagggttagaactacagagctt

SEQ ID NO: 737698 - DNA, 120 bp, Artificial Sequence
  ENSG00000203757_12 (sequence is synthesized)
gagcttcagaagctgacaatgtgctctgtggtagtatgtgtctatttaggtaacacatcttagaaaagtttttttgtttaattatgagtcatggattacctcattggggttttccagaaa

SEQ ID NO: 737699 - DNA, 120 bp, Artificial Sequence
  ENSG00000203757_13 (sequence is synthesized)
gttttccagaaatagagatctaagaaaaagcccaaacaacatttaattaagttatatctttatttttagttatgtagttacctattcattagaataattacatgtttagtaagattagat

SEQ ID NO: 737700 - DNA, 120 bp, Artificial Sequence
  ENSG00000203760_0 (sequence is synthesized)
atacggaccggattgttttcgctggcccagtgtccccggagcttgtgtgcgatacagagagcacctcggaagctgaggcagctggtacttgacagagaggatggcgctgtcgaccatagt

SEQ ID NO: 737701 - DNA, 120 bp, Artificial Sequence
  ENSG00000203760_1 (sequence is synthesized)
ctcccagaggaagcagataaagcggaaggctccccgtggctttctaaagcgagtcttcaagcgaaagaagcctcaacttcgtctggagaaaagtggtgacttattggtccatctgaactg

SEQ ID NO: 737702 - DNA, 120 bp, Artificial Sequence
  ENSG00000203760_2 (sequence is synthesized)
tttactgtttgttcatcgattagcagaagagtccaggacaaacgcttgtgcgagtaaatgtagagtcattaacaaggagcatgtactggccgcagcaaaggtaattctaaagaagagcag

SEQ ID NO: 737703 - DNA, 120 bp, Artificial Sequence
  ENSG00000203760_3 (sequence is synthesized)
agttatgatgcattcttttgggtggtaacagatcataaagacattttttacacatcagttaatatgggattattaaatattggctataagtgatgtgtgtgtttgtattttttttctggc

SEQ ID NO: 737704 - DNA, 120 bp, Artificial Sequence
  ENSG00000203760_4 (sequence is synthesized)
atgaaatatctcaagtaaatgcataggactatttaacccttttatgggaattactattatttttattttaaatgtcctctagttcagtttgcttttgttttgttgctgctgcaaatattt

SEQ ID NO: 737705 - DNA, 120 bp, Artificial Sequence
  ENSG00000203760_5 (sequence is synthesized)
gctgctgcaaatattttatgtatcaaaaatgaaatcttactatattaaatactttgaaaatgtacttcttagaattaagtttatatatatttagatttagccacagttaactatggaatt

SEQ ID NO: 737706 - DNA, 120 bp, Artificial Sequence
  ENSG00000203772_0 (sequence is synthesized)
ggctgagggtccgcgccgccgcccgcccgctccttcccgctcggccgcggcctcagggacggatactccagcgcgcggttccaaccgaggcccgtggtttagccccacgaagatgaactg

SEQ ID NO: 737707 - DNA, 120 bp, Artificial Sequence
  ENSG00000203772_1 (sequence is synthesized)
atgaactgggcacccgcaacgtgctgggctctgctactggcggccgccttcctctgcgacagcggcgcagccaagggcggccgcggaggtgcgcggggcagtgcccggggaggggtccgc

SEQ ID NO: 737708 - DNA, 80 bp, Artificial Sequence
  ENSG00000203772_2 (sequence is synthesized)
gtgcgcgcggggcctcgagggtgcgcgtgaggccggcgcagcgctacggtgccccgggctcctccctgcgcgtggctgcc

SEQ ID NO: 737709 - DNA, 120 bp, Artificial Sequence
  ENSG00000203772_3 (sequence is synthesized)
ggcggcgggctcgggctggagaagggccgcgggacccggggaacgcggcctggaggacgaggaggacggggtgcccggaggcaacgggacaggccccggcatctacagctaccgggcgtg

SEQ ID NO: 737710 - DNA, 120 bp, Artificial Sequence
  ENSG00000203772_4 (sequence is synthesized)
gacttcgggcgctggacccacgcgcggcccgcgtctctgtctcgtgctgggcggcgccctcggagccctggggctgctgcggccctaggcctggctgggctcggggaccacatctggccc

SEQ ID NO: 737711 - DNA, 120 bp, Artificial Sequence
  ENSG00000203772_5 (sequence is synthesized)
ccggcccgcgccatcccccaggatcctccggcctgggctcccccttcctcccttgcccacggtcttggagccccactgggtgcaggagctgctggctgtccctgtggacccgccatccac

SEQ ID NO: 737712 - DNA, 120 bp, Artificial Sequence
  ENSG00000203772_6 (sequence is synthesized)
cgtcctgcccacgccgcctcagcctgccacctcccacctagaggagaccatgggccctgccccacccactccaggatgttagggtcccctcagccaaaaaggcagctgcctgtggctcct

SEQ ID NO: 737713 - DNA, 120 bp, Artificial Sequence
  ENSG00000203772_7 (sequence is synthesized)
gtaccaaccgcccagccacgctccatcgccgcccaaagggaggtgccaaggccaggaacccaagccaccccggctcccctcgcctgcccaggggccgtggtgactcacgggcagggaggc

SEQ ID NO: 737714 - DNA, 120 bp, Artificial Sequence
  ENSG00000203772_8 (sequence is synthesized)
gacatcaggctggttctgccactgagcccctgaggaatctgaccctccccaaaagaagcagtgaaatggaccaaaggacttaagaatttggggggaagtgagggaaaaacgttaggtgct

SEQ ID NO: 737715 - DNA, 120 bp, Artificial Sequence
  ENSG00000203772_9 (sequence is synthesized)
aaccacctgcccagaagagtggatctcacagcccaggaacattcccaagcaggaaaaccgtccgtccgaggaacgtccatcctggctctctgcggctggtgggaaaacacaccctgccct

SEQ ID NO: 737716 - DNA, 120 bp, Artificial Sequence
  ENSG00000203772_10 (sequence is synthesized)
gaggggctgtccaggccttctcccccacaccctcaggccgagatccgtgagagacccactttgctccaacaacttgaaacaagtcactttaccctccttaggacccattttgggggggaa

SEQ ID NO: 737717 - DNA, 120 bp, Artificial Sequence
  ENSG00000203772_11 (sequence is synthesized)
aaaccaacacattccagagctttccaagtcctttgaacttcaggttcacattcagggatcacacagttctgcctgttctcagggcacagcaactgccaatcccgctgaagaggcctccct

SEQ ID NO: 737718 - DNA, 120 bp, Artificial Sequence
  ENSG00000203772_12 (sequence is synthesized)
gggcacagcacaggctgcacggtgcacgcatttccctgaaggcagccccttcttcggaagcagctgttccaggcctcggaacagggcctgggtatccgcgtggtgggctggcagctgacg

SEQ ID NO: 737719 - DNA, 120 bp, Artificial Sequence
  ENSG00000203772_13 (sequence is synthesized)
agtggagccaggagctaactcagaccccaaagcaagcagggggccagtggcggggcccagcgcccagcaggacacccatgcaagaggctgagccccccaacatccaaggacaggagagac

SEQ ID NO: 737720 - DNA, 120 bp, Artificial Sequence
  ENSG00000203772_14 (sequence is synthesized)
atggagtggcgctggacagtcacgacaaggacttgcctccagcactggacacacctgtgttaagaccagccctctgcttcccagtcccgccagcctggggcatcctccatgggctcagca

SEQ ID NO: 737721 - DNA, 120 bp, Artificial Sequence
  ENSG00000203772_15 (sequence is synthesized)
ctgagaggtcttgggtctgccacgttctctagctctccagtcacccactcatccagggtaggaggggttctccctgccccccgccgtggccttgggatctcaccctctccatgtcctggg

SEQ ID NO: 737722 - DNA, 120 bp, Artificial Sequence
  ENSG00000203772_16 (sequence is synthesized)
gacagcctcgccctcagccggactgcatccctcctgggcctgagcctcgggactcagtggacaccaaagtcaagaccagcacccaccacgggccctgccagcctctgccttccccagctg

SEQ ID NO: 737723 - DNA, 120 bp, Artificial Sequence
  ENSG00000203772_17 (sequence is synthesized)
gcctgggttctggcctgggtgaggatctggaagctgttggcaggactcaaccaagcactgctctctagctccagggcactaagccacaggaggcagcgccctgcagcctcccgtccacac

SEQ ID NO: 737724 - DNA, 120 bp, Artificial Sequence
  ENSG00000203772_18 (sequence is synthesized)
tgccagcaatgcccctggcccagtgagcccagacgctcctccaccccttccagaccaagctcaacgcctccaagaccagcaggccaaggccaagccctgccccagatcctcataggcaga

SEQ ID NO: 737725 - DNA, 120 bp, Artificial Sequence
  ENSG00000203772_19 (sequence is synthesized)
gaagcccttctgacatttcccccaggaggcagggggtggtctgagtctcctcacagcagagagacccaccggagccccctcaactttgcagatgcccacctggaaaatgggctgagctgc

SEQ ID NO: 737726 - DNA, 120 bp, Artificial Sequence
  ENSG00000203772_20 (sequence is synthesized)
accagaccctcacacaccacagcactgcaagctgatggaatgttccagttatgatggacacttcgtgatctgcaatgactgttgattcagcacattagcatctgacacagccaacctgaa

SEQ ID NO: 737727 - DNA, 120 bp, Artificial Sequence
  ENSG00000203772_21 (sequence is synthesized)
tacttcctgccccaggcggtcagggttatggcacgatgcaggtggcactcaggggctaacttcaggctgatgagtgtgtggggtatggggcagcagaggcagccagccagcaaagagggg

SEQ ID NO: 737728 - DNA, 120 bp, Artificial Sequence
  ENSG00000203772_22 (sequence is synthesized)
ccactgagcaccagggccctggtggaggctgctgtgggacggtcaggccaccaccgcaaagaggcagccggagcttctgcacaggatgtccctggccccaggtcctgcagcaccttagtc

SEQ ID NO: 737729 - DNA, 120 bp, Artificial Sequence
  ENSG00000203772_23 (sequence is synthesized)
catactaccagccccacccaccttccttcctcttccctcttctaggacacaggctgtggaccccttcaggtgcactataatggggctggaggggcccccacatctctcagccccactaat

SEQ ID NO: 737730 - DNA, 120 bp, Artificial Sequence
  ENSG00000203772_24 (sequence is synthesized)
gcagaatcccactacccgtgagctagaaggtgctcagaggccaggggtctctactgcccatgccgggcggccttccagtcattgcacagcaaagccatgtgcagggcgtccccctcaacc

SEQ ID NO: 737731 - DNA, 120 bp, Artificial Sequence
  ENSG00000203772_25 (sequence is synthesized)
ctgccctgaacatgccccagggcactgaggggcgaagccagtgcttgggctctgctgctgggagtctctggtctgtgtctgtgtgtgcctgtaagtgtgaaataaacctctctgatggca

SEQ ID NO: 737732 - DNA, 120 bp, Artificial Sequence
  ENSG00000203778_0 (sequence is synthesized)
gtcagaaggccgcgcaagtgcacttgcgtgtcaccgttaccgtagcgactgggcttctggactgtatatcctagctgccttgtcaacatcttcgagcatcggcagctccggaggccgggg

SEQ ID NO: 737733 - DNA, 120 bp, Artificial Sequence
  ENSG00000203778_1 (sequence is synthesized)
taactggcagcaggtaggaaactatgtgaaagaatctcctgatgtcataatttccgggtgtcaccggaacatttgatcatcattcctttggcaattccagccttctgtggaaaggccagt

SEQ ID NO: 737734 - DNA, 120 bp, Artificial Sequence
  ENSG00000203778_2 (sequence is synthesized)
agaaagcattgatttattcacctctacaggaatcagactcagcctcttttggttttcagtgaagtatgccttttcaatttggaacccagccaaggaggtttccagtggaaggaggagatt

SEQ ID NO: 737735 - DNA, 120 bp, Artificial Sequence
  ENSG00000203778_3 (sequence is synthesized)
cttcaattgagctggaacctgggctgagctccagtgctgcctgtaatgggaaggagatgtcaccaaccaggcaactccggaggtgccctggaagtcattgcctgacaataactgatgttc

SEQ ID NO: 737736 - DNA, 120 bp, Artificial Sequence
  ENSG00000203778_4 (sequence is synthesized)
ccgtcactgtttatgcaacaacgagaaagccacctgcacaaagcagcaaggaaatgcatcctaaatagcaccattaagtcttttgtcaaggtctgactaggtcaagggtaatggaccagt

SEQ ID NO: 737737 - DNA, 120 bp, Artificial Sequence
  ENSG00000203778_5 (sequence is synthesized)
atcatctggtgatctggtaaacaaataaaagtggtggcacctttagatgatgacaacagttgagctctttacttttagtaagaccgacagaaatgtagtcagtaaagcacatgtagtgat

SEQ ID NO: 737738 - DNA, 120 bp, Artificial Sequence
  ENSG00000203778_6 (sequence is synthesized)
aggctatcagttatgtctgatacataagacagaataatatttcacaattagaaagtaccttagagatcatcttgctcacagtagatcattaatatcaataattaaagatgaagcttaatc

SEQ ID NO: 737739 - DNA, 120 bp, Artificial Sequence
  ENSG00000203778_7 (sequence is synthesized)
caccatggtcatcagtcaggtggggcttattctaaatgcttaatgtgtcttaagctcatttccttgttcatatttgggttgctacttggctaaatcctttcaccttagtaccctaagcca

SEQ ID NO: 737740 - DNA, 120 bp, Artificial Sequence
  ENSG00000203778_8 (sequence is synthesized)
gtttcctggcttgatactatttgataatgctctgctcaggaatgattatattgggtgagaaatggagccctggggttgtgtgttttggaacagtattcaagatcaaagaaagttcttagt

SEQ ID NO: 737741 - DNA, 120 bp, Artificial Sequence
  ENSG00000203778_9 (sequence is synthesized)
ccatggttaatctgcaaggcatttaagccacttccatagaggagcccagattgttggttaaatatattgataatgaagtcaaagctgtggttccaaccccgatttttccaagaaaaatga

SEQ ID NO: 737742 - DNA, 120 bp, Artificial Sequence
  ENSG00000203778_10 (sequence is synthesized)
aaccaggtatcttgataaattgtttacagtaggtattgagaaacctcatgtggattttttaatttggttagatgtgggatcacttttgaggatgaggccagctctctatgttctcttttt

SEQ ID NO: 737743 - DNA, 120 bp, Artificial Sequence
  ENSG00000203778_11 (sequence is synthesized)
cttcttgcagtagtccccagaaactcagtctgctttccttttctctcgatggctgtcagcacccatctaatgaaattgtcttctccaaaagactgactttaggatcagatacaattttca

SEQ ID NO: 737744 - DNA, 120 bp, Artificial Sequence
  ENSG00000203778_12 (sequence is synthesized)
ccagtgttttttgtctaccttgctgcttctgaaaatatacatataagccttttaaaatgaaaagtttattaacttataattaaatagacgtagatgcatatgtgttgcattaggtgaaaa

SEQ ID NO: 737745 - DNA, 120 bp, Artificial Sequence
  ENSG00000203778_13 (sequence is synthesized)
gaaaaactgccagggagttataagaggaaaaactctcagagctcacactgagctgggagaagtttgaatgccaaccagttaaagtggaaagatcttgaacatgtggggcattgagtagag

SEQ ID NO: 737746 - DNA, 120 bp, Artificial Sequence
  ENSG00000203778_14 (sequence is synthesized)
actcagaaaggttgtactttcataagagatccaaactggagctagactaaaggctaatgtataccaattttaagaaagcttaaaaataagccttgagagactcaagatgatctctaagta

SEQ ID NO: 737747 - DNA, 120 bp, Artificial Sequence
  ENSG00000203778_15 (sequence is synthesized)
acctcattttatctgccaaataaaaatagaacattccttaaaggaagaaaacaaaatcgaggcaggaaattgcctgaggctggagaaaaaatgacaggaaggagaaaggagtgatgaaaa

SEQ ID NO: 737748 - DNA, 66 bp, Artificial Sequence
  ENSG00000203778_16 (sequence is synthesized)
cctgtaatcctggcactttgggaggccgaagtggatggattatctgaggtcaggcattcgaatcgg

SEQ ID NO: 737749 - DNA, 120 bp, Artificial Sequence
  ENSG00000203778_17 (sequence is synthesized)
agagtgagactttgtctcaaaaaaaaagaaaaacaaagaaaaattcctcagagctcatacaaggctgggtagaatatgtgtttcaacaatagtggatcttttaatatagtacatggatca

SEQ ID NO: 737750 - DNA, 120 bp, Artificial Sequence
  ENSG00000203778_18 (sequence is synthesized)
aacaatagtggatcttttaatatagtacatggatcattgagtagagtcttcagcaaaatattggcaaagtagggttagggttaggttagggagatgggaatagactgaagactactctgg

SEQ ID NO: 737751 - DNA, 120 bp, Artificial Sequence
  ENSG00000203778_19 (sequence is synthesized)
acttgccctaacagagtttaagagcaacatttgaaaggatcaaactgatttcaagtaacttgagtgcatccaaggggagaaaacccatcaaaataaaaataaaaactacaataaaatcca

SEQ ID NO: 737752 - DNA, 120 bp, Artificial Sequence
  ENSG00000203780_0 (sequence is synthesized)
cacttcgcctccgggttgtcagggcaaccgtagcgacgccggccctggctgagaggcgttaggagtccgggggttcgcccgcggaggccggggagcagccgaccatggagccccagaaaa

SEQ ID NO: 737753 - DNA, 120 bp, Artificial Sequence
  ENSG00000203780_1 (sequence is synthesized)
tcatgccaccctcaaagcctcatccacctgtcgtgggcaaagtgactcatcacagcattgaattatactgggatctggaaaagaaagccaaacgccaaggacctcaagagcagtggttca

SEQ ID NO: 737754 - DNA, 120 bp, Artificial Sequence
  ENSG00000203780_2 (sequence is synthesized)
ggttctcgattgaagaagaagaccccaaaatgcacacttatggtatcatttatacgggatatgcaacgaagcatgttgttgaaggtctggaaccaaggacgctgtacagatttcgcctga

SEQ ID NO: 737755 - DNA, 120 bp, Artificial Sequence
  ENSG00000203780_3 (sequence is synthesized)
aggtcaccagcccctctggggagtgtgagtacagcccactcgtctcagtgtctacaaccagagagcccataagtagtgagcacttgcaccgggctgtcagtgtgaatgatgaagatttgc

SEQ ID NO: 737756 - DNA, 120 bp, Artificial Sequence
  ENSG00000203780_4 (sequence is synthesized)
tggtccgaatacttcaaggaggccgtgttaaggttgatgttcccaataagtttggctttaccgctctgatggttgctgcccagaaaggatacaccaggcttgtgaaaatcctagtttcta

SEQ ID NO: 737757 - DNA, 120 bp, Artificial Sequence
  ENSG00000203780_5 (sequence is synthesized)
aagacatggcgcttcttggcaggctagagacctgggaggctgtacagctctgcactgggctgcagatggaggccactgcagtgtgattgagtggatgataaaggatggctgtgaggtaga

SEQ ID NO: 737758 - DNA, 120 bp, Artificial Sequence
  ENSG00000203780_6 (sequence is synthesized)
cgtcgtggacactggttcaggatggaccccactcatgagagtctctgcggtgtcgggaaatcagagggtggcctctcttctaattgatgctggggccaatgtgaatgtgaaggacagaaa

SEQ ID NO: 737759 - DNA, 120 bp, Artificial Sequence
  ENSG00000203780_7 (sequence is synthesized)
tggaaagacgccccttatggtggctgtgttaaataatcatgaagagttagttcagttacttcttgacaaaggggcagatgcaagtgtaaaaaatgagttcggcaaaggtgtcctagaaat

SEQ ID NO: 737760 - DNA, 120 bp, Artificial Sequence
  ENSG00000203780_8 (sequence is synthesized)
ggccagagtttttgacagacagagtgtagtctccttattagaagaaaggaaaaaaaagcagaggccaaagaagtcttgtgtctgctgatgagagcaccactcatctgcgaaacgcacgta

SEQ ID NO: 737761 - DNA, 120 bp, Artificial Sequence
  ENSG00000203780_9 (sequence is synthesized)
aaacaaagtgaaccgtgactgttaaactagggatgggaaattctgcatcttggggggctgtacatttatttatttagttgaagattcactgatcccactttgaaatacatctttttacct

SEQ ID NO: 737762 - DNA, 120 bp, Artificial Sequence
  ENSG00000203780_10 (sequence is synthesized)
tgcaagtgtaaaaaatgaggtaaatgagtccatctttatgtaaagattttcctcggagggggagaaaacatttataagcatgtaaaatttttgttgtttcctgtttcagttcggcaaagg

SEQ ID NO: 737763 - DNA, 120 bp, Artificial Sequence
  ENSG00000203780_11 (sequence is synthesized)
tgggctgtgaaaaaaatcatttgttcaacactgatgtcgtgatacaaggacgtgaagatgtgagtcattgtgacatcaccagccagaattgctgggattcagtgagatgactcacagtaa

SEQ ID NO: 737764 - DNA, 120 bp, Artificial Sequence
  ENSG00000203780_12 (sequence is synthesized)
agaaaatatttaatttttaaataccaatttttagagtaagaaattggtttgatagttatctctaatagtgtcaaatgagtattttttttcctttttctcttttttgaatatcatggactt

SEQ ID NO: 737765 - DNA, 120 bp, Artificial Sequence
  ENSG00000203780_13 (sequence is synthesized)
tcctttttctcttttttgaatatcatggactttggatgttttaaaatccaatattttaccctcagttacagtcactattcattttttattgagatataattcagataccataaaattcac

SEQ ID NO: 737766 - DNA, 120 bp, Artificial Sequence
  ENSG00000203780_14 (sequence is synthesized)
cttttaaaacatacaattcaacatctaaaaatgtattcacaaagttgtggaaccaccactactatctacttccagaatattcatcccctgcccccctgaaagaagccctgccctcttcag

SEQ ID NO: 737767 - DNA, 120 bp, Artificial Sequence
  ENSG00000203780_15 (sequence is synthesized)
caatcacaccccattactccttcccttcagccgcaggcaaccgctcacctgctagttctgtcttgcagatgtgcctgttctggacatttcgtataaatggaatcagacaatatgtggcct

SEQ ID NO: 737768 - DNA, 120 bp, Artificial Sequence
  ENSG00000203780_16 (sequence is synthesized)
ttcatggctggcatctttcagcacagtgtttcgaggttcatgcatgtttgtagcacttcatttctaatattccattgtatggatataccacattttgtacatcagttgatggatacgtgt

SEQ ID NO: 737769 - DNA, 120 bp, Artificial Sequence
  ENSG00000203780_17 (sequence is synthesized)
acgttttatatgaacagttcccatggcttttccactcaagttaggatttcttggtttaagccaggtagggtaaaaggtggagctgagtttggtgactgtgcttattgtcaaatgccgctt

SEQ ID NO: 737770 - DNA, 120 bp, Artificial Sequence
  ENSG00000203780_18 (sequence is synthesized)
agtgtctggttcagtagttccttcttccacatgtatccctcagtatctagaaccctgaaattggtttctctaagaaaaccaagaggcccataagggtaatgtatactgttgatttttatg

SEQ ID NO: 737771 - DNA, 120 bp, Artificial Sequence
  ENSG00000203780_19 (sequence is synthesized)
gttatttttcaaaaactaatattttaaacatatcaaaattatttcaaatggtaatgtactcaatgtaccatttggtttaagatgttaacattttgccatatatgtcataaagtcttttca

SEQ ID NO: 737772 - DNA, 120 bp, Artificial Sequence
  ENSG00000203780_20 (sequence is synthesized)
cttgcaccgggctgtcagtgtgaatgatgaagatttgctggtccgaatacttcaaggagggtgagagaactctgtcagttgttttttttcccccatgcctataaagtgcatagaaataca

SEQ ID NO: 737773 - DNA, 120 bp, Artificial Sequence
  ENSG00000203780_21 (sequence is synthesized)
atacgtaggtgcagtgttgaattgcttgccactttgccttacttcctgattagctggaatgatttctgttgtctctaaaaagccactgcttgtttcaaattaaagaatgagtcagcatca

SEQ ID NO: 737774 - DNA, 120 bp, Artificial Sequence
  ENSG00000203780_22 (sequence is synthesized)
tgagagcttctttgacttctgaaatattttaatgatatgtatttaaaatccagaatgtagagacagactcaaacaatagcttgatgcaattaggtgagcttcccatcaggctgttgtgtt

SEQ ID NO: 737775 - DNA, 120 bp, Artificial Sequence
  ENSG00000203780_23 (sequence is synthesized)
cactgacgtggaatggccccgcatggtctaccctggctagcttctctgatctcatgtcataccattgtccccttgtcaactctcttataccacgctggctgcctctcagcctggacaggc

SEQ ID NO: 737776 - DNA, 120 bp, Artificial Sequence
  ENSG00000203780_24 (sequence is synthesized)
caagctggttcccatcgcaggatcttgctcgttgctgtggtcttgaatacatttccttctgtttttatacagctggttccttcacaccatgccaatctcagatgaaacatccccccgccc

SEQ ID NO: 737777 - DNA, 120 bp, Artificial Sequence
  ENSG00000203782_0 (sequence is synthesized)
acattgccagcatcttctctcctcactcacccttcctggtgctttgggctctccttccttctcagacaagatgtcttatcagaaaaagcagcccacccctcagcccccagtggactgcgt

SEQ ID NO: 737778 - DNA, 120 bp, Artificial Sequence
  ENSG00000203782_1 (sequence is synthesized)
gaagacctctggcggcggtggcggtggcggcggcagcggcggtggtggctgcggcttcttcggcggcggcggctcagggggcggtagcagcggttctggctgcggctactccggcggcgg

SEQ ID NO: 737779 - DNA, 120 bp, Artificial Sequence
  ENSG00000203782_2 (sequence is synthesized)
gctactccggcggcggtggctactctggcggcggctgcggcgggggctcctccggcggcgggggcgggggcggcattggaggctgcggagggggctccggtgggagcgtcaagtactccg

SEQ ID NO: 737780 - DNA, 120 bp, Artificial Sequence
  ENSG00000203782_3 (sequence is synthesized)
cggcgggggctctggctgtttctccagcggtgggggcggctccggctgcttctcctccggtggcggcggctcctccgggggcggctccggctgcttctccagcggtgggggcggctcctc

SEQ ID NO: 737781 - DNA, 120 bp, Artificial Sequence
  ENSG00000203782_4 (sequence is synthesized)
cgggggcggctccggctgcttctcctccggcggcggcggcttctcgggccaggcggtccagtgccagagctacggaggcgtctctagcggcggctcctccgggggcggctccggctgctt

SEQ ID NO: 737782 - DNA, 120 bp, Artificial Sequence
  ENSG00000203782_5 (sequence is synthesized)
cggctctggctgcggcggaggctcctctggcggcagcggctccggctacgtctcctcgcagcaggtcactcagacctcgtgcgcgccccagccgagttacggaggggggtcgtccggcgg

SEQ ID NO: 737783 - DNA, 120 bp, Artificial Sequence
  ENSG00000203782_6 (sequence is synthesized)
cggcggcagcggcggaagcggctgcttctccagcggcgggggcggcgggagctccggctgcggcggcggctcctccgggattggcagcggctgcatcatcagtggcgggggctccgtctg

SEQ ID NO: 737784 - DNA, 120 bp, Artificial Sequence
  ENSG00000203782_7 (sequence is synthesized)
cggaggtggttcctctggaggcggcggcggcggctcctccgtgggtggctccgggagtggcaagggcgtcccgatctgccaccagacccagcagaagcaggcgcctacctggccgtccaa

SEQ ID NO: 737785 - DNA, 120 bp, Artificial Sequence
  ENSG00000203782_8 (sequence is synthesized)
atagatcccccagggtaccacggaggcgaaggagttggaggtgttttccaggggcaccgatgggcttagagctctcatgatgctacccgaggtttgcaaatccttcatgtcttaacctac

SEQ ID NO: 737786 - DNA, 120 bp, Artificial Sequence
  ENSG00000203782_9 (sequence is synthesized)
ctggaagaagccattgagctctccggctgcatctagttctgctgtttagcctctttggtttctgtacaactacctcccaaccccagtgcctcagtcaataaatttgcaaattcatgagaa

SEQ ID NO: 737787 - DNA, 120 bp, Artificial Sequence
  ENSG00000203783_0 (sequence is synthesized)
agtccacagcctttgttgagtcttgttgaagatcaggctctgcaaatcaccctaggatgtccttcagtgagcagcagtgcaagcagccatgtgtgccccctccatgcctcccaaagaccc

SEQ ID NO: 737788 - DNA, 120 bp, Artificial Sequence
  ENSG00000203783_1 (sequence is synthesized)
aggagcagtgccaagcaaaggctgaggaggtgtgcctccccacatgccagcacccctgccaagataagtgtctagtgcaggcccaggaggtatgtctttctcagtgccaggaatcaagtc

SEQ ID NO: 737789 - DNA, 120 bp, Artificial Sequence
  ENSG00000203783_2 (sequence is synthesized)
aagaaaaatgcccacagcaaggccaagagccatacctacctccatgccaagaccagtgtccacctcagtgtgcagagccatgccaggagctattccagacaaaatgtgtggaggtttgcc

SEQ ID NO: 737790 - DNA, 120 bp, Artificial Sequence
  ENSG00000203783_3 (sequence is synthesized)
cacagaaagtccaggagaagtgctcatcccctggcaagggaaagtagctgctcatatgtcatctgggttcaagaagatggccagcagatgaaaccctgaccccagcccacgctctggtga

SEQ ID NO: 737791 - DNA, 120 bp, Artificial Sequence
  ENSG00000203783_4 (sequence is synthesized)
ccttcttctgtgggtacctctgtgtgcaatgtaccttcttgcctcctggcttccttagcattccaggacttggtctgtgtctctgaagacagttctttctgtatttcatcaccctctgtg

SEQ ID NO: 737792 - DNA, 120 bp, Artificial Sequence
  ENSG00000203783_5 (sequence is synthesized)
ctgatggaaggtctcaaatgtaggaatggtgtggttgtcagggaagaccacagaagcctagcacagcttccttggtgcaaaaattcacccagctctgggtgtgtaacagccaaggatacc

SEQ ID NO: 737793 - DNA, 120 bp, Artificial Sequence
  ENSG00000203783_6 (sequence is synthesized)
ttcattcatctttcagagtttcaggctctcaaataagcctcaaaacaaactgaattctgatggactttccacttatcaccaccaccaccacctccaccaccaccaccaccacaggtgttg

SEQ ID NO: 737794 - DNA, 120 bp, Artificial Sequence
  ENSG00000203783_7 (sequence is synthesized)
agacaaagcggcttgcggtgtttcaaaaatcaaaaatttggtgattttgtctctgtacactaaaaagaacagcaaattattgaactttgaaatgttggttgtgcttttttaaaatgaacc

SEQ ID NO: 737795 - DNA, 120 bp, Artificial Sequence
  ENSG00000203783_8 (sequence is synthesized)
gaaagtatgtaaacgattgaatccaaacaaccagaagggaaagataagatggatgtttggtgcccttgtcaatctctgtgcttcatagctggtctaatgtgggcccttagttctcaccat

SEQ ID NO: 737796 - DNA, 120 bp, Artificial Sequence
  ENSG00000203783_9 (sequence is synthesized)
gtacactctttagagatgtgatttgtgtctgtgtgatgcaggctggtctgttctccagcttccttgccttcttctccctggtgaaggtaaaatacataataaagctgatcctaaggctga

SEQ ID NO: 737797 - DNA, 120 bp, Artificial Sequence
  ENSG00000203784_0 (sequence is synthesized)
agatctgggcagaggaaccaaagggaaaagccaccttcccaggcacagccataacatccacctcactcaactgcttgtcaagttcaccaccaacacagagggggctcagataatcaagaa

SEQ ID NO: 737798 - DNA, 120 bp, Artificial Sequence
  ENSG00000203784_1 (sequence is synthesized)
acaatgtcgagtgatgataaaagtaaatcaaatgaccccaagactgagcccaagaactgcgatcccaagtgtgaacaaaagtgtgagtccaaatgccagcccagctgtttaaagaagctg

SEQ ID NO: 737799 - DNA, 120 bp, Artificial Sequence
  ENSG00000203784_2 (sequence is synthesized)
cctgccctgcccctcgcagtctccttcatcctgccctccccagccctgcaccaagccctgtcctcctaaatgcccttcatcctgcccacatgcttgcccacctccctgccctcccccaga

SEQ ID NO: 737800 - DNA, 120 bp, Artificial Sequence
  ENSG00000203784_3 (sequence is synthesized)
gtgaggcactgtgggcactacccaaccccaccaccactgccacctccaccatgtacaacgctgtggggctggagactgaaaccatgaactgacaagtaaacgtgttcctctgctgtgcaa

SEQ ID NO: 737801 - DNA, 120 bp, Artificial Sequence
  ENSG00000203785_0 (sequence is synthesized)
taaactcctggtacttgagcactgatctgctttggagaacctgattctgagactccagcaggatgtcttatcaacagcagcagtgcaagcagccctgccagccacctcctgtgtgcccca

SEQ ID NO: 737802 - DNA, 120 bp, Artificial Sequence
  ENSG00000203785_1 (sequence is synthesized)
cgccaaagtgcccagagccatgtccacccccgaagtgccctgagccctgcccaccaccaaagtgtccacagccctgcccacctcagcagtgccagcaaaaatgtcctcctgtgacacctt

SEQ ID NO: 737803 - DNA, 120 bp, Artificial Sequence
  ENSG00000203785_2 (sequence is synthesized)
taattggctcaccttgttccacagcttcacctgcatcttctcatcaaagcctaccatggatacacagttagcttctttcctcttagccagtgatctgcccatgatgatccctgatagcaa

SEQ ID NO: 737804 - DNA, 120 bp, Artificial Sequence
  ENSG00000203785_3 (sequence is synthesized)
aaggtttcctttctgaggctgccatattgccactgtccaggtggagactgagaaaggaagtcctcagcagtgtcagttcccagagctttggaagaaggaccagcagctctgtccctggga

SEQ ID NO: 737805 - DNA, 120 bp, Artificial Sequence
  ENSG00000203785_4 (sequence is synthesized)
accatcaaaaaatgctgttgatgttttctgtgtctgtctgtcacctgggcatgggcttctaacacctgtgcaattgtcacttttctttcactccctgaataaaatatctttgcatacgta

SEQ ID NO: 737806 - DNA, 120 bp, Artificial Sequence
  ENSG00000203786_0 (sequence is synthesized)
gtcactcttgactggctgcatcaggaccatgtgtgaccagcagcagatccagtgccgcctgccgctccaacagtgctgcgtcaagggtccctccttctgctcctctcaatccccctttgc

SEQ ID NO: 737807 - DNA, 120 bp, Artificial Sequence
  ENSG00000203786_1 (sequence is synthesized)
ccagagccaagtggtggttcaagccccttgtgagatgcaaattgtggactgccctgcatcatgcccagttcaagtttgccaggtgtcagaccaggctccatgccagtctcagaccacaca

SEQ ID NO: 737808 - DNA, 120 bp, Artificial Sequence
  ENSG00000203786_2 (sequence is synthesized)
ggtgaagtgccagtctaagaccaagcaggtgaagggccaggctcaatgtcagtctaagaccacccaggtgaagggccaggctgcatcccaatctcaaacttcctctgttcaaagccaggc

SEQ ID NO: 737809 - DNA, 120 bp, Artificial Sequence
  ENSG00000203786_3 (sequence is synthesized)
tccatgccaatctgaggtgtcctacgtgcagtgcgaagcgtcacaacctgttcagacttgcttcgtagaatgtgctccagtttgttatacagaaacttgttatgtagaatgcccagtcca

SEQ ID NO: 737810 - DNA, 120 bp, Artificial Sequence
  ENSG00000203786_4 (sequence is synthesized)
gaactatgtaccctgtccagctcctcagcctgtccagatgtatagagggcgtcctgcagtgtgccagcctcagggaagattctccacccagtgccagtatcaaggctcctatagcagttg

SEQ ID NO: 737811 - DNA, 120 bp, Artificial Sequence
  ENSG00000203786_5 (sequence is synthesized)
tggcccccagtttcagtcaagggctacctgcaacaactacaccccccagttccagttgaggccttcctacagcagctgtttccctcagtatcggtcccggacttcatttagtccctgtgt

SEQ ID NO: 737812 - DNA, 120 bp, Artificial Sequence
  ENSG00000203786_6 (sequence is synthesized)
gccccagtgccagacccagggctcctatgggagcttcactgaacagcaccgctctcggagcaccagcagatgccttcctcctcctcggcggctgcagcttttcccccgcagctgttcccc

SEQ ID NO: 737813 - DNA, 120 bp, Artificial Sequence
  ENSG00000203786_7 (sequence is synthesized)
accaagacgttttgagccctgctccagcagctacctgccactaagaccctctgaaggtttccctaactactgcaccccaccccgccgctctgaacccatatataacagtcgctgtcctcg

SEQ ID NO: 737814 - DNA, 120 bp, Artificial Sequence
  ENSG00000203786_8 (sequence is synthesized)
ccgccccatttcaagctgctctcagagacgtggccccaagtgccgaatcgagatttcctccccgtgctgccccaggcaggttcccccacagaggtgtcctgttgagattcctcccatcag

SEQ ID NO: 737815 - DNA, 120 bp, Artificial Sequence
  ENSG00000203786_9 (sequence is synthesized)
acgccgctcccagagctgtggcccgcagccctcctggggcgcctcctgccctgagctgaggccacacgtagagccacgtccactcccaagcttctgtccaccacggcgtcttgaccagtg

SEQ ID NO: 737816 - DNA, 120 bp, Artificial Sequence
  ENSG00000203786_10 (sequence is synthesized)
ctctaccacgacaactttcagaaccttgtttgtatccagaaccacttccagcactacgtccaacaccgcggccagttccccttcctcgcccagggcagtgtgagattccagagccacgtc

SEQ ID NO: 737817 - DNA, 120 bp, Artificial Sequence
  ENSG00000203786_11 (sequence is synthesized)
catgcctgcagccctgtgagcacccagagccttgtccacgaccagagccaattcccctgccggcgccctgcccaagcccggagccctgcagggagacttggcgcagccccagcccatgct

SEQ ID NO: 737818 - DNA, 120 bp, Artificial Sequence
  ENSG00000203786_12 (sequence is synthesized)
ggggcccaaatccagttccatacccaggagacctaggctgtcatgagtctagtccacaccgcctagacaccgaagctccctactgtggcccatccagttacaaccaggggcaagagagtg

SEQ ID NO: 737819 - DNA, 120 bp, Artificial Sequence
  ENSG00000203786_13 (sequence is synthesized)
gtgctggctgtgggcctggtgatgtgtttccagagcggaggggtcaggatggccatggagaccaaggcaatgcctttgctggagtgaaaggggaagcaaagagtgcttatttttaaagga

SEQ ID NO: 737820 - DNA, 120 bp, Artificial Sequence
  ENSG00000203786_14 (sequence is synthesized)
aaggtgactgagataaccctctctcctgctctgaaaatgttgttcctcctattccacaatttccagtacgctcttgtttgaatctctccaaagatattcagagactccctattacgaagg

SEQ ID NO: 737821 - DNA, 120 bp, Artificial Sequence
  ENSG00000203786_15 (sequence is synthesized)
tgatgtccaaactcctttgcctatcatccaaagatccacacctgggtctcagatgcctctccagcctcacgtgtcactcctcgcccgtacgcatcctcggctctagccagaccagtctgg

SEQ ID NO: 737822 - DNA, 120 bp, Artificial Sequence
  ENSG00000203786_16 (sequence is synthesized)
ccactgggcacagcttgggtgttccccaggccatactttagatgtccctgcctccaagcctctgctcactcttccccactctgcctggaccacttctctcctcctccccagcttctgaaa

SEQ ID NO: 737823 - DNA, 120 bp, Artificial Sequence
  ENSG00000203786_17 (sequence is synthesized)
tccaccccatctttcagtgcctctcccttggagccttctttgcttgttcccactcacaagaacctgtgccgacttcctagaactcactgcatcccccgcactacttggtaactgcctggt

SEQ ID NO: 737824 - DNA, 120 bp, Artificial Sequence
  ENSG00000203786_18 (sequence is synthesized)
gacatctcttgaattgttatttcactttgcaggcatgtcttccttatctgcccaactaggttgtaaactcccaactgagtggagtcggagaatctctaaatctcagtgtctatcctgggg

SEQ ID NO: 737825 - DNA, 120 bp, Artificial Sequence
  ENSG00000203786_19 (sequence is synthesized)
ctggctgttgcttagcaaggcttgtgggttggcagcttgaaccatgttctgtcctgatgctcaactgcaggaactgaggtgagaggaggccatgtgacaataaagatcattatgtactca

SEQ ID NO: 737826 - DNA, 120 bp, Artificial Sequence
  ENSG00000203791_0 (sequence is synthesized)
gcctgtgccccgtctctatggcggccccaacggccgtccaggacgtggagcgaaatgagctcgggcgctgacggcggcggtggcgctgcggtggcggcgcggtcggacaagggcagtccc

SEQ ID NO: 737827 - DNA, 120 bp, Artificial Sequence
  ENSG00000203791_1 (sequence is synthesized)
ggggaggacggtttcgtcccgtcggcgctggggacccgcgagcattgggatgctgtctatgagagagaactgcaaactttccgagaatatggagatacaggtgaaatctggtttggagaa

SEQ ID NO: 737828 - DNA, 120 bp, Artificial Sequence
  ENSG00000203791_2 (sequence is synthesized)
gagagtatgaatcgactaataaggtggatgcagaaacacaagattccactggatgcttcagtgcttgatattggaactggaaatggtgttttcctggttgaacttgcaaaatttggtttc

SEQ ID NO: 737829 - DNA, 120 bp, Artificial Sequence
  ENSG00000203791_3 (sequence is synthesized)
tctaatattactggaattgattactctccttctgcaattcagctttctggaagtattatagaaaaagaaggtttatctaacattaagttaaaggtagaagactttttgaatctctccaca

SEQ ID NO: 737830 - DNA, 120 bp, Artificial Sequence
  ENSG00000203791_4 (sequence is synthesized)
cagctgtctggatttcatatttgtattgacaaagggacttttgatgccataagccttaatcctgacaatgcaattgagaagaggaagcaatatgtgaaatctctctccagggtgttgaaa

SEQ ID NO: 737831 - DNA, 120 bp, Artificial Sequence
  ENSG00000203791_5 (sequence is synthesized)
gtaaaaggcttttttctaataacgtcatgtaattggaccaaggaagagttgctaaatgaattcagtgaaggttggagtacagtggcaggattttggctcactgcagccttgacttcctgg

SEQ ID NO: 737832 - DNA, 90 bp, Artificial Sequence
  ENSG00000203791_6 (sequence is synthesized)
ctgcagccttgacttcctgggctcaagcgatcttttccacttcagcctcccgagtaggtggaactacaggcacacatcatcatgcctgga

SEQ ID NO: 737833 - DNA, 120 bp, Artificial Sequence
  ENSG00000203791_7 (sequence is synthesized)
actcctgggctcaagtgattctcccacctggcctcccaaagtgctgggattataccatgccaggccctcgttggcattttagatttgaacttctcgaagagctaccaacacccaagttca

SEQ ID NO: 737834 - DNA, 120 bp, Artificial Sequence
  ENSG00000203791_8 (sequence is synthesized)
caagttcagctttggaggcagatctggaaacagtgtagcagcattggttttccaaaaaatgtgagactttttcttggacgaattcaggtagctacacagaatctacacagcaaagttaac

SEQ ID NO: 737835 - DNA, 120 bp, Artificial Sequence
  ENSG00000203791_9 (sequence is synthesized)
ctgacacagaaaatccttgtgcaaataaatgcttagtaagtacacaggatgcacatgttgaatagagtatactggattggtgaaagaaaataataataatgagcatctaagtggttgggt

SEQ ID NO: 737836 - DNA, 120 bp, Artificial Sequence
  ENSG00000203791_10 (sequence is synthesized)
gggttttagagatcaatcaagaataattttaattttcttttgtatttgaaatgtaaatagttttcttttcgattaaaaaaatttcctataactgctaaacagttaaaaactttaaagtag

SEQ ID NO: 737837 - DNA, 120 bp, Artificial Sequence
  ENSG00000203791_11 (sequence is synthesized)
tgagtttatagaaagcatgtattcttgatttttgtgccttggtaaagttgataactatttatgaatatttgaccaaattattccagcatcagaataataagcaaaataactttgttagtg

SEQ ID NO: 737838 - DNA, 120 bp, Artificial Sequence
  ENSG00000203791_12 (sequence is synthesized)
ttttgttagactgtttatgaaatataacaagaaatactattttgtgttggatggcggttatttttaaacttaattaatacctgtgaaaaggcctcttacctttatgtatataattaaaca

SEQ ID NO: 737839 - DNA, 120 bp, Artificial Sequence
  ENSG00000203791_13 (sequence is synthesized)
aaatcagagaaatgtatcagttgctcaagttatcaagcctgcattttgcagctatggtcttctacacactgtaagggtagtagaaggaaagagaactaaggaatgttattatttgctagc

SEQ ID NO: 737840 - DNA, 120 bp, Artificial Sequence
  ENSG00000203791_14 (sequence is synthesized)
tatgaggttcaacagtacaggatggagccaggatttttatctgggtctgtctgactttaaaacacatactcttctcctagcatattctgcctcacaggtgcttagtctttgcctttgtag

SEQ ID NO: 737841 - DNA, 120 bp, Artificial Sequence
  ENSG00000203791_15 (sequence is synthesized)
catttacagtacagctggagacccatgatgattacatataaagttcagttagaaaagatgggtagttactttattagtgttcatctgtggagtatcagaatagcagtcagccaactctgt

SEQ ID NO: 737842 - DNA, 120 bp, Artificial Sequence
  ENSG00000203791_16 (sequence is synthesized)
ctcatatcatccttcattacttttccccatctccctactcaaagacttgcctctattaagaattttgtcattcttctgtgaaagggtagtgtaagttatataagccctcagcgatacatg

SEQ ID NO: 737843 - DNA, 120 bp, Artificial Sequence
  ENSG00000203791_17 (sequence is synthesized)
cacaaagatgttctagttaggggctaatttggcaagagaaacagtttattaatgtttttgaaaagataagtcatattcatacttaataccattttgtatttgtggtaatattttaatatt

SEQ ID NO: 737844 - DNA, 120 bp, Artificial Sequence
  ENSG00000203791_18 (sequence is synthesized)
ggagctaaatacaaatttttgcataattttttgatgattttcagctttgtgggcctattgggttacataagtgactttttgtttggcaaatgttactcctgtattgagtaagtctaacat

SEQ ID NO: 737845 - DNA, 120 bp, Artificial Sequence
  ENSG00000203791_19 (sequence is synthesized)
tacgtcccttttctttttggggaggggtagccagaggagtgagtttttcatttagatcaacattgatcaaccattaagacaagatagttgaagacatgtatgtggactgtcaacaaaaat

SEQ ID NO: 737846 - DNA, 120 bp, Artificial Sequence
  ENSG00000203791_20 (sequence is synthesized)
aacattttttgaaaagcttttattttcaacatgtaaaaagtgagaaattacttcaaaatatatgcaatttaaattttttagaagattgtgttgattttaccaagacaggagatcttaaac

SEQ ID NO: 737847 - DNA, 120 bp, Artificial Sequence
  ENSG00000203791_21 (sequence is synthesized)
tgtagaaacttttatagtttttgagatcgggtctttgttttttttcacattaatattctttgatttcaaatataacatagataagtactcttagaattttgagttaagtatatgctattt

SEQ ID NO: 737848 - DNA, 120 bp, Artificial Sequence
  ENSG00000203791_22 (sequence is synthesized)
taatgtgctaatcctacaaactaggctttctgtgtgactagactgagatgttgagtttgattcacaaaaagcttagaatggttctttgttgaaaagcttttcgagtcactatttggggca

SEQ ID NO: 737849 - DNA, 120 bp, Artificial Sequence
  ENSG00000203791_23 (sequence is synthesized)
tgttagtgccatttgcaaaggtgaaggttttctttttttttttttttttaaccatagagcttttgataaggttaggaaaaggaagttgtcatctcttcttattactctaatcctgctgga

SEQ ID NO: 737850 - DNA, 120 bp, Artificial Sequence
  ENSG00000203791_24 (sequence is synthesized)
agctagcttcttagggactaaaaccagaacaaatggaaggtccaaaaatgctaataagaaattagtattttcacataataccaaactgtaaaaaccaggccagcaagtgtcaccaggttc

SEQ ID NO: 737851 - DNA, 120 bp, Artificial Sequence
  ENSG00000203791_25 (sequence is synthesized)
ctgaaacaaaccataaatacattatttaacttagtattgttaaattgtataaatatgtgggtaactgtgacagaaattatgcacttataaaaagcagtaagttacatagtgaatgctgtt

SEQ ID NO: 737852 - DNA, 120 bp, Artificial Sequence
  ENSG00000203791_26 (sequence is synthesized)
ttctgtggataagaagctggaattgtgatttcatttaatcgaaagacgcttactttgaggaaacttgtttgaaatgcaaacgcgatttctctgtggagccttcacggaattgctgctttt

SEQ ID NO: 737853 - DNA, 120 bp, Artificial Sequence
  ENSG00000203791_27 (sequence is synthesized)
cactatgattattgctgcataacaggccacttctgtgtgtaggaagtgcgtgtgcaagtccaaagggaattgaggcctgaatgggtgggttatcccaattaacaaatacaaagttttcag

SEQ ID NO: 737854 - DNA, 120 bp, Artificial Sequence
  ENSG00000203791_28 (sequence is synthesized)
tacattttgttttaagccaggtgcacaagttagagttgctttttgggactggcatttatgtatgtgagaatcaaacctgatatcactcttggcagcctgactaaagccatttaaaaataa

SEQ ID NO: 737855 - DNA, 120 bp, Artificial Sequence
  ENSG00000203791_29 (sequence is synthesized)
atttttttcccattgtagtagcactgaattttccttttttcttcatctgtggtacgcatgcaatcttctgggttttgtttttttgttttttttttgaagaaataagggagctaagtatat

SEQ ID NO: 737856 - DNA, 120 bp, Artificial Sequence
  ENSG00000203791_30 (sequence is synthesized)
acaaaagacttttagtctttttatgaatcatgtgcttcagtggacttacttattttaaaatttctatgatactgtaatgtggtactgtatgttgacctcaattcacatttatccagagta

SEQ ID NO: 737857 - DNA, 120 bp, Artificial Sequence
  ENSG00000203791_31 (sequence is synthesized)
taatagaaacctcaatttttaaggaacttatattagtagttaagtttcttatggccttgaaataattttcttcaaattggtatacaaagaaatagtgtatccctgctatgttaatgactt

SEQ ID NO: 737858 - DNA, 120 bp, Artificial Sequence
  ENSG00000203791_32 (sequence is synthesized)
tcgtctatgttcttttaagtaattttattttacgaattgtgtgtgtgtatgtgtgtgtgtctctgtctggtagcctacaatgaaaatctgtacaaatgtgaacagtttgtctccagggga

SEQ ID NO: 737859 - DNA, 120 bp, Artificial Sequence
  ENSG00000203791_33 (sequence is synthesized)
gagccctggggtttgatttcctgtttttggctctgtaagctaacgtgtatgtgctcctggacagccctctgctttgagagtatgagaccaagtgtcttgtgttccacagtagtaacctct

SEQ ID NO: 737860 - DNA, 120 bp, Artificial Sequence
  ENSG00000203791_34 (sequence is synthesized)
gtgtgtgtgtgtgtgtgtgtgtgggagggagtgttgatgggctctgaaagaagtcttgtctcgtacatttcactgaatgaaggctgcccatgacctagagcttgattgtgggaggtgaag

SEQ ID NO: 737861 - DNA, 120 bp, Artificial Sequence
  ENSG00000203791_35 (sequence is synthesized)
agagcttgattgtgggaggtgaagagcatatatggctgaaagacaattgcatagtggggaaaaaaattaggaaatccttacatttctcttggttaggcaggaaacagagatgtccataga

SEQ ID NO: 737862 - DNA, 120 bp, Artificial Sequence
  ENSG00000203791_36 (sequence is synthesized)
agaagagggagctcatcagcatgttttattaacagttaatggaagaaaattaatgctaatttattcttcatatacaccatgcaatttgttagaaaagtaaaagaatagtttgaaattctt

SEQ ID NO: 737863 - DNA, 120 bp, Artificial Sequence
  ENSG00000203791_37 (sequence is synthesized)
tggtcaattgatggattcctatgttcagggcatagaaatgaaactcaacatcaagcagacaaatacccaagcccacaggctacataaatgctgaataaaaccagctctacaatggaactc

SEQ ID NO: 737864 - DNA, 120 bp, Artificial Sequence
  ENSG00000203791_38 (sequence is synthesized)
tgaaaagcgacgggtaagaagcctaatgaatgattgaatatgaccttagcaaaatccctggagtgttgttgaacgatcattcatttccagcttagatgtcaagatgggctccagtaacca

SEQ ID NO: 737865 - DNA, 120 bp, Artificial Sequence
  ENSG00000203791_39 (sequence is synthesized)
ggaaaaaagagagcttgagtcagtacttactgagttttaaaaatcttttgcaacacagtgtattagactgatcattaaaaggacttctctagctgaattttgagctgtcactatagttta

SEQ ID NO: 737866 - DNA, 120 bp, Artificial Sequence
  ENSG00000203791_40 (sequence is synthesized)
ggcccagggaaataaacttaaaaagataggaataattcctaagacatgaatgtatcaatatcctatcctgcttttctggagtaggacttcaaaaactgaaatgtataggctggcagaatg

SEQ ID NO: 737867 - DNA, 120 bp, Artificial Sequence
  ENSG00000203791_41 (sequence is synthesized)
tacttttgtcatgctgataccactgtaaaagagacttaaactaggagatcagttgagccctaaagtatttgcaaattacttgcctagcttgttagaagaagaaataaaaagccaaaatct

SEQ ID NO: 737868 - DNA, 120 bp, Artificial Sequence
  ENSG00000203791_42 (sequence is synthesized)
ctctacatcaaaaataagacatcaccagtcctaaaggaatattataattcataaacaaaacattatattaaaattttatactaaagtataaaattatttctctctaggcaaaatttggtt

SEQ ID NO: 737869 - DNA, 120 bp, Artificial Sequence
  ENSG00000203791_43 (sequence is synthesized)
acttaggctcacaacccatactttgtggtgcacaatgctggcccagctggcatgctttcgtacctcaatggtgctagacagtcagttacaaagctgtgtggcttcacatgcgctgatctc

SEQ ID NO: 737870 - DNA, 120 bp, Artificial Sequence
  ENSG00000203791_44 (sequence is synthesized)
aatagtcactcctcttcaagctgctttcaactcttattttgtatcaaaggagtgggattggtattattaaactcattgctgaggttatttttcagtgaaaataaattgttttatttagtt

SEQ ID NO: 737871 - DNA, 120 bp, Artificial Sequence
  ENSG00000203791_45 (sequence is synthesized)
ctttaatgatcttggactgaagctcataaaagttagctataaagttgaaaatatgtttattatatgtaaaatgccattataattaatgggtccttttattaataaccttttacaggttgt

SEQ ID NO: 737872 - DNA, 120 bp, Artificial Sequence
  ENSG00000203795_0 (sequence is synthesized)
attctaccagctctggctgagcctgagcttccaaaagtgagctgagctgttcaaccttggatcttaattactcctagcagggataattaggtccctctttctcagattacaggtttgaga

SEQ ID NO: 737873 - DNA, 120 bp, Artificial Sequence
  ENSG00000203795_1 (sequence is synthesized)
agttccaaatatccgatgccctagaggtttttttcccttaattttattgttacaattggccttcatctagctctggatggttgaactgtagcatggcaaagatgtttgatctcaggacga

SEQ ID NO: 737874 - DNA, 120 bp, Artificial Sequence
  ENSG00000203795_2 (sequence is synthesized)
aggcactaaaagctgcaaaggaccctgatgctgtggctgtaaaaaatcacaacccagacaaggtgtgttgggccacgaacagccaggccaaagccaccaccatggagtcttgtccatctc

SEQ ID NO: 737875 - DNA, 120 bp, Artificial Sequence
  ENSG00000203795_3 (sequence is synthesized)
tccagtgctgtgaaggttgtagaatgcatgccagttctgattccctgccaccttgctgttgtgacataaatgagggcctctgacttgggaaagctgggcacaaaaatcttcatgagcaat

SEQ ID NO: 737876 - DNA, 120 bp, Artificial Sequence
  ENSG00000203795_4 (sequence is synthesized)
atttctttcttaatagaatgttttattattcaagtcaagttctagagtgtttacatactattatataatgtacagtgttattttctgtacttctgaataaatgtgcaatattggaaataa

SEQ ID NO: 737877 - DNA, 120 bp, Artificial Sequence
  ENSG00000203797_0 (sequence is synthesized)
agtttcgctttctctctgtctctcagggcatgagaccagccaggcactgggaaacaaggtttggtgccagagattttggtggcttccaagactgctttttcagagacaggctcatggaca

SEQ ID NO: 737878 - DNA, 120 bp, Artificial Sequence
  ENSG00000203797_1 (sequence is synthesized)
cagcacggattgcagttgtcggggcaggtgtggtggggctctccacggctgtgtgcatctccaaactggtgccccgatgctccgttaccatcatttcagacaagtttactccagatacca

SEQ ID NO: 737879 - DNA, 120 bp, Artificial Sequence
  ENSG00000203797_2 (sequence is synthesized)
ccagtgatgtggcagccggaatgcttattcctcacacttatccagatacacccattcacacgcagaagcagtggttcagagaaacctttaatcacctctttgcaattgccaattctgcag

SEQ ID NO: 737880 - DNA, 120 bp, Artificial Sequence
  ENSG00000203797_3 (sequence is synthesized)
aagctggagatgctggtgttcatttggtatcaggttggcagatatttcagagcactccgactgaagaagtgccattctgggctgacgtggttctgggatttcgaaagatgactgaggctg

SEQ ID NO: 737881 - DNA, 120 bp, Artificial Sequence
  ENSG00000203797_4 (sequence is synthesized)
agctgaagaaattcccccagtatgtgtttggtcaggcttttacaaccctgaaatgtgaatgccctgcctacctcccgtggttggagaaaaggataaagggaagtggaggctggacactca

SEQ ID NO: 737882 - DNA, 120 bp, Artificial Sequence
  ENSG00000203797_5 (sequence is synthesized)
ctcggcgaatagaagacctgtgggaacttcatccgtcctttgacatcgtggtcaactgttcaggccttggaagcagacagcttgcaggagactcaaagattttccctgtaaggggccaag

SEQ ID NO: 737883 - DNA, 120 bp, Artificial Sequence
  ENSG00000203797_6 (sequence is synthesized)
tcctccaagttcaggctccctgggtggagcattttatccgagatggcagtgggctgacatatatttatcctggtacatcccatgtaaccctaggtggaactaggcaaaaaggggactgga

SEQ ID NO: 737884 - DNA, 120 bp, Artificial Sequence
  ENSG00000203797_7 (sequence is synthesized)
atctgtccccggatgcagaaaatagcagagagattctttcccgatgctgtgctctggagccctccctccacggagcctgcaacatcagggagaaggtgggcttgaggccctacaggccag

SEQ ID NO: 737885 - DNA, 120 bp, Artificial Sequence
  ENSG00000203797_8 (sequence is synthesized)
tgcactggggcactgctctggaggccgccaggctggtgagcgagtgtgtccatgccctcaggacccccattcccaagtcaaacctgtagatgacataaaatgacagcaaagagactgaga

SEQ ID NO: 737886 - DNA, 120 bp, Artificial Sequence
  ENSG00000203797_9 (sequence is synthesized)
gactgttgatcaaagcacagaacaggttcaaataacttttccactgcatgaaagtttaattagacatttctttgttttcaacattagaagtggtgtaacatgtaagctgagcacggtggc

SEQ ID NO: 737887 - DNA, 120 bp, Artificial Sequence
  ENSG00000203797_10 (sequence is synthesized)
ctacttgagaggctgaggcaggaggattgttgagcccaggagtttgagtgcaatctgggtaacattttttagaggtgccagttcccacctctaaaaaaaacaccaacaacaaaagaaatg

SEQ ID NO: 737888 - DNA, 120 bp, Artificial Sequence
  ENSG00000203797_11 (sequence is synthesized)
aacaacaaaagaaatgatgcaacatgtaggcttacttaggaagtccagcattaatggcatagggcataaagctctattttttgttaaaaatacttcttatagagtaaaatttatttagaa

SEQ ID NO: 737889 - DNA, 120 bp, Artificial Sequence
  ENSG00000203797_12 (sequence is synthesized)
ctgatgtccaaggacctatgcagatttatatgaatgttggaagctatagagattttgatatcatttggcttataaatccacaggaggagataatgtatggaaaacatttaaatcactgtc

SEQ ID NO: 737890 - DNA, 120 bp, Artificial Sequence
  ENSG00000203797_13 (sequence is synthesized)
aattgcagagctgcctgtgatcttcttaggttatagccaagtcagcaacataattcctctaaataaaattacattgtgctcacacagtgctggattattacatttaattgaagacaaagc

SEQ ID NO: 737891 - DNA, 120 bp, Artificial Sequence
  ENSG00000203797_14 (sequence is synthesized)
atgcttgctcctagtactagcagcaagcttttcctcccctcagctggtaatgatggtaggagacagagatgaagttgcctatgtatgtcatatcaattcaatagctgcctggggtcaaac

SEQ ID NO: 737892 - DNA, 120 bp, Artificial Sequence
  ENSG00000203797_15 (sequence is synthesized)
acctaggggttgtacattccattactgtaaatgattgagagctggtttgtggtatggttggctttgcctaagcatttttgaagatgaacagcatgtgcagccaaagaactaatttgctaa

SEQ ID NO: 737893 - DNA, 120 bp, Artificial Sequence
  ENSG00000203797_16 (sequence is synthesized)
ttaaggtggaacaatcattctgaatgaaatataatcagagtactccgcagtttgttaagaagtattggggaggaggggaatgtgtctcacaataaaatgagttggaattgttgagttaaa

SEQ ID NO: 737894 - DNA, 120 bp, Artificial Sequence
  ENSG00000203805_0 (sequence is synthesized)
ggtccgcgggtgcccggcgcgggcccaggaggcggaggcggctcctggggagagggatccgggagtccctgaggcggccccggctccgcactaggaggcggggtccgcagtatcgccagc

SEQ ID NO: 737895 - DNA, 120 bp, Artificial Sequence
  ENSG00000203805_1 (sequence is synthesized)
ctgaggcggccccggctccgcactaggaggcggggtccgcagtatcgccagcggccggcgcggcttcccggagccccggagcccgaggcgcgaggtttaggctgagccctccccggcgcc

SEQ ID NO: 737896 - DNA, 120 bp, Artificial Sequence
  ENSG00000203805_2 (sequence is synthesized)
gcctccctcgcctcccagggtctggcgagccggcgccggccgagctgcgggagccgcggagagcaccagctgacgccgcgggagctgctccggccgcaccatgcgggagctggccattga

SEQ ID NO: 737897 - DNA, 120 bp, Artificial Sequence
  ENSG00000203805_3 (sequence is synthesized)
gctggccattgagatcggggtgcgagccctgctcttcggagtcttcgtttttacagagtttttggatccgttccagagagtcatccagccagaagagatctggctctataaaaatccttt

SEQ ID NO: 737898 - DNA, 120 bp, Artificial Sequence
  ENSG00000203805_4 (sequence is synthesized)
ggtgcaatcagataacatacctacccgcctcatgtttgcaatttctttcctcacacccctggctgttatttgtgtggtgaaaattatccggcgaacagacaagactgaaattaaggaagc

SEQ ID NO: 737899 - DNA, 120 bp, Artificial Sequence
  ENSG00000203805_5 (sequence is synthesized)
cttcttagcggtgtccttggctcttgctttgaatggagtctgcacaaacactattaaattaatagtgggaagacctcgccccgatttcttttaccgctgctttccagatggagtgatgaa

SEQ ID NO: 737900 - DNA, 120 bp, Artificial Sequence
  ENSG00000203805_6 (sequence is synthesized)
cttttcgggccttggcttcacgacgttctacttggcgggcaagctgcactgcttcaccgagagtgggcggggaaagagctggcggctctgtgctgccatcctgcccttgtactgcgccat

SEQ ID NO: 737901 - DNA, 120 bp, Artificial Sequence
  ENSG00000203805_7 (sequence is synthesized)
gatgattgccctgtcccgcatgtgcgactacaagcatcactggcaagattcctttgtgggtggagtcatcggcctcatttttgcatacatttgctacagacagcactatcctcctctggc

SEQ ID NO: 737902 - DNA, 120 bp, Artificial Sequence
  ENSG00000203805_8 (sequence is synthesized)
caacacagcttgccataaaccctacgttagtctgcgagtcccagcctcactgaagaaagaggagaggcccacagctgacagcgcacccagcttgcctctggaggggatcaccgaaggccc

SEQ ID NO: 737903 - DNA, 120 bp, Artificial Sequence
  ENSG00000203805_9 (sequence is synthesized)
ggtatgaccagtgtcctgggaggatggacactaagccctgggcacatctgccaccctgacatcataacacaatagaaatggttttctgtagtgtatttttcatcagttgtttctcaaagt

SEQ ID NO: 737904 - DNA, 120 bp, Artificial Sequence
  ENSG00000203805_10 (sequence is synthesized)
catcgtacttctgcttctgtttcactgatggtgttcctgctactttaaatgtctacttccaacatccttgaatttgcaagtgaaggacaacaatctctgagagacgtgtggaagaggctg

SEQ ID NO: 737905 - DNA, 120 bp, Artificial Sequence
  ENSG00000203805_11 (sequence is synthesized)
tgaaggtggggtttggggagcttggccgattcgtctatctgaaatgtttgctgtaacagccaccttcctatgttttcatggttgtaaaacataataaaacctcccacgtggaagacttgg

SEQ ID NO: 737906 - DNA, 120 bp, Artificial Sequence
  ENSG00000203805_12 (sequence is synthesized)
tcaccgagagtgggcggggaaagagctggcggctctgtgctgccatcctgcccttgtactgcgccatgatgattgccctgtcccgcatgtgcgactacaagcatcactggcaagcagtgg

SEQ ID NO: 737907 - DNA, 120 bp, Artificial Sequence
  ENSG00000203805_13 (sequence is synthesized)
catgcactgaaacttatgctgccatcacggacatgtctaaaataaaagagcttttcttttatttgtacttcttttcctgctttgctattgtggattaataaaattacatgcatgaaatta

SEQ ID NO: 737908 - DNA, 120 bp, Artificial Sequence
  ENSG00000203811_0 (sequence is synthesized)
cgccgctgcgctggtaagcctgtgttttggttcgctatggcccgtactaagcagactgctcgcaagtcgaccggcggcaaggccccgaggaagcagctggccaccaaggcggcccgcaag

SEQ ID NO: 737909 - DNA, 120 bp, Artificial Sequence
  ENSG00000203811_1 (sequence is synthesized)
agcgcgccggccacgggcggggtgaagaagccgcaccgctaccggcccggcaccgtagccctgcgggagatccggcgctaccagaagtccacggagctgctgatccgcaagctgcccttc

SEQ ID NO: 737910 - DNA, 120 bp, Artificial Sequence
  ENSG00000203811_2 (sequence is synthesized)
cagcggctggtacgcgagatcgcgcaggactttaagacggacctgcgcttccagagctcggccgtgatggcgctgcaggaggccagcgaggcctacctggtggggctgttcgaagacacg

SEQ ID NO: 737911 - DNA, 120 bp, Artificial Sequence
  ENSG00000203811_3 (sequence is synthesized)
aacctgtgcgccatccacgccaagcgcgtgaccattatgcccaaggacatccagctggcccgccgcatccgtggagagcgggcttaagaagtggcggttcggccggaggttccatcgtat

SEQ ID NO: 737912 - DNA, 120 bp, Artificial Sequence
  ENSG00000203811_4 (sequence is synthesized)
ccaaaaggctcttttcagagccacccacatcagcacttggaagaagctgtaccgcttgccctccgtgctcctccggcattagagcggggaaggcacttccgcttaggctcccaacaaaac

SEQ ID NO: 737913 - DNA, 120 bp, Artificial Sequence
  ENSG00000203811_5 (sequence is synthesized)
ggggtcgggtccccctgctgcggtgccgtcttgagctttgccgacttcggccaattggcctatccgcactggccgggctgcggacgctttcctgggcgccggctcgcgggctttggcggt

SEQ ID NO: 737914 - DNA, 120 bp, Artificial Sequence
  ENSG00000203811_6 (sequence is synthesized)
acgctcagggctcgcggtcctgagcgcggctggcctttgcggaagtggagcgccacacgcccgtgcttcgcgcccaaaccggcctcacccggcgcggccatccggctagggagggaaatg

SEQ ID NO: 737915 - DNA, 120 bp, Artificial Sequence
  ENSG00000203811_7 (sequence is synthesized)
accacctcggcctcgccggggttctgcggacaaacgtggggagaactgcgctggggctgccgttcagtccccgcgccacctccactagcacagtggtaacccccatatcctgcccctaag

SEQ ID NO: 737916 - DNA, 120 bp, Artificial Sequence
  ENSG00000203811_8 (sequence is synthesized)
ccaaaattcccgggggcacggggtgtgggcggaattttgtgaatctgggctttatcgagccgttccctgtccatgtccacagaaggagattcactattccagtgaaggcactcggtcctc

SEQ ID NO: 737917 - DNA, 120 bp, Artificial Sequence
  ENSG00000203811_9 (sequence is synthesized)
ttagaagctgcatggtatgtctggattttctgtccagactcagtagttcctttacgttgttttcgtcggacatgtgggcagacgctggtgcccgagttcagatccttgggaagacagtag

SEQ ID NO: 737918 - DNA, 120 bp, Artificial Sequence
  ENSG00000203811_10 (sequence is synthesized)
atcagacaggaagaacgtgggcctccgttgggcaaatgaagctcttcgccttaggaaatcgtgacaggaggccacagaggtgatctctacagtctctgggagctgggaagtccaaggcct

SEQ ID NO: 737919 - DNA, 120 bp, Artificial Sequence
  ENSG00000203811_11 (sequence is synthesized)
cttagtgggaaagtgaggcagggtcttgcagagcccactctacacacggccagatacaaatggctgtagaggtcttagataacaccttctcggtcatttatttgcacctcagaagaagcc

SEQ ID NO: 737920 - DNA, 120 bp, Artificial Sequence
  ENSG00000203811_12 (sequence is synthesized)
agggcttcggttttctgtttgtttcatcacagttgacaggttaaaagcattcactgcagcgatctatgagaattaagaggggagaaggggaaatggaataaaacttcgttttgtaaagct

SEQ ID NO: 737921 - DNA, 120 bp, Artificial Sequence
  ENSG00000203812_0 (sequence is synthesized)
ccaggcaggagtttctctcggtgactactatcgctgtcatgtctggtcgtggcaagcaaggaggcaaggcccgcgccaaggccaagtcgcgctcgtcccgcgctggccttcagttcccgg

SEQ ID NO: 737922 - DNA, 120 bp, Artificial Sequence
  ENSG00000203812_1 (sequence is synthesized)
tagggcgagtgcatcgcttgctgcgcaaaggcaactacgcggagcgagtgggggccggcgcgcccgtctacatggctgcggtcctcgagtatctgaccgccgagatcctggagctggcgg

SEQ ID NO: 737923 - DNA, 120 bp, Artificial Sequence
  ENSG00000203812_2 (sequence is synthesized)
acgaggaactgaacaagctgctgggcaaagtcaccatcgcccagggcggcgtcttgcctaacatccaggccgtactgctccctaagaagacggagagtcaccacaaggcaaagggcaagt

SEQ ID NO: 737924 - DNA, 120 bp, Artificial Sequence
  ENSG00000203812_3 (sequence is synthesized)
gaggctgacgtccggcccaagtgggcccagcccggcccgcgtctcgaaggggcacctgtgaactcaaaaggctcttttcagagccacccacgttttcaaataaaagagttgttaatgctg

SEQ ID NO: 737925 - DNA, 120 bp, Artificial Sequence
  ENSG00000203814_0 (sequence is synthesized)
cttctttaagtctcttttctcttttttcgcgcaaaaatgccggatccagcgaaatccgctcctgctcccaagaagggctccaaaaaggctgttacgaaagtgcagaagaaggacggcaag

SEQ ID NO: 737926 - DNA, 120 bp, Artificial Sequence
  ENSG00000203814_1 (sequence is synthesized)
aagcgcaagcgcagccgcaaggagagctactccgtttacgtgtacaaggtgctgaagcaggtccaccccgacaccggcatctcgtccaaggccatgggcatcatgaactccttcgtcaac

SEQ ID NO: 737927 - DNA, 120 bp, Artificial Sequence
  ENSG00000203814_2 (sequence is synthesized)
gacatcttcgagcgcatcgcgggagaggcgtcccgcctggcgcactacaacaagcgctccaccatcacatcccgcgagatccagacggccgtgcgcctgctgctgcccggcgagctggcc

SEQ ID NO: 737928 - DNA, 120 bp, Artificial Sequence
  ENSG00000203814_3 (sequence is synthesized)
aagcacgccgtgtccgagggcaccaaggcggtcaccaagtacaccagctcgaagtaagagtgtgcaagggacgcaatagatcaaccacctaaccccaaaggctcttttcagagccacttc

SEQ ID NO: 737929 - DNA, 120 bp, Artificial Sequence
  ENSG00000203814_4 (sequence is synthesized)
agtaatcgagaaagcagctgtaaacacttgtcagagcgtttgatagcttttggtcaggtagggagtgttaccatggtcacggatgcattcgggtttaggactaaggagtttcctgtagtc

SEQ ID NO: 737930 - DNA, 120 bp, Artificial Sequence
  ENSG00000203814_5 (sequence is synthesized)
ctgtaatgagttggccctcagtcatccccgtccagtcttactgagttgcttgttatctgtgctacgagattcgaaaggtttgactcgttctgggatatttgggagggatggagggaagga

SEQ ID NO: 737931 - DNA, 120 bp, Artificial Sequence
  ENSG00000203814_6 (sequence is synthesized)
ggcggggggtggttctacaccccttcggcctttaacctgtatctttaaagtcgttttcctttttgtttctgaaagtaatgaacgagatgagatttcccatacagatgagaaaccctcggt

SEQ ID NO: 737932 - DNA, 120 bp, Artificial Sequence
  ENSG00000203814_7 (sequence is synthesized)
ccgacctcttactatttcttagtgttttaatctgttttccttaccatatacctacaggcgtctgtcacaaactttgtctaatatagccatgtgctttcgtcccttagcctttttgcaagt

SEQ ID NO: 737933 - DNA, 120 bp, Artificial Sequence
  ENSG00000203814_8 (sequence is synthesized)
agtgacttcaaacagggagatatattgccaccaccccaccccctgtggagtatttggcaatatctgtagatgttttgggttgtcaggtgtgtgtgtgttgcgggggaggtgctagaagta

SEQ ID NO: 737934 - DNA, 120 bp, Artificial Sequence
  ENSG00000203814_9 (sequence is synthesized)
tccaatgggcagaggccaggagtgctaagcataaggcacaggacagtcctctggggggacaaagagctacctggcctgtaatgtcgatctttggtgattgagagaccccagcgcccaaag

SEQ ID NO: 737935 - DNA, 120 bp, Artificial Sequence
  ENSG00000203814_10 (sequence is synthesized)
acatccctaaccttcaggatttaatcctcttcagtcaaacgtttccttaaccctatcagcccatgtttttcttttcttggtgaaagctgagcacttcataggctgtttacaggtccttct

SEQ ID NO: 737936 - DNA, 120 bp, Artificial Sequence
  ENSG00000203814_11 (sequence is synthesized)
ccacaggaaaatacttcctccaggacaagaaccctgtcttggttccaaactttcccaattataagagtcacctttgcgcttgttaaacctgcttccaggtgcttctcctgaggtttcctg

SEQ ID NO: 737937 - DNA, 120 bp, Artificial Sequence
  ENSG00000203814_12 (sequence is synthesized)
attcagctagactggaggtgggacctgacgaggtggttggtttttagtgttctcaggagtgtggatgttttaataggtgttgggtcctcatgttaatcgacctgtgggtgtgtcacagtc

SEQ ID NO: 737938 - DNA, 120 bp, Artificial Sequence
  ENSG00000203814_13 (sequence is synthesized)
tttgtgtcacagatgtcctgagaaaggaaacaatttgaggatgagtggaggggaatttgtggtgtagagaaggccacagttaatatgtggggtgaatttctgaagacctctcagttcaaa

SEQ ID NO: 737939 - DNA, 120 bp, Artificial Sequence
  ENSG00000203814_14 (sequence is synthesized)
acttgaataactcaagactcatcctgacaaaagccagtggatgtttcttttgccaaataaaatatacccttggtgcaactggaaaatcttagcttataattaacttgacagcctttgaaa

SEQ ID NO: 737940 - DNA, 120 bp, Artificial Sequence
  ENSG00000203814_15 (sequence is synthesized)
ttaagccattcttgataaatcttgggggaattaacaactttgtgcttaaaatgaattttactaatttttatgatgttgaaattcaaatttacacccaattaaaagatataaaatgcggta

SEQ ID NO: 737941 - DNA, 120 bp, Artificial Sequence
  ENSG00000203814_16 (sequence is synthesized)
catcacatcccgcgagatccagacggccgtgcgcctgctgctgcccggcgagctggccaagcacgccgtgtccgagggcaccaaggcggtcaccaagtacaccagctcgaaggacagcac

SEQ ID NO: 737942 - DNA, 120 bp, Artificial Sequence
  ENSG00000203814_17 (sequence is synthesized)
taccagtttagaagcctcagagtataagtcattgggtatttaaggaccttacctaagctaactcagaagcattatgaagggcagtattgacattaactgccaggaatctcctaaaagtca

SEQ ID NO: 737943 - DNA, 120 bp, Artificial Sequence
  ENSG00000203814_18 (sequence is synthesized)
agggattatacatgagtcatagaaggatacttgaagatggacaattatagtcccatcactttatggaacactataagacccaaataagagaaatcccagtggtccacgaacttagctctg

SEQ ID NO: 737944 - DNA, 120 bp, Artificial Sequence
  ENSG00000203814_19 (sequence is synthesized)
cattttctagctgaagttactgttgttgtcaactactcagcatccaaaattttcacaagaaaacaaggttttttctcttcaaattacagtccaaagagtggcaaacaagaaagatgacag

SEQ ID NO: 737945 - DNA, 120 bp, Artificial Sequence
  ENSG00000203814_20 (sequence is synthesized)
agtccgaagaccttaagatttcttttctttggtcaagaactcattatacaatggatgatacatcttaggtggtcctactaaaaagagacacaagaatctagagactatctcactgtcaac

SEQ ID NO: 737946 - DNA, 120 bp, Artificial Sequence
  ENSG00000203814_21 (sequence is synthesized)
caatccaaggaactttgctttagatggccaaagccagaaacagcaaagtagaagaaccactagagctttaagcagttccttagtatttttccttggtttatccaagcctggatactggtc

SEQ ID NO: 737947 - DNA, 120 bp, Artificial Sequence
  ENSG00000203814_22 (sequence is synthesized)
tgcaagagatcagagaataaagatatcagttggtccaaggaaaataatgaggaagagagaattggggagacagaattaatgtagactctgagggatcaactcagatctcttgagtttcta

SEQ ID NO: 737948 - DNA, 120 bp, Artificial Sequence
  ENSG00000203814_23 (sequence is synthesized)
tttctctttctcaaaatccagtactaacagaactgaacaagctacaggtggttatcaaggaaacttcactgcggtgcgtccaggcttaatgctacctcagggttgcccttcccatccttt

SEQ ID NO: 737949 - DNA, 120 bp, Artificial Sequence
  ENSG00000203814_24 (sequence is synthesized)
tcataaaataagctctaataaaccatggaagcacagatacaagttgcttcatactcatgagttctacccagagttaccacaggaagacaaaactcttgactcacaacagccacagcctgt

SEQ ID NO: 737950 - DNA, 120 bp, Artificial Sequence
  ENSG00000203814_25 (sequence is synthesized)
acccttctaactgtcccctctgagtccaacttaccccaaaggagcagagttgtcaagaaccacatgttgtctccaagctggtgggagcagtgaaatctgtaacatgcaagatattgaaga

SEQ ID NO: 737951 - DNA, 120 bp, Artificial Sequence
  ENSG00000203814_26 (sequence is synthesized)
gtaatgagttggccctcagtcatccccgtccagtcttactgagttgcttgttatctgtgctacgagattcgaaaggttaataggacccatcctttggaagtaggaaagtggcatagaagg

SEQ ID NO: 737952 - DNA, 120 bp, Artificial Sequence
  ENSG00000203837_0 (sequence is synthesized)
atttactttgcagagcataaggtggaataacatgttcttttaaacgtagagtttaaacattgagttgcatcattgtgaggaaaaccacttagtattttatagtgaggtgactttacaagt

SEQ ID NO: 737953 - DNA, 120 bp, Artificial Sequence
  ENSG00000203837_1 (sequence is synthesized)
aaagatcttcaagaagatttttatgtgatttaaaaaatcagcttagatgcttggaatttggattgttgcattcttgttctttggcacatcaagaggaaaagaagtttgctatgaaaggtt

SEQ ID NO: 737954 - DNA, 120 bp, Artificial Sequence
  ENSG00000203837_2 (sequence is synthesized)
agggtgtttcaaagatggtttaccatggaccaggactttctcaacagagttggtaggtttaccctggtctccagagaagataaacactcgtttcctgctctacactatacacaatcccaa

SEQ ID NO: 737955 - DNA, 120 bp, Artificial Sequence
  ENSG00000203837_3 (sequence is synthesized)
tgcctatcaggagatcagtgcggttaattcttcaactatccaagcctcatattttggaacagacaagatcacccgtatcaacatagctggatggaaaacagatggcaaatggcagagaga

SEQ ID NO: 737956 - DNA, 120 bp, Artificial Sequence
  ENSG00000203837_4 (sequence is synthesized)
catgtgcaatgtgttgctacagctggaagatataaattgcattaatttagattggatcaacggttcacgggaatacatccatgctgtaaacaatctccgtgttgttggtgctgaggtggc

SEQ ID NO: 737957 - DNA, 120 bp, Artificial Sequence
  ENSG00000203837_5 (sequence is synthesized)
ttattttattgatgttctcatgaaaaaatttgaatattccccttctaaagtgcacttgattggccacagcttgggagcacacctggctggggaagctgggtcaaggataccaggccttgg

SEQ ID NO: 737958 - DNA, 120 bp, Artificial Sequence
  ENSG00000203837_6 (sequence is synthesized)
aagaataactgggttggacccagctgggccatttttccacaacactccaaaggaagtcaggctagacccctcggatgccaactttgttgacgttattcatacaaatgcagctcgcatcct

SEQ ID NO: 737959 - DNA, 120 bp, Artificial Sequence
  ENSG00000203837_7 (sequence is synthesized)
ctttgagcttggtgttggaaccattgatgcttgtggtcatcttgacttttacccaaatggagggaagcacatgccaggatgtgaagacttaattacacctttactgaaatttaacttcaa

SEQ ID NO: 737960 - DNA, 120 bp, Artificial Sequence
  ENSG00000203837_8 (sequence is synthesized)
tgcttacaaaaaagaaatggcttccttctttgactgtaaccatgcccgaagttatcaattttatgctgaaagcattcttaatcctgatgcatttattgcttatccttgtagatcctacac

SEQ ID NO: 737961 - DNA, 120 bp, Artificial Sequence
  ENSG00000203837_9 (sequence is synthesized)
actaatggatcacattattttttaaacacagggtccctttccccatttgcccgttggaggcacaaattgtctgttaaactcagtggaagcgaagtcactcaaggaactgtctttcttcgt

SEQ ID NO: 737962 - DNA, 120 bp, Artificial Sequence
  ENSG00000203837_10 (sequence is synthesized)
gtaggcggggcagttaggaaaactggggagtttgccattgtcagtggaaaacttgagccaggcatgacttacacaaaattaatcgatgcagatgttaacgttggaaacattacaagtgtt

SEQ ID NO: 737963 - DNA, 120 bp, Artificial Sequence
  ENSG00000203837_11 (sequence is synthesized)
cagttcatctggaaaaaacatttgtttgaagattctcagaataagttgggagcagaaatggtgataaatacatctgggaaatatggatataaatctaccttctgtagccaagacattatg

SEQ ID NO: 737964 - DNA, 120 bp, Artificial Sequence
  ENSG00000203837_12 (sequence is synthesized)
ggacctaatattctccagaacctgaaaccatgctaatctcagatacagtcttgatggatttctttagtaggagcaatgaagaaaagtgtctccttccacctggcatccagaccaaatttg

SEQ ID NO: 737965 - DNA, 120 bp, Artificial Sequence
  ENSG00000203837_13 (sequence is synthesized)
acccttgtaaatgacttagtcatttacaagggtcttactcagagtcaagtacgggtttgctttttttctgtgtagaatgttcatctaactgcaccttaaaaacacactgaaccctgggac

SEQ ID NO: 737966 - DNA, 120 bp, Artificial Sequence
  ENSG00000203837_14 (sequence is synthesized)
aaaagataattactatgatctgtaggaatctggatatcattgacaaaatagagctgttttggaattttcctgaataagaggaggtgatgcaaatgtatgttgagtgtataaactcactgg

SEQ ID NO: 737967 - DNA, 120 bp, Artificial Sequence
  ENSG00000203837_15 (sequence is synthesized)
acaaaagtaagcctctggcttgctgagtttttgaagtatattttcaggtataataatcattgttctaaaattatataaaactatttgttatgttgttaaatcttgctgagacaaattatg

SEQ ID NO: 737968 - DNA, 120 bp, Artificial Sequence
  ENSG00000203837_16 (sequence is synthesized)
actatagtgcatgatatatagtagattataaccttgtgggttgatgtgtctatctagtaataataaaaactaatgagatggcactagtatttccaaggtgttccttggtgttcagggtgt

SEQ ID NO: 737969 - DNA, 120 bp, Artificial Sequence
  ENSG00000203837_17 (sequence is synthesized)
gcacaagagagattttggagcttatctgttatgtgttcatcagttagcaatgggacctgaagttcaacaacccagggtatagcccccttcctccaaagtccctgccacaggagaattact

SEQ ID NO: 737970 - DNA, 120 bp, Artificial Sequence
  ENSG00000203837_18 (sequence is synthesized)
cctctccctgggtcttgaatgctctatggtgaatttgtatttagcctcaaggcagcatttcatttgtaaagcacttgggtaaccctttgttcttgcaataacaatattataatatttaaa

SEQ ID NO: 737971 - DNA, 120 bp, Artificial Sequence; identical to SEQ ID NO: 737908
  ENSG00000203852_0 (sequence is synthesized)

SEQ ID NO: 737972 - DNA, 120 bp, Artificial Sequence; identical to SEQ ID NO: 737909
  ENSG00000203852_1 (sequence is synthesized)

SEQ ID NO: 737973 - DNA, 120 bp, Artificial Sequence; identical to SEQ ID NO: 737910
  ENSG00000203852_2 (sequence is synthesized)

SEQ ID NO: 737974 - DNA, 120 bp, Artificial Sequence; identical to SEQ ID NO: 737911
  ENSG00000203852_3 (sequence is synthesized)

SEQ ID NO: 737975 - DNA, 120 bp, Artificial Sequence; identical to SEQ ID NO: 737912
  ENSG00000203852_4 (sequence is synthesized)

SEQ ID NO: 737976 - DNA, 120 bp, Artificial Sequence; identical to SEQ ID NO: 737913
  ENSG00000203852_5 (sequence is synthesized)

SEQ ID NO: 737977 - DNA, 120 bp, Artificial Sequence; identical to SEQ ID NO: 737914
  ENSG00000203852_6 (sequence is synthesized)

SEQ ID NO: 737978 - DNA, 120 bp, Artificial Sequence; identical to SEQ ID NO: 737915
  ENSG00000203852_7 (sequence is synthesized)

SEQ ID NO: 737979 - DNA, 120 bp, Artificial Sequence; identical to SEQ ID NO: 737916
  ENSG00000203852_8 (sequence is synthesized)

SEQ ID NO: 737980 - DNA, 120 bp, Artificial Sequence; identical to SEQ ID NO: 737917
  ENSG00000203852_9 (sequence is synthesized)

SEQ ID NO: 737981 - DNA, 120 bp, Artificial Sequence; identical to SEQ ID NO: 737918
  ENSG00000203852_10 (sequence is synthesized)

SEQ ID NO: 737982 - DNA, 120 bp, Artificial Sequence; identical to SEQ ID NO: 737919
  ENSG00000203852_11 (sequence is synthesized)

SEQ ID NO: 737983 - DNA, 120 bp, Artificial Sequence; identical to SEQ ID NO: 737920
  ENSG00000203852_12 (sequence is synthesized)

SEQ ID NO: 737984 - DNA, 120 bp, Artificial Sequence
  ENSG00000203857_0 (sequence is synthesized)
gaggtgagaagtacgtccactcttctgtccagcttttaacaatctaactaatgccctctccagggtcaccctagaatcagatctgctccccagcatcttctgtttcctggtgagtgattc

SEQ ID NO: 737985 - DNA, 120 bp, Artificial Sequence
  ENSG00000203857_1 (sequence is synthesized)
ctgctactttggatggccatgacgggctggagctgccttgtgacaggagcaggagggtttctgggacagaggatcatccgcctcttggtgaaggagaaggagctgaaggagatcagggtc

SEQ ID NO: 737986 - DNA, 120 bp, Artificial Sequence
  ENSG00000203857_2 (sequence is synthesized)
ttggacaaggccttcggaccagaattgagagaggaattttctaaactccagaacaagaccaagctgacagtgctggaaggagacattctggatgagccattcctgaagagagcctgccag

SEQ ID NO: 737987 - DNA, 120 bp, Artificial Sequence
  ENSG00000203857_3 (sequence is synthesized)
gacgtctcggtcatcatccacaccgcctgtatcattgatgtcttcggtgtcactcacagagagtctatcatgaatgtcaatgtgaaaggtacccagctcctgttagaggcctgtgtccaa

SEQ ID NO: 737988 - DNA, 120 bp, Artificial Sequence
  ENSG00000203857_4 (sequence is synthesized)
gctagtgtgccagtcttcatctacaccagtagcatagaggtagccgggcccaactcctacaaggaaatcatccagaatggccatgaagaagagcctctggaaaacacatggcccgctcca

SEQ ID NO: 737989 - DNA, 120 bp, Artificial Sequence
  ENSG00000203857_5 (sequence is synthesized)
tacccacacagcaaaaagcttgctgagaaggctgtactggcggctaacgggtggaatctgaaaaacggcggcaccctgtacacttgtgccttacgacccatgtatatctatggggaagga

SEQ ID NO: 737990 - DNA, 120 bp, Artificial Sequence
  ENSG00000203857_6 (sequence is synthesized)
gggcccacattctggccttgagggccctgcaggaccccaagaaggccccaagcatccgaggacagttctactatatctcagatgacacgcctcaccaaagctatgataaccttaattaca

SEQ ID NO: 737991 - DNA, 120 bp, Artificial Sequence
  ENSG00000203857_7 (sequence is synthesized)
ccctgagcaaagagttcggcctccgccttgattccagatggagctttcctttatccctgatgtattggattggcttcctgctggaaatagtgagcttcctactcaggccaatttacacct

SEQ ID NO: 737992 - DNA, 120 bp, Artificial Sequence
  ENSG00000203857_8 (sequence is synthesized)
atcgaccgcccttcaaccgccacatagtcacattgtcaaatagcgtattcaccttctcttataagaaggctcagcgagatctggcgtataagccactctacagctgggaggaagccaagc

SEQ ID NO: 737993 - DNA, 120 bp, Artificial Sequence
  ENSG00000203857_9 (sequence is synthesized)
agaaaacggtggagtgggttggttcccttgtggaccggcacaaggagaccctgaagtccaagactcagtgatttaaggatgacagagatgtgcatgtgggtattgttaggagatgtcatc

SEQ ID NO: 737994 - DNA, 120 bp, Artificial Sequence
  ENSG00000203857_10 (sequence is synthesized)
aagctccaccctcctggcctcatacagaaagtgacaagggcacaagctcaggtcctgctgcctccctttcatacaatggccaacttattgtattcctcatgtcatcaaaacctgcgcagt

SEQ ID NO: 737995 - DNA, 120 bp, Artificial Sequence
  ENSG00000203857_11 (sequence is synthesized)
cattggcccaacaagaaggtttctgtcctaatcatataccagaggaaagaccatgtggtttgctgttaccaaatctcagtagctgattctgaacaatttagggactcttttaacttgagg

SEQ ID NO: 737996 - DNA, 120 bp, Artificial Sequence
  ENSG00000203857_12 (sequence is synthesized)
gtcgttttgactactagagctccatttctactcttaaatgagaaaggatttcctttctttttaatcttccattccttcacatagtttgataaaaagatcaataaatgtttgaatgtttaa

SEQ ID NO: 737997 - DNA, 120 bp, Artificial Sequence
  ENSG00000203857_13 (sequence is synthesized)
gtttgcaaaaaaaatggggtggaggaaaatgaggcatctgtgtgagtatataaccatttgacatctctttttagccctctccagggtcaccctagaatcagatctgctccccagcatctt

SEQ ID NO: 737998 - DNA, 120 bp, Artificial Sequence
  ENSG00000203857_14 (sequence is synthesized)
atcacaaagaagggcaggaagggaagagaagtccctccactgaacacctgctgtgctctgggccaagtgcctttgctgatcactacgaataggagagttcaagactgctaactttagttt

SEQ ID NO: 737999 - DNA, 120 bp, Artificial Sequence
  ENSG00000203857_15 (sequence is synthesized)
tttagatgataaaactaggactgagagagggcaagtaacttgtccaaggtcccccaggtaagtaagcaggtaggagagttagactttaaactcatccctgtgtgactccaaaggctcttt

SEQ ID NO: 738000 - DNA, 120 bp, Artificial Sequence
  ENSG00000203857_16 (sequence is synthesized)
ctgcatgtatgtggggggagatggaccttgtctagcaagttattgaaatttgtagccaaatctaagccaatctcacatccaaagtcatcaagaaataaatattaaatagtataaaatggc

SEQ ID NO: 738001 - DNA, 120 bp, Artificial Sequence
  ENSG00000203857_17 (sequence is synthesized)
atagtatgaaagatactgggtgggatttccagagactagattctggccctgacccagaacttgagaagcagccacctcagcctccaggcctcttttcttctcatctagaaaatcccacat

SEQ ID NO: 738002 - DNA, 120 bp, Artificial Sequence
  ENSG00000203857_18 (sequence is synthesized)
cagttctttgtcttgtctgcaactcttttatgttctgaagcttttgtcttggcaattgctgtacaacattcataaaggacactattaccctggagacctcaccaatgggtcattgtctct

SEQ ID NO: 738003 - DNA, 120 bp, Artificial Sequence
  ENSG00000203859_0 (sequence is synthesized)
gaggcagtaaggacttggactcctctgtccagcttttaacaatctaagttacgccctcttctgggtcacgctagaatcagatctgctctccagcatcttctgtttcctggcaagtgtttc

SEQ ID NO: 738004 - DNA, 120 bp, Artificial Sequence
  ENSG00000203859_1 (sequence is synthesized)
ctgctactttggattggccacgatgggctggagctgccttgtgacaggagcaggagggcttctgggtcagaggatcgtccgcctgttggtggaagagaaggaactgaaggagatcagggc

SEQ ID NO: 738005 - DNA, 120 bp, Artificial Sequence
  ENSG00000203859_2 (sequence is synthesized)
cttggacaaggccttcagaccagaattgagagaggaattttctaagctccagaacaggaccaagctgactgtacttgaaggagacattctggatgagccattcctgaaaagagcctgcca

SEQ ID NO: 738006 - DNA, 120 bp, Artificial Sequence
  ENSG00000203859_3 (sequence is synthesized)
ggacgtctcggtcgtcatccacaccgcctgtatcattgatgtctttggtgtcactcacagagagtccatcatgaatgtcaatgtgaaaggtacccagctactgttggaggcctgtgtcca

SEQ ID NO: 738007 - DNA, 120 bp, Artificial Sequence
  ENSG00000203859_4 (sequence is synthesized)
agccagtgtgccagtcttcatctacaccagtagcatagaggtagccgggcccaactcctacaaggaaatcatccagaacggccacgaagaagagcctctggaaaacacatggcccactcc

SEQ ID NO: 738008 - DNA, 120 bp, Artificial Sequence
  ENSG00000203859_5 (sequence is synthesized)
atacccgtacagcaaaaagcttgctgagaaggctgtgctggcggctaatgggtggaatctaaaaaatggtgataccttgtacacttgtgcgttaagacccacatatatctatggggaagg

SEQ ID NO: 738009 - DNA, 120 bp, Artificial Sequence
  ENSG00000203859_6 (sequence is synthesized)
cacattctggccttgagggctctgcgggaccccaagaaggccccaagtgtccgaggtcaattctattacatctcagatgacacgcctcaccaaagctatgataaccttaattacatcctg

SEQ ID NO: 738010 - DNA, 120 bp, Artificial Sequence
  ENSG00000203859_7 (sequence is synthesized)
agcaaagagtttggcctccgccttgattccagatggagccttcctttaaccctgatgtactggattggcttcctgctggaagtagtgagcttcctactcagcccaatttactcctatcaa

SEQ ID NO: 738011 - DNA, 120 bp, Artificial Sequence
  ENSG00000203859_8 (sequence is synthesized)
ccccccttcaaccgccacacagtcacattatcaaatagtgtgttcaccttctcttacaagaaggctcagcgagatctggcgtataagccactctacagctgggaggaagccaagcagaaa

SEQ ID NO: 738012 - DNA, 120 bp, Artificial Sequence
  ENSG00000203859_9 (sequence is synthesized)
accgtggagtgggttggttcccttgtggaccggcacaaggagaccctgaagtccaagactcagtgatttaaggatgacagagatgtgcatgtgggtattgttaggaaatgtcatcaaact

SEQ ID NO: 738013 - DNA, 120 bp, Artificial Sequence
  ENSG00000203859_10 (sequence is synthesized)
ccacccacctggcttcatacagaaggcaacaggggcacaagcccaggtcctgctgcctctctttcacacaatgcccaacttactgtcttcttcatgtcatcaaaatctgcacagtcactg

SEQ ID NO: 738014 - DNA, 120 bp, Artificial Sequence
  ENSG00000203859_11 (sequence is synthesized)
gcccaaccagaactttctgtcctaatcatacaccagaagacaaacaatatgatttgctgttaccaaatctcagtggctgattctgaacaattgtggtctctcttaacttgaggttctctt

SEQ ID NO: 738015 - DNA, 120 bp, Artificial Sequence
  ENSG00000203859_12 (sequence is synthesized)
ttgactaatagagctccatttcccctcttaaatgagaaagcatttcttttctctttaatctcctattccttcacacagttcaacataaagagcaataaatgttttaatgcttaacatgga

SEQ ID NO: 738016 - DNA, 120 bp, Artificial Sequence
  ENSG00000203859_13 (sequence is synthesized)
aaggctaaagccaagactctttatcacactgtggccttaagattggatttctcttcctgttcctgggaagaattagagatataacctaaaggtcactattattctgagaaaagggattct

SEQ ID NO: 738017 - DNA, 120 bp, Artificial Sequence
  ENSG00000203859_14 (sequence is synthesized)
gacttctgctatgaaatggcaattcctttgagccagtctgtctaaagtcggcagcaaaggagaagcagatgaagggagtagaaaagagctccagaacaggaccaagctgactgtacttga

SEQ ID NO: 738018 - DNA, 120 bp, Artificial Sequence
  ENSG00000203859_15 (sequence is synthesized)
agagaagtcactccattgaacacctgctgagctcttggccaagtgcctttgctgatcactactgactggggagttcaaggctggtaacctcagttttttagatgagaaaactagggctga

SEQ ID NO: 738019 - DNA, 120 bp, Artificial Sequence
  ENSG00000203859_16 (sequence is synthesized)
gagacagcaagtaacttgtccaaggccccaaaagtaagtaagtaagtaggagagttagactttaaactcactcctgtgtgactccaaaggctgtggaagctctttctactgtggccccaa

SEQ ID NO: 738020 - DNA, 120 bp, Artificial Sequence
  ENSG00000203867_0 (sequence is synthesized)
gcgccaccgggaaggacaaggggactgggcacggggaccccggccagtgagcgcccgtggcccgggaccgcccctcccttgagctctctcgccgcgatcccgggcgggtctcgccccgca

SEQ ID NO: 738021 - DNA, 120 bp, Artificial Sequence
  ENSG00000203867_1 (sequence is synthesized)
tggtgctggcagcagccatgagccaggacgcggaccccagcggtccggagcagccggacagagttgcctgcagtgtgcctggtgcccgggcgtccccggcaccctccggcccgcgaggga

SEQ ID NO: 738022 - DNA, 120 bp, Artificial Sequence
  ENSG00000203867_2 (sequence is synthesized)
tgcagcagccgccgccgccgccccagccaccgcccccgccccaagccggcctaccccagatcatccaaaatgccgccaagctcctggacaagaacccattctcggtcagtaacccgaacc

SEQ ID NO: 738023 - DNA, 120 bp, Artificial Sequence
  ENSG00000203867_3 (sequence is synthesized)
ctctgcttccttcacctgccagtctccagctggctcaactgcaggcccagctcaccctccaccggctgaagctggcacagacagctgtcaccaacaacactgcagccgccacagtcctga

SEQ ID NO: 738024 - DNA, 120 bp, Artificial Sequence
  ENSG00000203867_4 (sequence is synthesized)
accaagtcctctccaaagtggccatgtcccagcctctcttcaatcaactgaggcatccgtctgtgatcactggcccccacggccatgctggggttccccaacatgctgcagccataccca

SEQ ID NO: 738025 - DNA, 120 bp, Artificial Sequence
  ENSG00000203867_5 (sequence is synthesized)
gtacccggtttccctctaatgcaattgccttttcaccccccagccagacacgaggccccggaccctccatgaaccttcccaaccagccacccagtgccatggtgatgcatcctttcactg

SEQ ID NO: 738026 - DNA, 120 bp, Artificial Sequence
  ENSG00000203867_6 (sequence is synthesized)
gggtaatgcctcagacccctggccagccagcagtcatcttgggcattggcaagactgggcctgctccagctacagcaggattctatgagtatggcaaagccagctctggccagacatatg

SEQ ID NO: 738027 - DNA, 120 bp, Artificial Sequence
  ENSG00000203867_7 (sequence is synthesized)
gccctgaaacagatggtcagcctggcttcctgccatcctcggcctcaacctcgggcagtgtgacctatgaagggcactacagccacacagggcaggatggtcaagctgccttttccaaag

SEQ ID NO: 738028 - DNA, 120 bp, Artificial Sequence
  ENSG00000203867_8 (sequence is synthesized)
atttttacggacccaactcccaaggttcacatgtggccagcggatttccagctgagcaggctgggggcctgaaaagtgaggtcgggccactgctgcagggcacaaacagccaatgggaga

SEQ ID NO: 738029 - DNA, 120 bp, Artificial Sequence
  ENSG00000203867_9 (sequence is synthesized)
gcccccatggattctcgggccaaagcaagcctgatctcacagcaggtcccatgtggcctccaccccacaaccagccctatgagctgtacgaccccgaggaaccaacctcagacaggacac

SEQ ID NO: 738030 - DNA, 120 bp, Artificial Sequence
  ENSG00000203867_10 (sequence is synthesized)
ctccttccttcgggggtcggcttaacaacagcaaacagggttttatcggtgctgggcggagggccaaggaggaccaggcgttgctatctgtgcggcccctgcaggctcatgagctgaacg

SEQ ID NO: 738031 - DNA, 120 bp, Artificial Sequence
  ENSG00000203867_11 (sequence is synthesized)
actttcacggtgtggcccccctccacttgccgcatatctgtagcatctgtgacaagaaggtgtttgatttgaaggactgggagctgcatgtgaaagggaagctgcacgctcagaaatgcc

SEQ ID NO: 738032 - DNA, 120 bp, Artificial Sequence
  ENSG00000203867_12 (sequence is synthesized)
tggtcttctctgaaaatgctggcatccggtgtatacttggttcggcagagggaacattgtgtgcttctcccaacagcacagctgtttataaccctgctgggaatgaagattatgcctcaa

SEQ ID NO: 738033 - DNA, 120 bp, Artificial Sequence
  ENSG00000203867_13 (sequence is synthesized)
atcttggaacatcatacgtgcccattccagcaaggtcattcactcagtcaagccccacatttcctttggcttctgtggggacaacttttgcacagcggaaaggggctggccgtgtggtgc

SEQ ID NO: 738034 - DNA, 120 bp, Artificial Sequence
  ENSG00000203867_14 (sequence is synthesized)
acatctgcaatctccctgaaggaagctgcactgagaatgacgtcattaacctggggctgccctttggaaaggtcactaattacatcctcatgaagtcgactaatcaggcctttttagaga

SEQ ID NO: 738035 - DNA, 120 bp, Artificial Sequence
  ENSG00000203867_15 (sequence is synthesized)
tggcttacacagaagctgcacaggccatggtccagtattatcaagaaaaatctgctgtgatcaatggtgagaagttgctcattcggatgtccaagagatacaaggaattgcagctcaaga

SEQ ID NO: 738036 - DNA, 120 bp, Artificial Sequence
  ENSG00000203867_16 (sequence is synthesized)
aacccgggaaggccgtggctgccatcatccaggacatccattcccagagggagagggacatgttccgggaagcagacagatatggcccagaaaggccgcggtctcgtagtccggtgagcc

SEQ ID NO: 738037 - DNA, 120 bp, Artificial Sequence
  ENSG00000203867_17 (sequence is synthesized)
ggtcactctccccgaggtcccacactcccagcttcacctcctgcagctcttcccacagccctccgggcccctcccgggctgactggggcaatggccgggactcctgggagcactctccct

SEQ ID NO: 738038 - DNA, 120 bp, Artificial Sequence
  ENSG00000203867_18 (sequence is synthesized)
atgccaggagggaggaagagcgagacccggctccctggagggacaacggagatgacaagagggacaggatggacccctgggcacatgatcgcaaacaccacccccggcaactggacaagg

SEQ ID NO: 738039 - DNA, 120 bp, Artificial Sequence
  ENSG00000203867_19 (sequence is synthesized)
ctgagttggacgagcgaccagaaggagggaggccccaccgggagaagtacccgagatctgggtctcccaacctgccccactctgtgtccagctacaaaagccgtgaagacggctactacc

SEQ ID NO: 738040 - DNA, 120 bp, Artificial Sequence
  ENSG00000203867_20 (sequence is synthesized)
ggaaagagcccaaagccaagtcggacaagtatctgaagcagcagcaggatgcccccgggaggtccaggaggaaagacgaggccaggctgcgggaaagcagacacccccatccggatgact

SEQ ID NO: 738041 - DNA, 120 bp, Artificial Sequence
  ENSG00000203867_21 (sequence is synthesized)
caggcaaggaagatgggctggggccaaaggtcactagggcccctgagggcgccaaggccaagcagaatgagaaaaataaaaccaagagaactgatagagaccaagaaggagctgatgata

SEQ ID NO: 738042 - DNA, 120 bp, Artificial Sequence
  ENSG00000203867_22 (sequence is synthesized)
gaaaagaaaacacaatggcagagaatgaggctggaaaagaggaacaggagggcatggaagaaagccctcaatcagtgggcagacaggagaaagaagcagagttctctgatccggaaaaca

SEQ ID NO: 738043 - DNA, 120 bp, Artificial Sequence
  ENSG00000203867_23 (sequence is synthesized)
caaggacaaagaaggaacaagattgggagagtgaaagtgaggcagagggggagagctggtatcccactaacatggaggagctggtgacagtggacgaggttggggaagaagaagatttta

SEQ ID NO: 738044 - DNA, 120 bp, Artificial Sequence
  ENSG00000203867_24 (sequence is synthesized)
tcgtggaaccagacatcccagagctggaagaaattgtgcccattgaccagaaagacaaaatttgcccagaaacatgtctgtgtgtgacaaccaccttagacttagacctggcccaggatt

SEQ ID NO: 738045 - DNA, 120 bp, Artificial Sequence
  ENSG00000203867_25 (sequence is synthesized)
tccccaaggaaggagtcaaggccgtagggaatggggctgcagaaatcagcctcaagtcacccagagaactgccctctgcttccacaagctgtcccagtgacatggacgtggaaatgcctg

SEQ ID NO: 738046 - DNA, 120 bp, Artificial Sequence
  ENSG00000203867_26 (sequence is synthesized)
gcctaaatctggatgctgagcggaagccagctgaaagtgagacaggcctctccctggaggattcagattgctacgagaaggaggcaaagggagtggagagctcagatgttcatccagccc

SEQ ID NO: 738047 - DNA, 120 bp, Artificial Sequence
  ENSG00000203867_27 (sequence is synthesized)
ctacagtccagcaaatgtcttcccctaagccagcagaggagagggcccggcagccaagcccatttgtggatgattgcaagaccagggggacccccgaagatggggcttgtgaaggcagcc

SEQ ID NO: 738048 - DNA, 120 bp, Artificial Sequence
  ENSG00000203867_28 (sequence is synthesized)
ccctggaggagaaagccagcccccccatcgaaactgacctccaaaaccaagcttgccaagaagtgttgaccccggaaaactccaggtacgtggaaatgaaatctctggaggtgaggtcac

SEQ ID NO: 738049 - DNA, 120 bp, Artificial Sequence
  ENSG00000203867_29 (sequence is synthesized)
cagagtacactgaagtggaactgaaacagcccctttctttgccctcttgggaaccagaggatgtgttcagtgaacttagcattcctctaggggtggagttcgtggttcccaggactggct

SEQ ID NO: 738050 - DNA, 120 bp, Artificial Sequence
  ENSG00000203867_30 (sequence is synthesized)
aatatttgtcccagctggccgaggagggcctcaaggagaccgagggggcagatagcccgaggccagaggacagcggaatcgtgccacgcttcgaaaggaaaaagctctgatgcttctgct

SEQ ID NO: 738051 - DNA, 120 bp, Artificial Sequence
  ENSG00000203867_31 (sequence is synthesized)
tctgctgctactgctgctgctgcaaggttggaaaggagagcttgctgaagtggggccttcctgattctggggacaggactaaagcctgagaggaaggaaaaccaagcagggcacattgct

SEQ ID NO: 738052 - DNA, 120 bp, Artificial Sequence
  ENSG00000203867_32 (sequence is synthesized)
tgggcttgttcccagagactcagtgaaatgcccctgatatgtctccaggagcaagtcacccaggtgtgtccagcccactgagggtcaccaactctctccctgctgactcttgtttctctc

SEQ ID NO: 738053 - DNA, 120 bp, Artificial Sequence
  ENSG00000203867_33 (sequence is synthesized)
aatctttcaattcgtttttctctcttttcctcttgttctttctctccctccctccttatgtgccaaggatcgtttccttttcacaaaacccaacttctcagggattttcacagtgtttaa

SEQ ID NO: 738054 - DNA, 120 bp, Artificial Sequence
  ENSG00000203867_34 (sequence is synthesized)
attcttggtaggatataacaggtcaggcctagctgagtcaggcaaggaaaaggtttaatggaaactcctgggtcaggcgaacccctgcagtgagtctacagcagtatctctgcctggtgt

SEQ ID NO: 738055 - DNA, 120 bp, Artificial Sequence
  ENSG00000203867_35 (sequence is synthesized)
cccatgtatcccctgcatgaggagctgagtcaggtctgcagtcctggtgaggggacatcacggacaatctgttggcagagctgggagggtcttcattaacctcttcctccaactgggcca

SEQ ID NO: 738056 - DNA, 120 bp, Artificial Sequence
  ENSG00000203867_36 (sequence is synthesized)
cccttttgaaaagcccctgtttttaataactgtttcatcctctcagttattctagaaatctgccagacttatgccttaaagtaaaattaaatgaattttagagaagatgaaaagagccct

SEQ ID NO: 738057 - DNA, 120 bp, Artificial Sequence
  ENSG00000203867_37 (sequence is synthesized)
tcattttggaagctctgataagtttcctccaaacttattcccctcctcttgatttcaggagatgtcagggtttttctattctggacaatgaatttggtacagagtcactgtaattaaata

SEQ ID NO: 738058 - DNA, 120 bp, Artificial Sequence
  ENSG00000203867_38 (sequence is synthesized)
taaaaacagaagcatcttcctccagctaaagcagcagttggcgcgggcttaggttgaatgctggcctctctgcaaagcacagctttggctcgagaggcacagctccaggctgtggaaaac

SEQ ID NO: 738059 - DNA, 120 bp, Artificial Sequence
  ENSG00000203867_39 (sequence is synthesized)
agagttgtcttgggggttaaatgagcttatttaagtcaaggaaacatcatctgtccttgattcagccttggtgcctgcactctggggtacaaccacctcacagtaggatggtttttaaat

SEQ ID NO: 738060 - DNA, 120 bp, Artificial Sequence
  ENSG00000203867_40 (sequence is synthesized)
ggccccccagttgggggagaagctaaggaaagagaaggctgcagatccaaagagtggcattgaagtttgctgggtgtctgtaggtggaccctttccagctgggcagatagttgagggctc

SEQ ID NO: 738061 - DNA, 120 bp, Artificial Sequence
  ENSG00000203867_41 (sequence is synthesized)
cctgggtttgactgtatgtgcagactttgataccaaaatgttatgaaaagtcgtgattcccgctgctctttctggtactggagggtgggtaccttcaggctgtggggtctctagcctgat

SEQ ID NO: 738062 - DNA, 120 bp, Artificial Sequence
  ENSG00000203867_42 (sequence is synthesized)
attccattgaaagggtgtgggataaaggtgctgggggaaatgaggctctgccacagccatagagaggccctcgggcagttaagaagggagcctggagctgttttcatgagcagagatact

SEQ ID NO: 738063 - DNA, 120 bp, Artificial Sequence
  ENSG00000203867_43 (sequence is synthesized)
ctcctgaaagcacccttcatagcttagcccaggaaaaataaaacaaggaagacaggtcactctcccctaggcagttcctgttgtttctgttcctgaccttgggcaggcagactgagaagg

SEQ ID NO: 738064 - DNA, 120 bp, Artificial Sequence
  ENSG00000203867_44 (sequence is synthesized)
gactgtgtagggttttgttttgttttttttcattttcctttttatggcatgtgagagcatactgtacattctgtcctctgtactaatggaggaagggcagagagattagttcaaggctaa

SEQ ID NO: 738065 - DNA, 120 bp, Artificial Sequence
  ENSG00000203867_45 (sequence is synthesized)
cattttatatcaggtaactgaggcacacaaagggaacaaatgaagaacataaaatgatcagtgtaaacctgaaagcacgcagtcattggcaagggacaggctcatgggagctggtgagag

SEQ ID NO: 738066 - DNA, 120 bp, Artificial Sequence
  ENSG00000203867_46 (sequence is synthesized)
agagcagttaaggcaagcaccaggggaaagcagaccaacttgaacagatgtgatgcggagaggttggaagaagcaagaaacctgaactcatcatcaggctattaaataaaatttatagga

SEQ ID NO: 738067 - DNA, 120 bp, Artificial Sequence
  ENSG00000203867_47 (sequence is synthesized)
ggctgttggtttggactgagctcctgcaataggcccaacagaccaaaacaaaagggagtcactcatgttgaagttctgtcttccaggaaatcaggagagagagagagagaaagaatagcc

SEQ ID NO: 738068 - DNA, 120 bp, Artificial Sequence
  ENSG00000203867_48 (sequence is synthesized)
aaatccccaaacaggccagttttaaccagcatgatgaagtgtccttggttttaacctttataaggaaagcagctttgagatgaccagtctggtttttgttctttgtgtctgctttcctca

SEQ ID NO: 738069 - DNA, 120 bp, Artificial Sequence
  ENSG00000203867_49 (sequence is synthesized)
gcccttttctgtctataaagccaacctcctccgctcagctcatgggaacactcattctattttatagaatgacatgttgcccaattctagaatcaaaaataaaggccaactaagatcttc

SEQ ID NO: 738070 - DNA, 120 bp, Artificial Sequence
  ENSG00000203867_50 (sequence is synthesized)
aaagtaaatttgttgtaattttatcttttgagaagaccatatgggggctgctgaaaagttggtatctcaaataaagtctgaagatcacggctcagcccagattgttcccctggccaactc

SEQ ID NO: 738071 - DNA, 120 bp, Artificial Sequence
  ENSG00000203867_51 (sequence is synthesized)
cacaggtttgaacctggcattctggacaccagctatgcctcctccatttctcagaaaacctttgatcttgtgtgtctttcttcctactgaagggaattgtgggggcagttctttggcctt

SEQ ID NO: 738072 - DNA, 120 bp, Artificial Sequence
  ENSG00000203867_52 (sequence is synthesized)
cttgctgaactttgctggaaatagcccacaatttttatcagaggttagaactgtacattatcagagagactggacactttatcccctagcaaagtgggagaagattttaccagctcattc

SEQ ID NO: 738073 - DNA, 120 bp, Artificial Sequence
  ENSG00000203867_53 (sequence is synthesized)
cactccaccctggccttcccccaccccccatccccagcagcatttccatggaaatccagatggtcgtgtagtgttatggctctcttgtgatagactggccttcatattggagagctaggg

SEQ ID NO: 738074 - DNA, 120 bp, Artificial Sequence
  ENSG00000203867_54 (sequence is synthesized)
agagcccctgggagggagagagataaggcgctatctgccttcaatcagaaccttcggtttaaaatcatctaagagtctatacttgtgtgtacatacgtatttatttttatttatttttat

SEQ ID NO: 738075 - DNA, 120 bp, Artificial Sequence
  ENSG00000203867_55 (sequence is synthesized)
acaattccattggcatggtccttcaccgaccctatgatttgcactttttatttctatgtgtgccacacacaatgcagtattaatggcaaccaggtaaatattgatttattttttaaagct

SEQ ID NO: 738076 - DNA, 120 bp, Artificial Sequence
  ENSG00000203867_56 (sequence is synthesized)
tttcttcagtgttttgtcaaccatttcaaagtgtctcccaaaaaaggatgctgaagagcaattgctcccttaagcaacagattcatatttaccctgggttaatacaacaaaaggcctgta

SEQ ID NO: 738077 - DNA, 120 bp, Artificial Sequence
  ENSG00000203867_57 (sequence is synthesized)
taattgtcttttcattgttaacacccaaaatagcatctatctagacagtatccccaaagaatttggaaaatctgatggtgtgagcagcagccgttagtatcagggtttcccattcttgga

SEQ ID NO: 738078 - DNA, 120 bp, Artificial Sequence
  ENSG00000203867_58 (sequence is synthesized)
cagtccgaggctgtgacctgttagataattagattatacttgaactggaccagagtttgttttttgaatttatgagaaaaaccaaaacactaagttaagtttgaacttgtaaagtattga

SEQ ID NO: 738079 - DNA, 120 bp, Artificial Sequence
  ENSG00000203867_59 (sequence is synthesized)
aatttgttgagtgtcctataaattgtcactacttttcctgatctgtataactgactgcaaagtgtttgtttttacaaaagagaaaagaaaagatttttaataaagagaatttgaaagctg

SEQ ID NO: 738080 - DNA, 120 bp, Artificial Sequence
  ENSG00000203867_60 (sequence is synthesized)
gggctgtttctggaaaacagagttgttttgggagttaaatgagcttatttaagtcaagcagttagaacagcacttgacactagataagggctttggaagtgtttgctattatagctgtac

SEQ ID NO: 738081 - DNA, 120 bp, Artificial Sequence
  ENSG00000203867_61 (sequence is synthesized)
acctattatggctcctctcaccggggctgcataaccctttagcctgcaggactggtcactactggcatggagacttctagggaggggtggagttcgtggttcccaggactggcttttatt

SEQ ID NO: 738082 - DNA, 120 bp, Artificial Sequence
  ENSG00000203867_62 (sequence is synthesized)
gcagcgctgtccactacaggaacttacaggtaaaaatccactctccttgcccagcatgccaggggctccccagtctccataaccgagccaggtgtctggcgtccttggccttgcttgcct

SEQ ID NO: 738083 - DNA, 120 bp, Artificial Sequence
  ENSG00000203867_63 (sequence is synthesized)
ctgagtctagctcctacctgcaaggcctactccaggccacaggttacttgccattccccaagcacaccaggctgttttctgcttctgtgtctgtctccttccactacatggaaaacccct

SEQ ID NO: 738084 - DNA, 120 bp, Artificial Sequence
  ENSG00000203867_64 (sequence is synthesized)
aatcttcccatagacttgattccatcaggctgctctcgacatggtggctacctcctgtgttgctcctagcacatgtctctactttaatacctaaaacatcctgtttgggttggctttggc

SEQ ID NO: 738085 - DNA, 120 bp, Artificial Sequence
  ENSG00000203870_0 (sequence is synthesized)
aagactgaccagcttcttctgaagacttctgccctctaaagactaaggcctaattccactggtttctttgaattccgtggtcctaagtccattttcagacaaagtttctgtggaaagacc

SEQ ID NO: 738086 - DNA, 120 bp, Artificial Sequence
  ENSG00000203870_1 (sequence is synthesized)
tacggacaaagacatctctccttggcagagtgagctaggattaccagctcttcagccgcagctgaaggcgggagtccatggaaccccagaagctgctgataattggatttctgctatgct

SEQ ID NO: 738087 - DNA, 120 bp, Artificial Sequence
  ENSG00000203870_2 (sequence is synthesized)
ctctaacttgcctcttgttggagacagtagcttcctctcctttgcctttgtctgccttgggaatacaagaaaaaacaggatcgaaaccacgctcagggggtaatcacaggtcctggctga

SEQ ID NO: 738088 - DNA, 120 bp, Artificial Sequence
  ENSG00000203870_3 (sequence is synthesized)
ttttcttctcacctcagcactaatggggatcctctgctgcttcaccattcttgtagttgatccagtccactgaagaactagaagattcaacagggcaagtgtggtctctccagttggact

SEQ ID NO: 738089 - DNA, 120 bp, Artificial Sequence
  ENSG00000203870_4 (sequence is synthesized)
ccaaaagagtggggcatttgctatctgcttaaaatgaggaagtatctatcagttgaaattaaatcgtcttccaacttgaatcatcctttgccttcattttctccttcaaaagttgcaatt

SEQ ID NO: 738090 - DNA, 120 bp, Artificial Sequence
  ENSG00000203870_5 (sequence is synthesized)
ttaaaatgtgaatatccttattactgttttggttataatagtaatacatatttattgcaaaaaaaatttgagaaatacagagaaaagagtaagtttccataattctagcaaccagaaata

SEQ ID NO: 738091 - DNA, 120 bp, Artificial Sequence
  ENSG00000203870_6 (sequence is synthesized)
aacatcattaacatcttgatgtacctcccttcaatttttttctatatatgtattacaagttttccaaagtctgttctgtgaaacaatagttctgttttaataaaagtcacaaaacagtga

SEQ ID NO: 738092 - DNA, 120 bp, Artificial Sequence
  ENSG00000203870_7 (sequence is synthesized)
tgtttctttcttcataggacttaagattcatgtttcagttcaggtcaggtaaaatgaatttcatgtttaaaaagaatgttcataggaaagcaaactattctggtttggttcaatttagtt

SEQ ID NO: 738093 - DNA, 120 bp, Artificial Sequence
  ENSG00000203872_0 (sequence is synthesized)
aagttaacaacttaatgctagagtctgggaaggagcaactacttaaatcttcccaaatctggtgcccataccttctatggcaggggcttttagcaccattctttaacgttagacacataa

SEQ ID NO: 738094 - DNA, 120 bp, Artificial Sequence
  ENSG00000203872_1 (sequence is synthesized)
ccacagcctaatcacttgaaccatttaatccttaccagcctctagcattatcctaaaaccctgaacctcttccagctttcttaaactttcagcttttcttgaaacgactttttctgattc

SEQ ID NO: 738095 - DNA, 120 bp, Artificial Sequence
  ENSG00000203872_2 (sequence is synthesized)
taagattattttaactgtaagtaggagaagacatctgaaatttaactatgatcagaaattcagattacaaaaactttgtttgctgtgctgtttgtaataaaataattccaccagcccctt

SEQ ID NO: 738096 - DNA, 120 bp, Artificial Sequence
  ENSG00000203872_3 (sequence is synthesized)
ttggaaaaaccttcaaacggatccatgaatacaagccacttaagacacgcttttacactcacaaagacatactagatattggggcaaatattctgaaaaaagaagagcagtttcaagaag

SEQ ID NO: 738097 - DNA, 120 bp, Artificial Sequence
  ENSG00000203872_4 (sequence is synthesized)
atatactcagagaacacattgcgaaagcagaagctgaagtatgggctcaggctaatgaacgtcaaaaacaagcagtggagaaagcacttgaagaagcaaatgacagacacaaaattgaaa

SEQ ID NO: 738098 - DNA, 120 bp, Artificial Sequence
  ENSG00000203872_5 (sequence is synthesized)
agaaagatttacaggaagtgacagctaaaactaagacagagatgtatcaaaacatggatgacgaaatgaagagagagcacttggctgcagaacagcgcatggtccacagaatccaaagga

SEQ ID NO: 738099 - DNA, 120 bp, Artificial Sequence
  ENSG00000203872_6 (sequence is synthesized)
ttatgatggaatgccacagagagaaggtcgaagctgtggagaaagccagggctgaagaaagacacatcgcccaggaagcaatccaggcccagaaaagcaaagccgtggaggaaattgtga

SEQ ID NO: 738100 - DNA, 120 bp, Artificial Sequence
  ENSG00000203872_7 (sequence is synthesized)
atactggtgtcacagttattaaggatgagaagaccagtgtggcccgactgatgagggaaaaagaacatgaaatgagcatcctctatggcatagctcagaggcagaggcaagaagaggtac

SEQ ID NO: 738101 - DNA, 120 bp, Artificial Sequence
  ENSG00000203872_8 (sequence is synthesized)
aggaagtgcttcaagaagcagagaaaacacatcaggccactcttggcaatatgatggataaactggctaacacccagggggagctgctgtctatagcaaaacaactgggaatcatgacaa

SEQ ID NO: 738102 - DNA, 120 bp, Artificial Sequence
  ENSG00000203872_9 (sequence is synthesized)
attggaaagatttcctagaggaggaattacaggaaaccaggatggcatttcaaaaatacatcaattatacctttcctaagctttcaccaggacatgcagattttattctgccagaaagaa

SEQ ID NO: 738103 - DNA, 120 bp, Artificial Sequence
  ENSG00000203872_10 (sequence is synthesized)
agaaaacaccttctaatcttgttattaaggagaacaaaacaactcttgattagaagtcttcagttgaaattccactacaaaagacatcattccagactaaataaatttactcaaaaacca

SEQ ID NO: 738104 - DNA, 120 bp, Artificial Sequence
  ENSG00000203872_11 (sequence is synthesized)
tatttctacacaatgttgggcttttgcagtatgtgtccatctccaccgtaatatatgctgccctgtgtttttaagattcgctgatgaactagtaggagactctgtgccgccaaacatata

SEQ ID NO: 738105 - DNA, 120 bp, Artificial Sequence
  ENSG00000203872_12 (sequence is synthesized)
cttttaattgctagtgacagaaacataactcagaatagactgcatgaaatggaatttcttgactcttttaacagagaaacccaagggaaatctggcatcaaggctttcaatctgtccatg

SEQ ID NO: 738106 - DNA, 120 bp, Artificial Sequence
  ENSG00000203872_13 (sequence is synthesized)
cttacccttttagtgagttggcttaatggtttactgctgcagctagacttactccggcagctgggaaaggaggaatgtggatccagatagctctaagaatctattaccttcagcttagaa

SEQ ID NO: 738107 - DNA, 120 bp, Artificial Sequence
  ENSG00000203872_14 (sequence is synthesized)
ccgaaatggcgacactgcactgcaggctgggctacaaagcaagactccctctcaaaaaaaaagagaaatcccagtggaaaaagacctggctgtctgatattgcgtggtcctctagcctct

SEQ ID NO: 738108 - DNA, 120 bp, Artificial Sequence
  ENSG00000203872_15 (sequence is synthesized)
ctagacttttattaccttgtctgggtagagaggatattattatgggaatgttattatttggaaatcaaattagatcattgacagaaaaatagtaaacttctaccccttagctcactccat

SEQ ID NO: 738109 - DNA, 120 bp, Artificial Sequence
  ENSG00000203872_16 (sequence is synthesized)
actgaagcagttaaacccacaaagaaccacatgctaaagaaaggcatgtaatgtgaaggcattccacttcccttctcctgatgctagccctagcacccaaataggaacagggagagagag

SEQ ID NO: 738110 - DNA, 120 bp, Artificial Sequence
  ENSG00000203872_17 (sequence is synthesized)
ctttcttcgggcatttatttcacctccccagttgtctgctgtgtggactgggtgtgatgaggggaatgaccaactctatccaggcctgacagtgctgtgaattccctcctaatcagagaa

SEQ ID NO: 738111 - DNA, 120 bp, Artificial Sequence
  ENSG00000203872_18 (sequence is synthesized)
aatcttactctttcaatgggtatctttgaaatatatatactggcatctcctaaaaggacgtgtctcctaaatagccctcataaataactagataatggtggaaaggaaagccaggaagca

SEQ ID NO: 738112 - DNA, 120 bp, Artificial Sequence
  ENSG00000203872_19 (sequence is synthesized)
gtcggtggaggtttgtgaccattgctcttcaaatacacagatattggggcaaatattctgaaaaaagaagagcagtttcaagaagatatactcagagaacacattgcgaaagcagaagct

SEQ ID NO: 738113 - DNA, 120 bp, Artificial Sequence
  ENSG00000203872_20 (sequence is synthesized)
aagttttccatatcatacacactcttcttttaaatcatcagtgttaacaggtacacttgctagcagatagataaaactatggtttaaatagcctcctaatgtgcagttttaaacattaag

SEQ ID NO: 738114 - DNA, 120 bp, Artificial Sequence
  ENSG00000203872_21 (sequence is synthesized)
gctgcccccaacaagcaaggctggatggactggtacaaatagcacataggtgctgcaagagttcaaagtcctggaaagatcaagcagtatgggtggggtatgtagtgagcaaagccgtgg

SEQ ID NO: 738115 - DNA, 120 bp, Artificial Sequence
  ENSG00000203877_0 (sequence is synthesized)
gcggctagcagggagaggggcggagaggcagcgaacctctcaatgtgcagcaggccgcgagggctatataaagctcgggtctcggacctactggaactggtcaagattgcccgcgagctg

SEQ ID NO: 738116 - DNA, 120 bp, Artificial Sequence
  ENSG00000203877_1 (sequence is synthesized)
gcagcggccttccgcccagctctgcggcgtcatggagaacgcgggaggcgcagagggtacagagagtggagctgcggcgtgcgcggccaccgacggccctacgcggcgcgcgggcgcgga

SEQ ID NO: 738117 - DNA, 120 bp, Artificial Sequence
  ENSG00000203877_2 (sequence is synthesized)
ccgaaccacgccgcggaggcgatgcccgatggccctggaatgaccgcagcctcaggaaagctttaccaattcaggcacccagtcagactattttggccaaaatcaaaatgttatgattac

SEQ ID NO: 738118 - DNA, 120 bp, Artificial Sequence
  ENSG00000203877_3 (sequence is synthesized)
ttatatcaagaagcagaagctcttctgaaaaattttccaattcaagccacaatttcattttatgaagattctgatagcgaagatgaaattgaggatctgacctgtgaaaattaatctgat

SEQ ID NO: 738119 - DNA, 120 bp, Artificial Sequence
  ENSG00000203877_4 (sequence is synthesized)
ctgacctgtgaaaattaatctgattagctacttttgattatatccaaagcttgtggggtttaaatttagtgtacaaatgtatcataattattttaaactaatttatttgtatataaatta

SEQ ID NO: 738120 - DNA, 120 bp, Artificial Sequence
  ENSG00000203877_5 (sequence is synthesized)
ctctccatcccccactgcccggtgccagcgctcggcttcggtggattctcccgggtctgggctcacgtctcctctgcgcgccttgtgctcccctatcccgcagatacgcaggcttctgga

SEQ ID NO: 738121 - DNA, 120 bp, Artificial Sequence
  ENSG00000203877_6 (sequence is synthesized)
ggctctcgggacgcagggcctgagagagacatgcgagacaccgggtcctgcctctcgcttaacatcccgcctgccggtggccataaaggtgccgacgcggcggatgtgtcctctggagcg

SEQ ID NO: 738122 - DNA, 120 bp, Artificial Sequence
  ENSG00000203877_7 (sequence is synthesized)
atgggccacaggcacccagccgggagcgaggctgctgagagccctggggttacattcccagcgggcacgaggaacactgggtcgtgcacgtttccactttctagaaggaggtgggtgata

SEQ ID NO: 738123 - DNA, 120 bp, Artificial Sequence
  ENSG00000203877_8 (sequence is synthesized)
actggattcacttcctttcctctccagatgcccgatggccctggaatgaccgcagcctcaggaaagctttaccaattcaggcacccagtcaggtgagtgacaggcctcgccgaaggtctc

SEQ ID NO: 738124 - DNA, 120 bp, Artificial Sequence
  ENSG00000203877_9 (sequence is synthesized)
ccgctcctccagccccagggaggagccaggggcatcgcgcagcccagctccgcagctggtcctgcagtctctctctctctctctgaaaatctggcttcaaggttacttatcttctcactc

SEQ ID NO: 738125 - DNA, 120 bp, Artificial Sequence
  ENSG00000203877_10 (sequence is synthesized)
atcaaattgaaaaaggtaggggctcacggtcccacgtaaagggactgttgatgaatacatactcagtgaacttgatgaatatattacgaagagggaaaggggatgatatggtaagagagc

SEQ ID NO: 738126 - DNA, 120 bp, Artificial Sequence
  ENSG00000203877_11 (sequence is synthesized)
ggtgacatcttgtgctggcaaaacagtttttatttttaaatcctaaagggttcgaatgaaattgacttcgcatcaggcagagtgtgtatgctgcttttgtcttgcaatctggaaggaaga

SEQ ID NO: 738127 - DNA, 120 bp, Artificial Sequence
  ENSG00000203877_12 (sequence is synthesized)
atgggattaacagttacagtcttacaagtttgccgagtaggaaaaaatagaaatgtaatgaaaatcctaaagattattgagaatggttatagaaagggtcaaaagtttatttaacttgcg

SEQ ID NO: 738128 - DNA, 120 bp, Artificial Sequence
  ENSG00000203877_13 (sequence is synthesized)
gagctagtttactgttcctagtcacaggaagtcagcctttatctaagattctgtgtcacttttattcaggtgaaatgttaagaattctgcagttttcctgcctccgagagctgttaaatg

SEQ ID NO: 738129 - DNA, 120 bp, Artificial Sequence
  ENSG00000203877_14 (sequence is synthesized)
aagagctggatgatgtttgtaaagtgcccctggtcataaataacacatagaagtcattacatctaatttcctaccgtgtgctagcactggtgaaggacacaggaaaaagtagtcacagca

SEQ ID NO: 738130 - DNA, 120 bp, Artificial Sequence
  ENSG00000203877_15 (sequence is synthesized)
catggcaagtgttgtaatggaatttagtttggttagttttacaagtatgggcagggcacgaagtgcctaaatctgtcagtggtagggggaagggtcagggaagtgtatattataagttgt

SEQ ID NO: 738131 - DNA, 120 bp, Artificial Sequence
  ENSG00000203877_16 (sequence is synthesized)
ggttacctggctgagtcttggaaaagttagtcagatgaatgggaagtgggagcaaaagaaatagcattggaaaagagaagcaggatcatgaaacggtgtggctccttgcgggaactccaa

SEQ ID NO: 738132 - DNA, 120 bp, Artificial Sequence
  ENSG00000203877_17 (sequence is synthesized)
ggagtttaggtgtgtgaagttgtggtcattttagcagggtaatcagaggccaaatcttgcacactcttgtacagagttctgtcctgatcctgtatgtagtgttgggaacccatgggcttt

SEQ ID NO: 738133 - DNA, 120 bp, Artificial Sequence
  ENSG00000203877_18 (sequence is synthesized)
attccgaaggtagtcttgggggttatatgttaaataggcttagtcagggcatcaaaagtaaaactggaagttctgcaatttttcaggtaagaaataatgatgaaccattgtaagacagtg

SEQ ID NO: 738134 - DNA, 120 bp, Artificial Sequence
  ENSG00000203877_19 (sequence is synthesized)
gaagtgagggtgagactgggtgaatctaggaaatacttgaatgacaaaatagattaggctttataacgtattggatatgttaggtgaagaagaggtaaaaggccagaatggctcctaagt

SEQ ID NO: 738135 - DNA, 120 bp, Artificial Sequence
  ENSG00000203877_20 (sequence is synthesized)
aagttttccacttatcatatttaatgtgcctatggggcatccaaagagtgatatcctgtagagaactgcgtacgtaagttaggggcccagagtcaagatcttaagtggaaatacagactt

SEQ ID NO: 738136 - DNA, 120 bp, Artificial Sequence
  ENSG00000203877_21 (sequence is synthesized)
gggagtccatggtaaatgtagggtggggaaatcatgacagtgggccaggtcatcctagtttgtttagagggagggctgatgttctcaatgaaaacctgagggaaggccagcatctaacca

SEQ ID NO: 738137 - DNA, 120 bp, Artificial Sequence
  ENSG00000203877_22 (sequence is synthesized)
gtacacagagaaagagaggtccacaaggagacggagaagaatcagaacaggaagaaactcagaaaagtatgcgggccctgggagaaaaatggcccacagtgagaaattctggacagagta

SEQ ID NO: 738138 - DNA, 120 bp, Artificial Sequence
  ENSG00000203877_23 (sequence is synthesized)
tcataatgactagcattctttgggtttgccagttccagttacgcattaggaaataaattgtttcttatataagaaattcctttcttttctgaagtacggttacaatttaattgttctctt

SEQ ID NO: 738139 - DNA, 120 bp, Artificial Sequence
  ENSG00000203877_24 (sequence is synthesized)
atattttatttttattcatttatatcttgactaatatggtgtgttttattctttttattcagctgtcaactttttgagggtagggaccatgatttattcatctttaaattgtgaattatg

SEQ ID NO: 738140 - DNA, 120 bp, Artificial Sequence
  ENSG00000203877_25 (sequence is synthesized)
ttggcacaagggatcactaaaatatttattgaacgactgaataattgatagttacttgtttaagcatcaaaaatataaactttttttatgatttttgctggaaacatttataaactgcat

SEQ ID NO: 738141 - DNA, 120 bp, Artificial Sequence
  ENSG00000203877_26 (sequence is synthesized)
tgtttgtttttctgccttttaaagtggagcatactgaacataatgtaatcttccatttgttgggatgactccattgtatggatatatgggctgtttaccctgcactaaaatgactgcact

SEQ ID NO: 738142 - DNA, 120 bp, Artificial Sequence
  ENSG00000203877_27 (sequence is synthesized)
gtacttggtgattcagccttatctctcctctttcttttccttgatgaagaccagaaggcaagattagtatttgtcagatttttgaaattctgaggtaataatacttacatgccagttatt

SEQ ID NO: 738143 - DNA, 120 bp, Artificial Sequence
  ENSG00000203877_28 (sequence is synthesized)
tgtataaaacatatataatttctcaacatttcatatgatattcacaaatttagttgaatggggagaagacaggcacatagaatcaaagttgaggtcagaagtagtctttctatgcctcaa

SEQ ID NO: 738144 - DNA, 120 bp, Artificial Sequence
  ENSG00000203877_29 (sequence is synthesized)
gttgtgagtgcatagacaaaaattttaaaatactggtttttatacatttttaaacttacgttgtctacttctataagagttaaatctgtgagttttaaataagataataggttatttcca

SEQ ID NO: 738145 - DNA, 120 bp, Artificial Sequence
  ENSG00000203877_30 (sequence is synthesized)
cctttttgtaaggtgcataatattttgtcatctttataaagctggctatcattaaagtttttaatgtagtggtagaactcaattcattttttccaaaggaatttagaaactggaagacaa

SEQ ID NO: 738146 - DNA, 120 bp, Artificial Sequence
  ENSG00000203877_31 (sequence is synthesized)
atcttctatatattataagaataaatatatccataatgtacaaagtaaggtaaacattgatcttatgcatatccagggtttagtgtaaatttgtttgatccaatttacagcttgaataaa

SEQ ID NO: 738147 - DNA, 120 bp, Artificial Sequence
  ENSG00000203877_32 (sequence is synthesized)
gatttacaataatcaaacaattattgatacttgggcaggtagattccatgaaggctgtgatagtagcatattttaactctgtatcttaaggctatatccaaatgtataagtcaattgtta

SEQ ID NO: 738148 - DNA, 120 bp, Artificial Sequence
  ENSG00000203877_33 (sequence is synthesized)
aatatatggagctcttgaaatttgaccatttcatgagtttaaagatcctgaatgtgaaaaaataaaacatgttgtctgcttctttcagactattttggccaaaatcaaaatgttatgatt

SEQ ID NO: 738149 - DNA, 120 bp, Artificial Sequence
  ENSG00000203879_0 (sequence is synthesized)
atctttggtccagtgcggtggcggcggcggcggtggcggcggcgactgctgcggtgaaggaggaggaggagccgagcgggcgctggcaccgaggcctgaccatggacgaggaatacgatg

SEQ ID NO: 738150 - DNA, 120 bp, Artificial Sequence
  ENSG00000203879_1 (sequence is synthesized)
tgatcgtgctggggaccggtctcaccgaatgcatcctgtcgggcatcatgtctgtgaacgggaagaaggtgctgcacatggaccggaacccctactacgggggcgagagctcctccatca

SEQ ID NO: 738151 - DNA, 120 bp, Artificial Sequence
  ENSG00000203879_2 (sequence is synthesized)
cacccctggaggagctgtataagcgttttcagttgctggaggggccccctgagtcgatgggccgaggccgagactggaatgttgacctgattcccaaattcctcatggctaacgggcagc

SEQ ID NO: 738152 - DNA, 120 bp, Artificial Sequence
  ENSG00000203879_3 (sequence is synthesized)
tggtaaagatgctactgtatacagaggtgactcgctacctggacttcaaggtggtggagggcagctttgtctacaaggggggcaagatctacaaagtgccgtccactgagactgaggcct

SEQ ID NO: 738153 - DNA, 120 bp, Artificial Sequence
  ENSG00000203879_4 (sequence is synthesized)
tggcttccaatctgatgggcatgtttgagaaacggcgcttccgcaagttcctggtgtttgtggcaaacttcgatgagaatgaccccaagacctttgagggcgttgacccccagactacca

SEQ ID NO: 738154 - DNA, 120 bp, Artificial Sequence
  ENSG00000203879_5 (sequence is synthesized)
gcatgcgtgacgtctaccggaagtttgatctgggccaggatgtcatcgatttcactggccatgccctggcgctctaccgcactgatgactacctggaccagccctgccttgagaccgtca

SEQ ID NO: 738155 - DNA, 120 bp, Artificial Sequence
  ENSG00000203879_6 (sequence is synthesized)
accgcatcaagttgtacagtgagtccctggcccggtatggcaagagcccatatttatacccgctctacggcttgggcgagctgccccagggttttgcaagattgagtgccatctatgggg

SEQ ID NO: 738156 - DNA, 120 bp, Artificial Sequence
  ENSG00000203879_7 (sequence is synthesized)
ggacatatatgctgaacaaacctgtggatgacatcatcatggagaacggcaaggtggtgggcgtgaagtctgagggagaggtggcccgctgcaagcagctgatctgtgaccccagctaca

SEQ ID NO: 738157 - DNA, 120 bp, Artificial Sequence
  ENSG00000203879_8 (sequence is synthesized)
tcccggaccgtgtgcggaaggctggccaggttatccgcatcatctgtatccttagccaccccatcaagaacaccaacgacgccaactcctgccaaataatcatcccccagaaccaggtca

SEQ ID NO: 738158 - DNA, 120 bp, Artificial Sequence
  ENSG00000203879_9 (sequence is synthesized)
agcactactgtggagaccacggaccctgaaaaggaggtggagccggctctggagctgttggagcccattgaccagaagtttgtggctatcagtgacttgtatgagcccattgatgatggt

SEQ ID NO: 738159 - DNA, 120 bp, Artificial Sequence
  ENSG00000203879_10 (sequence is synthesized)
tgtgagagccaggtgttctgttcctgctcctacgatgccaccacacactttgagacaacctgcaacgacatcaaagacatctacaaacgcatggctggcacggcctttgactttgagaac

SEQ ID NO: 738160 - DNA, 120 bp, Artificial Sequence
  ENSG00000203879_11 (sequence is synthesized)
atgaagcgcaaacagaacgacgtctttggagaagctgagcagtgattgtggccgcccccagcccctgctgccccagcctgtgtctgttctcctcgagggctccagcatcctctgcttccc

SEQ ID NO: 738161 - DNA, 120 bp, Artificial Sequence
  ENSG00000203879_12 (sequence is synthesized)
ccaccacgttcccatcacccacctcattgatccactgaccaaatccttaaccctagcgatggcttgggagatggggggttggatagcatcctctttcttggcccttccttatcctaggaa

SEQ ID NO: 738162 - DNA, 120 bp, Artificial Sequence
  ENSG00000203879_13 (sequence is synthesized)
aagagggttcctctccttgtgtgtgtctcttccccccacccctaattcttctgctctgtttgggaagacgtggaggaaaaggtgacttctgcccccaccgctcttacccccactgtagtg

SEQ ID NO: 738163 - DNA, 120 bp, Artificial Sequence
  ENSG00000203879_14 (sequence is synthesized)
gcctttggagatgcccccacctcccccccaccaactctcgcgtgttggagagaaggggccctcccagcacaaagttgcattcctcccccctaatttattctaatttattaactttgaccc

SEQ ID NO: 738164 - DNA, 120 bp, Artificial Sequence
  ENSG00000203879_15 (sequence is synthesized)
accctttctgagcctgcagccttcccgtgtggcctgagggctgtcgagtgagctgccccagcccctcccagcccttgcccagcctgggggagtggggaaggcttgggcatggccccgttg

SEQ ID NO: 738165 - DNA, 120 bp, Artificial Sequence
  ENSG00000203879_16 (sequence is synthesized)
gaggttgatttgctgttttgtttcttgtctttgtgttctgtggtacttgctgagagaaaagaaaagtgagccaagcagaaggaggtgggaaaacggacccaaaccccagtgtgccctgcc

SEQ ID NO: 738166 - DNA, 120 bp, Artificial Sequence
  ENSG00000203879_17 (sequence is synthesized)
ccatgcctttcctttagtggtgggaaacccttatcttgcaaagtgaatgtgtccccttccccaccctctagtgtatttcacagaaaacaaaacctcccaataaaacggttgaaacctgaa

SEQ ID NO: 738167 - DNA, 120 bp, Artificial Sequence
  ENSG00000203879_18 (sequence is synthesized)
ttcttcctcggtccaggcccagatgcccctcctcagcggcaggggctcctgctatttgaagaaagagcagtccagggtggggcctacaatttcaaggactgtgctaagcctttcttttcc

SEQ ID NO: 738168 - DNA, 120 bp, Artificial Sequence
  ENSG00000203879_19 (sequence is synthesized)
tccctttcgagtgtcctttgcagtccagctgggtcttctctgtgccttattgtgttttatccgcctttttgtgcggctctgcgtaggtagatgcctctcggcgtgttggtactggaaggc

SEQ ID NO: 738169 - DNA, 120 bp, Artificial Sequence
  ENSG00000203879_20 (sequence is synthesized)
catcctgtgtctgctggatgccctgcctccctcaaagcctccgttatttcactctccgccttgtgagggggacgggactcctttgcccagcaaggttgcaatggagagtgtggtcggatg

SEQ ID NO: 738170 - DNA, 120 bp, Artificial Sequence
  ENSG00000203879_21 (sequence is synthesized)
aagccatcaccccaattttaggcgaggcaactagccagtggggatggtgggtggaaggagctgtccactgaggcaggtttgggtggggaacaaatcaggtctgctggtaggagcggaggc

SEQ ID NO: 738171 - DNA, 120 bp, Artificial Sequence
  ENSG00000203879_22 (sequence is synthesized)
gcagccccctcgcccggcccgcccccacccttcccacacctgcctgctgtccccctgccccgcatgtctcttgtactcagccacaggctcacctatcaccctttccatttcccccttgca

SEQ ID NO: 738172 - DNA, 120 bp, Artificial Sequence
  ENSG00000203879_23 (sequence is synthesized)
tttgatcctcatcttccccaggccattcagggtggtgggaagactggcctggtacctgggtgggggtaaatcaggggtgctgctattcccccagctacctggaccagccctgccttgaga

SEQ ID NO: 738173 - DNA, 120 bp, Artificial Sequence
  ENSG00000203879_24 (sequence is synthesized)
tttttcagttggcatagctgagtaggactagggccaggagtggagatggccgccttgagcattttcttggtagtatttcctcctttccaattcgtgctcttcatttacttcactccatcc

SEQ ID NO: 738174 - DNA, 120 bp, Artificial Sequence
  ENSG00000203879_25 (sequence is synthesized)
ttgggtgatgagggcacaaccccagtgcactgaagtacagaagtctccacacttgaaaaaacgagtctccacaaatgtgacttgctcagttcccggcagcaccaggactgggcccagggt

SEQ ID NO: 738175 - DNA, 120 bp, Artificial Sequence
  ENSG00000203879_26 (sequence is synthesized)
cccagaaccttgagtcagggcttagctgggagctgacctatctccagagagtccattctggtccctcaggctgtcttggtgcggagcactgatccctcatgccccctcccgctggccctt

SEQ ID NO: 738176 - DNA, 120 bp, Artificial Sequence
  ENSG00000203879_27 (sequence is synthesized)
ggcagtgtattctgagcagaagctccagagaggaaagagcccgcggagatggggccagcgttcacggcagtgacagagctgggatgaatcccggcgtctcctacctgctgcctgcctggg

SEQ ID NO: 738177 - DNA, 120 bp, Artificial Sequence
  ENSG00000203879_28 (sequence is synthesized)
ggttgaggcggggcttggtcactttctctgtgctgtcgagtctcctgctgcacagccccaagggtcttggagctgggaactgggggtccagaagtcttcagagtcatgactgtgggtgag

SEQ ID NO: 738178 - DNA, 120 bp, Artificial Sequence
  ENSG00000203879_29 (sequence is synthesized)
aggtctctttcagaggccacatgccatgtctgtggtgcagaaagtgttcttgatcacagtgcctctggggggcgggggggcgggcacccagcccgtgcgtcaaggcccacctatctgagc

SEQ ID NO: 738179 - DNA, 120 bp, Artificial Sequence
  ENSG00000203879_30 (sequence is synthesized)
ggcagggtagggccatgcattcaggaggggcagtagtgatggctccgaggaacgtcttgtctgccagagctgcctgcccttgctgtgagcgcagccccacgtctacctaagggagggatg

SEQ ID NO: 738180 - DNA, 120 bp, Artificial Sequence
  ENSG00000203879_31 (sequence is synthesized)
gggctgagcccaagggggagagggagggagcccagcagctgggcttagggaccaggaagggcatggcccattgtgaggcctgtcccctcccctctgtctgcccctcaggtttgtggctat

SEQ ID NO: 738181 - DNA, 120 bp, Artificial Sequence
  ENSG00000203879_32 (sequence is synthesized)
acccctctctgcgtatggccagcgcctctggcctgagttgacggagctcttcctgtggccagacatctacgtgtgcatgatctcctatgcacacaacgtggcggcccagggcaagtacat

SEQ ID NO: 738182 - DNA, 120 bp, Artificial Sequence
  ENSG00000203879_33 (sequence is synthesized)
gcacccattgcccgcctagcgttgcctctcagcgtccgttcccatcttgcgctaatcccggtggggatgaagtagaaggacctggggtcagggggcctcgccagagtgggccctcagccc

SEQ ID NO: 738183 - DNA, 120 bp, Artificial Sequence
  ENSG00000203879_34 (sequence is synthesized)
gcctcctcatcgtcttctggggccaggggatccagggaatgttccagaaggaacagcagtgggggcagtaagcacattcccgcaaccccacctcggttgcccatggagacctcaggctgg

SEQ ID NO: 738184 - DNA, 120 bp, Artificial Sequence
  ENSG00000203879_35 (sequence is synthesized)
tctctggaaaaaaatttgagccacattgtagccaccacaacttggagccctagggtttgggtggcctggactctttccctctgggagggtggcggcttggatgctacctgctctgcgggg

SEQ ID NO: 738185 - DNA, 80 bp, Artificial Sequence
  ENSG00000203879_36 (sequence is synthesized)
attcttcctgggccgcagcaccggccgccggcccgccccgcccgccccgccccgcgcctctctagactctcggcgagcag

SEQ ID NO: 738186 - DNA, 120 bp, Artificial Sequence
  ENSG00000203879_37 (sequence is synthesized)
ctcccgggaggcgagccggggaggcggtggcccctgccggttgcggcggggcgcgggaagaggcgggactctttgacgcggcggaggggtcgggcgacggccgacgcgccgccatctttg

SEQ ID NO: 738187 - DNA, 120 bp, Artificial Sequence
  ENSG00000203879_38 (sequence is synthesized)
tggcttccagtgagtgtgggccccctgagccagagaaatcatggggtggcagggaagccaactgtctttgggatgggtggctgtccagaataaggcacccccttgtccaaagtcacattt

SEQ ID NO: 738188 - DNA, 120 bp, Artificial Sequence
  ENSG00000203880_0 (sequence is synthesized)
ggatgtttacggcggccgaggttggagcggcgctgctcggccgcggacacacgagggacgcgcccgaggagctgcaggtggcagcccaggcggtccgaacccgtcggccggccgagcctg

SEQ ID NO: 738189 - DNA, 120 bp, Artificial Sequence
  ENSG00000203880_1 (sequence is synthesized)
gagtattgcctaagtgtaatcttgaacatgggcggtgctgtgagtgctggtgaagacaatgatgagctgatagataatttgaaagaagcacagtatatccggactgagctggtagagcag

SEQ ID NO: 738190 - DNA, 120 bp, Artificial Sequence
  ENSG00000203880_2 (sequence is synthesized)
gctttcagagctatcgatcgtgcagactattatcttgaagaatttaaagaaaatgcttataaagacttggcatggaagcatggaaacattcacctctcagccccgtgcatctactcggag

SEQ ID NO: 738191 - DNA, 120 bp, Artificial Sequence
  ENSG00000203880_3 (sequence is synthesized)
gtgatggaagccctagatctgcagcctggactctcgtttctgaacctgggcagtggcactgggtatctcagctccatggtgggcctcattctaggtccttttggtgtgaaccatggggtg

SEQ ID NO: 738192 - DNA, 120 bp, Artificial Sequence
  ENSG00000203880_4 (sequence is synthesized)
gaacttcactcagatgtgatagagtatgcaaagcagaaactggacttcttcatcagaacaagtgatagttttgacaagtttgacttctgtgaaccttcctttgttactgggaattgcctg

SEQ ID NO: 738193 - DNA, 120 bp, Artificial Sequence
  ENSG00000203880_5 (sequence is synthesized)
gagatttctccggattgttctcagtatgatcgtgtatactgtggggctggcgtgcagaaagagcatgaagagtacatgaagaatcttctcaaagtgggagggatccttgtcatgccactg

SEQ ID NO: 738194 - DNA, 120 bp, Artificial Sequence
  ENSG00000203880_6 (sequence is synthesized)
gaagagaagttgactaagataacacgcacaggtccttcagcttgggaaaccaaaaagattcttgctgtttcttttgctcctctgatccagccctgccattcagagtcaggaaaatcaaga

SEQ ID NO: 738195 - DNA, 120 bp, Artificial Sequence
  ENSG00000203880_7 (sequence is synthesized)
cttgtccagttaccaccagtggcagttcgcagcctccaggacttggctcgcatcgccatccggggcaccattaaaaagattattcatcaggaaactgtgagcaaaaacggaaacggacta

SEQ ID NO: 738196 - DNA, 120 bp, Artificial Sequence
  ENSG00000203880_8 (sequence is synthesized)
aagaacacccccaggtttaaacgaaggagagttcgccgccgtcgaatggaaacgattgtctttttggacaaagaagtctttgccagtcggatttccaacccctcagatgacaacagctgt

SEQ ID NO: 738197 - DNA, 120 bp, Artificial Sequence
  ENSG00000203880_9 (sequence is synthesized)
gaagacttggaagaggaacggagggaagaagaagagaagaccccgccggaaacaaagccagaccccccagtgaacttcctacgccagaaggtcctgagcctccctctgccagatcccctg

SEQ ID NO: 738198 - DNA, 120 bp, Artificial Sequence
  ENSG00000203880_10 (sequence is synthesized)
aaatactacttgctttattacagagaaaaataagtctcctgtttgaaagggggaaataggaagagcagattgctgagtgtgaagttcgtgctgcctgtgtgctgttgaagggtcacctgg

SEQ ID NO: 738199 - DNA, 120 bp, Artificial Sequence
  ENSG00000203880_11 (sequence is synthesized)
aggcagacgttgtggggaagggaactgctgggctcatccacaccatggttttcttctagttcctgattgacctctaaaattctattcagttgtatgatttgtttacatagttccacaaga

SEQ ID NO: 738200 - DNA, 120 bp, Artificial Sequence
  ENSG00000203880_12 (sequence is synthesized)
ccttcattgcatagaagattgttttcccaaagtggagagaatcttcatagagaaaaagagaaggctgtttctttttcggctctgacgaaacactgaagtctgcgtaagagagactgtttg

SEQ ID NO: 738201 - DNA, 120 bp, Artificial Sequence
  ENSG00000203880_13 (sequence is synthesized)
atgaccgtccctcatgcaacatgcacggtactcactaaaaatgaaaactgaagtggaaactaacctgtgttgcttataaagtgtgaaagcacaagcttataaatgtataaaatcttttct

SEQ ID NO: 738202 - DNA, 120 bp, Artificial Sequence
  ENSG00000203880_14 (sequence is synthesized)
gggtgtgacgcacctgcgtccaagtttgaatttttatgatatgtaccacttaattactggcactgagtatcactgaatttcttagttttctagtggggaaacattattgagaagccctcc

SEQ ID NO: 738203 - DNA, 120 bp, Artificial Sequence
  ENSG00000203880_15 (sequence is synthesized)
cttattttaagtaagttgattaaatcttatgtgagttgccagttgtaatttttcaaaggaaaaattttgatggggtggaggaatgaattgccagataatctttctggaattccgagagaa

SEQ ID NO: 738204 - DNA, 120 bp, Artificial Sequence
  ENSG00000203880_16 (sequence is synthesized)
ttttttttttaggacatcttttgatacctttaaaagaaccactgtcaagtaatccttaaaagaatatcttggaaaaggaaacagattttttcctgtgtgtaagcaataagtgaagttaca

SEQ ID NO: 738205 - DNA, 120 bp, Artificial Sequence
  ENSG00000203880_17 (sequence is synthesized)
tttgccctaaccctagggatgattctttacccagttttaaagcccatcatggtattctaaggtgttgacaccctccatcctcagagcaggtcgaaaatattaaatagactggggactcta

SEQ ID NO: 738206 - DNA, 120 bp, Artificial Sequence
  ENSG00000203880_18 (sequence is synthesized)
tgatgggcagcctgtgctttttgacttcagtttgctatttttctgtgatcacattagtactgattcatagattctatcttttataattctggagaaaaagatttgttagttttgtaattt

SEQ ID NO: 738207 - DNA, 120 bp, Artificial Sequence
  ENSG00000203880_19 (sequence is synthesized)
ttttgtaagaccaaatgtatgtattttagtagctccattgcatgagaagagtgtaactcacactgacttgtgatatcagccttctctgggccttgtgtgtggagagctttctatcttacc

SEQ ID NO: 738208 - DNA, 120 bp, Artificial Sequence
  ENSG00000203880_20 (sequence is synthesized)
aagtggtagggctaaaagaacaacagcctttttggtagtcacatagcagaatgatcagagttacattgcttattccaaaacattggttctttttaaaacatttttttttacccaaagaaa

SEQ ID NO: 738209 - DNA, 120 bp, Artificial Sequence
  ENSG00000203880_21 (sequence is synthesized)
agaataatagaaattactaacaataaatataaattcagagtgttgatataggattcagtatccagagtttatttttaatcttaatcctcagcttcttgggagttgctgggcttcagtgtc

SEQ ID NO: 738210 - DNA, 120 bp, Artificial Sequence
  ENSG00000203880_22 (sequence is synthesized)
tctgtggtttcaccagcttagcttgagctctggttattttggatcttttctgctttttttaagtaactgagtcatttttaccacacagtccagtttgcatgtatagctaggaaacatgta

SEQ ID NO: 738211 - DNA, 120 bp, Artificial Sequence
  ENSG00000203880_23 (sequence is synthesized)
ttgctctagattgggcagtttaagtcattttaaagaaagttagttcatagttgttgccttttaactcatagtcaagcttcagtctttcaaagagaaatgtgtgattttcatttacttgct

SEQ ID NO: 738212 - DNA, 120 bp, Artificial Sequence
  ENSG00000203880_24 (sequence is synthesized)
gatattttgtagtttggagatccttgtgggcattattctaactgatacgtagacacttacttggaaatttttggacattatattaaatgagtgctatctgtgaaattggttatattaggt

SEQ ID NO: 738213 - DNA, 120 bp, Artificial Sequence
  ENSG00000203880_25 (sequence is synthesized)
ggcttgactaatgttttttctataattgtatatggactgcatttttaaaaaaaccgcatttgcctttatgctagattgtaaaaaattatattagaatgcataagacatgtttttccttca

SEQ ID NO: 738214 - DNA, 120 bp, Artificial Sequence
  ENSG00000203880_26 (sequence is synthesized)
tatgctagacttttcctagcatttcgtatttctgtgttgtcagtgtgtgatttttaaaccggaatttggtttaaaaaaaatctggtggtaatatatgtgagaaatactttggtgtttacc

SEQ ID NO: 738215 - DNA, 120 bp, Artificial Sequence
  ENSG00000203880_27 (sequence is synthesized)
ttatgaaaataaaggattgtaagtaaagtttcctgcgcaccttataccagaattcagtataatacactactttctgttttcaaacagataaatcataatatagtctgtattatctgtaag

SEQ ID NO: 738216 - DNA, 120 bp, Artificial Sequence
  ENSG00000203880_28 (sequence is synthesized)
atctgtcttgtaaaccacattcttgacaactatttgcttttgagtagtttgtattttaatatgtgacttttgtcttgaaaagtagtaaagccatagacttgtgcaaaacaagtttcaagt

SEQ ID NO: 738217 - DNA, 120 bp, Artificial Sequence
  ENSG00000203880_29 (sequence is synthesized)
ttatagatattaagtttgtaatgtgagcatcaaatgtgtatgtaaaaatactttttaccagtctggaacttgggaaaatccagggaatttgaaacatagattttaatgagctggtaaaca

SEQ ID NO: 738218 - DNA, 120 bp, Artificial Sequence
  ENSG00000203880_30 (sequence is synthesized)
caaatcatgtcaataaaggtagtcaggatattttatccttagcattgcttctgcatcctgtgtaggattccaattcttgaatatgttcttttcaaaatcttaagaaaagaaccttttttc

SEQ ID NO: 738219 - DNA, 120 bp, Artificial Sequence
  ENSG00000203880_31 (sequence is synthesized)
tttattaacatcatgtgtttactttcagcaaatatttgtattactgcttgattctgtgacagtcacaatagatgtagagaaggcattatttttcattaataaatgtgaaattggaatgga

SEQ ID NO: 738220 - DNA, 120 bp, Artificial Sequence
  ENSG00000203880_32 (sequence is synthesized)
acggcggccgaggttggagcggcgctgctcggccgcggacacacgagggacgcgcccgaggagctgcaggtggcagcccaggcggtccgaacccgtcggccggccgagcctggaggtaga

SEQ ID NO: 738221 - DNA, 120 bp, Artificial Sequence
  ENSG00000203880_33 (sequence is synthesized)
gactgtcattcaagaatgagtgaagttgaggtgcctataagcaactcagaaattgttgtggccacgcttgggggaaatagagccctacactcaggtgatgagaggagacctcagaggtga

SEQ ID NO: 738222 - DNA, 120 bp, Artificial Sequence
  ENSG00000203880_34 (sequence is synthesized)
ccgatccagggccttgctccctgcgccaccccagctcgtacctccagtggaacttggctgggcttatcaagagctcctttcattcattgcaacttcatttgttagaaagcttctctgtgt

SEQ ID NO: 738223 - DNA, 120 bp, Artificial Sequence
  ENSG00000203880_35 (sequence is synthesized)
acggtggggtcgcatcccagtaaacacatcgttaaacctgaagtcgaaccatccgaagtcggagaccatctgtatttgaaaaaagtccctttgcattgcttgtaagagttctggttttca

SEQ ID NO: 738224 - DNA, 120 bp, Artificial Sequence
  ENSG00000203880_36 (sequence is synthesized)
aggaagggcatgtgaggtgttcgttgtctgtggtagacctgggtctgtgggaggctcaggattctggtccggactggagtagaacctggggagctattggctggcctctgttatttaaag

SEQ ID NO: 738225 - DNA, 120 bp, Artificial Sequence
  ENSG00000203880_37 (sequence is synthesized)
tgttatttaaagccacagaatggatgtaaaaccaaggactagcagtcatactgagacggtgaaatggtggaaattggaaccttagggagcagcactgggctggatggaagaggaagagcc

SEQ ID NO: 738226 - DNA, 120 bp, Artificial Sequence
  ENSG00000203880_38 (sequence is synthesized)
tgcaagagaaaagagctgcggaggtcagagggagcggctgtgccttgggccaggggagcagtgagccacgttccttatcccaagcagactccttggagatctggagaggccggagctgag

SEQ ID NO: 738227 - DNA, 120 bp, Artificial Sequence
  ENSG00000203880_39 (sequence is synthesized)
ggccgggaccccgagggcctcggaaggagttgtttcagcctcttggggcaacagccagatcccagtggctctggaagtaatctgtctagatgtgagatgatgaaggaaggaaggatggct

SEQ ID NO: 738228 - DNA, 120 bp, Artificial Sequence
  ENSG00000203880_40 (sequence is synthesized)
gtacttgaggagggagccgggtcacagatggggcaagaggcacgatcgtggtgttgagtgaagagaaaggactgaagacaaaggaagtgccggagcctgtcctggagaaaggagaaggga

SEQ ID NO: 738229 - DNA, 120 bp, Artificial Sequence
  ENSG00000203880_41 (sequence is synthesized)
cctcttgtctgtggagtcagaaaagcaggaaaggttgaagggagaaggtgctacttactcactaccaggggcctgggacacaagcctgtttgagggtttctgaagaacagtggagatgct

SEQ ID NO: 738230 - DNA, 63 bp, Artificial Sequence
  ENSG00000203880_42 (sequence is synthesized)
aggctggagtgtgtctcaatctcctacgtggctgacactacaggtgcttgccactatgcccaa

SEQ ID NO: 738231 - DNA, 120 bp, Artificial Sequence
  ENSG00000203880_43 (sequence is synthesized)
gaacccgtcggccggccgagcctggagaaaatgtcttcatgaggtctggtggtctttttccctgacaatttgtatctggtgttttgtaaagcattaccattttatatgaagttaaagcag

SEQ ID NO: 738232 - DNA, 120 bp, Artificial Sequence
  ENSG00000203880_44 (sequence is synthesized)
tgacggagttctttactgtgacccccgactgcctttcgcatggcctgagcggcatcctgggggagaatacagtagctactaagagatggtggctcataagtcacctacctgaaaagtgct

SEQ ID NO: 738233 - DNA, 120 bp, Artificial Sequence
  ENSG00000203880_45 (sequence is synthesized)
gggtgattcggaagcagggcagacctaggagcggctctgccaggggggcctcgctgctctggtttcatgccgtgctccagtgctgagtcccaggtgccgtgttcctgacaccccccggcc

SEQ ID NO: 738234 - DNA, 80 bp, Artificial Sequence
  ENSG00000203883_0 (sequence is synthesized)
ggctccccagtgcccgccgcccgcccgccgcgctcccgcgctccgttccgcccaggccgcgcccagctggaatgcagaga

SEQ ID NO: 738235 - DNA, 120 bp, Artificial Sequence
  ENSG00000203883_1 (sequence is synthesized)
gttccgcccaggccgcgcccagctggaatgcagagatcgccgcccggctacggcgcacaggacgacccgcccgcccgccgcgactgtgcatgggccccgggacacggggccgccgctgac

SEQ ID NO: 738236 - DNA, 80 bp, Artificial Sequence
  ENSG00000203883_2 (sequence is synthesized)
gtcccccgcgcagccccgagccggggcgctatggcctcagcccggccggccgcggggaacgccaggcggcagacgagtcg

SEQ ID NO: 738237 - DNA, 120 bp, Artificial Sequence
  ENSG00000203883_3 (sequence is synthesized)
gcagacgagtcgcgcatccggcggcccatgaacgccttcatggtgtgggcaaaggacgagcgcaagcggctggctcagcagaacccggacctgcacaacgcggtgctcagcaagatgctg

SEQ ID NO: 738238 - DNA, 120 bp, Artificial Sequence
  ENSG00000203883_4 (sequence is synthesized)
ggcaaagcgtggaaggagctgaacgcggcggagaagcggcccttcgtggaggaagccgaacggctgcgcgtgcagcacttgcgcgaccaccccaactacaagtaccggccgcgccgcaag

SEQ ID NO: 738239 - DNA, 120 bp, Artificial Sequence
  ENSG00000203883_5 (sequence is synthesized)
caagaagcaggcgcgcaaggcccggcggctggagcccggcctcctgctcccgggattagcgcccccgcagccaccgcccgagcctttccccgcggcgtctggctcggctcgcgccttccg

SEQ ID NO: 738240 - DNA, 120 bp, Artificial Sequence
  ENSG00000203883_6 (sequence is synthesized)
tcgcgccttccgcgagctgcccccgctgggcgccgagttcgacggcctggggctgcccacgcccgagcgctcgcctctggacggcctggagcccggcgaggctgccttcttcccaccgcc

SEQ ID NO: 738241 - DNA, 120 bp, Artificial Sequence
  ENSG00000203883_7 (sequence is synthesized)
ccaccgagttgtcgcgggaccccggcggttgctacggggctcccctggcggaggcgctcaggaccgcgccccccgcggcgccgctcgctggcctgtactacggcaccctgggcacgcccg

SEQ ID NO: 738242 - DNA, 120 bp, Artificial Sequence
  ENSG00000203883_8 (sequence is synthesized)
gcccgaggccccgccgctggagagcgccgagccgctggggcccgccgccgatctgtgggccgacgtggacctcaccgagttcgaccagtacctcaactgcagccggactcggcccgacgc

SEQ ID NO: 738243 - DNA, 120 bp, Artificial Sequence
  ENSG00000203883_9 (sequence is synthesized)
ccccgggctcccgtaccacgtggcactggccaaactgggcccgcgcgccatgtcctgcccagaggagagcagcctgatctccgcgctgtcggacgccagcagcgcggtctattacagcgc

SEQ ID NO: 738244 - DNA, 120 bp, Artificial Sequence
  ENSG00000203883_10 (sequence is synthesized)
gtgcatctccggctaggccgccggcgccgcccgggtccctgcagcgcttcctcccgcagcccccgcgaccgatccgaccgcgtcgctgccgctctgctctctcatacgcgtgtatgtttg

SEQ ID NO: 738245 - DNA, 120 bp, Artificial Sequence
  ENSG00000203883_11 (sequence is synthesized)
gttccatgtcacagccccctaggagccagtgatgctcggccttgcgcccgttccacctcccaggccacccttcctgggcttctgggccacctgccctcggggggcccctgcgagggtgcc

SEQ ID NO: 738246 - DNA, 120 bp, Artificial Sequence
  ENSG00000203883_12 (sequence is synthesized)
tggagttcccacgtgtcccggggcttttccaggaagcccgagcccaggacctgttggcagagttgccagggttacatttttgaagcacctgctccttttcttgcagtgtattttctacaa

SEQ ID NO: 738247 - DNA, 120 bp, Artificial Sequence
  ENSG00000203883_13 (sequence is synthesized)
ccagattgtattaatattttttactttgcccttttaaaaaatatacctaatacaatatatttaatttttaattaaactcttaaacttttcttccaagaagtttcagtgatcagaagcgtc

SEQ ID NO: 738248 - DNA, 120 bp, Artificial Sequence
  ENSG00000203883_14 (sequence is synthesized)
actgtggcaaagacttttgcaatgtgaggaatacagatgtttgctttctataaaggaggagcctggagctgggtccccggacggagaggccacaataaatcctcgggcctttcctctgca

SEQ ID NO: 738249 - DNA, 120 bp, Artificial Sequence
  ENSG00000203896_0 (sequence is synthesized)
cttcctggcctgccccagacagagctgaggacccctggccgtgggcttgggcctcggcttcacaggatggggctgccagtgtcctgggcccctcctgccctctgggttctagggtgctgc

SEQ ID NO: 738250 - DNA, 120 bp, Artificial Sequence
  ENSG00000203896_1 (sequence is synthesized)
gccctgctcctctcgctgtgggcgctgtgcacagcctgccgcaggcccgaggacgctgtagcccccaggaagagggcgcggaggcagcgggcgaggctgcagggcagtgcgacggcggcg

SEQ ID NO: 738251 - DNA, 120 bp, Artificial Sequence
  ENSG00000203896_2 (sequence is synthesized)
gaagcgtccctactgaggcggacccacctctgctccctcagcaagtcggacaccagactgcacgagctgcaccggggcccgcgcagcagcagggccctgcggcctgccagcatggatctc

SEQ ID NO: 738252 - DNA, 120 bp, Artificial Sequence
  ENSG00000203896_3 (sequence is synthesized)
ctgcgcccacactggctggaggtgtccagggacatcaccggaccgcaggcagccccctctgccttcccacaccaggagctgccccgggctctgccggcagctgcagccaccgcagggtgc

SEQ ID NO: 738253 - DNA, 120 bp, Artificial Sequence
  ENSG00000203896_4 (sequence is synthesized)
ggccgagtatgcccgcgtccagaagcgcaaagggacccatcgcagtccccaagagccacagcaggggaagactgaggtgaccccggccgctcaggtggacgtcctgtactccagggtctg

SEQ ID NO: 738254 - DNA, 120 bp, Artificial Sequence
  ENSG00000203896_5 (sequence is synthesized)
caagcctaaaaggagggacccaggacccaccacagacccgctggaccccaagggccagggagcgattctggccctggcgggtgacctggcctaccagaccctcccgctcagggccctgga

SEQ ID NO: 738255 - DNA, 120 bp, Artificial Sequence
  ENSG00000203896_6 (sequence is synthesized)
tgtggacagcggccccctggaaaacgtgtatgagagcatccgggagctgggggaccctgctggcaggagcagcacgtgcggggctgggacgccccctgcttccagctgccccagcctagg

SEQ ID NO: 738256 - DNA, 120 bp, Artificial Sequence
  ENSG00000203896_7 (sequence is synthesized)
gaggggctggagacccctccctgcctccctgccctgaacactcaaggacctgtgctccttcctccagagtgaggcccgtcccccgccccgccccgcctcacagctgacagcgccagtccc

SEQ ID NO: 738257 - DNA, 120 bp, Artificial Sequence
  ENSG00000203896_8 (sequence is synthesized)
aggtccccgggctgccagcccgtgaggtccgtgaggtcctggccgctctgacagccgcggcctccccgggctccagagaaggcccgcgtctaaataaagcgccagcgcaggatgaaagcg

SEQ ID NO: 738258 - DNA, 120 bp, Artificial Sequence
  ENSG00000203896_9 (sequence is synthesized)
gtgtgtggaggggttgtgagttaggctgtcagaacagtgcgggctagaggcgcacacgtttcatctaggcttcgggcggggcgcagcaggtgggtgaggctgcggtggtggctgctgccc

SEQ ID NO: 738259 - DNA, 120 bp, Artificial Sequence
  ENSG00000203896_10 (sequence is synthesized)
aggccagggtgcccgccaggctgcctgacacccacagatgggtggagctcagtgctgctccagcgggcgagacgggcgggagaggactgtggcccaccacgtggggcactcttgggcctc

SEQ ID NO: 738260 - DNA, 120 bp, Artificial Sequence
  ENSG00000203896_11 (sequence is synthesized)
agatgggtggagctcagtgctgctccagcgggcgagacgggcgggagaggactgtggcccaccacgtggggcactcttggtgaggcaggcggacctggccctgtgggtttgggggttctg

SEQ ID NO: 738261 - DNA, 120 bp, Artificial Sequence
  ENSG00000203896_12 (sequence is synthesized)
ccagacagagctgaggacccctggccgtgggcttggtaagtgccctcctggggggcagctggggtctgggaggccttgggatgtggctgcagctgggtcagtcagccaggctgaagccca

SEQ ID NO: 738262 - DNA, 120 bp, Artificial Sequence
  ENSG00000203896_13 (sequence is synthesized)
ctccctgggtctgagcagactggccccaaactccagagaccacccctcaccccccagcttctgtctctgctgctggactgtgctgtttgtaaggcatcccccaccccgagaagttctgct

SEQ ID NO: 738263 - DNA, 120 bp, Artificial Sequence
  ENSG00000203896_14 (sequence is synthesized)
aagatccccaagaaggggacagatcctctctggcagagacactggcagacaagaagagccagagagaagtggggtgggggcatcagcacccccagcagctgctgctgcctgctgacccag

SEQ ID NO: 738264 - DNA, 120 bp, Artificial Sequence
  ENSG00000203896_15 (sequence is synthesized)
cctccagctcctccgggtgcagggtccctcctgctgaccagcctccagctcttcccagttctgggctccgcagcgagcggcttgggggcactacctgacacaggagaccatgtctgggca

SEQ ID NO: 738265 - DNA, 120 bp, Artificial Sequence
  ENSG00000203896_16 (sequence is synthesized)
gagggtggctgcaggtggagtctgtggcctgtggcgcacacccaggggctcccccgatgctggttactatctgggctatggtggccacagctgtcttgcccctcctcacggccgtgctgg

SEQ ID NO: 738266 - DNA, 120 bp, Artificial Sequence
  ENSG00000203896_17 (sequence is synthesized)
gtgttaccgtggtcacccgcagggacacggaggggccaggcagagcagccctagttcacctcaccgggagcccccgccagaaggtgggcacctctgggagggagggactgccaggccttg

SEQ ID NO: 738267 - DNA, 120 bp, Artificial Sequence
  ENSG00000203896_18 (sequence is synthesized)
gggcttcctgtgctgagtcagagctggaacgggagacgcaggagccccgcagccgcgggaggtgcagatttggggctgccaggtggcgccaggtccccttggccagcccccagcgcccct

SEQ ID NO: 738268 - DNA, 120 bp, Artificial Sequence
  ENSG00000203896_19 (sequence is synthesized)
cgcgcagcagcaggggtgagcagagggcggggcgggggcggccgggcggggcttactgtgcagcgcgtgccaacccctgggccagacccgctcctgccccctgcccggagtgaactctgc

SEQ ID NO: 738269 - DNA, 120 bp, Artificial Sequence
  ENSG00000203907_0 (sequence is synthesized)
atggtcgatgatgctggtgccgctgagtcccagcggggcaaacagactccggcccactccctggagcagctgcgtaggttaccacttccgccgccacagattcgcatccggccctggtgg

SEQ ID NO: 738270 - DNA, 120 bp, Artificial Sequence
  ENSG00000203907_1 (sequence is synthesized)
tgctgacagtggacatagtggactcagggaacctagtcgaaatcaccgttttcgggcggccccgtgtacagaatcgggtgaagagcatgctcctgtgcctggcatggtttcaccgagaac

SEQ ID NO: 738271 - DNA, 120 bp, Artificial Sequence
  ENSG00000203907_2 (sequence is synthesized)
atcgtgcccgagctgagaagatgaaacaccttgagaagaacttgaaggcccatgcatcagacccccactctccccaggatcctgttgcttaagacaacatagttactgttgggaacatct

SEQ ID NO: 738272 - DNA, 120 bp, Artificial Sequence
  ENSG00000203907_3 (sequence is synthesized)
gctcttcaaagcaaaacacagcggcagttcctcgtgaccagcggccacggcctccgggggcctagaggtgcctctccagcgaccacctctgccgacactatatccctcaggacctgttcg

SEQ ID NO: 738273 - DNA, 120 bp, Artificial Sequence
  ENSG00000203907_4 (sequence is synthesized)
attcaactcctccgccggcctcctctctggcgctcgggacactgtcgagcttcgccgactagcaacgacccacgtagaggccttgggagctcctccgtggtgggacattgttccaagaag

SEQ ID NO: 738274 - DNA, 120 bp, Artificial Sequence
  ENSG00000203907_5 (sequence is synthesized)
gggcgcgtccgacgtcgttgccgtccagctctgcaccacctgaccgtgacgtcgtaagagtagcgtgccagggaagccacgcagccgctacttaaggagcccgcacgaggctagcccccc

SEQ ID NO: 738275 - DNA, 120 bp, Artificial Sequence
  ENSG00000203907_6 (sequence is synthesized)
cgcccacgctctctatcccgcccacttcgcactgatttcacgcagccattggccagtgagcgttgtgggcgggactttcccagttttagccaatcggttttctgaaccgtgggagtgtgc

SEQ ID NO: 738276 - DNA, 120 bp, Artificial Sequence
  ENSG00000203907_7 (sequence is synthesized)
aagtagtcgatgtgccccgccccccacccccccactgtgtattcctttccaggcgtgggactttttccaaacgcccaatttgctccctcccctactggacacacacctcgggttcctggc

SEQ ID NO: 738277 - DNA, 120 bp, Artificial Sequence
  ENSG00000203907_8 (sequence is synthesized)
atctcagtgccttggaaacttttttttttctttttaaatagagacggggtgtcgccgtgttgcccaggcaggtcttgaactcttggcttctggcttcaagtgatcttccagcctcggcct

SEQ ID NO: 738278 - DNA, 120 bp, Artificial Sequence
  ENSG00000203907_9 (sequence is synthesized)
ttgatggattgtggtttattttgttgcaagagtgagtttgaactattctaataaagaaatggctattttgccaaaagcattaagatcttcacacacttataataaagcaaatttataaaa

SEQ ID NO: 738279 - DNA, 120 bp, Artificial Sequence
  ENSG00000203908_0 (sequence is synthesized)
ctagtctcccagctccagctcggcctttgggtttgctgtggtgtccttgtctcctgcaggaccggccgcagcatggacgctcccaggcggtttccgacgctcgtgcaactgatgcagcca

SEQ ID NO: 738280 - DNA, 120 bp, Artificial Sequence
  ENSG00000203908_1 (sequence is synthesized)
aaagcaatgccagtggaggtgctcggtcacctccctaagcggttctcctggttccactctgagttcctgaagaatccgaaggtagttcgccttgaggtttggctggtggaaaagatcttc

SEQ ID NO: 738281 - DNA, 120 bp, Artificial Sequence
  ENSG00000203908_2 (sequence is synthesized)
ggccggggcggagaacgcatcccgcacgtccagggtatgtcccaaatcttgattcacgtgaatcgattggaccctaacggcgaggctgagatcttggtatttgggaggccttcttaccag

SEQ ID NO: 738282 - DNA, 120 bp, Artificial Sequence
  ENSG00000203908_3 (sequence is synthesized)
gaggacacaatcaagatgatcatgaacctggctgactatcaccgccagctccaggcgaaaggctcaggaaaggccctcgcccaggatgtcgccactcagaaggccgagacccagcggtct

SEQ ID NO: 738283 - DNA, 120 bp, Artificial Sequence
  ENSG00000203908_4 (sequence is synthesized)
ccaggaggtcgggacacagggttctccggtggaggtgcaggaggccgggacccagcagtctctccaggctgccaacaagtcggggacccagcgatcccccgaagctgccagcaaggcagt

SEQ ID NO: 738284 - DNA, 120 bp, Artificial Sequence
  ENSG00000203908_5 (sequence is synthesized)
gacccagcggtttcgcgaggatgcccgggacccagttactagattatgaaggcatctcaggccctggagccagagccagtcaggggttaaagtgaaagcccgtatttccgcccagaagct

SEQ ID NO: 738285 - DNA, 120 bp, Artificial Sequence
  ENSG00000203908_6 (sequence is synthesized)
ggggttggggagaggatgtggattttttgttttaccctttctgttgcatggttgcaaacacaaacttgagttctaataaagaattgcaaagtggaagcccgccccccgcctcccccccgc

SEQ ID NO: 738286 - DNA, 120 bp, Artificial Sequence
  ENSG00000203908_7 (sequence is synthesized)
ctcacttaagtccaggaagctggggtggcgaggaaggatgatgtggattgtttttgttttacaccttctgttgaatggttgccaacacaaacttgagttctaataaataattgcatttcc

SEQ ID NO: 738287 - DNA, 120 bp, Artificial Sequence
  ENSG00000203909_0 (sequence is synthesized)
gattaggcctggtttgcgctggagagtggtcttggttgtgagggtcataagatgggaactctcccggcacgtagacatatcccgccgtgggtgaaagttcccgaagacctgaaagatcca

SEQ ID NO: 738288 - DNA, 120 bp, Artificial Sequence
  ENSG00000203909_1 (sequence is synthesized)
gaggtgttccaggtccagacgcggctgctgaaagccattttcggcccggacggatctcgaatcccttacatcgagcaggtgagcaaggccatgctcgagctgaaggctctggagtcttca

SEQ ID NO: 738289 - DNA, 120 bp, Artificial Sequence
  ENSG00000203909_2 (sequence is synthesized)
gctccagtccatggctgagtggcaccgccagcgccaggagcgagggatgctcaaacttgccgaagccatgaatgccctcgaactaggcccttggatgaagtgaaccagtttccagccaat

SEQ ID NO: 738290 - DNA, 120 bp, Artificial Sequence
  ENSG00000203909_3 (sequence is synthesized)
gcaatgaagccgggttgcagagattaggttgtggccagagctagagtgattccttaagcttgttttaaaatctgctccagcctaaagagttaagggaaaaccatttgttcccttaaagag

SEQ ID NO: 738291 - DNA, 120 bp, Artificial Sequence
  ENSG00000203909_4 (sequence is synthesized)
ttaagggaaaacccttggctctgagtcttgttgtgaatatttctttgatgattgttaataaaaagtgttttttcttttttcccatttttaaaaataacaataaagttttaaataagttga

SEQ ID NO: 738292 - DNA, 120 bp, Artificial Sequence
  ENSG00000203910_0 (sequence is synthesized)
agaagcccagcgactgcagaaccctgccccaggcaccctgggcgctctgccctaccggcggcgcctctcactgctcacggaacgttctggaagtttgggaaaccctgagcggtctctgag

SEQ ID NO: 738293 - DNA, 120 bp, Artificial Sequence
  ENSG00000203910_1 (sequence is synthesized)
gacctggtgagcagattgttgcaccattagaagctaggttgatccacagacagatggctgaaagtggaaaagaaaaaataaaatggacaaccaccattattattagctcatctcttaaga

SEQ ID NO: 738294 - DNA, 120 bp, Artificial Sequence
  ENSG00000203910_2 (sequence is synthesized)
gttatgaagttgcaactgccctagaaaatcgaagccacaaagttcgatattcagattcagtggaaaatggatcaattatattttctctttctggagttgcatttttattaatggatacta

SEQ ID NO: 738295 - DNA, 120 bp, Artificial Sequence
  ENSG00000203910_3 (sequence is synthesized)
caactgaagaaatatttctagccaaaattgagaaatttattaacattcaccaaaatagttttttggttttgtctgctgccctccatgggcctgaagaatggaaactgatgttcaggattc

SEQ ID NO: 738296 - DNA, 120 bp, Artificial Sequence
  ENSG00000203910_4 (sequence is synthesized)
agcagagattcctgggttgtaacttacgaatacttccagtacacaacacagtaaatgctattaatcttatgtgcactatagcaaagactacctccaaaccatacatagatagcatttgct

SEQ ID NO: 738297 - DNA, 120 bp, Artificial Sequence
  ENSG00000203910_5 (sequence is synthesized)
acagaatgataacagctaaagcttacatcattgagcaaagtcctgtttggaaaacacttcagaagataaaactgaatagtgattcagttaacccaaattagagtaccaacttaatgtttt

SEQ ID NO: 738298 - DNA, 120 bp, Artificial Sequence
  ENSG00000203910_6 (sequence is synthesized)
gattcagttaacccaaattagagtaccaacttaatgtttttctcgaagaatgtgaaaataattagacctgttaaattataatattcaaatatctatttaaagacatttatattaatttga

SEQ ID NO: 738299 - DNA, 120 bp, Artificial Sequence
  ENSG00000203923_0 (sequence is synthesized)
atcctcctgggaagcttcaatacagctgtgcaagtctggagtctacaagagcctactatagacattctacaaccaaccagaatcatggaacagcccacttcaagcatcaatggggagaag

SEQ ID NO: 738300 - DNA, 120 bp, Artificial Sequence
  ENSG00000203923_1 (sequence is synthesized)
aggaagagcccctgtgaatccaacaatgaaaatgatgagatgcaggagacaccaaacagggacttagcccccgaaccgagtttgaaaaagatgaaaacgtcagaatattcaacagtatta

SEQ ID NO: 738301 - DNA, 120 bp, Artificial Sequence
  ENSG00000203923_2 (sequence is synthesized)
acgaaggcctagactcagctgaaggatcttcaaagcaggatgaagacctagacttacctgaaggcctagactcagctgaaggatcttcaaagcaggatgaagacctagacttacctgaag

SEQ ID NO: 738302 - DNA, 120 bp, Artificial Sequence
  ENSG00000203923_3 (sequence is synthesized)
gatcttcaaagcagaatgaagacctaggcttacctgaaggatcttcaaagcaggatgaagacctagacttacctgaaggatcttcacaggaggataaagacgtagaattacctgaaggat

SEQ ID NO: 738303 - DNA, 120 bp, Artificial Sequence
  ENSG00000203923_4 (sequence is synthesized)
cttcacaggaggatgaagacctagagaaaaagcgatcatctaggtcaagaaatgaaatcgaaatttcagaaattacagaaattctccaaggaaggagccagataaataaatattctgatt

SEQ ID NO: 738304 - DNA, 120 bp, Artificial Sequence
  ENSG00000203926_0 (sequence is synthesized)
actgagaagattcaaaacctacaaaagcctgccactgacattgaagaaccaatatatacaatggacaaacaatccagtgccggcggggtgaagaggagcgtcccctgtgattccaacgag

SEQ ID NO: 738305 - DNA, 120 bp, Artificial Sequence
  ENSG00000203926_1 (sequence is synthesized)
cctgctcctaaaaaaatgaaaacatctgagtcctcgaccatactagtggttcgctacaggaggaactttaaaagaacatctccagaggaactgctgaatgaccacgcccgagagaacaga

SEQ ID NO: 738306 - DNA, 120 bp, Artificial Sequence; identical to SEQ ID NO: 729152
  ENSG00000203926_2 (sequence is synthesized)

SEQ ID NO: 738307 - DNA, 120 bp, Artificial Sequence
  ENSG00000203933_0 (sequence is synthesized)
aaatcatttgaaccaagttgcggacatgaatcttgttatttgtgtcctacttttgtccatttggaaaaataattgcatgactacaaaccaaaccaatggatcttctactacaggagataa

SEQ ID NO: 738308 - DNA, 120 bp, Artificial Sequence
  ENSG00000203933_1 (sequence is synthesized)
acctgttgaatcaatgcagacaaaattgaactaccttagaagaaatctactcattttagttggtattatcatcatggtttttgtctttatctgtttttgttatctccattataattgtct

SEQ ID NO: 738309 - DNA, 120 bp, Artificial Sequence
  ENSG00000203933_2 (sequence is synthesized)
gagcgatgatgcgtccaaagcaggaatggtcaagaaaaaaggcatagcagccaagtcatctaaaacatcattcagtgaagccaagacagcctctcaatgcagtccagaaacacaacccat

SEQ ID NO: 738310 - DNA, 120 bp, Artificial Sequence
  ENSG00000203933_3 (sequence is synthesized)
gctatctactgcagacaagtcatctgattcatcgagtccagaaagggcatccgcacaatccagcacagaaaaattaatcagaccctcaagtctacaaaagccatccataccaaacagtgc

SEQ ID NO: 738311 - DNA, 120 bp, Artificial Sequence
  ENSG00000203933_4 (sequence is synthesized)
aggaaagttaactaggccatcatatccaaaaaggtcatccaagtcatcatgctcaaaaaaattaagcaagtcatctcacctggaaaaggcacataagaaaggcagcctagaaaaattatg

SEQ ID NO: 738312 - DNA, 120 bp, Artificial Sequence
  ENSG00000203933_5 (sequence is synthesized)
tctcatccacaaaatgaaatctcaccatccaagccattcggtccacaggaattggctaagcctcccaaacattttaatccaaaaaggtcagtgagtctaggcagggcagccttattatcc

SEQ ID NO: 738313 - DNA, 120 bp, Artificial Sequence
  ENSG00000203933_6 (sequence is synthesized)
aactctgaattagctgaaacttgtcaaccctacaagaaaaaacatcttgttgccaaaacttataggcctttggtcaatgatatttctgaggcaaaggagaaaaacactcaaaacctacat

SEQ ID NO: 738314 - DNA, 120 bp, Artificial Sequence
  ENSG00000203933_7 (sequence is synthesized)
gtttcaagcaaagtcaagtcctcttccaggtcctttcgtaagttagattccaggaacaatgcatacggtgatcatgtgaatgacagtgatacgatgaaatattatagtgaggttgacagt

SEQ ID NO: 738315 - DNA, 120 bp, Artificial Sequence
  ENSG00000203933_8 (sequence is synthesized)
gataaagttataatcattacgtgtgacagagggtacaatcaagtcacctctgaagtaaccctaaatgattaggagctcaacaaaaataaaatccaagtgtgaaagagcaaacttatacca

SEQ ID NO: 738316 - DNA, 120 bp, Artificial Sequence
  ENSG00000203933_9 (sequence is synthesized)
actattttatgctcatcatcccttaagaaaccagtagagggaaaaatcactatcaagatcacccatatctgtcttggaggcgatttattttaaaaatatcaataaaatgcatgacataaa

SEQ ID NO: 738317 - DNA, 120 bp, Artificial Sequence
  ENSG00000203942_0 (sequence is synthesized)
agacatccttggggagcctgccctttcaagcatgaatcataccaccagagatcacccagcgtgctcttagctctgcctgcctggtgtagggtcctggagaccttcttggagctcatccag

SEQ ID NO: 738318 - DNA, 120 bp, Artificial Sequence
  ENSG00000203942_1 (sequence is synthesized)
cagccatcatgcaaggtggtgctggggactgccctcttgctaggaggtggaggtctcatgctgtgggttcagagaaagaggagaagaaaggaaacctctgagtgtccatcagacaaggac

SEQ ID NO: 738319 - DNA, 120 bp, Artificial Sequence
  ENSG00000203942_2 (sequence is synthesized)
aagtcaccagaatcccataaagcaaagaatgaaagctggattaaatcccactttagccgcctttccgaagagaagctggccctcgacaacaatgccagcgctagtggcaatgctacccag

SEQ ID NO: 738320 - DNA, 120 bp, Artificial Sequence
  ENSG00000203942_3 (sequence is synthesized)
actgagagtgggagtgaagaggtcagctccacggttcacatagagaccttcaccacgaggcacggagaagtgggctccgctctgcaccgggaatccttcaccagcaggcagaagacatct

SEQ ID NO: 738321 - DNA, 120 bp, Artificial Sequence
  ENSG00000203942_4 (sequence is synthesized)
gggccctcagtgatccaagagatccaccaggagtctggaaaagccccatccactgatgaggccacgtgggccgctgtggctgcctgcaccaaggagattgacacccaggggcggcacctg

SEQ ID NO: 738322 - DNA, 120 bp, Artificial Sequence
  ENSG00000203942_5 (sequence is synthesized)
gcagcgggccatagcttaccagcactcaggtcacctagagtccaaggacatcaaccaggaggagctgagggccctcgaggaggtagagatgaagctgcaaaagaatttcctcacccagcg

SEQ ID NO: 738323 - DNA, 120 bp, Artificial Sequence
  ENSG00000203942_6 (sequence is synthesized)
ggaaaacaccatagctggtgccaatcacacacacaccttctatggccacagtcaccacagtcaccatggccacccaagccaccagagccacagcctgcctaatcgcagacactagatctg

SEQ ID NO: 738324 - DNA, 120 bp, Artificial Sequence
  ENSG00000203942_7 (sequence is synthesized)
tgacttcttggaagccacctaaccatggatggagacgcccctgcccccagcaaggctggctcacacacacgtctgttttctctcctatggggccatctatgcaggccagggtgagatgct

SEQ ID NO: 738325 - DNA, 120 bp, Artificial Sequence
  ENSG00000203942_8 (sequence is synthesized)
gtgcccaaatccctactttcttaggctcctcacggggattatgggctctttaaactccatgagtggggtctgccacagaagatggcccctgttggagggagagctgggaggacacagcgc

SEQ ID NO: 738326 - DNA, 120 bp, Artificial Sequence
  ENSG00000203942_9 (sequence is synthesized)
aggtgagatagaccctgaggcccctgaagacccaccaagagaagacagatgggagcaggcaagagccccacactgatgtcattgcctggaacggagccaataaagctttgtgtgccttca

SEQ ID NO: 738327 - DNA, 120 bp, Artificial Sequence
  ENSG00000203943_0 (sequence is synthesized)
ctcacagacgggtttttgaggctttcgttgagaatgtgagttgctgaagtaaaggaaccctgcagccttcccatgctatctgttgacatggaaaacaaggaaaatggctctgtcggtgta

SEQ ID NO: 738328 - DNA, 120 bp, Artificial Sequence
  ENSG00000203943_1 (sequence is synthesized)
aaaaattccatggaaaatgggagaccacctgatcctgcagactgggccgtgatggatgtcgtcaattatttccgaaccgtgggatttgaggagcaagctagtgcttttcaggaacaggaa

SEQ ID NO: 738329 - DNA, 120 bp, Artificial Sequence
  ENSG00000203943_2 (sequence is synthesized)
attgatggaaaatccctgctattgatgacaagaaatgatgtgttgacaggacttcagttaaaattggggcctgctctgaaaatctacgaatatcatgtaaaacctctgcagacaaagcat

SEQ ID NO: 738330 - DNA, 120 bp, Artificial Sequence
  ENSG00000203943_3 (sequence is synthesized)
ttaaagaacaactcttcatagtacagtcaaattggggtcttcgacctcaaaaaatacataatgacataatttagtttcatgtaatgaaactttgtaaacagaatacatacatgtgtatat

SEQ ID NO: 738331 - DNA, 120 bp, Artificial Sequence
  ENSG00000203943_4 (sequence is synthesized)
gtaaagaatttcaatcaaatgaaacgttatcctattggatagactaggcaattcatcagctcacctgaaatcagccaggaggagcaaggacaagatgcgcacagggtggttttcctcatg

SEQ ID NO: 738332 - DNA, 120 bp, Artificial Sequence
  ENSG00000203943_5 (sequence is synthesized)
ctttatagctttcccaaaatcttttaaaaaagaatttaattaaatgacagtcttttggttacagacttaggatgagtaaaaacaagaaaatttggggagggggagaaagaagaaagggat

SEQ ID NO: 738333 - DNA, 120 bp, Artificial Sequence
  ENSG00000203943_6 (sequence is synthesized)
tgctgtctcccttgaattcctctgttccttagagcttgtgttacttggacggaattgccaacacccttttttatagagggttctccacttgaccttattaaggttttattgggatatgct

SEQ ID NO: 738334 - DNA, 120 bp, Artificial Sequence
  ENSG00000203943_7 (sequence is synthesized)
gcagtgtttgaaatgaacatgcatcatggccccttcaggagcagaatcatagctctgaaaagagaagctccgttgtgtactgaggatatccatccatattcagctagctttcaaatgggg

SEQ ID NO: 738335 - DNA, 120 bp, Artificial Sequence
  ENSG00000203943_8 (sequence is synthesized)
taacgatattttctgcatagattttcttttaaattggttctttgtttctgaagaaagaattttttttaacttcatggttttatttataataatttgtttctgaagaaatttgccgagagt

SEQ ID NO: 738336 - DNA, 120 bp, Artificial Sequence
  ENSG00000203943_9 (sequence is synthesized)
tacaggtcaaaaagccttgttactagtacagaatatttttatatatattccttcatgatggtgtaattttttttaattgtcctatgctttgttcggttcctgggttaagtacttgttttt

SEQ ID NO: 738337 - DNA, 120 bp, Artificial Sequence
  ENSG00000203943_10 (sequence is synthesized)
aagagcttggaaaaagtgggcttgctacatctctgttcaaagagacatttgttcaatctctgtgtgtcaacgccttgttgaattggtgctttgtggttgcaataaagcattgcttcagtt

SEQ ID NO: 738338 - DNA, 120 bp, Artificial Sequence
  ENSG00000203943_11 (sequence is synthesized)
tactttgtgaaagaaaacattggggtttctttggctgttcttgataagcctataaaaaatgatattttttagttgcttataggtaggttttctttttactcttccacagaaaagaaaata

SEQ ID NO: 738339 - DNA, 120 bp, Artificial Sequence
  ENSG00000203943_12 (sequence is synthesized)
atagtaataataataagacaatgtagtgtggtgttgcagagtatcattgtgagtgttttgttttgttttctgagatgcttagaaaatggtgaatgtgtaacagtttccaactgaagtgaa

SEQ ID NO: 738340 - DNA, 120 bp, Artificial Sequence
  ENSG00000203943_13 (sequence is synthesized)
gaaggcagttggtgcagcttgtgtgtgattcctaacgtcatgttggctgagagccagcctggttttatttcactgtgtcaaattgtacctccttattgaattcctttgccagcctacttt

SEQ ID NO: 738341 - DNA, 120 bp, Artificial Sequence
  ENSG00000203943_14 (sequence is synthesized)
atattctgttagcatggagcagcagcactatcttcctgtctactctctaacgttgctgaagtaaaggaaccctgcagccttcccatgctatctgttgacatggaaaacaaggaaaatggc

SEQ ID NO: 738342 - DNA, 120 bp, Artificial Sequence
  ENSG00000203943_15 (sequence is synthesized)
tctgtcggtgtaaaaaagtaagtgaagctggcttctgagttctgcttctgcaaacaacagagggacttagtttctattttcgtacttcttgcttatctactacaatacacagtttggggg

SEQ ID NO: 738343 - DNA, 120 bp, Artificial Sequence
  ENSG00000203943_16 (sequence is synthesized)
actggccagcagcctcccttctcccccctaccccagttacctttttctgtattgcatttctaagacagagatgactcagacatcaaaatatatatgaaaggtttgtgtatcaggctttgg

SEQ ID NO: 738344 - DNA, 120 bp, Artificial Sequence
  ENSG00000203943_17 (sequence is synthesized)
aacaaggatggttgaggatttcagccctgcattctgtatattgaaacaaaaactccaagcagagactcttccatagacaacacagaatgggggcagaaaatagagttcaaattttttttt

SEQ ID NO: 738345 - DNA, 120 bp, Artificial Sequence
  ENSG00000203943_18 (sequence is synthesized)
tgaaatacaatcacctctaactctgaaaactaagagctatagtgcaggaagggaaaaagcttcagtaagaatatagtttaacaactcctccgtcctaattttatgaactgtttaatgaat

SEQ ID NO: 738346 - DNA, 120 bp, Artificial Sequence
  ENSG00000203943_19 (sequence is synthesized)
gtgaaacatttctgtgcatacatggtgtttattttaaagtctgttctcacatttgaaacttgtgtttatatgtgtcatgtaagagttatatatttgattattttaaatgggaaaattcaa

SEQ ID NO: 738347 - DNA, 120 bp, Artificial Sequence
  ENSG00000203943_20 (sequence is synthesized)
gtgatggatgtcgtcaattatttccgaaccgtgggatttgaggagcaagctagtgcttttcaggaacaggataaagttactgacagagataaatacctagaatgcacaccaatcgagagc

SEQ ID NO: 738348 - DNA, 120 bp, Artificial Sequence
  ENSG00000203943_21 (sequence is synthesized)
gagtggtcaaatcaaagggctgctgctatgataaggcctacttctgcctgcctaccctcagaaacaggatctcactatgttgcccaggctggagcatagtggttattcacaggcgtgatc

SEQ ID NO: 738349 - DNA, 120 bp, Artificial Sequence
  ENSG00000203943_22 (sequence is synthesized)
ccactactgatcagtacaggagtttcatctctttttgataaagaagactgaggatcccacacaggtgcacactgttttgtgctatagatgtacaactaataaaacaaatccttgtcaata

SEQ ID NO: 738350 - DNA, 120 bp, Artificial Sequence
  ENSG00000203943_23 (sequence is synthesized)
atgagtatatgaaaaatgtatattctcacttaggagttatagcaaagcaataagtactttgattacaaggagaaagtgagttccaagagggagttatctgtttcatttctttccatatca

SEQ ID NO: 738351 - DNA, 120 bp, Artificial Sequence
  ENSG00000203943_24 (sequence is synthesized)
tttagtttaaaattgccgtcaacttgagctttggaggaaactaattaaatataatccatagaagctgtgatatctaaatgaggaaacagtgtgctatatgtttatgaatagaaggtatat

SEQ ID NO: 738352 - DNA, 120 bp, Artificial Sequence
  ENSG00000203943_25 (sequence is synthesized)
tttgcttcacagcaaagttacattaaaactaacttaataaaatctgttttttaaagttctcgggtaatttatatatcagtgccatactgccatgctgattaccatccctaaagtttgggg

SEQ ID NO: 738353 - DNA, 120 bp, Artificial Sequence
  ENSG00000203943_26 (sequence is synthesized)
ccttgtcctgcccagatcttgtcccttctagtactggccttccccattcctgggggcccccgcccctccgacccccgccgaccggcgctggactacaactcccggcgtgccgcgcgcgtc

SEQ ID NO: 738354 - DNA, 120 bp, Artificial Sequence
  ENSG00000203943_27 (sequence is synthesized)
cacactcacatactttatgctacatactacacacacaactttttatcagcagaggattgatggcaaacagtttgttggagggagtgtttgctgaagtaaaggaaccctgcagccttccca

SEQ ID NO: 738355 - DNA, 120 bp, Artificial Sequence
  ENSG00000203950_0 (sequence is synthesized)
ttccggcgacgccttagcgctgacccccacgcaacccagcgaaactccgcggagcgcgcgcggcacgatggacggtcgggtgcagctgatgaaggccctcctggccgggcccctccggcc

SEQ ID NO: 738356 - DNA, 120 bp, Artificial Sequence
  ENSG00000203950_1 (sequence is synthesized)
cgcggcgcgtcgctggaggaacccgattccctttcccgagacgtttgacggagataccgaccgactcccggagttcatcgtgcagacgagctcctacatgttcgtggacgagaacacgtt

SEQ ID NO: 738357 - DNA, 120 bp, Artificial Sequence
  ENSG00000203950_2 (sequence is synthesized)
ctccaacgacgccctgaaggtgacgttcctcatcacccgcctcacggggccagccctgcagtgggtgatcccctacatcaggaaggagagccccctgctcaatgattaccggggcttcct

SEQ ID NO: 738358 - DNA, 120 bp, Artificial Sequence
  ENSG00000203950_3 (sequence is synthesized)
ggccgagatgaagcgggtctttggatgggaggaggacgaggacttctaggccgggagacccttgggcctgggggcgggtgctctgggaagagttcgctgtgccagtggccaccgctaggg

SEQ ID NO: 738359 - DNA, 120 bp, Artificial Sequence
  ENSG00000203950_4 (sequence is synthesized)
tctccacaggcgccctccctccgcgcctccctccccctcgagccgccgcgatgtcccctgcgctcctgtcccctcccgcgtagtgcttgcctttgttccaggaatagcgctccaggctcc

SEQ ID NO: 738360 - DNA, 120 bp, Artificial Sequence
  ENSG00000203950_5 (sequence is synthesized)
ctcttttgccagcccagcccctccatgcacatttggacgctgtcctgcacttcaggtgcaagctgggctcctgttacatactggacagaccacccacagccgctgctgccaacccacctc

SEQ ID NO: 738361 - DNA, 120 bp, Artificial Sequence
  ENSG00000203950_6 (sequence is synthesized)
cactcctccagactgccagccaactacatcattctgcccacagacctacgctaccactgccatcgccatccaccgcatctcaccaacagactgtggctcctagtgatgtggactcacctc

SEQ ID NO: 738362 - DNA, 120 bp, Artificial Sequence
  ENSG00000203950_7 (sequence is synthesized)
ggaggtatccgagctggacacagcccctggacagtgatccagacagctggccgtcccccaaggagcctgtcaccttcagcgagacccatttcctccccatccccagagacctcttgtgtt

SEQ ID NO: 738363 - DNA, 120 bp, Artificial Sequence
  ENSG00000203950_8 (sequence is synthesized)
cctgccacatagctgccagggcttaagtgtgcctggcaaccaaatcgaatctctcattttctcctgtggaccagttagttttgcctagaatcctgttttcttctgaatttgcagctgtct

SEQ ID NO: 738364 - DNA, 120 bp, Artificial Sequence
  ENSG00000203950_9 (sequence is synthesized)
ctctgatgggtgccttttgttcaacacagtaagccctgctcccttccctgctctaatacactacctgtacaaaggttttttccttatttttaataaatgtcagacactattaaatagaaa

SEQ ID NO: 738365 - DNA, 120 bp, Artificial Sequence
  ENSG00000203952_0 (sequence is synthesized)
aagccgccgcggtacccgcttcaccgggcatgctcagtcctccggccaggctttgactgcgggacgccagcgtccggccccctgcgcgcgtccggagtccgggtccctttaaatcgggca

SEQ ID NO: 738366 - DNA, 120 bp, Artificial Sequence
  ENSG00000203952_1 (sequence is synthesized)
ttaaatcgggcaggctcgttgctaggcaaccgcgcggcccgcgctggcgctgcactgcggtggctcagcccggagccggcccggcggggtcgcggtggccagagccgaacggggggctgc

SEQ ID NO: 738367 - DNA, 120 bp, Artificial Sequence
  ENSG00000203952_2 (sequence is synthesized)
gtggttgtctttgaggaagagaggttcgggctctccagacggcatccacgcttccagatattggaagaggtgcctggagaaatggatgctagaagaaaacactggaaggagaatatgttt

SEQ ID NO: 738368 - DNA, 120 bp, Artificial Sequence
  ENSG00000203952_3 (sequence is synthesized)
actcctttttttagtgcacaagatgttctagaagagacttctgagcctgaatcttcttctgaacaaacgactgcagatagcagcaagggaatggaagaaatttataatttgtccagtaga

SEQ ID NO: 738369 - DNA, 120 bp, Artificial Sequence
  ENSG00000203952_4 (sequence is synthesized)
aagtttcaggaagaaagtaaatttaagaggaaaaaatatattttccaactaaatgaaatagaacaagaacaaaatttaagagagaacaagagaaacatttcaaagaatgaaacagacaca

SEQ ID NO: 738370 - DNA, 120 bp, Artificial Sequence
  ENSG00000203952_5 (sequence is synthesized)
gctctactaagacaagacataagaaagaaatttatggaaagaatgtctccaaaactttgcctgaatcttttgaatgaagaactggaagaacttaatatgaaatacagaaaaatagaagag

SEQ ID NO: 738371 - DNA, 120 bp, Artificial Sequence
  ENSG00000203952_6 (sequence is synthesized)
gaatttgaaaatgctgaaaaagaacttttgcactacaaaaaagaaatattcacaaaacccctaaattttcaagaaacagagacggatgcttcaaaaagtgactatgaacttcaagcttta

SEQ ID NO: 738372 - DNA, 120 bp, Artificial Sequence
  ENSG00000203952_7 (sequence is synthesized)
agaaatgacctgtctgaaaaagcaacaaatgtaaaaaacttaagtgaacagctccagcaagccaaagaagtcatccacaaattgaacctagagaacagaaatttaaaagaagctgttagg

SEQ ID NO: 738373 - DNA, 120 bp, Artificial Sequence
  ENSG00000203952_8 (sequence is synthesized)
aagttaaagcatcaaaccgaggttggaaatgtgctcctaaaagaagaaatgaaatcatattatgaattagaaatggcaaagatccgcggagagctcagtgtcatcaagaatgaactgaga

SEQ ID NO: 738374 - DNA, 120 bp, Artificial Sequence
  ENSG00000203952_9 (sequence is synthesized)
actgagaagaccctacaagcaagaaataacagagccttggagttgcttagaaaatactatgcttcttcaatggtaacatcatcaagtatccttgaccactttactggggattttttttaa

SEQ ID NO: 738375 - DNA, 120 bp, Artificial Sequence
  ENSG00000203952_10 (sequence is synthesized)
gtggttgtctttgaggaagagaggttcgggctctccagacggcatccacgcttccagttcaaactggagaaggagggcagagatatccagtagacagaagatcttggaccccaggaagta

SEQ ID NO: 738376 - DNA, 120 bp, Artificial Sequence
  ENSG00000203952_11 (sequence is synthesized)
attacttaaaatatatgtaataggatgttattttcattttcagtaaatcacagtatctataaaacatatacatgtttccaagcttctgctttctctttctgatgaagttattgcaggaat

SEQ ID NO: 738377 - DNA, 82 bp, Artificial Sequence
  ENSG00000203952_12 (sequence is synthesized)
tatattcactcaaaaacacataatgattcaccaaatcatttatgaatacaaatcagcaattttgtgatctcgtaagcaaata

SEQ ID NO: 738378 - DNA, 120 bp, Artificial Sequence
  ENSG00000203952_13 (sequence is synthesized)
tgaatacaaatcagcaattttgtgatctcgtaagcaaatatgtctttggcacgtgaatatttttccatctgtgttcattgatgttaacaataaaaatcttgtttatgtgtataagcctaa

SEQ ID NO: 738379 - DNA, 120 bp, Artificial Sequence
  ENSG00000203963_0 (sequence is synthesized)
ataggaatttagtgattgacaatggcagaaaaaatcctagagaagttggatgtccttgataagcaagcagagataatcttggccagaagaacaaagataaacaggcttcagagtgaagga

SEQ ID NO: 738380 - DNA, 120 bp, Artificial Sequence
  ENSG00000203963_1 (sequence is synthesized)
agaaaaacaactatggctatacccctgacatttgattttcagttggaatttgaagaagctcttgctacatccgcgtctaaggcaatatcaaagatcaaagaagacaagtcatgcagcatt

SEQ ID NO: 738381 - DNA, 120 bp, Artificial Sequence
  ENSG00000203963_2 (sequence is synthesized)
acaaaatcaaaaatgcatgtctctttcaaatgtgagcctgaacctagaaagagtaattttgaaaagtcaaatttaagaccattctttattcaaacaaatgtaaaaaataaagaaagtgag

SEQ ID NO: 738382 - DNA, 120 bp, Artificial Sequence
  ENSG00000203963_3 (sequence is synthesized)
tcaacagctcaaattgaaaaaaaacctaggaaaccattggattctgttggtctcttagaaggtgatagaaataaaagaaaaaaatctccacagatgaacgattttaatataaaagaaaac

SEQ ID NO: 738383 - DNA, 120 bp, Artificial Sequence
  ENSG00000203963_4 (sequence is synthesized)
aaatcggtcagaaattatcaattaagtaagtataggtcagtaagaaagaaaagcttgctcccgttgtgctttgaggatgaattgaaaaatccacatgccaagatagtcaacgttagtcca

SEQ ID NO: 738384 - DNA, 120 bp, Artificial Sequence
  ENSG00000203963_5 (sequence is synthesized)
acaaagacagtaacttctcacatggaacaaaaggacacaaatcccataattttccatgacacagaatatgtacgaatgttacttttgacaaaaaatagattttcttctcatcctttggaa

SEQ ID NO: 738385 - DNA, 120 bp, Artificial Sequence
  ENSG00000203963_6 (sequence is synthesized)
aatgaaaacatttacccacataaaagaacaaatttcattttagaaagaaattgtgaaatcctcaaatctataattggcaatcaatctatttctcttttcaaaccccaaaaaactatgcct

SEQ ID NO: 738386 - DNA, 120 bp, Artificial Sequence
  ENSG00000203963_7 (sequence is synthesized)
acagtacagagaaaagatatacagatccctatgtcttttaaagcgggccacacaactgtagatgataaactaaagaagaaaactaataagcagacactagaaaacagatcttggaataca

SEQ ID NO: 738387 - DNA, 120 bp, Artificial Sequence
  ENSG00000203963_8 (sequence is synthesized)
cacagaatttttctagcctaacaaaacaatttgtgggttaccttgataaagctgttattcatgaaatgagtgcccaaactggaaaatttgaaagaatgttttctgcaggaaaaccaacga

SEQ ID NO: 738388 - DNA, 120 bp, Artificial Sequence
  ENSG00000203963_9 (sequence is synthesized)
gcatacccacatccagtgccttacctgtcaaatgttactcaaagccttttaaatatatatatgaactaaataatgtaacgccactggataatttgttaaacttatcaaatgaaattttaa

SEQ ID NO: 738389 - DNA, 120 bp, Artificial Sequence
  ENSG00000203963_10 (sequence is synthesized)
atgcctcataaaatattatgtatgcagcaatatttgagtaacaagaagcaaatatccaagttccaaaattataaaagaaattcttatccaaatagtaatgttctaattgatcatataaga

SEQ ID NO: 738390 - DNA, 120 bp, Artificial Sequence
  ENSG00000203963_11 (sequence is synthesized)
aagcaaagcatagacattagaattataagtcagcagtggtctgttcaagaacaatcaacatttttagaaaatagtaggacaaaattaggaaataattatcaccaagaggatctagttcat

SEQ ID NO: 738391 - DNA, 120 bp, Artificial Sequence
  ENSG00000203963_12 (sequence is synthesized)
gactttctattatctcaattagattgctcaatcatcagccttcctatactaaactctgattcaggaccaagaaaggcatagtctgactctggaaatgcgctgttggaagccaaataacat

SEQ ID NO: 738392 - DNA, 120 bp, Artificial Sequence
  ENSG00000203963_13 (sequence is synthesized)
caatactcttgttctataattgaatatcaaataagacaaattaccattaatttaatgactgtggagttaattgtataccagcatttcagcaaatcatcatcaatagtattacattagcaa

SEQ ID NO: 738393 - DNA, 120 bp, Artificial Sequence
  ENSG00000203963_14 (sequence is synthesized)
tttatgcaattaaaagggctttgtaaaactttgaatagattttattgtcattagtagctgttggaacttcattattatataatgtttttgcaaactttaacttttttctaaattgttaaa

SEQ ID NO: 738394 - DNA, 120 bp, Artificial Sequence
  ENSG00000203963_15 (sequence is synthesized)
taaaagaataactatccttaatctaaataattttggtagcaaatcctataaggtattaaacattttaaggtatattattacattgctattttactgtttctcattaacccaaacagttta

SEQ ID NO: 738395 - DNA, 120 bp, Artificial Sequence
  ENSG00000203963_16 (sequence is synthesized)
aaggcagaattccacttagaaacaagttgcattttgaaagtttatttgtaatccatttgtttggaattcagaaatgtatttcacataaaaataatcttggaagtaataaattccaaaatt

SEQ ID NO: 738396 - DNA, 120 bp, Artificial Sequence
  ENSG00000203963_17 (sequence is synthesized)
ctcatggctgtaatcccagcactttgagatgccaagagccagtagaagaacatctaaaatcaagatctattagaccctatctttatcttaaggatacaactgagatggaaaatgcagggc

SEQ ID NO: 738397 - DNA, 120 bp, Artificial Sequence
  ENSG00000203963_18 (sequence is synthesized)
acaaaatcaaaaatctcaaattgaaaaaaaacctaggaaaccattggattctgttggtctcttagaaggtgatagaaataaaaggtaatttattttaaaatgcttaatactttgttctgt

SEQ ID NO: 738398 - DNA, 120 bp, Artificial Sequence
  ENSG00000203963_19 (sequence is synthesized)
ttaatgatgtttctagtaggacacattttataattgacaggaataaatttattctgccttattatttagttccacagcacaatccaatgaatggtccaagactgcttagccactagatat

SEQ ID NO: 738399 - DNA, 120 bp, Artificial Sequence
  ENSG00000203963_20 (sequence is synthesized)
cacatccagaccttgagtattgttaaatggagagaaaggcatggaaaaatgaatagagggaatacaatttttttttttagtaaatacacacatttacttacatgacaacatggacatgaa

SEQ ID NO: 738400 - DNA, 120 bp, Artificial Sequence
  ENSG00000203963_21 (sequence is synthesized)
aaagtagcttttctttggataaagttctcatttttctcatgaacccttccatctctgtataatgaaaaaaatcattaatccagtgtgtttcaaactttgtttgaatcaataatgaacaag

SEQ ID NO: 738401 - DNA, 120 bp, Artificial Sequence
  ENSG00000203963_22 (sequence is synthesized)
cactttaggtttaactcagtttaaaaattatatcctgtctctgcctgaccacactattctatcctcttaacaaagctggggccaccctatgttggcatgaagctgccctgtggagcttct

SEQ ID NO: 738402 - DNA, 120 bp, Artificial Sequence
  ENSG00000203963_23 (sequence is synthesized)
tccagaatttcaacataggacgttgcaaatacctctctacctttggtgttctcctcaacctacgtaataatacaactcgtccccactcaaaatccaaagaggcatatatatgactctctt

SEQ ID NO: 738403 - DNA, 120 bp, Artificial Sequence
  ENSG00000203963_24 (sequence is synthesized)
gcttccactcctactcttgctgttttctcccacaaaccaggcaggacgggatgatcttgtcggtttgaaaagtctgtgggagagaggttggtgcagaagttggcagtgacttccagggat

SEQ ID NO: 738404 - DNA, 120 bp, Artificial Sequence
  ENSG00000203963_25 (sequence is synthesized)
aagacagtaacttctcacatggtaataagcatatcatctattgttaagtaaatatgtgtagtcataagacttatgggaatcacccatatattttagtgaccagaatctttgataaatcct

SEQ ID NO: 738405 - DNA, 120 bp, Artificial Sequence
  ENSG00000203963_26 (sequence is synthesized)
ttttacctcttggtttcatattccaaagtgataacagcacttaagttcttaatgcactttgcacaactcccaaaccagggattcctttataccagctgaaaattcagtgtttttctttat

SEQ ID NO: 738406 - DNA, 120 bp, Artificial Sequence
  ENSG00000203963_27 (sequence is synthesized)
gaagaagcctttatcaaatttgcttgattataatagaactgtagaataaaaagaattttttaaaaatggctgtaccaatctagcagaatgcagtggtgtgcacctgtaatccccgctact

SEQ ID NO: 738407 - DNA, 120 bp, Artificial Sequence
  ENSG00000203963_28 (sequence is synthesized)
ctggagtctgaggcaggggaactgcttgagcccaggcatttgaatccagcctgagcaatataacaagaccccagttctaaaatgatgggaccatgaccatgtgtcaatttttctaacaat

SEQ ID NO: 738408 - DNA, 120 bp, Artificial Sequence
  ENSG00000203963_29 (sequence is synthesized)
ctgttttggctttttcaaccagaaagtgcatttattaaaggctatttagtaactcatgctctctagagaggcaatatggctcgaaagctgtctagtcaggaatcacctaattatatagcc

SEQ ID NO: 738409 - DNA, 120 bp, Artificial Sequence
  ENSG00000203963_30 (sequence is synthesized)
ccagactgctccactgaggcccatgctattgtcacagataaaagtttacaactctgatgctgagcagggaatactctaagacatttgctactgctgtcattcaaagctagatgtaactcc

SEQ ID NO: 738410 - DNA, 120 bp, Artificial Sequence
  ENSG00000203963_31 (sequence is synthesized)
gcaaatgcctatgtcctaaccgcaaagaagctgataaacatggttcttgcctctacctaagggtacatagacttgtcaagtggaaaattccctaaggtgttggacagaccaaaagcatta

SEQ ID NO: 738411 - DNA, 120 bp, Artificial Sequence
  ENSG00000203963_32 (sequence is synthesized)
caaacatccattactatggctaaataggtaatattggcatcaccagtggattgcaaaactagatctttgtcatcttttcagtaatcatagcagacttggatattactgcgataaaaatgt

SEQ ID NO: 738412 - DNA, 120 bp, Artificial Sequence
  ENSG00000203963_33 (sequence is synthesized)
ctattcttaagtcaatctattactttggctattttattccacaaatatatattgagcactttttaggtgtcaggtattgtgctaagtattagggtacaataataacagttgtagagataa

SEQ ID NO: 738413 - DNA, 120 bp, Artificial Sequence
  ENSG00000203963_34 (sequence is synthesized)
tttttaattttttgaattacttactagaatatccagatttgtaattttggcttgtaatcagttatgtctcttctgaactttgactcaatccattttttggtatgctttttaatttctaga

SEQ ID NO: 738414 - DNA, 120 bp, Artificial Sequence
  ENSG00000203963_35 (sequence is synthesized)
acatggaaacctaagaaatgccagaacaaccaccttatttctcaatgacagtaccccagatatttaacaaatatattaattttttcgtattccaatttatttcaaaaaacatttaaggcc

SEQ ID NO: 738415 - DNA, 120 bp, Artificial Sequence
  ENSG00000203963_36 (sequence is synthesized)
aaaagttcaagttttatcactaacatctctatagaatattaagataagaaggatgtatgttacatacaagtacagtattttcatgtatttgaataatgctactgttcatattaaatattt

SEQ ID NO: 738416 - DNA, 120 bp, Artificial Sequence
  ENSG00000203963_37 (sequence is synthesized)
gtatgtagtcatttttagaatattttacaattttatttacatgttttaaaatatatggagctttcttgactcaatgaacttatgactaattattcttttctttaatctacaggaacaaaa

SEQ ID NO: 738417 - DNA, 120 bp, Artificial Sequence
  ENSG00000203965_0 (sequence is synthesized)
agttgccatggtgattagagaaaggccgagatctgtccagctgcggtgagaggaacgctgaatcgccgaagagaattggctgcgcttccttgtttgtgagctagaattagaatggcgatc

SEQ ID NO: 738418 - DNA, 120 bp, Artificial Sequence
  ENSG00000203965_1 (sequence is synthesized)
agtccacgaagcgatgcaactttctccagtcagaaatcaacaccttcagagagtcctcgaacaaagaaatttccactaactgaagaggaaatattttatatgaattgtagagctgcctac

SEQ ID NO: 738419 - DNA, 120 bp, Artificial Sequence
  ENSG00000203965_2 (sequence is synthesized)
ttaactgtcttcaaaagcagcttggaaaacattatttctaaagatcaactttacttagctcttcagcatgcaggaagaaatccatcccaaaagaccattaataagtattggactcctcaa

SEQ ID NO: 738420 - DNA, 120 bp, Artificial Sequence
  ENSG00000203965_3 (sequence is synthesized)
actgccaaactgaattttgatgatttttgtataattttaaggaaggaaaaacctacttcaaaagcagaactactaaaatcatttaagcaattagatgtaaatgatgatggctgtatttta

SEQ ID NO: 738421 - DNA, 120 bp, Artificial Sequence
  ENSG00000203965_4 (sequence is synthesized)
cacactgacctttataaatttctaacaaagagaggtgagaagatgactcgagaagaagtaaatgccataataaatttggctgatgtaaatgctgatggcaaatttgactacatcaagttt

SEQ ID NO: 738422 - DNA, 120 bp, Artificial Sequence
  ENSG00000203965_5 (sequence is synthesized)
tgtaaattatatatgacaaccaacgagcaatgtctcaagactacactagaaaaactagaggttgacagtaaattgatgcgtcaccagtttggaaaccacatcgaagggtcccctgaaagg

SEQ ID NO: 738423 - DNA, 120 bp, Artificial Sequence
  ENSG00000203965_6 (sequence is synthesized)
gacccatcaccagtaccaaaaccatcacctaaaatcacaagaaaaactgatccagaaacattcttaaataaaggtgacaccaggagttctttactgtcagcaaccaggaagttcaaaaca

SEQ ID NO: 738424 - DNA, 120 bp, Artificial Sequence
  ENSG00000203965_7 (sequence is synthesized)
tctgtttccttcacagttaccatgggggctaatggtaaccgaaactcaaagttaatggagccaaatttaataaaggactggcaacacatgcaatcaaaaggttgcttcttcttagaagaa

SEQ ID NO: 738425 - DNA, 120 bp, Artificial Sequence
  ENSG00000203965_8 (sequence is synthesized)
gatggtgaaatcattagtcatcagtacaggatgcaaatagctcagaggtccatggtttatctaacaattaagccattaaacctgagtcaagttgaaggaaaaccatccccttggttatcc

SEQ ID NO: 738426 - DNA, 120 bp, Artificial Sequence
  ENSG00000203965_9 (sequence is synthesized)
attctcaaggaaaatgagagtcaagcaaatctacagcttgtgtgttttaccgaactacgaaatagagaagtgtttggatggactggtgaactaggacctggaatttactggttaattcct

SEQ ID NO: 738427 - DNA, 120 bp, Artificial Sequence
  ENSG00000203965_10 (sequence is synthesized)
tccacaactggctgtaggctgaggaaaaaaataaaaccagtaacagatgaagcccaacttgtatatagagatgaaacaggggaattattccttacaaaggaatttaagtctactttatca

SEQ ID NO: 738428 - DNA, 120 bp, Artificial Sequence
  ENSG00000203965_11 (sequence is synthesized)
gatatatttgaagtaattgatttagatggaaatggtcttcttagccttgaagaatataatttttttgaattgagaacaagtggtgagaaatgtgatgaagatgcttgggctgtctgcaga

SEQ ID NO: 738429 - DNA, 120 bp, Artificial Sequence
  ENSG00000203965_12 (sequence is synthesized)
gagaattttgatacaaagaggaatgaactaacaagacaaggatttatggatttgaatctaatggaagctaatgatcgagaaggagatccttgtgacctttgggtaactctacactctatg

SEQ ID NO: 738430 - DNA, 120 bp, Artificial Sequence
  ENSG00000203965_13 (sequence is synthesized)
ggctacaataaagctctggagttgacagaggcatgtccatttgtcattgatatctatgcagaaaaatgcaagccaaaaattaaagctgtccatatggaggcatgtagtggacaacttgag

SEQ ID NO: 738431 - DNA, 120 bp, Artificial Sequence
  ENSG00000203965_14 (sequence is synthesized)
aaggccatttgtaaatctgttcttagcaacggtgatgccaaagtaatggatggctatgaaaatataatcgtgcatacttacagttgtgacacctggataacgtcagttattgaaaacaag

SEQ ID NO: 738432 - DNA, 120 bp, Artificial Sequence
  ENSG00000203965_15 (sequence is synthesized)
tcagatgagaaagtgattattcacatcagcaatgagctaagtaaaaactgcataaacaacagaggactcaacatatttgcagtagaagtgggacccaaatctacaatggtttgtcaacat

SEQ ID NO: 738433 - DNA, 120 bp, Artificial Sequence
  ENSG00000203965_16 (sequence is synthesized)
gtaatgcctttgaatgaacgacaagaatggatatattattgtatatattctcttatttcttaaataattatacttagaacttaccaaactaagaattatttcagatttagtctgttattt

SEQ ID NO: 738434 - DNA, 120 bp, Artificial Sequence
  ENSG00000203965_17 (sequence is synthesized)
tcagatttagtctgttatttattaaacaactaaatgctacttaactgatgtacctaaataataatctattcaatttatatgcattttcattttatgtccatggtatgtactttattatta

SEQ ID NO: 738435 - DNA, 120 bp, Artificial Sequence
  ENSG00000203965_18 (sequence is synthesized)
agagcaccttctctcactactctggccataccacccccgcgatagaggagcaacacagctgtctctgtgcgctccggatcagcgcttcctagatttctagccggatcgtttggagaaggg

SEQ ID NO: 738436 - DNA, 120 bp, Artificial Sequence
  ENSG00000203965_19 (sequence is synthesized)
tctgaaaaaaatttgacattaagtttattaataactgtgcagtgtctacagggaaccagtaaagtttatgaagtaatttgaggtttttctgtgtaatttctacctgtaagctagtgtaat

SEQ ID NO: 738437 - DNA, 120 bp, Artificial Sequence
  ENSG00000203965_20 (sequence is synthesized)
ggggaagatttagaagatatataacttacctattacagttttaggcatttgtttcaaaaatatataaagaactgctgtatctaatgatctcataatgggattaccattaacaaaaagaat

SEQ ID NO: 738438 - DNA, 120 bp, Artificial Sequence
  ENSG00000203965_21 (sequence is synthesized)
ttgaaacctgtaaaaagactgataggactataatagaatttgtaaatattgatttaaaaatcatttctaatgtgtccctttcagaagaaatattaaaagctttaaattaaaagatgaaaa

SEQ ID NO: 738439 - DNA, 120 bp, Artificial Sequence
  ENSG00000203965_22 (sequence is synthesized)
attttgctacaaagcttactaatatatttcatcttattccttactctattcgtatgtggtaattaagtatcccatcacattaataatgtttataatgcataattattttttctcctcagg

SEQ ID NO: 738440 - DNA, 120 bp, Artificial Sequence
  ENSG00000203965_23 (sequence is synthesized)
tttctaactcaaactgggagtggtaatttttatatgatttttaaaggtttccaattttttctcttaaaatattaggaaaattaaacatttggatattagtgaatatagagcacaatctgg

SEQ ID NO: 738441 - DNA, 120 bp, Artificial Sequence
  ENSG00000203965_24 (sequence is synthesized)
gtacaaagtattttatttagtttgtttctaaaagtttttatgtatacatagctattttaataatagatatcatgttttaaagaaatattataagcaaaggaaaaatttcaacccagcgtt

SEQ ID NO: 738442 - DNA, 120 bp, Artificial Sequence
  ENSG00000203965_25 (sequence is synthesized)
ttacactaacgttgcagagatcctataaattattattatttaatataactaaatgtattctactgtcccaagacctgctttcatcaagctgattatttctacctttggctctcttccctg

SEQ ID NO: 738443 - DNA, 120 bp, Artificial Sequence
  ENSG00000203965_26 (sequence is synthesized)
ctattaatactattgatattacaggtcaagagaatacgagcataaattcttagtcagaaatatccagttctctagaaattataaattttcataaaactttatataagatggctaggtgct

SEQ ID NO: 738444 - DNA, 120 bp, Artificial Sequence
  ENSG00000203965_27 (sequence is synthesized)
cagtactgttgacttatttcttttaggtcctacgtgagacatatttttatgcctgccataaatttcttaaaatacttaagatgtggcagcgtttttagtcaacctgagaatatattatgt

SEQ ID NO: 738445 - DNA, 120 bp, Artificial Sequence
  ENSG00000203965_28 (sequence is synthesized)
aactattttagtcacaataggagcaaccagaaagtgtaaaacttgatctctgcgttcaaggagtttatgggctataattggaaagacaaaattaatactcttgaaagacatcagagaata

SEQ ID NO: 738446 - DNA, 120 bp, Artificial Sequence
  ENSG00000203965_29 (sequence is synthesized)
aatttggaccatagaggttggggaaggatttgttacgaggggcaagggaactgtgatatgggatttgagcactgaaggatgactaggatttagatatgcagacagacagcctttagaagc

SEQ ID NO: 738447 - DNA, 120 bp, Artificial Sequence
  ENSG00000203965_30 (sequence is synthesized)
aggggaaacagtgtaaggcgaaacaaggcgaagggtatatatgaagtataaaggaaagagtgagaatatctgctttgcagcaatagacagctttatttggaggaggattaggaggtaaat

SEQ ID NO: 738448 - DNA, 120 bp, Artificial Sequence
  ENSG00000203965_31 (sequence is synthesized)
aacatacagaatggatccaaattatatatgttatcttgaaaacgagatagaggagtttagacttgattaactaagcttgggtccccacctagtagattgcagttttcaaatggaccaatc

SEQ ID NO: 738449 - DNA, 120 bp, Artificial Sequence
  ENSG00000203965_32 (sequence is synthesized)
atgcctcagagggtgattcctaagatgcatcatggttccctttctgccctctatgttttattagggttaaaaaggtgaagggagttactacgttaccccaacccctctgttctgctacca

SEQ ID NO: 738450 - DNA, 120 bp, Artificial Sequence
  ENSG00000203965_33 (sequence is synthesized)
cctattagttctcaattctctgcctcctttttcctcaaggaaaattcaactctcttcaccaaaatgtgataataatgtgaacattttagaccttattgtttgccaggcatttacatatat

SEQ ID NO: 738451 - DNA, 120 bp, Artificial Sequence
  ENSG00000203965_34 (sequence is synthesized)
tagagcatttacttctcacaacaaccctatgacataagtgctattctcattttacaaacaggaaactgaagcacagagcagttaaataacttgcaaatgattacacagctaagtagtaga

SEQ ID NO: 738452 - DNA, 120 bp, Artificial Sequence
  ENSG00000203965_35 (sequence is synthesized)
agagttgacaaataaattcaggtagtctaacattatactaccccctttatagtcattagggtatgatcgcagattcttagtaggggaatatttttattcctgcattttctccatttatca

SEQ ID NO: 738453 - DNA, 120 bp, Artificial Sequence
  ENSG00000203965_36 (sequence is synthesized)
gtgtcattctgctttcccttgctccctatccatcctagaggccattgtcttttatctcagttgtcacttcttccataaagtctttcttgaaaccccagtccgagctaatgttcatcttct

SEQ ID NO: 738454 - DNA, 120 bp, Artificial Sequence
  ENSG00000203965_37 (sequence is synthesized)
gtgtttctatagatccttctaaatacctctgttacaagactcagcaaagtgttttgtaattgtcattttatttgtctgtctcccctagagtgtgagctaggagtcagtaattctatcttt

SEQ ID NO: 738455 - DNA, 120 bp, Artificial Sequence
  ENSG00000203965_38 (sequence is synthesized)
tatctcagtgcacctagaccctaaaacaatgcctgatacaaagttgataataaatatatttgtttatatattgtcaatgaaggagtaaaaagatgttttagacatattagttggaaggta

SEQ ID NO: 738456 - DNA, 120 bp, Artificial Sequence
  ENSG00000203965_39 (sequence is synthesized)
gtattaaaatgaatggaagttgaaaaaactagagataacaacaaaagaaatagacactattgctatcataagtcaaggatgaaataatgtgaccctagtgtccataataccctgggaatg

SEQ ID NO: 738457 - DNA, 120 bp, Artificial Sequence
  ENSG00000203965_40 (sequence is synthesized)
aagattaaaaggtaagtaagtttaagtcacatttaaaagaaaaagtttatataaatggtgacagattggaaagaaaatcaatgagaaaaagtaacaaagttgaaagaagtagccaatttg

SEQ ID NO: 738458 - DNA, 120 bp, Artificial Sequence
  ENSG00000203965_41 (sequence is synthesized)
tatgaatttgtagtgcactatatgatgttaaaacagaatttcagggtttattctgaggcttatatttgtctgtaattattaaagaaaggaatagcagcttatgaaatctttttttaatag

SEQ ID NO: 738459 - DNA, 120 bp, Artificial Sequence
  ENSG00000203965_42 (sequence is synthesized)
gcaaaaggctgtagatactgagggggacagccatttttgctgtcttccacagaaggcaagggagtaagccttgtgggtgtatggtgctggaagggatgggtgaagagtggaggaggtggc

SEQ ID NO: 738460 - DNA, 120 bp, Artificial Sequence
  ENSG00000203965_43 (sequence is synthesized)
agagtattccaggtagacagaatactctgtgcagaggctctgtgagagtgtactggtgttaaaagaacagaggctagagtgtctcaaatggagtaagtgaggagagagttgtaggagatg

SEQ ID NO: 738461 - DNA, 120 bp, Artificial Sequence
  ENSG00000203965_44 (sequence is synthesized)
aaaccagggagaaacaaggacaaaatcaggaagaggtttctttttgccataattaggacttgggcttttgatcagagaaatgaggtttccccctcgttttttcacatagatgtctggcat

SEQ ID NO: 738462 - DNA, 120 bp, Artificial Sequence
  ENSG00000203965_45 (sequence is synthesized)
ctcttcctcgtgtgctccaccacaggaaaaccatccccttggttatccgttgatactgccttgtatattctcaaggaaaatgagagtcaagcaaatctacagcttgtgtgttttaccgaa

SEQ ID NO: 738463 - DNA, 120 bp, Artificial Sequence
  ENSG00000203970_0 (sequence is synthesized)
aaaacaactgacttgaaaaaggaggtctgttgccccctttttttaagaaactctctaccatgaagattcaactttttttctttattctgcacttttgggtcacaattttaccagccaaaa

SEQ ID NO: 738464 - DNA, 120 bp, Artificial Sequence
  ENSG00000203970_1 (sequence is synthesized)
agagtgcagaataggtaatggtcaatgtaaaaatcagtgtcatgaaaatgaaattaggattgcttactgcataagacctggaactcattgctgcttgcagcagtaacgatgacagaagaa

SEQ ID NO: 738465 - DNA, 120 bp, Artificial Sequence
  ENSG00000203970_2 (sequence is synthesized)
aagagtcacaagctccaagaagagagaccagcgttattaagttttcccagcacatccttcaaggcgtgtgtgtctctataatacacaagaactaaataaaaattaatgttgaaccattca

SEQ ID NO: 738466 - DNA, 120 bp, Artificial Sequence
  ENSG00000203970_3 (sequence is synthesized)
gaaccaaagtatagatttgaaagatgcgaaaaagtgagaggaatatgtaaaacgttttgtgatgatgttgagtatgattatggatactgcattaaatggagaagtcagtgctgcgtataa

SEQ ID NO: 738467 - DNA, 120 bp, Artificial Sequence
  ENSG00000203972_0 (sequence is synthesized)
gtttccactaagggctaattagagaggtagccttgaagaataaacttaccatttatataaaagggctactggactgatacacagctgaaaaccctcagttctggactgaactcccagcag

SEQ ID NO: 738468 - DNA, 120 bp, Artificial Sequence
  ENSG00000203972_1 (sequence is synthesized)
gtgtggagttgcaagagctctggaaaagatgttggtgctaaactgttctaccaaattactgatactggagaaaatgttgaagagttgctttcctgaatcactcaaggtttacggagcggt

SEQ ID NO: 738469 - DNA, 120 bp, Artificial Sequence
  ENSG00000203972_2 (sequence is synthesized)
gatgaacataaatcgtgggaacccctttcaaaaggaagtggtgttggattcatggccggatttcaaagctgttatcacccgacgacaaagagaggctgagacagataaccttgatcatta

SEQ ID NO: 738470 - DNA, 120 bp, Artificial Sequence
  ENSG00000203972_3 (sequence is synthesized)
tactaatgcctatgctgtgttctacaaggatgtcagggcttatcgacagctattggaagaatgtgatgtttttaactgggaccaagtttttcaaatacaagggctgcagagtgagttata

SEQ ID NO: 738471 - DNA, 120 bp, Artificial Sequence
  ENSG00000203972_4 (sequence is synthesized)
tgatgtttccaaagcggttgccaattcaaagcagttgaatataaagctaacttccttcaaggctgttcatttttctcctgtttcatctctgccagataccagtttcctcaaggggccttc

SEQ ID NO: 738472 - DNA, 120 bp, Artificial Sequence
  ENSG00000203972_5 (sequence is synthesized)
cccacgactaacctacctgagtgttgccaatgcggatctactcaaccggacttggtcccggggaggcaatgaacaatgtctccggtacatcgccaacctcatctcctgcttccctagtgt

SEQ ID NO: 738473 - DNA, 120 bp, Artificial Sequence
  ENSG00000203972_6 (sequence is synthesized)
gtgtgtccgggatgagaagggaaacccggtctcctggtccatcacagaccagtttgccaccatgtgccatggctacaccctgccagaacatcgcaggaaaggttacagccggctggtggc

SEQ ID NO: 738474 - DNA, 120 bp, Artificial Sequence
  ENSG00000203972_7 (sequence is synthesized)
cctcacgctggccaggaagttgcaaagccggggattcccctctcaggggaacgtcctggatgacaacacggcgtctataagcctcctgaagagtctccatgctgagttcttgccttgtcg

SEQ ID NO: 738475 - DNA, 120 bp, Artificial Sequence
  ENSG00000203972_8 (sequence is synthesized)
cttccacaggcttattctcacccctgcgactttctctggcctgcctcacctctagcccagtaaaaaactgcagtggttttattactttccctgagcatacacacactcttggctgccaac

SEQ ID NO: 738476 - DNA, 120 bp, Artificial Sequence
  ENSG00000203972_9 (sequence is synthesized)
gaatcaggggactcttgagttgttggaaagggtctggagaatatatacaggatccacttgagaagccttaatttttcgtatctcaggtttctccagtaaatagctgtgggggtgaagagt

SEQ ID NO: 738477 - DNA, 120 bp, Artificial Sequence
  ENSG00000203972_10 (sequence is synthesized)
agctgtggctgaagactgaggacgattgtcctcctgtaggatccactgtaggagaataggttctaaagccagcagttttagtgtactaggagaaattactgcatgagaacaaatgattta

SEQ ID NO: 738478 - DNA, 120 bp, Artificial Sequence
  ENSG00000203972_11 (sequence is synthesized)
acagaggaccacgtggctactgctttttgattgctgcttggacctctgctctgtattcttaaagccacaccgcttccctactgccatcatattcccctgtccccactgctatgtctcatc

SEQ ID NO: 738479 - DNA, 120 bp, Artificial Sequence
  ENSG00000203972_12 (sequence is synthesized)
aacctctgttcctaacacctctgccaccaagttctctgtagagtaacctcctttttcccctttaattacttgctctttacttctgcctaggactctagcctatagttcactgccctggga

SEQ ID NO: 738480 - DNA, 120 bp, Artificial Sequence
  ENSG00000203972_13 (sequence is synthesized)
atgttcaaatatagtggttcttacattttagtgtttatcagaatcacccagagggcaggttgcaacacacatcactaggcctctccttctacgaggtagggcccaaaatttgcatttcta

SEQ ID NO: 738481 - DNA, 120 bp, Artificial Sequence
  ENSG00000203972_14 (sequence is synthesized)
acagcttcccactgcttatttgccttggatgaatgacaatatgggcattttgatgctataaacaaatgctgtcaccatagaactagactttacctataacctatttcagcccccttattt

SEQ ID NO: 738482 - DNA, 120 bp, Artificial Sequence
  ENSG00000203972_15 (sequence is synthesized)
atagtctactttcccatataaaactaagatttatatataggggtgtttgggggtatgcaaatgaatatataacatatatgcatacacatatatatacattctcttcatttcttttatatg

SEQ ID NO: 738483 - DNA, 120 bp, Artificial Sequence
  ENSG00000203972_16 (sequence is synthesized)
tatactcatagaattttgataagataataaattttaaccctttgattacatatgaaaaatttgaggaccagagaaaataaatgactttttcaagattatattctttataatcagtactgg

SEQ ID NO: 738484 - DNA, 120 bp, Artificial Sequence
  ENSG00000203972_17 (sequence is synthesized)
agtactggaggcaaagccagaatgctgccattttaattccaatctgttattttcactaaatcatgtatccttttttataatgaaaattaaaatgcttacataattaaaatattaatttta

SEQ ID NO: 738485 - DNA, 120 bp, Artificial Sequence
  ENSG00000203985_0 (sequence is synthesized)
cttggtgacaatgcagggaacccgtgctgagctctctgcacacagccccagtcgggcagcaggaaaccgaagacatgaacaaggtcttcccccagggagagaatggctacactgctgctg

SEQ ID NO: 738486 - DNA, 120 bp, Artificial Sequence
  ENSG00000203985_1 (sequence is synthesized)
aatccaaagcccaccctggaggggaagcaggcggcggccacctctgctgctcacgtcgcggggcctgcctctctgcctctctgctgctcctcctggcaactgtggcggccctcatcgcct

SEQ ID NO: 738487 - DNA, 120 bp, Artificial Sequence
  ENSG00000203985_2 (sequence is synthesized)
tggtcaccattcttggactcccatcatgcaccccaggagcccaagcttgtataacactgacaaacaggacaggcttcttgtgccatgaccagaggagctgcattccagccagtggggtct

SEQ ID NO: 738488 - DNA, 120 bp, Artificial Sequence
  ENSG00000203985_3 (sequence is synthesized)
gtgatggcgttcgcacctgtacccacggcgaggacgaggatgagagcttgtgccgagatgtgccccagagcctcccccacttccttgtggcccactgtggagacccggcctcctggatct

SEQ ID NO: 738489 - DNA, 120 bp, Artificial Sequence
  ENSG00000203985_4 (sequence is synthesized)
actcagaccaaaaatgtgatggcactaacaactgcggggactgttcagatgaactgagcccagtaactgtgtgcccaccctgcggccctgggtggtggcgctgtccttcaaccttcttca

SEQ ID NO: 738490 - DNA, 120 bp, Artificial Sequence
  ENSG00000203985_5 (sequence is synthesized)
agtactgcgactgtataccgaggcatctctgccgcgaccatgtacagcactgctccgactggtccgatgagtatgcctgtcccggaccctgagtgggccactcaggccagcatggaaggc

SEQ ID NO: 738491 - DNA, 120 bp, Artificial Sequence
  ENSG00000203985_6 (sequence is synthesized)
tggctggaatggcactgataacccttcacatgaaaatcaaatcctagcgcacaagggcaggaagcagcctttgaaatgggatctacacatcatttctgaataggaattttctctcctcct

SEQ ID NO: 738492 - DNA, 120 bp, Artificial Sequence
  ENSG00000203985_7 (sequence is synthesized)
tcctttcaagttgttcagcctctgcttgaatgcttccaatgaccaggagctcattaccatgttaggtggcttctaacaaagatgatgtggtggaaccccgtctctaccaaaaatacaaaa

SEQ ID NO: 738493 - DNA, 120 bp, Artificial Sequence
  ENSG00000203985_8 (sequence is synthesized)
gtctctggggccacacagaggaaatctgctaactgctccaaggcatacttgtggatcctaatctcgtcatcccttagagtgatgacatgtctggggcttaaatgacaagccgagtttagc

SEQ ID NO: 738494 - DNA, 120 bp, Artificial Sequence
  ENSG00000203985_9 (sequence is synthesized)
cttcatggatggcacatacgtgaaacatatgccacttcctacccctttggtacctaaggcagatatactgggcttggatgcaactttagcatcttccccagtttagttaacccagcaggc

SEQ ID NO: 738495 - DNA, 120 bp, Artificial Sequence
  ENSG00000203985_10 (sequence is synthesized)
tctactgatttaaccaagtgacacagcacatgaaacaggatatctggcatcctaccagtgggaagccaccccaggaagctctgagctgtagaatagaagatctggagaaagagcagcttg

SEQ ID NO: 738496 - DNA, 120 bp, Artificial Sequence
  ENSG00000203985_11 (sequence is synthesized)
aagggctcctcaccagtcttctgtctgtccaacctgctctccaccccagcactccccaccctccactctatgcccagctgcccgcctaaacagcccagttttctggaagtagggactata

SEQ ID NO: 738497 - DNA, 120 bp, Artificial Sequence
  ENSG00000203985_12 (sequence is synthesized)
ttttgatcctggagcctgaatgagctgcttctgtgcttatctttccagcttcacaccacccaggcaggcaaggatgaatatttccattagatggatgagaaaactgaggcccagagaggg

SEQ ID NO: 738498 - DNA, 120 bp, Artificial Sequence
  ENSG00000203985_13 (sequence is synthesized)
cgatgacttgtccagaatcatagagcaaagtcagcgctggaactggaacccaaatacagcctatggcaccccagcccagaaggctttccagctaccagtgtgattataccttggccaggg

SEQ ID NO: 738499 - DNA, 120 bp, Artificial Sequence
  ENSG00000203985_14 (sequence is synthesized)
cagtctctgcggggtattttaaaagtgagcttgtcaggtgcactggctcatgcctatgatcccagcactttgggacactgaggtggaagtgtcccacttgagcccaggagttcgagacca

SEQ ID NO: 738500 - DNA, 120 bp, Artificial Sequence
  ENSG00000203985_15 (sequence is synthesized)
gcctgggcaacatagggagaacctgtctctacaaaaaataggaaaaaagtagctgggtggggtggtgcatgcttgtagtcccagccactcagaaagctaagatgggaggatcgtttgagc

SEQ ID NO: 738501 - DNA, 120 bp, Artificial Sequence
  ENSG00000203985_16 (sequence is synthesized)
cactgcactccagcctgggcaacaaaccctgtctcaaaaaatttctttttaataaaaataaaataaaacatgagattgagggtcagcaagtgtgacacccatattctgaaagagagactt

SEQ ID NO: 738502 - DNA, 120 bp, Artificial Sequence
  ENSG00000203985_17 (sequence is synthesized)
agcaagtgtgacacccatattctgaaagagagacttgggatctgcctgatgggagggctcctgtcgagggagacagacatatccccactgaaaaattaataaaattggttttacatatca

SEQ ID NO: 738503 - DNA, 87 bp, Artificial Sequence
  ENSG00000203985_18 (sequence is synthesized)
acaccactgcactccagcctgatgaaacaaaacacaaacacaaacaaagacgaagggaatctgcttccatgatttcatgcctgtctc

SEQ ID NO: 738504 - DNA, 120 bp, Artificial Sequence
  ENSG00000203989_0 (sequence is synthesized)
aggaggtctctaagtggatacactgttgctgagtctagacaccagaagaacgttgcaggcggcgactcacagttctagcactgcctaggagagcgtggtggccccagctcagaatctgca

SEQ ID NO: 738505 - DNA, 120 bp, Artificial Sequence
  ENSG00000203989_1 (sequence is synthesized)
gaagtgcacagctccatccacaccactcagggtatggagcctccggaccagtgtagccagtatatgaccagcttgctcagccctgcagtcgacgacgagaaagaactacaggatatgaat

SEQ ID NO: 738506 - DNA, 120 bp, Artificial Sequence
  ENSG00000203989_2 (sequence is synthesized)
gctatggtgctgtcgcttactgaagaggtcaaagaggaggaagaggatgcacagcctgagcctgagcaaggcacagcagcaggagaaaagttaaagtcggcaggagcccaaggcggagaa

SEQ ID NO: 738507 - DNA, 120 bp, Artificial Sequence
  ENSG00000203989_3 (sequence is synthesized)
gaaaaagatggcggcggagaagaaaaagatggcggcggcgccggagttcctggccacctatgggaaggaaacctcgagggcaccagcggcagcgatggcaacgttgaggacagcgaccag

SEQ ID NO: 738508 - DNA, 120 bp, Artificial Sequence
  ENSG00000203989_4 (sequence is synthesized)
agcgagaaggaacctgggcagcagtattcgcgcccacagggcgccgtcggggggctggagcctggcaacgcgcagcagcccaacgtccacgccttcaccccattgcagctgcaggagctg

SEQ ID NO: 738509 - DNA, 120 bp, Artificial Sequence
  ENSG00000203989_5 (sequence is synthesized)
gagtgcattttccaacgcgagcagttccccagtgagttcctgcgaaggaggctggcaagaagcatgaatgtgactgaactcgcagtgcagatttggtttgagaatagaagagccaaatgg

SEQ ID NO: 738510 - DNA, 120 bp, Artificial Sequence
  ENSG00000203989_6 (sequence is synthesized)
aggagacatcagagggcattaatggcaagaaacatgctgcccttcatggcagtgggccagcctgtcatggtaaccgcagctgaggccataacggcacccttgttcatcagcgggatgaga

SEQ ID NO: 738511 - DNA, 120 bp, Artificial Sequence
  ENSG00000203989_7 (sequence is synthesized)
gatgattacttctgggaccacagccattccagcagcctgtgtttccccatgccaccctttcctcctccgtccttgccccttccactcatgcttcttccacctatgccacccgctggccag

SEQ ID NO: 738512 - DNA, 120 bp, Artificial Sequence
  ENSG00000203989_8 (sequence is synthesized)
gctgaatttggcccattcccttttgttatcgtgccttctttcacattccccaatgtctaagggatagcctctgtgccactttttgccagagtgtctttgagccagattcatattttgcat

SEQ ID NO: 738513 - DNA, 120 bp, Artificial Sequence
  ENSG00000203989_9 (sequence is synthesized)
agcaccccatcaaaagtagttcatcaaatgtctattaaacgttttaaagaaaagtacatcattgacccatttttagggcacttgtaaaaatgtttctataaatatgtgaagggtatgtac

SEQ ID NO: 738514 - DNA, 120 bp, Artificial Sequence
  ENSG00000203989_10 (sequence is synthesized)
atttgttttgtgtgtcacatggggtcagtaagttctcaataaaaattgttaagaaatgccattcaaaccgaatgtcacggactctcgtctcatgcagtaatcttgagtcaccatctgggg

SEQ ID NO: 738515 - DNA, 120 bp, Artificial Sequence
  ENSG00000203989_11 (sequence is synthesized)
tgcccccattgataccaggtacatgtgcaggatggggtggtgtgagtccctaatgagagaatagtgtgtttcaagttactgccagggtggaaaacagcaaaaccaaaatggtatcgggaa

SEQ ID NO: 738516 - DNA, 120 bp, Artificial Sequence
  ENSG00000203989_12 (sequence is synthesized)
ggaagccatgcccactcttaaaaattcattaagttttttcttgctatggaagacttctttaaagtaattttcttgtaaaagtgtaagtgtaaataatgccatgaaattatacacttattt

SEQ ID NO: 738517 - DNA, 120 bp, Artificial Sequence
  ENSG00000203989_13 (sequence is synthesized)
aatggctaaaatggcaaatttttatatggtttaccacaacaaaagaaaagaaaaaatataccaaaaagtttttaaaaagtgatcatgaacattgtggtcatcctgtgaagtgattgcaat

SEQ ID NO: 738518 - DNA, 120 bp, Artificial Sequence
  ENSG00000203989_14 (sequence is synthesized)
gcctgcagataaggagtgatggttacaacagtattttctctgaaaattatttgatggccagtttcataatgattatgttttcagcctgaaggaaaattccattttcttgggtgagcatga

SEQ ID NO: 738519 - DNA, 120 bp, Artificial Sequence
  ENSG00000203989_15 (sequence is synthesized)
actttctgtcaggctgtctgctgcttttcattccccacttctctcttcacaattgtgggtgtcaagcttcagccacgcaattgcatttggtgtgagggttttgcaaggagaaggaggttt

SEQ ID NO: 738520 - DNA, 120 bp, Artificial Sequence
  ENSG00000203989_16 (sequence is synthesized)
attcatacccctgaagccacaagccttggtgggaataaggaaagtccatgaattcactatgcattaatgcatgcctcttggccaagtggattcttttttcttctccgattgagattttcc

SEQ ID NO: 738521 - DNA, 120 bp, Artificial Sequence; identical to SEQ ID NO: 294110
  ENSG00000203989_17 (sequence is synthesized)

SEQ ID NO: 738522 - DNA, 120 bp, Artificial Sequence
  ENSG00000203989_18 (sequence is synthesized)
cattttgtgccagtcggtctattcctgctcattattttgttttttctacattcagactgaaacatttggtagcctacagatactcagaaataggcaaagaaaggtaaaaggggaggaggg

SEQ ID NO: 738523 - DNA, 120 bp, Artificial Sequence
  ENSG00000203989_19 (sequence is synthesized)
gagattgaagtcatacttccattatccctccccgtggttatcagattcataaaatttttacaccatcaaaagacatttttagccatatatgtttcctttatgtagaaaatgagatctcct

SEQ ID NO: 738524 - DNA, 120 bp, Artificial Sequence; identical to SEQ ID NO: 294113
  ENSG00000203989_20 (sequence is synthesized)

SEQ ID NO: 738525 - DNA, 120 bp, Artificial Sequence
  ENSG00000203989_21 (sequence is synthesized)
agaaattcaaatttgtagaattatagttaggatgtcatttactgaccttgaacaacacattgtttaggtagcatacaatgggactagttcaaggggctgggtggagaacaagttacaatt

SEQ ID NO: 738526 - DNA, 120 bp, Artificial Sequence; identical to SEQ ID NO: 294115
  ENSG00000203989_22 (sequence is synthesized)

SEQ ID NO: 738527 - DNA, 120 bp, Artificial Sequence
  ENSG00000203995_0 (sequence is synthesized)
gctagctccgtgtgcctcgcaggcgtggtgggcgcgtcctggcagccgcccgcttggttctcgcgggatccgggctccggctcgacgccggctctctttttgacgccccgccgccggggt

SEQ ID NO: 738528 - DNA, 120 bp, Artificial Sequence
  ENSG00000203995_1 (sequence is synthesized)
tgccatggttcatttcttgcacccgggccacacgccccggaacatcgtccctcctgacgctcagaaggatgccctgggctgctgcgtggtacaggaagaggcatctccctacactttggt

SEQ ID NO: 738529 - DNA, 120 bp, Artificial Sequence
  ENSG00000203995_2 (sequence is synthesized)
caacatctgcctgaatgtcctgattgctaacctggagaaattgtgttctgaaagacctgatggaacactgtgccttccggagcattggagtttccctcaggaagtagccgagcgatttct

SEQ ID NO: 738530 - DNA, 120 bp, Artificial Sequence
  ENSG00000203995_3 (sequence is synthesized)
cagggtgatgacttggcaaggcaagctgactgacagaacagccagcattttccgaggcaaccaaatgaaactgaagctggtcaatatccaaaaagctaaaatctctacagctgcattcat

SEQ ID NO: 738531 - DNA, 120 bp, Artificial Sequence
  ENSG00000203995_4 (sequence is synthesized)
aaaagccttctgccgtcataagctcattgaactgaatgctactgcagtgcacgctgacctcccagttccagacatcataagtggactctgcagcaataggtggatccagcaaaacctcca

SEQ ID NO: 738532 - DNA, 120 bp, Artificial Sequence
  ENSG00000203995_5 (sequence is synthesized)
gtgtctcctgttagactcgacaagcatccctcaaaattcaagattactgttctttagtcagctcactggtcttcgcattttaagtgtttttaatgtttgttttcatactgaagacctggc

SEQ ID NO: 738533 - DNA, 120 bp, Artificial Sequence
  ENSG00000203995_6 (sequence is synthesized)
taatgtttctcagttaccaagactggaaagcttagatatctctaatactctagtcactgatatttctgcactgcttacctgtaaggatcgattgaagtctctcacaatgcactatctgaa

SEQ ID NO: 738534 - DNA, 120 bp, Artificial Sequence
  ENSG00000203995_7 (sequence is synthesized)
atgcctggccatgaccaaatcacaaattcttgcagtcattagagaacttaaatgtctgcttcaccttgatatttctgatcacaggcaactcaaatcagacctagcttttcatttgctaca

SEQ ID NO: 738535 - DNA, 120 bp, Artificial Sequence
  ENSG00000203995_8 (sequence is synthesized)
gcagaaggatatcctgcccaatgttgtgtcattggatatttctgggggcaattgcatcactgatgaagctgtagaactgtttatacgactgcggcctgccatgcaatttgtgggactatt

SEQ ID NO: 738536 - DNA, 120 bp, Artificial Sequence
  ENSG00000203995_9 (sequence is synthesized)
ggccacggatgctggctcttctgacttctttactacaaagcaaggcttgagggttgctggaggagccagtatgagtcagatttcagaagcactgagccgatacaggaacagatcatgttt

SEQ ID NO: 738537 - DNA, 120 bp, Artificial Sequence
  ENSG00000203995_10 (sequence is synthesized)
tgtgaaggaagccctccacaggctgttcacagagacattttcaatggaggtaaccatgcctgctattttaaagcttgtggctataggaatgaggaatcacccattggatttgcgagtgca

SEQ ID NO: 738538 - DNA, 120 bp, Artificial Sequence
  ENSG00000203995_11 (sequence is synthesized)
gttcacagccagtgcttgcgctctcaacctaacacgccagggcctggccaaggggatgcctgttcgcctgttgtcagaggtcacctgtctacttttcaaggctctgaaaaatttccccca

SEQ ID NO: 738539 - DNA, 120 bp, Artificial Sequence
  ENSG00000203995_12 (sequence is synthesized)
ttaccagcagttacagaagaattgtcttctctccttaaccaattccaggattcttgtggatgttccatttgacaggtttgatgctgccaagtttgtcatgagatggctctgtaagcatga

SEQ ID NO: 738540 - DNA, 120 bp, Artificial Sequence
  ENSG00000203995_13 (sequence is synthesized)
aaaccccaagatgcaaacaatggcagtgagtgtcacctctattctggctctgcagctctcacctgagcaaacggcacagcttgaagagcttttcatggcagttaaggaacttctagcaat

SEQ ID NO: 738541 - DNA, 120 bp, Artificial Sequence
  ENSG00000203995_14 (sequence is synthesized)
agtaaaacaaaagactactgagaatttagatgatgtcaccttcttgtttactttgaaagcactttggaatcttacagatgggtctccagctgcctgcaagcacttcattgaaaatcaagg

SEQ ID NO: 738542 - DNA, 120 bp, Artificial Sequence
  ENSG00000203995_15 (sequence is synthesized)
attgcaaatcttcatccaagtcttggagaccttttcagagtcagcaatacaaagcaaagtacttggtcttttgaacaacatagcagaagtcagagagctctcttccaagctggtgaccga

SEQ ID NO: 738543 - DNA, 120 bp, Artificial Sequence
  ENSG00000203995_16 (sequence is synthesized)
agatgtgctgaagcatatcaacagtttactctgtagcagggaaatggaagtcagctattttgctgcaggtatcatagcccacctgacatctgacagacagctttggatatcccgtgactt

SEQ ID NO: 738544 - DNA, 120 bp, Artificial Sequence
  ENSG00000203995_17 (sequence is synthesized)
ccagaggcgtactcttctccaagatctgcatgcaaccatacagaattggccaagttcaagttgtaagatgacagcattggtgacctatagatctttcaagacatttttcccgctccttgg

SEQ ID NO: 738545 - DNA, 120 bp, Artificial Sequence
  ENSG00000203995_18 (sequence is synthesized)
tctctcaaccagaggttcagctctgggcactatgggctatgtatcatgtctgcagtaaaaatcccagcaaatactgcaaaatgttagttgaagaagaaggattgcagcttttgtgtgata

SEQ ID NO: 738546 - DNA, 120 bp, Artificial Sequence
  ENSG00000203995_19 (sequence is synthesized)
tccaggagcacagtgaggcaacccccaaagcacagcagattgcagcctccattctggatgacttcagaatgcatttcatgaattatcagaggcccactctgtgtcaaatgcccttctgaa

SEQ ID NO: 738547 - DNA, 120 bp, Artificial Sequence
  ENSG00000203995_20 (sequence is synthesized)
cctaaggaatttcagaggtgtgtgctcttcctcaatgtcaggtgttctgccctggcagtaattgcacatcagttgtcattggagtttgtgagttggctgtctcattggcctttgattgtt

SEQ ID NO: 738548 - DNA, 120 bp, Artificial Sequence
  ENSG00000203995_21 (sequence is synthesized)
gattttatatatgttacaaaaggttggatttgtatgatagctgtaatcccaagtcaagttggactcattctgcagcctttcagcagcaattttgaagactcaaaccgtggactctgggaa

SEQ ID NO: 738549 - DNA, 120 bp, Artificial Sequence
  ENSG00000203995_22 (sequence is synthesized)
ggcctgggagcttgtgttggaacagctatgcaagttacttttctctagccttggacaattttttccctttgggagcttgtcatgggagtgggacctgttcactagaagagaaaggaaacc

SEQ ID NO: 738550 - DNA, 120 bp, Artificial Sequence
  ENSG00000203995_23 (sequence is synthesized)
tacagggagactttgatatttatattaaatttcctttgttgttatcgtcatgtgaagctatgagaaaagcttgggaagcatatgcttcaaaatgtagtgtttagaaggcagaacccctgt

SEQ ID NO: 738551 - DNA, 82 bp, Artificial Sequence
  ENSG00000203995_24 (sequence is synthesized)
tatgcttcaaaatgtagtgtttagaaggcagaacccctgttggagagcggggaaaagaatttatttatttatttatttatct

SEQ ID NO: 738552 - DNA, 73 bp, Artificial Sequence
  ENSG00000203995_25 (sequence is synthesized)
ctttgggaggccaaggcaggtggattgtctgaactcaggagttcgagatcagccttgccaacgtggtaaaact

SEQ ID NO: 738553 - DNA, 87 bp, Artificial Sequence
  ENSG00000203995_26 (sequence is synthesized)
ttttacaattttgggtgtctatctttggcatgtttcctgttatgtgagcatgacatgctgtgtatgtgagtgagcttgtagggcgtg

SEQ ID NO: 738554 - DNA, 120 bp, Artificial Sequence
  ENSG00000203995_27 (sequence is synthesized)
gcatgacatgctgtgtatgtgagtgagcttgtagggcgtggtgggacttaggcatttgcagacagtgtttagatgaaagattacatgtaatgataaatctgaatccctccattttatttg

SEQ ID NO: 738555 - DNA, 120 bp, Artificial Sequence
  ENSG00000203995_28 (sequence is synthesized)
ggtggaaccatgaccaaaaatggtaggaagacgaaaggccagaaagagactttgccagagagttcacggagttttcttaccccgcatgctgactaaagaaaacatgggcttttctgaaac

SEQ ID NO: 738556 - DNA, 120 bp, Artificial Sequence
  ENSG00000203995_29 (sequence is synthesized)
cagcttcaactacagtataaactatatcagaagcttacttgataagccttgcggagctgctctgaggaatagtgtgaattccttccttgccttattgttgactgttaatgaacatgtttt

SEQ ID NO: 738557 - DNA, 120 bp, Artificial Sequence
  ENSG00000203995_30 (sequence is synthesized)
gtcatttatctgtttaagtttttcagaaaataaaagtaaatttctgttagcacattttaggattagatttttgtgcttttggctggcttggttcagattcttaactagagtaccatgtac

SEQ ID NO: 738558 - DNA, 120 bp, Artificial Sequence
  ENSG00000203995_31 (sequence is synthesized)
tgtctttggaaatcaaatgaggaagaagctcattctcttactctaaaccatgttccaaactattaccagagtccaaccagataagcagaatttgtaaccttacttccttccatagtcctt

SEQ ID NO: 738559 - DNA, 120 bp, Artificial Sequence
  ENSG00000203995_32 (sequence is synthesized)
aaactgtactgtattttttcacactcttgcatgattccaaaaggatatcttcctgacctgggttctagtacctcagagcattgttatcagatgctagcttattctaatgtgaggatgtgt

SEQ ID NO: 738560 - DNA, 120 bp, Artificial Sequence
  ENSG00000203995_33 (sequence is synthesized)
taggggaactagtgtgttaagtccaattctgtacaagacatcctttcaagttctgtgtcattcacaacaatcctcacgggtaggtgagttttattttcctcacttaacagatgagaaaaa

SEQ ID NO: 738561 - DNA, 120 bp, Artificial Sequence
  ENSG00000203995_34 (sequence is synthesized)
gggaatatcctctcaagccctgaggtgcagggctgggaaggagtgggtgagcggctgggtcgtggcaggttggtctggggaggctggggaggctggggaggcgggaggagaacggttggc

SEQ ID NO: 738562 - DNA, 80 bp, Artificial Sequence
  ENSG00000203995_35 (sequence is synthesized)
gaggccgcccggggggtggggtctgcggcgggccggcccccgcgtgcgcgtcgcctcgccgggcatttcaaaagctcgcc

SEQ ID NO: 738563 - DNA, 120 bp, Artificial Sequence
  ENSG00000204001_0 (sequence is synthesized)
atatgccaggagggtggctgggcaggctgctgtctaggccaggctaacccctgcggtgggcgtgggtgtcaccagggccgatggcgcttgtgcagaaacccacgtctctgagctgccagc

SEQ ID NO: 738564 - DNA, 120 bp, Artificial Sequence
  ENSG00000204001_1 (sequence is synthesized)
agccaagctgtcctgatgacattcccgggtgggcgcacaagcctgcactgtccgtatagaatcggcccaggctgtgcagcaggggaacccggagcccggaccccgccacggaggccaggc

SEQ ID NO: 738565 - DNA, 120 bp, Artificial Sequence
  ENSG00000204001_2 (sequence is synthesized)
tgccgtgcaccatcctgggtgtcctcgtggtgctccgggcgcaggtggcagcagccatggaggagctggaccggcagaagattggaggattctggagggaagtcggtgtggcctccgatc

SEQ ID NO: 738566 - DNA, 120 bp, Artificial Sequence
  ENSG00000204001_3 (sequence is synthesized)
gggtggagggcttgttcctcaccttgagcgggagtaacctgaccgtgaaggttgcatataacagctcaggaagctgtgagatagagaagatcgtgggctcagaaatagacagtacgggaa

SEQ ID NO: 738567 - DNA, 120 bp, Artificial Sequence
  ENSG00000204001_4 (sequence is synthesized)
aattcgcttttcctggccacagagagatccacgtgctggacaccgactacgagggctacgccatcctgcgggtgtccctgatgtggcggggcaggaactttcgcgtcctcaagtacttta

SEQ ID NO: 738568 - DNA, 120 bp, Artificial Sequence
  ENSG00000204001_5 (sequence is synthesized)
ctcggagccttgaggacaaggaccggctggggttctggaagtttcgggagctgacagcagacactggtctctacctggcggcccggcctgggcggtgtgccgagctcctgaaggaggagc

SEQ ID NO: 738569 - DNA, 120 bp, Artificial Sequence
  ENSG00000204001_6 (sequence is synthesized)
tgatttaatggagttcctgcctcagaccacaaggttcggagcgcccgcccacccctgcccctcctgggcaccctgcccaccaggtcacctgcacctgctctgaataaactgtgaagtcaa

SEQ ID NO: 738570 - DNA, 120 bp, Artificial Sequence
  ENSG00000204001_7 (sequence is synthesized)
atgcctggtgcagcagaggccctccccactgtcactgtcactctggtcgctggcgctgtgcctccggcctccggagctctgactgcccactgcattggaggattctggagggaagtcggt

SEQ ID NO: 738571 - DNA, 120 bp, Artificial Sequence
  ENSG00000204001_8 (sequence is synthesized)
actccgccgcgccctgcgggctttcttttccaggcctctgctcctgggtcctgcctccgaggtcaggcagggcctgtggttcctcccgacatgtcgcagaagccctagggactgttccgc

SEQ ID NO: 738572 - DNA, 120 bp, Artificial Sequence
  ENSG00000204001_9 (sequence is synthesized)
agctctagatggcccagtggggaggggctgccctgtgggcattgctgtctgatggcctgaaggcaccgcttggagggacacatgcctggggacagtgggctcacagatgtcttgctgctt

SEQ ID NO: 738573 - DNA, 120 bp, Artificial Sequence
  ENSG00000204001_10 (sequence is synthesized)
tgccaccgagcctcacagccatctgctgacctctcagagcccagcaggcccctgcccgggggttcgtggaatgcccctgggggtctcagacccactgctcagctcttggccaggctccgt

SEQ ID NO: 738574 - DNA, 120 bp, Artificial Sequence
  ENSG00000204001_11 (sequence is synthesized)
tggaacccggctgtgcacacagctaggccttattgttccccatgctgttccctgcactgttccccatgctgttccctgcactgttctctgtgctgttccctgcactgttccccatgctgt

SEQ ID NO: 738575 - DNA, 120 bp, Artificial Sequence
  ENSG00000204001_12 (sequence is synthesized)
tccctgaactattccctgtgctgttccccatgttgttccctgcactgctccctgcactgttccacatgctgtttcctgcactattccccatgctgttccctgcacttttctctgcgccat

SEQ ID NO: 738576 - DNA, 120 bp, Artificial Sequence
  ENSG00000204001_13 (sequence is synthesized)
tccccatgcgttccctgcactgttccctgcactgttccccatgctgttccctgcgctgttccccatgctgttccctgcactgttcctcatgctgttccctgcgctgttccacatgctgtt

SEQ ID NO: 738577 - DNA, 120 bp, Artificial Sequence
  ENSG00000204001_14 (sequence is synthesized)
ccctgcgctgttccccatgctgttccctgcactgttccccatgctgttccctgcaatgctccctgcactgttccccgcactgctccctgcactgttccccatgctgtttcctgcactatt

SEQ ID NO: 738578 - DNA, 120 bp, Artificial Sequence
  ENSG00000204001_15 (sequence is synthesized)
ccccatgctgttccctgcacttttctctgtgccgttccccatgcattccctgcactgttccctgcactgttccccatgctgttccctgcaatgctccctgcactgttccccgcactgctc

SEQ ID NO: 738579 - DNA, 120 bp, Artificial Sequence
  ENSG00000204001_16 (sequence is synthesized)
tccccatgctgtttcctgcaccgttccccatgctgttccctgcagggttccctgcactgttccccatgctgttccctgcacatttcatgccccagaccttcccattctcccaccaacaca

SEQ ID NO: 738580 - DNA, 120 bp, Artificial Sequence
  ENSG00000204001_17 (sequence is synthesized)
ctggatcatccttcaaaagcttctgtagtgtctccaaccactcaagtgctgggactgggtgggggcaggatggagttagaccctgcagaccctggccttcgaggtccgtccccctcagac

SEQ ID NO: 738581 - DNA, 120 bp, Artificial Sequence
  ENSG00000204001_18 (sequence is synthesized)
ctgaagttcccgggcccctggcccagtccctggccctgtcaggagcccccgtggctccgcctcccggccctgggctgggccttctcaccccttcctgtgaacaggacaccaaacaccact

SEQ ID NO: 738582 - DNA, 120 bp, Artificial Sequence
  ENSG00000204001_19 (sequence is synthesized)
ggtgggcagctccagagatgagtctgtctcctggtttggaaagagctggaacctccagggtggtgaccctaggctgccaggcagggaccctgggaggctggggtcacggggtgcagagct

SEQ ID NO: 738583 - DNA, 120 bp, Artificial Sequence
  ENSG00000204001_20 (sequence is synthesized)
gggtggggcaggggagcagaaatggcgccttttcttcggtgttctgtgcaggactgccggctgcttctgcccccgaaggtcccgtcggcggcggggcacagatcctgcgggcgctgcctc

SEQ ID NO: 738584 - DNA, 120 bp, Artificial Sequence
  ENSG00000204001_21 (sequence is synthesized)
agggctcccatgttgggcactgcgagaacccagtgtctccctcacctcgctttgtcttggccctagaggctgggcctgttaccccattttgcagattgagaaggcgctcagggagctggg

SEQ ID NO: 738585 - DNA, 120 bp, Artificial Sequence
  ENSG00000204001_22 (sequence is synthesized)
tgctttgcgcaaaaccaggcagcgaggacagaagtcccgccgtgtggccctcatcgaagccccgtggggcctccagagaccacacgggcctgagcccctgcacttctgtgtcgcaggagc

SEQ ID NO: 738586 - DNA, 120 bp, Artificial Sequence
  ENSG00000204006_0 (sequence is synthesized)
agtcatatggcttcacctaaaggtttttttaattacttgacctattttcttgctgctggtgctgtcactttgggaattggtttctttgctttggcatcagctttgtggttcctgatttgc

SEQ ID NO: 738587 - DNA, 120 bp, Artificial Sequence
  ENSG00000204006_1 (sequence is synthesized)
aaacgaagagaaatatttcaaaattccaaatttaaagcaattgatgagagatgcaggcaaagaccatcaatggcgaagattaaatctcattctcagtgtgtttttatttctcgaaatttt

SEQ ID NO: 738588 - DNA, 120 bp, Artificial Sequence
  ENSG00000204006_2 (sequence is synthesized)
catactgggagattccaattacaggaggagcaaagaaaaaaggaagcagcacatataaaagcaattaaagatcattctaaagatgaaccccaacttgcaacaaaaaatatcatttgtgat

SEQ ID NO: 738589 - DNA, 120 bp, Artificial Sequence
  ENSG00000204006_3 (sequence is synthesized)
caaagtatagaagcagctgatgactggttttctgatgattctctagtgaaaaggaactctccaatgccttctctcggggaacctctaatggaaaaagtattttcatacctgtcaaccatt

SEQ ID NO: 738590 - DNA, 120 bp, Artificial Sequence
  ENSG00000204006_4 (sequence is synthesized)
tcattagaagagggtactgaaagtgtactgaatgacactttatgaccatcaaaaagatgactacattaagggaaaatgttcatgaagaaacacagaggttgaaatataaaaccttcaaca

SEQ ID NO: 738591 - DNA, 120 bp, Artificial Sequence
  ENSG00000204006_5 (sequence is synthesized)
taatactgaatgacttttttcttttgaaaccttgtatacaatcagcttctgagtctcttaacatgtccatgctaatattgctttttttgttctttaccatagagcggctctacttccctt

SEQ ID NO: 738592 - DNA, 120 bp, Artificial Sequence
  ENSG00000204006_6 (sequence is synthesized)
gctggttcttatttctagaaacaaaattaggaagaactagagtgatgtcatgaacattaagcttaacttattgtatctcatccaaagacatattaaataaaatgagtgtatgtcaacaaa

SEQ ID NO: 738593 - DNA, 120 bp, Artificial Sequence
  ENSG00000204007_0 (sequence is synthesized)
attctcctagatcaagaagacttcctcatcaagacctcattctatttgcacagccctgcagtggagagatttattgcgtttctttcatgcaatcaacgcagactttgatgtgaacacggg

SEQ ID NO: 738594 - DNA, 120 bp, Artificial Sequence
  ENSG00000204007_1 (sequence is synthesized)
gagagacagtgcacgtgcagctgacccacggggaacagtcagccccgggcacttgaaggagaacagaggcttccctaactcaagtcgctgtctcctgccagctgaacattctagaagcaa

SEQ ID NO: 738595 - DNA, 120 bp, Artificial Sequence
  ENSG00000204007_2 (sequence is synthesized)
cctctaaggagagaatgaattctaaaagaatgctgttattggttttatttgctttttcactgatgttggttgagcgttatttcaggaatcaccaagtagaagaacttcggctctcagact

SEQ ID NO: 738596 - DNA, 120 bp, Artificial Sequence
  ENSG00000204007_3 (sequence is synthesized)
ggtttcatcctagaaaacgccctgatgttataacgaaaacagactggctcgctcctgtcctatgggaagggactttcgacaggcgggtcctggaaaaacattacagaaggcggaatatca

SEQ ID NO: 738597 - DNA, 120 bp, Artificial Sequence
  ENSG00000204007_4 (sequence is synthesized)
ctgtgggcctggccgtctttgctactggcaggtttgcagaggagtacctgaggccgttcctacactccgcaaataagcacttcatgacaggctaccgagtgatcttctacatcatggtgg

SEQ ID NO: 738598 - DNA, 120 bp, Artificial Sequence
  ENSG00000204007_5 (sequence is synthesized)
acgccttcttcaagctgcctgacatagagcccagtcctcttcgaacgttcaaagcatttaaagtgggcaccgagaggtggtggctcgatggccccctggtgcatgtgaagagcctgggtg

SEQ ID NO: 738599 - DNA, 120 bp, Artificial Sequence
  ENSG00000204007_6 (sequence is synthesized)
gggcccgttggtggcccagctccacgcctggtggtatttcagaaacaccaagaacttcccttatgagaggaggccgacctcagcagcttgcatcccgtttggacagggagatttctatta

SEQ ID NO: 738600 - DNA, 120 bp, Artificial Sequence
  ENSG00000204007_7 (sequence is synthesized)
tggcaacttgatggttggtggcacaccccataatattttagacttcatcaaagaatatctgaacggagttattcatgacatcaaaaatggactcaatagcacttatgaaaagcaccttaa

SEQ ID NO: 738601 - DNA, 120 bp, Artificial Sequence
  ENSG00000204007_8 (sequence is synthesized)
caaatatttttacctcaataaacccacctagctgttatcaccagcatacagctgggatcttgcattttctcctcctccacagatccaatacgtcaaggtcgcacatgattcccagaggaa

SEQ ID NO: 738602 - DNA, 120 bp, Artificial Sequence
  ENSG00000204007_9 (sequence is synthesized)
attatgaattacgccatgaggtttatgacgaataaatgaatcacggcaatttcttataaatgagggaagtcttaagaccttccattttttagagacatacaaatttacatccttcccaaa

SEQ ID NO: 738603 - DNA, 120 bp, Artificial Sequence
  ENSG00000204007_10 (sequence is synthesized)
taaatgtttcttcttgccattttgagccatcttatttggctaatgtaggataaagaataaaaggataattacttaatgttaatacacagtaatgttattatctatgtattgtagacaatg

SEQ ID NO: 738604 - DNA, 120 bp, Artificial Sequence
  ENSG00000204007_11 (sequence is synthesized)
tgaaaatacatttgacatagaatgaatatttttaatggagaaagactctagttgagaaaaaacattcataaaatggaaaagtagttcacgcaaaggaaaaaataaatgccaggccactca

SEQ ID NO: 738605 - DNA, 120 bp, Artificial Sequence
  ENSG00000204010_0 (sequence is synthesized)
agaactctgtggatgaaccttgaaggagcctccaagcctgaaccaaagcactacagatcacctgctatcttcatagcaccatgagtgaagaatctgatggaaagcttattgaagacagcc

SEQ ID NO: 738606 - DNA, 120 bp, Artificial Sequence
  ENSG00000204010_1 (sequence is synthesized)
tgattcagctgagatgtcactttacatggaagttgttaattgaagcccctgaaattcctgatttagaaaacaggatctgggaagagattcagttcctggacaccaaatacaatgtgggaa

SEQ ID NO: 738607 - DNA, 120 bp, Artificial Sequence
  ENSG00000204010_2 (sequence is synthesized)
tacacaacctactagcctatgtgaaacacctgaaaggccagaatgaggaagccctggtcagcttgaaaaaggctgaagacttaattcagaaagaacatgccaaccaagcagatattagaa

SEQ ID NO: 738608 - DNA, 120 bp, Artificial Sequence
  ENSG00000204010_3 (sequence is synthesized)
gtctggtgacctggggcaactttgcctgggtgtattaccacatgggcagattggcagaagcccagacttacctggacaaggtggagaacacttgcaagaagtttgcaaatccttcccgct

SEQ ID NO: 738609 - DNA, 120 bp, Artificial Sequence
  ENSG00000204010_4 (sequence is synthesized)
atagaatggagtgtccagaggtggactgtgaggaaggatgggccttggcgaagtgtggtggaaagaattatgaacgggccaagacctgctttgaaaaggctctggaagggaaccctgaaa

SEQ ID NO: 738610 - DNA, 120 bp, Artificial Sequence
  ENSG00000204010_5 (sequence is synthesized)
accctgaattcaatactgggtacgcaatcaccgtctatcgcctggataaatttaacacagcatcagggaggaataaggcattttctctgcacgtcctaaaacgagctgtcaggctaaatc

SEQ ID NO: 738611 - DNA, 120 bp, Artificial Sequence
  ENSG00000204010_6 (sequence is synthesized)
cagatgatgtatatattagggttctccttgccctgaagcttcaggatgaaggacaggaagctgaaggagaaaagtacattgaagaagctctgaccagtatatcttcacaggcctatgtct

SEQ ID NO: 738612 - DNA, 120 bp, Artificial Sequence
  ENSG00000204010_7 (sequence is synthesized)
ttcaatatgcagccaagttttatcgaagaaaagggtctgtggataaagctcttgagctcttaaaaatggccttggagacaacacccacttctgccttcctgcatcaccaaatggggcttt

SEQ ID NO: 738613 - DNA, 120 bp, Artificial Sequence
  ENSG00000204010_8 (sequence is synthesized)
agggcaagatagggaaactgtggacagattggttcaattggctatatgcaaatttgaaaagactataatgttaaagcgaacatttgagatggcctatgttgacctggctgaaacgtatgc

SEQ ID NO: 738614 - DNA, 120 bp, Artificial Sequence
  ENSG00000204010_9 (sequence is synthesized)
agaaataggccaccacagaaaggctgaggaacattttcagaaagggttacgcatgaagatctttgaagatcagctaaagcaagagattcattaccactacggccgtttccaagaacatca

SEQ ID NO: 738615 - DNA, 120 bp, Artificial Sequence
  ENSG00000204010_10 (sequence is synthesized)
tgggaaatctcaagataaagcaattacccattatttaaaaggtttgaaaatagaaaaaatgtcccattccagggaaaaacttctcaatgctttagagaaattggctaaaagatgtattca

SEQ ID NO: 738616 - DNA, 120 bp, Artificial Sequence
  ENSG00000204010_11 (sequence is synthesized)
ccagaatgtacgggttgtggaaagtgtcagcctccttgggcttatccacaaattgaaaggagaagtaagtgatgctttgctgtgctatgagagggctctgaggctggctgctgacctgaa

SEQ ID NO: 738617 - DNA, 120 bp, Artificial Sequence
  ENSG00000204010_12 (sequence is synthesized)
ccctatattttaacatagaggtcaccattatccatttaatggtcttataactaaatagaatgactatgaaattaaataatgcaaacttaaagctgttggaaatttaccttattttgagcc

SEQ ID NO: 738618 - DNA, 120 bp, Artificial Sequence
  ENSG00000204010_13 (sequence is synthesized)
ttgagaggaatgtggctgtgtggcctgagttatgtagcatgcaactgcaacttctgctttttcctgtaaatgatcaggaaaggccttgtggcaccagacataagaccccctgaaagtatc

SEQ ID NO: 738619 - DNA, 120 bp, Artificial Sequence
  ENSG00000204010_14 (sequence is synthesized)
atccctcctgatggaatggtaaagcaatctttcttggaacatagcaagtagtaaccgatcaaattgctataacgtgtgtactgaccttatgtggaaaatgctgcaaccctgtttactgcc

SEQ ID NO: 738620 - DNA, 120 bp, Artificial Sequence
  ENSG00000204010_15 (sequence is synthesized)
tatgtaagtgaaatcttaacttccccattttggaatgctgactccagtcattaggtgtctgtatttcctgagtggttaccctcaagctttgtgctcaaataaactctatacttaatcata

SEQ ID NO: 738621 - DNA, 120 bp, Artificial Sequence
  ENSG00000204019_0 (sequence is synthesized)
agttacaccaggcatcctggcccaaagtttcccaaatccaggcggctagaggcccactgcttcccaactaccagctgagggggtccgtcccgagaagggagaagaggccgaagaggaaac

SEQ ID NO: 738622 - DNA, 120 bp, Artificial Sequence
  ENSG00000204019_1 (sequence is synthesized)
atgaacttctatttactcctagcgagcagcattctgtgtgccttgattgtcttctggaaatatcgccgctttcagagaaacactggcgaaatgtcatcaaattcaactgctcttgcacta

SEQ ID NO: 738623 - DNA, 120 bp, Artificial Sequence
  ENSG00000204019_2 (sequence is synthesized)
cagacaacaatcttgcagtctacgacctctctcgggatattttaaataatttcccacactcaatagccaggcagaagcgaatattggtaaacctcagtatggtggaaaacaagctggttg

SEQ ID NO: 738624 - DNA, 120 bp, Artificial Sequence
  ENSG00000204019_3 (sequence is synthesized)
aactggaacatactctacttagcaagggtttcagaggtgcatcacctcaccggaaatccacctaaaagcgtacaggatgtaatgccagtggtggaaatcattaaagacactttgagtaga

SEQ ID NO: 738625 - DNA, 120 bp, Artificial Sequence
  ENSG00000204020_0 (sequence is synthesized)
atgatgtggctgcttttaacaacaacttgtttgatctgtggaactttaaatgctggtggattccttgatttggaaaatgaagtgaatcctgaggtgtggatgaatactagtgaaatcatc

SEQ ID NO: 738626 - DNA, 120 bp, Artificial Sequence
  ENSG00000204020_1 (sequence is synthesized)
atctacaatggctaccccagtgaagagtatgaagtcaccactgaagatgggtatatactccttgtcaacagaattccttatgggcgaacacatgctaggagcacaggtccccggccagtt

SEQ ID NO: 738627 - DNA, 120 bp, Artificial Sequence
  ENSG00000204020_2 (sequence is synthesized)
gtgtatatgcagcatgccctgtttgcagacaatgcctactggcttgagaattatgctaatggaagccttggattccttctagcagatgcaggttatgatgtatggatgggaaacagtcgg

SEQ ID NO: 738628 - DNA, 120 bp, Artificial Sequence
  ENSG00000204020_3 (sequence is synthesized)
ggaaacacttggtcaagaagacacaaaacactctcagagacagatgagaaattctgggcctttagttttgatgaaatggccaaatatgatctcccaggagtaatagacttcattgtaaat

SEQ ID NO: 738629 - DNA, 120 bp, Artificial Sequence
  ENSG00000204020_4 (sequence is synthesized)
ggtcctacgatctcattcaaatatcccacgggcatttttaccaggttttttctacttccaaattccataatcaaggctgtttttggtaccaaaggtttctttttagaagataagaaaacg

SEQ ID NO: 738630 - DNA, 120 bp, Artificial Sequence
  ENSG00000204020_5 (sequence is synthesized)
aagatagcttctaccaaaatctgcaacaataagatactctggttgatatgtagcgaatttatgtccttatgggctggatccaacaagaaaaatatgaatcagagtcgaatggatgtgtat

SEQ ID NO: 738631 - DNA, 120 bp, Artificial Sequence
  ENSG00000204020_6 (sequence is synthesized)
atgtcacatgctcccactggttcatcagtacacaacattctgcatataaaacagctttaccactctgatgaattcagagcttatgactggggaaatgacgctgataatatgaaacattac

SEQ ID NO: 738632 - DNA, 120 bp, Artificial Sequence
  ENSG00000204020_7 (sequence is synthesized)
aatcagagtcatccccctatatatgacctgactgccatgaaagtgcctactgctatttgggctggtggacatgatgtcctcgtaacaccccaggatgtggccaggatactccctcaaatc

SEQ ID NO: 738633 - DNA, 120 bp, Artificial Sequence
  ENSG00000204020_8 (sequence is synthesized)
aagagtcttcattactttaagctattgccagattggaaccactttgattttgtctggggcctcgatgcccctcaacggatgtacagtgaaatcatagctttaatgaaggcatattcctaa

SEQ ID NO: 738634 - DNA, 120 bp, Artificial Sequence
  ENSG00000204021_0 (sequence is synthesized)
atgtggcagcttttagcagcagcatgctggatgcttcttcttggatctatgtatggttatgacaagaaaggaaacaatgcaaaccctgaagctaatatgaatattagccagattatttct

SEQ ID NO: 738635 - DNA, 120 bp, Artificial Sequence
  ENSG00000204021_1 (sequence is synthesized)
tactggggttatccttatgaagagtatgatgttacaacaaaagatggttatatccttggaatttataggattccacatggaagaggatgcccagggaggacagctccaaagcctgctgtg

SEQ ID NO: 738636 - DNA, 120 bp, Artificial Sequence
  ENSG00000204021_2 (sequence is synthesized)
tatttgcagcatggcttaattgcatctgccagtaactggatttgcaacctgcccaacaacagtttggctttccttctggcagatagtggttatgacgtgtggttggggaacagccgagga

SEQ ID NO: 738637 - DNA, 120 bp, Artificial Sequence
  ENSG00000204021_3 (sequence is synthesized)
aacacttggtccagaaaacaccttaaattgtcaccgaaatcaccggaatactgggccttcagtttggatgagatggctaaatatgaccttccagccacaatcaattttatcatagagaaa

SEQ ID NO: 738638 - DNA, 120 bp, Artificial Sequence
  ENSG00000204021_4 (sequence is synthesized)
actggacagaagcgactctactacgtgggccactcacaaggcaccaccatagcttttatagcattttctacaaacccagaactggctaaaaagattaagatattttttgcactggctcca

SEQ ID NO: 738639 - DNA, 120 bp, Artificial Sequence
  ENSG00000204021_5 (sequence is synthesized)
gttgtcacagttaaatacacccaaagtcctatgaaaaaactaacaaccctttccaggcgagtagttaaggtgttgtttggtgacaaaatgttccaccctcatacattgtttgaccaattc

SEQ ID NO: 738640 - DNA, 120 bp, Artificial Sequence
  ENSG00000204021_6 (sequence is synthesized)
attgccaccaaagtgtgcaatcgaaagctattccgtcgtatttgcagcaacttcctatttactctgagtggatttgatccgcaaaacttaaatatgagtcgcttggatgtttatttgtca

SEQ ID NO: 738641 - DNA, 120 bp, Artificial Sequence
  ENSG00000204021_7 (sequence is synthesized)
cacaatcctgcgggaacatctgttcagaatatgctgcactgggctcaggctgttaattctggtcagctccaagcttttgattggggaaactctgatcagaacatgatgcacttccatcag

SEQ ID NO: 738642 - DNA, 120 bp, Artificial Sequence
  ENSG00000204021_8 (sequence is synthesized)
cttacacctcctttatacaacattactaagatggaagttccaacagcaatatggaatggtggacaggacattgtggctgatcccaaggatgttgaaaatttacttcctcaaattgctaac

SEQ ID NO: 738643 - DNA, 120 bp, Artificial Sequence
  ENSG00000204021_9 (sequence is synthesized)
cttatttattacaagctgattccacactacaatcatgtggatttttaccttggagaggatgcacctcaggaaatttaccaagacctaattatattgatggaagaatatttacaaaattaa

SEQ ID NO: 738644 - DNA, 120 bp, Artificial Sequence
  ENSG00000204022_0 (sequence is synthesized)
agagactatgagggttcactatctgtttgctggaagatatacaagacttttgaggataatacttaaatgaagatagaccggatgtataatatgctttttcttagctttcctatgactcta

SEQ ID NO: 738645 - DNA, 120 bp, Artificial Sequence
  ENSG00000204022_1 (sequence is synthesized)
cttagcaacttttgctaaaagaaacacaatatatgactgactactttgaagacacatatattggacacttaaaatcaacaaaagcagagaggtcccaaacgtggtatcttttcacaatga

SEQ ID NO: 738646 - DNA, 120 bp, Artificial Sequence
  ENSG00000204022_2 (sequence is synthesized)
tgtattttatccgaattcttggaattactcatggtgtctttcaaaattaaagatctgtgaaacctgaagcagatatgaatattagccagattatttcctactggggctaccctgatgaag

SEQ ID NO: 738647 - DNA, 120 bp, Artificial Sequence
  ENSG00000204022_3 (sequence is synthesized)
aatatgatattgtaaccgaagatggttatatccttggcctttatagaattccttattggaggacagacaataataaaaatctagctcagagggttgttgtatacttgcaacatggtttgc

SEQ ID NO: 738648 - DNA, 120 bp, Artificial Sequence
  ENSG00000204022_4 (sequence is synthesized)
ttacatctgccagcagctggatttccaatcttcccaacaatagtctgggcttcattctggcagatgctggttatgatgtgtggatgggaaatagcagaggaaatacctggtccaggaaac

SEQ ID NO: 738649 - DNA, 120 bp, Artificial Sequence
  ENSG00000204022_5 (sequence is synthesized)
acttgtacctagaaacgagttccaaagaattctgggctttcagttttgatgagatggcaaaatatgaccttccagcctctattgatttcactgtgaagcaaaccagacaagaggaaatat

SEQ ID NO: 738650 - DNA, 120 bp, Artificial Sequence
  ENSG00000204022_6 (sequence is synthesized)
ttttctactatatcaaagatagctgaaagaatcaaaatattttttgctttagcaccagttttttccacaaagtacttaaaaagtcctttaattagaatgacatacaaatggaagtcaata

SEQ ID NO: 738651 - DNA, 120 bp, Artificial Sequence
  ENSG00000204022_7 (sequence is synthesized)
gtcatggctttttcaggcaacaaagacttcttgcctaaaacctcatttaaaaaattcattggttcaaagctgtgtccactacagatttttgataagatttgcctcaatatcttgtttatg

SEQ ID NO: 738652 - DNA, 120 bp, Artificial Sequence
  ENSG00000204022_8 (sequence is synthesized)
atgtttggatatgacccaaaaaacttaaatatgagtcgtttggatgtgtatttttcacacaacccagcaggaacatctgttcaaaatatgcttcattggagtcagcttttaaattctact

SEQ ID NO: 738653 - DNA, 120 bp, Artificial Sequence
  ENSG00000204022_9 (sequence is synthesized)
catttgaaagcttatgactggggcagtcctgatctgaacttggttcattataatcagacaacgtctccattatacaacatgacaaacatgaatgtggcaactgcaatttggaatggtaaa

SEQ ID NO: 738654 - DNA, 120 bp, Artificial Sequence
  ENSG00000204022_10 (sequence is synthesized)
agtgacttgttggctgaccctgaagacgttaacattttacattctgaaatcacaaaccacatttattataaaactatttcttactacaatcatatagactctttgtttggattagatgtc

SEQ ID NO: 738655 - DNA, 120 bp, Artificial Sequence
  ENSG00000204022_11 (sequence is synthesized)
tatgatcaagtttaccatgaaatcattgatattatccaagacaatctataaagaaccatggcgctgtgtgtttaaagatctacatcattcctaatgaaatccaattcttattttttttta

SEQ ID NO: 738656 - DNA, 120 bp, Artificial Sequence
  ENSG00000204022_12 (sequence is synthesized)
agaattctcagagactatgagggttcactatctgtttgctggaagatatacaagacttttgaggataatacttaaatgaagatagaccggatggtaattcagttggataatgatcagtga

SEQ ID NO: 738657 - DNA, 120 bp, Artificial Sequence
  ENSG00000204022_13 (sequence is synthesized)
cgttgaacttcttttcatgtgttcattggccgtgtaaatgtcttcttttgagacctaacaatacttttaagactgttgcttctatatttgaactcctttaagtcattatagactgcatag

SEQ ID NO: 738658 - DNA, 120 bp, Artificial Sequence
  ENSG00000204022_14 (sequence is synthesized)
tcactacttgttgctgttattacaataactgccagacagaaaaataaatctacttcagacttttaaggaagtttcatatcttaatacttttaattgctttttaatggacactagcgggaa

SEQ ID NO: 738659 - DNA, 120 bp, Artificial Sequence
  ENSG00000204022_15 (sequence is synthesized)
actatcactaacaacctctgtagtggttttctcattttcgtcaagatgtgaatgtatttggattaacgtatgggaaaggggcttgaaaaaaataggaagctgaatttaatattgccttga

SEQ ID NO: 738660 - DNA, 120 bp, Artificial Sequence
  ENSG00000204022_16 (sequence is synthesized)
acaagaaaagcatcttaagattaagtgaatagttaacttcccatgtatcttctcgcatgctacaagaagagtcacacaagaagatacaccggccttctggtcacagagaggttgtgatgg

SEQ ID NO: 738661 - DNA, 120 bp, Artificial Sequence
  ENSG00000204022_17 (sequence is synthesized)
aacacaagctgttcttcccaggtttcctttgtggatcactttgctcttacatgttgattctctagaattttctttttctgatgagaaattagaaatgctctgaaacacaataacattatt

SEQ ID NO: 738662 - DNA, 120 bp, Artificial Sequence
  ENSG00000204022_18 (sequence is synthesized)
atgctctaggttttgaagaaaggctggtacaaatttccttttttgtctttctgattctctcctctagaaatagcagagagatgaggttagtagcagcctcagggctctttattccaacag

SEQ ID NO: 738663 - DNA, 120 bp, Artificial Sequence
  ENSG00000204022_19 (sequence is synthesized)
taagtatcatcagagtgtggtgcaaaatgcactggaatttgttaggagatctgggttgtaatcctagatctgccacttactagtagaatatgtaatggattactttttcttattcatata

SEQ ID NO: 738664 - DNA, 120 bp, Artificial Sequence
  ENSG00000204022_20 (sequence is synthesized)
attacccaaataaaagccaagtattttctccttagcttttcttcctgaaagaatgtttctttcagaaggaaacaggatgtgaaacaaatagaatgtttcttatattatagggcatcctct

SEQ ID NO: 738665 - DNA, 120 bp, Artificial Sequence
  ENSG00000204022_21 (sequence is synthesized)
caagttattttgaacattaaagtacacttcagagaggatattaatttgaaacaacctcaattaacataattttgcatatttataaaggttatacccagtagcagaaaatcttaacataga

SEQ ID NO: 738666 - DNA, 120 bp, Artificial Sequence
  ENSG00000204022_22 (sequence is synthesized)
ttttatataataatagtaattatcccccaagctatgacctcattttacaagtactgtattaaagatttaaagataattttaaaacacagcaagtgccttagagtgctctaaaggcagagc

SEQ ID NO: 738667 - DNA, 120 bp, Artificial Sequence
  ENSG00000204022_23 (sequence is synthesized)
gaataatataatatgactcagcttggggctagctaaaagatgatctcagaggagttcaaggttcccataaaaattacactacagaggtggtcccaccctgagattagagagccagctttt

SEQ ID NO: 738668 - DNA, 120 bp, Artificial Sequence
  ENSG00000204022_24 (sequence is synthesized)
tgcattcctaaatcagttaatcattgcctgaaggctacccctagaaggaggtgtgatctcttaggtgaggcagttccaatttggccatgggcaattctacagagaaaggagcaatagtaa

SEQ ID NO: 738669 - DNA, 120 bp, Artificial Sequence
  ENSG00000204022_25 (sequence is synthesized)
acccttaaaaagcaacactagggccataactagtattcataaatgtcctcctccactatccattctagatttctttacctctcagctagcctgcctgatgagcaatagtaaacccttaaa

SEQ ID NO: 738670 - DNA, 120 bp, Artificial Sequence
  ENSG00000204022_26 (sequence is synthesized)
aagcaacctaaggccataactagtactcataaatgtcctcctccaccatctattctagctttctctacctctcagctagcctgcctgatagggtaagccagaccttcatccctaggggct

SEQ ID NO: 738671 - DNA, 120 bp, Artificial Sequence
  ENSG00000204022_27 (sequence is synthesized)
aacatattcatatcaggtgatggttgcacttgttcatgtacagttaaaacagggcatagaagtaggaaaagatgactcagtggatctcctgaagagcaaatgtatttctccctttcctcg

SEQ ID NO: 738672 - DNA, 120 bp, Artificial Sequence
  ENSG00000204022_28 (sequence is synthesized)
ttttgtagcagcagacctacttccttatgatgatcagggtcaatgaacttcctggtcttcagtaatgaagagcccaaagtgaccaggcggtggtcatagccttgtttgttaggatgctta

SEQ ID NO: 738673 - DNA, 120 bp, Artificial Sequence
  ENSG00000204022_29 (sequence is synthesized)
cagtgccttggtggaagcattttctctctggagaccagggcctctagatatgtagaggctaaaattgtgagaacagatccctaaatgggttactaggagtcatggcaagctcttgttcct

SEQ ID NO: 738674 - DNA, 120 bp, Artificial Sequence
  ENSG00000204022_30 (sequence is synthesized)
cagactcctgtattctacttattggggaatcactaatatattctcaccatttttaaaagatgtacaataaatcctgaaggatagtgcccatacttacaggatgtcatctcccagctggct

SEQ ID NO: 738675 - DNA, 120 bp, Artificial Sequence
  ENSG00000204022_31 (sequence is synthesized)
ttttcccagctggcttttactgagcattcaagggcttgtttcatttttctatcaggttggcagcctcttgttgggagttatatggtaggaccagtggataccatggccatgtgccaatgg

SEQ ID NO: 738676 - DNA, 120 bp, Artificial Sequence
  ENSG00000204022_32 (sequence is synthesized)
atgtgtcaactttgctatgtaattgatccctgatttaaaatgtgttacttaaaatgtgtatgagtgcttgaattactataaaattttttattattttctctcagtaaaatgtacatattt

SEQ ID NO: 738677 - DNA, 120 bp, Artificial Sequence
  ENSG00000204022_33 (sequence is synthesized)
aagtgtgatgtgacctaattgctcacttggttatttgaaagacatccattagtgaactgtattaaacagctctgtcatacaacgggattaaatcttaataacttaccccacttatgaaaa

SEQ ID NO: 738678 - DNA, 120 bp, Artificial Sequence
  ENSG00000204022_34 (sequence is synthesized)
caattttttaaaatctttaaactgtcatgtactaaaagtttgaatttcagataaaagattttcatatagataactacaaaatttataaagaactttctacatttttttctcagctcagag

SEQ ID NO: 738679 - DNA, 120 bp, Artificial Sequence
  ENSG00000204022_35 (sequence is synthesized)
tttcattttgaatgcaataaaataaaatttaggtcttactattttcacaatttaggactttccatagactattacaatttatgtgaatttttgcttgaaaattaaagagtacttgtgtga

SEQ ID NO: 738680 - DNA, 120 bp, Artificial Sequence
  ENSG00000204025_0 (sequence is synthesized)
aagagtgttccctggtttcttgagggtgtcaattcaggggttgcttcccgttttatcctataaatacttctggctgcaaagagcctacaagcagtctgtttcctgttgcagtgtggtaag

SEQ ID NO: 738681 - DNA, 120 bp, Artificial Sequence
  ENSG00000204025_1 (sequence is synthesized)
gtaaccttttaaggtggagaccggtggcctgtttggggcagttcccctctagagggagaatttgtctctgaagtaccaggagactgcaggagattttcctgtgcttttcctacccagaca

SEQ ID NO: 738682 - DNA, 120 bp, Artificial Sequence
  ENSG00000204025_2 (sequence is synthesized)
ccagcccagaactcaggtgacttcaggagcgttcacatcctgtttggaaacaaagtctgcaaattgtttaataggccgagccttgatatccgcatccctctcagctctatcacaggtctg

SEQ ID NO: 738683 - DNA, 120 bp, Artificial Sequence
  ENSG00000204025_3 (sequence is synthesized)
ctttgctgttttctcttggctgtgacagtccgcctgatggtcattataacagcagttcaccattagtacaaacaagagtaccatacataaattctgtgcgcggtttaccaacatcatcaa

SEQ ID NO: 738684 - DNA, 120 bp, Artificial Sequence
  ENSG00000204025_4 (sequence is synthesized)
aaagttatattgttctactgttctcattctttacttgatcaccatcataatcatatcaacatcctaatttctggcctaaaccaaccacagaaccattgttagccccttatactatccatt

SEQ ID NO: 738685 - DNA, 120 bp, Artificial Sequence
  ENSG00000204025_5 (sequence is synthesized)
gtcaccaagagtccatttgctagagcttttagtgatattttatctatttagaagagcactgcagcatggattctgtgttaattcatgtactcattgatggacttgttgcttgtgtagccc

SEQ ID NO: 738686 - DNA, 120 bp, Artificial Sequence
  ENSG00000204025_6 (sequence is synthesized)
agttaataagaatagctgatgagcttttacaattcattctacaagtacaagaagttccttatgtagaagaaaatggtagagcagaagagactgaagcagatgcacctcttcccgaggagc

SEQ ID NO: 738687 - DNA, 120 bp, Artificial Sequence
  ENSG00000204025_7 (sequence is synthesized)
cttcgctacctgatctccctgatctctcagacttagactcaatacttacaccaagagaggatgaagacctaatatttgatatagatcaggctatgttagacatggataacttatatgaag

SEQ ID NO: 738688 - DNA, 120 bp, Artificial Sequence
  ENSG00000204025_8 (sequence is synthesized)
atacagtctctggtataaatgatgacttaacaggtgactaagacccaatttctgcccccgtccccagggatgtgaaaactgatcatttctctgttttaatatattcttattttctgtata

SEQ ID NO: 738689 - DNA, 120 bp, Artificial Sequence
  ENSG00000204025_9 (sequence is synthesized)
ttagcaatatgtgttttctcatagttctgcacattttcattactaataacccatataacaagtgagatttgatttacttctagcaaaagctggtcttttttcatctttgttgttattcag

SEQ ID NO: 738690 - DNA, 120 bp, Artificial Sequence
  ENSG00000204025_10 (sequence is synthesized)
aaagttctgtcttttgccatgtaggtctccctttacctgtacttactctcatgctagaatttctgatgatgggagcaaacaatagtaaagaaaagaaattccttgcctaattatggagtg

SEQ ID NO: 738691 - DNA, 120 bp, Artificial Sequence
  ENSG00000204025_11 (sequence is synthesized)
tccaatgaatgcaaatgaaaaggggaatatcccccagggtagcattacagtaaatgaatacattcacattaacaagacagtgttgggatacttttatttgaaaggatataactccttact

SEQ ID NO: 738692 - DNA, 120 bp, Artificial Sequence
  ENSG00000204025_12 (sequence is synthesized)
tatcctttaagaaagcatgtgtccgacaaaaaatgctatagcagactaagggaggtaattttaaaagagtactatctaccagataataaaagtgaagaaaggttttcaaatgactgttgc

SEQ ID NO: 738693 - DNA, 120 bp, Artificial Sequence
  ENSG00000204025_13 (sequence is synthesized)
caaggagaaaactgaaaaagctgggaccaagagttccagtgcaggactgttcttgcaaattctgaccacattgtagctactttgcactattattccccaaatggaaaaggcacactatac

SEQ ID NO: 738694 - DNA, 120 bp, Artificial Sequence
  ENSG00000204025_14 (sequence is synthesized)
caaataatcaaagagagaagtaatagaagggctaagcaaagccctacaaggactattcaccaatggaaagacaaacactcaccatattggactaaatatctatggactagatatagtcct

SEQ ID NO: 738695 - DNA, 120 bp, Artificial Sequence
  ENSG00000204025_15 (sequence is synthesized)
taggcatcaaagcaggaagatgctacaaccccataatatgtggagctggctggacccttgttttcctgggtcacctgaacagattgtactgtaatggtacctcaggaactagataagata

SEQ ID NO: 738696 - DNA, 120 bp, Artificial Sequence
  ENSG00000204025_16 (sequence is synthesized)
tattccagtgtttgctttgattctgtaattttatgtgcttaaggattgttaagatataacccccgctccaaggaatggattgttgtattaagtatgtttgctctatggagcagaattaga

SEQ ID NO: 738697 - DNA, 120 bp, Artificial Sequence
  ENSG00000204025_17 (sequence is synthesized)
gttaatagtgaaaagaaatatttaggaaataagaaaatatttaggaacaagaactagtggggacggtgttttcaggagagagaagcaaattaataaattgtcaacagttatgcgacggtt

SEQ ID NO: 738698 - DNA, 120 bp, Artificial Sequence
  ENSG00000204025_18 (sequence is synthesized)
tatgatggaaagccatgatatggagttagtttctaaacaggtttatgaacaaagccctgtttttgtcttctgcaaattagccaaccctaagatgttgctataaacagctggtaggcgatt

SEQ ID NO: 738699 - DNA, 120 bp, Artificial Sequence
  ENSG00000204025_19 (sequence is synthesized)
gacataagtcatgtatctgaaagctcaattagatggagaattattaactagtttagtccactgactggatatcgctgattgaaatcctgcatctcctccaggagaatggagtgagtggct

SEQ ID NO: 738700 - DNA, 120 bp, Artificial Sequence
  ENSG00000204025_20 (sequence is synthesized)
gatcctttatgcaaattagcccttttctgtatcttcttaagaccagtgttaaagccaattattatatagcatggcagaaaagagaggggctcatcattctgagacaagcttaaaggtgtg

SEQ ID NO: 738701 - DNA, 120 bp, Artificial Sequence
  ENSG00000204025_21 (sequence is synthesized)
aaaatcaaggaagataggctggtagatggcattagattaggtagtacaagttttcatccctatttgtttgggttaaaatatgtggggagttgtgcctatataaattcttatgtgtgatga

SEQ ID NO: 738702 - DNA, 120 bp, Artificial Sequence
  ENSG00000204025_22 (sequence is synthesized)
ttactgctagttattatcttatgattgtttacaatctgtattagctattgatctaaaccattttattgttttctttcaagagattttaactaataaactttcattcacaaatcaaaaaaa

SEQ ID NO: 738703 - DNA, 120 bp, Artificial Sequence
  ENSG00000204025_23 (sequence is synthesized)
agaaaagacaaatgtggcaaacaaaaactgcaggaccatagttggaagaggtttctgaagaggtgggagctatctcttaattatgtagacggaagaggaggttacctaccatgtgatgaa

SEQ ID NO: 738704 - DNA, 120 bp, Artificial Sequence
  ENSG00000204033_0 (sequence is synthesized)
agaaatatggcttcagtttttcattacttcctgttagttctggtctttctggatacacacgcagctcagcctttctgtctgccaggatgcacttgctcagaggagagttttggcaggact

SEQ ID NO: 738705 - DNA, 120 bp, Artificial Sequence
  ENSG00000204033_1 (sequence is synthesized)
ctgcagtgcacatctgtctccttgggaaagatccctgggaacctttctgaagagttcaagcaagtgagaattgaaaattcacccttatttgagatgccccaagggtctttcatcaacatg

SEQ ID NO: 738706 - DNA, 120 bp, Artificial Sequence
  ENSG00000204033_2 (sequence is synthesized)
agcaccttggaatacctctggctcaattttaacaatatcagtgtgatccacctaggagccctggaacacctgccagaactgagggagctgagactggaggggaacaagctctgctcagta

SEQ ID NO: 738707 - DNA, 120 bp, Artificial Sequence
  ENSG00000204033_3 (sequence is synthesized)
ccatggacagcgttccgtgccacccctctcctgagggtcttggatctcaaacgcaacaagattgatgcactccctgagctggctcttcaattcttggtcagcctgacctaccttgaccta

SEQ ID NO: 738708 - DNA, 120 bp, Artificial Sequence
  ENSG00000204033_4 (sequence is synthesized)
tcctccaataggcttacagttgtatccaagagtgtcttcctgaactggccagcctaccagaaatgccggcagcctgactgtggggctgagattctctccagcctggtggtggccctgcat

SEQ ID NO: 738709 - DNA, 120 bp, Artificial Sequence
  ENSG00000204033_5 (sequence is synthesized)
gacaacccctgggtatgtgactgtcgcctaagggggcttgtccagtttgtcaagtccattaccctcccagtcatcctggtgaattcctacctgatatgtcagggccctctgtccaaggca

SEQ ID NO: 738710 - DNA, 120 bp, Artificial Sequence
  ENSG00000204033_6 (sequence is synthesized)
gggcagctttttcatgaaactgagcttagtgcttgcatgaagccacagatctcaacccccagtgccaatatcaccatccgggcaggacagaatgtgaccctgcgatgcttggcacaggcc

SEQ ID NO: 738711 - DNA, 120 bp, Artificial Sequence
  ENSG00000204033_7 (sequence is synthesized)
agcccctcaccatccattgcatggacttatcccctgagtatgtggagagaatttgatgtgttgacatcttctactggagaagacactgctctgtcagagctggccatacctgctgcccac

SEQ ID NO: 738712 - DNA, 120 bp, Artificial Sequence
  ENSG00000204033_8 (sequence is synthesized)
ctggtagacagtggtaattacacctgcatggcctccaactccattggcaagagcaaccttgtaatctctctccatgtccagcctgcccaggccctacatgcacctgattctctttccatc

SEQ ID NO: 738713 - DNA, 120 bp, Artificial Sequence
  ENSG00000204033_9 (sequence is synthesized)
ccctcggagggcaatgcctacattgacctgcgggttgtcaagcagacagtgcatgggattttgctggagtggcttgcagtggctgacacctctaaggaggagtggttcaccctctacatt

SEQ ID NO: 738714 - DNA, 120 bp, Artificial Sequence
  ENSG00000204033_10 (sequence is synthesized)
gcatcggatgaagccttcaggaaggaggtggttcacattggccccggaatcaatacttatgctgtggatgacctccttcctggcacaaaatatgaggcctgcctcagcctagagggccag

SEQ ID NO: 738715 - DNA, 120 bp, Artificial Sequence
  ENSG00000204033_11 (sequence is synthesized)
cctccacaccagggccagtgtgtagcttttgtaacaggcagagatgctggtgggctagaggcacgtgagcacctcctgcatgtcacagtggtcctgtgtgtggtgctgcttgcagtgcct

SEQ ID NO: 738716 - DNA, 120 bp, Artificial Sequence
  ENSG00000204033_12 (sequence is synthesized)
gcccccagctgcacccctgcagccccgcagtccaaggatggctcctttagagaacatccagctgtctgtgatgacggtgaagggcacatagacactgagggggacaaggagaaaggagga

SEQ ID NO: 738717 - DNA, 120 bp, Artificial Sequence
  ENSG00000204033_13 (sequence is synthesized)
acggaagacaacagctgaacaacccaggccatggggtggaaacggcttgggcttcaagcctctgaaaccaaccctctgcagcagctccatccatttatccagcaagtatatattgagcac

SEQ ID NO: 738718 - DNA, 120 bp, Artificial Sequence
  ENSG00000204033_14 (sequence is synthesized)
ccactgtgttccaagcactgaacttgacacagggggttcaagagtaaaaagggaaacagagtctttatcttcatgataaaggggacatagtcattatcttcgtaaagttaaagtcaatga

SEQ ID NO: 738719 - DNA, 120 bp, Artificial Sequence
  ENSG00000204033_15 (sequence is synthesized)
agatttgtccatcaaattaatcattttattatacatggtgattagaaatcactaaatattactctttgcatatacttagcctataacatttacatgcttatacgtaatgtctacgtataa

SEQ ID NO: 738720 - DNA, 120 bp, Artificial Sequence
  ENSG00000204033_16 (sequence is synthesized)
tattttacatatattatcctgtaaacgaaggtagacttctacccactttttataggtgaaaaactgcagcctggacagttcaatgatacacccagagtccacatctggcaggaggcagaa

SEQ ID NO: 738721 - DNA, 120 bp, Artificial Sequence
  ENSG00000204033_17 (sequence is synthesized)
gccccattcaaaagaggttccagttccatcgtttccttgaatgcctgttttgcggtattcttgtgtctttcattgtttataaagtgtgaccctctctcttcatgacaaactcctaatgag

SEQ ID NO: 738722 - DNA, 120 bp, Artificial Sequence
  ENSG00000204033_18 (sequence is synthesized)
atcacataaatgtgatgttccaaagagctgcccatcagggtgatgagagctgttgggtaatgtgagtctctttttgtaggtgtctgttcccctgtgagcacagcccttggtgctgctggg

SEQ ID NO: 738723 - DNA, 120 bp, Artificial Sequence
  ENSG00000204033_19 (sequence is synthesized)
caggctggagccatcagcaccaaggaagagtaggggattggctgcagccctgggtctggcagagagcagactctgcagggccatacccagaaggaagagcacccatacgtccgctgcttt

SEQ ID NO: 738724 - DNA, 120 bp, Artificial Sequence
  ENSG00000204033_20 (sequence is synthesized)
cccctagtcaatgtctaaagccctcctatgaaatccatgagaggtggtcatttcctcttagccggacccatgtggaatggaggggccccaagaatcccaacatcagctcatcatcccact

SEQ ID NO: 738725 - DNA, 120 bp, Artificial Sequence
  ENSG00000204033_21 (sequence is synthesized)
gaacagcccttctaggggagaccattcccaggatttaattcacatctgtctccctgccgtttccctcactggccacatgcaaacctttctaagagtgtaaacatgaactagactcattgt

SEQ ID NO: 738726 - DNA, 120 bp, Artificial Sequence
  ENSG00000204033_22 (sequence is synthesized)
gacatctccacacgtttcctccttcccaccttttttacccattcctaatcatccttttaggcctctctcaagtgtgtacattacgtcttccacagagctttccttgacttcacacctctg

SEQ ID NO: 738727 - DNA, 120 bp, Artificial Sequence
  ENSG00000204033_23 (sequence is synthesized)
gggaaaaggacagtatgcacattgtgtccattggttgtgagacatttgcaggcaaagactgaccttcctcacggtggccactgcactcgtctaatacctggattgtgttcataatcaatg

SEQ ID NO: 738728 - DNA, 120 bp, Artificial Sequence
  ENSG00000204033_24 (sequence is synthesized)
ttagttaacaataaattttaaaaaattgaagatggctctcattttcagactaattgtccgctcatttcttcagattctactcatttgttttcttctgggcattagaaaaaaaaactctaa

SEQ ID NO: 738729 - DNA, 120 bp, Artificial Sequence
  ENSG00000204052_0 (sequence is synthesized)
gagggaacagtgccctggattccggcgggggtatggaccttaggaacggggaaggatggaagaatgggcagaagcagcagtaaccgtgcccaacgccatctccacggggcgtgcctccat

SEQ ID NO: 738730 - DNA, 120 bp, Artificial Sequence
  ENSG00000204052_1 (sequence is synthesized)
tccgctccccgtcagccctacccactcagccctgccgcctgccgcctgccagttggctgaccccactcccaagggaagagcggcctatcgctcccagctccttgccccgaaccacccagt

SEQ ID NO: 738731 - DNA, 120 bp, Artificial Sequence
  ENSG00000204052_2 (sequence is synthesized)
gtacgcgaacctcgcgggccggcgtggccttggccgggcagggggcggggcgagcgccggtgacgcggccgttgccatgggaactcgccgcccgctcgctctctggagctggagccggag

SEQ ID NO: 738732 - DNA, 120 bp, Artificial Sequence
  ENSG00000204052_3 (sequence is synthesized)
ctgccgccagccgcccgcctcaggctctctctgccagccgtgcggccaggcccgcggggtggtcggggggagccgggcggcagagaaggagggagcgggtacggcctcctagccgagacc

SEQ ID NO: 738733 - DNA, 120 bp, Artificial Sequence
  ENSG00000204052_4 (sequence is synthesized)
ggtaagccgaagcccttgagccgctcgctgccgctgccgccgccgccgccgcgaccgcgagggacaaggacaagcgccgagcagcgcctgcccaacccccggaacgcgcacccgccccaa

SEQ ID NO: 738734 - DNA, 120 bp, Artificial Sequence
  ENSG00000204052_5 (sequence is synthesized)
cagacacggaccgtgcgggccgcccccgccccagcgccgccccacttcagcccggcccgcgccctggacgcctccgcacctctggccggctccggctcagtcccggtagctcttctccgc

SEQ ID NO: 738735 - DNA, 80 bp, Artificial Sequence
  ENSG00000204052_6 (sequence is synthesized)
gctcttctccgcccccgccgcagcctccgccgcagccgcagcctccgccacagccgccgcctccacccccggccccactc

SEQ ID NO: 738736 - DNA, 120 bp, Artificial Sequence
  ENSG00000204052_7 (sequence is synthesized)
cgcccgcggccccaccaacctccgttccggccccgtacccggaggcccagccgtgggcacgatgctgcccagctccatccagatttcgggggagccgctgtccggcgccgaggtgcggga

SEQ ID NO: 738737 - DNA, 120 bp, Artificial Sequence
  ENSG00000204052_8 (sequence is synthesized)
catctgccgggccctggccggggccacgtccctggcgcagctcaaccttaacctgggcgtcgtgtccagccccagccgcatcaagcagctggctgaggctctgcggaccaaccgctccat

SEQ ID NO: 738738 - DNA, 120 bp, Artificial Sequence
  ENSG00000204052_9 (sequence is synthesized)
ccagtccctcttcctgcatgggagccccctgacagatgcggggctggccttgctgaacccagccctggccctccaccctgccctcgtggctctggacctgggggactgcatgctgggtga

SEQ ID NO: 738739 - DNA, 120 bp, Artificial Sequence
  ENSG00000204052_10 (sequence is synthesized)
tgaagccatcaacctcatctgtggcctcctgcccccagatggggccaaatctggcttgaaggagctaacgctgagtgccaaccctggcatcacccctaagggctggagccgccttgccat

SEQ ID NO: 738740 - DNA, 120 bp, Artificial Sequence
  ENSG00000204052_11 (sequence is synthesized)
tgccgtggcccacagctcccaggtccgcgtcctcaatctggattacaaccccctgggtgaccatgtggcaggaatgctggctgtagctgtggcctctagtcgtaccctagaggtcctaga

SEQ ID NO: 738741 - DNA, 120 bp, Artificial Sequence
  ENSG00000204052_12 (sequence is synthesized)
cttggagggcacagggctcaccaaccagtcagctcagaccctgctggacatggtagaaaattaccccacagctttgcggagcctggtgttggctgagaacagcattagcccagagctgca

SEQ ID NO: 738742 - DNA, 120 bp, Artificial Sequence
  ENSG00000204052_13 (sequence is synthesized)
gcaacagatctgtgacctcctctctgagggagaggaggaggaggaagtggcaggaggggctggcgacacccaggaatgggagagagggcgggagcctgctgcccaccagagaggcagcag

SEQ ID NO: 738743 - DNA, 120 bp, Artificial Sequence
  ENSG00000204052_14 (sequence is synthesized)
ctcctggatgtgccccagcgatcccagctctcagatggtgctaatgacgtcaggactaggggacagtctgttggctgagaccgagatgtgactctccactgggcctctgcacaccatttc

SEQ ID NO: 738744 - DNA, 120 bp, Artificial Sequence
  ENSG00000204052_15 (sequence is synthesized)
acttatctatgtcccgagcaccttgccccagatatcagggtcaggccctgggacttgggagggaactggggtcaggggctgcatgggggctctggcagctcctggcagtgtggtgggaag

SEQ ID NO: 738745 - DNA, 120 bp, Artificial Sequence
  ENSG00000204052_16 (sequence is synthesized)
gaagctctggaagctgtgactgagcaacagccttggggggcacttgaacccacggcaatgcctttgaacttggcagctctggctgcaacccgctggctcggaaaagattttatgaactcc

SEQ ID NO: 738746 - DNA, 120 bp, Artificial Sequence
  ENSG00000204060_0 (sequence is synthesized)
atggctgcgaagctgcgagcgcatcaggtggacgtggacccggacttcgcgccgcagagccggccgcgctcgtgtacctggcccctgccgcagcctgacttggccggcgacgaggacgga

SEQ ID NO: 738747 - DNA, 120 bp, Artificial Sequence
  ENSG00000204060_1 (sequence is synthesized)
ggactgcgggccggagcgccgggctacggccccggcgatggccccagcgccgcccctgggcgcggaggtcggaccgctgcggaaagcgaagagctctcggcggaacgcgtgggggaacct

SEQ ID NO: 738748 - DNA, 120 bp, Artificial Sequence
  ENSG00000204060_2 (sequence is synthesized)
aagagctctcggcggaacgcgtgggggaacctgtcctacgccgacctcatcaccaaagccatcgagagcgccccggacaagcggctcacgctctcgcagatctacgactggatggtccgt

SEQ ID NO: 738749 - DNA, 120 bp, Artificial Sequence
  ENSG00000204060_3 (sequence is synthesized)
tacgtgccctacttcaaggataaaggcgacagcaacagctcggccggctggaagaactccatccggcacaacctgtcgctgcacacccgtttcatccgcgtgcagaacgagggcaccggc

SEQ ID NO: 738750 - DNA, 120 bp, Artificial Sequence
  ENSG00000204060_4 (sequence is synthesized)
aagagttcgtggtggatgctgaaccccgagggcggaaagacagggaagaccccgcggcgcagggccgtgtccatggacaacggggccaagttcctgcgcatcaagggcaaggcgagcaag

SEQ ID NO: 738751 - DNA, 120 bp, Artificial Sequence
  ENSG00000204060_5 (sequence is synthesized)
caagaagaagcagctgcaggcgcccgagcgaagcccggacgacagctccccgagtgcgcccgccccggggccggtgcctgccgcagccaagtgggccgccagccccgcctcgcacgccag

SEQ ID NO: 738752 - DNA, 120 bp, Artificial Sequence
  ENSG00000204060_6 (sequence is synthesized)
agacccctgctcggggaggcggccgagctggaggacgacgaggccctggaggccctggcgccatcatcgccgctcatgtacccaagccccgccagcgcgctgtcgccggcgctgggctcg

SEQ ID NO: 738753 - DNA, 80 bp, Artificial Sequence
  ENSG00000204060_7 (sequence is synthesized)
tgtcgccggcgctgggctcgcgctgtccgggtgagctgccccgcctggccgagctgggaggcccgctgggcctgcacggc

SEQ ID NO: 738754 - DNA, 120 bp, Artificial Sequence
  ENSG00000204060_8 (sequence is synthesized)
ccgggggagctggcgctggcgggcgcagccgccgcctaccccggcaaaggggcggccccgtacgcgccgcccgcgccctcgcgcagtgccttagcccaccccatcagccttatgacgctg

SEQ ID NO: 738755 - DNA, 80 bp, Artificial Sequence
  ENSG00000204060_9 (sequence is synthesized)
agtgccttagcccaccccatcagccttatgacgctgcccggcgaggcgggcgccgcgggcctggcaccgccgggccacgc

SEQ ID NO: 738756 - DNA, 120 bp, Artificial Sequence
  ENSG00000204060_10 (sequence is synthesized)
gctctgccggggccctacgctgccgccgccgccgggccgctgggcgccgcgcccgaccgcttcccggccgacctggacctcgacatgttcagcgggagcctcgagtgcgacgtggagtcc

SEQ ID NO: 738757 - DNA, 120 bp, Artificial Sequence
  ENSG00000204060_11 (sequence is synthesized)
atcatcctcaacgacttcatggacagcgacgaaatggacttcaacttcgattcggccctgcctccgccgccgccgggcctggccggggccccgccccccaaccagagctgggtgccgggc

SEQ ID NO: 738758 - DNA, 120 bp, Artificial Sequence
  ENSG00000204060_12 (sequence is synthesized)
tgattcccgggtccctgcccccgactctagctccccaggaggcggccccagcccagctagggacccctctcggaggccggccgccggggaaggggagggaggggccggggcaccccactg

SEQ ID NO: 738759 - DNA, 120 bp, Artificial Sequence
  ENSG00000204060_13 (sequence is synthesized)
cacactcctgagatccacccccttctcctgggcaggaagcctgggagaggaggctgaattccaggctggctgggagtagggaggagcggggtgggccgcctggtgtggacggtggtcggg

SEQ ID NO: 738760 - DNA, 120 bp, Artificial Sequence
  ENSG00000204060_14 (sequence is synthesized)
gaagccaactaggagatgggccagggagcgtttacaaatcttcagtttcatttgcggaggcctagccgtgaccccgcgcccaccccaaacacggatctgattcccacttgacacactttc

SEQ ID NO: 738761 - DNA, 120 bp, Artificial Sequence
  ENSG00000204060_15 (sequence is synthesized)
ccactggtcttagtctcacccacccgaagccagcaaccctctgcggaaaactcacacctacctatatccatccaccctgagcagccctccacccccaaatcgccctccgacgaccgccac

SEQ ID NO: 738762 - DNA, 120 bp, Artificial Sequence
  ENSG00000204060_16 (sequence is synthesized)
ccccacagttcagtctccccctcccatccctgccggccctcgcttctcccctcccccgtcggagtcagtccctctcttcaaccgcccccaccccctagtactggtctcagcttctgcagc

SEQ ID NO: 738763 - DNA, 120 bp, Artificial Sequence
  ENSG00000204060_17 (sequence is synthesized)
gggcctcagccccgtccacccccaaccccgacgcccctttctccgcgccagttctggcccttctcccatatttataagtgtccggccgggacgggcggtgggcgcggcgtccccggcgcg

SEQ ID NO: 738764 - DNA, 120 bp, Artificial Sequence
  ENSG00000204060_18 (sequence is synthesized)
tatcgtaggcagtgtaccgtggccgtgccgtcagagtgtgcgtgtgcgtgtgtgccgtgtcgaggctgtgtagagtgcattgtacagcatattttcatgaataaaattgttttaaatatt

SEQ ID NO: 738765 - DNA, 120 bp, Artificial Sequence
  ENSG00000204065_0 (sequence is synthesized)
accagatccctgtttccgtggaggaaggcagacttcagactgaaggacagagaaggcaactgccctacagccctgcaggtcttcaagtctgtggttgtgggcactaacccagacaagaaa

SEQ ID NO: 738766 - DNA, 120 bp, Artificial Sequence
  ENSG00000204065_1 (sequence is synthesized)
aggaaagacctgcagtatcggtgcaggaaaggcaaagaagggaacatctcaacatggaaaagctctacaaagaaaatgaaggaaagccagagaatgaaagaaacctagaaagtgagggaa

SEQ ID NO: 738767 - DNA, 120 bp, Artificial Sequence
  ENSG00000204065_2 (sequence is synthesized)
agccagaggatgagggaagtacagaagatgaaggaaagtcagacgaggaagaaaagccggacatggaggggaagacagaatgcgagggaaagcgagaggatgagggagagccaggtgatg

SEQ ID NO: 738768 - DNA, 120 bp, Artificial Sequence
  ENSG00000204065_3 (sequence is synthesized)
agggacaactggaagatgagggaaaccaggaaaagcagggcaagtctgaaggtgaggacaagccacaaagtgagggcaagccagcctcccaggccaagccagagagccagccgcgggccg

SEQ ID NO: 738769 - DNA, 120 bp, Artificial Sequence
  ENSG00000204065_4 (sequence is synthesized)
caggaggacttacaagaaaggcatctgagcagtgaggagatgatgagagaatgtggagatgtgtcaagggctcaggaggagctaaggaaaaaacagaaaatgggtggttttcattggatg

SEQ ID NO: 738770 - DNA, 120 bp, Artificial Sequence
  ENSG00000204065_5 (sequence is synthesized)
caaagagatgtacaggatccattcgccccaaggggccaacggggtgtgaggggagtgaggggcggaggtaggggccagaaagacttagaagatgtcccatatgtttaatgtctttggcct

SEQ ID NO: 738771 - DNA, 120 bp, Artificial Sequence
  ENSG00000204065_6 (sequence is synthesized)
ttaattctgatttctctgatgggaatattgccagtcctgcttttcctggcaggcatttgccggcctatgtgctttaaccttaagctgatactttcctttaggtgtcactcttgttaccag

SEQ ID NO: 738772 - DNA, 120 bp, Artificial Sequence
  ENSG00000204065_7 (sequence is synthesized)
cagacttttgacccaactacagtgctctgtcttttagtagaggattttcacccatgtgcatggaataaatgttcatggtacattgtaaaataacaataaaaaagagttttcagaaccatg

SEQ ID NO: 738773 - DNA, 120 bp, Artificial Sequence
  ENSG00000204070_0 (sequence is synthesized)
ctttcctacgcagccgctcctgccgccgtggtcgctggagctttgcctctctaggccggcagcgcctctcctccatggtcctgtctgtcagcgctgttttgggagcccgccggtgaggcc

SEQ ID NO: 738774 - DNA, 120 bp, Artificial Sequence
  ENSG00000204070_1 (sequence is synthesized)
gggccacgctcagacacttcgatcgtcgagtctgtcactgggcatggcgggtcagttccgcagctacgtgtgggacccgctgctgatcctgtcgcagatcgtcctcatgcagaccgtgta

SEQ ID NO: 738775 - DNA, 120 bp, Artificial Sequence
  ENSG00000204070_2 (sequence is synthesized)
ttacggctcgctgggcctgtggctggcgctggtggacgggctagtgcgaagcagcccctcgctggaccagatgttcgacgccgagatcctgggcttttccacccctccaggccggctctc

SEQ ID NO: 738776 - DNA, 120 bp, Artificial Sequence
  ENSG00000204070_3 (sequence is synthesized)
catgatgtccttcatcctcaacgccctcacctgtgccctgggcttgctgtacttcatccggcgaggaaagcagtgtctggatttcactgtcactgtccatttctttcacctcctgggctg

SEQ ID NO: 738777 - DNA, 120 bp, Artificial Sequence
  ENSG00000204070_4 (sequence is synthesized)
ctggttctacagctcccgtttcccctcggcgctgacctggtggctggtccaagccgtgtgcattgcactcatggctgtcatcggggagtacctgtgcatgcggacggagctcaaggagat

SEQ ID NO: 738778 - DNA, 120 bp, Artificial Sequence
  ENSG00000204070_5 (sequence is synthesized)
acccctcaactcagcccctaaatccaatgtctagaatcaggccctttggacatcctgctgacacttgggccccttaacaccttgggctgctcagaccctccagatgaggtccagcccaga

SEQ ID NO: 738779 - DNA, 120 bp, Artificial Sequence
  ENSG00000204070_6 (sequence is synthesized)
tctgagaggaaccctggaaatgtgaagtctctgttggtttgggagagatagtgagggcctgtcaaagaaggcaggtagcagtcagcatgacagctgcaagaatgacctctgtctgttgaa

SEQ ID NO: 738780 - DNA, 120 bp, Artificial Sequence
  ENSG00000204070_7 (sequence is synthesized)
gccttggtatctgagaggtcaggaaggggacctctttgagggtaataacagaattggaaccatgccactcttgagccacaatacctgtcaccagcctgttgttttaagagagaaaaaaaa

SEQ ID NO: 738781 - DNA, 120 bp, Artificial Sequence
  ENSG00000204070_8 (sequence is synthesized)
tcaaggatatctgattggagcaaaccacttctttagtcatctgtcttacccccctgggacagctgttacctttgcagtgttgccgaatcacagcagttacctttgcagtgttgccgaatc

SEQ ID NO: 738782 - DNA, 120 bp, Artificial Sequence
  ENSG00000204070_9 (sequence is synthesized)
acagcagttctgttggagaaacgcttggtttccggatccagagccacagaaagaaatgtaggtgtgaagtattaggctgctgtcagggagaggatggcagatggaggcatcaagcacaag

SEQ ID NO: 738783 - DNA, 120 bp, Artificial Sequence
  ENSG00000204070_10 (sequence is synthesized)
gaaaatgcacaacctgtgccctgttatacacacgttcatgtgcacccaagaacctatgactttcttccagttccttctaccaggtccccatcctgctgccagctctcaacatagcaggcc

SEQ ID NO: 738784 - DNA, 120 bp, Artificial Sequence
  ENSG00000204070_11 (sequence is synthesized)
ctcccactggactccaattttttttcctgccttatttagaattctttggcgggaagggtatgatgggttcccagagacaagaagcccaaccttctggcctgggctgtgctgatagtgctg

SEQ ID NO: 738785 - DNA, 120 bp, Artificial Sequence
  ENSG00000204070_12 (sequence is synthesized)
agggagataggaatttgctgctaagatttttctttggggtggagtttcctctgtgaggggcttgcagctatccttcctgtgtatacaaatacagtattttccatggttctgcctgcactt

SEQ ID NO: 738786 - DNA, 120 bp, Artificial Sequence
  ENSG00000204070_13 (sequence is synthesized)
actttgtaatgccacggttgagattgagagagatcagcgcagccaggcaagggaactttaaagaattattaggccaccttctccctttcctggaccccagagtcattcctccatttggtt

SEQ ID NO: 738787 - DNA, 120 bp, Artificial Sequence
  ENSG00000204070_14 (sequence is synthesized)
aaaatactcagtgcagggaactcttacatcctgtctccttcacttgcagcgtcccctgctatgcctcaggtgaaccacataattcttgggtttccgttcctacttgctagtgatttctga

SEQ ID NO: 738788 - DNA, 120 bp, Artificial Sequence
  ENSG00000204070_15 (sequence is synthesized)
acatgttcaatggagcggcacacagtctagacccacttccgcattgaaaccttcactgttcctctttggtttcttcagagctttcccaagagagctgtcagttttcagctgtcagtaaca

SEQ ID NO: 738789 - DNA, 120 bp, Artificial Sequence
  ENSG00000204070_16 (sequence is synthesized)
caaatgagtttatggtaacacaaatgagttttgctatctctctgagaagctcatctgacctcctgactctcagccctacagagtagggagttgatgctgacaggatgaagatttaggaat

SEQ ID NO: 738790 - DNA, 120 bp, Artificial Sequence
  ENSG00000204070_17 (sequence is synthesized)
aaatatgcctgggaagagactgggaaggttctagggtgaggcacctcagtaactcatggtaccttggccaagttggaaggaagcagtttgttaatgaggcacagtaatcctggctgcagg

SEQ ID NO: 738791 - DNA, 120 bp, Artificial Sequence
  ENSG00000204070_18 (sequence is synthesized)
gtctaggaggtaagaccagctgggatgaccttccctgggttaatcaatttccctctagacaacacaaactgcaggcatgtgactaactttgaaagaacacccatcatgtggctgctgtca

SEQ ID NO: 738792 - DNA, 120 bp, Artificial Sequence
  ENSG00000204070_19 (sequence is synthesized)
cccttgaccagccgtggtggtggttactccatctgtggttggagcgcctctttgggattcacttcaaggtcttgtgcctatttttctgcatatcttctgtgatgacaaatctctgtcccc

SEQ ID NO: 738793 - DNA, 120 bp, Artificial Sequence
  ENSG00000204070_20 (sequence is synthesized)
tgagtgttaatttgatttttagaaatggccaaaagtcacgtgatccaaactttttttcagtaatatggagactgagctgcatggtagttggggatcaaaaatatgtgaccttaatgagat

SEQ ID NO: 738794 - DNA, 120 bp, Artificial Sequence
  ENSG00000204070_21 (sequence is synthesized)
ttttatgatttctaaagtaacaataaaagcagtttttagagttgagttccagagagggcagggcaatggcagtgacatgtttgtcattttaataataaataacatctattgagtgcttaa

SEQ ID NO: 738795 - DNA, 120 bp, Artificial Sequence
  ENSG00000204070_22 (sequence is synthesized)
gctgctatagacaaatatataagtgaataggtgtggctgtgtttcaataaaaccttatgtacaggagcagatgccaggcctatggagccatagtcagctgaacgctgttctagactttac

SEQ ID NO: 738796 - DNA, 120 bp, Artificial Sequence
  ENSG00000204070_23 (sequence is synthesized)
tcttgttgtttattactttgggcaacttaacttgtctgagtttttacgtcctcctttgtaaaatgagaataatccctttccacctgctgtgagaaacaaatgaaatcccataatggatgt

SEQ ID NO: 738797 - DNA, 120 bp, Artificial Sequence
  ENSG00000204070_24 (sequence is synthesized)
ctatgaaagcacctattggaaataggctgccgtacagatgtagggaggtattatcttctgtgctctgggaagaatgcttgttccttaggaggcttgctgagatcctggggctctgccaag

SEQ ID NO: 738798 - DNA, 120 bp, Artificial Sequence
  ENSG00000204070_25 (sequence is synthesized)
gtttgaacatgagacaggctggcacttgtttctggggagtggtggagtaaagtgggtgacagaggccagttctgggaccagctgtataatgggcctccttccattgctgttttgacttac

SEQ ID NO: 738799 - DNA, 120 bp, Artificial Sequence
  ENSG00000204070_26 (sequence is synthesized)
acagctcactgcagcctcgactcctgggcttaagcgatcctccgacctcagcctcctgagtagctgatactacaagcgcaaggcaccacatctggctaatttttaaattttttgtagaga

SEQ ID NO: 738800 - DNA, 72 bp, Artificial Sequence
  ENSG00000204070_27 (sequence is synthesized)
tgttcagagtaaatcttatttgaggcatgaatcaatcaaacataaatagagagttgaattgatcttagaggg

SEQ ID NO: 738801 - DNA, 120 bp, Artificial Sequence
  ENSG00000204070_28 (sequence is synthesized)
caatcaaacataaatagagagttgaattgatcttagagggaatgggatgcagcaaagccctacttgaccatctcccccctcccacatttggaaatccttaaacccacttatgtaggcctc

SEQ ID NO: 738802 - DNA, 120 bp, Artificial Sequence
  ENSG00000204070_29 (sequence is synthesized)
tgactgtgagattcagagccacagcagtttccacctctgctaaggccttcaggcagtgagatggctcacttcagtgcccctccttccacacatctcctagctgtatcctgagacgcctca

SEQ ID NO: 738803 - DNA, 120 bp, Artificial Sequence
  ENSG00000204070_30 (sequence is synthesized)
acctagtcactacccttctgtatgatgttggtctaaggcttccccctctctggacatgaaggcggagcctcccagcactaccagccacacaccactcaagactccagatcctgaaccctg

SEQ ID NO: 738804 - DNA, 120 bp, Artificial Sequence
  ENSG00000204070_31 (sequence is synthesized)
actctggggcccagctctgggcctggcttggggcttgcatctcacctagcctggcagtgttgttgtcacacccaccttgtatggatgccacataggcatttcaagtgatgcggagcagaa

SEQ ID NO: 738805 - DNA, 120 bp, Artificial Sequence
  ENSG00000204070_32 (sequence is synthesized)
gcgggtgcagcggcgcttgacccaacgcagggtggaggatctgcacatcaccctgggcgccgggaggtggattcgtgtgggcagcccctcaaaccagatccactggtcggctacatccag

SEQ ID NO: 738806 - DNA, 120 bp, Artificial Sequence
  ENSG00000204070_33 (sequence is synthesized)
ctgcttcatgtgccccatgggagttctattgcggtagggcttaatgaagatgactcgggggccctcggtgagtggttgcctcccctggactccagggttcaagctatcatccctcgatgt

SEQ ID NO: 738807 - DNA, 120 bp, Artificial Sequence
  ENSG00000204070_34 (sequence is synthesized)
gtggcattgccgccaatgacgttttctccttgttcctcatccctgactgcacctgggacttccactccttgtactcttttttcttagggtcccctgtggactctaatttcttggacttga

SEQ ID NO: 738808 - DNA, 120 bp, Artificial Sequence
  ENSG00000204070_35 (sequence is synthesized)
gttccttctcggagcacccgatctcctggaactcttcattattttgttttgttttattgcaggcactgttttccctggcagggagaggaaaggcagtcagcacagcaggaccgaggccct

SEQ ID NO: 738809 - DNA, 120 bp, Artificial Sequence
  ENSG00000204070_36 (sequence is synthesized)
ggttcccgagacagttgctatgtagccagctcaggggagcctgttaagaaaggctagaggggcctgcaaagaaacttctctactgcccagaggccttgtgctggtgtgaggaggtgtgat

SEQ ID NO: 738810 - DNA, 120 bp, Artificial Sequence
  ENSG00000204070_37 (sequence is synthesized)
gagcactagcagagggatgtgagagattgggaaggtgaaagccatgactagtagttaaggcccctaagaatgaatattgtctacatcatctgccactagattagggttctgtctctctgg

SEQ ID NO: 738811 - DNA, 120 bp, Artificial Sequence
  ENSG00000204070_38 (sequence is synthesized)
acttcagctgggagggtgaacagtccagtagtttttctaaattgtgctccaagaaccttagggttctgaggaggtgtctcaatgtcacctcccctgacccactggggcaggatacctctc

SEQ ID NO: 738812 - DNA, 120 bp, Artificial Sequence
  ENSG00000204070_39 (sequence is synthesized)
aggatacctctccccagctcataacaacacaattggggcttggaaatagatatttgaacagaggtttcactgctttaataaagttggaaaactgttcaagaccagcctgggcaacatggt

SEQ ID NO: 738813 - DNA, 120 bp, Artificial Sequence
  ENSG00000204070_40 (sequence is synthesized)
ccatacaaaaaaaaaatttttaagttggaaaatgatggggctagatgatcctgatccttctagctctatgtttcctgattgcctgcgactagaggccaaatcagaaagaggagcccagaa

SEQ ID NO: 738814 - DNA, 120 bp, Artificial Sequence
  ENSG00000204070_41 (sequence is synthesized)
aggtggccttgacagaaatattaaatgctgagactttcccaaagggtgtctgtaacagactgggccccctgcaaacccccagtggcaacaccatcctagccaagggcgtggagagagatg

SEQ ID NO: 738815 - DNA, 120 bp, Artificial Sequence
  ENSG00000204070_42 (sequence is synthesized)
aggccttgggctgcagataatggcaatactgtgatgataataatggctcccgctgattgagtcctcgctctatgccagactcgggacccttacaacttgggatccttactatttctgtga

SEQ ID NO: 738816 - DNA, 120 bp, Artificial Sequence
  ENSG00000204070_43 (sequence is synthesized)
agtagaaggcagtgaaacagagtggcttacagagcacaggtgttggattcagacaaacgggctcagattctgcttctgcctcttaccacctgtgtgatttgggcaagatatttaacctct

SEQ ID NO: 738817 - DNA, 120 bp, Artificial Sequence
  ENSG00000204070_44 (sequence is synthesized)
cagagccttagcttccttatctgtaaaactaggataattctgtctacctaacaggattgttgtgaagaataaactaaatgggaaaattcttaagtgcttaacactgtaggatggtactta

SEQ ID NO: 738818 - DNA, 120 bp, Artificial Sequence
  ENSG00000204070_45 (sequence is synthesized)
gcaggcaccaatcaatgttagctttcttaatactgtcatgtgacttatgaggaaacggtttgaacttgtctcggaggcatggtaaaaaaaaataaaaataaaaataaattaataaagaaa

SEQ ID NO: 738819 - DNA, 120 bp, Artificial Sequence
  ENSG00000204071_0 (sequence is synthesized)
gggagagacaacttgaggactgaggagagaggaggcccaggacagaaccccaggaacaccgccactcaaggtggcagctcagcttcctggcaggcaccactaccccccgggctctggagt

SEQ ID NO: 738820 - DNA, 120 bp, Artificial Sequence
  ENSG00000204071_1 (sequence is synthesized)
caggcagagccggtattgaaagtgggctgtggagttctggggctaagcgctcttggcaaagtcgggtaccctctctgatcagctgtcacacctggcgataatgggcatcagagagagatg

SEQ ID NO: 738821 - DNA, 120 bp, Artificial Sequence
  ENSG00000204071_2 (sequence is synthesized)
ccttgcgaggatgctgtgagctgcgtcaggtctgcgcgtctgttgttcccagcgctcttggaggcctgcaaaggaagagcaacctgtccagactccccgcaggaaaaagagaaatctcga

SEQ ID NO: 738822 - DNA, 120 bp, Artificial Sequence
  ENSG00000204071_3 (sequence is synthesized)
catggaaaaaccctacaataaaaatgaaggaaacctggaaaacgagggaaagccagaagatgaagtagagcctgatgatgaaggaaagtcagacgaggaagaaaagccagacgcggaggg

SEQ ID NO: 738823 - DNA, 120 bp, Artificial Sequence
  ENSG00000204071_4 (sequence is synthesized)
gaaaggctgagggagagccaggtgatgagggacaactggaagataagggaagccaggaaaagcagggcaagtccgaaggtgagggcaagccacaaggcgagggcaagccagcctcccagg

SEQ ID NO: 738824 - DNA, 120 bp, Artificial Sequence
  ENSG00000204071_5 (sequence is synthesized)
caaagccagagggccagccgcgggccgccgaaaagcgcccggctggagattatgtgccccggaaagcaaaaagaaaaacagacagggggacggacgattcccccaaggactctcaggagg

SEQ ID NO: 738825 - DNA, 120 bp, Artificial Sequence
  ENSG00000204071_6 (sequence is synthesized)
acttacaggaaaggcatctgagcagtgaggagatgatgagagaatgtggagatgtgtcaagggctcaggaggagctaaggaaaaaacagaaaatgggtggttttcattggatgcaaagag

SEQ ID NO: 738826 - DNA, 120 bp, Artificial Sequence
  ENSG00000204071_7 (sequence is synthesized)
atgtacaggatccattcgcccaaggggacaacggggtgtcaggggagtgaggggtggaggtaggggccaaagaggcttacacgatatcccatacctttaatgcctttggccttccattct

SEQ ID NO: 738827 - DNA, 120 bp, Artificial Sequence
  ENSG00000204071_8 (sequence is synthesized)
ccgcccgcccgcccagcggtccggtccaggcgcccgcgcagaatcagctgtctgagctgcccaggcggcgggggagcagcgagcgggcttcagcgagccgcaggaggcacaggcctgtcc

SEQ ID NO: 738828 - DNA, 120 bp, Artificial Sequence
  ENSG00000204071_9 (sequence is synthesized)
caggaggcacaggcctgtcctgggtccccgcaggtctgcgcgtctgttgttcccagcgctcttggaggcctgcaaaggaagagcaacctgtccagactccccgcaggacaggaaaaagag

SEQ ID NO: 738829 - DNA, 120 bp, Artificial Sequence
  ENSG00000204071_10 (sequence is synthesized)
agccttttgacccaactacagcgctctatattttagtagaggattttcacccatgtgcatggaaaagatgttcatgacacattgtaaaaaataaataaataaagaacagtttgcagaacc

SEQ ID NO: 738830 - DNA, 120 bp, Artificial Sequence
  ENSG00000204084_0 (sequence is synthesized)
gtagtcactgtcccggaacctggggcagcggagtcccgtgcgccctgtggtgacagctcaggagggtgtgtgcgctcagcaggggccagcatggaccagtctgtggcaatccaggagacg

SEQ ID NO: 738831 - DNA, 120 bp, Artificial Sequence
  ENSG00000204084_1 (sequence is synthesized)
ctggctgagggggaatactgcgtcatcgcggtgcaaggtgtgctgtgtgagggggacagccggcagagccgcctcctgggactcgtgcgctaccgcctggagcacggcggccaggaacac

SEQ ID NO: 738832 - DNA, 120 bp, Artificial Sequence
  ENSG00000204084_2 (sequence is synthesized)
gctctcttcctctatacgcaccggaggatggccattaccggggacgatgtctctctggaccagatagtgccagtctcgcgggattttacgctggaagaagtgtccccagatggtgaactc

SEQ ID NO: 738833 - DNA, 120 bp, Artificial Sequence
  ENSG00000204084_3 (sequence is synthesized)
tacatccttggctcagatgtgaccgtccagctggacacagcagagcttagcctcgtattccaactgccctttggttcacaaaccaggatgttcctccacgaagttgccagggcctgtcca

SEQ ID NO: 738834 - DNA, 120 bp, Artificial Sequence
  ENSG00000204084_4 (sequence is synthesized)
ggcttcgattctgcgacccgggatcctgaattcctgtggctgtctcggtataggtgcgcagagctggagctggagatgccaacgccgcgcggttgtaactcggccctagttacctggcca

SEQ ID NO: 738835 - DNA, 120 bp, Artificial Sequence
  ENSG00000204084_5 (sequence is synthesized)
gggtacgcgacaattggcggaggtggttctaactttgatggtttgagaccaaatgggaagggagtgcctatggaccaaagctccaggggtcaagataaaccagaaagcttgcaaccaaga

SEQ ID NO: 738836 - DNA, 120 bp, Artificial Sequence
  ENSG00000204084_6 (sequence is synthesized)
cagaataaatccaagtccgaaattactgacatggttcgctcctccactatcacagtgtcggacaaggctcatattttatccatgcagaagtttggactgcgagatacaattgtgaaatca

SEQ ID NO: 738837 - DNA, 120 bp, Artificial Sequence
  ENSG00000204084_7 (sequence is synthesized)
catctactacagaaagaagaggattacacctatatccagaacttcaggttttttgcgggaacatacaatgtaaatgggcagtcccccaaagaatgcctccggctgtggctgagcaatggt

SEQ ID NO: 738838 - DNA, 120 bp, Artificial Sequence
  ENSG00000204084_8 (sequence is synthesized)
atccaggccccagatgtctattgtgtagggttccaggagcttgatctgagtaaggaagcttttttctttcacgataccccaaaggaggaagagtggttcaaagctgtgtcagagggtctt

SEQ ID NO: 738839 - DNA, 120 bp, Artificial Sequence
  ENSG00000204084_9 (sequence is synthesized)
catccagatgccaaatatgcaaaggtgaagcttatccgactggttgggattatgctgctgttatatgtcaaacaggagcatgcagcttatatctcagaagtggaagccgagactgtgggg

SEQ ID NO: 738840 - DNA, 120 bp, Artificial Sequence
  ENSG00000204084_10 (sequence is synthesized)
acaggaatcatggggaggatgggcaacaagggaggcgtggcgatcaggttccagttccacaacaccagcatctgcgttgtgaattctcacttggcagcccacattgaagagtatgagagg

SEQ ID NO: 738841 - DNA, 120 bp, Artificial Sequence
  ENSG00000204084_11 (sequence is synthesized)
aggaaccaggactataaggacatttgttctcgaatgcagttttgtcagcctgacccaagccttccccctctcaccatcagcaaccatgatgtgatcttgtggctgggggacctcaactac

SEQ ID NO: 738842 - DNA, 120 bp, Artificial Sequence
  ENSG00000204084_12 (sequence is synthesized)
aggatagaagagctggatgtggaaaaagtgaaaaagctcatcgaagagaaggactttcaaatgctgtatgcatatgatcagctgaaaattcaggtggccgcaaagactgtctttgaaggc

SEQ ID NO: 738843 - DNA, 120 bp, Artificial Sequence
  ENSG00000204084_13 (sequence is synthesized)
ttcacagagggtgagctcacattccagcctacttacaagtatgatacgggctctgacgactgggataccagtgagaagtgccgtgctcctgcctggtgtgatcggattctctggaaaggg

SEQ ID NO: 738844 - DNA, 120 bp, Artificial Sequence
  ENSG00000204084_14 (sequence is synthesized)
aagaacatcactcagctgagttaccagagccacatggccctgaagaccagtgaccacaagcctgtcagctcagtgtttgacatcggggtgagggtcgtaaatgacgagctttaccggaag

SEQ ID NO: 738845 - DNA, 120 bp, Artificial Sequence
  ENSG00000204084_15 (sequence is synthesized)
acactggaggaaattgttcgctccctggataagatggaaaatgccaacattccttctgtgtccctgtccaagcgagagttctgttttcagaatgtgaagtacatgcaattgaaagtagaa

SEQ ID NO: 738846 - DNA, 120 bp, Artificial Sequence
  ENSG00000204084_16 (sequence is synthesized)
tcctttacaattcataatggacaagtaccctgtcattttgaattcatcaacaagcctgatgaagagtcttactgtaagcagtggctgaatgccaaccccagcagaggcttcctcctgcca

SEQ ID NO: 738847 - DNA, 120 bp, Artificial Sequence
  ENSG00000204084_17 (sequence is synthesized)
gattctgatgttgagattgacttggagctcttcgtaaataagatgacagctacaaagctcaactcgggtgaagacaaaattgaggacattctggttctgcacttggacaggggaaaggat

SEQ ID NO: 738848 - DNA, 120 bp, Artificial Sequence
  ENSG00000204084_18 (sequence is synthesized)
ctgtgtctgggaactacctgcccagctgttttgggtctcccattcatacactgtgttacatgagagagccaatcttggacctaccacttgaaaccattagtgagctgactctgatgccag

SEQ ID NO: 738849 - DNA, 120 bp, Artificial Sequence
  ENSG00000204084_19 (sequence is synthesized)
tatggactggagatgatgggagccagttggatagccccatggaaatccccaaagagctctggatgatggttgattacctgtaccgaaatgctgtccagcaggaagatctgtttcagcaac

SEQ ID NO: 738850 - DNA, 120 bp, Artificial Sequence
  ENSG00000204084_20 (sequence is synthesized)
caggcctgaggtcagaatttgaacatatcagggactgcttggatactggaatgattgataacctctctgccagcaatcattctgtagccgaagccctgctgcttttcctggagagccttc

SEQ ID NO: 738851 - DNA, 120 bp, Artificial Sequence
  ENSG00000204084_21 (sequence is synthesized)
cagagcctgtcatctgttacagcacctaccataactgcttggagtgttctggcaactacacagcaagcaaacaggtcatttctactctccccatattccacaaaaatgtcttccactact

SEQ ID NO: 738852 - DNA, 120 bp, Artificial Sequence
  ENSG00000204084_22 (sequence is synthesized)
tgatggcgtttttgcgagaactgctgaaaaattcagcaaaaaatcatttggatgagaatattctagctagcatatttggcagcttattgcttcgaaacccagctggtcaccaaaagcttg

SEQ ID NO: 738853 - DNA, 120 bp, Artificial Sequence
  ENSG00000204084_23 (sequence is synthesized)
atatgacagagaagaagaaggctcaagaatttattcaccagttcctctgcaacccactctgagcctctctctcctcctattttacttgaggctgccaattaccagccccacctgtttcag

SEQ ID NO: 738854 - DNA, 120 bp, Artificial Sequence
  ENSG00000204084_24 (sequence is synthesized)
ctcaagagatgccttaagataattatgtgaggccacttggtagcaagaatggcagctatttcctgagcctagtaccccaattaagcccaccattggttagcacactcagcgctgtgagtc

SEQ ID NO: 738855 - DNA, 120 bp, Artificial Sequence
  ENSG00000204084_25 (sequence is synthesized)
ttagcacactcagcgctgtgagtcgtgaagacacgggagaaaatccaccataataaaactgacattcaattttcaactttagttatttaacacagatttttttattttttattttttttt

SEQ ID NO: 738856 - DNA, 68 bp, Artificial Sequence
  ENSG00000204084_26 (sequence is synthesized)
gcaacctctgcctcctgggtactgccacgcccagctaattttttgcattttagtagagacggggtttc

SEQ ID NO: 738857 - DNA, 84 bp, Artificial Sequence
  ENSG00000204084_27 (sequence is synthesized)
ggggtttcaccgtgttgcccaggctgttctaaaactcctgaactcaggtaatctgcctgcctcggcctccccgccttttttttt

SEQ ID NO: 738858 - DNA, 66 bp, Artificial Sequence
  ENSG00000204084_28 (sequence is synthesized)
aaaatgtttttaaataactgtacttgtactcactcaccctacctccagggcatagtcagtctgggc

SEQ ID NO: 738859 - DNA, 120 bp, Artificial Sequence
  ENSG00000204084_29 (sequence is synthesized)
tactcactcaccctacctccagggcatagtcagtctgggctgagatccccatgatcagatatttgatggaaagtcctgaaaggccaatgagttggatggcaagaatgcaggcagaagctg

SEQ ID NO: 738860 - DNA, 120 bp, Artificial Sequence
  ENSG00000204084_30 (sequence is synthesized)
ctggataaaataggctacagccacctcagatgctttcagtgctctgtctgaggatgtgtatatgcatatgcaaactcgacccccgttcctgcccagataatggctcaataactctgaggc

SEQ ID NO: 738861 - DNA, 88 bp, Artificial Sequence
  ENSG00000204084_31 (sequence is synthesized)
ccccgttcctgcccagataatggctcaataactctgaggctggttgctcagcctctgagggcaatacaggcatttaaaaaattaaaat

SEQ ID NO: 738862 - DNA, 120 bp, Artificial Sequence
  ENSG00000204084_32 (sequence is synthesized)
aggagtttgggaccaggctgggcaacacagggagaccccctctctacaaaaacatttttaaaaaattagctgggtgtggtgatgcatgcctgtggtcccagttacttgggaggctgacgt

SEQ ID NO: 738863 - DNA, 120 bp, Artificial Sequence
  ENSG00000204084_33 (sequence is synthesized)
tgagcacaggagtttgaggctgcagtgacctatgaccacatcactgtacgccagcccgggtgagagagggagaccccgtctctaaaaataaaatgtaaaatcactgaaaaaatgagtgtt

SEQ ID NO: 738864 - DNA, 120 bp, Artificial Sequence
  ENSG00000204084_34 (sequence is synthesized)
aaaatgagtgttcggtgaaacaagtgggattttctgggccagcaagtcttccaaactgtatatgatgcatcctgtctccatgtgtaatatattttaatgataaatgtatttttaacagtg

SEQ ID NO: 738865 - DNA, 120 bp, Artificial Sequence
  ENSG00000204084_35 (sequence is synthesized)
gacaggctttcgattgatggagcgggcacacgggggcgggttcgtctgggggcggagcgcgcgggacgggcggcgggatgaggagcttgaggaagcaggcagggaaatgtctgccgccgc

SEQ ID NO: 738866 - DNA, 120 bp, Artificial Sequence
  ENSG00000204084_36 (sequence is synthesized)
tgagccaccgcaccgggcctaaatcaggcttttctcacagctctatgaggttatcactgtttgcatctccattttatggacaaggctcagatgtgaccgtccagctggacacagcagagc

SEQ ID NO: 738867 - DNA, 120 bp, Artificial Sequence
  ENSG00000204084_37 (sequence is synthesized)
ggcttccaccccatgcggttcaccatgagtacatagagttgtgggctctgtcttttcatggggagatgcctggtggtggtttcctattgctgcaatggtggtagctcccacctcttggtt

SEQ ID NO: 738868 - DNA, 120 bp, Artificial Sequence
  ENSG00000204084_38 (sequence is synthesized)
gggaactacctgcccagctgttttgggtctcccattcatacactgtgttacatgagagagccaatcttggacctaccacttgaaaccattagtgagctgttctggagactgagaagtcca

SEQ ID NO: 738869 - DNA, 120 bp, Artificial Sequence
  ENSG00000204084_39 (sequence is synthesized)
gggcggcggtgcgcccggccctcgggtgggcagggtcggcggtttggccagtggacgctcggggcgaagaccaaagtcctggtggccctctggaggctgggacactggggcagaagttct

SEQ ID NO: 738870 - DNA, 120 bp, Artificial Sequence
  ENSG00000204084_40 (sequence is synthesized)
gtgatgttcttcttaggcgtgcgtgacgagggtaggcgggtgggaatggggtacttgggaatccggaggctggggttttagtaaagctccgttccgaactcgctgtgtgacctcgggcca

SEQ ID NO: 738871 - DNA, 120 bp, Artificial Sequence
  ENSG00000204084_41 (sequence is synthesized)
ctcgctgcccctctctgggcctgttgctccatctgagcttgctcttcaatcctgatcttccgagtttgtcgcgtggggcgggtgggggagtggtgccctgcctacgatagagtcttcctt

SEQ ID NO: 738872 - DNA, 120 bp, Artificial Sequence
  ENSG00000204084_42 (sequence is synthesized)
tgggtgaggtatggtatgtgttggggctctgtcagttctcagcccctgtgatgatagcgcagtgtacagggctggagtcttggggagccctgtctactctgggactagaggccaggatga

SEQ ID NO: 738873 - DNA, 120 bp, Artificial Sequence
  ENSG00000204084_43 (sequence is synthesized)
agttacaggttataaaaggactaggttttttcccacccagcagttggtggataatggggagcacagaaggccagttgctgagcaggagcttgtcgtttggagatgggaggctcagggctg

SEQ ID NO: 738874 - DNA, 120 bp, Artificial Sequence
  ENSG00000204084_44 (sequence is synthesized)
aaatttgggtgagtccgtgctctgggaggacctgcagacctgtctttttttgtccagctccagggttttctgcaagggcccctggtgcttttttcccctgggtgtgtccgtgaggctcca

SEQ ID NO: 738875 - DNA, 120 bp, Artificial Sequence
  ENSG00000204084_45 (sequence is synthesized)
tttatgtgtgagctttggcatgacccctagtacctatttgtgacagtcatttgccagcaatgaagagcctgtcaagtagctgtgtaaagtgtgggccagccctccacttgctcttacaag

SEQ ID NO: 738876 - DNA, 120 bp, Artificial Sequence
  ENSG00000204084_46 (sequence is synthesized)
gcttggaaactatgaggggcagggaggagtggcatgttgcacaagagtttgtaaactgagaggaaacgaggtgagcagaggacttcctcggtgcttgtttctccttcattgcagccatca

SEQ ID NO: 738877 - DNA, 120 bp, Artificial Sequence
  ENSG00000204084_47 (sequence is synthesized)
caaggtgcgatcgaagcgcctgatggtgctgatagtttgcatcttccttgggcttatctcagagttcactatcactagagtttccatgacattctgggctatggtgctgggacgggtgag

SEQ ID NO: 738878 - DNA, 120 bp, Artificial Sequence
  ENSG00000204084_48 (sequence is synthesized)
tgggtgctgtgttctcagccagtacaccagagccaggccatgcaggcacttcattcccttagtcttctatgacaagtcaggccagctagctctgaagccagttagctgccccgactgaga

SEQ ID NO: 738879 - DNA, 120 bp, Artificial Sequence
  ENSG00000204084_49 (sequence is synthesized)
aatgtgcagggatctcaatctttcatttcctttcaaaaaacagagactagccatatgctggtgaggaattattgttacggtttcggttttatttttattttaaaataatttgaaagctga

SEQ ID NO: 738880 - DNA, 120 bp, Artificial Sequence
  ENSG00000204084_50 (sequence is synthesized)
acatggtggcgcgtacctgtagtcccagccacttgagaggctgaggtggaaggcttgagcccaggagtttgagggtgatgtgcactatgattgatcctgtgaattagttgctgcactcca

SEQ ID NO: 738881 - DNA, 120 bp, Artificial Sequence
  ENSG00000204084_51 (sequence is synthesized)
gatcctgtgaattagttgctgcactccagcctaggcaacatagtgagactgtctctaaaataaataaataaatagttttaaaaattttgtcagccaggcgtggtgactcatgcctgtaat

SEQ ID NO: 738882 - DNA, 120 bp, Artificial Sequence
  ENSG00000204084_52 (sequence is synthesized)
ttttctcttaaaatacctacagtaagtggggtgacactattaattgctaagttgctcctgctaaaattggtaagaaatggtatcaagcccctcagttctatttgggtcatctgtttccag

SEQ ID NO: 738883 - DNA, 120 bp, Artificial Sequence
  ENSG00000204084_53 (sequence is synthesized)
agttattatggcctcagaggagagttacatcttctataacaggtaggaagaaccctttgggctgcctttggatgtcgatacaggccccaagggaaacagagtagtagattgttttttcct

SEQ ID NO: 738884 - DNA, 120 bp, Artificial Sequence
  ENSG00000204084_54 (sequence is synthesized)
atatgcatatgatcaaaatacccactttttgatagcctagagaacccaaagcaaacagttgcttaaaaatgctgtttctggctgggcacgatgactcatgcctttaatcccaacactttg

SEQ ID NO: 738885 - DNA, 68 bp, Artificial Sequence
  ENSG00000204084_55 (sequence is synthesized)
aatacaaaaattagatgggtgtagtggcacatggctataatcccaggtacttggctgagatcgtgcca

SEQ ID NO: 738886 - DNA, 120 bp, Artificial Sequence
  ENSG00000204084_56 (sequence is synthesized)
aaaaaaaaaaaatttttttttatcttatcgtaatacctacagtaagtgactgggtgacactgttaattgctaagttgctgctgctaaaattggtaagaaatggtatcaagctctccagtt

SEQ ID NO: 738887 - DNA, 120 bp, Artificial Sequence
  ENSG00000204084_57 (sequence is synthesized)
ctgtttgggtcatctctgtttccagagttgttctggcctcagaggagagttacatcttctataacaggtgggaagaaccctttgggctgcctctggatgtcgatacaggccccaagggaa

SEQ ID NO: 738888 - DNA, 120 bp, Artificial Sequence
  ENSG00000204084_58 (sequence is synthesized)
acggagtagtagatttgttttttcctatatgcatatgatcaaaatacccactacttgatagcctagagaaaccaaggcaaatggttgcttaaaaatgctgtttttggctgggcgcggtgg

SEQ ID NO: 738889 - DNA, 69 bp, Artificial Sequence
  ENSG00000204084_59 (sequence is synthesized)
cgcggtggctcatgcttcaagaccaggctgggcaacatgacgaaatcctgtctctactaaaaatataaa

SEQ ID NO: 738890 - DNA, 120 bp, Artificial Sequence
  ENSG00000204084_60 (sequence is synthesized)
ttcaaatgtttttgtttgttgttttcatattcccagttggactataaactctttgttcttgtgtctcctgcatgccaagcacatttggatgcttgttggttggctgataccttttctttc

SEQ ID NO: 738891 - DNA, 120 bp, Artificial Sequence
  ENSG00000204084_61 (sequence is synthesized)
agtactcattgatcagggcctgatcaacccttctaattatgctcctgccaaaattgacttctcataaagtgttctctctacttacttcactatttcccttctcctgccctttttttatac

SEQ ID NO: 738892 - DNA, 120 bp, Artificial Sequence
  ENSG00000204084_62 (sequence is synthesized)
tttctttgctctcaccccagttattaacctctgtaagtcccattttgtcttacattcaagacccaactaaaatgtcttatttctttcagtcttataggaacatgtagttaaaagtttgac

SEQ ID NO: 738893 - DNA, 120 bp, Artificial Sequence
  ENSG00000204084_63 (sequence is synthesized)
cctctcttttgatacttatgccaagtggtaagcaaccagttttctgtgcacagtctttctcgtgcacttggatcgtgtatacagttcttggactatagtaggcacttgagaaatgattca

SEQ ID NO: 738894 - DNA, 120 bp, Artificial Sequence
  ENSG00000204086_0 (sequence is synthesized)
ctagtaaaaatgcatttttatagagatgttgggaaaggcttgcttgaaattacacgtgggacttttaatagataggcgctttgaccagctaagcaacagggctcccctcgtgtgggactt

SEQ ID NO: 738895 - DNA, 120 bp, Artificial Sequence
  ENSG00000204086_1 (sequence is synthesized)
ttagaatgtagcaaccactgacacacagggaaggattatgcgatcaggtgagaaggtggccgaccctgactggctggaagcagatgcattctggtagttgattggtccacaggtagcgtg

SEQ ID NO: 738896 - DNA, 120 bp, Artificial Sequence
  ENSG00000204086_2 (sequence is synthesized)
acgcttgtcacgtcctcagcctcccagcattcaatcgtagcctttcggacagctcgaagccttctgtggagagctcgaagccttctgtggagaactcaaagccgtccgtggagccccaga

SEQ ID NO: 738897 - DNA, 120 bp, Artificial Sequence
  ENSG00000204086_3 (sequence is synthesized)
cgagccaaagcccaccttctcctcagcctgagctgtcttgaagatgagtaagagtgggtttgggagctatggcagcatttctgctgctgatggagcgagtggaggcagtgaccaactgtg

SEQ ID NO: 738898 - DNA, 120 bp, Artificial Sequence
  ENSG00000204086_4 (sequence is synthesized)
tgagagagatgcaactcctgctattaagacccaaagacctaaggtccgaattcaggacgttgtaccgtgtaatgtgaaccagcttctcagctctactgtgtttgaccctgtgttcaaggt

SEQ ID NO: 738899 - DNA, 120 bp, Artificial Sequence
  ENSG00000204086_5 (sequence is synthesized)
taggggaattatagtttcccaggtctccatcgtgggggtaatcagaggggcagagaaggcttcaaatcacatttgttacaaaattgatgatatgaccgcgaaaccaatcgaggcccgaca

SEQ ID NO: 738900 - DNA, 120 bp, Artificial Sequence
  ENSG00000204086_6 (sequence is synthesized)
gtggtttggtagagagaaagtcaagcaggtgactccattgtcagtcggagtatatgtcaaagtgtttggtatcctcaaatgtcccacgggaacaaagagccttgaggtattgaaaattca

SEQ ID NO: 738901 - DNA, 120 bp, Artificial Sequence
  ENSG00000204086_7 (sequence is synthesized)
tgtcctagaggacatgaacgagttcaccgtgcatattctggaaacggtcaatgcacacatgatgctggataaagcccgtcgtgataccactgtagaaagtgtgcctgtgtctccatcaga

SEQ ID NO: 738902 - DNA, 120 bp, Artificial Sequence
  ENSG00000204086_8 (sequence is synthesized)
agtgaatgatgctggggataacgatgagagtcaccgcaatttcatccaggacgaagtgctgcgtttgattcatgagtgtcctcatcaggaagggaagagcatccatgagctccgggctca

SEQ ID NO: 738903 - DNA, 120 bp, Artificial Sequence
  ENSG00000204086_9 (sequence is synthesized)
gctctgcgaccttagcgtcaaggccatcaaggaagcgattgattatctgaccgttgagggccacatctatcccactgtggatcgggagcattttaagtctgctgattgaggcagggaaaa

SEQ ID NO: 738904 - DNA, 120 bp, Artificial Sequence
  ENSG00000204086_10 (sequence is synthesized)
catcctttcatttttcgaagacccttgcatccagctgtgagtaattttgacctgttgactttttaggaagtaggactaaaaaaaaaaatctcaagtggcattctttgtcaactcgctgct

SEQ ID NO: 738905 - DNA, 120 bp, Artificial Sequence
  ENSG00000204086_11 (sequence is synthesized)
tttctaactgctttgaacttttcggattttctgtatttgaagctcagagagagacggtgatggataaattgacaactctgtaggatttactagcaagctaatggaaacatgattttcggg

SEQ ID NO: 738906 - DNA, 120 bp, Artificial Sequence
  ENSG00000204086_12 (sequence is synthesized)
gaagaaaaactacagaaaatgtagaaatttattatttaattgtgttggagcttctttttccaaaagaaaaactagttgcagtcagggagccagcgaaaagacaaaaaaaaaaaaaaaaaa

SEQ ID NO: 738907 - DNA, 120 bp, Artificial Sequence
  ENSG00000204099_0 (sequence is synthesized)
attgcgatggggtgctggcctgccaggagcacagatacagagctagagcccagtgaggcctgtgctgtgaggggctgtgctgtgccaggggaggccccgcacccgggaagcccagaggag

SEQ ID NO: 738908 - DNA, 120 bp, Artificial Sequence
  ENSG00000204099_1 (sequence is synthesized)
agtgtgcactcacggagccctcctggcagggccgcgtctctggagcagcagacccgtgtccctctgggaggtcaactgcggcctcacagctgggcctgtcccagcacagcccttgttgga

SEQ ID NO: 738909 - DNA, 120 bp, Artificial Sequence
  ENSG00000204099_2 (sequence is synthesized)
gggcgcacccccgtgtcctcagcaccccagtgttgagtgccttgacctgcagaggggagcctgtgctggtcccgggcgtctgtgtggctcctgggtgcccatctgcacccctggccctgc

SEQ ID NO: 738910 - DNA, 120 bp, Artificial Sequence
  ENSG00000204099_3 (sequence is synthesized)
tctgggcttcagtggagccgtgccaccgtgggagtgtccagggtcctgacgtagccctgagacgtggccagctccctggcctgctgcccgcacagtgggcccttgtctctgctctgggtc

SEQ ID NO: 738911 - DNA, 120 bp, Artificial Sequence
  ENSG00000204099_4 (sequence is synthesized)
aggcgaggcagccacccatgatgagctctgcagccttcccaaggtggctgagcatgggggtccctcgtaccccttcacggacagtgctcttcgagcgggagaggacgggcctgacctacc

SEQ ID NO: 738912 - DNA, 120 bp, Artificial Sequence
  ENSG00000204099_5 (sequence is synthesized)
gcgtgccctcgctgctccccgtgccccccgggcccaccctgctggcctttgtggagcagcggctcagccctgacgactcccacgcccaccgcctggtgctgaggaggggcacgctggccg

SEQ ID NO: 738913 - DNA, 120 bp, Artificial Sequence
  ENSG00000204099_6 (sequence is synthesized)
ggggctccgtgcggtggggtgccctgcacgtgctggggacagcagccctggcggagcaccggtccatgaacccctgccctgtgcacgatgctggcacgggcaccgtcttcctcttcttca

SEQ ID NO: 738914 - DNA, 120 bp, Artificial Sequence
  ENSG00000204099_7 (sequence is synthesized)
tcgcggtgctgggccacacgcctgaggccgtgcagatcgccacgggaaggaacgccgcgcgcctctgctgtgtggccagccgtgacgccggcctctcgtggggcagcgcccgggacctca

SEQ ID NO: 738915 - DNA, 120 bp, Artificial Sequence
  ENSG00000204099_8 (sequence is synthesized)
ccgaggaggccatcggtggtgccgtgcaggactgggccacattcgctgtgggtcccggccacggtgtgcagctgccctcaggccgcctgctggtacccgcctacacctaccgcgtggacc

SEQ ID NO: 738916 - DNA, 120 bp, Artificial Sequence
  ENSG00000204099_9 (sequence is synthesized)
gcacctggcgctgtggaggcctcgtgcccaacctgcgctcaggcgagtgccagctggcagcggtggacggtgggcaggccggcagcttcctctactgcaatgcccggagcccactgggca

SEQ ID NO: 738917 - DNA, 120 bp, Artificial Sequence
  ENSG00000204099_10 (sequence is synthesized)
gccgtgtgcaggcgctcagcactgacgagggcacctccttcctgcccgcagagcgcgtggcttccctgcccgagactgcctggggctgccagggcagcatcgtgggcttcccagcccccg

SEQ ID NO: 738918 - DNA, 120 bp, Artificial Sequence
  ENSG00000204099_11 (sequence is synthesized)
cccccaacaggccacgggatgacagttggtcagtgggccccgggagtcccctccagcctccactcctcggtcctggagtccacgaacccccagaggaggctgctgtagacccccgtggag

SEQ ID NO: 738919 - DNA, 120 bp, Artificial Sequence
  ENSG00000204099_12 (sequence is synthesized)
gccaggtgcctggtgggcccttcagccgtctgcagcctcggggggatggccccaggcagcctggccccaggcctggggtcagtggggatgtggggtcctggaccctggcactccccatgc

SEQ ID NO: 738920 - DNA, 120 bp, Artificial Sequence
  ENSG00000204099_13 (sequence is synthesized)
cctttgctgccccgccccagagccccacgtggctgctgtactcccacccagtggggcgcagggctcggctacacatgggtatccgcctgagccagtccccgctggacccgcgcagctgga

SEQ ID NO: 738921 - DNA, 120 bp, Artificial Sequence
  ENSG00000204099_14 (sequence is synthesized)
cagagccctgggtgatctacgagggccccagcggctactccgacctggcgtccatcgggccggcccctgaggggggcctggtttttgcctgcctgtacgagagcggggccaggacctcct

SEQ ID NO: 738922 - DNA, 120 bp, Artificial Sequence
  ENSG00000204099_15 (sequence is synthesized)
atgatgagatttccttttgtacattctccctgcgtgaggtcctggagaacgtgcccgccagccccaaaccgcccaaccttggggacaagcctcgggggtgctgctggccctcctgacagg

SEQ ID NO: 738923 - DNA, 120 bp, Artificial Sequence
  ENSG00000204099_16 (sequence is synthesized)
ccttctggccgtgcccatgccccttgggtgcctggggcagaggggtggaatacgttggggtgccccacgatagctgtggggggggctcttagtgcaggatcctgtggattagaaacaagt

SEQ ID NO: 738924 - DNA, 120 bp, Artificial Sequence
  ENSG00000204099_17 (sequence is synthesized)
tgctcctcagagctctcaagcagggactgctctttaggaaggggagcagcggctgggagtgagcagggcagggtgggggcagggtgggggcacgaagtgggccctgggtgacccccacag

SEQ ID NO: 738925 - DNA, 120 bp, Artificial Sequence
  ENSG00000204099_18 (sequence is synthesized)
ctcccttccgaggctgcagggccaggcgcgggaccgcaggtagcccagggtgttgtgggtggcagcacttgtttactggctgctttctggctcgaaataaaggaatcgtgcttgtgtcgg

SEQ ID NO: 738926 - DNA, 120 bp, Artificial Sequence
  ENSG00000204099_19 (sequence is synthesized)
cgaggcagccacccatgatgagctctgcagccttcccaaggtggctgccccgcatccaggtgccccgtgtgcccggcctgggcggctggccgtggatctgaccgctcctgcatggtggag

SEQ ID NO: 738927 - DNA, 120 bp, Artificial Sequence
  ENSG00000204099_20 (sequence is synthesized)
gaccagcgttcccactgtctgcagctgtgccacctccctgtgccgggctgtgcgtgctcacgctcggctccgtctgcctttgtgcgatcagactgagagaccccccagagcatgggggtc

SEQ ID NO: 738928 - DNA, 120 bp, Artificial Sequence
  ENSG00000204099_21 (sequence is synthesized)
agcttcacagtcaccgaagaaatgaagttacaggaggggcacaccgtccttttgtctctgcctttgaggttggcgggaactgaaactgcagagcatgggggtccctcgtaccccttcacg

SEQ ID NO: 738929 - DNA, 120 bp, Artificial Sequence
  ENSG00000204099_22 (sequence is synthesized)
gttgtcgcggaggcctgcgtgagtgaggcctggcgtgccctggaaacattcccctgagttgaagaaagactcacagttttcagcatccagttaccctctgagcatcaggcagaacccgcc

SEQ ID NO: 738930 - DNA, 120 bp, Artificial Sequence
  ENSG00000204099_23 (sequence is synthesized)
ggccccaaaaccaggcccccttggcacatgtgggcccgagtgagtccagcatgaggaggtgccgcttctgagcagagctcaggttgtctctgggaggaggagcgagcgttgggtgcggtg

SEQ ID NO: 738931 - DNA, 120 bp, Artificial Sequence
  ENSG00000204099_24 (sequence is synthesized)
gccgctgcgttggcagccctgtccctgagcggaacgcaggtcgtctctgggaggaggagcgagggttggacgcagtggccgctgcggtggcagccctgtccccaggcgtggactctgccc

SEQ ID NO: 738932 - DNA, 120 bp, Artificial Sequence
  ENSG00000204099_25 (sequence is synthesized)
ggcgggggtggcggcggcaggcagatgcccgaggtagagatgagcaaaccaggctcagcgatcctgggtgccctgcggggggctgtgcccaggtccctggacgtcctggtcagcggaact

SEQ ID NO: 738933 - DNA, 120 bp, Artificial Sequence
  ENSG00000204099_26 (sequence is synthesized)
cacccctgtctccagccacaagggaaccaaccatccctttccccaggactgttctgcgcctcccgtcccaggcaaatccctctccccaggaccgtcctgagcctcccgtcccagacaaat

SEQ ID NO: 738934 - DNA, 120 bp, Artificial Sequence
  ENSG00000204099_27 (sequence is synthesized)
ccctctccccaggactgttctgcgcctcccgtcccaggcaaatccctctccccaggaccgtcctgcacctcccgtcccaggcaaatgggtattgatcacccccagtcacccagtgggcag

SEQ ID NO: 738935 - DNA, 120 bp, Artificial Sequence
  ENSG00000204099_28 (sequence is synthesized)
gagcaggccctctatggctgacccgactctctctcatcccccccgctaatctctttatctgcagaggagaaggctggacgctgaggtgtctctcagctcccaaaccaacagccaccccgc

SEQ ID NO: 738936 - DNA, 120 bp, Artificial Sequence
  ENSG00000204099_29 (sequence is synthesized)
cccaccccttcctcttattctttactcccttctcaccctgcccagggcctggccaggcctcacccacaactttccctccaccccatcctctgtggccacctgaccccggcccgtgggagc

SEQ ID NO: 738937 - DNA, 120 bp, Artificial Sequence
  ENSG00000204099_30 (sequence is synthesized)
tacagcagggagtgcagcagacacatggccaacccagggaccccactgcagggcctcatgccccccgcctgccctccgctctctctgtgtgggcagcgctcaccagcctccctgggtgcc

SEQ ID NO: 738938 - DNA, 120 bp, Artificial Sequence
  ENSG00000204099_31 (sequence is synthesized)
cggctgctaagggctgtgagaggcttgttcagcctgggaggactcagggcggctgggatgagtcgtgtggaagggcggtcagagtgcgatggtcctaacccgaggcaccagcccctcctt

SEQ ID NO: 738939 - DNA, 120 bp, Artificial Sequence
  ENSG00000204099_32 (sequence is synthesized)
caagcagaccccatgcgtgccccaaatgccccctcacccgggccctgccctggtgggtgttgcctgggagcaaactcccagaatggccgccgggccccactcggctttggagcttctgat

SEQ ID NO: 738940 - DNA, 120 bp, Artificial Sequence
  ENSG00000204099_33 (sequence is synthesized)
tcctgtgggcgcttctcaggtcagggccctgcaggtgggaagcaccaggcactggaatgagggcactgtggggccagctgcctgcaggcaggggtctgatcaccaagcacctgtcccctg

SEQ ID NO: 738941 - DNA, 120 bp, Artificial Sequence
  ENSG00000204099_34 (sequence is synthesized)
acggtgctgtggcctctattctggggacactgagctcctccttgctcgaggttttgggtcctcattgtccacatgacctcctgctgggcgaattctgggatgaccctgtgtcctgggcac

SEQ ID NO: 738942 - DNA, 120 bp, Artificial Sequence
  ENSG00000204099_35 (sequence is synthesized)
atggctggcagggtcccgggggctctctggccagcctcccctgcaccctggcaccaaccagcctggccgaggagcatgggggtccctcgtaccccttcacggacagtgctcttcgagcgg

SEQ ID NO: 738943 - DNA, 120 bp, Artificial Sequence
  ENSG00000204099_36 (sequence is synthesized)
cttttgtctctgcctttgaggttggcgggaactgaaactgattgaaaacagtgggcttgaaaagcctggagcagagggagtgaggcctgccccccaccccagctctgcgggcacaccctg

SEQ ID NO: 738944 - DNA, 120 bp, Artificial Sequence
  ENSG00000204103_0 (sequence is synthesized)
acagctgcaccgccgagctgcgagcggctgcgagcgagagagcgtaagagcaagagagctagagagcgagcaacgggcactcgccccacgcctcccctcagccccaccgcgcgctccgct

SEQ ID NO: 738945 - DNA, 120 bp, Artificial Sequence
  ENSG00000204103_1 (sequence is synthesized)
tgcctctccaccccgcccgactctacccggcccggtccctgcgcgggcacagcccagagctctggggcggtgcaggcagcctcgggactctccggcgcgccgccgcgtccccagacaaag

SEQ ID NO: 738946 - DNA, 120 bp, Artificial Sequence
  ENSG00000204103_2 (sequence is synthesized)
agacaaaggcttggccggcggccccggcccgctgcgccctcgctccccgcctccccagctcttctccgctcttcccccccgcgcttggctcggcgcgctccggccggccgcaaagtttcc

SEQ ID NO: 738947 - DNA, 120 bp, Artificial Sequence
  ENSG00000204103_3 (sequence is synthesized)
agcggcggctgcgcctcgcttcagcgatggccgcggagctgagcatggggccagagctgcccaccagcccgctggccatggagtatgtcaacgacttcgacctgctcaagttcgacgtga

SEQ ID NO: 738948 - DNA, 120 bp, Artificial Sequence
  ENSG00000204103_4 (sequence is synthesized)
agaaggagccactggggcgcgcggagcgtccgggcaggccctgcacacgcctgcagccagccggctcggtgtcctccacaccgctcagcactccgtgtagctccgtgccctcgtcgccca

SEQ ID NO: 738949 - DNA, 120 bp, Artificial Sequence
  ENSG00000204103_5 (sequence is synthesized)
gcttcagcccgaccgaacagaagacacacctcgaggatctgtactggatggcgagcaactaccagcagatgaaccccgaggcgctcaacctgacgcccgaggacgcggtggaagcgctca

SEQ ID NO: 738950 - DNA, 120 bp, Artificial Sequence
  ENSG00000204103_6 (sequence is synthesized)
tcggctcgcacccagtgccacagccgctgcaaagcttcgacagctttcgcggcgctcaccaccaccaccatcaccaccaccctcacccgcaccacgcgtacccgggcgccggcgtggccc

SEQ ID NO: 738951 - DNA, 120 bp, Artificial Sequence
  ENSG00000204103_7 (sequence is synthesized)
acgacgagctgggcccgcacgctcacccgcaccatcaccatcatcaccaagcgtcgccgccgccgtccagcgccgctagcccggcgcaacagctgcccactagccaccccgggcccgggc

SEQ ID NO: 738952 - DNA, 120 bp, Artificial Sequence
  ENSG00000204103_8 (sequence is synthesized)
cgcacgcgacggcctcggcgacggcggcgggcggcaacggcagcgtggaggaccgcttctccgacgaccagctcgtgtccatgtccgtgcgcgagctgaaccgccacctgcggggcttca

SEQ ID NO: 738953 - DNA, 120 bp, Artificial Sequence
  ENSG00000204103_9 (sequence is synthesized)
ccaaggacgaggtgatccgcctgaagcagaagcggcggaccctgaagaaccggggctacgcccagtcttgcaggtataaacgcgtccagcagaagcaccacctggagaatgagaagacgc

SEQ ID NO: 738954 - DNA, 120 bp, Artificial Sequence
  ENSG00000204103_10 (sequence is synthesized)
agctcattcagcaggtggagcagcttaagcaggaggtgtcccggctggcccgcgagagagacgcctacaaggtcaagtgcgagaaactcgccaactccggcttcagggaggcgggctcca

SEQ ID NO: 738955 - DNA, 120 bp, Artificial Sequence
  ENSG00000204103_11 (sequence is synthesized)
ccagcgacagcccctcctctcccgagttctttctgtgagtcgtggccggtcctggcccccgcccttgccccggcccggactccctgtcccacgtccctagtcccagactaccccggaccc

SEQ ID NO: 738956 - DNA, 120 bp, Artificial Sequence
  ENSG00000204103_12 (sequence is synthesized)
tgtccctgccgcggccccagccttgacctgtttgacttgagcgagagggaggaagggcgcgcgggccgcgggcgacgggcgggtgcgcgggcgggcaggggaccttggctaaggcgagag

SEQ ID NO: 738957 - DNA, 120 bp, Artificial Sequence
  ENSG00000204103_13 (sequence is synthesized)
tagcgcacgccagcgccgcctcctagactcgagcagagccggagagagagacgagagggtgggaggtcccggagtaacttctctccaggctgaagggcggcgaggcatagtcccgagaag

SEQ ID NO: 738958 - DNA, 120 bp, Artificial Sequence
  ENSG00000204103_14 (sequence is synthesized)
ttctgaactttgcgcgttaagccgggacagctgctttgctgcccggagagtagtccgcgccaggaagagagcaacgaggaaaggagagggactctggcgtcccggcaggcgagaggcgag

SEQ ID NO: 738959 - DNA, 120 bp, Artificial Sequence
  ENSG00000204103_15 (sequence is synthesized)
gctgagcgaaagaaggaaggacagacggacctgtctgtcagagttcggagaacactggctctcagccctgagacacaggcctcagttaggacgctcggcgcccaaatctcatcagtttta

SEQ ID NO: 738960 - DNA, 120 bp, Artificial Sequence
  ENSG00000204103_16 (sequence is synthesized)
ttgcctgctcgattatatagaaaaatacaaaaaatctgcattaaaaatattaatcctgcatgctggacatgtatggtaataatttctattttgtaccattttcttgtttaactttagcat

SEQ ID NO: 738961 - DNA, 120 bp, Artificial Sequence
  ENSG00000204103_17 (sequence is synthesized)
gttgttgatcatggatcatactccccttgtttctttgggtgagaagggatcgcagtttggaaactccggcggctgcgtgcggggtttcagtcccagctgtaggcttgtaaatacccgccc

SEQ ID NO: 738962 - DNA, 120 bp, Artificial Sequence
  ENSG00000204103_18 (sequence is synthesized)
cgccaaaccgcatagagaacgtggcagcaagctgagggtctttgtttgggtttattattacggtatttttgtttgtaagttaaaaagaaaaaaaaaaagaaaaagttccgggcattttgc

SEQ ID NO: 738963 - DNA, 120 bp, Artificial Sequence
  ENSG00000204103_19 (sequence is synthesized)
atcagaaaacaactttgtcttggggcacacttggaagttgcatgttttctttccttcccttatccccattcggtcctctttttcctctctcgctttagttttcaaccttgttggtgctga

SEQ ID NO: 738964 - DNA, 120 bp, Artificial Sequence
  ENSG00000204103_20 (sequence is synthesized)
gagagagaaccgagaggtcccagtacaagggcagggcagggcagggaagctgccaagctccgcaccccagaggagtgttctggactacagccttgtcttatggtcaaattgataccctta

SEQ ID NO: 738965 - DNA, 120 bp, Artificial Sequence
  ENSG00000204103_21 (sequence is synthesized)
ataagaaaggaaaggaaaggaaaacagatcctcccctctgctttttattgtaaccagaatcaccctgaggtcccttctgaaccctctgggcctgcgctaattgtaggagccacagcgctc

SEQ ID NO: 738966 - DNA, 120 bp, Artificial Sequence
  ENSG00000204103_22 (sequence is synthesized)
ctagggtgagaggcttagccatccctgaccctggcagtgcactggtaagcagacactgcactgaaccaactgctatgctcagaatgtaccagaaacccaaacattggcaagtaattttgc

SEQ ID NO: 738967 - DNA, 120 bp, Artificial Sequence
  ENSG00000204103_23 (sequence is synthesized)
aactttcaagtgcgttctttagaccaatgcattgcgtttctttccctgcttttgagatagtaggaagagttcttggtggtgtccccccccttcaattcttcagttgtatagtagttatag

SEQ ID NO: 738968 - DNA, 120 bp, Artificial Sequence
  ENSG00000204103_24 (sequence is synthesized)
ggaagatatgggtgtttttctttattattacttttttttttctgcaggtcagtaaaaggatttaagttgcactgacaaaaataccaaaataaaagtgtatttttaagttcccatttgaaa

SEQ ID NO: 738969 - DNA, 120 bp, Artificial Sequence
  ENSG00000204103_25 (sequence is synthesized)
ttgctggcgctgctggccggatgcatttttgagtttgtattagttgataaattaacagtaataacaagattgtatgaaccgcatggtgcttgcagttttaaatattgtggatatttgtcc

SEQ ID NO: 738970 - DNA, 120 bp, Artificial Sequence
  ENSG00000204103_26 (sequence is synthesized)
tgcatcagaaacgagctttggtttttacagattcaactgtgttgaaatcaaacctgccgcaacagaaattgtttttatttcatgtaaaataagggatcaatttcaaaccctgcttatgat

SEQ ID NO: 738971 - DNA, 120 bp, Artificial Sequence
  ENSG00000204103_27 (sequence is synthesized)
atgaaaatattaaaacctagtctattgtagttttattcagactggtttctgttttttggttattaaaatggtttcctattttgcttattaaaaccatggaaatggtgtttatttagagga

SEQ ID NO: 738972 - DNA, 80 bp, Artificial Sequence
  ENSG00000204104_0 (sequence is synthesized)
gccagggacccgggcttaggctcggccaggccggctgaggggcgcgggcggccagcgggcggcggacgccgtcatgaacg

SEQ ID NO: 738973 - DNA, 120 bp, Artificial Sequence
  ENSG00000204104_1 (sequence is synthesized)
cggccagcgggcggcggacgccgtcatgaacgcggcggtggtgaggcggacgcaggaggcgctggggaaagtgattcggaggccgccgctgaccgagaagctgctgagcaagcccccgtt

SEQ ID NO: 738974 - DNA, 120 bp, Artificial Sequence
  ENSG00000204104_2 (sequence is synthesized)
ccgctacctgcacgacatcatcacggaggtgattagaatgactggtttcatgaagggcctctacacagacgccgagatgaagtctgataatgtgaaggataaagatgcaaaaattagctt

SEQ ID NO: 738975 - DNA, 120 bp, Artificial Sequence
  ENSG00000204104_3 (sequence is synthesized)
cctacaaaaggccatagacgtggttgtaatggtgtcgggagagccactgttggccaaaccagcccgaatcgtggcggggcatgagcctgaaagaacaaacgagctgctccagataattgg

SEQ ID NO: 738976 - DNA, 120 bp, Artificial Sequence
  ENSG00000204104_4 (sequence is synthesized)
aaaatgctgtctcaacaagctctctagtgacgatgcggtgcggagggttttagctggagagaagggagaagtgaaaggccgggcctcactgacctcaagatctcaggaattggataataa

SEQ ID NO: 738977 - DNA, 120 bp, Artificial Sequence
  ENSG00000204104_5 (sequence is synthesized)
gaatgtgcgagaagaagagtccagagttcacaaaaatacagaggatagaggagacgctgaaataaaagagagaagtacaagcagagatcgaaaacagaaggaagaattgaaagaagaccg

SEQ ID NO: 738978 - DNA, 120 bp, Artificial Sequence
  ENSG00000204104_6 (sequence is synthesized)
caagccaagagaaaaggacaaggacaaggagaaggccaaggagaatggcggaaacagacacagagaaggggagagagagagagccaaagcccgggccaggccagacaacgagcgacagaa

SEQ ID NO: 738979 - DNA, 120 bp, Artificial Sequence
  ENSG00000204104_7 (sequence is synthesized)
agacagaggcaacagggagcgggacagagactccgagcgcaagaaggagacagagagaaagagtgagggggggaaagagaaggagagactgagagacagggaccgagagcgcgaccggga

SEQ ID NO: 738980 - DNA, 120 bp, Artificial Sequence
  ENSG00000204104_8 (sequence is synthesized)
caaagggaaggacagggacagacggagagtgaaaaacggggagcactcctgggacctggacagggagaagaacagagagcatgacaaacctgagaaaaagtcagcaagctcaggggagat

SEQ ID NO: 738981 - DNA, 120 bp, Artificial Sequence
  ENSG00000204104_9 (sequence is synthesized)
gtctaaaaagttatcagatggaacttttaaagactccaaggctgaaacagagactgagatttccactagagcttccaagtcattgacaacaaaaacatcaaaacggcgatccaaaaattc

SEQ ID NO: 738982 - DNA, 120 bp, Artificial Sequence
  ENSG00000204104_10 (sequence is synthesized)
agtggaaggaaggaaggaggataatatttcagctaaaagtttagactccatagtgtctggaataaataatgagccaaatcaggaaacgacaacatcagaaataggaacaaaagaagctaa

SEQ ID NO: 738983 - DNA, 120 bp, Artificial Sequence
  ENSG00000204104_11 (sequence is synthesized)
tattaactcaactagtatttcagatgataattcagctagtctgcggtgtgagaatattcagcccaaccccacagagaagcagaaaggtgactccaccagtgatgcagaaggagatgctgg

SEQ ID NO: 738984 - DNA, 120 bp, Artificial Sequence
  ENSG00000204104_12 (sequence is synthesized)
acctgctggccaagataagtctgaggtgccagagactccagaaattcctaatgagctttcatccaacatcagaagaattcctcggcctgggagtgcaagaccagcccctccccgggtcaa

SEQ ID NO: 738985 - DNA, 120 bp, Artificial Sequence
  ENSG00000204104_13 (sequence is synthesized)
acggcaagacagcatggaggcgctacaaatggataggtcagggagtggtaaaaccgtttcaaatgtgattacagagtcacacaattctgacaatgaagaggatgatcaatttgtggtgga

SEQ ID NO: 738986 - DNA, 120 bp, Artificial Sequence
  ENSG00000204104_14 (sequence is synthesized)
agctgcccctcagctctctgaaatgtcagaaattgaaatggtaacagcagtggaactagaagaagaggagaagcatggtggacttgtgaaaaaaattttggagacgaagaaagattatga

SEQ ID NO: 738987 - DNA, 120 bp, Artificial Sequence
  ENSG00000204104_15 (sequence is synthesized)
gaaattgcagcagtcacccaaacctggggagaaggagcgatctctctttgagtcggcatggaagaaggagaaggacatcgtttccaaggagatagagaagctccgcacgtccatccagac

SEQ ID NO: 738988 - DNA, 120 bp, Artificial Sequence
  ENSG00000204104_16 (sequence is synthesized)
cctgtgcaagagcgcacttcccctggggaagatcatggactacatccaggaagacgtggatgccatgcagaatgagctgcagatgtggcacagcgagaacaggcagcacgccgaggccct

SEQ ID NO: 738989 - DNA, 120 bp, Artificial Sequence
  ENSG00000204104_17 (sequence is synthesized)
tcaagaatgaagaaaaaatccagaaaatggtatatagtatcaatttgacttcgagaaggtgaacactcaaaagtttcagagatgaaaagtcacctcagtttaaaagcaaaaaggaagata

SEQ ID NO: 738990 - DNA, 120 bp, Artificial Sequence
  ENSG00000204104_18 (sequence is synthesized)
gaaaatcattactcttttaagttccagtttgctaagaaaatgaacagtttacaatgttattatccagctaattttcagagctttaaaactgtaagcatgttaagtgtattaaaaaaacca

SEQ ID NO: 738991 - DNA, 120 bp, Artificial Sequence
  ENSG00000204104_19 (sequence is synthesized)
tgttttcttacctccttccagatggaatactggctagttataaatagcgcttccaaacacctctgtgaaaagtttttttgaaagcctgttctttgtgtttctgctgtaacctgtttagtt

SEQ ID NO: 738992 - DNA, 120 bp, Artificial Sequence
  ENSG00000204104_20 (sequence is synthesized)
ctgtaccagaactctctagcaggtaagtggtgtgggcataccaagggaacagtagtcctttattttggtttagtggaaagactttcagaggtcagtgccgaatgaaggatgactgtgtac

SEQ ID NO: 738993 - DNA, 120 bp, Artificial Sequence
  ENSG00000204104_21 (sequence is synthesized)
tttttgataggcacttgataagtagaatgaggcctgaaaatgaatacattatatttttagttaatttccaatggaaagggctaacctcagcctgtctccatatcaggtacctatcaactg

SEQ ID NO: 738994 - DNA, 120 bp, Artificial Sequence
  ENSG00000204104_22 (sequence is synthesized)
gattgttttcatttttgttttttgacctctttgtaattgcatgtacttctctatgtaattttcctcttgatctctactatcgtttgcttgtgtttctagtccttaaagttcataaattta

SEQ ID NO: 738995 - DNA, 120 bp, Artificial Sequence
  ENSG00000204104_23 (sequence is synthesized)
aaaaggagatttcaggatggcctttatggacgttgtctggacatacatcctcactttcttccgcagtttaccctggttttcctcagacagaggctagcgcagccccccggagtccttgtt

SEQ ID NO: 738996 - DNA, 120 bp, Artificial Sequence
  ENSG00000204104_24 (sequence is synthesized)
ctccttaagagggtctcgctctgcaaagcattggcgccatggcttttcctttgcatgggtgtgcataccgagagacaggcagcttaggaaaaacaacataaggaagacttaaaaggatgc

SEQ ID NO: 738997 - DNA, 120 bp, Artificial Sequence
  ENSG00000204104_25 (sequence is synthesized)
actgatttacgacgttttttgatgttagccatttttttggaaattgttttttaaagcaaaagttttttaaaaacatggtttatagtttttcacttacatatactattgtaaatacttagc

SEQ ID NO: 738998 - DNA, 120 bp, Artificial Sequence
  ENSG00000204104_26 (sequence is synthesized)
agagtcttaagttactgtataaaacatttcattgtgtttgaagacatacttatgggtcttgaggtctgggtcctaatacttttaaatagtgtatttattatgtaaactgaggagtgccat

SEQ ID NO: 738999 - DNA, 65 bp, Artificial Sequence
  ENSG00000204104_27 (sequence is synthesized)
tttaaatagtgtatttattatgtaaactgaggagtgccatttaaagtgtgaggattgcctgaaaa

SEQ ID NO: 739000 - DNA, 61 bp, Artificial Sequence
  ENSG00000204104_28 (sequence is synthesized)
ttttgtttctttaaggattagcacaaatggcaccgttgggtttttcttcatacaatttcca

SEQ ID NO: 739001 - DNA, 120 bp, Artificial Sequence
  ENSG00000204104_29 (sequence is synthesized)
cacaaatggcaccgttgggtttttcttcatacaatttccaaaataaattctgtactcaggttgttatatgattttctgagctgaataagttcaggagcagattattaagatctgccattc

SEQ ID NO: 739002 - DNA, 120 bp, Artificial Sequence
  ENSG00000204104_30 (sequence is synthesized)
tgaaacgctggtctttttctccttcctatagtgcaccataaaattctgtttgatcagattatattacatacattttgggggagtggagggacatgagttaagtagcccttcatgtattta

SEQ ID NO: 739003 - DNA, 120 bp, Artificial Sequence
  ENSG00000204104_31 (sequence is synthesized)
taatctcttttctactgaatcaaatgacttagccatgaccctgaatggaccttgttttacttcaagttgagatgtctgccttttatgaatttgtatatgtgaatagagtttgggggttgc

SEQ ID NO: 739004 - DNA, 120 bp, Artificial Sequence
  ENSG00000204104_32 (sequence is synthesized)
ttgccaaaaattgcatacattgtatgtaagtaaaattttttatgaagtagtctgtcaaattgtatcataaagtttatttttcttttatacgtaaatcattaaaaataatcacatattttt

SEQ ID NO: 739005 - DNA, 120 bp, Artificial Sequence
  ENSG00000204104_33 (sequence is synthesized)
tccgatgtgctttctccacatccctgtgtcctgtttctatttagtaccattttatgatgcacagtttgtttgctctttgtttttctatctttgaaaataaaacaaaatggcaatagggac

SEQ ID NO: 739006 - DNA, 120 bp, Artificial Sequence
  ENSG00000204104_34 (sequence is synthesized)
attagaaaagcggctatgaggaaatgatctttttttcttagcagacatccaaaattatgtacagtgtgttttttctccaattctgttctcatcatttaatgtattgaggttgactacacg

SEQ ID NO: 739007 - DNA, 120 bp, Artificial Sequence
  ENSG00000204116_0 (sequence is synthesized)
gttccccctcctcttgcagcacctcggcaggttcaaactcttctccgggagcgtggcggcgatcgcgaggtcacgtgatgagcatcctgctgcccaacatggcggagttcgacaccatct

SEQ ID NO: 739008 - DNA, 120 bp, Artificial Sequence
  ENSG00000204116_1 (sequence is synthesized)
cggaactggaggaggaggaggaagaagaagcggcaacgtcgtcgtcgtcgccgtcgtcgtcgtcgtcggtatctgggcccgacgatgacgaggaggatgaggaggaagaggaggaagagg

SEQ ID NO: 739009 - DNA, 120 bp, Artificial Sequence
  ENSG00000204116_2 (sequence is synthesized)
ggaggaggaggaagaggaggaggaagcgccgcccccgcctcgggtagtgagcgaggagcatctgcggagatatgctcccgaccctgtattagtgcggggtgccggccacatcactgtgtt

SEQ ID NO: 739010 - DNA, 120 bp, Artificial Sequence
  ENSG00000204116_3 (sequence is synthesized)
gccacatcactgtgtttggcttgagcaacaagtttgatactgaatttccctccgttctaacagggaaggtggccccagaagaatttaaaaccagcattggccgtgtgaatgcatgtttga

SEQ ID NO: 739011 - DNA, 120 bp, Artificial Sequence
  ENSG00000204116_4 (sequence is synthesized)
aaaaggctctcccggtcaatgtgaaatggctgctgtgtggttgtctctgctgctgttgcacactgggttgcagcctatggcctgttatttgtctcaacaaaagaaccagaagatcaattc

SEQ ID NO: 739012 - DNA, 120 bp, Artificial Sequence
  ENSG00000204116_5 (sequence is synthesized)
agaagttaatagaatgggaaaataacagattatatcacaagcttgctttgcactggaagttgactaagaggaaatgtgaaactagcaatatgatggagtatgtaatactaatagaattct

SEQ ID NO: 739013 - DNA, 120 bp, Artificial Sequence
  ENSG00000204116_6 (sequence is synthesized)
taccaaaatatcccatattccgacctgactgaggagttttatccagtcacttctgtgttacctgtcatttcctacccttagtgccttgtagatttggaatgaagatggtctcctttgctg

SEQ ID NO: 739014 - DNA, 120 bp, Artificial Sequence
  ENSG00000204116_7 (sequence is synthesized)
tgttcaacttattctttataatggtagaatattcttctcgctcttttgtgttggtttatgaagaaaatttgcacatcttttttgtctttcaatgaggcttgtgttttgcactctcaattt

SEQ ID NO: 739015 - DNA, 120 bp, Artificial Sequence
  ENSG00000204116_8 (sequence is synthesized)
taaatacacacacatgcgtgtgtgcatatacatatatagatagttgccattaaagataaatcatcagtgttggtgtttaaaaaacaaaaacttgttctgagcatgctgccttataatttt

SEQ ID NO: 739016 - DNA, 120 bp, Artificial Sequence
  ENSG00000204116_9 (sequence is synthesized)
catactcattgtttctaaactcgcatcatttttctaggctacttgatgctctgtaatcccttactggacaaacttaaataagcttttggtagcttttagaaatggttttactctgctttt

SEQ ID NO: 739017 - DNA, 120 bp, Artificial Sequence
  ENSG00000204116_10 (sequence is synthesized)
aaaggacatgcttttaaaggacatgcaattaatggcactggttttgtcctgcactttgctttatcacttatgttagtggataaaatatttaaactcctaaagacttgtaaatattgcctc

SEQ ID NO: 739018 - DNA, 120 bp, Artificial Sequence
  ENSG00000204116_11 (sequence is synthesized)
tttgcataatgtaaaatgtggtatgccatggtttacataatgtaacattactcttattgtattgccaacaattttacatagattttaatatgaatgaagtttgcaagcatccctttgaat

SEQ ID NO: 739019 - DNA, 120 bp, Artificial Sequence
  ENSG00000204116_12 (sequence is synthesized)
gtagaaactgctaacatgctgttttatggcaaggccataatgagtatgttaagaatttcaggtgtagggcaaggttgccctttgtaacaagtggactaaaattgaaattattatctcaga

SEQ ID NO: 739020 - DNA, 120 bp, Artificial Sequence
  ENSG00000204116_13 (sequence is synthesized)
tattctgtattgcacctgaaaccatgacctttatttttccatttcgtttaataatttccattttgttgtctactccttcccacaaaaaaactatttgacatctgacacatttcacagtct

SEQ ID NO: 739021 - DNA, 120 bp, Artificial Sequence
  ENSG00000204116_14 (sequence is synthesized)
cactatcctgcatttattagccttttcttcctttgaaaatacacacaattatgacttttaaggagtattttgagatttcagacatcttcagaaggtatctagaccctcttgaaagccact

SEQ ID NO: 739022 - DNA, 120 bp, Artificial Sequence
  ENSG00000204116_15 (sequence is synthesized)
aacacctttctgcagttctgatattctagtttgagaaagagagagaactatttgagaagctgtagctaaagagtatatagcagctgattcataattgaaaaaaaattctcaattctgttt

SEQ ID NO: 739023 - DNA, 120 bp, Artificial Sequence
  ENSG00000204116_16 (sequence is synthesized)
ttgatgatcctttataaaacattaatgaggaaagacaagtgtttagacaaaagtattttagtttataaattcagcacatatgtaacatttatttggtccatatttctctatttttcttca

SEQ ID NO: 739024 - DNA, 120 bp, Artificial Sequence
  ENSG00000204116_17 (sequence is synthesized)
aactgcaaatgtatgcctgtttgtaggcattatttgtaattcatagtgctaaaaataaaagtgtctagggctcagtaatattttgtcatcttactcttactgcttttagtaaacctttta

SEQ ID NO: 739025 - DNA, 120 bp, Artificial Sequence
  ENSG00000204116_18 (sequence is synthesized)
ggcaagattcatctcagtgaagtgaacaatcatttcttcatagaaggtcaagcctttttaagccactcttaaaatttatgcctaatttgaaatccacagtccttgaccagtttaaaaaag

SEQ ID NO: 739026 - DNA, 120 bp, Artificial Sequence
  ENSG00000204116_19 (sequence is synthesized)
agaggaaaaagaagacactattttatatgtgattataattgtttgcacaaacacttttccaccttcctctgtgccccattacctctgtgccactcagtcaccccaaatctctaaccttta

SEQ ID NO: 739027 - DNA, 120 bp, Artificial Sequence
  ENSG00000204116_20 (sequence is synthesized)
gtaatgtgtatgcctgcaaatattatgtgtttgcctgctgcaaaattgaaggtgtatttttatagacaaggtagaagcctctgaaaatgtataccaaatgtcttgttttgtagctaaggt

SEQ ID NO: 739028 - DNA, 120 bp, Artificial Sequence
  ENSG00000204116_21 (sequence is synthesized)
cgggaaaaattgtatctgaggtttatgttccagctaatgttatcaaatttatgcttcaaactgtgatattttaataccaaaatcgattttcagcataatacaaaatatctcattttcact

SEQ ID NO: 739029 - DNA, 120 bp, Artificial Sequence
  ENSG00000204116_22 (sequence is synthesized)
gatagaaaattgcttttaagtgttgatccttagaaatcttatttttttctataaccttagaatttgatcatatgatggtcataggaactttttctgccatgtataaatcacacttggttt

SEQ ID NO: 739030 - DNA, 120 bp, Artificial Sequence
  ENSG00000204116_23 (sequence is synthesized)
tgctcaaagaacagcatgaagtggtgaattgtttccatgaaacaattattgagaatgggaatacagtatatctggaaatgacacagtataatacaagttacagtagcatttgtcacaaaa

SEQ ID NO: 739031 - DNA, 120 bp, Artificial Sequence
  ENSG00000204116_24 (sequence is synthesized)
accacttgtcagcatgtgtaaacttaattttaaagcctattctaatcactcgagtttattattttattgttcgctatgctggttgactcatcttagtttcttcaactacccaaaaaaata

SEQ ID NO: 739032 - DNA, 120 bp, Artificial Sequence
  ENSG00000204116_25 (sequence is synthesized)
ccaatttttttcctctcttgtatgactactttttcaaactgttttcctttgcagggggctgattagcaattgagtattttgtaatgtttgggcggggttgctttgttttcagtgaaattg

SEQ ID NO: 739033 - DNA, 120 bp, Artificial Sequence
  ENSG00000204116_26 (sequence is synthesized)
gttgcagtgaatgctaaaatgacacagcacactggtgattaattcctcccccatggagccttttttctgttatgcttaggatagaacatacttgtaattttccattaggttagtaacata

SEQ ID NO: 739034 - DNA, 120 bp, Artificial Sequence
  ENSG00000204116_27 (sequence is synthesized)
cttttgtgaaagttgtttttagactgaagaaagtaattttgaatttctttgttacataatattcctttatgaaacttgtgatagtttccagagcaaaacatgtatttgccaaagtatata

SEQ ID NO: 739035 - DNA, 120 bp, Artificial Sequence
  ENSG00000204116_28 (sequence is synthesized)
aatctcacaaggctttaagattacaagctaaaattgttttttaaaattaatgttccaatgtttctcatttggcccaagattctggcttcataaatttgtccaactggctatttttaagct

SEQ ID NO: 739036 - DNA, 120 bp, Artificial Sequence
  ENSG00000204116_29 (sequence is synthesized)
tgtcctaaaagccaataacatgtttattcctaataactaatatgggcaagtgttatttacagatttattaactccatcccagatatgtctccactctttgttccctcctaatgctaattt

SEQ ID NO: 739037 - DNA, 120 bp, Artificial Sequence
  ENSG00000204116_30 (sequence is synthesized)
aggaaagagaccactgtagtaaaactttagaagaagatggagaagtgccttgtctttttagaacaaagataacacattacgtgtaaggaagcataataaatgaattggtagatgattaga

SEQ ID NO: 739038 - DNA, 120 bp, Artificial Sequence
  ENSG00000204116_31 (sequence is synthesized)
ttagaaatcatccttttcaactaggtctaagaatactttactagtgtattatcttttatttattatgtaaagcttctttccttccttttccccaatcatgatatattagtgacaaaatat

SEQ ID NO: 739039 - DNA, 120 bp, Artificial Sequence
  ENSG00000204116_32 (sequence is synthesized)
tacagaaccggactatcagtcacttaaaaaaacagtataattctaatgctagtaaacatgtaatttaatttagttctggaaggacagttgtctttgattaaagccccaccaaaacccatt

SEQ ID NO: 739040 - DNA, 120 bp, Artificial Sequence
  ENSG00000204116_33 (sequence is synthesized)
taagtatttaatgtacatactattcatattattatggcctgtaaacactaatatctgagcaatcaaactgttttatctaccatttttgatgaaatttgaataaagtttaaaaacgtgtaa

SEQ ID NO: 739041 - DNA, 120 bp, Artificial Sequence
  ENSG00000204116_34 (sequence is synthesized)
tgtttacaaataagctgccatttaaaaaaataaaacctcactacttgaacataaagctcccaaacaatattgtattaaaatgtactatattgacctaggaggatatagaaattatattca

SEQ ID NO: 739042 - DNA, 120 bp, Artificial Sequence
  ENSG00000204116_35 (sequence is synthesized)
cctgattaactggagcagtttcacatagtagaaatactttttgctaatttgattataagtgctcaaatttattgaaattagattctcatgcctataaaagtatactttaaaaatattttg

SEQ ID NO: 739043 - DNA, 120 bp, Artificial Sequence
  ENSG00000204116_36 (sequence is synthesized)
caacaactgtcaaattatttgggttcctttaaatagcaaacaattgggaaattttccataaaaatgaataggttttattaatacctgttcatgtagtatgtggactaaaacaattgatat

SEQ ID NO: 739044 - DNA, 120 bp, Artificial Sequence
  ENSG00000204116_37 (sequence is synthesized)
atatctgtatgtaaaaatgaatgatcttatcttgccccaaatttttcttacctgattctgagccagcctttttgttttgatggcaccctgtgagtatgttccattttctgtgaactttgt

SEQ ID NO: 739045 - DNA, 120 bp, Artificial Sequence
  ENSG00000204116_38 (sequence is synthesized)
caaattcatactatatgaggaaatgatctaatattgtgggctccaggcaggtcatcttaattgcatgtctgtctcttctgtaaaatgatgaggtggaacctagagctggacaaaaaatta

SEQ ID NO: 739046 - DNA, 120 bp, Artificial Sequence
  ENSG00000204116_39 (sequence is synthesized)
gagatcacttaacattctgtgattcaaggaattcttaggacatttttactctatagaatctcagaatgattattctcagatctactgtccttggtggaaactctcacagtgccttgcatg

SEQ ID NO: 739047 - DNA, 120 bp, Artificial Sequence
  ENSG00000204116_40 (sequence is synthesized)
cagtaaaagtttgatttgccgactggctgacgtgttaattatcacacagactccaagaacctgatgcttgctagaccttagttccttggtgatgctaagagtaaatgtagttttcctagg

SEQ ID NO: 739048 - DNA, 120 bp, Artificial Sequence
  ENSG00000204116_41 (sequence is synthesized)
aactgagcactgaggtctgtgtcctttgcctgtgtagaatctgtctatgcagttggtattcaggcaagaattttagctgtaacaacaatggaaatattggaggacccactttggcattta

SEQ ID NO: 739049 - DNA, 120 bp, Artificial Sequence
  ENSG00000204116_42 (sequence is synthesized)
tgtaaagatttcatatcctatccaacatttactttagtgtctaatcaaattccataccctcaaaaagatctgttggaacaaattgataaaattaggtggaaaggaaagtggtatgggact

SEQ ID NO: 739050 - DNA, 120 bp, Artificial Sequence
  ENSG00000204116_43 (sequence is synthesized)
caaatacaagtcacttctggtttaattattggctctgctgcttaattcctctgtacctcacgtcctcattgtcgaagtggggacaataatctggacctacctcacaggggaattgaggat

SEQ ID NO: 739051 - DNA, 120 bp, Artificial Sequence
  ENSG00000204116_44 (sequence is synthesized)
attttcatatattagtgtgctttgaagttgactgaaagatatactggatatcataattatataatttctaaatagatttctttaaatccatgctatgttttctttttcagtcaggtccta

SEQ ID NO: 739052 - DNA, 120 bp, Artificial Sequence
  ENSG00000204116_45 (sequence is synthesized)
cagaatgactattgcacttggtctattgttttaatagtaaattttgttattaatctcctatgtgttaaacgtgggtaattgtattatgttaatacatacttagggaggaaaagcaggtgg

SEQ ID NO: 739053 - DNA, 120 bp, Artificial Sequence
  ENSG00000204116_46 (sequence is synthesized)
atgtaaatcagtgattcccaacttcagcagatgatagcagtggagggtatccttgagctttttgtaatatttcaaaaagtatattagaaattatacatttacccataatattcctgcttc

SEQ ID NO: 739054 - DNA, 120 bp, Artificial Sequence
  ENSG00000204116_47 (sequence is synthesized)
acaagtcaattaagacattgaatttccattcattttgcctatattctctcaaaagctgtgaatggcagtatgtttttgattaataataaaataagaaatcctattatgtgcaacttatta

SEQ ID NO: 739055 - DNA, 120 bp, Artificial Sequence
  ENSG00000204116_48 (sequence is synthesized)
aatacttgggaacatgggaaaagaataatgaagggattcttatggtgaaaatgttgggaaccacttttataaaggaactaagattatttgaccccctccacagattgcttacctagtctc

SEQ ID NO: 739056 - DNA, 120 bp, Artificial Sequence
  ENSG00000204116_49 (sequence is synthesized)
taaataatgaaatgtgtgtgtttgtgtgttttggctatattaggctatataacttcaggttagaatttgccttcagttttttttctgttttagaatatcactggcctaatttatttaggt

SEQ ID NO: 739057 - DNA, 120 bp, Artificial Sequence
  ENSG00000204116_50 (sequence is synthesized)
gtgtacatgttgctcatacatacacacacatataggattacaaatgtggaaaatgttataatgtcatattctagcattggactaaatatcaatttctgactcttaaagtagttctgtgta

SEQ ID NO: 739058 - DNA, 120 bp, Artificial Sequence
  ENSG00000204116_51 (sequence is synthesized)
taaattcaacatgatgaatcaaggcaataatttctcaaatgttcttttatttctttgtttttatctcgactttttattttccattttttctagtacgcaaatagtgtaaaattgttttaa

SEQ ID NO: 739059 - DNA, 120 bp, Artificial Sequence
  ENSG00000204116_52 (sequence is synthesized)
tgcctggactttgaaacaagtaacaagtgtttgaaagtatataatctacgagcgaatttgccctccttggactaaccacatacaaatatgaatctggctgcaagaacaggatatccaggt

SEQ ID NO: 739060 - DNA, 120 bp, Artificial Sequence
  ENSG00000204116_53 (sequence is synthesized)
aactagagagtgggcattgataaaaatatctggtggagaagcctaggatttcaactttttgtcagaggattcctgttgggacagctttaccagaaaagaataatagcggatatgttcatc

SEQ ID NO: 739061 - DNA, 120 bp, Artificial Sequence
  ENSG00000204116_54 (sequence is synthesized)
caaactaagaactttcatgcatcttgcattgttacatagcctgtggaatgaattcattttttctcccttgagtccaggaatgacttccctggaaaaactcaatctatatacagctgtgcc

SEQ ID NO: 739062 - DNA, 120 bp, Artificial Sequence
  ENSG00000204116_55 (sequence is synthesized)
aaaatgaaggatacctgcctctccgaaactttcactgctgcttctgtcattgttcacttgtcagataaaattttattatctcaggatgcaaatttaaaataaagtgtaaatctatgttaa

SEQ ID NO: 739063 - DNA, 120 bp, Artificial Sequence
  ENSG00000204120_0 (sequence is synthesized)
gacgtgcgtggcgacgtgtcggccatcttgtgttgttgaggctgaggactgactggggttctgagactccctgtcccggaccgcagcgttaaaaggatctgaacaaagtctgctcaaatc

SEQ ID NO: 739064 - DNA, 120 bp, Artificial Sequence
  ENSG00000204120_1 (sequence is synthesized)
tcctgctgtgaaccagcagaatttttgaacaggtttcttcacatataaaaatctattgtaaaaatacggaaaagaatggcagcggaaacgcagacactgaactttgggcctgaatggctc

SEQ ID NO: 739065 - DNA, 120 bp, Artificial Sequence
  ENSG00000204120_2 (sequence is synthesized)
cgagctctgtccagtggtgggagtattacatcccctcctctttctccagcattgccgaagtataaattagcagattatcgttacggcagagaagaaatgttagcacttttccttaaagac

SEQ ID NO: 739066 - DNA, 120 bp, Artificial Sequence
  ENSG00000204120_3 (sequence is synthesized)
aacaagataccttcagaccttctggataaagaatttctgcctatcctccaggaggaaccccttccaccattggctctggtaccctttacagaagaagaacagagaaacttttccatgtct

SEQ ID NO: 739067 - DNA, 120 bp, Artificial Sequence
  ENSG00000204120_4 (sequence is synthesized)
gtaaatagtgctgctgtcctgcgattgacaggacgaggaggaggaggaacagtggtgggggctcctagaggtcgaagttcttcaagagggcgaggcagaggcagaggtgaatgtggtttc

SEQ ID NO: 739068 - DNA, 120 bp, Artificial Sequence
  ENSG00000204120_5 (sequence is synthesized)
taccaaagaagttttgatgaagtagagggtgtttttggtcgaggaggtggcagagaaatgcatagatcgcagagctgggaggaaaggggtgacagacgttttgaaaaaccaggacgaaaa

SEQ ID NO: 739069 - DNA, 120 bp, Artificial Sequence
  ENSG00000204120_6 (sequence is synthesized)
gatgtagggagaccaaattttgaggaaggtggaccaacatcagtagggagaaagcatgaatttatacgctcagaaagtgaaaattggcgcatctttagagaggaacaaaatggagaagat

SEQ ID NO: 739070 - DNA, 120 bp, Artificial Sequence
  ENSG00000204120_7 (sequence is synthesized)
gaagatggaggttggcgactagctggatcaaggagggatggagagaggtggcgacctcacagtcctgatggccctcgttctgcaggctggcgggaacacatggaacgacgtcggaggttt

SEQ ID NO: 739071 - DNA, 120 bp, Artificial Sequence
  ENSG00000204120_8 (sequence is synthesized)
gagtttgattttcgagatagagatgatgaacggggttaccgaagggttcgctctggcagtgggagcatagatgatgacagggatagcttgcccgaatggtgcttagaggatgctgaagaa

SEQ ID NO: 739072 - DNA, 120 bp, Artificial Sequence
  ENSG00000204120_9 (sequence is synthesized)
gaaatgggtacatttgactcatctggagcattcctttctctaaaaaaagtacagaaagagcctattccagaagagcaggagatggacttccggcctgtggacgaaggggaggagtgctct

SEQ ID NO: 739073 - DNA, 120 bp, Artificial Sequence
  ENSG00000204120_10 (sequence is synthesized)
gactctgagggtagccataatgaagaggccaaagaacccgataagacaaataagaaagaaggagagaaaacagatagagtaggagttgaagctagtgaggaaactccccagacctcatca

SEQ ID NO: 739074 - DNA, 120 bp, Artificial Sequence
  ENSG00000204120_11 (sequence is synthesized)
tcatctgctagaccaggtactccttcagaccatcagtctcaggaagcatcacagtttgagaggaaagatgaaccaaaaactgagcaaacggaaaaagctgaagaggagactcggatggaa

SEQ ID NO: 739075 - DNA, 120 bp, Artificial Sequence
  ENSG00000204120_12 (sequence is synthesized)
aatagtctaccagccaaagtgcccagcagaggggatgaaatggttgctgatgtccagcagcccctgtcgcagattccttcagatacagcctctcctcttctcatacttccacctcctgtt

SEQ ID NO: 739076 - DNA, 120 bp, Artificial Sequence
  ENSG00000204120_13 (sequence is synthesized)
cccaatcctagtcctactctccggccagttgaaacaccagttgtaggtgctcctggtatgggcagtgtttccacagaacctgatgatgaagaaggtctcaaacatttggagcagcaagct

SEQ ID NO: 739077 - DNA, 120 bp, Artificial Sequence
  ENSG00000204120_14 (sequence is synthesized)
gagaaaatggtggcttatctccaagacagtgcactagatgatgaaagattggcatcaaaactgcaagagcacagagctaaaggagtgtcgattccattgatgcatgaagcaatgcagaag

SEQ ID NO: 739078 - DNA, 120 bp, Artificial Sequence
  ENSG00000204120_15 (sequence is synthesized)
tggtattacaaagatcctcagggagaaattcaaggtcccttcaataatcaggagatggcagaatggtttcaggcgggctattttactatgtctttattggtgaagagagcgtgtgatgaa

SEQ ID NO: 739079 - DNA, 120 bp, Artificial Sequence
  ENSG00000204120_16 (sequence is synthesized)
agcttccaacctcttggcgatatcatgaaaatgtggggaagggttcccttttctccaggtccagctccccctcctcatatgggagagctggaccaggaacgactgaccaggcagcaagaa

SEQ ID NO: 739080 - DNA, 120 bp, Artificial Sequence
  ENSG00000204120_17 (sequence is synthesized)
ctcacagccttataccagatgcagcacctgcagtaccagcagtttttaatacaacaacaatatgcacaggttttggcccaacagcagaaagcagcactgtcttcccagcagcagcagcag

SEQ ID NO: 739081 - DNA, 120 bp, Artificial Sequence
  ENSG00000204120_18 (sequence is synthesized)
ttggcacttcttcttcaacagtttcagaccttgaagatgagaatatctgatcagaacatcattccctcagtaactaggtctgtgtccgtgccagatactggctctatctgggagcttcag

SEQ ID NO: 739082 - DNA, 120 bp, Artificial Sequence
  ENSG00000204120_19 (sequence is synthesized)
ccaacagcttcacagcctacagtttgggaaggtggtagtgtatgggatcttcctctggacaccacgacaccaggccctgccctggaacagcttcagcagctagagaaggccaaagctgca

SEQ ID NO: 739083 - DNA, 120 bp, Artificial Sequence
  ENSG00000204120_20 (sequence is synthesized)
aagctagagcaagagagaagagaggcagaaatgagggcaaaacgggaagaggaagagcgaaagaggcaggaagaactccgaagacaacaggaggaaattcttcggcgacagcaggaagaa

SEQ ID NO: 739084 - DNA, 120 bp, Artificial Sequence
  ENSG00000204120_21 (sequence is synthesized)
gaaaggaaaaggcgagaggaagaagaacttgcccgaaggaaacaggaagaggctctgcgtcgccagcgggagcaagaaattgcattaaggcgacagcgagaagaggaagaaagacagcag

SEQ ID NO: 739085 - DNA, 120 bp, Artificial Sequence
  ENSG00000204120_22 (sequence is synthesized)
caagaagaagctcttagaagactggaagagaggagaagagaagaggaagaaaggcggaagcaggaagaattgttacgcaaacaggaagaggaggctgcaaaatgggcccgggaagaagaa

SEQ ID NO: 739086 - DNA, 120 bp, Artificial Sequence
  ENSG00000204120_23 (sequence is synthesized)
gaagcccagcgtcgattagaggagaaccggctgcggatggaagaggaggcagccagactccggcatgaggaagaagaacggaagagaaaggagctggaggtccagcggcagaaggagtta

SEQ ID NO: 739087 - DNA, 120 bp, Artificial Sequence
  ENSG00000204120_24 (sequence is synthesized)
tcttcttcaacgtggggccagcagtccaatacaacagcatgtcagtcccaggccacgctgtcgttggctgaaatccaaaaactagaggaagaacgagaacggcagcttcgagaagagcaa

SEQ ID NO: 739088 - DNA, 120 bp, Artificial Sequence
  ENSG00000204120_25 (sequence is synthesized)
aggcgccagcagagggagttgatgaaagctcttcagcagcagcagcaacagcaacagcagaaactctcaggttgggggaatgtcagcaaaccttcaggtaccacgaaatctcttctggag

SEQ ID NO: 739089 - DNA, 120 bp, Artificial Sequence
  ENSG00000204120_26 (sequence is synthesized)
atccagcaggaagaggccaggcaaatgcaaaagcagcagcagcagcagcagcaacaccagcaaccaaacagagctcgtaacaatacgcattccaacctgcacaccagcattgggaattct

SEQ ID NO: 739090 - DNA, 120 bp, Artificial Sequence
  ENSG00000204120_27 (sequence is synthesized)
gtttggggctctataaatactggtcctcctaaccagtgggcatctgacctagtcagtagtatttggagtaatgctgacactaaaaactccaacatgggattctgggatgatgcagtgaaa

SEQ ID NO: 739091 - DNA, 120 bp, Artificial Sequence
  ENSG00000204120_28 (sequence is synthesized)
gaggtgggacctaggaattcaacaaataaaaataaaaacaacgccagtctcagtaaatctgtaggtgtgtctaaccggcagaataagaaagtagaagaagaagaaaagttgctgaagctc

SEQ ID NO: 739092 - DNA, 120 bp, Artificial Sequence
  ENSG00000204120_29 (sequence is synthesized)
tttcagggagtaaataaagcccaagatggatttacgcagtggtgtgaacagatgcttcatgcccttaatacggcaaataacttggatgttcccacatttgtttctttcctgaaagaagta

SEQ ID NO: 739093 - DNA, 120 bp, Artificial Sequence
  ENSG00000204120_30 (sequence is synthesized)
gaatctccttatgaggtccatgattatatcagggcctatttaggagatacttctgaggccaaggagtttgccaagcagttccttgagcgccgtgccaaacagaaagccaaccagcagcgt

SEQ ID NO: 739094 - DNA, 120 bp, Artificial Sequence
  ENSG00000204120_31 (sequence is synthesized)
cagcagcagcagctgccacagcagcagcagcagcagccgccacagcagccgccacagcagccacaacagcaggactctgtgtgggggatgaaccacagtacactccattcagtatttcag

SEQ ID NO: 739095 - DNA, 120 bp, Artificial Sequence
  ENSG00000204120_32 (sequence is synthesized)
accaatcaaagcaacaaccaacaatccaattttgaggctgtgcagagtggcaagaagaagaaaaagcagaagatggtccgagcagatcccagtttattaggattttcagtcaatgcatca

SEQ ID NO: 739096 - DNA, 120 bp, Artificial Sequence
  ENSG00000204120_33 (sequence is synthesized)
tcggagcgactcaacatgggtgaaatcgagacgttggatgactactgagcacctgccagtggactggccatccctctcctgtctgccgactatggagtctccacctttggacacaacact

SEQ ID NO: 739097 - DNA, 120 bp, Artificial Sequence
  ENSG00000204120_34 (sequence is synthesized)
tactcaccatttactctttatcactctgcaacaaatcacagaaccgatcatctcaggctttttcttctggccctttgtgtccaagattctttaatccatttttgttggtgaacatctcag

SEQ ID NO: 739098 - DNA, 120 bp, Artificial Sequence
  ENSG00000204120_35 (sequence is synthesized)
actatagataagtggactggaccctgtgtcttgggggtggcagttgggattactccccaacaaggctgattttaggcagcatgtgttcactgtgctgtgatttcatctactgtctcccag

SEQ ID NO: 739099 - DNA, 120 bp, Artificial Sequence
  ENSG00000204120_36 (sequence is synthesized)
aaagtgtgttgggatcggccattagcagcttgctttctcttgtcactttttttcttctattttgttttttcttcttctttttccccccatcagggcaaatggtctaactggtgcaatcat

SEQ ID NO: 739100 - DNA, 120 bp, Artificial Sequence
  ENSG00000204120_37 (sequence is synthesized)
gaagagagttaatggttaacagacattggccaataacaaaacaccccatggactgtgactcgagtatccaacaggcagtcagagctctcccggtctgaaagttgcattgccactgctaac

SEQ ID NO: 739101 - DNA, 120 bp, Artificial Sequence
  ENSG00000204120_38 (sequence is synthesized)
tttgggattgcatcagagaggccctgagtggggttgagatgaggttggtttggtttgatgttacacactcctcacctgttctttctgagtgtcctttctctgaaaggatttatgtttttc

SEQ ID NO: 739102 - DNA, 120 bp, Artificial Sequence
  ENSG00000204120_39 (sequence is synthesized)
ttcgttagatagtgacttctgagcaagctgatctcccctggcatgctccaacctgattggacaaaggaagctctatggcctgggagagagactattcttaatttttctttcttacaaaaa

SEQ ID NO: 739103 - DNA, 120 bp, Artificial Sequence
  ENSG00000204120_40 (sequence is synthesized)
ctgatttttcccataaatatttttacttcagaggactaggaccattttgttttgggcccttctgctgaaaatttgtctcgtttaagaggcagctagaatctttaccatatgtatgaattt

SEQ ID NO: 739104 - DNA, 120 bp, Artificial Sequence
  ENSG00000204120_41 (sequence is synthesized)
gtataatttcatttttggatagggataaacttttgcttctgataaaagcctggaatttcatctggtcctcagagcattgcgtgtgtgtcttgctgtagcccggaaaaggttttgtgtaaa

SEQ ID NO: 739105 - DNA, 120 bp, Artificial Sequence
  ENSG00000204120_42 (sequence is synthesized)
gattctgggatggcaagttgtttgccttttctgaaaagagaacatacagaacctgtccatctttaagaccttcatccatggaatctactatacaggaggatgcagtgggctggaggggat

SEQ ID NO: 739106 - DNA, 120 bp, Artificial Sequence
  ENSG00000204120_43 (sequence is synthesized)
gggcgaaaatgggagcaggaagcctggcctggcttctggtcatggcctcctaaaaccttaaacttcaagtagaaatgtactcaagccctatttataaacaaatacttttcctgcctccac

SEQ ID NO: 739107 - DNA, 120 bp, Artificial Sequence
  ENSG00000204120_44 (sequence is synthesized)
caaacccctacagaacatcacctggaattgccactcacactgggttggagtcattgggcagctgtgcctgtgcgagaggtgctgtggtctgggcagcccctggaaaagcacctttgctgc

SEQ ID NO: 739108 - DNA, 120 bp, Artificial Sequence
  ENSG00000204120_45 (sequence is synthesized)
ctgtcattgttgcctgaagaaggctggagttgctctgagagcagtttgggtttggagtattatatttggcttctatttttattattttggatcaccattctccctatcccttcttgcctc

SEQ ID NO: 739109 - DNA, 120 bp, Artificial Sequence
  ENSG00000204120_46 (sequence is synthesized)
cctcccttctaaacatgtgtaataactatacagagactgctacaaaattgtatatagtttttggatcaaatagcatgaggggagaggaaaccattaaaagttggggctcctactctcctt

SEQ ID NO: 739110 - DNA, 120 bp, Artificial Sequence
  ENSG00000204120_47 (sequence is synthesized)
tgctttgtaaattcaaaagttgggggtgggtaagagggatagttaaaatgtttacaaaactttaggctccctcggaacttttgccagtgtggaggaaaataaaaaagaacttaaataaaa

SEQ ID NO: 739111 - DNA, 120 bp, Artificial Sequence
  ENSG00000204120_48 (sequence is synthesized)
atcttgtgttgttgaggctgaggactgactggggttctgagactccctgtcccggaccgcagattatagtgggaccagtctcattaggttgaatctacagcctatgttggtgttaaccca

SEQ ID NO: 739112 - DNA, 120 bp, Artificial Sequence
  ENSG00000204120_49 (sequence is synthesized)
atggaggctgagttctgcactaaactgttcctcttggtaccatggaaaagctccaagcacccaagacatggaggcagccatggcttctttctctgccagaccacgtagcactggctggtt

SEQ ID NO: 739113 - DNA, 120 bp, Artificial Sequence
  ENSG00000204120_50 (sequence is synthesized)
ctgtatttgagaatgtagaggtcaaggcagatgtcggtaagtttgaccaaatatcttttctctttttgactctccctttctgctaacatgtggatcagctcctgccctcataccgcagac

SEQ ID NO: 739114 - DNA, 120 bp, Artificial Sequence
  ENSG00000204120_51 (sequence is synthesized)
acacccactctgaacacacccctccagagcttgcccacaccttcccaactagactctgtgtgtgtattcaggaaaaatgaaaataaatttttaaaaattgggagtggaatgggcagatta

SEQ ID NO: 739115 - DNA, 120 bp, Artificial Sequence
  ENSG00000204120_52 (sequence is synthesized)
gggggaacaaagtcattttggtcatggaacatccatttgcttaaccaaggagacttgcttctatctgaggaatttcccacttagtagaaagaaacactcttccctgggaatgtttgtttc

SEQ ID NO: 739116 - DNA, 120 bp, Artificial Sequence
  ENSG00000204120_53 (sequence is synthesized)
tgtctctctcaatgctactctctttcatattctcatttgctcaccctttcacttagagccaccgttttctcatcccattctatgaacttatttccaaattctcctaactattcctgagtt

SEQ ID NO: 739117 - DNA, 120 bp, Artificial Sequence
  ENSG00000204120_54 (sequence is synthesized)
ttgaagtatttgttttgtaccctctctgcttccggttttttgtttggttggcttttttggagatagggtcttgtgatgttgcccacactggtctcgagcccctgggctcaagtgatcctc

SEQ ID NO: 739118 - DNA, 120 bp, Artificial Sequence
  ENSG00000204120_55 (sequence is synthesized)
tacaggtgtgtgccaccatgcccagctccagttttgttggttgatttgtttaaattcagagatttaaaaacatcccagacaagacagtttgattatggagactgtccccaagcagattgg

SEQ ID NO: 739119 - DNA, 120 bp, Artificial Sequence
  ENSG00000204120_56 (sequence is synthesized)
ttatggagactgtccccaagcagattggtgtgctggtggctgctgtgcataacagattccctccagattggcttacaacagctacttcattctgtgggtcaggaatttggatagggctca

SEQ ID NO: 739120 - DNA, 120 bp, Artificial Sequence
  ENSG00000204120_57 (sequence is synthesized)
gctgggtggtggttctcctggggtattctttggttgtggtcagatgtcttccagggcatcattcctatgaaggcttaatgaattaggcaagctgtccaagatggctcactcgtgtaatga

SEQ ID NO: 739121 - DNA, 120 bp, Artificial Sequence
  ENSG00000204120_58 (sequence is synthesized)
cagttgacgttggctgtaggctgggaactcagctgggttgatgactggaggagcttatgtgtgtcgtctccggaatggcagcttcagaggagttgaacttaagtggtgattggcttcccc

SEQ ID NO: 739122 - DNA, 120 bp, Artificial Sequence
  ENSG00000204120_59 (sequence is synthesized)
cagagaaccaggcagaagctgtgttacctttttgagctcttagctcaggagtcacatagagtcacttctgtgacactgtgttgcatcaaagtagtcacaaacccactcagattcaagaga

SEQ ID NO: 739123 - DNA, 120 bp, Artificial Sequence
  ENSG00000204120_60 (sequence is synthesized)
agggagcatggccctctccctgcaaccccctccccccccgccttgatgaaaggagtgacaaggtcacattggagaagagcttgtggggtgggagatattatagccatttttgggaaatat

SEQ ID NO: 739124 - DNA, 120 bp, Artificial Sequence
  ENSG00000204120_61 (sequence is synthesized)
ctgcataaaatgagtttatgcatacatgaaggactttattttcattggctttaagttgagggtttttgtttttgtttttgtattggagatgggttcttactatgttgcccaggctggtct

SEQ ID NO: 739125 - DNA, 120 bp, Artificial Sequence
  ENSG00000204120_62 (sequence is synthesized)
cagcctcccaagtagctgggactacagctatgtgccagtgcacccagcttgttttttttaaattttaggatagataatggtacttctggctttatttaaataatttttttagggaaacca

SEQ ID NO: 739126 - DNA, 120 bp, Artificial Sequence
  ENSG00000204120_63 (sequence is synthesized)
catatatgttatatacgtatatatattgcaccctactttaaaattgactgataacaaaattggtaattttgtataaaatgcccaactgtgcattattaataaaagtatgtgaatgactct

SEQ ID NO: 739127 - DNA, 120 bp, Artificial Sequence
  ENSG00000204120_64 (sequence is synthesized)
tgtgaaccagcagaatttttgaacaggtttcttcacatataaaaatctattgtaaaaatacggaaaagaatggcagcggaaacgcagacactgaactttgggcctgaatgatgtgtttgg

SEQ ID NO: 739128 - DNA, 120 bp, Artificial Sequence
  ENSG00000204120_65 (sequence is synthesized)
accccgaatatggaattctcatggaattttgagatccatcacattgtagtgtggcttccccccctcccctccttcctttttccccaaagttggtgattgaagatcctctcttcagtggca

SEQ ID NO: 739129 - DNA, 120 bp, Artificial Sequence
  ENSG00000204120_66 (sequence is synthesized)
tcaataataataattactttttctattcaaacctcgggcaacccctttggtaatatcagaagtagtatctaaaatagataaattggatttgtgtcttaaactcttggttgttcaggtggg

SEQ ID NO: 739130 - DNA, 120 bp, Artificial Sequence
  ENSG00000204120_67 (sequence is synthesized)
ctctatttgaggagtcttattaacttatcctattagaaatatttctttttattaatatatgtaatctcgaagttttcttaacctttatagccagcatttggagactgaggagaaatcact

SEQ ID NO: 739131 - DNA, 120 bp, Artificial Sequence
  ENSG00000204120_68 (sequence is synthesized)
atttgaagttctaagaaccgatggaactcctgtattttgagagtttatttagaacatgttaacctaagtaatgctgtacttgttttagttattcctttatatttttaaaatgattttctt

SEQ ID NO: 739132 - DNA, 120 bp, Artificial Sequence
  ENSG00000204120_69 (sequence is synthesized)
agtatcaaattaatatgtttctaaaaaaattagaaataactagtaagccagaaataatttcaacatccatggtacacactgtaaataccttggtgtatctttccaggtggttttatgtat

SEQ ID NO: 739133 - DNA, 120 bp, Artificial Sequence
  ENSG00000204120_70 (sequence is synthesized)
gcttatttgtgtatatatacacttattttttacaaaaatgggatcatactgtaccttcagttttgtagcctgcttaaagaaataaccaaatcagaaacatctttttttaatcaataaata

SEQ ID NO: 739134 - DNA, 120 bp, Artificial Sequence
  ENSG00000204120_71 (sequence is synthesized)
ttttctgttgtattaaatggttgcattgtatggatgtaccatcatttattcaactagtcttctagatgtgacatatagaagctgttcttgatttttcattataaaaatatttttaatgaa

SEQ ID NO: 739135 - DNA, 120 bp, Artificial Sequence
  ENSG00000204120_72 (sequence is synthesized)
attttatgctgagcttgtccgtaggcagagggtttgtagactatgttcccaacaagcattcagtgaagaatggataggatctgggctgagagagaaaagaaattccagctggtcaaaaac

SEQ ID NO: 739136 - DNA, 120 bp, Artificial Sequence
  ENSG00000204120_73 (sequence is synthesized)
ttgaacagatgctgcttgaatctggggcttcgtttatatttcaagactgctgcctgtaggagctccatctgtatcatttgtgttaatagtgaccctggagttttgtacttccagaaccta

SEQ ID NO: 739137 - DNA, 120 bp, Artificial Sequence
  ENSG00000204120_74 (sequence is synthesized)
tttagaagatgacacataactttaattttgtaagctctttagtttctaagtgcctcctgagtggctcagctttgaatgccacagaggaaaaaaaatatatatgtatataagcgagagggt

SEQ ID NO: 739138 - DNA, 120 bp, Artificial Sequence
  ENSG00000204120_75 (sequence is synthesized)
gggaaagaagttaaagttaattattttaggagtggtgtggaatgatggcaaagtcagtcaggttttgttatgtcctttttgtagaagaaataagatttgctgttcttgtggtgcagaggt

SEQ ID NO: 739139 - DNA, 120 bp, Artificial Sequence
  ENSG00000204120_76 (sequence is synthesized)
tggcaaagtctgacctttgggctaaatctggcctgctctctatttttatatttataagcaaagtgttactgaaacagacacacctgttggtttgtaggatgtatattgctgcttttgcct

SEQ ID NO: 739140 - DNA, 120 bp, Artificial Sequence
  ENSG00000204120_77 (sequence is synthesized)
tatgatggcagaattgagtagttgcaacagagagtatatgagctgcatagatgaaactatttactctctggcccattacaaaagtttaaccctgatctagtgaagaaaaattacctaaat

SEQ ID NO: 739141 - DNA, 120 bp, Artificial Sequence
  ENSG00000204120_78 (sequence is synthesized)
ttttccaagttgaagacgatcaatgtatgaatttttatagaagtgttacattttttacaaagggtacgtcatatggttaaagctactaatttgaatctgtttcatttttcatttgatttc

SEQ ID NO: 739142 - DNA, 120 bp, Artificial Sequence
  ENSG00000204120_79 (sequence is synthesized)
tgataaaaggttatctttggagtttaccaatttttgacattcgtgattttaaaaatattttctctgaatagaccactttgcactgaattgtgaatttttttgctatcctctttcactcgg

SEQ ID NO: 739143 - DNA, 120 bp, Artificial Sequence
  ENSG00000204120_80 (sequence is synthesized)
aaacacgccatctatgagttcagttctttctagaatgaagcatagaattttctatgtgtctattatcataatgaagaattataaaatatatttgatagctatttctaataatgtctcctg

SEQ ID NO: 739144 - DNA, 120 bp, Artificial Sequence
  ENSG00000204120_81 (sequence is synthesized)
gggggctttgaattgaactttgtctttcagcatctcagccatgtgaactaagtgtggattgacaggttatacttttttttttactttttgaagacaacaatatgcacaggttttggccca

SEQ ID NO: 739145 - DNA, 120 bp, Artificial Sequence
  ENSG00000204120_82 (sequence is synthesized)
actgatacattgatcagtatgaggtcaatatgagtatattgtgagatatcctacgacatcacattaagacagttcaagtactgaagattccaggatgatctattctttttaaaattagga

SEQ ID NO: 739146 - DNA, 120 bp, Artificial Sequence
  ENSG00000204120_83 (sequence is synthesized)
atgatgcttaccatgtatttgcttctcatgaaaagagaaatgggtagaattacagacatctttagatgtaagatgtcttgtaagatgtaagaagcttgcataacccctgtgaacaaccat

SEQ ID NO: 739147 - DNA, 120 bp, Artificial Sequence
  ENSG00000204120_84 (sequence is synthesized)
tgcacagggggagatcagttctggtgcccatcttatgtttccaaaggaacgtttaaagttagttccgaagtagtcttcctgatcatgtgtgcaagacttcatgaccaagctcccagatga

SEQ ID NO: 739148 - DNA, 120 bp, Artificial Sequence
  ENSG00000204120_85 (sequence is synthesized)
tccaggtcagtcctgtttgggcttttagaaaccagaggagttggaaattcagggacagtcttgtcaaaattctccatcttgatttgatattcacctttggaacctcgggtcaacagagat

SEQ ID NO: 739149 - DNA, 120 bp, Artificial Sequence
  ENSG00000204120_86 (sequence is synthesized)
agcattgaaaaaagaaaacatgagatacagtaaagaaaaagtagctgcataactggctgggtgtatttaatacattaaaaaatggataagtcttattctgtcagtcctgtttcagagatc

SEQ ID NO: 739150 - DNA, 84 bp, Artificial Sequence
  ENSG00000204120_87 (sequence is synthesized)
tgtcctgaattggagactggcacagaacaaggatgttgttggaaaaactgatgaaatctgaataaactctgaagtatagagact

SEQ ID NO: 739151 - DNA, 120 bp, Artificial Sequence
  ENSG00000204120_88 (sequence is synthesized)
cttcttcttcaacgtggggccagcagtccaatacaacagcatgtcagtcccaggccacgctgtcgttggctgaaatccaaaaactagaggaagaacgagaacggcagcttcgagaagagg

SEQ ID NO: 739152 - DNA, 120 bp, Artificial Sequence
  ENSG00000204120_89 (sequence is synthesized)
tttttgaaacttttgctttatgtgcctcgctgaaaacaatgtgttagttcaggaataaattatatttggtaaatgagtgtattctatacttaattaaaattttttttctttgtctggtta

SEQ ID NO: 739153 - DNA, 120 bp, Artificial Sequence
  ENSG00000204120_90 (sequence is synthesized)
gaggctgaggactgactggggttctgagactccctgtcccggaccgcagcgttaaaaggatctgaacaaagtctgctcaaatctcctgctgtgaaccagcagaatttttgaacaggctgg

SEQ ID NO: 739154 - DNA, 120 bp, Artificial Sequence
  ENSG00000204120_91 (sequence is synthesized)
aaacattgctgtttattcatctctctagctagctatgctttttactttcagtttactgctgcttagctggtataagtacattcatattgtatctttactgtgctctcttctcccaaaaaa

SEQ ID NO: 739155 - DNA, 120 bp, Artificial Sequence
  ENSG00000204120_92 (sequence is synthesized)
tggggcatttgaagccttgcgatgggaactgtgtgaaggaaatggagctgtttagataggagacaagattgtggacagggcagagtggggaggagggcttatagggtcactctctatcaa

SEQ ID NO: 739156 - DNA, 120 bp, Artificial Sequence
  ENSG00000204120_93 (sequence is synthesized)
gagactccctgtcccggaccgcagtcaaagcacttaaacacacgtagtctctctgtaagaaagcgttaaaaggatctgaacaaagtctgctcaaatctcctgctgtgaaccagcagaatt

SEQ ID NO: 739157 - DNA, 120 bp, Artificial Sequence
  ENSG00000204120_94 (sequence is synthesized)
acgtgcgtggcgacgtgtcggccatcttgtgttgttgaggctgaggactgactggggttctgagactccctgtcccggaccgcagagaccacgtctccacctcctgggctccaacgattc

SEQ ID NO: 739158 - DNA, 120 bp, Artificial Sequence
  ENSG00000204120_95 (sequence is synthesized)
cacagatagtgtggttttcaggtggggcatcatgatctagttccagatcaccattcatctcagccagaacataccagagcactgcaaagacaagccagtggacaacaaaagaagcagaaa

SEQ ID NO: 739159 - DNA, 120 bp, Artificial Sequence
  ENSG00000204120_96 (sequence is synthesized)
agaccaacatcatccaacgccagcgcatgtccattaggattccccaagcatctcgaagatatgcaagacctctttgagcgccatccatttgaagtgtgctgtggccatccttggtgacca

SEQ ID NO: 739160 - DNA, 120 bp, Artificial Sequence
  ENSG00000204120_97 (sequence is synthesized)
tcctccggtatctttgacttaggagaggagcaataactttgcaattactgctgtccatctcaggctgtatttctctaaaatcaagagtaaattagtaagctcttaactgttttatagtta

SEQ ID NO: 739161 - DNA, 120 bp, Artificial Sequence
  ENSG00000204120_98 (sequence is synthesized)
tgaggactgactggggttctgagactccctgtcccggaccgcagcgttaaaaggatctgaacaaagtctgctcaaatctcctgctgtgaaccagcagaatttttgaacagagttgcactc

SEQ ID NO: 739162 - DNA, 120 bp, Artificial Sequence
  ENSG00000204120_99 (sequence is synthesized)
aaccagcagaatttttgaacagagttgcactcttgctgccgaggctggagcacaatggcgtgatctcggctcaccacatcctctgcctcctgggctcaagcagttctgcctcagcctccc

SEQ ID NO: 739163 - DNA, 62 bp, Artificial Sequence
  ENSG00000204120_100 (sequence is synthesized)
tgcgccaccacaccccaattcccgacctcaggttatccgcccgccttggcctcccaaagtac

SEQ ID NO: 739164 - DNA, 120 bp, Artificial Sequence
  ENSG00000204120_101 (sequence is synthesized)
gtgtatgacagtattttatcaaccatgtgccagaggggcttacctttaatacaggaaattatgataagtaaactgttttcacttttaaaaatcaagttattagcaaaaccactagcttag

SEQ ID NO: 739165 - DNA, 120 bp, Artificial Sequence
  ENSG00000204120_102 (sequence is synthesized)
atctgggtagacattataacaggcattcagagtattttaaggaagtggtaggtagatagaaacatactgaagttaatgtttgggtagagttaggatggttttataccaactcttcatggc

SEQ ID NO: 739166 - DNA, 120 bp, Artificial Sequence
  ENSG00000204120_103 (sequence is synthesized)
ggagtcccacccgccctagaaaattattttctttttatttgagtcgttgtctaggtgcacatacaattttatgtaagtataattataacatttttatgtctgtatgttttctgctacatt

SEQ ID NO: 739167 - DNA, 80 bp, Artificial Sequence
  ENSG00000204128_0 (sequence is synthesized)
agcatggagcgcgagctggaggcgctggcggcccggcttgcgcgccctgccgagccgcccttccaggcgttggtggaagc

SEQ ID NO: 739168 - DNA, 120 bp, Artificial Sequence
  ENSG00000204128_1 (sequence is synthesized)
gtggaagcggcggggggccgcgggcaggtgctgctggtgggcgagctgtgggagcgcgaacagagccgcgcgctgctgcgggacttcgcacgggcggtgttcccgccggagccaggcgcg

SEQ ID NO: 739169 - DNA, 80 bp, Artificial Sequence
  ENSG00000204128_2 (sequence is synthesized)
ggtcttcgtgctgtgccgcgcgtcgtcgctggccgcccgggagccgcggcgccgcctgcgggagatgctgcgggacgtgc

SEQ ID NO: 739170 - DNA, 80 bp, Artificial Sequence
  ENSG00000204128_3 (sequence is synthesized)
ggtggccgaggccgggccagaggacgcggtggcgccggggctgcggctgctggaggcgctgttgcgcgccgtgttcggcc

SEQ ID NO: 739171 - DNA, 120 bp, Artificial Sequence
  ENSG00000204128_4 (sequence is synthesized)
cggcctcccggcctcctgcctggccgtccaggcggccgcctgcagggccctgcaagccgccggagccgggcaaccagtggaaggagcctgggagaggccaggcctccccggactgctagc

SEQ ID NO: 739172 - DNA, 120 bp, Artificial Sequence
  ENSG00000204128_5 (sequence is synthesized)
ctgcttttcctggggtccctggagccggaggaagaaccaggatgttgctgcctgcagaagctcagctcaggaagacttccaggaacctgaggaggagctgccactaacagccatatttcc

SEQ ID NO: 739173 - DNA, 120 bp, Artificial Sequence
  ENSG00000204128_6 (sequence is synthesized)
caatggagactgtgatgaccttggaagggggtcaaaagcctgtgatggagtcgtacacactcctgctgagcccaccggagactcaagatgaaggctggacccttgcgctgtccctggctc

SEQ ID NO: 739174 - DNA, 120 bp, Artificial Sequence
  ENSG00000204128_7 (sequence is synthesized)
taacctacagactggggcctggctccgtcttactggcccccaggtctccatggagactgcagaaacccccgcctgctggaggcctgccacactcacagttaccagctagacagtggggct

SEQ ID NO: 739175 - DNA, 120 bp, Artificial Sequence
  ENSG00000204128_8 (sequence is synthesized)
tactaagacaagcaggacctaaaacagtgtctcccctgggaacctactccccacccagcatttgctaagtctgatcacagggaggttattttgtctctctgtctcggtttctctgagcca

SEQ ID NO: 739176 - DNA, 120 bp, Artificial Sequence
  ENSG00000204128_9 (sequence is synthesized)
ctgagacagatggctgtccgctttgaggctctgcagagctgtggcaccccatggtgtgtctgcagtgttctgggcacatgcatgggcacccatcgttgagagtgcagctgggaagaactc

SEQ ID NO: 739177 - DNA, 120 bp, Artificial Sequence
  ENSG00000204128_10 (sequence is synthesized)
tgaaccagaagtcatcagagctgaggcatggccttgaacatgtcactcagtctctggggcttctgtttcacaaatgcatgagggggccaccagcccagtggctttaaaccaggggcaggt

SEQ ID NO: 739178 - DNA, 120 bp, Artificial Sequence
  ENSG00000204128_11 (sequence is synthesized)
tgtccctccaggcagcattggaaatgtgtgtgtgttgagggggtcacagtgactgtgggggcacccctggcatctagtgggcatcccacaatgtgcagaacagtctctgacagcaaagaa

SEQ ID NO: 739179 - DNA, 120 bp, Artificial Sequence
  ENSG00000204128_12 (sequence is synthesized)
ttggtccattcaatgccaattgtagtacctttgagacattctggctgagccaatgccttctccctgtcagagtcccccagagcagagagggtcaggcttccctggaccttggctcccaga

SEQ ID NO: 739180 - DNA, 120 bp, Artificial Sequence
  ENSG00000204128_13 (sequence is synthesized)
gcaagccaaaataaagactacactgttgccttgggggcttgtcgggccagggccaagacggtctgcgtgctgcagggccaggacagaaatagccacacatgccggtgagaacaaagagcc

SEQ ID NO: 739181 - DNA, 120 bp, Artificial Sequence
  ENSG00000204128_14 (sequence is synthesized)
ctgtgccaagtcctttgggtataaggatgctagggaattcctataggcaccaaacagaaggaaagctaggggcttggactactgggtataggacttgctctagctctcaggtcctagccc

SEQ ID NO: 739182 - DNA, 120 bp, Artificial Sequence
  ENSG00000204128_15 (sequence is synthesized)
aagctcaatgcaaacacagcccctccgggctctctgtttctgtgaggttctggaatcccttcctctgtgtccgtgagtctgacagaatcgatgatgttcccttagagctgggaaatccat

SEQ ID NO: 739183 - DNA, 120 bp, Artificial Sequence
  ENSG00000204128_16 (sequence is synthesized)
gtgtttattcacggagggaactcaccattacctcccttgtcttctttgcctgccttggagaaatccagagtcttcggaatggcaaaggcagctcctggatttccctggaggggaggcact

SEQ ID NO: 739184 - DNA, 120 bp, Artificial Sequence
  ENSG00000204128_17 (sequence is synthesized)
agctgagggaagtagctcccttcattcatgatgcacagtttacgcagcagacacacaactgcgcctactatttgctcggtgccctgcaaggtgctgcctaactttgatttgttatttcag

SEQ ID NO: 739185 - DNA, 120 bp, Artificial Sequence
  ENSG00000204128_18 (sequence is synthesized)
ctctctccaggatagtgccaaatggtgcaatgggaaacctgttttgctggggggctctagatcactggctccagaactcccggctgccagggtagcccctacccccagccccttgctcct

SEQ ID NO: 739186 - DNA, 120 bp, Artificial Sequence
  ENSG00000204128_19 (sequence is synthesized)
ggacagcagtgggtctcacctttagcctctgcccccagttctggtctgacccaacagaggggctctatgatattaagaaggggcccttcctgctctgtgcctcaacctattctccataat

SEQ ID NO: 739187 - DNA, 120 bp, Artificial Sequence
  ENSG00000204128_20 (sequence is synthesized)
agggagtctaatcctattccttccctgcctgatgaggatggtgtgaggatgaggaggacggcatctcatttggggctttttggcagtgggcctcattttaatcctgcagggctgcctgcc

SEQ ID NO: 739188 - DNA, 120 bp, Artificial Sequence
  ENSG00000204128_21 (sequence is synthesized)
agtggatctatccagctgcttccttgtagccaagaatgagttcaatgaattgtgattcactgattttattgattttgttttaaaacagggagactggtatttttgaagctgctatcattt

SEQ ID NO: 739189 - DNA, 120 bp, Artificial Sequence
  ENSG00000204128_22 (sequence is synthesized)
tctatttctttattaatttctttgtaatcatcttattaaagttttcttatttagtgggagagggagctttgtttaagtttggaatttgcctaaggcagaagttataaggcttcataacct

SEQ ID NO: 739190 - DNA, 120 bp, Artificial Sequence
  ENSG00000204128_23 (sequence is synthesized)
tttgtatgtattgccaatatttgaaacttgggagattacgtataaaaaatacctagttttctgggtggaggatggggcatgctgtcatctcaagtctgctgcggctcacccccaccacct

SEQ ID NO: 739191 - DNA, 120 bp, Artificial Sequence
  ENSG00000204128_24 (sequence is synthesized)
ttaccccctcccccgcccttcccatcccccactgcacttcactcatgtaagacgtctgcccggtgctggtccaggcgggcatgtgagtttgtagcctctgctccaaaggatggtttacac

SEQ ID NO: 739192 - DNA, 120 bp, Artificial Sequence
  ENSG00000204128_25 (sequence is synthesized)
attattttttcattaccttcagtattcctgtgaatggttcaagagagaaagtcttcatttactaagatttgggttctgcctcccaagtgacaatacggggctgagatccctctcagcttc

SEQ ID NO: 739193 - DNA, 120 bp, Artificial Sequence
  ENSG00000204128_26 (sequence is synthesized)
tttgagatgtggccaccataagcatcatcgttgtagggacagtctcattgctgtcttctagcagacagaagagttaggtgccagaaaggacaatcttgatggtgggtcccctccctgaag

SEQ ID NO: 739194 - DNA, 120 bp, Artificial Sequence
  ENSG00000204128_27 (sequence is synthesized)
gactttaagaaggcataaaggggttggggtggagggtggcgtgtgaaggaggaggcccttgattaggtcagtggtccctgggagccatcggcgagaggcctccagccgggtgacagtctg

SEQ ID NO: 739195 - DNA, 120 bp, Artificial Sequence
  ENSG00000204128_28 (sequence is synthesized)
ggctctcgggtactaatctttctaatatggcagtggttgtggcacttctgacttgaattgataattctcatatctaataaaaccaagaagtacctcgttgatatcttatagaaaacaaaa

SEQ ID NO: 739196 - DNA, 120 bp, Artificial Sequence
  ENSG00000204128_29 (sequence is synthesized)
cagcatggagcgcgagctggaggcgctggcggcccggcttgcgcgccctgccgagccgcccttccaggcgttggtggaagcggcggggggccgcgggcagtggaaggagcctgggagagg

SEQ ID NO: 739197 - DNA, 120 bp, Artificial Sequence
  ENSG00000204128_30 (sequence is synthesized)
aagcaatcatttttaaagttcggttttaaaaacccacccacttttgcaaatcagactctgtgtttttaatcagacagttgaaactagggcagttgaccgttggggcacttgatttgctaa

SEQ ID NO: 739198 - DNA, 120 bp, Artificial Sequence
  ENSG00000204130_0 (sequence is synthesized)
cgggcctggctgcagatgcggtggtggccgccgagcgcctggaaggagctgctggacaggccgagggagcctccgcccgagaccgcgcagccgccgccgccatggctacaaaagacccca

SEQ ID NO: 739199 - DNA, 120 bp, Artificial Sequence
  ENSG00000204130_1 (sequence is synthesized)
cagctgtagagagagcaaacttgttaaacatggctaaactgagtatcaaaggactcattgaatctgctctgagctttggccgcactttggattctgactatccccccttgcagcaattct

SEQ ID NO: 739200 - DNA, 120 bp, Artificial Sequence
  ENSG00000204130_2 (sequence is synthesized)
ttgttgttatggaacattgcctgaaacacggtcttaaagtaagaaaatcatttttgagttacaacaaaaccatctggggccctttggaactggtggagaagctgtaccccgaagcagagg

SEQ ID NO: 739201 - DNA, 120 bp, Artificial Sequence
  ENSG00000204130_3 (sequence is synthesized)
aaataggagctagtgtccgggatctacctggtctgaagacccctctgggtcgagcaagagcgtggcttcgattagccctcatgcaaaaaaaaatggccgattacttacgttgcttaatta

SEQ ID NO: 739202 - DNA, 120 bp, Artificial Sequence
  ENSG00000204130_4 (sequence is synthesized)
ttcagagggatctcttgagtgagttttatgagtatcacgcactaatgatggaagaagaaggagcagtaattgttgggctgctggttggcctgaatgtgatcgatgctaatctgtgtgtga

SEQ ID NO: 739203 - DNA, 120 bp, Artificial Sequence
  ENSG00000204130_5 (sequence is synthesized)
agggagaggatttagactcacaagttggagtgattgatttttctatgtatttaaagaatgaagaagatattggaaataaagaaaggaatgttcaaattgctgccatattagaccaaaaga

SEQ ID NO: 739204 - DNA, 120 bp, Artificial Sequence
  ENSG00000204130_6 (sequence is synthesized)
attatgttgaagaattaaatagacaactgaacagcacagtcagcagcctccattcaagagttgattcattagaaaagtcaaatactaagctgattgaagagttagcaatagcaaagaata

SEQ ID NO: 739205 - DNA, 120 bp, Artificial Sequence
  ENSG00000204130_7 (sequence is synthesized)
acatcattaaactccaggaagaaaatcatcaattacgaagtgaaaataaattgattttaatgaaaacacagcagcacctagaggttaccaaagtagatgtggaaactgagcttcaaacat

SEQ ID NO: 739206 - DNA, 120 bp, Artificial Sequence
  ENSG00000204130_8 (sequence is synthesized)
ataagcattctcgtcaggggctagatgaaatgtacaatgaagccagaaggcagcttcgagatgaatctcagttacgacaggatgtagagaatgagctagcagtacaagttagtatgaagc

SEQ ID NO: 739207 - DNA, 120 bp, Artificial Sequence
  ENSG00000204130_9 (sequence is synthesized)
atgagattgaacttgccatgaagttgctggagaaagatatccatgagaaacaagatactctgataggccttcgacaacaactagaggaagttaaagcaattaacatagagatgtatcaaa

SEQ ID NO: 739208 - DNA, 120 bp, Artificial Sequence
  ENSG00000204130_10 (sequence is synthesized)
agttgcagggttctgaagatggcttgaaagaaaaaaatgaaataattgcccgactagaagaaaaaaccaataaaattactgcagccatgaggcagctggaacaaagattgcagcaagcag

SEQ ID NO: 739209 - DNA, 120 bp, Artificial Sequence
  ENSG00000204130_11 (sequence is synthesized)
agaaggcgcaaatggaagctgaagatgaggatgagaaatatctacaagaatgtctcagtaaatctgatagtctgcagaaacaaatctcccaaaaggagaaacagctggtgcaactggaaa

SEQ ID NO: 739210 - DNA, 120 bp, Artificial Sequence
  ENSG00000204130_12 (sequence is synthesized)
ctgacttgaagattgagaaggaatggaggcagactttgcaggaagatcttcaaaaggagaaagatgccttatctcatcttagaaatgagactcaacaaatcattagtcttaaaaaagagt

SEQ ID NO: 739211 - DNA, 120 bp, Artificial Sequence
  ENSG00000204130_13 (sequence is synthesized)
tccttaacctccaggatgaaaatcagcagttgaaaaaaatatatcatgaacaagagcaagctcttcaagaactcggcaacaagcttagcgaatcaaaacttaaaattgaagacataaaag

SEQ ID NO: 739212 - DNA, 120 bp, Artificial Sequence
  ENSG00000204130_14 (sequence is synthesized)
aagccaacaaagcattgcagggactggtttggctgaaagacaaagaagcaacacattgtaaactttgtgaaaaggaattctcactctctaagagaaagcaccactgtagaaattgtgggg

SEQ ID NO: 739213 - DNA, 120 bp, Artificial Sequence
  ENSG00000204130_15 (sequence is synthesized)
aaattttctgtaatgcctgctctgacaacgaactacctttgccttcttcaccaaaaccagtacgggtttgtgattcctgtcatgcactgctcattcagagatgctcatctaacttgccct

SEQ ID NO: 739214 - DNA, 120 bp, Artificial Sequence
  ENSG00000204130_16 (sequence is synthesized)
tgtatgaaattacctacaatgaatgttatgatgttgtatacaaaggtaaccagacagctctccttaagcggctttcggtcagtatttggtaccagtttatcttctacatattcagctcat

SEQ ID NO: 739215 - DNA, 120 bp, Artificial Sequence
  ENSG00000204130_17 (sequence is synthesized)
ggaaattacaagttatatatttccttccccattgtttttcaaaatgtattttcaacagagcatgcttaaaaatcatgtaactcattaaaaggccagagagcagagctaacacaacttgcc

SEQ ID NO: 739216 - DNA, 120 bp, Artificial Sequence
  ENSG00000204130_18 (sequence is synthesized)
ttatcttgtaaaggccttaaaaataaggcttcagattgtttttttcttctgaattctgtcaatttggtatttgatggtgcctgcagttctcttaatgcactttaaagcttcacagttctg

SEQ ID NO: 739217 - DNA, 120 bp, Artificial Sequence
  ENSG00000204130_19 (sequence is synthesized)
aaactggaaacgcataaaacttttaaaattattaatattctaattcaacagattttcattatctttgtaagatttcaactatatttatttgccctttcttctccccctctccctttgcct

SEQ ID NO: 739218 - DNA, 120 bp, Artificial Sequence
  ENSG00000204130_20 (sequence is synthesized)
cttgcattagacagggccaatattttgtcctacaaaatttcctcttggtctctttaaaaatcagttattgtcgtgcttgctgaagattttcagctacagtggattaaattaaagggggca

SEQ ID NO: 739219 - DNA, 120 bp, Artificial Sequence
  ENSG00000204130_21 (sequence is synthesized)
ttatttggcctcggcctctacttttttccttttaatcttgaaaggaagttacatataaccatctttcttttcctgatttataaatcttcccatatgctgtttcattaaattgctgttttt

SEQ ID NO: 739220 - DNA, 120 bp, Artificial Sequence
  ENSG00000204130_22 (sequence is synthesized)
ttaaggggtgactcagaccccaattcaaagatgaaaacacaaatccttccccagaaaaaaaagtatgtaatagtaggggatgttacaggctccttataaaggtcctctcctctaagcatt

SEQ ID NO: 739221 - DNA, 120 bp, Artificial Sequence
  ENSG00000204130_23 (sequence is synthesized)
aaaagtgagaaaaaaatcaggactttgctttggtaatgtattagagttcagttcaaaaaattttgtattaacattttcattggagtaaattttaggaagtatcacattgtagtggcctac

SEQ ID NO: 739222 - DNA, 120 bp, Artificial Sequence
  ENSG00000204130_24 (sequence is synthesized)
ctgtatacatccacagtaaaatttcaccatgtccattgagcacctctatgccaagggtgttgagatgatgaaatatacacttgacctatttctttttttttcgagatggagtttcactct

SEQ ID NO: 739223 - DNA, 120 bp, Artificial Sequence
  ENSG00000204130_25 (sequence is synthesized)
cttgacctatttcaagctgactcaatgaacactaatccaagttatattgcttatggcatactaagaatttaacttgtataaattacctctgaatagttacataaacactatcaccattca

SEQ ID NO: 739224 - DNA, 120 bp, Artificial Sequence
  ENSG00000204130_26 (sequence is synthesized)
gtatcctattttttacattaatttttaaccatgcactttaagtttgtgagcctataaaaaatacatagaaaatttatggattaagagcattatatttagtggttaatcctaggtacctcc

SEQ ID NO: 739225 - DNA, 120 bp, Artificial Sequence
  ENSG00000204130_27 (sequence is synthesized)
ctgcctacaaaggagttcttattaatactgcaggatcttttcttcatgaatatatgcttccatgaaatttaaatttttctgaatagcctaagtatgaaatgaatattttacttgaagatc

SEQ ID NO: 739226 - DNA, 120 bp, Artificial Sequence
  ENSG00000204130_28 (sequence is synthesized)
tattttttccaaaacccgtaaatttccagtcagcttttgaggtgtcagatgtgacacagatttctagatggtctttcttgaatactgacagaaatgtcctcaagagaggattatattctt

SEQ ID NO: 739227 - DNA, 120 bp, Artificial Sequence
  ENSG00000204130_29 (sequence is synthesized)
gaaccattttgtattgataggtgggatgggctaacatttttatgattactgaataaacaaaaaatgaaattttcaaatatgcttttttattactgtgcttagaacaaattttaaaatgtg

SEQ ID NO: 739228 - DNA, 120 bp, Artificial Sequence
  ENSG00000204130_30 (sequence is synthesized)
acttaagttgcttaaattccaaggctaatttcattcaacaaaccatgattttgtcatcctttaagtaagtttctcacttttcaaaactcatgtatcaacactgactgacttgcttttttt

SEQ ID NO: 739229 - DNA, 120 bp, Artificial Sequence
  ENSG00000204130_31 (sequence is synthesized)
catctgcttctcctgtggctctgccatcagctccaatatcaatatgaactcgtattggatttagtggtgagaagaactaaataaaaggaaacacttatttacttttctattgagaatatt

SEQ ID NO: 739230 - DNA, 120 bp, Artificial Sequence
  ENSG00000204130_32 (sequence is synthesized)
aactaggacaattgcaatgtcattggtgaaatgtgccagcagtgacacgcaggaccagtacaagctggttaaagatatatctttctgaagaccacttgtatttaaacagactaaatgaaa

SEQ ID NO: 739231 - DNA, 120 bp, Artificial Sequence
  ENSG00000204130_33 (sequence is synthesized)
ataatatattaaatagaaaggaatctaaatgctattaaatattctaaaaggatgttaggaaccctgtacatttcttggtcagctgctgtggtaatacactgccatcaagcagagtgggtg

SEQ ID NO: 739232 - DNA, 120 bp, Artificial Sequence
  ENSG00000204130_34 (sequence is synthesized)
cacttggatttccagacatacgttcctcaaaccttgtgcacaaagggtgatttgagtattgaccctttggaggtcaggattttcaaatgcagttttatctttttagctactttttgatga

SEQ ID NO: 739233 - DNA, 120 bp, Artificial Sequence
  ENSG00000204130_35 (sequence is synthesized)
aaaatataaagattgtttaaaaataacttaaccttcagttttatactgtgttggcacagatatttttttctcattggcccactctttgcccaatggctcccttacagatttttacatatg

SEQ ID NO: 739234 - DNA, 120 bp, Artificial Sequence
  ENSG00000204130_36 (sequence is synthesized)
ctttaaaataatttataacccagactggccaacaccctgtgcttcagcttctcagttttccggttctcccttgccctcttctgtgatagcacaacttcaaggcctacctcactctgactt

SEQ ID NO: 739235 - DNA, 120 bp, Artificial Sequence
  ENSG00000204130_37 (sequence is synthesized)
ctattttcctttttgtaaccttagagaaaagcttgggtccaatcccagcacctgaatattttaatttaaacttggatttggagataacttaaatgttactctcccttccttggaagcagc

SEQ ID NO: 739236 - DNA, 120 bp, Artificial Sequence
  ENSG00000204130_38 (sequence is synthesized)
atttatacccctgaaatatgtgagggttgctccattggtatggttttaaggaagaaaggaagaggaagagttttttagttagttgaaccgaaatttctcttgtgatttcctgcaaggagt

SEQ ID NO: 739237 - DNA, 120 bp, Artificial Sequence
  ENSG00000204130_39 (sequence is synthesized)
taatatcctttgaatcttggtaaatattttcttataaaaatattgaagttaaatacaagaaatcctagatggccaaagaaggcagggagtggagctaagcacaggaaaatgcaacgactt

SEQ ID NO: 739238 - DNA, 120 bp, Artificial Sequence
  ENSG00000204130_40 (sequence is synthesized)
acaaataaaaacaggaaagatgaaaatcacaatgttttagctaatttttaatattaaatggtgaggaacaaaaatgatctctagcaaatgatgccaactggcaccaaattctttttgaat

SEQ ID NO: 739239 - DNA, 120 bp, Artificial Sequence
  ENSG00000204130_41 (sequence is synthesized)
cttaaacatatatgcacacgtgcacacacacacacacacagagcttcggcataatttagtaaatgcataaagatgccgtaagaaggacttggctatcatttggagtaattgcaggtcttt

SEQ ID NO: 739240 - DNA, 120 bp, Artificial Sequence
  ENSG00000204130_42 (sequence is synthesized)
gctcttggccttgtagcacacttgattcctggcatacacatcctagcataacatataacagtgtggcttcttcacctagtgtaggcataaatcctttgcttttcatggttttgtaaaaag

SEQ ID NO: 739241 - DNA, 120 bp, Artificial Sequence
  ENSG00000204130_43 (sequence is synthesized)
gtagtaacatacctattatgctttgaaatttgattcgttatgctctgcataagtggtaaaggctgtattgctttgcactgttaattatgaacaagaaataaaacaaatttgaagatagta

SEQ ID NO: 739242 - DNA, 120 bp, Artificial Sequence
  ENSG00000204130_44 (sequence is synthesized)
tctatttacagtgtggttttattttgttgttttcccccctgtgacttcttcatttcattttcacttccattacaagctttacaaagcagattatggaaaatcacttaggagaaggaggtt

SEQ ID NO: 739243 - DNA, 120 bp, Artificial Sequence
  ENSG00000204130_45 (sequence is synthesized)
ttattaatagtatgaagtgggacctttggttatacctgtagttactgagacccattttaatagtggttttttggaataaaagagatgaaagcttattattcacaagtttgcaaatactgg

SEQ ID NO: 739244 - DNA, 120 bp, Artificial Sequence
  ENSG00000204130_46 (sequence is synthesized)
caaaacatctcatgtaccccataaatatgtaactactatgtacccacaaaaatttaaaaaataaaatgttgttgtactattttaaggtttttttcatctttaaggttcttttcctgaaga

SEQ ID NO: 739245 - DNA, 120 bp, Artificial Sequence
  ENSG00000204130_47 (sequence is synthesized)
tctttaaggttcttttcctgaagagaattcccatcagcaacagattatctctttaaagcatttttacatgttatatgttctaatatatacaattgtatagaaaagagcaaaatgaaccat

SEQ ID NO: 739246 - DNA, 120 bp, Artificial Sequence
  ENSG00000204130_48 (sequence is synthesized)
tacccatttcaatatttatcatgtgcagtcttgatttttcattttttcaatttttattttttaagagacagattctgtgttgcccagcttggtcttgaactccaggcctcaggcgatcct

SEQ ID NO: 739247 - DNA, 120 bp, Artificial Sequence
  ENSG00000204130_49 (sequence is synthesized)
cctcagcctcccaagtagctggaattaccggtgtgagccattgtcgcctggctgcaatcttgttttttatacttaatccacatcccacctccccaacccagaatattttgaggctaattc

SEQ ID NO: 739248 - DNA, 120 bp, Artificial Sequence
  ENSG00000204130_50 (sequence is synthesized)
attccatacatatttacatatatatacatctctcaaagaaaataacttattttccattcttcatatatctattcctataaataatgttcttgggggaaaaagttttcacatttaattttt

SEQ ID NO: 739249 - DNA, 120 bp, Artificial Sequence
  ENSG00000204130_51 (sequence is synthesized)
tatttaaaaactatactaactttggatttttctgttacaagacttttaacaatctgtatttcgtgattgtgaactcgtattcattttacttttcaaaaacagacttaacataccattccc

SEQ ID NO: 739250 - DNA, 120 bp, Artificial Sequence
  ENSG00000204130_52 (sequence is synthesized)
tcacctagcagtactaccacaataatgctatcatggtgccagggaattacaattgtaattcttctaacctataatgtttaaaaaataaaatgtgaattttatgaactaaataaatatttg

SEQ ID NO: 739251 - DNA, 120 bp, Artificial Sequence
  ENSG00000204130_53 (sequence is synthesized)
gaaaattagcctgctttaaaagggcaattttggtttcattaatactgtatacttttactgctttaagatgttaagagagtaatcctgggaaaataaaacacatacaactttcaaaaaaga

SEQ ID NO: 739252 - DNA, 120 bp, Artificial Sequence
  ENSG00000204130_54 (sequence is synthesized)
gcagcgggcctggctgcagatgcggtggtggccgccgagcgcctggaaggagctgctggacaggccgagggagcctccgcccgagaccgcgcagccgccgccgccatggtaagaaaatca

SEQ ID NO: 739253 - DNA, 120 bp, Artificial Sequence
  ENSG00000204130_55 (sequence is synthesized)
aaaaaaaaaaatcacaaaacaacttctagacattgtgtggctctttcacgtttgagtttgtgagttttcccccaaactttgttttcatttagaaatgtttctatttccccatttttcttt

SEQ ID NO: 739254 - DNA, 120 bp, Artificial Sequence
  ENSG00000204130_56 (sequence is synthesized)
atgggtaaggcgagcgggccgaaaccgaacgctaggccctcagtcccgggctgagggccgcggccaggcggggtggactgggagctgggggagacgccgaggccgccagtcggaactggg

SEQ ID NO: 739255 - DNA, 120 bp, Artificial Sequence
  ENSG00000204130_57 (sequence is synthesized)
gcccgaacccaggatgggcggggactgcctgggactcgggggctcccggggtcgtcatggcaacgcgccccctcccttgttccggcccgttcccgcccgggttctgaggcatagtggccg

SEQ ID NO: 739256 - DNA, 120 bp, Artificial Sequence
  ENSG00000204130_58 (sequence is synthesized)
agggctcgaggtgccacggcgtccaggagcgaggacagggccaggcagggtgtcactcccgggtcggggagcaggcggggaggggcgatgacttttcaggtttgggggtggcggagggaa

SEQ ID NO: 739257 - DNA, 120 bp, Artificial Sequence
  ENSG00000204130_59 (sequence is synthesized)
ttctttattcagttcctacacctgccacaaaaaccattaggaagacatagattaggacatgttttttgtttaagcccagcaggattttgcgtttttgctttggttgttgcatggaatcaa

SEQ ID NO: 739258 - DNA, 120 bp, Artificial Sequence
  ENSG00000204130_60 (sequence is synthesized)
gttgctttatattacgctgattcatttgaagttgtcatattgtagatttttcttagaggcctaatatcagcagtttcatgtcgttcagttacataaaacaaatacacaaataaaaatgtc

SEQ ID NO: 739259 - DNA, 120 bp, Artificial Sequence
  ENSG00000204130_61 (sequence is synthesized)
acaggcatgagccaccgcacccagccgaaaatgccaatatttcttaaaaagcaagttttaaatctaaaatatttttgctttaggacatttagaaaatataggaaaatatgaaatattcca

SEQ ID NO: 739260 - DNA, 120 bp, Artificial Sequence
  ENSG00000204130_62 (sequence is synthesized)
taggacatttagaaaatataggaaaatatgaaatattccactagccagagaaggccataaaaatcatatactatacataattttatatcctatgaaataccaatacctactgaaatacta

SEQ ID NO: 739261 - DNA, 120 bp, Artificial Sequence
  ENSG00000204131_0 (sequence is synthesized)
ggaggaggagcccggcgaagcagagtcagagggactggtggctccggcgagtgtgcagccccgggggagccggcgctctaggcgaggaacccgtcagcccgcctacccgcccgtcgtctt

SEQ ID NO: 739262 - DNA, 80 bp, Artificial Sequence
  ENSG00000204131_1 (sequence is synthesized)
tctttggcgcccgcacgctctccggcccgcgcccaggggcctgctacacccggagctggggccgccgctcaggggcgctc

SEQ ID NO: 739263 - DNA, 120 bp, Artificial Sequence
  ENSG00000204131_2 (sequence is synthesized)
tggtcccctgcgcccgcgcccgcggccgggatgccgttctacaggcgcacggtggtaccccagcgcctgtgcccgcgcaacccgccgcagcagctggcggagctccgcgacgtgagccac

SEQ ID NO: 739264 - DNA, 120 bp, Artificial Sequence
  ENSG00000204131_3 (sequence is synthesized)
ctggcagcgctcagcctgctccggcagctcgccgacctctgtggccactcgttggctctgctcgaggacctcgaggggcacctgctggccctggggcgccgcacagacagcctgtaccgg

SEQ ID NO: 739265 - DNA, 120 bp, Artificial Sequence
  ENSG00000204131_4 (sequence is synthesized)
cgcaccgtgcgcctccgccgccgccttccctgccgcctgcttggcccggaggaggacgaggaagagctagctgcagctaactcgggtcgggaaaatgcgacagcgactgcccactcgagg

SEQ ID NO: 739266 - DNA, 120 bp, Artificial Sequence
  ENSG00000204131_5 (sequence is synthesized)
tcgtcatggcgacagccagtgaacgtgttcctctcctcgggcaggcccccgagtgtagaggagctgcttcgggaggcgcagctcaatctccagagcctgttgcaagaagaatatgaggaa

SEQ ID NO: 739267 - DNA, 120 bp, Artificial Sequence
  ENSG00000204131_6 (sequence is synthesized)
cagtactcggaggccagacttgtggggcagaccttccgctcttctgatgaggccactaagcccacccccaacccaaggccccagtctgccaggcgtctggagtttatattgatgcctaca

SEQ ID NO: 739268 - DNA, 120 bp, Artificial Sequence
  ENSG00000204131_7 (sequence is synthesized)
aaacggcagctgagcgaggatgagactaccacccagggtgtgagggcccccgaggcctccctgagcctgtctaccacagccgacaagcaaactgcctggaatagccttttccctctgccc

SEQ ID NO: 739269 - DNA, 120 bp, Artificial Sequence
  ENSG00000204131_8 (sequence is synthesized)
atcctagaggagaagcggtggcctcagctttgctccacgcagtctgacattgtgcccatcaacatctctgggcagcagtttgataaacatgcaagtttgcgacactcgttgtttaacaca

SEQ ID NO: 739270 - DNA, 120 bp, Artificial Sequence
  ENSG00000204131_9 (sequence is synthesized)
gagacagccgtgaaccccaagtccaccctgaggcggaggcggaccattattggattctctaacttttcccagcgagaccaaggtcacagcaacagcccagcaggcagtgtggcccactct

SEQ ID NO: 739271 - DNA, 120 bp, Artificial Sequence
  ENSG00000204131_10 (sequence is synthesized)
accacctccgacatcaggcccagtcactcagttccagaaggggttcatggaagagttgcagttggtcaggatgctcggttcccaagtctcacctcgccagtactgagaactccttccagt

SEQ ID NO: 739272 - DNA, 120 bp, Artificial Sequence
  ENSG00000204131_11 (sequence is synthesized)
gagccggacgaacctcaccaggcacggagtggcccaaaccctcctggcatggagagcatgggaatggtgtacagtgtccccagttcttgcaatggacctacagaatcaaccttctccact

SEQ ID NO: 739273 - DNA, 120 bp, Artificial Sequence
  ENSG00000204131_12 (sequence is synthesized)
tcctggaagggagatgcttttacctacatgactccaagtgccaccagccagagcaatcaagtcaatgaaaatgggaaaaatccttcctgtgggaattcttgggtctctctaaacaaagtc

SEQ ID NO: 739274 - DNA, 120 bp, Artificial Sequence
  ENSG00000204131_13 (sequence is synthesized)
ccacctctggttcctaaggaggctgctaccctccttgtcgctcgtgataacccagcaggatgcagtgggtcagctggctaccctgagcgccttattcagcaaaggcacatgcccgaaaga

SEQ ID NO: 739275 - DNA, 120 bp, Artificial Sequence
  ENSG00000204131_14 (sequence is synthesized)
ccctccaagattggccttctgaccagtgggacctcgaggctggagacaggccccggtggggccagcagattccgggagcggtcactgtctgtgcccacagactcaggcaccacagatgtg

SEQ ID NO: 739276 - DNA, 120 bp, Artificial Sequence
  ENSG00000204131_15 (sequence is synthesized)
gactatgatgaggagcagaaggccaatgaggcctgtgccctgccttttgccagtacgagctctgagggcagtaacagtgctgacaacattgcctcccttagtgcccagcaagaggcccag

SEQ ID NO: 739277 - DNA, 120 bp, Artificial Sequence
  ENSG00000204131_16 (sequence is synthesized)
cacagaaggcagaggtccaagagtatctcacttaggaaggccaaaaagaagccttccccacccacacgcagtgtctcactggtcaaagatgagccaggcctcttgcctgaaggtgggtca

SEQ ID NO: 739278 - DNA, 120 bp, Artificial Sequence
  ENSG00000204131_17 (sequence is synthesized)
gcactacccaaggaccagaggcccaagagcctttgcctctccttggaacatcaaggacatcactcgtcccacccagatgctcagggtcacccagctattccaaaccacaaagatccagaa

SEQ ID NO: 739279 - DNA, 120 bp, Artificial Sequence
  ENSG00000204131_18 (sequence is synthesized)
agtacacaattctcccaccactggtatcttactgactggaagtctggtgacacctaccaatccctgtccagctccagcactgccactggcaccacagtcattgagtgcacccaagttcag

SEQ ID NO: 739280 - DNA, 120 bp, Artificial Sequence
  ENSG00000204131_19 (sequence is synthesized)
ggcagctcagagtctcttgcctcaccttccacctccagagccactacaccttcccaactctccattgaagtggaggccagggagatatcatccccgggaaggccccctggactgatgtca

SEQ ID NO: 739281 - DNA, 120 bp, Artificial Sequence
  ENSG00000204131_20 (sequence is synthesized)
ccctccagtggctactccagccagtcggaaacaccaacacccactgtttccatgtccctgaccctgggccacttaccccctccaagcagcagtgtccgggtacgtccagtggtacctgag

SEQ ID NO: 739282 - DNA, 120 bp, Artificial Sequence
  ENSG00000204131_21 (sequence is synthesized)
aggaagtcatcactacccccgacgtcaccaatggagaaatttcccaagtcacggctatcatttgacctaccactgacctcttcacccaacctggatctgtctgggatgagtatctccatc

SEQ ID NO: 739283 - DNA, 120 bp, Artificial Sequence
  ENSG00000204131_22 (sequence is synthesized)
cgaagcaaaactaaggtgagtcggcaccactcagagacaaattttggcgtcaagctggcccagaaaactaatcccaaccagccaatcatgcctatggttactcagtccgacctacgttct

SEQ ID NO: 739284 - DNA, 120 bp, Artificial Sequence
  ENSG00000204131_23 (sequence is synthesized)
gttcgcctgaggtcggtcagcaagtctgagccggaagatgatattgagagccctgagtatgccgaggaacccagagcagaagaagtcttcaccttgccagagagaaagacaaaacctccc

SEQ ID NO: 739285 - DNA, 120 bp, Artificial Sequence
  ENSG00000204131_24 (sequence is synthesized)
gtagctgagaagcctccggtggcccggaggcctccaagcttggtccacaagccaccatctgttcctgaggagtatgcactaacttcaccaaccttggctatgccccccaggagctcaatt

SEQ ID NO: 739286 - DNA, 120 bp, Artificial Sequence
  ENSG00000204131_25 (sequence is synthesized)
caacatgcgagaccactccctcaagacagctacacggtagtgcggaaaccaaagccctccagcttcccagatggcagaagcccaggggagtcaacagcaccctcatctcttgttttcacg

SEQ ID NO: 739287 - DNA, 120 bp, Artificial Sequence
  ENSG00000204131_26 (sequence is synthesized)
ccttttgccagttcctctgatgctttcttctcaggaacacagcagcctccccagggaagtgtagaggacgagggccccaaggtgagggttctgcctgaaagaattagcctccagagccag

SEQ ID NO: 739288 - DNA, 120 bp, Artificial Sequence
  ENSG00000204131_27 (sequence is synthesized)
gaagaagctgagaaaaagaaaggcaagattccacctcccgtaccaaaaaaacccagcgtgctgtacctgcctctcacttctcccacagctcaaatggaggcctatgtggcagaaccaagg

SEQ ID NO: 739289 - DNA, 120 bp, Artificial Sequence
  ENSG00000204131_28 (sequence is synthesized)
ctgcctctcagccccatcatcaccctggaggaagacaccaagtgtcccgccaccggcgatgacctgcaatcacttggtcaaagggtgacttcaactcctcaggctgacagtgaaagggag

SEQ ID NO: 739290 - DNA, 120 bp, Artificial Sequence
  ENSG00000204131_29 (sequence is synthesized)
gcaagccctctggggagttctgtggaaccaggcaccgaagaaaaaagtttaatcagtgataaaacagctgaatggattgcagaggatgatgatgacgtgtttgtggcttcacgcacaact

SEQ ID NO: 739291 - DNA, 120 bp, Artificial Sequence
  ENSG00000204131_30 (sequence is synthesized)
gaagatttatttactgtgatacacaggtccaaaaggaagctgctcggctggaaggaacctggtgaggcctttgtgggtggcagaacgagttcccactcaccaataaagaacacagctgag

SEQ ID NO: 739292 - DNA, 120 bp, Artificial Sequence
  ENSG00000204131_31 (sequence is synthesized)
tctccaatcagtgagtctaccgccactgcagggtcaggcagcagtgccaacctagatgctggcagaaatgacgatttcaaggccttgctacagaagaagggaagtaaggcaactccaagg

SEQ ID NO: 739293 - DNA, 120 bp, Artificial Sequence
  ENSG00000204131_32 (sequence is synthesized)
tctcgtccctcagcagctgaacttctgaagaccactaacccactggctcggagaattattgcacaattttcaaaagactatgaaaccaccgataaccccagtacctaagccctgggctca

SEQ ID NO: 739294 - DNA, 120 bp, Artificial Sequence
  ENSG00000204131_33 (sequence is synthesized)
acaagcagggtttacttactaaacttgagtagagaagggggaagagaaagggtctttaaacagaaccatgggaacaacagagcctacatttcttttatattaactcacactctggacagc

SEQ ID NO: 739295 - DNA, 120 bp, Artificial Sequence
  ENSG00000204131_34 (sequence is synthesized)
aggagagaggctacttcatctagagctaaaatcatctggcacttaatcatcttcagacatttttatgttttcatacttataagcttgtcatgactgactaccgagtttcttcttattttc

SEQ ID NO: 739296 - DNA, 120 bp, Artificial Sequence
  ENSG00000204131_35 (sequence is synthesized)
ccccagtggtgtgcactaactaagaagaaattttcagatgtcagggcacatgtgccactttttcaattcagtgacccggctgctccatccctggctcctgtcactgaggagtgcagtgtg

SEQ ID NO: 739297 - DNA, 120 bp, Artificial Sequence
  ENSG00000204131_36 (sequence is synthesized)
agagcagattggaggctgccaaacttggggggcatagggtgccattgcttattattcactttcctagggaggctctgatggccctgtgtgcaaacacagaaagactctgatgcctcctca

SEQ ID NO: 739298 - DNA, 120 bp, Artificial Sequence
  ENSG00000204131_37 (sequence is synthesized)
accacagtttagctttcccctgcgctcacaagaggtttgcagggtgcacttatttcggcatgaggttgattggatggcttttgtggtgcaaaatatgactgtgactctgtcctgaaactt

SEQ ID NO: 739299 - DNA, 120 bp, Artificial Sequence
  ENSG00000204131_38 (sequence is synthesized)
aatgcctttttcagtttgattgtctacatggagatcagggtgataagtttcaataaacatatagacgcccccccacccacccccattagctagaaaagaccaggactgggttgctttaaa

SEQ ID NO: 739300 - DNA, 120 bp, Artificial Sequence
  ENSG00000204131_39 (sequence is synthesized)
tgaaccaagcttgaccaacaaacaagacagccatttgttcactcagatctagccgaggtaactcacaagtgcaccttgagatcctccatgtgtctgtcaacagcgataggcaggatctgc

SEQ ID NO: 739301 - DNA, 120 bp, Artificial Sequence
  ENSG00000204131_40 (sequence is synthesized)
gcccagctcatgctgcattctaagaactctcatttcatttgcatataaaattcattacaggaagtaattaactgaaggaacagcatcatcaaaggctcaaggataatggaaagtaagtgc

SEQ ID NO: 739302 - DNA, 120 bp, Artificial Sequence
  ENSG00000204131_41 (sequence is synthesized)
atcttgccccccaccagtcaattcagatcgtggtttgtggttggtttggttttgtttaaaggaagtccgactctgttccaaaaaccaagaacatataaactaaaaggatctatccaaaat

SEQ ID NO: 739303 - DNA, 74 bp, Artificial Sequence
  ENSG00000204131_42 (sequence is synthesized)
ctactttttgccatttaggttctgtgtttgaccagctttcaattaaccttgctgggggagagcataagaacctg

SEQ ID NO: 739304 - DNA, 120 bp, Artificial Sequence
  ENSG00000204131_43 (sequence is synthesized)
gctttcaattaaccttgctgggggagagcataagaacctgggtaaatggcatactgaaagagcttcagaataatcattgcgacccctccctgcccccaccccccacgaagcttataggca

SEQ ID NO: 739305 - DNA, 120 bp, Artificial Sequence
  ENSG00000204131_44 (sequence is synthesized)
ctaactattcttgtcagctcaattttctaagcagagcaagagcagtgattcatttgatttttgtatgcctgatttctgggaggttggggaggaagacaaagcactgagcaaagaaaacct

SEQ ID NO: 739306 - DNA, 120 bp, Artificial Sequence
  ENSG00000204131_45 (sequence is synthesized)
gctgaccaatgatggaaagttaattgtctactgtcttcaagaggcaaaaagaacagttgaatgaaattgtagcctgcttcacaaagagagttccccagccccttcctacttcacccctca

SEQ ID NO: 739307 - DNA, 120 bp, Artificial Sequence
  ENSG00000204131_46 (sequence is synthesized)
cccaatagattcaatggtcaacctcctggaggatgcagtaaggttccagagacaagcagatctcaactttgataggtcgtattgcccaatgagaagccaccttttagctcaactgcccac

SEQ ID NO: 739308 - DNA, 120 bp, Artificial Sequence
  ENSG00000204131_47 (sequence is synthesized)
actccagctggacagagcagctgaaaaaccacactaagtactgagaaaacttgggcctctcacaagagaagccctaggcctaggccctttgttgttatagttctgaatctgagacttctg

SEQ ID NO: 739309 - DNA, 120 bp, Artificial Sequence
  ENSG00000204131_48 (sequence is synthesized)
gaaacaggccaggcccaccaactcccttgcaaccagcacttcgacacttaaaataataaaacagctaggctcagttgcttttgaaagtactagaactacttggtgtgaagttcttaacca

SEQ ID NO: 739310 - DNA, 120 bp, Artificial Sequence
  ENSG00000204131_49 (sequence is synthesized)
aattccaaattccagggattttgcccaaaataaaatcaattcatccctggcctcagtttatatatgaatgccacatttgtctgctccagacttagaattccaaaaaacagacattttcct

SEQ ID NO: 739311 - DNA, 120 bp, Artificial Sequence
  ENSG00000204131_50 (sequence is synthesized)
ctgtagtaaatgaaggagcgtttgtgcttttgcttagcaaaaatgaaaggacaccagggtctccttgggaaccattatgactggttgaacgttaaagctgagtatgggactcacatagta

SEQ ID NO: 739312 - DNA, 120 bp, Artificial Sequence
  ENSG00000204131_51 (sequence is synthesized)
taggccttgttacttctgtggacttttctggaagtttcttgtttactacttctaatgggttttgcctctcccctcaccttgctacctctggaggttttcccaaaagattctgaacctgaa

SEQ ID NO: 739313 - DNA, 120 bp, Artificial Sequence
  ENSG00000204131_52 (sequence is synthesized)
ttctcagacaccttgatgtttgtcagttacctttagtcttgttttcctctacaatactctatatgcctggaatttttagaatatcttctacatcatcactgtggcccacgcagtggtgtt

SEQ ID NO: 739314 - DNA, 120 bp, Artificial Sequence
  ENSG00000204131_53 (sequence is synthesized)
cccattagcacaagaggatttggggcagaaatcatatggtcagagagaacatttaagaccggaagtattcatttaattttttaaattaattttttgtaaagatgggggttttgctatgtt

SEQ ID NO: 739315 - DNA, 86 bp, Artificial Sequence
  ENSG00000204131_54 (sequence is synthesized)
agtaagccactgcacctggcctcatttaatattttgcaacaggtagacgtcccaaataaacaaccaaactgtaaaatttctactaa

SEQ ID NO: 739316 - DNA, 120 bp, Artificial Sequence
  ENSG00000204131_55 (sequence is synthesized)
acgtcccaaataaacaaccaaactgtaaaatttctactaatcactaattaacagaacacaaagcatcttccccactcctaacactcaacctctctcctacctttgattatcataactcca

SEQ ID NO: 739317 - DNA, 120 bp, Artificial Sequence
  ENSG00000204131_56 (sequence is synthesized)
ttgcagagaacccaccactactacaattactagtataaataataatgataataatttttgaaggtggaatagagaagagatttgagtgaaatgaagttggccctaggagctcagcttcca

SEQ ID NO: 739318 - DNA, 120 bp, Artificial Sequence
  ENSG00000204131_57 (sequence is synthesized)
tttcaagtcgtccctatcctcttttttcctccccattccagttagtagcaacagatggctctgctagcctgactttgatctagtcaccatccccaggagcggaggttaattgttaaccaa

SEQ ID NO: 739319 - DNA, 120 bp, Artificial Sequence
  ENSG00000204131_58 (sequence is synthesized)
ggatgctttgcatttggtgggtagtcagtacatgtttttgagggtagttattcttggtacaatagcaagctttgctggtgtctcctctccttatcctgtactacttggcctgcctcagct

SEQ ID NO: 739320 - DNA, 120 bp, Artificial Sequence
  ENSG00000204131_59 (sequence is synthesized)
cctgactgggcctcccccaccagccccaacttattcctcagccccaacttatccctcagccccaaatcccatgaactgcatccctagcacaacaactcacccataaaggaagtgagacaa

SEQ ID NO: 739321 - DNA, 120 bp, Artificial Sequence
  ENSG00000204131_60 (sequence is synthesized)
caggaagcaaaataattaatgttagcttaatgaccacaaactgaccagttgatctggataaattaccttgaacgtgcaaagacagaggagatcctaccaggctctcctaacaagcactgc

SEQ ID NO: 739322 - DNA, 120 bp, Artificial Sequence
  ENSG00000204131_61 (sequence is synthesized)
acctgacatccagtgtaactatctggacaacacagacccgattgcagtctctctgtacctgtcagtctgagcagatctgtccacgcacctgccctcttcctcatcaatgaacaagttggg

SEQ ID NO: 739323 - DNA, 120 bp, Artificial Sequence
  ENSG00000204131_62 (sequence is synthesized)
aaaaagatgagttcatgctcagtgctctgttcctcactcgttccaccttccattatcaagtctgtgacacaatggtgagctttcgctttaatatgatttgctagggccaggactagggtg

SEQ ID NO: 739324 - DNA, 120 bp, Artificial Sequence
  ENSG00000204131_63 (sequence is synthesized)
aggtgagcgaggcacctagggcgtaaaattcaaagaggtgcccgctctcagggccatgcaagtgccttaccctcgtcccagccctgtgatttgcactctttaaagtaatatcagtttatc

SEQ ID NO: 739325 - DNA, 120 bp, Artificial Sequence
  ENSG00000204131_64 (sequence is synthesized)
ttcttcctatgaacaagtatagtccttctgatttggggtcgggggttaactccctatctcttgttgcaccaaatattttattgctacctatttttccattgctataagtctttgtgtgcc

SEQ ID NO: 739326 - DNA, 120 bp, Artificial Sequence
  ENSG00000204131_65 (sequence is synthesized)
tatacattaaagaatctttaatagtgttaatatcggaaaacatagttgatttctaagtaatatgctccaggtggcaagttaacacccatttcagcagggatgctcccaaggccagccctt

SEQ ID NO: 739327 - DNA, 120 bp, Artificial Sequence
  ENSG00000204131_66 (sequence is synthesized)
caacaaaagagtgactgagttgacggtctgtcaccaggatcctccctctcctctttctgctccattctcctaaaccttgcttcccagcaccaactctcttcagtgcctcctacttccttc

SEQ ID NO: 739328 - DNA, 120 bp, Artificial Sequence
  ENSG00000204131_67 (sequence is synthesized)
tcctcctaagaaaaacctgctctcaggaaagggataaattcatttactttgagattataaggcttaatgctacctcttttgagggtcagttgcattttaacaagggaaaagccttaagcc

SEQ ID NO: 739329 - DNA, 120 bp, Artificial Sequence
  ENSG00000204131_68 (sequence is synthesized)
aatggaatgaagttctacttgcagaatgttaggcatcaactagttgtagaagtgtatttttcaccatggaaaggccaaattccctgacgcctaactccagaatatagaaaatatcttaat

SEQ ID NO: 739330 - DNA, 120 bp, Artificial Sequence
  ENSG00000204131_69 (sequence is synthesized)
cgcctggaatcatttgagttactagctgatggtcaattaaattgtcctgatatccaatgctattcaatatggttactaccaagggactctcagaaatggctactaaaagccactgagaag

SEQ ID NO: 739331 - DNA, 120 bp, Artificial Sequence
  ENSG00000204131_70 (sequence is synthesized)
gcctagatcattcatattgtacattgacatttttacataaatggaattaatactacttaccatttgagtaaagaacacaaggaattgaagagtctgtgaaaatatgtcctgtttgtgaaa

SEQ ID NO: 739332 - DNA, 120 bp, Artificial Sequence
  ENSG00000204131_71 (sequence is synthesized)
ggtgaaactgtccaatccatgtccaatcaatgtcagtcgtccagtattggtggtgattattaaacttattggaggtacaactttacctccaataagcttacctttacaagcttctgcttt

SEQ ID NO: 739333 - DNA, 120 bp, Artificial Sequence
  ENSG00000204131_72 (sequence is synthesized)
ccctgcttcatctctgttatgggctatcagtccagcttggtgtgaaaatgagactatatctataccacagcccccaatcctttcaaaggctttgcatgtatttcagctacaagtgacaag

SEQ ID NO: 739334 - DNA, 120 bp, Artificial Sequence
  ENSG00000204131_73 (sequence is synthesized)
gatattagggatttaaaaggataagagagtgggaaagatgtataaggaagtgcctttgtcaaaaggcagcaaaaagtataatgatataaacataatatgaaataagcaaattttagaata

SEQ ID NO: 739335 - DNA, 120 bp, Artificial Sequence
  ENSG00000204131_74 (sequence is synthesized)
ctttgaaacagatttatagaggaatacatagtaaatagttatagacacacatttggggcatttttaataaggttagcaagaagaaatttgcatgagtaatgagcaatgtgaaatgggcat

SEQ ID NO: 739336 - DNA, 120 bp, Artificial Sequence
  ENSG00000204131_75 (sequence is synthesized)
tatacttttgttcagtaaagcccaaaatctaggccaatggttctcaaagtgcagttccaggagcagcaacagcagcatccctggagagggagaaagagagagagagagagtgtatgtgtg

SEQ ID NO: 739337 - DNA, 120 bp, Artificial Sequence
  ENSG00000204131_76 (sequence is synthesized)
tgtgtgtgtgtgtgtgtgtgtatgtgcattccagtgatgttactccttcaagcccctgaatcactatagccacgactctccaactgattccaacctttaccattattctggctctcatca

SEQ ID NO: 739338 - DNA, 120 bp, Artificial Sequence
  ENSG00000204131_77 (sequence is synthesized)
tggctctcatcataaggaccagtctctggccaagaggtgtatattgttatcttggtcaggcatatgtttgcttggttttaagaaattatcagattgaggagtctcatgttttatgggact

SEQ ID NO: 739339 - DNA, 120 bp, Artificial Sequence
  ENSG00000204131_78 (sequence is synthesized)
ccggtgcatatgctcgaaaaaaattaaaaagaacttatcatattggatcaacaaattgctcaacctgcaaaatctttgattagacttagccagcccatctggcctgctttgggtttaaaa

SEQ ID NO: 739340 - DNA, 120 bp, Artificial Sequence
  ENSG00000204131_79 (sequence is synthesized)
aaaaaaaaaagattttttttaactcacaaatggaaaaaagggaaaggtgttaagtttgtttggtattgccagctcttaaatacctgtctttaccgtggtggctgttctccagtaaggctc

SEQ ID NO: 739341 - DNA, 120 bp, Artificial Sequence
  ENSG00000204131_80 (sequence is synthesized)
tggcagaagtatatttgattttaagatttttgcctaaatagtagaatttgatagcaacgaactccaaaacaaaatctgaactggaacaactagttaacccctctcagcctctttgtaatg

SEQ ID NO: 739342 - DNA, 120 bp, Artificial Sequence
  ENSG00000204131_81 (sequence is synthesized)
ccaagctttatagacatttattccttaggtggtcttgagctttttctaacatccaattttataaaatgttgtgcatgcaaacgcagcattgtgctcattgtacaagtcacctcaaactca

SEQ ID NO: 739343 - DNA, 120 bp, Artificial Sequence
  ENSG00000204131_82 (sequence is synthesized)
ttccttcccccatgtgtatcatggcgaagaaatatcaatatatgtatgtgctgaggtcttctgatgaattgtaaattacaaaccttttcattcatttttaaatgagatatatttaccctg

SEQ ID NO: 739344 - DNA, 120 bp, Artificial Sequence
  ENSG00000204131_83 (sequence is synthesized)
gctagtggttaaagttttattctttttattatatttcactgctacttttttctactgactccaaagcttactttgggctatatttcttatttctagattgttgtatttatcttatttcta

SEQ ID NO: 739345 - DNA, 120 bp, Artificial Sequence
  ENSG00000204131_84 (sequence is synthesized)
tatttatctgcagtcttggaatgttagagctgaaagggaccaacctctctcatttcacacatgaggaagctgaggcccagaaaggtcaaataacttatatacaaggtcacacagtgagtc

SEQ ID NO: 739346 - DNA, 120 bp, Artificial Sequence
  ENSG00000204131_85 (sequence is synthesized)
agtggtggggcccagcctcaattccaggtctcctgcccttgggcccaatctggtttcatttaaagcactacaatttatagaagacccacagctggcttctacttttatgacacatgaatt

SEQ ID NO: 739347 - DNA, 120 bp, Artificial Sequence
  ENSG00000204131_86 (sequence is synthesized)
tcccaggtatttcaatgaactaatatatatgctttaagggaaaatgttcaagagttctttaattcattaatccaaagacaaattggattttcagtttataaacattagtttccctccaaa

SEQ ID NO: 739348 - DNA, 120 bp, Artificial Sequence
  ENSG00000204131_87 (sequence is synthesized)
ttcaatatgtgcaccctacttagtacaatggatgttttccctaaaagttgtgtgaaaaatgagttttttagatatcaagtatcattttttagaggtaaacttcctatgtaagggaacctt

SEQ ID NO: 739349 - DNA, 120 bp, Artificial Sequence
  ENSG00000204131_88 (sequence is synthesized)
ctggtgacttctttttgaaaaaccgagattcctcttgtcattgtcccataatgtctctactttttttagtgcaaacttttgtatttggtgtttatttaaaagtagggtacaacccaacca

SEQ ID NO: 739350 - DNA, 120 bp, Artificial Sequence
  ENSG00000204131_89 (sequence is synthesized)
atattagctttcccagagtctactttagccttcccttcttaatctttatgagaaattttcagactgttaaatgctcatgagatatttagttgtgttctagaaatttcacctggcttgata

SEQ ID NO: 739351 - DNA, 120 bp, Artificial Sequence
  ENSG00000204131_90 (sequence is synthesized)
ttctgtcaatccctgggctcaaattccagctccatcttatcaaacaataacagaattccctaatcagtactaagctccgcatgcagtctcttttccagaacattctttgcctaatgttcc

SEQ ID NO: 739352 - DNA, 120 bp, Artificial Sequence
  ENSG00000204131_91 (sequence is synthesized)
ttagtgtggctctctctttagttggggcctccttccttagtacatgcataccttactattctgtggaattgcaagccatgcatcttttagagccacactagtcaaattgattggcatttc

SEQ ID NO: 739353 - DNA, 120 bp, Artificial Sequence
  ENSG00000204131_92 (sequence is synthesized)
catttattttccattgttcccttgtttctcctggacttcctctcgtttctcttttcgaggatgcttagaggcttctcaccagagattggtgaggtttcccccatcatctagatgggagat

SEQ ID NO: 739354 - DNA, 120 bp, Artificial Sequence
  ENSG00000204131_93 (sequence is synthesized)
tgacaaattctgtaaaggttaagacagtaactattttaggctttgtgggctacatgtggtctctgtagcacattcttctttgttgttgctgtttgttcattcgtttgttttgcaaccttt

SEQ ID NO: 739355 - DNA, 120 bp, Artificial Sequence
  ENSG00000204131_94 (sequence is synthesized)
caacctttggataatgtaaaccactctctttttttttgacagagtctctctctgtagccaggctggagggcaattgtacaatctcggctcattacaacctccacctcccgggttcaggca

SEQ ID NO: 739356 - DNA, 87 bp, Artificial Sequence
  ENSG00000204131_95 (sequence is synthesized)
tgccaatataaactattcttagctcatgggctatgcaaagccttaggctgacccctgatccagactgtcttctgagacaagcatttc

SEQ ID NO: 739357 - DNA, 120 bp, Artificial Sequence
  ENSG00000204131_96 (sequence is synthesized)
ctgacccctgatccagactgtcttctgagacaagcatttctgtgagctgccccatgtgataactgagttgtgcagtagctgatgtggtttattgccttcccatctactgcattgtcagac

SEQ ID NO: 739358 - DNA, 120 bp, Artificial Sequence
  ENSG00000204131_97 (sequence is synthesized)
cagactgactgcacaggagcaggtggaggggggctgcatatgccaaccattactcttcaatagagtgtccttcatgagctctctctctctctcattactgactacctcagtgtagaaacc

SEQ ID NO: 739359 - DNA, 120 bp, Artificial Sequence
  ENSG00000204131_98 (sequence is synthesized)
ctcatttttttccccagacctatccttgttacccaatgtgcctctgcttccctgggtttgggataaactggaaggagagaatttctgagttctcttacttattttgttccataacttctc

SEQ ID NO: 739360 - DNA, 120 bp, Artificial Sequence
  ENSG00000204131_99 (sequence is synthesized)
cctcatatctgtggttggagactcccacccttgtccaccctttcctgcctcatactagtatcatgagtttagggctgtcgttggaaagtctggcagcccaggccataggattccagttca

SEQ ID NO: 739361 - DNA, 120 bp, Artificial Sequence
  ENSG00000204131_100 (sequence is synthesized)
gcctacgatttcctagggaaatcaccaggttccaaaggctggtttttaaacctagaatatccatgtatccatttcctaatgcagtttggacctgttctagacagagcactcagccttagc

SEQ ID NO: 739362 - DNA, 120 bp, Artificial Sequence
  ENSG00000204131_101 (sequence is synthesized)
aagaaaaccaatgaggtgcagaagatattctgtgcccacagtttttccctgccttctggaccctcagcccctgggatgggctccttgggattgcccatgcaacaacacagccacaagaca

SEQ ID NO: 739363 - DNA, 120 bp, Artificial Sequence
  ENSG00000204131_102 (sequence is synthesized)
ttcagcacaccacctcctcctgtgttttgaatctctaaatgaattctgttctaaagcttcttcacgtctctctccatcctgctcccatctccacctctaatgcttcttgggagtctgaag

SEQ ID NO: 739364 - DNA, 120 bp, Artificial Sequence
  ENSG00000204131_103 (sequence is synthesized)
ctcagattcacattttcacattttctcgtataaacgttgtgggataagaatggatgatatgtatgtgtctgtgtgagtttggtttctcaacctggactgtgagggctaattcacaaatca

SEQ ID NO: 739365 - DNA, 120 bp, Artificial Sequence
  ENSG00000204131_104 (sequence is synthesized)
acacacacacacacacacacacacagtccagcaccctcatcagttctctggtttaggtccagatctgatgggactggtcaagaaggggatggtgggggctcctgaagcatttgccctttc

SEQ ID NO: 739366 - DNA, 120 bp, Artificial Sequence
  ENSG00000204131_105 (sequence is synthesized)
agaaggggatggtgggggctcctgaagcatttgccctttcttgcctcttgagaccttctttccattggcaattcaaaacaggctgacatacagagggctagcactctaatttgatgtgga

SEQ ID NO: 739367 - DNA, 120 bp, Artificial Sequence
  ENSG00000204131_106 (sequence is synthesized)
ctcagccactcagacctaggtctcaggctgcagcttatcctagctcagcaaattgcttcttagaatctttagcttgatttctgtcatttgagcccagggatctacccacttactgaaatc

SEQ ID NO: 739368 - DNA, 120 bp, Artificial Sequence
  ENSG00000204131_107 (sequence is synthesized)
taaattttaaaaaatcagtgatgaaagtaattttcaggatttccctatttaaaagcatccatgaaacagttcctttatgccttctgtttaggatttccagaattaggaagggaaaccagg

SEQ ID NO: 739369 - DNA, 120 bp, Artificial Sequence
  ENSG00000204131_108 (sequence is synthesized)
cttgtgccttggatccaaaagcagcaaaaatactacacttgccaaaagcaaactgaggaatgagcattggccagtcctagtatgcagtcaagaggtggacttttgttaagttagccctta

SEQ ID NO: 739370 - DNA, 120 bp, Artificial Sequence
  ENSG00000204131_109 (sequence is synthesized)
ccatttagtgcttactgaatgccaacaatgcacttagaaaaataagggagacaagaatttacagaccataccctaaactggaaggtacaggaaagacacatctcctagagctgggaatgt

SEQ ID NO: 739371 - DNA, 120 bp, Artificial Sequence
  ENSG00000204131_110 (sequence is synthesized)
gtccctaacatttcaagaagaagcagaaagtaggagagatcacgatctcagtctttttaggattccaacacaaaatggaagggagccctctgtggggtgatattacaaagggtttttctt

SEQ ID NO: 739372 - DNA, 120 bp, Artificial Sequence
  ENSG00000204131_111 (sequence is synthesized)
gtctttctttaaaaaaaaaaaggcattccttactggcttgctaccagcaattgaactgtattctttatatagctagagctgtttgtgtcttcttaaaataaactttttctgttaaaatca

SEQ ID NO: 739373 - DNA, 120 bp, Artificial Sequence
  ENSG00000204131_112 (sequence is synthesized)
aaactgtctgctggctttttccttcagtcacaggagagatgagggtgagaatggagtgccagagatggaagcagatgccccagaataattatcctgatcccaagtcagtagcgggcaccc

SEQ ID NO: 739374 - DNA, 120 bp, Artificial Sequence
  ENSG00000204131_113 (sequence is synthesized)
tttgagggtttgagttactctaaataggaaccacgggctggccttactgcccttgagatcaagactagcccgaggcagatctccaaggcccagtttaggccactctcccctctaaatctc

SEQ ID NO: 739375 - DNA, 120 bp, Artificial Sequence
  ENSG00000204131_114 (sequence is synthesized)
tagtgctgagataatgaaatcaaactaggttctagcaccctaggacttcagcatcccacatccctagccaagcatgcatcctgtcttgggaactactccacctcactgtacagtactttt

SEQ ID NO: 739376 - DNA, 120 bp, Artificial Sequence
  ENSG00000204131_115 (sequence is synthesized)
cattggctgcagtgaatttagttccctacatgggacccagtaccccaccagactgagttcaagtgccatggcaggctcggagccatctgaaacaacggaatatgttgccaccagcagcct

SEQ ID NO: 739377 - DNA, 120 bp, Artificial Sequence
  ENSG00000204131_116 (sequence is synthesized)
gccgcggtggctgccagtccagagcagaatgatgggcaactctcaccacaagcaaccgaggagtaaaagccaaagcaggatgcattcagcaacaggtcacagcaacagcccagcaggcag

SEQ ID NO: 739378 - DNA, 120 bp, Artificial Sequence
  ENSG00000204131_117 (sequence is synthesized)
aggaagaaaaaagaaggggttagctttggtcctgcctcctttcctttctctcatttgctcgtctctcctccgtccttcgtctggaaatttggtgaacttggccaggaggttccagagccc

SEQ ID NO: 739379 - DNA, 120 bp, Artificial Sequence
  ENSG00000204131_118 (sequence is synthesized)
atcatgattatctactgggacctcatcagccacagtgagatgttctctgacagttacatgagccaggaaattgcagacgggctgcgcctggaggtggaagggaagatagtcagtaggaca

SEQ ID NO: 739380 - DNA, 120 bp, Artificial Sequence
  ENSG00000204131_119 (sequence is synthesized)
gaaggtaacatttttgactcgctcattggtggaaatgcctccgctgaaggccctgagggcaaaggtaccgaaagcacagtaatcactggtgtcgatagtgtcatgaatcatcacctgcaa

SEQ ID NO: 739381 - DNA, 120 bp, Artificial Sequence
  ENSG00000204131_120 (sequence is synthesized)
gaaacaagcttcacaaaagaagcctacaataagtgcatcaaagattacatgaaatcaatcaaaggcaaactggaagaacagagaccaaaaagagtaaaaccttttatgacaggagctgca

SEQ ID NO: 739382 - DNA, 120 bp, Artificial Sequence
  ENSG00000204131_121 (sequence is synthesized)
gaacagatcaagcacatccttgctaatttcaaaaactaccagaaaacatgaatccagatggcatggttgctctgcggactactgtgaggatggtgtgacccgatatatgattttctttaa

SEQ ID NO: 739383 - DNA, 120 bp, Artificial Sequence
  ENSG00000204131_122 (sequence is synthesized)
ggatggtttagaaatggaaaaatgttaacaaatttggcaattactttggatctatcacctgtcatcataactggcttctgtttgtcatccacataacaccaggacttaagacaaatggga

SEQ ID NO: 739384 - DNA, 120 bp, Artificial Sequence
  ENSG00000204131_123 (sequence is synthesized)
ctgatatcatcttgagttcttcattattttgactgatttatttggagtggaggcattgttttttagaaaaacatgtcatgtaggttgtctaaaagtaaaatgcatttaaacttaaaaaaa

SEQ ID NO: 739385 - DNA, 120 bp, Artificial Sequence
  ENSG00000204131_124 (sequence is synthesized)
ctgtgtcacaacatagtggagaagatcaaagagaaagtggacacatgcaaagaggggaaaacctgagtggcatcccggctttataacaacccactgtcacaggaactaatccattcctga

SEQ ID NO: 739386 - DNA, 120 bp, Artificial Sequence
  ENSG00000204131_125 (sequence is synthesized)
gagaactaatccagtcttgtgagactgagaattcactcactcctgcaagactgccaccaagccattcacgaaggatccatccccatgacccagacacctcccactaggacccaccttcca

SEQ ID NO: 739387 - DNA, 120 bp, Artificial Sequence
  ENSG00000204131_126 (sequence is synthesized)
acatttggggatcaaatttcaacatgagttttgatggagacaaataaaccacatccaaaccatagcacagggactgctaaataccccaacaacagaaatagaaagctcccctaaacacct

SEQ ID NO: 739388 - DNA, 120 bp, Artificial Sequence
  ENSG00000204131_127 (sequence is synthesized)
tctttaactgagacctggctgtctcctgagaaccccacttcgcctgtaggcctctcctcagagattctttccctcccgcaaatacttctgcatctggaggtggagtgggccccttctttg

SEQ ID NO: 739389 - DNA, 120 bp, Artificial Sequence
  ENSG00000204131_128 (sequence is synthesized)
ctccccactgcaccttccagaccatgaccactgtacctctcaggcacttccctccattctatccttttgcccaccccctagtcttgcccaaatccaaatcacttcaacattcatgtgaaa

SEQ ID NO: 739390 - DNA, 120 bp, Artificial Sequence
  ENSG00000204131_129 (sequence is synthesized)
gatctatcccacttcccacacttcttgtttcttcggcctactcacctctgttgccctccctttctgctccagtcacccactctcagggccccaagtggatcttgcgatggcccagaactg

SEQ ID NO: 739391 - DNA, 120 bp, Artificial Sequence
  ENSG00000204131_130 (sequence is synthesized)
ctgcaccattgaaatcttaacttcaatccccacaacctcacatctttctaactttcccatctgattacttcattacactgttcagctttgttgagacttgtatgagctcatcacaaaaga

SEQ ID NO: 739392 - DNA, 120 bp, Artificial Sequence
  ENSG00000204131_131 (sequence is synthesized)
agaaatcccaatgtccaataaacatggaaatgtgcttaacctcatctactgtcagggaaacgaagaatgagggagaatggggcatgaggaaggagcatgagaaaactttttgaggtaata

SEQ ID NO: 739393 - DNA, 120 bp, Artificial Sequence
  ENSG00000204131_132 (sequence is synthesized)
gatatgtgcattatcttgattgtggctctggtttcaaggatgtttactaatcaaatcgtcacttaaaacgtgcagtttgttgtacatcaattatatatcaataaagttgtaaaatataca

SEQ ID NO: 739394 - DNA, 120 bp, Artificial Sequence
  ENSG00000204131_133 (sequence is synthesized)
ttcccctcactgcaggacagccgctgagcgggaggtcagccctctgaggggctctgactcgggcctttggctgagaaccttacctagagaaagacaagcccaactcacagtaaacttccc

SEQ ID NO: 739395 - DNA, 120 bp, Artificial Sequence
  ENSG00000204131_134 (sequence is synthesized)
tcgcctgtccgctgtgactgggccgacgggtccagggtggctgtgggtggagtgcagcggggtggagaaagagagaggaaactcacttttgaatcctcagttgctttccctaggctgggc

SEQ ID NO: 739396 - DNA, 120 bp, Artificial Sequence
  ENSG00000204131_135 (sequence is synthesized)
tgcccaggaacaacttcaatgggcaaaggagtatgtgatcgatgggaccaaggtgctgggaaacggggttcaggaaagtccctgggcacccactgaggagcctagggacagggtttggga

SEQ ID NO: 739397 - DNA, 120 bp, Artificial Sequence
  ENSG00000204131_136 (sequence is synthesized)
cagtgtggagcccgtcggctccctgcccccagtgtgggctcagcacacacttttctcatgtggattcttggttatccacaccgctgggatggagagaactgactctgtcaccctcttctg

SEQ ID NO: 739398 - DNA, 120 bp, Artificial Sequence
  ENSG00000204131_137 (sequence is synthesized)
aaagaactccagattggacttcctggtgtaaatctcttcttgcttcacacaggtcatttccttggtagggtcgcagaaaaccttaagagctgcagggcttcaaagagaggaacttgcagt

SEQ ID NO: 739399 - DNA, 120 bp, Artificial Sequence
  ENSG00000204131_138 (sequence is synthesized)
ccaaagtagcaaaaggtgtctgcattctgagcctcttttcgtaactgagcactcaaggtggggatcattgagataagggcttggtccccaaaccaccacagcatgaatttattgactttc

SEQ ID NO: 739400 - DNA, 120 bp, Artificial Sequence
  ENSG00000204131_139 (sequence is synthesized)
tcttctcctcgatcctcatggtcctgggaagcaagcacttttccatttccaaatccagtggctcaaacacctggaaatagcctaaagaaaatgcaagtcaggcctggcagctagagcagg

SEQ ID NO: 739401 - DNA, 120 bp, Artificial Sequence
  ENSG00000204131_140 (sequence is synthesized)
ccagcatgcacccactgacaagagacctccagctgcttactttacccactggaagctgctcagccctgctcaccagcagagctaccctgaggccccactgggataggccctgcacagcag

SEQ ID NO: 739402 - DNA, 120 bp, Artificial Sequence
  ENSG00000204131_141 (sequence is synthesized)
gtgcctggcctggtggcctgtccacgctttcctgcctcccagacgaagcctccaactacccagcctaaacagccaccctatgggcactggctcattgccaggcaggaatacaccctttcc

SEQ ID NO: 739403 - DNA, 120 bp, Artificial Sequence
  ENSG00000204138_0 (sequence is synthesized)
gtgtgaagacagttttgtaagaactgcaagtgctcaggctgtatgggaaacagaaacttcagcagatgaactgaccttatgccatttcctgatgtttggcagtgacactgaaagaggacc

SEQ ID NO: 739404 - DNA, 120 bp, Artificial Sequence
  ENSG00000204138_1 (sequence is synthesized)
gcatgtcccctctttatgtggatttatcttttatgaaaagtttgcttttgtccgggacagtttgttgtcgtgagatacatcagacaatataatcatgggacaagctgatgtctccagacc

SEQ ID NO: 739405 - DNA, 120 bp, Artificial Sequence
  ENSG00000204138_2 (sequence is synthesized)
ggtaaatccagatgcagttgaggaagcagaccagcccactacagagccaggcatggtcctggacagtgtggaagcaggagacacaacacctcctaccaaaaggaagagcaagttctcagg

SEQ ID NO: 739406 - DNA, 120 bp, Artificial Sequence
  ENSG00000204138_3 (sequence is synthesized)
ctttggcaagatcttcaagccctggaaatggaggaaaaaaaaaagtagtgataaatttaaagagacttcagaagttttagaacggaaaatatctatgcgaaagccaagagaagagctggt

SEQ ID NO: 739407 - DNA, 120 bp, Artificial Sequence
  ENSG00000204138_4 (sequence is synthesized)
taaaagaggggttctgttggaagaccctgagcaaggtggtgaggatccaggaaagccaagcgatgccatgttaaagaatggccataccacccccatagggaatgccagatcatctagtcc

SEQ ID NO: 739408 - DNA, 120 bp, Artificial Sequence
  ENSG00000204138_5 (sequence is synthesized)
agtccaagtagaggaagagccagtaagattagcaagtcttaggaaagctattccagaagaggacctaaagaaacgactaggctcaactggaagccagcctaattctgaagcagagtctgt

SEQ ID NO: 739409 - DNA, 120 bp, Artificial Sequence
  ENSG00000204138_6 (sequence is synthesized)
tcctgagaatgtacccaaaccacctttacttcctcccaaaagacccttgtcctcttctcatgaagcaagtgaagggcaagcaaaggatgccacttcctctggcggcacggcaaggttcat

SEQ ID NO: 739410 - DNA, 120 bp, Artificial Sequence
  ENSG00000204138_7 (sequence is synthesized)
catctccacctccatcaccacagcacccgctgccaccactgctgccacaagccttgcaaagactgttaatctctctgtcaccccttccccagcacccaggactctgcctgctgctcctgc

SEQ ID NO: 739411 - DNA, 120 bp, Artificial Sequence
  ENSG00000204138_8 (sequence is synthesized)
cagcactaacactactgctaccccaagcctcactcatatggtccctgccaagcagccccctatccctccccctaaaccagctcacagaaatagcaaccctgtcattgctgaactgtccca

SEQ ID NO: 739412 - DNA, 120 bp, Artificial Sequence
  ENSG00000204138_9 (sequence is synthesized)
agcaataaacagtggtacattgttatcaaaaccgtccccacccttaccacctaagagaggcattccatcaacctcagtacccaccttggagtctgctgctgccatcaccacaaaaacacc

SEQ ID NO: 739413 - DNA, 120 bp, Artificial Sequence
  ENSG00000204138_10 (sequence is synthesized)
aagtgatgaaagagagaagagcacgtgttctatgggctcggaactactaccaatgatctcacctcgctctccgtcccccccactgcctactcatatacctccagagcctccacgcacccc

SEQ ID NO: 739414 - DNA, 120 bp, Artificial Sequence
  ENSG00000204138_11 (sequence is synthesized)
tccattccctgctaagacttttcaagttgtgccagaaattgagtttccaccatccttagatctacaccaggagattccccagcaggaagatcagaaaaaggaagtccccaagaggatact

SEQ ID NO: 739415 - DNA, 120 bp, Artificial Sequence
  ENSG00000204138_12 (sequence is synthesized)
tggagggttctcacagagctcattcgttgctttttgaaaacagtgacagcttttctgaggacagcagtacgctgggtcggaccaggtctcttcccatcactattgaaatgctaaaagttc

SEQ ID NO: 739416 - DNA, 120 bp, Artificial Sequence
  ENSG00000204138_13 (sequence is synthesized)
cagacgatgaagaagaagaggagcaaacctgtccatccacattcagtgaagaaatgacacctacctcagtcattcctaaattaccacagtgtctacgggaggaagaagagaaggagagcg

SEQ ID NO: 739417 - DNA, 120 bp, Artificial Sequence
  ENSG00000204138_14 (sequence is synthesized)
actctgattcagaaggtcccattcagtaccgagatgaagaagatgaagatgaaagctatcagagtgctctcgccaacaaagtgaagaggaaagacacactggcaatgaagttgaaccaca

SEQ ID NO: 739418 - DNA, 120 bp, Artificial Sequence
  ENSG00000204138_15 (sequence is synthesized)
gacccagtgaaccagagttgaacctgaattcttggccttgtaaaagcaaggaggagtggaatgaaatacggcaccagattggaaacacactgatccggcgactgagtcaaagaccaacac

SEQ ID NO: 739419 - DNA, 120 bp, Artificial Sequence
  ENSG00000204138_16 (sequence is synthesized)
cagaagaactagaacaacgcaatatattgcaacctaaaaatgaagctgatcgtcaggcagaaaaacgagaaattaaacgtcggctcactagaaagctcagtcaaaggccaactgtcgctg

SEQ ID NO: 739420 - DNA, 120 bp, Artificial Sequence
  ENSG00000204138_17 (sequence is synthesized)
aactccttgccaggaagattctgaggtttaatgaatatgtagaggtaacagatgctcaagattatgaccggcgagccgacaaaccttggaccaaactgacccctgctgacaaggctgcca

SEQ ID NO: 739421 - DNA, 120 bp, Artificial Sequence
  ENSG00000204138_18 (sequence is synthesized)
taagaaaagaattaaatgaatttaaaagctccgagatggaggttcatgaagagagcaaacattttacacgctaccatcgtccatgatgccaaaggttgagagaggaatcaacatggctgc

SEQ ID NO: 739422 - DNA, 120 bp, Artificial Sequence
  ENSG00000204138_19 (sequence is synthesized)
tttgctgcttccttctccaaagtgacatatggagggaactttagcacttcccagcacagccagaattgcatcctctgggatcttctgaggtggacagcactttgaatgtagcatttcact

SEQ ID NO: 739423 - DNA, 120 bp, Artificial Sequence
  ENSG00000204138_20 (sequence is synthesized)
ggaacagagtcttatgtgctgcaccgggggcaaaacaacactttgtcagtgcttttgaacctttcaatattgtagcatgcttgaggagtttttcccttactggccaccaaagttctgaac

SEQ ID NO: 739424 - DNA, 120 bp, Artificial Sequence
  ENSG00000204138_21 (sequence is synthesized)
cacttgcaggttccaggttttactggctgcaccacaccccttcccctagatgactgcctgtgcagagacacagtttgcaccattagccttacctgccctgccctgattgtgagacccaaa

SEQ ID NO: 739425 - DNA, 120 bp, Artificial Sequence
  ENSG00000204138_22 (sequence is synthesized)
tgtgtaggctctaaattccagccatcaaatccaattcctggtggggaaaaccttctggagacccccaaccttctgataaaagagtctctacctccagggaaagccttcttaccacactgg

SEQ ID NO: 739426 - DNA, 120 bp, Artificial Sequence
  ENSG00000204138_23 (sequence is synthesized)
catatcagatgaaagcattgcactgtacctctcgtaacacagcaatacagtcctcttgaggcactcaagcctgagaggaagctcaggatctgacatgttcttccttttcctcacaagtca

SEQ ID NO: 739427 - DNA, 120 bp, Artificial Sequence
  ENSG00000204138_24 (sequence is synthesized)
cctcacaagtcatcatgattttttattttaaaataatctggaagtaatgggaacttagtttttcctgaactccaaccagaatccaaattggttagatgaggccaggcgcggtggctcacg

SEQ ID NO: 739428 - DNA, 120 bp, Artificial Sequence
  ENSG00000204138_25 (sequence is synthesized)
cggctgctgcctggcggccaacgggccaggtaggatttccgggagaggctgctgtggaggctgaggaggcggcggcggagatctggaaacagtatctcacctccctaaactggttaatag

SEQ ID NO: 739429 - DNA, 120 bp, Artificial Sequence
  ENSG00000204138_26 (sequence is synthesized)
gtcttaaaaaaaaaaaaaaaaaaaaaatcggttagatgagaaagcatgtatattttctatatacaaaaacaagaaaggcgttttgagcccctgtgctcaggcccactcccacactgtgga

SEQ ID NO: 739430 - DNA, 74 bp, Artificial Sequence
  ENSG00000204138_27 (sequence is synthesized)
cttattccttccttgcaaaaaaaaaaaaaaaaaaagccttagccagattcagtggctcacgcctgtaatcccaa

SEQ ID NO: 739431 - DNA, 79 bp, Artificial Sequence
  ENSG00000204138_28 (sequence is synthesized)
atggcaaaaccctgtctctactaaaaagtaaaaaaaattagccgggcatggtggcttgtgccttgtagtcccagccact

SEQ ID NO: 739432 - DNA, 120 bp, Artificial Sequence
  ENSG00000204138_29 (sequence is synthesized)
gactccgtctcaaaaaaaaaaaaaaagccttaatattaatgctaacgtggcagaaaactagcaggttacattttataggctattgtagttttatttaccaaatgatattctctaaatcac

SEQ ID NO: 739433 - DNA, 120 bp, Artificial Sequence
  ENSG00000204138_30 (sequence is synthesized)
aatgatattctctaaatcacttcgaccaataaatgtattctcctccttaaagcagagttgtatcaactctgtgggagcatttatgagctgtcagtccccacacttctagccagaatcaca

SEQ ID NO: 739434 - DNA, 120 bp, Artificial Sequence
  ENSG00000204138_31 (sequence is synthesized)
ataaggtctggctgggtgtggggtgctgcataggaaagggtctctggagaagcaagaagggcacaatcatggcccactgctcccctcttcttctcagtgctctttgccctctcctgctgc

SEQ ID NO: 739435 - DNA, 120 bp, Artificial Sequence
  ENSG00000204138_32 (sequence is synthesized)
gtgcttcctcttcactccagtgctgatcctcctgctctctctggcagcttccacctcacccgcccctcttccacactataaccagtatggttggtgctggggcattgactcagcccccct

SEQ ID NO: 739436 - DNA, 120 bp, Artificial Sequence
  ENSG00000204138_33 (sequence is synthesized)
gctttctgcatttgtaatagatattaatatgatttcctaaaacagaagattttgttgctttctttgaacttgtattgaaaaccatacagtctcactgttttgctttaattcctatccaca

SEQ ID NO: 739437 - DNA, 120 bp, Artificial Sequence
  ENSG00000204138_34 (sequence is synthesized)
ctataaatggaagaaaaaaattaatagcttctgtttaatctgatgaatgtggctttttttcccttcactttaatgttcaagaagttgtggctatttcatagatttcttctgatttattct

SEQ ID NO: 739438 - DNA, 120 bp, Artificial Sequence
  ENSG00000204138_35 (sequence is synthesized)
gtgggtccctgttatctgttctttatgtaatctttcagtagattttcatcctttcatatccacattcttatgtggacttgctgaagaaacagaatatcagttcaaaacaaaacctaggcc

SEQ ID NO: 739439 - DNA, 88 bp, Artificial Sequence
  ENSG00000204138_36 (sequence is synthesized)
ctgaagaaacagaatatcagttcaaaacaaaacctaggccaggcatggtggttcacgcctataatctcagcactttgggaagccaagg

SEQ ID NO: 739440 - DNA, 90 bp, Artificial Sequence
  ENSG00000204138_37 (sequence is synthesized)
gactccatcaaaaaaaaaaaaaaaaaagaaggaaggaaggaaagcaagccctgaatccacatctccttgaagttttttttgttttatttt

SEQ ID NO: 739441 - DNA, 84 bp, Artificial Sequence
  ENSG00000204138_38 (sequence is synthesized)
gtgggattacaggcatgagccaccgtgccgagccttccttgaagttttttgtttggttttggagatagggtctcactctgttac

SEQ ID NO: 739442 - DNA, 75 bp, Artificial Sequence
  ENSG00000204138_39 (sequence is synthesized)
tgcctcccaggctcaagcaatcctcccacttcagtttttgtgttttgttagagatgaggttttgccatattgccc

SEQ ID NO: 739443 - DNA, 120 bp, Artificial Sequence
  ENSG00000204138_40 (sequence is synthesized)
ttttgtgttttgttagagatgaggttttgccatattgcccaggctcgtcttgaacaccggggctcaaggaatctgcccatcttcgcctcccaaagttctgagatagcaggtgtgagtcat

SEQ ID NO: 739444 - DNA, 120 bp, Artificial Sequence
  ENSG00000204138_41 (sequence is synthesized)
catgcccagcctccttgaagtttactaacaattgggataactgagggaagagaagtgacaattccactcagtctattagaggtctggatataaggtagccacacaataactctaacttga

SEQ ID NO: 739445 - DNA, 120 bp, Artificial Sequence
  ENSG00000204138_42 (sequence is synthesized)
cttctaaccattctatcttattgatttggaggctgtcttctgccagattttttgtggcttgagatgatattttcgaacccttctttcactacctttcttacccttaatgtgccaagcttg

SEQ ID NO: 739446 - DNA, 120 bp, Artificial Sequence
  ENSG00000204138_43 (sequence is synthesized)
aaacaggatttgatttcctgagctacttgttcgccttctgtgcgtcaccaagtaatctggttcatctttcgtctcattcatgttattttcaagtgaaacaagacattttgggggtcaagt

SEQ ID NO: 739447 - DNA, 120 bp, Artificial Sequence
  ENSG00000204138_44 (sequence is synthesized)
ctctttgggtgttttgtttttatgtatataaaaatggattttgtgttccctttccatgtaagtaccaacttatatggaaactcacaatcataatgtaaagaagaaatgaaagcctggtgt

SEQ ID NO: 739448 - DNA, 120 bp, Artificial Sequence
  ENSG00000204138_45 (sequence is synthesized)
attgtacttcaagatgcctccctgatgtatagaatctccttgtaaaataaataattgcattgtatatcagtcttctcatcaatattaattattaaatattttagaatttttaaataccaa

SEQ ID NO: 739449 - DNA, 120 bp, Artificial Sequence
  ENSG00000204138_46 (sequence is synthesized)
gtcattggtaagtaagtctttaggcttccagtgttttgggtttggtttgatgttggatggttattttatttgataactggtacaacattgatttggtctgtgagaattttccatatcttg

SEQ ID NO: 739450 - DNA, 84 bp, Artificial Sequence
  ENSG00000204138_47 (sequence is synthesized)
tacaacattgatttggtctgtgagaattttccatatcttgtccctttgaatgacctcaatatggagaaaagtcttaggttaaga

SEQ ID NO: 739451 - DNA, 120 bp, Artificial Sequence
  ENSG00000204138_48 (sequence is synthesized)
ggagagaaaggacgcacgcttcccgccattttgttcagcttgccgggcaaccggcccctgctggggactacaagtcccgtaagcctccgcggcggcacgtcctaccctacactgtccagc

SEQ ID NO: 739452 - DNA, 120 bp, Artificial Sequence
  ENSG00000204138_49 (sequence is synthesized)
cactgagaaggtttgggcttccttggggctatttgtgagcatgttcagtctgaccaatccatcccctgttctctcagcactacttggctaaaaatgaagctgatcgtcaggcagaaaaac

SEQ ID NO: 739453 - DNA, 85 bp, Artificial Sequence
  ENSG00000204138_50 (sequence is synthesized)
tgagaccagcctgggaaacacgctaccatcgtccatgatgccaaaggttgagagaggaatcaacatggctgctttgctgcttcct

SEQ ID NO: 739454 - DNA, 120 bp, Artificial Sequence
  ENSG00000204140_0 (sequence is synthesized)
acatggtgttcccacagctgggaggacacccacatggtcggcgtgcaggatatttcgctggaccctagaaaagccaccacgacctgtgggccatgatgctaccccaatggctgctgctgc

SEQ ID NO: 739455 - DNA, 120 bp, Artificial Sequence
  ENSG00000204140_1 (sequence is synthesized)
tgttccttctcttcttctttctcttcctcctcaccaggggctcactttctccaacaaaatacaaccttttggagctcaaggagtcttgcatccggaaccaggactgcgagactggctgct

SEQ ID NO: 739456 - DNA, 120 bp, Artificial Sequence
  ENSG00000204140_2 (sequence is synthesized)
gacttgtatatattcaaagaatgagaaatggcttagcatcgcctatggccgttgtcagaaaattggaaggcagaagttggctaagaaaatgttcttctagtgctccctccttcttgctgc

SEQ ID NO: 739457 - DNA, 120 bp, Artificial Sequence
  ENSG00000204140_3 (sequence is synthesized)
ctcctcctcctccacctgctctcctccctacccagagctctgtgttcaccctgttccccagagcctccaccatgagtggagggaagtggggagtgattgaaataaagagctttttcaatg

SEQ ID NO: 739458 - DNA, 120 bp, Artificial Sequence
  ENSG00000204140_4 (sequence is synthesized)
ggctgctgccaacgtgctccagacaattgcgagtcgcactgcgcggagaaggggtccgagggcagtctgtgtcaaacgcagctgccagctactccatgcttcctgccttcgaatacggtg

SEQ ID NO: 739459 - DNA, 120 bp, Artificial Sequence
  ENSG00000204140_5 (sequence is synthesized)
gcatgtggcaaccttgaagagaaggtcaagagctaccagccaccaaaagaatgccagcacttcctgtgtctttgctttggattcatgagaaatatacgttcctatttgcttcagccataa

SEQ ID NO: 739460 - DNA, 120 bp, Artificial Sequence
  ENSG00000204147_0 (sequence is synthesized)
gctgggattacaggcatgagccaccgcttcctgccaaaagagggctttagggcacccccagaacctgagatctccctcatctgtcatctttaaagagaaggaagtcgactcccagtcgag

SEQ ID NO: 739461 - DNA, 120 bp, Artificial Sequence
  ENSG00000204147_1 (sequence is synthesized)
ccatagtccatttgtcccgggcacggtgactccggggtggccaggaccaaatgtgtctccttctggcttttgcaccgcaccaactaatccgcggcaggccgcacagctgccctggccttc

SEQ ID NO: 739462 - DNA, 120 bp, Artificial Sequence
  ENSG00000204147_2 (sequence is synthesized)
gcggaggactaaggcgagggcggtgtacgctgctccggagtcccaccgcgggagttgaggcagcggattccgagggcagggtggggcggaatcgggagggatgcggacccggtggaacgc

SEQ ID NO: 739463 - DNA, 120 bp, Artificial Sequence
  ENSG00000204147_3 (sequence is synthesized)
actgcgcagacggcgccggcgcccgcacacagctgttgactagtcttccagctctcccctggaagtcgtccaggcgccggtctcttttttctgcctttttgtttccctccccgcgagtcg

SEQ ID NO: 739464 - DNA, 120 bp, Artificial Sequence
  ENSG00000204147_4 (sequence is synthesized)
gcgcgacggtgaatttccgtttccggcggtgtggaagcggacctgaggagtcgcaattgtgaacaggttcggtgctgcggctggggctcagcgatatgaggcagcatcgacaatttatgg

SEQ ID NO: 739465 - DNA, 120 bp, Artificial Sequence
  ENSG00000204147_5 (sequence is synthesized)
accgcacgcattatctgcttacattcagctcttcagaaaccttgctaaggctattgctacggacatggtagccaacctgagcagaggtccagaacctccctttttcaaacaattaatagt

SEQ ID NO: 739466 - DNA, 120 bp, Artificial Sequence
  ENSG00000204147_6 (sequence is synthesized)
tccattaattcctagtattgtggatagagcaccaaaaggcagaactttcggggatgtcctgcagccagcaaaacctgaatacagagtgggggaagttgctgaagttatatttgtaggtgc

SEQ ID NO: 739467 - DNA, 120 bp, Artificial Sequence
  ENSG00000204147_7 (sequence is synthesized)
taacccgaagaattcagtacaaaaccagacccatcagaccttcctcactgtggagaaatatgaggctacttcaacatcgtggcagatagtgtgtaatgatgcctcctgggagactcgttt

SEQ ID NO: 739468 - DNA, 120 bp, Artificial Sequence
  ENSG00000204147_8 (sequence is synthesized)
ttattggcacaagggactcctgggtctgagtaatgcaacagtggaatggcatattccagacactgcccagcctggaatctacagaataagatattttggacacaatcggaagcaggacat

SEQ ID NO: 739469 - DNA, 120 bp, Artificial Sequence
  ENSG00000204147_9 (sequence is synthesized)
tctgaagcctgctgtcatactttcatttgaaggcacttccccggcttttgaagttgtaactatttagtgaaaagttgatagatcatttaaagaacagctttactctctacacattatata

SEQ ID NO: 739470 - DNA, 120 bp, Artificial Sequence
  ENSG00000204147_10 (sequence is synthesized)
tataagtgatttcaaatgaatgtgaactagtgaactaccatgttgacttctataatcgtccctgtttggggacagatagtttactgctaatggggtggaggggtgtgtgtgtgtgtgtgt

SEQ ID NO: 739471 - DNA, 120 bp, Artificial Sequence
  ENSG00000204147_11 (sequence is synthesized)
gtgtatgtgagagagagagagagagagagaggtttgtcccatatatcttgttccagcagccatatatcttgtggtctacagcctaaagcatgatttcccttgaagtcttggggttgttta

SEQ ID NO: 739472 - DNA, 120 bp, Artificial Sequence
  ENSG00000204147_12 (sequence is synthesized)
tgaagtcttggggttgtttaaaggagagtcccttcaatataaaacctctgaaatattagtgagaatggctcactaatgtgaacaatgtttaaattatttatttatatatagaattactga

SEQ ID NO: 739473 - DNA, 120 bp, Artificial Sequence
  ENSG00000204147_13 (sequence is synthesized)
atattagtactgggaaaatttatagaaatcatctagtcttacccttcatcttacatataagaaaaatggtcttttcttctaatcacatttacaaaatatgatataaaccttgaccatgaa

SEQ ID NO: 739474 - DNA, 120 bp, Artificial Sequence
  ENSG00000204147_14 (sequence is synthesized)
gtggatgctcaaatcatttctggaattgccttcaggacacaattatgagaaagtcagacttccaatattttgatcatgccttgtgtcttcctaagtgtccttatcccactggattgtgtc

SEQ ID NO: 739475 - DNA, 120 bp, Artificial Sequence
  ENSG00000204147_15 (sequence is synthesized)
tcttactcccaagacttattccaaatgattttttgactcttttcattaatcaaattcaccccaaaccagaaagttttgccattagcgtagatattaaaaatattactggctgggaaagca

SEQ ID NO: 739476 - DNA, 120 bp, Artificial Sequence
  ENSG00000204147_16 (sequence is synthesized)
ctcctcaaagcagaggttctaaattaatttatctgttcttttaccatttgctcactcactcactcatggacccattcaatcatagaatatttaagatttatatgcccagaattataatag

SEQ ID NO: 739477 - DNA, 120 bp, Artificial Sequence
  ENSG00000204147_17 (sequence is synthesized)
tgcctaggccttgataattagtgaatttgtacttggggtgaatgtgtaagtgtcaaaaggtaactattatgaaggagaaaataatcgatttaatatgtaaattctggggaggcatttaaa

SEQ ID NO: 739478 - DNA, 120 bp, Artificial Sequence
  ENSG00000204147_18 (sequence is synthesized)
aaatcagtaatcttcaagttatatcttgtgtatcatctgtgttggatactctaatttggggggaaagaggctccagacagtttgctaaatactattttgaaagttatttttgggcattgt

SEQ ID NO: 739479 - DNA, 120 bp, Artificial Sequence
  ENSG00000204147_19 (sequence is synthesized)
aaaataccttgcttcataccccaaagaataagatatgacaatctgacatcgattgtctgaaagtactaattgcatttaaaattctttaagttaactacaacctcccagactgcaaagcaa

SEQ ID NO: 739480 - DNA, 120 bp, Artificial Sequence
  ENSG00000204147_20 (sequence is synthesized)
atttccaaaccccaggtcatacttttgtatgtatgtaaaagctttagcattttagggaaaaaaatcaatctgtatttcaaaaataaactttgaggtttgaaaataataacaatattcata

SEQ ID NO: 739481 - DNA, 120 bp, Artificial Sequence
  ENSG00000204147_21 (sequence is synthesized)
atggtagtattaacatctattatgtataacttaatctcaacataatttattgaattagaatgaacctggaacactttttgatgaattggtatcctagaggctgtttccttgggccttaac

SEQ ID NO: 739482 - DNA, 120 bp, Artificial Sequence
  ENSG00000204147_22 (sequence is synthesized)
tgctggaggattaggtaatcagggattccaagtgttgtgatcttttttctgatgacgccacagtcttcagtgtaaaagttcagaagcctaaaagaacaagtgatcctgaaagtagctgat

SEQ ID NO: 739483 - DNA, 120 bp, Artificial Sequence
  ENSG00000204147_23 (sequence is synthesized)
tccagacaagaaaattatattagaactcatgatatggttttttaaagtatttgttattactcagaagggttcatgaatcagtttccactacctctattccttctattgaagctttcctca

SEQ ID NO: 739484 - DNA, 120 bp, Artificial Sequence
  ENSG00000204147_24 (sequence is synthesized)
aatctacttgtgattcctgatagctcactggcaactgtaccaaggtggccactgtatcatctactgatccttctgcacctagcactcttggctccagataacgcacagaaacctattttc

SEQ ID NO: 739485 - DNA, 120 bp, Artificial Sequence
  ENSG00000204147_25 (sequence is synthesized)
tcaccagctgtcatttcttctagggcatgcagttctatgttcacagttcatgtgtaaaaataaaaccaaattcctggattatcaatatcagttctttacctgtgcataaaagaatatcat

SEQ ID NO: 739486 - DNA, 120 bp, Artificial Sequence
  ENSG00000204147_26 (sequence is synthesized)
gaagtaattgaacttatctgttgatataaaaacacagatccaattcgtgtctgtggatgctgcaaggactggctcactggagccaaaccatgtggcggaaactcctgaaattggtggaaa

SEQ ID NO: 739487 - DNA, 120 bp, Artificial Sequence
  ENSG00000204147_27 (sequence is synthesized)
aagtggaatatggcagattgggtaggtaggagaacaattttggagattttgtttctcatgttaaagtgtctgcattttatttgctgtaccctgcctactctggttttaaggattttttga

SEQ ID NO: 739488 - DNA, 120 bp, Artificial Sequence
  ENSG00000204147_28 (sequence is synthesized)
cttcttcgaaaagcactgaataatctctttgccgggtctagattttttgatgagtactgtgtaaaattgtcaatattcaatggattatttaataataaattaagaattacactcataaaa

SEQ ID NO: 739489 - DNA, 120 bp, Artificial Sequence
  ENSG00000204147_29 (sequence is synthesized)
aaaggtaatgtagacaaacgaacacttttttaaaaaaagaggtggaacaaaaggtggtagattacatgtaaattaggttggaaagtgatacaaatgacttgtaaataaccactgaagcac

SEQ ID NO: 739490 - DNA, 120 bp, Artificial Sequence
  ENSG00000204147_30 (sequence is synthesized)
aagggaaccacttctttatcagttcctttctaacttctgaagatgtactgctggtaaagcacatgtatggttggcatttcttttattttctttctcttttttactagttgggcaaaaaaa

SEQ ID NO: 739491 - DNA, 120 bp, Artificial Sequence
  ENSG00000204147_31 (sequence is synthesized)
tttcctaggcaggtagctaactatgaaattgtttcctgcgctaattctgaacaaaaagaccaagaatgaatttacttatgaatgtccttttctaatgtgccctcttatgcttctcctcca

SEQ ID NO: 739492 - DNA, 120 bp, Artificial Sequence
  ENSG00000204147_32 (sequence is synthesized)
atgtaagcaagcttactgtctttttctaagattagcgcatggattctatctttagccaaaaggtttcatcactagatgaacttctcatgtgtttagttcttccaaatgatgctcttgctt

SEQ ID NO: 739493 - DNA, 120 bp, Artificial Sequence
  ENSG00000204147_33 (sequence is synthesized)
cctgggtatccaacctgacttgctggtttatattggcttccaaaattttagagtgatagggtatcggagagggaaatttgcacattccttatgcaatttgttagtatgcattcagctgta

SEQ ID NO: 739494 - DNA, 120 bp, Artificial Sequence
  ENSG00000204147_34 (sequence is synthesized)
actcagaaaatattcctgatcaacatgcatccaaacactaaagacatttataacctcacatagcagtaagtcttgaagtgataaattcaggtttggtgcagccactcagtggctcttctt

SEQ ID NO: 739495 - DNA, 120 bp, Artificial Sequence
  ENSG00000204147_35 (sequence is synthesized)
aatatattgacttaattcttaggcttatcctcttagctaaaagatcgctacctcaagtctacatataattgaatgcggcagcaaaatgggaggagagagttctctttataatcccctttt

SEQ ID NO: 739496 - DNA, 120 bp, Artificial Sequence
  ENSG00000204147_36 (sequence is synthesized)
agaaggtggaaaatagtaagaacacaagttgaattttccttctatttctttgttcagaactgtgccacacagctactcttacctgcaagggaagctggaaaaaagaatatttagtatttt

SEQ ID NO: 739497 - DNA, 120 bp, Artificial Sequence
  ENSG00000204147_37 (sequence is synthesized)
gtgcttctagagagtgaggcaagttctgatagtaagaaagaagagatagccgaagtagctgtcataaaattatgttagtcaagacagattagttatgctacaacattagagatttatttc

SEQ ID NO: 739498 - DNA, 120 bp, Artificial Sequence
  ENSG00000204147_38 (sequence is synthesized)
ttgatctcatgacctgtccattggggttagctgaaggatctgttccacatctcatttgagttcacaggctgacagagacttccattctaaacattcttccattgtgagggaacaggaaca

SEQ ID NO: 739499 - DNA, 120 bp, Artificial Sequence
  ENSG00000204147_39 (sequence is synthesized)
ggtgcttccatgattagggggaagggacagggagaatcatgcaatagttcgtgaagcttccacattactgtgcatttttcactgggcaggtgacagaaccaggatatttgcaagcagccc

SEQ ID NO: 739500 - DNA, 120 bp, Artificial Sequence
  ENSG00000204147_40 (sequence is synthesized)
taaaggttaccacagtgggcaagcaataatatctgcatatccaaattaactgctctttgaaataattagaactcgttttactctagaaaatatattttggaaaagaacacacattggaat

SEQ ID NO: 739501 - DNA, 120 bp, Artificial Sequence
  ENSG00000204147_41 (sequence is synthesized)
aatgacgaaaaaaattgctttctgtattgcaaaatgtatacgttcctttaacagatttatatcaagcacctatatactttatggcagaaattatgctaaatcctaagaatgaaacaataa

SEQ ID NO: 739502 - DNA, 120 bp, Artificial Sequence
  ENSG00000204147_42 (sequence is synthesized)
tgaaggcaaagctattccctgccaaaaggaacttagagtttaacgaacaaagcaaacggatgaacaggtaattactgtacagagtgacccatattgttattgttcagggaattagagagg

SEQ ID NO: 739503 - DNA, 120 bp, Artificial Sequence
  ENSG00000204147_43 (sequence is synthesized)
gcacctaatatggtcttggggatgtttcagtaagtttcctggaagaaataacatataagctaagacttaaaagatatgtagaaattagctagaaggaaggcaatggtgtgtgcatgtatg

SEQ ID NO: 739504 - DNA, 120 bp, Artificial Sequence
  ENSG00000204147_44 (sequence is synthesized)
tgtgtattagtttgtgtttgtgtttgtgtactgggcaaatagactattccatgtagagggaatattgagtactttatcaagactatagttagagtataaggaaagagttgacagtgaggc

SEQ ID NO: 739505 - DNA, 120 bp, Artificial Sequence
  ENSG00000204147_45 (sequence is synthesized)
agcaccaaactttaccttcataaatagcaatttggttttatacttgtattagcatttttcccccttgacatcaatgtccttgaatgtatttgccatttgctctaataataaaatacactt

SEQ ID NO: 739506 - DNA, 120 bp, Artificial Sequence
  ENSG00000204147_46 (sequence is synthesized)
aaccttgctaaggctattgctacggaacttcacttgtggaaatcttccctttggatgcagttgtttatgaagctgcaactgtgatgtcagaaggacatggtagccaacctgagcagaggt

SEQ ID NO: 739507 - DNA, 120 bp, Artificial Sequence
  ENSG00000204147_47 (sequence is synthesized)
gagctcaggcctgcaatcatgccccacacagtgagccatggtgaatgcattttgaaaagcaacctcctcccttcccttttcctctttgtgactttgtgtatcacaaaagcagctgtgagc

SEQ ID NO: 739508 - DNA, 120 bp, Artificial Sequence
  ENSG00000204147_48 (sequence is synthesized)
cagagaaggggctcggataatggctctgttgctgagatgtcctttggtggctgggaaatgaagactgggaattgctgcataggtctggggggcatagaagacaggagctccaagggtgac

SEQ ID NO: 739509 - DNA, 120 bp, Artificial Sequence
  ENSG00000204147_49 (sequence is synthesized)
ttcaatgggggaaccatccagcacctgttgtagagagcaaagaaatatcaacgcgagatgatatgaagataaccaagtgtggctgagccctaataacatgactccttctaagtgttagac

SEQ ID NO: 739510 - DNA, 120 bp, Artificial Sequence
  ENSG00000204147_50 (sequence is synthesized)
tatttgctgtaggtttattgattgtatcttgtcattttataggtttgttttgtatgccagttgaactttttctgagccattttgttggtaagttgcataagatgccaacaggtttgacag

SEQ ID NO: 739511 - DNA, 120 bp, Artificial Sequence
  ENSG00000204147_51 (sequence is synthesized)
ttcagctcttcagaaaccttgctaaggctattgctacgacaagaatctaggaaaaaacttggtactcactccaggacatggtagccaacctgagcagaggtccagaacctccctttttca

SEQ ID NO: 739512 - DNA, 120 bp, Artificial Sequence
  ENSG00000204149_0 (sequence is synthesized)
gggcattgtgtgccacatgcctgggctcccacctggggccagtgggcttcagtctgtaggtgactacagaaggaggaggaactccgtctgttctctcttcaggcagttgttgtgtctctc

SEQ ID NO: 739513 - DNA, 120 bp, Artificial Sequence
  ENSG00000204149_1 (sequence is synthesized)
agcgcttgttggtttcacaacctattaaataagccggctggtcttcaccctcccagacaagtcaactcaggggaggcagcagggtgcgggccttggcccgcagccctagccggggccggg

SEQ ID NO: 739514 - DNA, 120 bp, Artificial Sequence
  ENSG00000204149_2 (sequence is synthesized)
gccagggctggtgcccggggcctcgctgtgaggtgggcaggcgaggagcgggaagaccatctctgcaagtgcagcatagcctcggcctaggacagcgggagtgcgtggccaaagctgtga

SEQ ID NO: 739515 - DNA, 120 bp, Artificial Sequence
  ENSG00000204149_3 (sequence is synthesized)
gcagaggcacaggtggtggcagacagtagaggcgccccatggggaacatactgacctgtcgtgtgcaccctagcgtcagcctcgagtttgaccagcagcaggggtcggtgtgtccctctg

SEQ ID NO: 739516 - DNA, 120 bp, Artificial Sequence
  ENSG00000204149_4 (sequence is synthesized)
aatctgagacctatgaggcaggagctagggacaggatggcaggagcgcccatggctgctgctgtacagcctgctgaggtgactgttgaagttggtgaggacctccacatgcaccacgttc

SEQ ID NO: 739517 - DNA, 120 bp, Artificial Sequence
  ENSG00000204149_5 (sequence is synthesized)
accatgtatctgctgtgcgtttcagtcaacaatacagcttgtgttcgacaatattccttgatgacagcacagccatccagcattatcttacaatgacaataatatctgtgaccttggaga

SEQ ID NO: 739518 - DNA, 120 bp, Artificial Sequence
  ENSG00000204149_6 (sequence is synthesized)
tacctcatcatatcacacaaagagatgcagatagaactttgagcatacctgatgaacagttacactcatttgcggtttccaccgtgcacattatgaagaaaagaaatggaggtgggagtt

SEQ ID NO: 739519 - DNA, 120 bp, Artificial Sequence
  ENSG00000204149_7 (sequence is synthesized)
taaataactattcctcctccattccatcgactcccagcaccagccaggaggaccctcagttcagtgttcctcccactgccaacacacccacgcccgtttgcaagcggtccatgcgctggt

SEQ ID NO: 739520 - DNA, 120 bp, Artificial Sequence
  ENSG00000204149_8 (sequence is synthesized)
ccaacctgtttacatctgagaaagggagtgacccagacaaagagaggaaagccccggagaatcatgctgacaccatcgggagcggtagagccatccccattaaacagggcatgctcttaa

SEQ ID NO: 739521 - DNA, 120 bp, Artificial Sequence
  ENSG00000204149_9 (sequence is synthesized)
agcgaagtgggaaatggctgaagacatggaaaaagaaatacgtcaccctgtgttccaatggcatgctcacctattattcaagcttaggtgattatatgaagaatattcataaaaaagaga

SEQ ID NO: 739522 - DNA, 120 bp, Artificial Sequence
  ENSG00000204149_10 (sequence is synthesized)
gcacacccatctccagctctaaaagcaatggcctatccaaggacatggacaccgggctgggtgactccatatgcttcagccccagtatctccagcaccaccagccccaagctcaacccgc

SEQ ID NO: 739523 - DNA, 120 bp, Artificial Sequence
  ENSG00000204149_11 (sequence is synthesized)
ccccctctcctcatgctaataaaaagaaacacctaaagaagaaaagcaccaacaactttatgattgtgtctgccactggccaaacgtggcactttgaagccacgacgtatgaggagcggg

SEQ ID NO: 739524 - DNA, 120 bp, Artificial Sequence
  ENSG00000204149_12 (sequence is synthesized)
atgcctgggtccaagccatccagagccagatcctggccagcctgcagtcatgcgagagcagtaaaagcaagtcccagctgaccagccagagcgaggccatggccctgcagtcgatccaaa

SEQ ID NO: 739525 - DNA, 120 bp, Artificial Sequence
  ENSG00000204149_13 (sequence is synthesized)
acatgcgtgggaacgcccactgtgtggactgtgagacccagaatcctaagtgggccagtttgaacttgggagtcctcatgtgtattgaatgctcaggtatccaccgcagtcttggccccc

SEQ ID NO: 739526 - DNA, 120 bp, Artificial Sequence
  ENSG00000204149_14 (sequence is synthesized)
acctttcccgtgtgcgatctctggagctggatgactggccagttgagctcaggaaggttatgtcatctattgtcaatgacctagccaacagcatctgggaagggagcagccaggggcaga

SEQ ID NO: 739527 - DNA, 120 bp, Artificial Sequence
  ENSG00000204149_15 (sequence is synthesized)
caaaaccctcagaaaagtccacgagggaagagaaggaacggtggatccgttccaaatatgaggagaagctctttctggccccactaccctgcactgagctgtccctgggccagcagctgc

SEQ ID NO: 739528 - DNA, 120 bp, Artificial Sequence
  ENSG00000204149_16 (sequence is synthesized)
tgcgggccaccgctgatgaggacctgcagacagccatcctgctgctggcacatggctcctgtgaggaggtgaacgagacctgtggggagggagacggctgcacggcgctccatctggcct

SEQ ID NO: 739529 - DNA, 120 bp, Artificial Sequence
  ENSG00000204149_17 (sequence is synthesized)
gccgcaaggggaatgtggtcctggcgcagctcctgatctggtacggggtggacgtcatggcccgagatgcccacgggaacacagcgctgacctacgcccggcaggcctccagccaggagt

SEQ ID NO: 739530 - DNA, 120 bp, Artificial Sequence
  ENSG00000204149_18 (sequence is synthesized)
gcatcaacgtgcttctgcagtacggctgccccgacgagtgtgtgtagtatctgttttatttgactgcagtctccttggtgcaaaaacaaaatgggaaaaataaggataactcagaatttc

SEQ ID NO: 739531 - DNA, 120 bp, Artificial Sequence
  ENSG00000204149_19 (sequence is synthesized)
aaaaggaaatcacaaattcagctaatattagcattttcagtacttttcgtaaactaagtaaatacacaaaatgttgatttttctgaccataagacgtattttatgtccttctgccaaggt

SEQ ID NO: 739532 - DNA, 120 bp, Artificial Sequence
  ENSG00000204149_20 (sequence is synthesized)
ggatttgttagtctcaggccctcctggccacattgcccaagtcacacaggcttctgtattatgtatttagataaaatgtgtgaaaacatatttgaaataaagttcataaatatgcattga

SEQ ID NO: 739533 - DNA, 120 bp, Artificial Sequence
  ENSG00000204149_21 (sequence is synthesized)
ctgataggaagtgaaaggtggctgaggtaatgagaatagacccatctgcagaggatcataaaaccagcaaagacaagatcttgtctaagatgccttcacaaactttgtccatgagaactc

SEQ ID NO: 739534 - DNA, 120 bp, Artificial Sequence
  ENSG00000204149_22 (sequence is synthesized)
taaggacttctccagacctgttggctgctgctgtgatctctgcccaagaggagcctctgaccaacatccaaagggcttctggacccactggactcctctggagttgctccttcacatgtt

SEQ ID NO: 739535 - DNA, 120 bp, Artificial Sequence
  ENSG00000204149_23 (sequence is synthesized)
cccactctctgtgcggccaccatgtaagtcggacctgcccttctgccatgattgactaaaatctcaggaagctggtgatgaatgaaaaccttagtcccaatggcactgcacgaggggcca

SEQ ID NO: 739536 - DNA, 120 bp, Artificial Sequence
  ENSG00000204152_0 (sequence is synthesized)
atggaaggaggcgggggaagcggcgacaaaaccacaggggtattggccggctttttcggagccggcgaagcaggttactcgcacgcggatttggctggcgtcccgctaactggtatgaac

SEQ ID NO: 739537 - DNA, 120 bp, Artificial Sequence
  ENSG00000204152_1 (sequence is synthesized)
cctctgtgtccttatttaaatgtggatccacgatacctcgtgcaggatacagatgagttcattttacctaccggagctaataaaacctggggcagatttgagctggccttctttacgatt

SEQ ID NO: 739538 - DNA, 120 bp, Artificial Sequence
  ENSG00000204152_2 (sequence is synthesized)
aaaccaggaaatgtacagattttgaatatggtgactaggcaaggggcactttgggctaatactctaggttctctggcgttgctctatagtgcatttggtgtcatcattgagaaaacacga

SEQ ID NO: 739539 - DNA, 120 bp, Artificial Sequence
  ENSG00000204152_3 (sequence is synthesized)
ggtgcagaagatgaccttaacacagtagcagctggaaccatgacaggcatgttgtataaatgtacagtgtcagagatggctttggattccccgttctgtgtgctgctgtctggctcctga

SEQ ID NO: 739540 - DNA, 120 bp, Artificial Sequence
  ENSG00000204152_4 (sequence is synthesized)
tgtgtgtcaatcccaactggtgaagtactgagaagaagctacacaaaaggcagcaaagtattagtaagtgtacctctgacattttaaccacctctgacttttccatggaatggacaagta

SEQ ID NO: 739541 - DNA, 120 bp, Artificial Sequence
  ENSG00000204152_5 (sequence is synthesized)
gtagtctctgtcagagctacattttaaaggagaaaaagaaacgtgaagtcatgaactgtttatttatgctgttatttttgtgtttactcacctcatttatattgacttgtaaattagtaa

SEQ ID NO: 739542 - DNA, 120 bp, Artificial Sequence
  ENSG00000204152_6 (sequence is synthesized)
tttctgaactattatttatcaattcattgcctacatgtcagcaaacaaattttcttcttaataaagaatccagttgctgggcacaatggttcacacctgtaatctcagcacgtttggagg

SEQ ID NO: 739543 - DNA, 120 bp, Artificial Sequence
  ENSG00000204152_7 (sequence is synthesized)
tcaagaccagcctgggcaatatagcaagatttcatctctacaaaaaaatgaaaacattggctgggcatggtggctcattcctatagttcaggctactgaggagcctgatgtaggaggatc

SEQ ID NO: 739544 - DNA, 120 bp, Artificial Sequence
  ENSG00000204152_8 (sequence is synthesized)
caggctactgaggagcctgatgtaggaggatcacgtgaccccagtagtttgaggctgcagtgagctatgatcctaacactgctctccagcctgggtgacacaccaagttgccatctcttc

SEQ ID NO: 739545 - DNA, 120 bp, Artificial Sequence
  ENSG00000204152_9 (sequence is synthesized)
gcttaacgggaaccggcgcccggaatgtcagcgtgtgaagtaggcgctggcaacgcggggttacccgctgttattgaggagtaacggcccagcggaccacccaggcttgaggcagcggcg

SEQ ID NO: 739546 - DNA, 120 bp, Artificial Sequence
  ENSG00000204152_10 (sequence is synthesized)
ctggcgtcccgcagtcaggacctcgttctgtcacccatgttggggtgcggtggcatgattatagttcactgaagcctggcactcctgagctcaaacaatcctcccctctaagcctcctaa

SEQ ID NO: 739547 - DNA, 70 bp, Artificial Sequence
  ENSG00000204152_11 (sequence is synthesized)
tggaagtgtgtatgtgcatagttgtgctcaagaatgtgttgatgattataccttctcagaatgaaggtaa

SEQ ID NO: 739548 - DNA, 68 bp, Artificial Sequence
  ENSG00000204152_12 (sequence is synthesized)
aggtcatttttataaagatctctccacgtcttagatttgattcttcctttaaatatttttctcattga

SEQ ID NO: 739549 - DNA, 120 bp, Artificial Sequence
  ENSG00000204152_13 (sequence is synthesized)
tcttagatttgattcttcctttaaatatttttctcattgacatttgaaagcacctgaccttatataaaatgaacaattttcataactccataaaaggagaattatggcatcatctatttc

SEQ ID NO: 739550 - DNA, 120 bp, Artificial Sequence
  ENSG00000204152_14 (sequence is synthesized)
tttctcttgtctcataaatctaaaccatcaacctgcttatttttgtatactgtcacactgtgtattccctgcattgaatgcctgtctgttgacattatctgtaaaaattgtgggaagttt

SEQ ID NO: 739551 - DNA, 120 bp, Artificial Sequence
  ENSG00000204152_15 (sequence is synthesized)
tctgcaccctgaaatttctgttatgcggattaaatatccactatccatgtttttccaagtcttacagtagaaagggtaaatgcagccctcacagcagcctgttgttcgtcctgcaaatgt

SEQ ID NO: 739552 - DNA, 120 bp, Artificial Sequence
  ENSG00000204152_16 (sequence is synthesized)
gtttccatcacattacacaaagcctctttgtcttcgtggttctaccctactaataagttttttaaaaaattatgtaatgtgtgtatatacaaatacctatatgtatgtgtgtacacatac

SEQ ID NO: 739553 - DNA, 120 bp, Artificial Sequence
  ENSG00000204152_17 (sequence is synthesized)
agctgatatctgctgagattatgtatgcatgaactatagaattaacttgtaattttaagaaaataaattattttgtaaagataaatctcatgtttaagaagaggaattacagttgaatca

SEQ ID NO: 739554 - DNA, 120 bp, Artificial Sequence
  ENSG00000204152_18 (sequence is synthesized)
tttagggatgcctcagcctaaacataatatggaaaaagccataaccaaaagtcattttagagtactgctaggttactcaacctatcatcacatttaattaaaatgtcagtttgaaccatg

SEQ ID NO: 739555 - DNA, 89 bp, Artificial Sequence
  ENSG00000204152_19 (sequence is synthesized)
agtctgggaagtgaggagcgccttttcccggctggcccggccacccatcgtctgagatgaggggagcgcctctgccccgccgccccgtc

SEQ ID NO: 739556 - DNA, 90 bp, Artificial Sequence
  ENSG00000204152_20 (sequence is synthesized)
tgtcagagatggctttggattccccgttctgtgtgctgctgtctggctcctgaacccagctgtagaggtgtgtgtcaatcccaactggtg

SEQ ID NO: 739557 - DNA, 80 bp, Artificial Sequence
  ENSG00000204160_0 (sequence is synthesized)
agtgagtgagcgagcgagcgccgcgcgcgccgccgctgccacctccgctgctcggcccggtcccggagtggcccggccgg

SEQ ID NO: 739558 - DNA, 80 bp, Artificial Sequence
  ENSG00000204160_1 (sequence is synthesized)
catgaaggactgcgagtaccagcagatcagccccggggccgccccgctgcccgcctccccgggggcgcgccgtcccggcc

SEQ ID NO: 739559 - DNA, 120 bp, Artificial Sequence
  ENSG00000204160_2 (sequence is synthesized)
gcccccgccccgccgcgctggagcagcagcggcagcggcagcggcagcgggagcgggagcctcggccgccgcccacggcgcaagtgggaggtgttcccgggtcgcaatcgcttctactgc

SEQ ID NO: 739560 - DNA, 120 bp, Artificial Sequence
  ENSG00000204160_3 (sequence is synthesized)
ggcggccgcctcatgctggccggccacggcggcgtcttcgcgctcacgctgctgctcatcctcaccaccaccggcctcttcttcgtctttgactgtccctacctggctcgcaagctgacc

SEQ ID NO: 739561 - DNA, 120 bp, Artificial Sequence
  ENSG00000204160_4 (sequence is synthesized)
cttgccatccccatcatcgctgccatcctcttcttcttcgtcatgagctgcctgctgcagacaagcttcaccgaccctgggatcctgccccgggccactgtctgtgaagcagccgccctg

SEQ ID NO: 739562 - DNA, 120 bp, Artificial Sequence
  ENSG00000204160_5 (sequence is synthesized)
gagaaacagatcgacaacacaggcagttctacataccggccaccccctcggacccgggaggtgctgatcaacgggcagatggtgaagctgaagtactgcttcacctgcaagatgttccgg

SEQ ID NO: 739563 - DNA, 120 bp, Artificial Sequence
  ENSG00000204160_6 (sequence is synthesized)
ccaccccgaacctcacactgcagtgtctgcgacaactgtgtggaacgatttgaccatcactgcccctgggtgggcaactgtgtggggagacggaactatcgcttcttctacgcgtttatt

SEQ ID NO: 739564 - DNA, 120 bp, Artificial Sequence
  ENSG00000204160_7 (sequence is synthesized)
ctctccctctcattcctgacggccttcatcttcgcctgtgtggtcacccacctgacgttgcgcgctcagggaagcaacttcctctccactctgaaggagacaccagcaagcgtgctggag

SEQ ID NO: 739565 - DNA, 120 bp, Artificial Sequence
  ENSG00000204160_8 (sequence is synthesized)
ttggtgatctgcttcttctccatctggtccattctgggcctctcagggtttcacacgtacctcgtcgcctccaacctgactactaatgaagacatcaaaggctcgtggtccagcaagagg

SEQ ID NO: 739566 - DNA, 120 bp, Artificial Sequence
  ENSG00000204160_9 (sequence is synthesized)
ggcggtgaggcctctgtcaacccctacagccataaaagtattatcaccaactgctgtgctgtgctctgtggccccctacctcccagcctaattgaccggaggggatttgtgcagtccgac

SEQ ID NO: 739567 - DNA, 120 bp, Artificial Sequence
  ENSG00000204160_10 (sequence is synthesized)
accgtgttgccctcacccatcagaagcgatgagccagcctgcagagccaagcctgatgccagcatggtaggaggccacccctgaccacggctcagtacttgccacctgctggcctgtctg

SEQ ID NO: 739568 - DNA, 120 bp, Artificial Sequence
  ENSG00000204160_11 (sequence is synthesized)
accctccgcactcacctgccgggaccctccctattccatccaagggaagcagaactgccaaagactcaagtcttttcatatttatttcccatcctgcgtggctttccctgaactgttccg

SEQ ID NO: 739569 - DNA, 120 bp, Artificial Sequence
  ENSG00000204160_12 (sequence is synthesized)
tggctgtgccctctgctccccaaacccaggttcccacagccttgggccctaggtaccccagctgatcagtgccaggagagaccagagcctctggaggctacccaggggaccacaccaagt

SEQ ID NO: 739570 - DNA, 120 bp, Artificial Sequence
  ENSG00000204160_13 (sequence is synthesized)
ccttgcctgtgccgggcgagccctgtgtgagtgaggctgtgaactgagcgtgaggcctcccaggtgggggaactgcttgggccttgctgagccagggtcctcagggtgaagcaggactga

SEQ ID NO: 739571 - DNA, 120 bp, Artificial Sequence
  ENSG00000204160_14 (sequence is synthesized)
ggagtggccagctctggatagctggctgtggagaggaagcctccatgggctgctttggtctgtgggctccttcattcccttggtgataatttccctttattctgtgggatttttggtggg

SEQ ID NO: 739572 - DNA, 120 bp, Artificial Sequence
  ENSG00000204160_15 (sequence is synthesized)
gttttccccccttttttatggagttggccaataggattgagttggggctccagtagagaaggcagggttggtggtgggtgggggcagcctgtatcagacaaaggtaaatcagccagccag

SEQ ID NO: 739573 - DNA, 120 bp, Artificial Sequence
  ENSG00000204160_16 (sequence is synthesized)
gcacccacagcctcagctcctgtgcagttcctgggcagcacagtggaagtgggagcctggtccttcccctgcccatggagagctctttaagggatcccagcctgcccctccacttctctc

SEQ ID NO: 739574 - DNA, 120 bp, Artificial Sequence
  ENSG00000204160_17 (sequence is synthesized)
ccaagccaggtcccggcatgggtgggttatgctcatgctggcaatacttgaaacgggtttattaatgctgggtattttgcacaattttatagacctcttttctacatagtcttttttaaa

SEQ ID NO: 739575 - DNA, 120 bp, Artificial Sequence
  ENSG00000204160_18 (sequence is synthesized)
tggaaggagaaaatgtcagccacattactgtctgtgtagtgccaggtgaagggttatcagaaggctggttggttttaataagtttattccaagagaccttctggctggaatgagtgagag

SEQ ID NO: 739576 - DNA, 120 bp, Artificial Sequence
  ENSG00000204160_19 (sequence is synthesized)
tgtgtgtgcatgtgtgtgtgtgttcatgtgtgccctgtatgaatgtggctggctcccatatcccctgggctgccccctgccccatcccctttgagtgtcagaagcactctgagccaaggg

SEQ ID NO: 739577 - DNA, 120 bp, Artificial Sequence
  ENSG00000204160_20 (sequence is synthesized)
gacagggggcacgtgcactggtcacgagaaaaccctgggctcccactggggctcagcccagcctcctatctttccttcttctatggacttcagacagccagtgtctggggactctgccac

SEQ ID NO: 739578 - DNA, 120 bp, Artificial Sequence
  ENSG00000204160_21 (sequence is synthesized)
ccccagccctacccaccagcccccaggtgaggcttccagctgggacctgcccagacaggctgagcctgggcgtggtgggtggggtgatggctctggggagcggctgccatcctacaagcc

SEQ ID NO: 739579 - DNA, 120 bp, Artificial Sequence
  ENSG00000204160_22 (sequence is synthesized)
acaccccctcctctgagctctgaatatgggacccagtgccaggagctggaagacaaggtgtttctgccaaacggggacctccatccagagaaaaggaagaaggtgcagggtgggccaaga

SEQ ID NO: 739580 - DNA, 120 bp, Artificial Sequence
  ENSG00000204160_23 (sequence is synthesized)
ggcaagtgaaggttggcctgagtctgggccggaaactcagaggatgtttctcctctgctgggagctgtagtttcttatcaaaatagatattgttccaccatccccctccttggcccttca

SEQ ID NO: 739581 - DNA, 120 bp, Artificial Sequence
  ENSG00000204160_24 (sequence is synthesized)
agtgggctgaagcccttggaaagtgacataggaagtccccagatcttgcccttctcactccagaggctagtggtcacagacagctgggaatggcagccacagagggtcccctctgggaga

SEQ ID NO: 739582 - DNA, 120 bp, Artificial Sequence
  ENSG00000204160_25 (sequence is synthesized)
aacagcttcaccccagcctcagggccctgggccatcactgcagtggccctgggaggtgaggaagaagctggctagaggagggggctcccacctaccttttatttaagccagtattctttg

SEQ ID NO: 739583 - DNA, 120 bp, Artificial Sequence
  ENSG00000204160_26 (sequence is synthesized)
ttcctgcttgtaataaaacttcagtttataagagttgctttgctttggtttggtttttgtttgcttttcctttgctgaggccccaactgggagccctctgttctttcagacaaatttggt

SEQ ID NO: 739584 - DNA, 120 bp, Artificial Sequence
  ENSG00000204160_27 (sequence is synthesized)
tctttcctggggagactgtgagaaggcaggcagcccagtgatctggctacattttccctcacctggctggagctctgtccgctggaggaagagcagagagggctgcggctgagcccccat

SEQ ID NO: 739585 - DNA, 120 bp, Artificial Sequence
  ENSG00000204160_28 (sequence is synthesized)
gggcacgtgaaaagaggccatcctgtcccctctttgtcccctccaccttcccctgcctcaggggcttggagacccccaaattcttcttccctactgcctttccactccgatccccaatga

SEQ ID NO: 739586 - DNA, 120 bp, Artificial Sequence
  ENSG00000204160_29 (sequence is synthesized)
gtgcccagctaagaaaatgtttgagacagtagattccagtttgagagccggagcttccctggctaccacctccaacctgggcaccagggcccagccagacaactcataacactggcccac

SEQ ID NO: 739587 - DNA, 120 bp, Artificial Sequence
  ENSG00000204160_30 (sequence is synthesized)
ctctctggtatctccctcaggaggacacctgtcaggattttgccatctcctgcacagcctgaggggagctaacaggcctctttgcagagggttagctggtaagaccgtttcttccctgtc

SEQ ID NO: 739588 - DNA, 120 bp, Artificial Sequence
  ENSG00000204160_31 (sequence is synthesized)
ggccagcactgcccgctcccctcacacaccatctcatcctcatcgcatgcctcgccaaccccatggagcccgtccatctgtctggtgtgtggtgcggtgtgtgtgctggtggtggtaggg

SEQ ID NO: 739589 - DNA, 120 bp, Artificial Sequence
  ENSG00000204160_32 (sequence is synthesized)
tctccagggactccccgctaagcagaaggatcgggatatagggcaaggctaaaagcccagccccattgtggactgaggaagtagcttctcgcagagcagctctccagctggaagaggagg

SEQ ID NO: 739590 - DNA, 120 bp, Artificial Sequence
  ENSG00000204160_33 (sequence is synthesized)
tggagggtgaggctggggagaggatggcgaacctgccctgaggtgcttgggtctgtgctggtggggtcctggtatgcaggggccaccggtcactaacactcttatgtcctggctttctgt

SEQ ID NO: 739591 - DNA, 120 bp, Artificial Sequence
  ENSG00000204160_34 (sequence is synthesized)
ccccgctgagctttctctcacccgcccgttttctctcctgcttcattgcctgctgcctaagccttggcccttctctcgggcagaggcaggtgctgtggcagcacctctccccaccaccgg

SEQ ID NO: 739592 - DNA, 120 bp, Artificial Sequence
  ENSG00000204160_35 (sequence is synthesized)
ggcccctgcaggccgcctccctcctcccaggcctgctaaccctctctcttctccttctttgctgtcctgccggggatctccagtgtgtgcgggggcttaaggacctcctgaggaccgctg

SEQ ID NO: 739593 - DNA, 120 bp, Artificial Sequence
  ENSG00000204160_36 (sequence is synthesized)
ctctctgcctctccaggaatggcctggggggagccaggcacccggcacctccacctgcctaacctgtggcccatctgccaccatctgtgcctacagggtctgccccccagcctgcccggc

SEQ ID NO: 739594 - DNA, 120 bp, Artificial Sequence
  ENSG00000204160_37 (sequence is synthesized)
ctgtgtgctctctaggacccccatagggggcaggggctggcctctttgccccattcccgctccatgccggccagagtgtagaaagccataacgcagccatcagcacaataatgtgactct

SEQ ID NO: 739595 - DNA, 120 bp, Artificial Sequence
  ENSG00000204160_38 (sequence is synthesized)
acgctgatatgctccctctctcctccactgacttccccttcccggatttgtgaggtgtcaagactaggaatctggccttagagcctgcccctccaccccctcagatcaggcatagccata

SEQ ID NO: 739596 - DNA, 120 bp, Artificial Sequence
  ENSG00000204160_39 (sequence is synthesized)
gtcaagcccagcaggtttcctcaggagctgtctggggtgttgatggtggatgacgctgctgaacaagtttggtgactgttctaagcacaactggcttgatactgttcccacggcctgtcc

SEQ ID NO: 739597 - DNA, 120 bp, Artificial Sequence
  ENSG00000204160_40 (sequence is synthesized)
acctcccacccccaaccctccaccagagtaggtaggatgtagggagggtgcgtgcctcctttgctctaggcactgagggaccaagctagccgtgcacagccccatacacttcaggggact

SEQ ID NO: 739598 - DNA, 120 bp, Artificial Sequence
  ENSG00000204160_41 (sequence is synthesized)
aaaggaaagagctgagccaaggaaaatcagctgagcccagggctgggggctgcttgtctgctatcctgtaccttttttttttttaaccaaaataaagattcccctcttcttgccatacca

SEQ ID NO: 739599 - DNA, 120 bp, Artificial Sequence
  ENSG00000204160_42 (sequence is synthesized)
tccactaccccctggagggcatttgtcatgtgacggaattccatggagaattgttatttaatcacgtgctcattgtagaaaaaaaaaattaagtacaaaacgtaaaacagaggagcattg

SEQ ID NO: 739600 - DNA, 120 bp, Artificial Sequence
  ENSG00000204160_43 (sequence is synthesized)
gatatgacatgtaattctactccccgggggtagccaccatgactgtttcagccatgtttgaatgacactgcccttccggttgcccactgcctggactgggtggcgactccatcctctcct

SEQ ID NO: 739601 - DNA, 120 bp, Artificial Sequence
  ENSG00000204161_0 (sequence is synthesized)
ggagccaagagcagagcgccagcatgaacttgggggtcagcatgctgaggatcctcttcctcctggatgtaggaggagctcaagtgctggcaacaggcaagacccctggggctgaaattg

SEQ ID NO: 739602 - DNA, 120 bp, Artificial Sequence
  ENSG00000204161_1 (sequence is synthesized)
atttcaagtacgccctcatcgggactgctgtgggtgtcgccatatctgctggcttcctggccctgaagatctgcatgatcaggaggcacttatttgacgacgactcttccgacctgaaaa

SEQ ID NO: 739603 - DNA, 120 bp, Artificial Sequence
  ENSG00000204161_2 (sequence is synthesized)
ctcagtgacaccatcccgctaaagaagagagccccaaggcgaaaccacaatttctccaaaagagatgcacaggtgattgagctgtaggtgagcagtgacgtgaagaggggttctagcccc

SEQ ID NO: 739604 - DNA, 120 bp, Artificial Sequence
  ENSG00000204161_3 (sequence is synthesized)
gtggaaaacagcccatggttaacatctcaggatgttctgcattcaaacacccaaggctggtaatgaactttcacatggactgaatattggaggcaaataatagaaggaatagaatataca

SEQ ID NO: 739605 - DNA, 120 bp, Artificial Sequence
  ENSG00000204161_4 (sequence is synthesized)
gtgcctctgtcctgaaggaaaatatcatgcctcttctggaagaaacggactgcacagaggaaggattgagcaatttagcctgcagtggaagaaggtggacaccaaaagcttcaccctgtg

SEQ ID NO: 739606 - DNA, 120 bp, Artificial Sequence
  ENSG00000204161_5 (sequence is synthesized)
taataccccagcatgtacaatgggtctaatcacagccagcttctggtggagtccagaatgacaggggcttccttcagccctgtcttcagagaggctgagaggaactgaacagcctcctgg

SEQ ID NO: 739607 - DNA, 120 bp, Artificial Sequence
  ENSG00000204161_6 (sequence is synthesized)
acgcctgggggcctcagtggtgagggatgtggtgctcgggcctggctctgccccacccagcgaggcaccgagggccactctgtgatgctggctacagcaagaatgaacccacaagcgcag

SEQ ID NO: 739608 - DNA, 120 bp, Artificial Sequence
  ENSG00000204161_7 (sequence is synthesized)
tctggccagatctgtgcaaattcaccaactacagaaagtgaaaagtttcccaaaatatgcctattaacctcgaggaatgacttctctttttgtcatcaaagtggatgaagttttgtttgc

SEQ ID NO: 739609 - DNA, 120 bp, Artificial Sequence
  ENSG00000204161_8 (sequence is synthesized)
gcaggcagaaaacaacttccaggttgagctctcccctttacccagaagccactggccttcagttcctttctatgttgcacaaggaagtggcccaccttgcaggctttgctgatgagcttt

SEQ ID NO: 739610 - DNA, 120 bp, Artificial Sequence
  ENSG00000204161_9 (sequence is synthesized)
tatacctgtttaattgtgtgaattgcataaacacatgcaatcattagagtatagttgctctctcaataagtcttccagatggttctcttcctttccagagatgcacaggtgattgagctg

SEQ ID NO: 739611 - DNA, 120 bp, Artificial Sequence
  ENSG00000204161_10 (sequence is synthesized)
tttgcacttgctgttttctgtaattggaatgctctttgccagaaagctgcaagcctcgaccctcttttccttcaaatccctgcttcagtgtcaccactgcatcatggagggcctatttaa

SEQ ID NO: 739612 - DNA, 120 bp, Artificial Sequence
  ENSG00000204161_11 (sequence is synthesized)
ggcgaaaccacaatttctccaaaaggtgagttgtaagagtgatcacttgtcttaaaaggaggacaggcagtctctgccccatggggctgcatgggttttcggcatgacctctccctcccc

SEQ ID NO: 739613 - DNA, 120 bp, Artificial Sequence
  ENSG00000204161_12 (sequence is synthesized)
tggccacgtgggacgggcaaccatggcatggccaggagccctcatgccaggacagctgtgagaccaggaatcagcatcaccttgggacatgatggtacttggcaagatttaacatgaagc

SEQ ID NO: 739614 - DNA, 120 bp, Artificial Sequence
  ENSG00000204161_13 (sequence is synthesized)
tgtggggcatttgcccagttagagctgagaaaatggttttaacaggataggtaaactttttttcattctccaagacctatcctatgatagtgtccaatctaataattagccaatttagtc

SEQ ID NO: 739615 - DNA, 120 bp, Artificial Sequence
  ENSG00000204161_14 (sequence is synthesized)
gctgctttggggtctcggagaggacgaagcctgtatgtggagggccggtctacagaaggggacaggatctcggacccctgattgaatgagcctatggatgaagactcctaggaatgaagg

SEQ ID NO: 739616 - DNA, 120 bp, Artificial Sequence
  ENSG00000204161_15 (sequence is synthesized)
catcttcaccagggttttgagaatcatcatttcacaatccacattccccagcttggcttttcctcacctcatgccccttgcatgtgccaaacccactgagaatttgctccctgtctgacc

SEQ ID NO: 739617 - DNA, 120 bp, Artificial Sequence
  ENSG00000204161_16 (sequence is synthesized)
agcccaggatggtcacacaggcctggggcaatctcttgacctcactctcctgctttatgaaaaattttcaaatccaaagaaaagttgaaagaacgggacaatcaaaatatatacaccctt

SEQ ID NO: 739618 - DNA, 120 bp, Artificial Sequence
  ENSG00000204161_17 (sequence is synthesized)
cacctagggtcactcactgacacggtgccccctttgctttatctctgtgtacataagccttttttgactgatctacttgcaaattagtgtagatatcatgatatttcacccctgaataca

SEQ ID NO: 739619 - DNA, 120 bp, Artificial Sequence
  ENSG00000204161_18 (sequence is synthesized)
gcaccattgtgtttcctattgtgtataatcacaatacagtgaccactcctaagaaaattaatgctaatttaatatcatctattatacagtccatatttaaatttctctggttatttcaga

SEQ ID NO: 739620 - DNA, 120 bp, Artificial Sequence
  ENSG00000204161_19 (sequence is synthesized)
agtatcttttattgctctattttttattgtgctattttccaatccagaaaaaatatttgtatttattttgtcttttttttaagtctctttcagtattgaacagcccctctgctttttatc

SEQ ID NO: 739621 - DNA, 120 bp, Artificial Sequence
  ENSG00000204161_20 (sequence is synthesized)
cttatggcattgttaattgagaagtccctaagccccgttgtcttatacaatgtcccattttctggatttgtctgatcgttttctcctgagtagattcagattgaagtttttggtcagaaa

SEQ ID NO: 739622 - DNA, 120 bp, Artificial Sequence
  ENSG00000204161_21 (sequence is synthesized)
atctggtcttgctgggccattgctctagaacctgctcagtaattagcacttgtttgagtcaattattgcccgaagtggaacatcagcctctggagccagtctgcaagaatgggacaggtg

SEQ ID NO: 739623 - DNA, 120 bp, Artificial Sequence
  ENSG00000204161_22 (sequence is synthesized)
gcgtgccatcctaagaagagaggacagcctctgctgaggccccgggcaagggcagcatggactacaggggttgtgcaagaggggagaatgagagatgtaggaggagctcaagtgctggca

SEQ ID NO: 739624 - DNA, 120 bp, Artificial Sequence
  ENSG00000204161_23 (sequence is synthesized)
ctatctctctctgtctctctatttgtgttcctttttctgtctccctttccatgtctctgtctttctgtgtctctttccctctgtacttttcctttcagttgctcttggcagtcctgagaa

SEQ ID NO: 739625 - DNA, 120 bp, Artificial Sequence
  ENSG00000204161_24 (sequence is synthesized)
tggaacctaccacagaaaatggctcatgaaaaggggaatccgacccaacacacagcttcctacacactgccatcttatcaacagttaggcactactttgtagaacgattagcttcaccct

SEQ ID NO: 739626 - DNA, 120 bp, Artificial Sequence
  ENSG00000204161_25 (sequence is synthesized)
cttagctgccaggagatcccttcttaaagatggactatgtgaagattcgggagtcctgaaacatggggactccgggatggtctctagccctatcgatgatgaacactggccttctggagg

SEQ ID NO: 739627 - DNA, 120 bp, Artificial Sequence
  ENSG00000204161_26 (sequence is synthesized)
ggaaatggcagtctgggctggcgtggtaggaagggctttggtgttcatggaatgggcctgctgctctcagaccttcaaaggatggaaccaacgaaggaccaaatgagaaagcagatgctg

SEQ ID NO: 739628 - DNA, 120 bp, Artificial Sequence
  ENSG00000204161_27 (sequence is synthesized)
tgccttgcagagggccatgaatgtcagttattatttttctccttatacaattattttgtggttattattacaatgtacatggctgttgcatagaagacatgactggtggaggctgaggaa

SEQ ID NO: 739629 - DNA, 120 bp, Artificial Sequence
  ENSG00000204161_28 (sequence is synthesized)
agccatgacattctacaattgccatcaggctaaggccccgtgagcatttctctcccttgtaatattaaccctgtatttctgggatcacatcacggaatattctttgcctttccactttcc

SEQ ID NO: 739630 - DNA, 120 bp, Artificial Sequence
  ENSG00000204161_29 (sequence is synthesized)
aggaaatctctcggactgggctaccctccttgtgtgtgatgaaagatgagctatatttcagaacaaagtgctgtgttgtcatgatttgcctggactcccagggcgtctcttacccaactt

SEQ ID NO: 739631 - DNA, 120 bp, Artificial Sequence
  ENSG00000204161_30 (sequence is synthesized)
gataacgatgctgttcattagcagcctttgttaactgataaccaagagcggtaatgtgatactcataagcaattttctgtgtgtaggataaaataaaccatcttgtatgggatctgctaa

SEQ ID NO: 739632 - DNA, 120 bp, Artificial Sequence
  ENSG00000204165_0 (sequence is synthesized)
atccacaactatcaacagctctctcctgcctgtccagcctgggcatcctcagcctatgaaatccatctgcctctctagtccaccaaccctataggcctatttgccccacacaaggcctct

SEQ ID NO: 739633 - DNA, 120 bp, Artificial Sequence
  ENSG00000204165_1 (sequence is synthesized)
agaacaccctccttctgcatgactcatcagggcactttgtgaagagtgaggcgatcttgagggcatgttcatcttcatcaaacatggagataatcagcagtttctggtcaataccaactg

SEQ ID NO: 739634 - DNA, 120 bp, Artificial Sequence
  ENSG00000204165_2 (sequence is synthesized)
tgctgtcgtcgtgttgctgtattacatccgcagtaaagtaaagttgcctaaaacaaacaccatcgatttgtgtgaacaaacggggaaaatgaagatgcttttcctgatgaagcccaatca

SEQ ID NO: 739635 - DNA, 120 bp, Artificial Sequence
  ENSG00000204165_3 (sequence is synthesized)
cctcaagaatccggagccttggctgcttgttgcactgcgcatacaatgtgatgccctggagaggagacgaattcagatgcttaaaatgaaagaagccaagaaggtcgttataattgaacc

SEQ ID NO: 739636 - DNA, 120 bp, Artificial Sequence
  ENSG00000204165_4 (sequence is synthesized)
ccctgcgagtgtcccgtccaagcaatcaggacgatcagacaaaaagaagtccactcgcaagtctccgacctttaggaacagaccagacttcaggaagaataaaggtcgccaactcaataa

SEQ ID NO: 739637 - DNA, 120 bp, Artificial Sequence
  ENSG00000204165_5 (sequence is synthesized)
aaccaccaagcaaaagaagtaatactaggtgtgaaattactggaatttaacgtgagatttctttttctagaaagactccttctcccaatatctgcactaaggcttgagtacatacgcccc

SEQ ID NO: 739638 - DNA, 120 bp, Artificial Sequence
  ENSG00000204165_6 (sequence is synthesized)
atccttagagcttcctccaacccattttgtataggatcactggccccttttgctcccactctctttccttagctgccccaattaccctgtgatctccctccagacaccatcgatttgtgt

SEQ ID NO: 739639 - DNA, 120 bp, Artificial Sequence
  ENSG00000204172_0 (sequence is synthesized)
agcgggaagaccatctctgcaagtgcagcatagcctcggcctaggacagcgggagtgcgtggccaaagctgtgagcagaggcacaggtggtggcagacagtagaggcgccccatggggaa

SEQ ID NO: 739640 - DNA, 120 bp, Artificial Sequence
  ENSG00000204172_1 (sequence is synthesized)
catactgacctgtcgtgtgcaccctagcgtcagcctcgagtttgaccagcagcaggggtcggtgtgtccctctgaatctgagatctatgaggcaggagctgaggacaggatggcaggagc

SEQ ID NO: 739641 - DNA, 120 bp, Artificial Sequence
  ENSG00000204172_2 (sequence is synthesized)
gcccatggctgctgctgtacagcctgctgaggtgactgttgaagttggtgaggacctccacatgcaccaggttcgtgaccgggagatgcctgaagctttggagtttaacctttctgccaa

SEQ ID NO: 739642 - DNA, 64 bp, Artificial Sequence
  ENSG00000204172_3 (sequence is synthesized)
cctgaagctttggagtttaaccttggagtttaactcttctgccaatccagaggcaagcacaata

SEQ ID NO: 739643 - DNA, 120 bp, Artificial Sequence
  ENSG00000204172_4 (sequence is synthesized)
agaagaagcaactgtacaaaccatgtatctactgagcgtttcagtcaacaatacagctcgtgttcgacaatattccttgatgacagcacagccatccagcattatcttacaatgacaata

SEQ ID NO: 739644 - DNA, 82 bp, Artificial Sequence
  ENSG00000204172_5 (sequence is synthesized)
ttgatgacagcacagccatccagcattatcttacaatgacaataatatctgtgaccttggagatacctcatcatatcacaca

SEQ ID NO: 739645 - DNA, 120 bp, Artificial Sequence
  ENSG00000204172_6 (sequence is synthesized)
gaaaagaaatggaggtgggagtttaaataactattcctcctccattccaccgactcccagcaccagccaggaggaccctcagttcagtgttcctcccactgccaacacacccacccccgt

SEQ ID NO: 739646 - DNA, 120 bp, Artificial Sequence
  ENSG00000204172_7 (sequence is synthesized)
ttgcaagcggtccatgcgctggtccaacctgtttacatctgagaaagggagtgacccagacaaagagaggaaagccccggagaatcatgctgacaccatcgggagcggcagagccatccc

SEQ ID NO: 739647 - DNA, 120 bp, Artificial Sequence
  ENSG00000204172_8 (sequence is synthesized)
cattaaacagggcatgctcttaaagcgaagtggaaaatggctgaagacatggaaaaagaaatacgtcaccctgtgttccaatggcgtgctcacctattattcaagcttaggtgattatat

SEQ ID NO: 739648 - DNA, 120 bp, Artificial Sequence
  ENSG00000204172_9 (sequence is synthesized)
aaagcaatggcctatccaaggacatggacaccgggctgggtgactccatatgcttcagccccggtatctccagcaccaccagccccaagctcaacccgcccccctctcctcatgccaata

SEQ ID NO: 739649 - DNA, 120 bp, Artificial Sequence
  ENSG00000204172_10 (sequence is synthesized)
aaaagaaacacctaaagaagaaaagcaccaacaactttatgattgtgtctgccactggccaaacgtggcactttgaagccacgacgtatgaggagcgggatgcctgggtccaagccatcc

SEQ ID NO: 739650 - DNA, 120 bp, Artificial Sequence
  ENSG00000204172_11 (sequence is synthesized)
agagccagatcctggccagcctgcagtcatgcaagagcagtaaaagcaagtcccagctgaccagccagagtgaggccatggccctgcagtcgatccaaaacatgcgtgggaacgcccact

SEQ ID NO: 739651 - DNA, 120 bp, Artificial Sequence
  ENSG00000204172_12 (sequence is synthesized)
gtgtggactgtgagacccagaatcctaagtgggccagtttgaacttgggagtcctcatgtgtattgaatgctcaggtatccaccgcagttttggcacccgcctttcccgtgtgcgatctc

SEQ ID NO: 739652 - DNA, 120 bp, Artificial Sequence
  ENSG00000204172_13 (sequence is synthesized)
tggagctggatgactggccagttgagctcaggaaggttatgtcatctattggcaatgagctagccaacagcatctgggaagggagcagccaggggcagacaaaaccctcaataaagtcca

SEQ ID NO: 739653 - DNA, 120 bp, Artificial Sequence
  ENSG00000204172_14 (sequence is synthesized)
cgagggaagagaaggaatggtggatccgttccaaatatgaggagaagctctttctggccccactaccctgcactgagctgtccctgggccagcagctgctgcgggccaccactgatgagg

SEQ ID NO: 739654 - DNA, 120 bp, Artificial Sequence
  ENSG00000204172_15 (sequence is synthesized)
acctgcagacagccatcctgctgctggcacatggctcccgtgaggaggtgaacgagacctgtggggagggagacggctgcacggcactccatctggcctgccgcaaggggaatgtggtcc

SEQ ID NO: 739655 - DNA, 120 bp, Artificial Sequence
  ENSG00000204172_16 (sequence is synthesized)
tggagcagctcctgacggggtggacgtcatggcccgagatgcccacgggaacacagcgctgacctacgcccggcaggcctccagccaggagtgcatcaacgtgcttctgcagtacggctg

SEQ ID NO: 739656 - DNA, 120 bp, Artificial Sequence; identical to SEQ ID NO: 586379
  ENSG00000204172_17 (sequence is synthesized)

SEQ ID NO: 739657 - DNA, 120 bp, Artificial Sequence
  ENSG00000204172_18 (sequence is synthesized)
tagcattttcagtacttttcgtaaactaagtaaatacacaaaatgttgatttttctgaccataagacatattttatgtccttttgccaaggtggatgtgttagtctcaggccctcctggc

SEQ ID NO: 739658 - DNA, 80 bp, Artificial Sequence
  ENSG00000204174_0 (sequence is synthesized)
actccgcacgcaggcagcatcggggcagcaggagcaggtgaagcaggcgcggctctgccccgcgcctggtgccccctggg

SEQ ID NO: 739659 - DNA, 120 bp, Artificial Sequence
  ENSG00000204174_1 (sequence is synthesized)
tacgaaccctccgggaagccgggcgcgctgcctgcccttggcccggggcgcagagcgtcacactggatctggggagcatcctacccccactgtggacctcagtctcctcacctgagacat

SEQ ID NO: 739660 - DNA, 120 bp, Artificial Sequence
  ENSG00000204174_2 (sequence is synthesized)
gggcggccccatccgcaccctgtaagccgcaagccaaggagattcctggcccccatcctggattcacttaactacatctcctggtggaagggccctgggatctgcactttcaacatgctt

SEQ ID NO: 739661 - DNA, 120 bp, Artificial Sequence
  ENSG00000204174_3 (sequence is synthesized)
ctagaatgattctgatgtttactgaaggttgagaactgcaaccctgtgggattaataatgactagagaatctgagaggcgtcatccctcaagtgtatcacttagttcaagagtcctggaa

SEQ ID NO: 739662 - DNA, 120 bp, Artificial Sequence
  ENSG00000204174_4 (sequence is synthesized)
tcttttcacatccactatgaacacctctcacctcctggccttgctgctcccaaaatctccacaaggtgaaaacagaagcaaacccctgggcaccccatacaacttctctgaacattgcca

SEQ ID NO: 739663 - DNA, 120 bp, Artificial Sequence
  ENSG00000204174_5 (sequence is synthesized)
ggattccgtggacgtgatggtcttcatcgtcacttcctacagcattgagactgtcgtgggggtcctgggtaacctctgcctgatgtgtgtgactgtgaggcagaaggagaaagccaacgt

SEQ ID NO: 739664 - DNA, 120 bp, Artificial Sequence
  ENSG00000204174_6 (sequence is synthesized)
gaccaacctgcttatcgccaacctggccttctctgacttcctcatgtgcctcctctgccagccgctgaccgccgtctacaccatcatggactactggatctttggagagaccctctgcaa

SEQ ID NO: 739665 - DNA, 120 bp, Artificial Sequence
  ENSG00000204174_7 (sequence is synthesized)
gatgtcggccttcatccagtgcatgtcggtgacggtctccatcctctcgctcgtcctcgtggccctggagaggcatcagctcatcatcaacccaacaggctggaagcccagcatctcaca

SEQ ID NO: 739666 - DNA, 120 bp, Artificial Sequence
  ENSG00000204174_8 (sequence is synthesized)
agttcctggcggataaggtggtctgtaccgagtcctggccactggctcaccaccgcaccatctacaccaccttcctgctcctcttccagtactgcctcccactgggcttcatcttggtct

SEQ ID NO: 739667 - DNA, 120 bp, Artificial Sequence
  ENSG00000204174_9 (sequence is synthesized)
gttatgcacgcatctaccggtgcctgcagaggcaggggcgcgtgtttcacaagggcacctacagcttgcgagctgggcacatgaagcaggtcaatgtggtgctggtggtgatggtggtgg

SEQ ID NO: 739668 - DNA, 120 bp, Artificial Sequence
  ENSG00000204174_10 (sequence is synthesized)
cctttgccgtgctctggctgcctctgcatgtgttcaacagcctggaagactggcaccatgaggccatccccatctgccatgggaacctcatcttcttagtgtgccacttgcttgccatgg

SEQ ID NO: 739669 - DNA, 120 bp, Artificial Sequence
  ENSG00000204174_11 (sequence is synthesized)
cctccacctgtgtcaacccattcatctatggctttctcaacaccaacttcaagaaggagatcaaggccctggtgctgacttgccagcagagcgcccccctggaggagtcagagcatctgc

SEQ ID NO: 739670 - DNA, 120 bp, Artificial Sequence
  ENSG00000204174_12 (sequence is synthesized)
ccctgtccacagtacatacggaagtctccaaagggtccctgaggctaagtggcaggtccaatcccatttaaccaggtctaggtcttctccctgccatgtcccttgccaggctcttccact

SEQ ID NO: 739671 - DNA, 120 bp, Artificial Sequence
  ENSG00000204174_13 (sequence is synthesized)
tagctaagtgggcacactgcaagctggggtggcaccccagcattcctggctttctggggtccagataggctggcaagagctgtttttgcatccatttgcatcgtgaagactggcattttg

SEQ ID NO: 739672 - DNA, 120 bp, Artificial Sequence
  ENSG00000204174_14 (sequence is synthesized)
atacttcagctgtttgttcctgggagaattctgagcacagattccagaggtcacagtaagccttgcagcttgagctgaaagatgccagagccggagatgtctgctggcagcaggcagggt

SEQ ID NO: 739673 - DNA, 120 bp, Artificial Sequence
  ENSG00000204174_15 (sequence is synthesized)
tcattctggtgacacagcaacagatgcctggcctgggaacccagggatttcacctccaccagtgagaccacggggccactgtggggtgagggaaggagcgcttggagtcagagctctaga

SEQ ID NO: 739674 - DNA, 120 bp, Artificial Sequence
  ENSG00000204175_0 (sequence is synthesized)
aggcagccatgagctccagccgccccgagccgggtccctgggcacccctgagcccccgccttcagcccctgtcccagagctcttccagcctgctgggtgaaggccgggaacagaggccag

SEQ ID NO: 739675 - DNA, 120 bp, Artificial Sequence
  ENSG00000204175_1 (sequence is synthesized)
agctccgcaagactgccagcagcaccgtgtggcaggcccagctgggcgaggccagcaccagaccccaggccccggaggaagaggggaacccgcctgagagcatgaagccagcacgggcct

SEQ ID NO: 739676 - DNA, 120 bp, Artificial Sequence
  ENSG00000204175_2 (sequence is synthesized)
ctggccccaaggcgcgacccagtgctggaggccactggtggagcagcactgtgggcaatgtgtccaccatgggcggcagtgacctgtgtcgcctgcgggcccctagtgctgctgctatgc

SEQ ID NO: 739677 - DNA, 120 bp, Artificial Sequence
  ENSG00000204175_3 (sequence is synthesized)
agaggagccattcagacctggtccgtagcacccagatgcggggacacagtggtgctcggaaggccagtctcagctgctcagcccttggcagcagccctgtccacagggctcagctgcagc

SEQ ID NO: 739678 - DNA, 120 bp, Artificial Sequence
  ENSG00000204175_4 (sequence is synthesized)
caggtggtacttctggccagggtggccaggcccctgcaggcctggaaagggacctggctcctgaggatgagacttctaactcagcctggatgctgggggcgagtcagttgtcagtgccac

SEQ ID NO: 739679 - DNA, 120 bp, Artificial Sequence
  ENSG00000204175_5 (sequence is synthesized)
cactagacctgggggacacaactgcccacagcagcagtgcccaggctgagcccaaagctgctgaacagctggctaccaccacctgccatgctctgcccccagctgctctactctgtggca

SEQ ID NO: 739680 - DNA, 120 bp, Artificial Sequence
  ENSG00000204175_6 (sequence is synthesized)
tgagggaggtgagggctggtggctgctgccatgccctacctgccacagggatcctggcctttcccaaactagtggcgtcagtgagcgagtctgggctgcaggctcagcatggggtgaaga

SEQ ID NO: 739681 - DNA, 120 bp, Artificial Sequence
  ENSG00000204175_7 (sequence is synthesized)
tggggggctccctgggcattcccattgctgtgcccacctttggggtcccgctgggttagtcccagagcctggctctaggaccaaagatgtgtggaccatgacctcagccaatgacttggc

SEQ ID NO: 739682 - DNA, 120 bp, Artificial Sequence
  ENSG00000204175_8 (sequence is synthesized)
ccctgcagaggcatccccgctgtcagcccaggatgctggtgtgcaggcggccccagtggcggcctgcaaggctgtggccaccagtccgtccctggaagcgcctgcagccctgcatgtgtt

SEQ ID NO: 739683 - DNA, 120 bp, Artificial Sequence
  ENSG00000204175_9 (sequence is synthesized)
cccagaggtaactctggggtccagcctggaggaggtgccgtcccctgtgcgggatgtgcgatgggatgctgagggcatgacatgggaggtgtacggagctgcggtggacctggaggtgct

SEQ ID NO: 739684 - DNA, 120 bp, Artificial Sequence
  ENSG00000204175_10 (sequence is synthesized)
cggtgtggccatccagaagcacctggagatgcagtttgagcagctgcagcgggcgcccgccagcgaggacagcctgtctgtggagggccggagggggccactgcgggctgtcatgcagtc

SEQ ID NO: 739685 - DNA, 120 bp, Artificial Sequence
  ENSG00000204175_11 (sequence is synthesized)
cctgcggcgccccagctgctgcggctgctccggcgcggcccccgagtgaggagctgtggcccttggagctggcctgggcccactgacttagtcctagacctgggccagggacggtggggg

SEQ ID NO: 739686 - DNA, 120 bp, Artificial Sequence
  ENSG00000204175_12 (sequence is synthesized)
ctccgtgccccctggacccaccggcagctgggcacatctctcacctgaatattggctgcctccagaccacaggactgcagcctggggcttccggccctacacagctgggctgttttctta

SEQ ID NO: 739687 - DNA, 120 bp, Artificial Sequence
  ENSG00000204175_13 (sequence is synthesized)
agggcttgatttccaagggccacatctctgcaccttccgggctctgaactttgagacagggctttagcactgtgcagaggggagatcctgagttttctgtaaaaaatgaccttttgttca

SEQ ID NO: 739688 - DNA, 120 bp, Artificial Sequence
  ENSG00000204175_14 (sequence is synthesized)
ggaatgctgcctgctgctttgcccagagttggccctgagtgttcctatcaggccccgttcactctggggtggattaaaccacctcctggagggtgctgtatccccactgtgcaatggggg

SEQ ID NO: 739689 - DNA, 120 bp, Artificial Sequence
  ENSG00000204175_15 (sequence is synthesized)
tttgtgctgtgtgcattcctgcctggtccttgagagttgctgacaggtggaacctgaggcagcaggacagcctggcattggccacgggacatcggccacaaccatagcaacttcggcatc

SEQ ID NO: 739690 - DNA, 120 bp, Artificial Sequence
  ENSG00000204176_0 (sequence is synthesized)
agccgcccagaccggcgagaccagcctgcgggagcagccccatggcggagcagctggccctggtgattgggggcaccatcggggggctgctgctgctgctgttgatcggggcaagctgct

SEQ ID NO: 739691 - DNA, 120 bp, Artificial Sequence
  ENSG00000204176_1 (sequence is synthesized)
gtctgtggagaaggttctgtgccaccctcacctatgaggagctgcctgggacaccagccatggccaccacagctgcctccagtgggcagcgggacaggccctgccagccgcatgctagga

SEQ ID NO: 739692 - DNA, 120 bp, Artificial Sequence
  ENSG00000204176_2 (sequence is synthesized)
cccaactgagcaggccaccagctgtgccattcgtggtgcccccaacccttcaaggccgagattgggtgcccctgcacagtggagagtgggccgatgccccatgggacccctgcccggcat

SEQ ID NO: 739693 - DNA, 120 bp, Artificial Sequence
  ENSG00000204176_3 (sequence is synthesized)
cagagctgctgcctcacacctccagcggcggccttggagatgcatgtatggtgggggccatcaacccagagctgtacaagttcccggaggacaaaagtgagaccgacttccccgacggct

SEQ ID NO: 739694 - DNA, 120 bp, Artificial Sequence
  ENSG00000204176_4 (sequence is synthesized)
gcctggggcggctgtggttctcggtggaatatgagcaggaggctgagcggctgctggtgggcttgatcaaggcacagcacctgcaagccccctcggagacctgcagccccctggtgaagc

SEQ ID NO: 739695 - DNA, 120 bp, Artificial Sequence
  ENSG00000204176_5 (sequence is synthesized)
tctacctgctgcccgatgagcggcgcttcctccaatccaagaccaaacgcaaaacctccaacccgcagtttgacgagcacttcatctttcaggtgtccagcaagaccatcacccagaggg

SEQ ID NO: 739696 - DNA, 120 bp, Artificial Sequence
  ENSG00000204176_6 (sequence is synthesized)
tgctgaagttctccgtctaccacgtggacaggcagaggaagcaccagctcctgggccaggtgctcttccccttgaagaatgagaccctagtgggggactgccggcgtgtcatctggagag

SEQ ID NO: 739697 - DNA, 120 bp, Artificial Sequence
  ENSG00000204176_7 (sequence is synthesized)
acctggaggccgagagcctggagcccccctcggagtttggcgacctccagttctgcctcagctacaacgactacctgagccgcctgacggtggttgtgctgcgtgccaagggcctccggc

SEQ ID NO: 739698 - DNA, 120 bp, Artificial Sequence
  ENSG00000204176_8 (sequence is synthesized)
tccaggaggacagaggcattgtcagtgtgtttgtcaaagtgtctctgatgaaccacaacaagtttgtcaagtgcaagaagacttcagctgtgctgggctccatcaaccctgtgtacaatg

SEQ ID NO: 739699 - DNA, 120 bp, Artificial Sequence
  ENSG00000204176_9 (sequence is synthesized)
agaccttcagcttcaaggccgatgccaccgagctggataccgctagcctcagcctgactgtggtgcagaacatggaaggggacaagagccagcagctgggccgagtggtggtgggcccct

SEQ ID NO: 739700 - DNA, 120 bp, Artificial Sequence
  ENSG00000204176_10 (sequence is synthesized)
acatgtacacccgcggcagagagctggagcactgggacgagatgctcagcaagcccaaggagctggtgaagcgctggcatgcgctctgccgcaccacggagccctgacccttcgcccagc

SEQ ID NO: 739701 - DNA, 120 bp, Artificial Sequence
  ENSG00000204176_11 (sequence is synthesized)
accgcggttccgctttgggagccgaccatcctcgcagttgcatgtgacagccacagccacacgcatggacgtttcatccaacagctccccgagctgccagccagcccgagccaggaggac

SEQ ID NO: 739702 - DNA, 120 bp, Artificial Sequence
  ENSG00000204176_12 (sequence is synthesized)
gtgagtgctgatatgcaggagagaagaggggacaaagaagccctggcccggtcagcggctctggccatacagccttccgacacactccctcctccttatctgcggggctgcctgggctcg

SEQ ID NO: 739703 - DNA, 120 bp, Artificial Sequence
  ENSG00000204176_13 (sequence is synthesized)
gaatcccggctcctggtcctcacagccctgatttggaccagaatctcagatgctcagaagaaagatcctgtttagtgatgacccagctctacctgctgaatggacctgcagggtaaactt

SEQ ID NO: 739704 - DNA, 120 bp, Artificial Sequence
  ENSG00000204176_14 (sequence is synthesized)
gggtgcctccatctgggaaagctgatgatgtgttcatgcagtcgatgaccctcactgctttttcagccagggtttctctgccttctgcctggcagagaaaacacactgctatggggaaaa

SEQ ID NO: 739705 - DNA, 120 bp, Artificial Sequence
  ENSG00000204176_15 (sequence is synthesized)
tcacagggagggcgctgtgaccagcgcactcaggcaccaagtgtcggcatggctcactgtgctgggtgaaggcctccccgagcattaggtcctccacggggctgtgtcaaatgccctccc

SEQ ID NO: 739706 - DNA, 120 bp, Artificial Sequence
  ENSG00000204176_16 (sequence is synthesized)
acattgtgtcaagtctgcccatggcccaccctccccacagtccaaaaccacacagccctggttctccagctgttctgctgctgtttctgtgctctccctgattaagagcattcagttcct

SEQ ID NO: 739707 - DNA, 120 bp, Artificial Sequence
  ENSG00000204176_17 (sequence is synthesized)
gggctctccctttgagcaggaaatggtgaaagcatgtggctatggtatagcccacagggctgagattgctgtgttgcagtattgatgtaaaatttgttaagaaggaagtacccacagatc

SEQ ID NO: 739708 - DNA, 120 bp, Artificial Sequence
  ENSG00000204176_18 (sequence is synthesized)
actgccatcaactccccagaagttgcactcaagctagtgagcagcccttgtgcttgtcacagttactgtaacaggtagtgtgtatttgcacctggcatcgtgcagcctgcacgtcaacac

SEQ ID NO: 739709 - DNA, 86 bp, Artificial Sequence
  ENSG00000204176_19 (sequence is synthesized)
tgtatttgcacctggcatcgtgcagcctgcacgtcaacacgttgttttgtgtaactagaacagcacatggaaccactatctctttc

SEQ ID NO: 739710 - DNA, 120 bp, Artificial Sequence
  ENSG00000204176_20 (sequence is synthesized)
gtcaccgcacccagcccgaccagtatctttttcttatgcagtgaaacaactttagcaaaagaggcaatgaatgttatactgagtttctacctctttaactccacctccaatttctgtcaa

SEQ ID NO: 739711 - DNA, 72 bp, Artificial Sequence
  ENSG00000204176_21 (sequence is synthesized)
aggcttactgcaagctccgcctcccgggtttacttacaccactgtcctgcctcagcctccggagtagctggg

SEQ ID NO: 739712 - DNA, 72 bp, Artificial Sequence
  ENSG00000204176_22 (sequence is synthesized)
tgcacattttcaaagtagtccgcaaagctgtagtttctaatagcttcatagctcacatgtaataggggttct

SEQ ID NO: 739713 - DNA, 120 bp, Artificial Sequence
  ENSG00000204176_23 (sequence is synthesized)
gtttctaatagcttcatagctcacatgtaataggggttctctgtgtgtttatagagcaggctactacagtggaactgtttctgtttcatctgacatccggatagatgccagccaccccca

SEQ ID NO: 739714 - DNA, 120 bp, Artificial Sequence
  ENSG00000204176_24 (sequence is synthesized)
cattccaaggtgagatttctgactagcagtgacttttctagggccgcttggaaaagttgataagtatccttttctgcaggacagagtagactggtatctctgactcatccctgaaaaatc

SEQ ID NO: 739715 - DNA, 120 bp, Artificial Sequence
  ENSG00000204176_25 (sequence is synthesized)
taaatggcaagagactagctggctctctgctctgatggggaggaggttgttgtttgggctgttctctacagacatagtcagggcaaaaagcatacgcatgcttcccatggaccagagaaa

SEQ ID NO: 739716 - DNA, 120 bp, Artificial Sequence
  ENSG00000204176_26 (sequence is synthesized)
cctggcctgggttgtctcaaatcctgtccacaaggcaactccagaagaaagaagccctttacatttccataaaacactttagaatcagctagtcaatttccacaaaataaagtgctagaa

SEQ ID NO: 739717 - DNA, 120 bp, Artificial Sequence
  ENSG00000204176_27 (sequence is synthesized)
tttgattggatttaattgattatgtagaacaatttgggggccatttgacatcattaaaatattcaatcttcctattcattaacatggtatatctcttcactttaagtcttttgtatgttt

SEQ ID NO: 739718 - DNA, 120 bp, Artificial Sequence
  ENSG00000204176_28 (sequence is synthesized)
ctcagaactatttttgtggttttcagtaaagtgttcttgcacatccttcaatagatttattcttagacgttttatatttgtttatggctagtatatacagattctgttgctacaaaacta

SEQ ID NO: 739719 - DNA, 120 bp, Artificial Sequence
  ENSG00000204176_29 (sequence is synthesized)
tgttgaccttgttatccagtgagaggctttgtgacattcatttaaattgtaataatttgcagattatttttgtataatcatgtcctctgtgaatgacagttttatttcttcctttcttaa

SEQ ID NO: 739720 - DNA, 120 bp, Artificial Sequence
  ENSG00000204176_30 (sequence is synthesized)
tctttatgccttatttagctcttgccaaactgcagtggctgagcaattggacaagataaagaaataaaagtgatccagatcataaagaaagaagtaaaactatatctgcacatgacataa

SEQ ID NO: 739721 - DNA, 120 bp, Artificial Sequence
  ENSG00000204176_31 (sequence is synthesized)
tcttgtctatggaaaatcctaaggaatccacacacaaaaaaactactagagctaataagtttggcaaggttgcaagatataaaattggtatacaaattgcagtggctaggacctccagca

SEQ ID NO: 739722 - DNA, 120 bp, Artificial Sequence
  ENSG00000204176_32 (sequence is synthesized)
gaatgctgactataagtagtgatagtgggtattcttgtctcatcctcaatctcaggggtggtgggtgtggcatgtggagagttgtcaatattcaccatgaagtttgatggttgttatagg

SEQ ID NO: 739723 - DNA, 120 bp, Artificial Sequence
  ENSG00000204176_33 (sequence is synthesized)
taggatttttaatgtactcattaacatatattctcaagctgttaaaaagatttttttaattacaaataaggttaaatttctctcaaatacttactctgcaccttttgaaataattttatt

SEQ ID NO: 739724 - DNA, 120 bp, Artificial Sequence
  ENSG00000204176_34 (sequence is synthesized)
tcctttattctttggatgtgatgacttatactaattgactgttgaatgtcaaaccaaacttaacattcttgtaatagaaaccagcagggtgtgtacacttttgtgtgtgtgcgcaggttt

SEQ ID NO: 739725 - DNA, 120 bp, Artificial Sequence
  ENSG00000204176_35 (sequence is synthesized)
atacacataaacacaacaatacttggacttatttatttaaaatttagatttattagagggagcatggccataaaataaaataaaataaaatttagatttaagtcgagctcagtggctcac

SEQ ID NO: 739726 - DNA, 120 bp, Artificial Sequence
  ENSG00000204176_36 (sequence is synthesized)
atctattatccccgcactttggaaggccaaggcaggtagattgtctaagctcaggaatttgagaccaacgtggtgaaactcggtctctacaaaaaccacaaaaattagccaggtatggtg

SEQ ID NO: 739727 - DNA, 120 bp, Artificial Sequence
  ENSG00000204176_37 (sequence is synthesized)
tcacatgcctgttgtcccagctacttggagggctggggcaggagtattgcgtgagcccgggaggttaaggctgaagtgagtcatgttcacgccactgcactacagcttggataacaaagc

SEQ ID NO: 739728 - DNA, 120 bp, Artificial Sequence
  ENSG00000204176_38 (sequence is synthesized)
tacagcttggataacaaagcgagactctgtctccaaaaataaaataagtaaataaataaataaataaaatttagatcaatttgctgttatatttttatataaactatgtttatgacataa

SEQ ID NO: 739729 - DNA, 120 bp, Artificial Sequence
  ENSG00000204176_39 (sequence is synthesized)
taaataaataaaatttagattaatttgctgttatatttttatataagctatgtttatgacagactttcctataatattcttatcataatgttcttgcacttgaaagaatgtgcattctgc

SEQ ID NO: 739730 - DNA, 120 bp, Artificial Sequence
  ENSG00000204176_40 (sequence is synthesized)
cattctgcagttgtgtgcaggtgttatgtgtatttcaactgggtcaagtttgttaatcaggttggtcaaattatctacatctttactgatatttttgtctgtttttctataaattactga

SEQ ID NO: 739731 - DNA, 120 bp, Artificial Sequence
  ENSG00000204176_41 (sequence is synthesized)
gagaggataaagcctgccactgttattatgaatttgtttatttctcctttgagttttgttagtttttgttttatgcatttagaggttgtgttattaggctcatacccatttaaaattgac

SEQ ID NO: 739732 - DNA, 120 bp, Artificial Sequence
  ENSG00000204176_42 (sequence is synthesized)
gttttctggtagagtgaacctttattatgtgaaatggctttctctaccactcacaatggtatttttttcactttcccccttatttttgaattttcaatgttcttataatgatgtcatgtc

SEQ ID NO: 739733 - DNA, 120 bp, Artificial Sequence
  ENSG00000204176_43 (sequence is synthesized)
tcttgaatagagttgttttaatcaagtctgtcaaattttgtcttttgtgtatttcgtgaatttacatttattgtaattactgatatagttgtgttcataaataccatcttactacttgtt

SEQ ID NO: 739734 - DNA, 120 bp, Artificial Sequence
  ENSG00000204176_44 (sequence is synthesized)
gttctaataatcaccataataataggcgctgggtgtacagaggggacccaggcgacgctggcctccatccgataaccaccgtaacaggggctgggccgcgccgctcctccgctctaagtg

SEQ ID NO: 739735 - DNA, 120 bp, Artificial Sequence
  ENSG00000204176_45 (sequence is synthesized)
ctctttacatgcttcttaagttaccggcaggccagccgcccttacgagagcccctcacggacattaacccaattgagaagactgaacccagcttacgaacgttaagttgtcccaaatcgc

SEQ ID NO: 739736 - DNA, 120 bp, Artificial Sequence
  ENSG00000204176_46 (sequence is synthesized)
agggctggcgagtgaggagcctgaattggaacccaggagcttctggaacccgctccagaattgcgctctcgaccggtttgtccgctgagagcgaacgggtgcgcgagcgccgcatccctg

SEQ ID NO: 739737 - DNA, 120 bp, Artificial Sequence
  ENSG00000204176_47 (sequence is synthesized)
cccaaggccatcaggcaggcagcgctggggccggggacccgcgcggagactccaccccgggatccgggaaggctcccccgagccggggtcggagctgcggctggaggggcctcggcttga

SEQ ID NO: 739738 - DNA, 120 bp, Artificial Sequence
  ENSG00000204176_48 (sequence is synthesized)
ggaggatctgggagggcgggggctcagtcctggccaccaggtgtgaggggtcgggtgcggagccctgtgtcagacgcggcggtgaaggctgtagccctgctctccgggatgggggtggta

SEQ ID NO: 739739 - DNA, 120 bp, Artificial Sequence
  ENSG00000204176_49 (sequence is synthesized)
ggtactctcaccccaccctgccccaagccgcagggagcccctggcgcccctggcgcccgggacccgccctggctggagccctgcggtttccgggagctcacggtcggctctgcgcccctc

SEQ ID NO: 739740 - DNA, 80 bp, Artificial Sequence
  ENSG00000204176_50 (sequence is synthesized)
ctgcggcctcggggcgctgggtccctgcccctgccgtgcactgcgcggctccccgcgccgcagctgggcaccagcagcac

SEQ ID NO: 739741 - DNA, 120 bp, Artificial Sequence
  ENSG00000204176_51 (sequence is synthesized)
cacggaccgcccctgtgctcgcccgacggcgccccgcggcgctttaagagacggcctggcagcccagccccagccgcccagaccggcgagaccagcctgcgggagcagccccatggcggg

SEQ ID NO: 739742 - DNA, 120 bp, Artificial Sequence
  ENSG00000204176_52 (sequence is synthesized)
gccagccacccccacattccaagctcttgccaaactgcagtggctgagcaattggacaagataaagaaataaaagtgatccagatcataaagaaagaagtaaaactatatctgcacatga

SEQ ID NO: 739743 - DNA, 120 bp, Artificial Sequence
  ENSG00000204176_53 (sequence is synthesized)
ctgtttctgtttcatctgacatccggatagatgccagccacccccacattccaagattccagttctttgatgaaagtctctattccacccatcaagtctgtgtctgataacaccaatatc

SEQ ID NO: 739744 - DNA, 120 bp, Artificial Sequence
  ENSG00000204176_54 (sequence is synthesized)
tgggtcattagtggctccgttttgttgtgtctgttttcccctccttcctgttttgtggtgtgtttgatcacttattgttgaatgctaaccattataataaattttagtggctccaggaaa

SEQ ID NO: 739745 - DNA, 120 bp, Artificial Sequence
  ENSG00000204176_55 (sequence is synthesized)
ggcgccccgcggcgctttaagagacggcctggcagcccagccccagccgcccagaccggcgagaccagcctgcgggagcagccccatggcgggagatgcatgtatggtgggggccatcaa

SEQ ID NO: 739746 - DNA, 120 bp, Artificial Sequence
  ENSG00000204176_56 (sequence is synthesized)
aggagcaggctactacagtggaactgtttctgtttcatctgacatccggatagatgccagccacccccacattccaagcagtttaagtatagtgtgcctgggttgggtgcggtggctcac

SEQ ID NO: 739747 - DNA, 84 bp, Artificial Sequence
  ENSG00000204176_57 (sequence is synthesized)
gcttgacctgccaccgtactccagcctgggtgacaaagaaaaactccgtctcaaaaaataataataaaaaaaaagtatagtgtg

SEQ ID NO: 739748 - DNA, 120 bp, Artificial Sequence
  ENSG00000204178_0 (sequence is synthesized)
gtcatttctttgtttccgaaggcggaggaggctccgagccccccctccccgtgctaccccctccccccgggtgctggctccatgtctgtgtgaccggcctcaggggtagagtccaggccc

SEQ ID NO: 739749 - DNA, 120 bp, Artificial Sequence
  ENSG00000204178_1 (sequence is synthesized)
gccagcggcggcggcagctgaggtgagagacggcggcggcggcgcgggcacccggccccccagcgggaggatgaagcggcggaacgccgactgcagtaagctccgccgccccctaaagcg

SEQ ID NO: 739750 - DNA, 120 bp, Artificial Sequence
  ENSG00000204178_2 (sequence is synthesized)
ccccctaaagcggaaccggatcaccgagggcatttacggcagtacatttttatacctgaaattcctggtggtgtgggcacttgtcctcctagcagattttgtcctggagttcagatttga

SEQ ID NO: 739751 - DNA, 120 bp, Artificial Sequence
  ENSG00000204178_3 (sequence is synthesized)
atacctgtggccattctggcttttcatcagaagcgtctatgattccttcagataccagggactggccttctcagtattttttgtttgtgtagcattcacgtcaaatataatatgcctgct

SEQ ID NO: 739752 - DNA, 120 bp, Artificial Sequence
  ENSG00000204178_4 (sequence is synthesized)
gttcatccccatacagtggcttttttttgctgctagcacatatgtatgggttcagtacgtatggcacacagaaaggggagtgtgtttgcctacagtgtctctctggatcctctttgttta

SEQ ID NO: 739753 - DNA, 120 bp, Artificial Sequence
  ENSG00000204178_5 (sequence is synthesized)
tattgaagcagccattagatttaaagatctcaaaaactttcatgtagacctttgtcgtccatttgctgctcactgtattgggtaccctgtggtaactttggggtttggcttcaaaagtta

SEQ ID NO: 739754 - DNA, 120 bp, Artificial Sequence
  ENSG00000204178_6 (sequence is synthesized)
cgtaagctacaaaatgcggttaaggaagcaaaaagaagtacaaaaagagaacgagttttacatgcaacttcttcaacaagctctccctccagagcaacagatgctacagaagcaagaaaa

SEQ ID NO: 739755 - DNA, 120 bp, Artificial Sequence
  ENSG00000204178_7 (sequence is synthesized)
agaggccgaggaagcagccaaaggattacctgatatggattcttcgatccttatacaccacaatggaggtatcccagccaacaaaaaactctccacaactttgccagagatagaataccg

SEQ ID NO: 739756 - DNA, 120 bp, Artificial Sequence
  ENSG00000204178_8 (sequence is synthesized)
agaaaaagggaaagaaaaggacaaggatgccaaaaaacacaaccttggaataaataacaacaatattctacaacctgtagactctaaaatacaagagattgagtatatggaaaaccatat

SEQ ID NO: 739757 - DNA, 120 bp, Artificial Sequence
  ENSG00000204178_9 (sequence is synthesized)
caatagtaaaagattaaataatgatcttgtgggaagtacagaaaatctcttgaaagaggactcatgcactgcttcctcaaaaaattacaaaaatgccagtggagttgtgaactcttcacc

SEQ ID NO: 739758 - DNA, 120 bp, Artificial Sequence
  ENSG00000204178_10 (sequence is synthesized)
tcgaagtcatagcgccacaaatgggagcattccttcctcatctagtaaaaatgagaagaagcagaaatgcactagcaagagcccaagtacacacaaggacttaatggaaaactgtattcc

SEQ ID NO: 739759 - DNA, 120 bp, Artificial Sequence
  ENSG00000204178_11 (sequence is synthesized)
taataaccagctaagcaaaccagacgcactggtcaggctggaacaagacattaaaaagttaaaggctgacctgcaagccagcagacaagtggaacaagagctccgcagtcagatcagctc

SEQ ID NO: 739760 - DNA, 120 bp, Artificial Sequence
  ENSG00000204178_12 (sequence is synthesized)
cctttcgagcaccgagcgagggatccgctcagaaatgggccagcttcggcaggagaacgagctgctgcagaacaagttacataatgctgtgcaaatgaagcaaaaagacaagcagaatat

SEQ ID NO: 739761 - DNA, 120 bp, Artificial Sequence
  ENSG00000204178_13 (sequence is synthesized)
cagccagttggagaaaaagctaaaagctgagcaggaagcccgaagttttgtagagaaacagttaatggaagagaaaaagaggaagaagttagaagaagccactgctgcccgggctgttgc

SEQ ID NO: 739762 - DNA, 120 bp, Artificial Sequence
  ENSG00000204178_14 (sequence is synthesized)
gtttgctgctgcatctaggggagaatgcaccgaaaccttacggaatcggatcagagaactagaagcagagggcaagaagctcacgatggacatgaaggtgaaagaagaccaaatcagaga

SEQ ID NO: 739763 - DNA, 120 bp, Artificial Sequence
  ENSG00000204178_15 (sequence is synthesized)
actagaactaaaagtccaggagcttcggaaatataaggaaaatgagaaggacactgaggtgttaatgtcagccctctcagccatgcaagacaaaacacagcacctggagaacagcttaag

SEQ ID NO: 739764 - DNA, 120 bp, Artificial Sequence
  ENSG00000204178_16 (sequence is synthesized)
atcaaggacctaaaacagaagatagccgaagtcatggccgtcatgcccagcataacatacagtgccgccaccagccccctgagccctgtttccccccactactcttccaaatttgtggag

SEQ ID NO: 739765 - DNA, 120 bp, Artificial Sequence
  ENSG00000204178_17 (sequence is synthesized)
accagcccctctggacttgaccccaatgcctctgtttaccagcccctgaagaaatgaaggccagctgtgtgttgtgcccaaaaatttggttaccggaaggcattgcaaaggagcgtctct

SEQ ID NO: 739766 - DNA, 120 bp, Artificial Sequence
  ENSG00000204178_18 (sequence is synthesized)
ggcagtcaagataaaaaaacagtttctattgtattttgtggaactgtatctgttgtcatttttaaaaaggggggaaaagataacatccaagtctgattagaactgcccatcagtttttct

SEQ ID NO: 739767 - DNA, 120 bp, Artificial Sequence
  ENSG00000204178_19 (sequence is synthesized)
tgtaaatttttagaagacctcacagaactttacagtttatttttctcggccaacacattaaaaccattcttggatttcaagtagccaactttgccttttatgtattcttacatagtttcc

SEQ ID NO: 739768 - DNA, 120 bp, Artificial Sequence
  ENSG00000204178_20 (sequence is synthesized)
tcttgaagaaaaaaaaagcagagtttttgtttttcaaccctttatgtttgttttgttttattcttaaataagcaagcaaaacctgcacattggattcacgtgagatgataatgaaaactt

SEQ ID NO: 739769 - DNA, 120 bp, Artificial Sequence
  ENSG00000204178_21 (sequence is synthesized)
ttagtttaagagtgaagggttaagtaacctaacagagctttgatgttatagctgcattaaagaaggtgattgtcaatattacagaaaacaaaaatggattgcccctccaaggaccaaaca

SEQ ID NO: 739770 - DNA, 120 bp, Artificial Sequence
  ENSG00000204178_22 (sequence is synthesized)
gattcaaggagcatcatttaagctaagaagagacctaagtgatgaaactagctgtaagaatgtaacaggggttgtgtttgaaatatttatattcccatcggtgtgtttagtcctagaaaa

SEQ ID NO: 739771 - DNA, 120 bp, Artificial Sequence
  ENSG00000204178_23 (sequence is synthesized)
ttgctagcagcagtcttcttcacagtgccttgggaaaagacatttcaagaggaaacttgataattttaaactcttttccccctttaccgtcatctatcctctatctgtatcaagctcact

SEQ ID NO: 739772 - DNA, 120 bp, Artificial Sequence
  ENSG00000204178_24 (sequence is synthesized)
gcggatcctgctgtaaaactggtgggtagctgggctgtccgttaccaccacagctacatcttctgtttctttgaatagaaagcaccacagtgttttgcacttgcctccagtaaagtgccc

SEQ ID NO: 739773 - DNA, 120 bp, Artificial Sequence
  ENSG00000204178_25 (sequence is synthesized)
gcacttgcctccagtaaagtgccctgggaagggagctgggcagtgtttgtggacgagagactgtaacgatggctaataaaagctgcgggtctaggtttttttttttttgttttgtttttt

SEQ ID NO: 739774 - DNA, 120 bp, Artificial Sequence
  ENSG00000204178_26 (sequence is synthesized)
cacttttcatcattttgtgtttgatgatttaaaagaagcttgactattcctcagctcttgtgccaaggagggttttttttttttaagactcttaaactcaaaactctgcacaaagatttc

SEQ ID NO: 739775 - DNA, 120 bp, Artificial Sequence
  ENSG00000204178_27 (sequence is synthesized)
agtttcaaatgtgtattatacatgggtagaaaagtgtttgcacaggcaacttttggaagtgtttaagaatcagggtgggggtggcgggagggaccgggtgggggcaatgcaaaattgtat

SEQ ID NO: 739776 - DNA, 120 bp, Artificial Sequence
  ENSG00000204178_28 (sequence is synthesized)
ttggaaactaggaaaaattaagaaaccaaataaattggttttgcttccttgccatggattctggaaggacatagttcttctaaaatttcctgttaattggcatgtacgtctcatttaaag

SEQ ID NO: 739777 - DNA, 120 bp, Artificial Sequence
  ENSG00000204178_29 (sequence is synthesized)
caaattaagtaggacaagcaagtcagtaaaatagaagtattaaaaagaatcatcctttaaatcacagatcttattttgagattaaaaaaaatacttctagctttagccaggtgtgcatgt

SEQ ID NO: 739778 - DNA, 120 bp, Artificial Sequence
  ENSG00000204178_30 (sequence is synthesized)
tgctgccattttgcatttttgaatcatcttgtgtaattgtcaccatgaaagtgttactcagaattgtcatagattttctcttctttgtgcaaaaacatggaaaattgtcactgactttgt

SEQ ID NO: 739779 - DNA, 120 bp, Artificial Sequence
  ENSG00000204178_31 (sequence is synthesized)
tttgaggtttcccccattttgctgccttttgggacacttcgttaaatactggtcttggctgcattcttttttttttttcctgtggggttcaaaagaataaacattttcttacagataaaa

SEQ ID NO: 739780 - DNA, 120 bp, Artificial Sequence
  ENSG00000204179_0 (sequence is synthesized)
tggcctgactcacaggacactaaggctccttttctgaagaagccttttaccagtctcatttaggggatgggaacaacatgtcttcacctagggactttagagcagagcctgtaaacgatt

SEQ ID NO: 739781 - DNA, 120 bp, Artificial Sequence
  ENSG00000204179_1 (sequence is synthesized)
atgagggaaatgactctgaagcagaagacttgaatttcagggagactttgccttcatcaagtcaggaaaacacacctagatcaaaggtttttgaaaataaagttaattcagagaaggtaa

SEQ ID NO: 739782 - DNA, 120 bp, Artificial Sequence
  ENSG00000204179_2 (sequence is synthesized)
aactttctcttcggaatttcccacataatgattatgaggatgtttttgaagagccttcagaaagtggcagtgatcccagcatgtggacagccagaggccccttcagaagagacaggtgga

SEQ ID NO: 739783 - DNA, 120 bp, Artificial Sequence
  ENSG00000204179_3 (sequence is synthesized)
gcagtgaggatgaggaggctgcagggccatcacaggctctctcccctctactttctgatacgcgcaaaattgtttctgaaggagaactagatcagttggctcagattcggccattaatat

SEQ ID NO: 739784 - DNA, 120 bp, Artificial Sequence
  ENSG00000204179_4 (sequence is synthesized)
tcaattttcatgagcagacagccatcaaggattgtttgaaaatccttgaggaaaaaacagcagcgtatgatatcatgcaggaatttatggctttagaacttaagaatctgcctggtgagt

SEQ ID NO: 739785 - DNA, 120 bp, Artificial Sequence
  ENSG00000204179_5 (sequence is synthesized)
acacgcgttcctcttggaaaaagcaaggactacatcaatgctagttatattagaatagtcaattgtggagaagagtatttttatatcgctactcaaggaccactgctgagcaccatagat

SEQ ID NO: 739786 - DNA, 120 bp, Artificial Sequence
  ENSG00000204179_6 (sequence is synthesized)
gacttttggcaaatggtgttggaaaataattcaaatgttattgccatgataaccagagagatagaaggtggaattatcaaatgctaccattactggcccatttctctgaagaagccattg

SEQ ID NO: 739787 - DNA, 120 bp, Artificial Sequence
  ENSG00000204179_7 (sequence is synthesized)
gaattgaaacacttccgtgtattcctggagaactaccagatacttcaatatttcatcattcgaatgtttcaagttgtggagaagtccacgggaactagtcactctgtaaaacagttgcag

SEQ ID NO: 739788 - DNA, 120 bp, Artificial Sequence
  ENSG00000204179_8 (sequence is synthesized)
ttcaccaagtggccagaccatggcactcctgcctcagcagatagcttcataaaatatattcgttatgcaaggaagagccaccttacaggacccatggttgttcactgcagtgccggcata

SEQ ID NO: 739789 - DNA, 120 bp, Artificial Sequence
  ENSG00000204179_9 (sequence is synthesized)
ggccggacaggggtgttcctatgtgtggatgtcgtgttctgtgccatcgtaaagaactgttcattcaacatcatggatatagtggcccaaatgagagaacaacgttctggcatggttcaa

SEQ ID NO: 739790 - DNA, 120 bp, Artificial Sequence
  ENSG00000204179_10 (sequence is synthesized)
acgaaggagcagtatcacttttgttacgatattgtgcttgaagttcttcggaaacttctgactttggattaagaaagacttctgttgcctctcacttgaaattaccaagtgggtttgcac

SEQ ID NO: 739791 - DNA, 120 bp, Artificial Sequence
  ENSG00000204179_11 (sequence is synthesized)
aagctccctgaagggcaatatcatttggcttggggtgatcagtgtttacttattgatcttgctagacaatatcaaaataacttcccacattttccagtgaaacagatgttacataaaacg

SEQ ID NO: 739792 - DNA, 120 bp, Artificial Sequence
  ENSG00000204179_12 (sequence is synthesized)
attgcagcttggctatttggttgaagggattacagagcccaataaaggatttaaaatatattcattaagattttatttggaaaggtggctggagagagctgaggatttccaggactttgt

SEQ ID NO: 739793 - DNA, 120 bp, Artificial Sequence
  ENSG00000204179_13 (sequence is synthesized)
aagttcttattctgggagaacataaggccaataatcatgacctcttccaggcatttttaagacagatgtctattcatgttctttagctagagcctgtactttttgctggcatttgaataa

SEQ ID NO: 739794 - DNA, 120 bp, Artificial Sequence
  ENSG00000204179_14 (sequence is synthesized)
cccagtttaaaaagagtccagttagggtggactaactttggacacaaattggcttccatttcctacattttcatactgctgccttcctacagctgctagaccaagacctgttggtctggg

SEQ ID NO: 739795 - DNA, 120 bp, Artificial Sequence
  ENSG00000204179_15 (sequence is synthesized)
aagcatttcatggatagggagagctcctctcggtgaacagtccaaaactaaaatagatgtttatatagaaagcccaagaggagacttttgccatgcctgagttctttcctatcccaccct

SEQ ID NO: 739796 - DNA, 120 bp, Artificial Sequence
  ENSG00000204179_16 (sequence is synthesized)
aacacttaacatattacttagtctgctttgttaaaagcaagtattacctttaacttgcctcttactctttgccctttagctaactaataaagtttgatataggcattattatataattct

SEQ ID NO: 739797 - DNA, 120 bp, Artificial Sequence
  ENSG00000204179_17 (sequence is synthesized)
gagtcattcatggtatctctcatgtttgatgtatttttcaaactaagatctatgatagttttttttccagagttccattaaatcatttatttcctttactttctcacctctgttgaaaca

SEQ ID NO: 739798 - DNA, 120 bp, Artificial Sequence
  ENSG00000204179_18 (sequence is synthesized)
tttagaaactggatttgggaacccaattttggaaaaccagattcatagtcatgaaaatggaaacttccatattctgtttttgaaaagatgtggccattattacagtaattttattatagg

SEQ ID NO: 739799 - DNA, 120 bp, Artificial Sequence
  ENSG00000204179_19 (sequence is synthesized)
actttgcctcgtacaattaatagtgatattttggacaaggagttctggtgacaagctatacctaattataagctataaaacaatagatatgagtgtttgtacagtttaactcaatggaga

SEQ ID NO: 739800 - DNA, 120 bp, Artificial Sequence
  ENSG00000204179_20 (sequence is synthesized)
tcagaatattctatgtattgagaaaatgtttaatatcaatctataaatcttgaatttctaagaggcttattttgttcttttggctgaatgagtatatttgaattggttgaataattaata

SEQ ID NO: 739801 - DNA, 120 bp, Artificial Sequence
  ENSG00000204179_21 (sequence is synthesized)
tcattgtaaaaataattatatgccaaaaatatatttgatgttaaatcaaatagatgattctgtttacattgttcatatgaataataatctgtgttaatttcattttgataattggccttt

SEQ ID NO: 739802 - DNA, 120 bp, Artificial Sequence
  ENSG00000204179_22 (sequence is synthesized)
gttaatttcattttgataattggcctttaatatttgtatctctaattttattttctctctgttactgtaaaataatagctataatgtataacaattttcttcagaagaattctatgctat

SEQ ID NO: 739803 - DNA, 120 bp, Artificial Sequence
  ENSG00000204179_23 (sequence is synthesized)
gttggtggcagttcttgtactcctgtacttgcttgtatctgcagcagctcctgctccttccttggactccactccagaaaatgtgtgcccagtcgaaaccactaccaatttcatctggga

SEQ ID NO: 739804 - DNA, 120 bp, Artificial Sequence
  ENSG00000204179_24 (sequence is synthesized)
gctttcttcaccccacaacacttccgcagttctgctggttgtcttccacaagggccccagtgagatatagtcagggatggcgtccctgtgctcgagctggagactgggagtgcatacaag

SEQ ID NO: 739805 - DNA, 120 bp, Artificial Sequence
  ENSG00000204179_25 (sequence is synthesized)
cagggccatcacaggctctctcccctctactttctgtattccattcaccagttgaaggacactgtgttgcttccagattttggcaattatggataaaagtactacagatattcacaaact

SEQ ID NO: 739806 - DNA, 120 bp, Artificial Sequence
  ENSG00000204179_26 (sequence is synthesized)
aaccaagcaacagagaaaaaaatagataccgagatattcttccatgtctcatgaacaaagtggccataatggcagggatggaggttatgtatgagctcagcaacatggacttccactcac

SEQ ID NO: 739807 - DNA, 120 bp, Artificial Sequence
  ENSG00000204179_27 (sequence is synthesized)
tactgagtgtccaatctgccagcaacagagaccaacactgagtacctgatgggcactattccatgggatgatcagccagctagctgatggcaggttgattacactgggaccacttccata

SEQ ID NO: 739808 - DNA, 120 bp, Artificial Sequence
  ENSG00000204179_28 (sequence is synthesized)
atgcatggagcagtgcttttttcttactagaatagacagtaactctgggtatggatttgccttccctgcacacagtgctcccaccaatttaccatctgtggacctacagaatgccttatc

SEQ ID NO: 739809 - DNA, 120 bp, Artificial Sequence
  ENSG00000204179_29 (sequence is synthesized)
aggtggcatattggtttttctggaatccgttgcgaaactgttcttatctacttaaagggaactcatttgaagtctgagtcttgagggaataggcagaacaggcatgttggaaggaaagta

SEQ ID NO: 739810 - DNA, 120 bp, Artificial Sequence
  ENSG00000204179_30 (sequence is synthesized)
gcaggtgggattggatagcgacgaaggccggcaggctaggcgtggacccaactggcgaggctgctggggttgcagcgggacagttggggcggccccgcaggcccagtggcagtgatccca

SEQ ID NO: 739811 - DNA, 120 bp, Artificial Sequence
  ENSG00000204179_31 (sequence is synthesized)
gaggattttggtatctgtgggaggtcctggaaccaattccttgcaaatacagagggacaacagtagtacaagtatttaatacaacaaatcttcctatacgcgcaaaattgtttctgaagg

SEQ ID NO: 739812 - DNA, 120 bp, Artificial Sequence
  ENSG00000204179_32 (sequence is synthesized)
aagaaaaattccacaatgcttgatgttaaacatgtctcttctttaatgtgtgcctcatatttttacagctggactaatttttagttttccagggaaattaaaggagtgaatatggaaata

SEQ ID NO: 739813 - DNA, 120 bp, Artificial Sequence
  ENSG00000204179_33 (sequence is synthesized)
agatatgcacaaagatatttctaatacaaatgaaagaaagagctagggaaaacttcaaaaatgggaaaatatggttttctaggattttcttttaaaaataaaaaaatgcaattaaaaaaa

SEQ ID NO: 739814 - DNA, 120 bp, Artificial Sequence
  ENSG00000204179_34 (sequence is synthesized)
gacctttggcctgactcacaggacactaaggctccttttctgaagaagccttttaccagtctcatttaggggatgggaacaacatgtcttcacctagggactttagagcagagcctgtgt

SEQ ID NO: 739815 - DNA, 120 bp, Artificial Sequence
  ENSG00000204183_0 (sequence is synthesized)
agggatctattttggagacaacaaacttgactaaggaatctcaagaagaaaatataattctgctgccaggccccaatggagcaaatagagctcgggacccaggggcctttggaaggaaca

SEQ ID NO: 739816 - DNA, 120 bp, Artificial Sequence
  ENSG00000204183_1 (sequence is synthesized)
ggaatgcggttagaggagtgcaggaaggggctcttgggatgtgccacccaggaagacagagggccagtgctgctacctgcagccacacgactccacgaccatgtcctcatactgcttata

SEQ ID NO: 739817 - DNA, 120 bp, Artificial Sequence
  ENSG00000204183_2 (sequence is synthesized)
caccacgttgttggcagagtcaatgaagaggatgctgatgggactcagccgcgtgggcacacagcaggtgggtggtgtggactcggggtccatggagttcatcagggtctggatgactgc

SEQ ID NO: 739818 - DNA, 120 bp, Artificial Sequence
  ENSG00000204183_3 (sequence is synthesized)
atgattcgtgggctccaggtgggagcgcaatgggaactcgcacagcccctcgcagtggaaagcctcgtactcaaggggtgcgatgatccagtcgtcccagcccatgtccttgaagttgac

SEQ ID NO: 739819 - DNA, 120 bp, Artificial Sequence
  ENSG00000204183_4 (sequence is synthesized)
atgcagtgccttccgactgcagcgagccttaaggttcttgctgggtcgcttgccctggcgagtggccagtggggcccgccgttttcgccgctggctgaacaggtactcatacacggtctt

SEQ ID NO: 739820 - DNA, 120 bp, Artificial Sequence
  ENSG00000204183_5 (sequence is synthesized)
atcgtcctggccagagcgggccttaatctcattaaagaacaggtcccgtttcttggtgcggccaaacaccaggaacagggctttctcgtggacctgccgggcggcgcggtcgaagcccag

SEQ ID NO: 739821 - DNA, 120 bp, Artificial Sequence
  ENSG00000204183_6 (sequence is synthesized)
gccacggaggtccacggccctgccccgttcccaggcctccagctccaggcacagctgggccgagttcttaaagtttcggaagagcttccagatgtcgaacacctcccagccagatccgtc

SEQ ID NO: 739822 - DNA, 120 bp, Artificial Sequence
  ENSG00000204183_7 (sequence is synthesized)
gcagctggacagcttcagctgggcagcccgcccgcctccgggggccgctggcttggccgtgtccgagggcttcttccgcaagatccgcagctcggcccccagcagcccatccttctccag

SEQ ID NO: 739823 - DNA, 120 bp, Artificial Sequence
  ENSG00000204183_8 (sequence is synthesized)
ggcactaatgtcaaacacgtacctctgcttcctgaccacgggacctcggtcatctagagagaacacccagaagtcattccctgcaacctcaccaagggagccagtcacttcgaggctgcg

SEQ ID NO: 739824 - DNA, 120 bp, Artificial Sequence
  ENSG00000204183_9 (sequence is synthesized)
ggggaaggccccagctctctcccagtccagagagctttctttcacctctgccccattctgacagaagccaagagccaaaccactgagagcctttttgaaaatgagagcatttcctacata

SEQ ID NO: 739825 - DNA, 120 bp, Artificial Sequence
  ENSG00000204183_10 (sequence is synthesized)
gccgaccaagtaggggtgttcacctgaagatgtggctggggatgatttgcgtgattctggtgtttgtgtcatgatatacgtgttatcagagatttatcagctttgtaactgccttctacc

SEQ ID NO: 739826 - DNA, 120 bp, Artificial Sequence
  ENSG00000204183_11 (sequence is synthesized)
ctgccttctacctatctctctcccagccatgagctaacgtgatgtctcatttgtgagataggtggagtgagcattaaaattactcctgttgactgggcacagtggctcacacctgcaatc

SEQ ID NO: 739827 - DNA, 74 bp, Artificial Sequence
  ENSG00000204183_12 (sequence is synthesized)
ctgaggtgggtggattgcttgagctccggagttcgaaaccagcctgcacaacatggtgactgcacatgtagtcc

SEQ ID NO: 739828 - DNA, 79 bp, Artificial Sequence
  ENSG00000204183_13 (sequence is synthesized)
ccccagggaggtcaaggcttcagtgagccgtgaattcgctattgcactccggcctgggcaacagagaaagaccctggct

SEQ ID NO: 739829 - DNA, 120 bp, Artificial Sequence
  ENSG00000204186_0 (sequence is synthesized)
aaacctccatcagggttgcaacgccacgttgccttggatgcctgcgtgagtggagtcgcgactcggggcccgcgtcctgagagacgcgctcccgcgccgcttctcgcctccggaccgcag

SEQ ID NO: 739830 - DNA, 120 bp, Artificial Sequence
  ENSG00000204186_1 (sequence is synthesized)
gggccgaagtcgcctatttctggctccgcgggcagcggggccgtggcgctcggacggtctgggattcgggcgccgccgcggaaccggaataagaagggagagcgcccggctcggtcctcg

SEQ ID NO: 739831 - DNA, 120 bp, Artificial Sequence
  ENSG00000204186_2 (sequence is synthesized)
gtctccaccgcggcccggaaggaatccgggcagcctccgcggagatacttgccagaactaatacagctgatgaaatacctgaccttttctgctccagcttgagtattcaaagacagtagc

SEQ ID NO: 739832 - DNA, 120 bp, Artificial Sequence
  ENSG00000204186_3 (sequence is synthesized)
catctgacttcagttatttattcaagatgcagaaaagacaaggatattgcagttattgccgtgtgcagtataataacctggaacagcatttgttcagtgctcagcacaggagtttgacca

SEQ ID NO: 739833 - DNA, 120 bp, Artificial Sequence
  ENSG00000204186_4 (sequence is synthesized)
gacagagtagacgtcaaatatgtaccagtagtttgatggaacgtttcttacaggatgtactgcagcaccacccatatcattgtcaagagagcagttcaacacaagatgagacacatgtga

SEQ ID NO: 739834 - DNA, 120 bp, Artificial Sequence
  ENSG00000204186_5 (sequence is synthesized)
atactgggtcatcgtctgaagtggtgcatttggatgatgctttttctgaagaagaggaagaggatgaggataaggttgaggatgaggatgctaccgaagagagaccatccgaggtttcag

SEQ ID NO: 739835 - DNA, 120 bp, Artificial Sequence
  ENSG00000204186_6 (sequence is synthesized)
aacctattgaagagttacattccagacctcataaatctcaggaaggcacgcaggaggtttcagttcgaccatcagttattcaaaaactggagaagggacagcagcagcccttggagtttg

SEQ ID NO: 739836 - DNA, 120 bp, Artificial Sequence
  ENSG00000204186_7 (sequence is synthesized)
ttcataaaattggggccagtgtgagaaaatgtaacctagtagatattggtcaggctacaaataatagaagcaacttggtacgccccccagtgatttgtaatgctcctgctagttgtttac

SEQ ID NO: 739837 - DNA, 120 bp, Artificial Sequence
  ENSG00000204186_8 (sequence is synthesized)
ctgaaagctctaacgatagaccagttacagctaatacaactagtttaccaccagcagctcatttggattcagttagcaaatgtgacccaaacaaagttgagaaatatcttgaacagccag

SEQ ID NO: 739838 - DNA, 120 bp, Artificial Sequence
  ENSG00000204186_9 (sequence is synthesized)
atggggcctctagaaatcctgtgccatcatcccatgtagaaactacttcattttcgtatcagaaacataaagaatcaaataggaaatctttacgcatgaattcagataagttggttttgt

SEQ ID NO: 739839 - DNA, 120 bp, Artificial Sequence
  ENSG00000204186_10 (sequence is synthesized)
ggaaagatgtaaaatctcagggtaaaactttatcagctggcttgaaattccatgaacgcatgggtactaagggctccttaagagttaaatctccttccaaattagcagtaaacccgaata

SEQ ID NO: 739840 - DNA, 120 bp, Artificial Sequence
  ENSG00000204186_11 (sequence is synthesized)
aaactgacatgccttctaataaaggaatctttgaagatactattgcaaagaaccatgaggaattcttttctaacatggattgtacccaagaagaaaagcatttggtttttaacaagacag

SEQ ID NO: 739841 - DNA, 120 bp, Artificial Sequence
  ENSG00000204186_12 (sequence is synthesized)
ccttttgggaacagaagtgctcagtgagttctgaaatgaagtttgattgtatctctcttcagtcagcatctgatcagccccaagagactgcacaagacttaagtctttggaaggaggagc

SEQ ID NO: 739842 - DNA, 120 bp, Artificial Sequence
  ENSG00000204186_13 (sequence is synthesized)
aaattgaccaagaagataactatgagtctagaggttcagaaatgagttttgattgcagttcctcttttcattcactgactgaccaatctaaagtgagtgccaaagaagtaaacctttcca

SEQ ID NO: 739843 - DNA, 120 bp, Artificial Sequence
  ENSG00000204186_14 (sequence is synthesized)
aggaagtacgtactgatgtacagtataagaataataaatcttatgtttctaaaataagttctgattgtgatgacattcttcacttggttaccaaccaatcccaaatgattgttaaagaaa

SEQ ID NO: 739844 - DNA, 120 bp, Artificial Sequence
  ENSG00000204186_15 (sequence is synthesized)
taagtcttcagaatgcaaggcatattagcctggttgaccaaagctatgaatctagtagttctgaaacgaattttgattgtgatgcttcacctcagtccactagtgactacccccaacaat

SEQ ID NO: 739845 - DNA, 120 bp, Artificial Sequence
  ENSG00000204186_16 (sequence is synthesized)
ctgtaacagaagtaaaccttcctaaggaagtgcacattggtttggttgataagaactatggttccagtagctctgaagtaagtgctgattctgttttcccactgcagtcagtggttgaca

SEQ ID NO: 739846 - DNA, 120 bp, Artificial Sequence
  ENSG00000204186_17 (sequence is synthesized)
gacccccagtggctgtcacagaaacaaaacttcggaagaaggctcataccagcttggttgataactatggatcgagttgttctgaaacaagttttgattgtgatgtttctcttgagtcag

SEQ ID NO: 739847 - DNA, 120 bp, Artificial Sequence
  ENSG00000204186_18 (sequence is synthesized)
tagttgatcatccccaactgactgtcaaaggaagaaacctgaaaggtagacaagtccacctaaaacataagaagcgtaaacccagtagtgctaaagcacatcttgattgtgatgtctcac

SEQ ID NO: 739848 - DNA, 120 bp, Artificial Sequence
  ENSG00000204186_19 (sequence is synthesized)
ttgggacagttgcagatgaatcccagagggctgttgaaaagataaatcttctgaaggagaagaatgctgaccttatggatatgaactgtgaatcccatggtcctgaaatgggttttcagg

SEQ ID NO: 739849 - DNA, 120 bp, Artificial Sequence
  ENSG00000204186_20 (sequence is synthesized)
ctgatgctcaattagctgaccagtctcaagtagccgaaatagagcgtcagaaagtggatgttgaccttgagaataagagtgttcagtctagccgttcttctctgagttctgattctccgg

SEQ ID NO: 739850 - DNA, 120 bp, Artificial Sequence
  ENSG00000204186_21 (sequence is synthesized)
cttctctttatcattcagctcatgatgagcctcaagaagctttggatgaagtaaatcttaaagagttaaatattgacatggaagttaggagctatgattgctccagctctgagttgactt

SEQ ID NO: 739851 - DNA, 120 bp, Artificial Sequence
  ENSG00000204186_22 (sequence is synthesized)
ttgattctgacccgcctcttctgtcagttactgagcagtctcatctggatgctgaaggaaaagaacggcacattgacctggaagatgagagctgtgagtcagatagttctgaaataactt

SEQ ID NO: 739852 - DNA, 120 bp, Artificial Sequence
  ENSG00000204186_23 (sequence is synthesized)
ttgattctgatattcctctttattcagtaattgaccaacctgaagtagctgtttatgaggaagaaactgttgatctggaaagtaaaagtaatgaatcttgtgtctctgaaataacttttg

SEQ ID NO: 739853 - DNA, 120 bp, Artificial Sequence
  ENSG00000204186_24 (sequence is synthesized)
attctgatattcctcttcattcaggaaatgatcaccctgaagtagctgttaaagaagtaattcagaaagaagagtacattcacttagaaaggaagaatgatgaacccagtggttctgaaa

SEQ ID NO: 739854 - DNA, 120 bp, Artificial Sequence
  ENSG00000204186_25 (sequence is synthesized)
taagttcggattcccatgcccctcttcattcagtgactaattctcccgaagtagctgttaaaaagctaaatcctcaaaaagaagagcaggtacacttagaaaataaggaaaatgaaccta

SEQ ID NO: 739855 - DNA, 120 bp, Artificial Sequence
  ENSG00000204186_26 (sequence is synthesized)
ttgattctgaagtaagtttggattataatatcatttttcattcagtgactggacgttctgaagatcccattaaagaaataagccttcacacaaaagagcacatgtacttagaaaataaga

SEQ ID NO: 739856 - DNA, 120 bp, Artificial Sequence
  ENSG00000204186_27 (sequence is synthesized)
gtgtttttgaaacaagtttggattctgatgtccctcttcaggcagcgactcacaaacctgaagtaattgtcaaagaaacatggcttcaaagagaaaagcacgctgaattccaaggtagaa

SEQ ID NO: 739857 - DNA, 120 bp, Artificial Sequence
  ENSG00000204186_28 (sequence is synthesized)
gtactgaattcagtggttcaaaaacaagtttagattctggtgtccctcattattcagtaactgaacctcaagtagctgttaacaaaataaacagaaagaagcaatatgttctagaaaaca

SEQ ID NO: 739858 - DNA, 120 bp, Artificial Sequence
  ENSG00000204186_29 (sequence is synthesized)
agaatgataaatgtagtggttctgaaataattttggattctaatgttccacctcagtcaatgactgaccaacctcaactagcttttttgaaggaaaaacatgttaatctgaaggacaaaa

SEQ ID NO: 739859 - DNA, 120 bp, Artificial Sequence
  ENSG00000204186_30 (sequence is synthesized)
acagtaaatcaggtgattctaaaataacttttgattctgaacaacttcaggaagcggttaaaaaaatagaccaatggaaggaagaggttattggcctgaaaaataagattaatgaaccta

SEQ ID NO: 739860 - DNA, 120 bp, Artificial Sequence
  ENSG00000204186_31 (sequence is synthesized)
gtacttataaattaatacatcatcctgatgtttctgtccaatctgtggctgatcaacccaaagtagctattaaacatgtgaaccttgggaatgaaaaccatatgtacttggaagttaaga

SEQ ID NO: 739861 - DNA, 120 bp, Artificial Sequence
  ENSG00000204186_32 (sequence is synthesized)
acagccaatatagttgttcagaaatgaatttggattctggtttcttgggtcagtcaatagtcaatcgacctcaaataactattttggagcaggagcacattgaactagaaggtaagcaca

SEQ ID NO: 739862 - DNA, 120 bp, Artificial Sequence
  ENSG00000204186_33 (sequence is synthesized)
atcaatgttgtggttctgaagtaagttttgattctgatgaccctcttcagtcagtggctgaccggctgagagaaaccgttaaagaaataagcctttggaaggatgaagaagttgacacgg

SEQ ID NO: 739863 - DNA, 120 bp, Artificial Sequence
  ENSG00000204186_34 (sequence is synthesized)
aagataggagaaatgaagctaagggttttgaaattatgtatgattctgatgttcttcagccagtggctggccaacctgaagaagtagttaaggaggtcagtctttggaaagagcatgttg

SEQ ID NO: 739864 - DNA, 120 bp, Artificial Sequence
  ENSG00000204186_35 (sequence is synthesized)
acttggaaaataagattgtcaaacctacagattccagaataaattttgattctcatgaaccccttcagtccgtaactaataaaattccaggggcgaataaagaaataaatcttttgaggg

SEQ ID NO: 739865 - DNA, 120 bp, Artificial Sequence
  ENSG00000204186_36 (sequence is synthesized)
aggaacatgtttgtctggatgataagggctatgtgcccagtgattctgaaataatttatgtttcaaatatccctcttcagtcagtgataaaacaaccacacattttggaagaggagcatg

SEQ ID NO: 739866 - DNA, 120 bp, Artificial Sequence
  ENSG00000204186_37 (sequence is synthesized)
ccagtctggaagataagagcagtaattcttatagtcctgaagaaagttctgattccaatgactcttttcaggcagcagcagatgagcttcaaaaacctgtcaaagaaataaatctttgga

SEQ ID NO: 739867 - DNA, 120 bp, Artificial Sequence
  ENSG00000204186_38 (sequence is synthesized)
aggaagaccatatttacctggaagataagagctataaattaggtgattttgatgtaagttatgcttctcatattcctgttcagtttgtgactgatcaatcttctgtacctgtcaaagaaa

SEQ ID NO: 739868 - DNA, 120 bp, Artificial Sequence
  ENSG00000204186_39 (sequence is synthesized)
taaacttgcaaaagaaggatcataatgatctagaaaataagaactgtgaagtctgtggttctgaaataaaatgtcattcttgtgttcatcttcagtcagaagttgaccaacctcaagtgt

SEQ ID NO: 739869 - DNA, 120 bp, Artificial Sequence
  ENSG00000204186_40 (sequence is synthesized)
cttacaaagaggcagaccttcagaaggaagagcatgttgtcatggaagaaaagaccgatcaacctagtgattcagaaatgatgtatgattctgatgttccttttcaaatagtagttaacc

SEQ ID NO: 739870 - DNA, 120 bp, Artificial Sequence
  ENSG00000204186_41 (sequence is synthesized)
aatttccaggatcagtcaaagaaacccaccttccaaaggtggtacttgtggatctggtgcccggtgatagtgattatgaagtaatttcagatgatattccccttcagttagtgactgacc

SEQ ID NO: 739871 - DNA, 120 bp, Artificial Sequence
  ENSG00000204186_42 (sequence is synthesized)
tgaagtcagatgtaattgtaaagcctctactccctcaatgacaaaccaatgcaaagagactttcaaaataataaaccggaagaaggactatattattctgggagagccaagttgtcaatc

SEQ ID NO: 739872 - DNA, 120 bp, Artificial Sequence
  ENSG00000204186_43 (sequence is synthesized)
ttgtggttctgaaatgaattttaatgttgatgcctctgatcagtccatgacttacgagtcacaaggacctgatgagaaaatggtgaaatatattgattcagaagataagagctgtggata

SEQ ID NO: 739873 - DNA, 120 bp, Artificial Sequence
  ENSG00000204186_44 (sequence is synthesized)
taatggttctaaaggaaaatttaatttggaagacacttctcatcgaacgactcaccgactgcagaaagctcacaaagaagccagtcttcggaaggatccaagaaatgctggcctaaaagg

SEQ ID NO: 739874 - DNA, 120 bp, Artificial Sequence
  ENSG00000204186_45 (sequence is synthesized)
taagagctgtcagtctagtgcttctgcagtggattttggtgcctcttccaagtcagcgctccatcgaagggctgataaaaaaaaacgttcgaagctaaaacatagagatctagaagtgag

SEQ ID NO: 739875 - DNA, 120 bp, Artificial Sequence
  ENSG00000204186_46 (sequence is synthesized)
ctgtgaaccggatggttttgagatgaattttcagtgtgctccccctcttccatctgatactgatcagcctcaagaaactgttaagaaaagacacccttgtaagaaggtatcttctgactt

SEQ ID NO: 739876 - DNA, 120 bp, Artificial Sequence
  ENSG00000204186_47 (sequence is synthesized)
gaaagaaaagaaccatgattcccagtcaagctctgttctcaaggttgattctgtaaggaacctgaaaaaagcaaaggatgtcatagaggataatcctgatgaaccagttcttgaagcctt

SEQ ID NO: 739877 - DNA, 120 bp, Artificial Sequence
  ENSG00000204186_48 (sequence is synthesized)
gcctcatgtacctccttcatttgtggggaaaacatggtctcagataatgagagaagatgacataaaaattaatgctctggtgaaggagtttagggaaggtcgtttccactgttactttga

SEQ ID NO: 739878 - DNA, 120 bp, Artificial Sequence
  ENSG00000204186_49 (sequence is synthesized)
tgatgactgtgagaccaaaaaagtttcttcgaaggggaaaaaaaaggttacctgggctgacttgcaaggtaaggaggacactgcaccaactcaagctgtgtcagagagtgatgatattgt

SEQ ID NO: 739879 - DNA, 120 bp, Artificial Sequence
  ENSG00000204186_50 (sequence is synthesized)
ctgtggtatttcagatattgatgacttgtcagtggccttagataaaccatgccatcgtcatcctccagcagagaggcctcctaagcaaaaggggcgtgtggcttctcaatgccagacagc

SEQ ID NO: 739880 - DNA, 120 bp, Artificial Sequence
  ENSG00000204186_51 (sequence is synthesized)
gaaaatcagccatagtactcagaccagttgtaagaattacccagtgatgaaaagaaaaataattagacaagaggaagacccaccaaaaagtaagtgttcacgtttacaggatgacagaaa

SEQ ID NO: 739881 - DNA, 120 bp, Artificial Sequence
  ENSG00000204186_52 (sequence is synthesized)
aaccaaaaagaaagtcaaaattgggacagttgaatttcctgcatcatgtactaaagttttgaagcctatgcaacccaaagccttagtctgtgttctttcttctttaaatattaaactgaa

SEQ ID NO: 739882 - DNA, 120 bp, Artificial Sequence
  ENSG00000204186_53 (sequence is synthesized)
agagggtgaaggccttcctttccctaaaatgaggcaccatagttgggataatgatattcggtttatatgcaaatataaacggaatatctttgattattatgagcccttgattaagcaaat

SEQ ID NO: 739883 - DNA, 120 bp, Artificial Sequence
  ENSG00000204186_54 (sequence is synthesized)
tgtaattagtcctcccctgagtgtaatagtaccagagtttgagaggcgtaactgggttaaaattcattttaataggagcaaccaaaactccagtgcaggagataatgatgctgatggaca

SEQ ID NO: 739884 - DNA, 120 bp, Artificial Sequence
  ENSG00000204186_55 (sequence is synthesized)
aggctctgcttcagcgcctttaatggcagtgccggcaagatatggatttaattcacatcagggaaccagtgactcttctctgtttctggaagaatcaaaggttctgcatgctcgtgagct

SEQ ID NO: 739885 - DNA, 120 bp, Artificial Sequence
  ENSG00000204186_56 (sequence is synthesized)
tccaaagaaaagaaatttccagctaacatttttaaatcatgatgttgtcaaaatctctccaaaatcagttagaaataagcttttggaaagtcaaagtaaaaagaaaattcatggaaagag

SEQ ID NO: 739886 - DNA, 120 bp, Artificial Sequence
  ENSG00000204186_57 (sequence is synthesized)
ggtgacaactagtagtaataagctaggttttcccaaaaaggtttataaaccaattattctccagcaaaaacccagaaaagcttcagagaaacagtcaatttggattcggaccaaaccaag

SEQ ID NO: 739887 - DNA, 120 bp, Artificial Sequence
  ENSG00000204186_58 (sequence is synthesized)
tgatatcattagaaagtatatttcgaaatactctgtctttttacgtcatagatatcagtccaggagcgcttttcttggaaggtatctgaagaagaaaaaatctgttgtcagtaggctaaa

SEQ ID NO: 739888 - DNA, 120 bp, Artificial Sequence
  ENSG00000204186_59 (sequence is synthesized)
gaaggcgaagagaacagctaaagtgcttttgaactcttcagttccaccagctggtgccgaagagctgtcaagcgctatggcaaatcctcctccaaagcgacctgtgcgggcttcttgccg

SEQ ID NO: 739889 - DNA, 120 bp, Artificial Sequence
  ENSG00000204186_60 (sequence is synthesized)
cgttgcaagaaggaggaagaagactgatgaaagctaccatggccgacagaaaggtccttctacacctgtgagagcatatgatctgagaagctcatcttgtttacaacaacgtgagagaat

SEQ ID NO: 739890 - DNA, 120 bp, Artificial Sequence
  ENSG00000204186_61 (sequence is synthesized)
gatgactcggctagcaaacaaactgagaggtaatgaggtaaaatagaagttggttttgtgttcaggctagttgaggattcagtacttcagttgaaatatatttggtactttgtgcacaca

SEQ ID NO: 739891 - DNA, 120 bp, Artificial Sequence
  ENSG00000204186_62 (sequence is synthesized)
gctttcccagctttggtgagaaaactaatcttgaactattttgctataaatattatttttcagaatttttatattcatttaaaattagtgtttagagtcctttcattttaagattcagaa

SEQ ID NO: 739892 - DNA, 120 bp, Artificial Sequence
  ENSG00000204186_63 (sequence is synthesized)
acagcctttgtccaacattttctgtagaagaacttcatcttaatttatgtcacaaaataatttagcaccgtatatagaattttgttcctcaaatcatatccctcttattttttatgatta

SEQ ID NO: 739893 - DNA, 120 bp, Artificial Sequence
  ENSG00000204186_64 (sequence is synthesized)
tctctctcatgccagcaaatttaacattgtgagaatgaatatagcaaacttattaaaaagaaggaattataatgaattatgtcaacttttgaatggggttgacttaaatgaatacaaaca

SEQ ID NO: 739894 - DNA, 120 bp, Artificial Sequence
  ENSG00000204186_65 (sequence is synthesized)
aaatataagttttctttctttttaaagcattccagaaaatgagattccataatctttaatacagtttttaaaaactggtgattttttttatgcatagcacaaactcctcctgcttcattt

SEQ ID NO: 739895 - DNA, 120 bp, Artificial Sequence
  ENSG00000204186_66 (sequence is synthesized)
aaattggatctgcaagtctctaacttttatcatttggacacatgcacacatacagtctctaggttttttgggttagccttattagatcttaaaggggaaaataattttgcccatgtgttt

SEQ ID NO: 739896 - DNA, 120 bp, Artificial Sequence
  ENSG00000204186_67 (sequence is synthesized)
aggcattcccccccttttttttaaccacctttactctcttctacatgaagagttggtggcttaatatgaaaatccaggttattttgtggccttatcccctaaaaatattttaggcattac

SEQ ID NO: 739897 - DNA, 84 bp, Artificial Sequence
  ENSG00000204186_68 (sequence is synthesized)
attttgtggccttatcccctaaaaatattttaggcattaccatatcagtttttatttttatgtttgtcttgcccaggctggagt

SEQ ID NO: 739898 - DNA, 73 bp, Artificial Sequence
  ENSG00000204186_69 (sequence is synthesized)
accatatcagtttttaataacttgaactgaaattattggcttggtaatatttgggcaggccattaattctcat

SEQ ID NO: 739899 - DNA, 120 bp, Artificial Sequence
  ENSG00000204186_70 (sequence is synthesized)
tattggcttggtaatatttgggcaggccattaattctcattagaaaattacttaatatttcaaaaaattgaataaaactggtaatctttgtggaggcccattttgcaagtggaaacctgt

SEQ ID NO: 739900 - DNA, 120 bp, Artificial Sequence
  ENSG00000204186_71 (sequence is synthesized)
atttatacattagtttgtctttaactatttgttaacagattttaacagttcaaatgaaagatgttaacgagatgcagtttgagtctgggatactcagaatagatccagaacctttattca

SEQ ID NO: 739901 - DNA, 120 bp, Artificial Sequence
  ENSG00000204186_72 (sequence is synthesized)
gggacactggttgagttggtacagatgcattcagttgtcattcattcgtgttaagccaagatcctggatcttctatcattaatgttaagaggaaacatgaattacaactatattgtatga

SEQ ID NO: 739902 - DNA, 120 bp, Artificial Sequence
  ENSG00000204186_73 (sequence is synthesized)
ctgccatattttattgaaactaaggtcaatgttgaaccatatcttgatttcagaatttaaaatgtgttaccttagaaataatgaaatatagtgtaacagttggtttctaaatgtggtttt

SEQ ID NO: 739903 - DNA, 120 bp, Artificial Sequence
  ENSG00000204186_74 (sequence is synthesized)
atttcaggggccattatttaacctgtgtgtatgctatgatggagttcttttgtgatttctttacttctaaatttaaatagtaattatgtttaaaaacaaatgtttttgtctttagttgca

SEQ ID NO: 739904 - DNA, 120 bp, Artificial Sequence
  ENSG00000204186_75 (sequence is synthesized)
aagcagcatatatctcatttccttcaaccttgcctcctcatacacaaatatattttcatttcttaaaagatcactgggccagtagttcaaaataatcctccaattttaatttaggaacaa

SEQ ID NO: 739905 - DNA, 120 bp, Artificial Sequence
  ENSG00000204186_76 (sequence is synthesized)
agctttgtcctactgactaggaagtaaacaaacagctgatatataagatatttgtgggtattggtgtcttttttccctatggaatagacacatagttcccttaaatattattaatagaca

SEQ ID NO: 739906 - DNA, 120 bp, Artificial Sequence
  ENSG00000204186_77 (sequence is synthesized)
ttctacagtctttcagtgtaagtttaaaagcaagagatcaaatgaaaatgtgtactatgtacctatgatgtgtcatatcgtgattacatcatgcagagagaacagttcctgtaattcaag

SEQ ID NO: 739907 - DNA, 120 bp, Artificial Sequence
  ENSG00000204186_78 (sequence is synthesized)
taattaaaatttcaagttgtaaaaatgttaccattttcacattggaagcccttctaagtaccattttcattgggggcagggagaaggtttatatttaaattttatattaccagacataaa

SEQ ID NO: 739908 - DNA, 120 bp, Artificial Sequence
  ENSG00000204186_79 (sequence is synthesized)
agtacagtgcagtactgatgattttgtttaaagtttttgaaatgttttgtttactaagttcttgtaatcattattttagacaagcttgaaaacttgaaattgttgaaacttataatttaa

SEQ ID NO: 739909 - DNA, 120 bp, Artificial Sequence
  ENSG00000204186_80 (sequence is synthesized)
attaaattggaaattactttcagaatttggtagtatacaagatgtgcccctttgtctaaataaatgttggcttaatttgcagaatagataaaacaattgatgtttttgtgtgttcaagaa

SEQ ID NO: 739910 - DNA, 120 bp, Artificial Sequence
  ENSG00000204186_81 (sequence is synthesized)
tgcattaaattcttttaatagtaaaaagtcaaattacgaccataatgagtattttaatcttgttcttgttcagtattttgcgtagatttttattgtaattgtcctgagttctacagtatg

SEQ ID NO: 739911 - DNA, 120 bp, Artificial Sequence
  ENSG00000204186_82 (sequence is synthesized)
tgaacaatatcgtgtgaagtgtgtttttgcatttgtgcatttaaattatttatgtaactagggctgtgagtaacactttttttttttttttttggttaaagaaaagctatatttaaatat

SEQ ID NO: 739912 - DNA, 120 bp, Artificial Sequence
  ENSG00000204186_83 (sequence is synthesized)
tcaaataattatatatttccatgtaaaactaatgtgaagactaatgtattttttatattgcagtgtaaaagctaaacttgtttttgatgttatcaagataaaatttattaaaccttgaaa

SEQ ID NO: 739913 - DNA, 120 bp, Artificial Sequence
  ENSG00000204186_84 (sequence is synthesized)
gggcgcccggggcgccttcttcccgagggacgccaggaccgctcgctgggctcccgcggccgcctcgcaggtcctcggcttccccccaccccgcgtccctttctgcccctgctgcgtgag

SEQ ID NO: 739914 - DNA, 120 bp, Artificial Sequence
  ENSG00000204186_85 (sequence is synthesized)
gggggagggacgatggaggcagcctgtagcgatctcatcctcgagagaatctgctaacaatttggggggtatctttccttcctttttaattaatacacaaacatatatacgtgtgttaca

SEQ ID NO: 739915 - DNA, 120 bp, Artificial Sequence
  ENSG00000204186_86 (sequence is synthesized)
taaggggtgtttatttgcttttttcacttaatacgtggaagaccttttctctatcgtttgaacctaaagcctagaaggcaagaaagcaactcgttagagagttgataaagtatcactgca

SEQ ID NO: 739916 - DNA, 120 bp, Artificial Sequence
  ENSG00000204186_87 (sequence is synthesized)
gtggccagtgatttggatagaaataagctgaattcaggatacttgccagaactaatacagctgatgaaatacctgaccttttctgctccaggttaataagtgaagtaaattagtggaaaa

SEQ ID NO: 739917 - DNA, 120 bp, Artificial Sequence
  ENSG00000204193_0 (sequence is synthesized)
cctggtgtaatcatggtacagattattaaagacacgaatgaatttaaaacatttttgacagctgccggacacaaactcgcagtggttcaattttcttcgaaacggtgtggtccctgcaaa

SEQ ID NO: 739918 - DNA, 120 bp, Artificial Sequence
  ENSG00000204193_1 (sequence is synthesized)
ttgtcacatcaaaacaatacccacatttcagatgttcaagaaaagccagaaggtaaccctattctcaagaatcaaaagaataatttgctgttatagaagtggattcatgagcaacctgtg

SEQ ID NO: 739919 - DNA, 120 bp, Artificial Sequence
  ENSG00000204193_2 (sequence is synthesized)
tcttgcagatgatggaaatgagtaggatttaacttttcaatcaggaataaaattccttaaagcctcaacattttcgcagcacttgaatcaataaatgtttcacctttgtgcatttgtgaa

SEQ ID NO: 739920 - DNA, 120 bp, Artificial Sequence
  ENSG00000204193_3 (sequence is synthesized)
cagaagggctccatctccaggcctacaccaaccagtgaactccatccccatcagaaatggacccttgactccagtcaagccaatccaagtcaaaccagagctaatttcaggactttgctt

SEQ ID NO: 739921 - DNA, 120 bp, Artificial Sequence
  ENSG00000204193_4 (sequence is synthesized)
aagcagctaggtaaataaccttctcctttgatatcactggatttgaatttgggaagatatgagtctgaagctactacagcttgtcaccatgtaaaacctgaaaacgaatctaccacacag

SEQ ID NO: 739922 - DNA, 120 bp, Artificial Sequence
  ENSG00000204193_5 (sequence is synthesized)
aagaaaacagagtcaagccaagagtactaatggcattgactgcaccctgaatctatccatgcctgaagcctacactatccccatagattcttcagctatgtaaactctgggttggtttct

SEQ ID NO: 739923 - DNA, 120 bp, Artificial Sequence
  ENSG00000204193_6 (sequence is synthesized)
ctgtcacttgcaacccaaaaaattctgatgaacatatctggtgttctcccaggctactctccttcatttcatggtgtaattgttaaaagagtagaatatatttgcagtttccaattctca

SEQ ID NO: 739924 - DNA, 120 bp, Artificial Sequence
  ENSG00000204193_7 (sequence is synthesized)
ttttccactcattccctcatctatttatctatttatctttctgtcctctctaaagtcaccaaggatctccctgcacctaatttaaatagccatttctcaattcttgattccttagctaca

SEQ ID NO: 739925 - DNA, 120 bp, Artificial Sequence
  ENSG00000204193_8 (sequence is synthesized)
gtcaaatatatccgttttggatatctatctttttggttcaatccatttcccattctacctctctcctttagcaatgtcattcctacttctagttccatctataaatacttttttacttag

SEQ ID NO: 739926 - DNA, 120 bp, Artificial Sequence
  ENSG00000204193_9 (sequence is synthesized)
acaattgcaatgccccctcctcaccctcaacttagcaccatatctctgttctccagatttgtgcacagctccctgtatggcatccttttttaacatgtgatgtcctccccctccattgcc

SEQ ID NO: 739927 - DNA, 120 bp, Artificial Sequence
  ENSG00000204193_10 (sequence is synthesized)
tatagaatcaaggctaaaccattgtatttaaggctggcattcaagtttctccataattttgacccaatctactgctccaagcctttctctgtttaactcagatcttcatgtatttttctc

SEQ ID NO: 739928 - DNA, 120 bp, Artificial Sequence
  ENSG00000204193_11 (sequence is synthesized)
atactagtccaagcacctgaaggaggtcatgtctgatttgaaagctcagtgactagaagaatcccaagtggatagaaaatactcatgatgtgtgtgatgaatgagtgagtgcatgaatga

SEQ ID NO: 739929 - DNA, 120 bp, Artificial Sequence
  ENSG00000204193_12 (sequence is synthesized)
atgaatgaatgcttctgttttttccctgcatcccactgccagctcagcctctcctcctgattctgtcctggtaccaacctgattcagggcaagtttctctccagttcagtataattttct

SEQ ID NO: 739930 - DNA, 120 bp, Artificial Sequence
  ENSG00000204193_13 (sequence is synthesized)
ggttttattcctgctgctgctgatattgtttggtagctgctgccactcaacagtttttactccattttatgatgacacaagactctgagttctcaactgattttgtgtctatgctcttga

SEQ ID NO: 739931 - DNA, 120 bp, Artificial Sequence
  ENSG00000204193_14 (sequence is synthesized)
accaattcaagctatgcttttgaggaaaggcatggccctgcttggtctcaattctgtatggggatggaagtgccctcaataagctggggagagaggacatttataaacaattatatctaa

SEQ ID NO: 739932 - DNA, 120 bp, Artificial Sequence
  ENSG00000204195_0 (sequence is synthesized)
actgttctgagatctttgcctccctcaggctcccgagaatcatggctcattccaagcagcctagtcacttccagagtctgatgcttctgcagtggcctttgagctaccttgccatctttt

SEQ ID NO: 739933 - DNA, 120 bp, Artificial Sequence
  ENSG00000204195_1 (sequence is synthesized)
ggatcttgcagccattgttcgtctacctgctgtttacatccttgtggccgctaccagtgctttactttgcctggttgttcctggactggaagaccccagagcgaggtggcaggcgttcgg

SEQ ID NO: 739934 - DNA, 120 bp, Artificial Sequence
  ENSG00000204195_2 (sequence is synthesized)
cctgggtaaggaactggtgtgtctggacccacatcagggactatttccccattacgatcctgaagacaaaggacctatcacctgagcacaactacctcatgggggttcacccccatggcc

SEQ ID NO: 739935 - DNA, 120 bp, Artificial Sequence
  ENSG00000204195_3 (sequence is synthesized)
tcctgacctttggcgccttctgcaacttctgcactgaggccacaggcttctcgaagaccttcccaggcatcactcctcacttggccacgctgtcctggttcttcaagatcccctttgtta

SEQ ID NO: 739936 - DNA, 120 bp, Artificial Sequence
  ENSG00000204195_4 (sequence is synthesized)
gggagtacctcatggccaaaggtgtgtgctctgtgagccagccagccatcaactatctgctgagccatggcactggcaacctcgtgggcattgtagtgggaggtgtgggtgaggccctgc

SEQ ID NO: 739937 - DNA, 120 bp, Artificial Sequence
  ENSG00000204195_5 (sequence is synthesized)
catctggtccccaccttcacttttggggaaactgaggtgtatgatcaggtgctgttccataaggatagcaggatgtacaagttccagagctgcttccgccgtatctttggtttctactgt

SEQ ID NO: 739938 - DNA, 120 bp, Artificial Sequence
  ENSG00000204195_6 (sequence is synthesized)
tgtgtcttctatggacaaagcttctgtcaaggctccactgggctcctgccatactccaggcctattgtcactgtggttggggagcctctgccactgccccaaattgaaaagccaagccag

SEQ ID NO: 739939 - DNA, 120 bp, Artificial Sequence
  ENSG00000204195_7 (sequence is synthesized)
gagatggtggacaaataccatgcactttatatggatgctctgcacaaactgttcgaccagcataagacccactatggctgctcagagacccaaaagctgtttttcctgtgaatgaaggta

SEQ ID NO: 739940 - DNA, 120 bp, Artificial Sequence
  ENSG00000204195_8 (sequence is synthesized)
ctgcatgcccaggagcacaggagtgcctgccttgaagaagagactcatctgccactaaccaaagacaggcaggagatgagggaggttatatgtggtaggggagggcatgaggaattcctt

SEQ ID NO: 739941 - DNA, 120 bp, Artificial Sequence
  ENSG00000204195_9 (sequence is synthesized)
ctttgccttcttgccacagggtccttacaggaattctttctgaagagctgcacacagtcattcctcaaaggagggcatcctagtgcccctcatgctggggcctgatgcctggtcatcatt

SEQ ID NO: 739942 - DNA, 120 bp, Artificial Sequence
  ENSG00000204195_10 (sequence is synthesized)
tgagtcctctgggacacattagcagtcactgcatattcccccagcccctgggcaactatctactttctgtctctgtggatttgccaattctgaacattttatataaatggaataatacaa

SEQ ID NO: 739943 - DNA, 120 bp, Artificial Sequence
  ENSG00000204209_0 (sequence is synthesized)
atatggcggcgcttagttgcatgaaggcggaaactctgtgacttccggtccgtagtggggcctgcggtgggagtgggaaggaaggcggagggaaccatgcgaggttctgagaattgcggc

SEQ ID NO: 739944 - DNA, 120 bp, Artificial Sequence
  ENSG00000204209_1 (sequence is synthesized)
gagggtcgcctcgagagacggtttctgaggaattctgaaatccccaccacttcctccctccgggggatttgatcccctatggccaccgctaacagcatcatcgtgctggatgatgatgac

SEQ ID NO: 739945 - DNA, 120 bp, Artificial Sequence
  ENSG00000204209_2 (sequence is synthesized)
gaagatgaagcagctgctcagccagggccctcccacccactccccaatgcggcctcacctggggcagaagcccctagctcctctgagcctcatggggccagaggaagcagtagttcgggc

SEQ ID NO: 739946 - DNA, 120 bp, Artificial Sequence
  ENSG00000204209_3 (sequence is synthesized)
ggcaagaaatgctacaagctggagaatgagaagctgttcgaagagttccttgaactttgtaagatgcagacagcagaccaccctgaggtggtcccattcctctataaccggcagcaacgt

SEQ ID NO: 739947 - DNA, 120 bp, Artificial Sequence
  ENSG00000204209_4 (sequence is synthesized)
gcccactctctgtttttggcctcggcggagttctgcaacatcctctctagggtcctgtctcgggcccggagccggccagccaagctctatgtctacatcaatgagctctgcactgttctc

SEQ ID NO: 739948 - DNA, 120 bp, Artificial Sequence
  ENSG00000204209_5 (sequence is synthesized)
aaggcccactcagccaaaaagaagctgaacttggcccctgccgccaccacctccaatgagccctctgggaataaccctcccacacacctctccttggaccccacaaatgctgaaaacact

SEQ ID NO: 739949 - DNA, 120 bp, Artificial Sequence
  ENSG00000204209_6 (sequence is synthesized)
gcctctcagtctccaaggacccgtggttcccggcggcagatccagcgtttggagcagctgctggcgctctatgtggcagagatccggcggctgcaggaaaaggagttggatctctcagaa

SEQ ID NO: 739950 - DNA, 120 bp, Artificial Sequence
  ENSG00000204209_7 (sequence is synthesized)
ttggatgacccagactccgcatacctgcaggaggcacggttgaagcgtaagctgatccgcctctttgggcgactatgtgagctgaaagactgctcttcactgaccggccgtgtcatagag

SEQ ID NO: 739951 - DNA, 120 bp, Artificial Sequence
  ENSG00000204209_8 (sequence is synthesized)
cagcgcatcccctaccgtggcacccgctacccagaggttaacaggcgcattgagcggctcatcaacaagccagggcctgataccttccctgactatggggatgtgcttcgggctgtagag

SEQ ID NO: 739952 - DNA, 120 bp, Artificial Sequence
  ENSG00000204209_9 (sequence is synthesized)
aaggcagctgcccgacacagccttggcctcccccgacagcagctccagctcatggctcaggatgccttccgagatgtgggcatcaggttacaggagcgacgtcacctcgatctcatctac

SEQ ID NO: 739953 - DNA, 120 bp, Artificial Sequence
  ENSG00000204209_10 (sequence is synthesized)
aaaccggagtttggccatgagtcggctggatgaggtcatctccaaatatgcaatgttgcaagacaaaagtgaggagggcgagagaaaaaagagaagagctcggctccaaggcacctcttc

SEQ ID NO: 739954 - DNA, 120 bp, Artificial Sequence
  ENSG00000204209_11 (sequence is synthesized)
ccactctgcagacacccccgaagcctccttggattctggtgagggccctagtggaatggcatcccaggggtgcccttctgcctccagagctgagacagatgacgaagacgatgaggagag

SEQ ID NO: 739955 - DNA, 120 bp, Artificial Sequence
  ENSG00000204209_12 (sequence is synthesized)
tgatgaggaagaggaggaggaggaggaagaagaagaggaggaggccacagattctgaagaggaggaggatctggaacagatgcaggagggtcaggaggatgatgaagaggaggacgaaga

SEQ ID NO: 739956 - DNA, 120 bp, Artificial Sequence
  ENSG00000204209_13 (sequence is synthesized)
ggaagaagcagcagcaggtaaagatggagacaagagccccatgtcctcactacagatctccaatgaaaagaacctggaacctggcaaacagatcagcagatcttcaggggagcagcaaaa

SEQ ID NO: 739957 - DNA, 120 bp, Artificial Sequence
  ENSG00000204209_14 (sequence is synthesized)
caaaggacgcatagtgtcaccatcgttactgtcagaagaacccctggccccctccagcatagatgctgaaagcaatggagaacagcctgaggagctgaccctggaggaagaaagccctgt

SEQ ID NO: 739958 - DNA, 120 bp, Artificial Sequence
  ENSG00000204209_15 (sequence is synthesized)
gtctcagctctttgagctagagattgaagctttgcccctggataccccttcctctgtggagacggacatttcctcttccaggaagcaatcagaggagcccttcaccactgtcttagagaa

SEQ ID NO: 739959 - DNA, 120 bp, Artificial Sequence
  ENSG00000204209_16 (sequence is synthesized)
tggagcaggcatggtctcttctacttccttcaatggaggcgtctctcctcacaactggggagattctggtcccccctgcaaaaaatctcggaaggagaagaagcaaacaggatcagggcc

SEQ ID NO: 739960 - DNA, 120 bp, Artificial Sequence
  ENSG00000204209_17 (sequence is synthesized)
attaggaaacagctatgtggaaaggcaaaggtcagtgcatgagaagaatgggaaaaagatatgtaccctgcccagcccaccttcccccttggcttccttggccccagttgctgattcctc

SEQ ID NO: 739961 - DNA, 120 bp, Artificial Sequence
  ENSG00000204209_18 (sequence is synthesized)
cacgagggtggactctcccagccatggcctggtgaccagctccctctgcatcccttctccagcccggctgtcccaaaccccccattcacagcctcctcggcctggtacttgcaagacaag

SEQ ID NO: 739962 - DNA, 120 bp, Artificial Sequence
  ENSG00000204209_19 (sequence is synthesized)
tgtggccacacaatgcgatccagaagagatcatcgtgctctcagactctgattagctgcctccccttctccctgcctccagaatgttctgggataacatttggaggaaggtgggaagcag

SEQ ID NO: 739963 - DNA, 120 bp, Artificial Sequence
  ENSG00000204209_20 (sequence is synthesized)
atgactgaggaagggatggactaagctaatccccttttggtggtgtttctttaaaaaaaaaaaaaagcttaagttttacacagaaacattaataaacaataaagttcttttcttactgta

SEQ ID NO: 739964 - DNA, 120 bp, Artificial Sequence
  ENSG00000204209_21 (sequence is synthesized)
ctgttcgaagaggtgagctttagcggggaagattgttgtaccccagggagggggatggctgactggttctcctgtcctttctttcccactaaccccacctcccctttctctcaaccccct

SEQ ID NO: 739965 - DNA, 120 bp, Artificial Sequence
  ENSG00000204209_22 (sequence is synthesized)
ttggggagagctgggcgctgagtctgaggggaaagctgtggtaccttcctgtccctgaaagggagtggagcggccgggggctgaactgggggagggggatttggcgggaagcgcatctag

SEQ ID NO: 739966 - DNA, 120 bp, Artificial Sequence
  ENSG00000204209_23 (sequence is synthesized)
ggtgggagtgggaaggaaggcggagggaaccatgcgaggttctgagaattgcggcgagggtcgcctcgagagacggtttctgaggggctcattctgaggccccatccccttccagcagga

SEQ ID NO: 739967 - DNA, 120 bp, Artificial Sequence
  ENSG00000204209_24 (sequence is synthesized)
agaaaaaagagaagagctcggctccaaggcacctcttcccactctgcagacacccccgaagcctccttggattctggtgaggtgtggatggggtacagccttcagagagacattgtcctt

SEQ ID NO: 739968 - DNA, 120 bp, Artificial Sequence
  ENSG00000204209_25 (sequence is synthesized)
cccctgcactggccaccagggagtccaggttgactgatgggggagcatgagaaggaaagcaagaaccaaaccctctggggcaagggattccttagagaaacttctttgtctcccagggcc

SEQ ID NO: 739969 - DNA, 120 bp, Artificial Sequence
  ENSG00000204217_0 (sequence is synthesized)
gactcccccctttgtgtctggtctgctcggagccactggaagtgcctcccggagggacgcagggtgtctcgccgcctccctgcccacccccttccccggctaccttcatccgccctcccg

SEQ ID NO: 739970 - DNA, 120 bp, Artificial Sequence
  ENSG00000204217_1 (sequence is synthesized)
cacccccttccccggctaccttcatccgccctcccgccgccccccgccctcggtccgcgacgcccgagttccgtcaggagcccagagctgcgggagaacgaggcggcggcggcggcggcg

SEQ ID NO: 739971 - DNA, 120 bp, Artificial Sequence
  ENSG00000204217_2 (sequence is synthesized)
gggggttgtgattcgctcacaggagccattgacgggagaagaggaggctttcttggtggaatttacctcaggcaagatcgagccgcaggaataaaaagcgaggaagggaagggagcgccg

SEQ ID NO: 739972 - DNA, 120 bp, Artificial Sequence
  ENSG00000204217_3 (sequence is synthesized)
ccgggaggactagaaggggcagcctctcacacccactccgcctgccgtctcggggagcccggaccggggccgcgaccgcgacccctcccctcccccgctcctacctctcctcagccttcg

SEQ ID NO: 739973 - DNA, 120 bp, Artificial Sequence
  ENSG00000204217_4 (sequence is synthesized)
ccagggcctccccaaccctctcacggttgttctgcgaaggcgtggggactgtgagcttgtccatggaggcaggcaccttttttgatccagtcaaggaagaggatttgttgttttcgaaat

SEQ ID NO: 739974 - DNA, 120 bp, Artificial Sequence
  ENSG00000204217_5 (sequence is synthesized)
cagagtgaaggaagcaccgaagcgaaacttaaggaatcctgccttcccggagccgcgggcgatgcgactagggctgccgggcgccgccgccgcccgtccggcttcgtccttcccggcagt

SEQ ID NO: 739975 - DNA, 120 bp, Artificial Sequence
  ENSG00000204217_6 (sequence is synthesized)
cgggaactagttctgaccctcgccccccgaccccggatcgaatccccgccctccgcaccctggatatgttttctcccagacctggatatttttttgatatcgtgaaactacgagggaaat

SEQ ID NO: 739976 - DNA, 120 bp, Artificial Sequence
  ENSG00000204217_7 (sequence is synthesized)
aatttgggggatttcttcttggctccctgctttccccacagacatgccttccgtttggagggccgcggcaccccgtccgaggcgaaggaacccccccagccgcgagggagagaaatgaag

SEQ ID NO: 739977 - DNA, 120 bp, Artificial Sequence
  ENSG00000204217_8 (sequence is synthesized)
ggaatttctgcagcggcatgaaagctctgcagctaggtcctctcatcagccatttgtcctttcaaactgtattgtgatacgggcaggatcagtccacgggagagaagacgagcctcccgg

SEQ ID NO: 739978 - DNA, 120 bp, Artificial Sequence
  ENSG00000204217_9 (sequence is synthesized)
ctgtttctccgccggtctacttcccatatttcttttctttgccctcctgattcttggctggcccagggatgacttcctcgctgcagcggccctggcgggtgccctggctaccatggacca

SEQ ID NO: 739979 - DNA, 120 bp, Artificial Sequence
  ENSG00000204217_10 (sequence is synthesized)
tcctgctggtcagcactgcggctgcttcgcagaatcaagaacggctatgtgcgtttaaagatccgtatcagcaagaccttgggataggtgagagtagaatctctcatgaaaatgggacaa

SEQ ID NO: 739980 - DNA, 120 bp, Artificial Sequence
  ENSG00000204217_11 (sequence is synthesized)
tattatgctcgaaaggtagcacctgctatggcctttgggagaaatcaaaaggggacataaatcttgtaaaacaaggatgttggtctcacattggagatccccaagagtgtcactatgaag

SEQ ID NO: 739981 - DNA, 120 bp, Artificial Sequence
  ENSG00000204217_12 (sequence is synthesized)
aatgtgtagtaactaccactcctccctcaattcagaatggaacataccgtttctgctgttgtagcacagatttatgtaatgtcaactttactgagaattttccacctcctgacacaacac

SEQ ID NO: 739982 - DNA, 120 bp, Artificial Sequence
  ENSG00000204217_13 (sequence is synthesized)
cactcagtccacctcattcatttaaccgagatgagacaataatcattgctttggcatcagtctctgtattagctgttttgatagttgccttatgctttggatacagaatgttgacaggag

SEQ ID NO: 739983 - DNA, 120 bp, Artificial Sequence
  ENSG00000204217_14 (sequence is synthesized)
accgtaaacaaggtcttcacagtatgaacatgatggaggcagcagcatccgaaccctctcttgatctagataatctgaaactgttggagctgattggccgaggtcgatatggagcagtat

SEQ ID NO: 739984 - DNA, 120 bp, Artificial Sequence
  ENSG00000204217_15 (sequence is synthesized)
ataaaggctccttggatgagcgtccagttgctgtaaaagtgttttcctttgcaaaccgtcagaattttatcaacgaaaagaacatttacagagtgcctttgatggaacatgacaacattg

SEQ ID NO: 739985 - DNA, 120 bp, Artificial Sequence
  ENSG00000204217_16 (sequence is synthesized)
cccgctttatagttggagatgagagagtcactgcagatggacgcatggaatatttgcttgtgatggagtactatcccaatggatctttatgcaagtatttaagtctccacacaagtgact

SEQ ID NO: 739986 - DNA, 120 bp, Artificial Sequence
  ENSG00000204217_17 (sequence is synthesized)
gggtaagctcttgccgtcttgctcattctgttactagaggactggcttatcttcacacagaattaccacgaggagatcattataaacctgcaatttcccatcgagatttaaacagcagaa

SEQ ID NO: 739987 - DNA, 120 bp, Artificial Sequence
  ENSG00000204217_18 (sequence is synthesized)
atgtcctagtgaaaaatgatggaacctgtgttattagtgactttggactgtccatgaggctgactggaaatagactggtgcgcccaggggaggaagataatgcagccataagcgaggttg

SEQ ID NO: 739988 - DNA, 120 bp, Artificial Sequence
  ENSG00000204217_19 (sequence is synthesized)
gcactatcagatatatggcaccagaagtgctagaaggagctgtgaacttgagggactgtgaatcagctttgaaacaagtagacatgtatgctcttggactaatctattgggagatattta

SEQ ID NO: 739989 - DNA, 120 bp, Artificial Sequence
  ENSG00000204217_20 (sequence is synthesized)
tgagatgtacagacctcttcccaggggaatccgtaccagagtaccagatggcttttcagacagaggttggaaaccatcccacttttgaggatatgcaggttctcgtgtctagggaaaaac

SEQ ID NO: 739990 - DNA, 120 bp, Artificial Sequence
  ENSG00000204217_21 (sequence is synthesized)
agagacccaagttcccagaagcctggaaagaaaatagcctggcagtgaggtcactcaaggagacaatcgaagactgttgggaccaggatgcagaggctcggcttactgcacagtgtgctg

SEQ ID NO: 739991 - DNA, 120 bp, Artificial Sequence
  ENSG00000204217_22 (sequence is synthesized)
aggaaaggatggctgaacttatgatgatttgggaaagaaacaaatctgtgagcccaacagtcaatccaatgtctactgctatgcagaatgaacgcaacctgtcacataataggcgtgtgc

SEQ ID NO: 739992 - DNA, 120 bp, Artificial Sequence
  ENSG00000204217_23 (sequence is synthesized)
caaaaattggtccttatccagattattcttcctcctcatacattgaagactctatccatcatactgacagcatcgtgaagaatatttcctctgagcattctatgtccagcacacctttga

SEQ ID NO: 739993 - DNA, 120 bp, Artificial Sequence
  ENSG00000204217_24 (sequence is synthesized)
ctataggggaaaaaaaccgaaattcaattaactatgaacgacagcaagcacaagctcgaatccccagccctgaaacaagtgtcaccagcctctccaccaacacaacaaccacaaacacca

SEQ ID NO: 739994 - DNA, 120 bp, Artificial Sequence
  ENSG00000204217_25 (sequence is synthesized)
caggactcacgccaagtactggcatgactactatatctgagatgccatacccagatgaaacaaatctgcataccacaaatgttgcacagtcaattgggccaacccctgtctgcttacagc

SEQ ID NO: 739995 - DNA, 120 bp, Artificial Sequence
  ENSG00000204217_26 (sequence is synthesized)
tgacagaagaagacttggaaaccaacaagctagacccaaaagaagttgataagaacctcaaggaaagctctgatgagaatctcatggagcactctcttaaacagttcagtggcccagacc

SEQ ID NO: 739996 - DNA, 120 bp, Artificial Sequence
  ENSG00000204217_27 (sequence is synthesized)
cactgagcagtactagttctagcttgctttacccactcataaaacttgcagtagaagcaactggacagcaggacttcacacagactgcaaatggccaagcatgtttgattcctgatgttc

SEQ ID NO: 739997 - DNA, 120 bp, Artificial Sequence
  ENSG00000204217_28 (sequence is synthesized)
tgcctactcagatctatcctctccccaagcagcagaaccttcccaagagacctactagtttgcctttgaacaccaaaaattcaacaaaagagccccggctaaaatttggcagcaagcaca

SEQ ID NO: 739998 - DNA, 120 bp, Artificial Sequence
  ENSG00000204217_29 (sequence is synthesized)
aatcaaacttgaaacaagtcgaaactggagttgccaagatgaatacaatcaatgcagcagaacctcatgtggtgacagtcaccatgaatggtgtggcaggtagaaaccacagtgttaact

SEQ ID NO: 739999 - DNA, 120 bp, Artificial Sequence
  ENSG00000204217_30 (sequence is synthesized)
cccatgctgccacaacccaatatgccaatgggacagtactatctggccaaacaaccaacatagtgacacatagggcccaagaaatgttgcagaatcagtttattggtgaggacacccggc

SEQ ID NO: 740000 - DNA, 120 bp, Artificial Sequence
  ENSG00000204217_31 (sequence is synthesized)
tgaatattaattccagtcctgatgagcatgagcctttactgagacgagagcaacaagctggccatgatgaaggtgttctggatcgtcttgtggacaggagggaacggccactagaaggtg

SEQ ID NO: 740001 - DNA, 120 bp, Artificial Sequence
  ENSG00000204217_32 (sequence is synthesized)
gccgaactaattccaataacaacaacagcaatccatgttcagaacaagatgttcttgcacagggtgttccaagcacagcagcagatcctgggccatcaaagcccagaagagcacagaggc

SEQ ID NO: 740002 - DNA, 120 bp, Artificial Sequence
  ENSG00000204217_33 (sequence is synthesized)
ctaattctctggatctttcagccacaaatgtcctggatggcagcagtatacagataggtgagtcaacacaagatggcaaatcaggatcaggtgaaaagatcaagaaacgtgtgaaaactc

SEQ ID NO: 740003 - DNA, 120 bp, Artificial Sequence
  ENSG00000204217_34 (sequence is synthesized)
cctattctcttaagcggtggcgcccctccacctgggtcatctccactgaatcgctggactgtgaagtcaacaataatggcagtaacagggcagttcattccaaatccagcactgctgttt

SEQ ID NO: 740004 - DNA, 120 bp, Artificial Sequence
  ENSG00000204217_35 (sequence is synthesized)
accttgcagaaggaggcactgctacaaccatggtgtctaaagatataggaatgaactgtctgtgaaatgttttcaagcctatggagtgaaattattttttgcatcatttaaacatgcaga

SEQ ID NO: 740005 - DNA, 120 bp, Artificial Sequence
  ENSG00000204217_36 (sequence is synthesized)
agatgtttaaaaataaaaaaaaaactgctttatcctcctgtcagcaccccctcccacccctgcaacaaagacttgctttaaatagatttcagctatgcagaaaaatttagcttatgcttc

SEQ ID NO: 740006 - DNA, 120 bp, Artificial Sequence
  ENSG00000204217_37 (sequence is synthesized)
catatttttaaattttgttttttaagttttgcacttttgtttagtctcgctaaagttatatttgtctgttatgaccacagagttatatgtgtgtgtatcaaaagtggtctcaaaatattt

SEQ ID NO: 740007 - DNA, 120 bp, Artificial Sequence
  ENSG00000204217_38 (sequence is synthesized)
ttttaagaaaaaaagcaaaaacaatgtattgctgataatcagtttggaccagtttcttaaggtcattaaaacagaagcaaattaagacaggtttgactgcagtggtgtctggtatccatg

SEQ ID NO: 740008 - DNA, 120 bp, Artificial Sequence
  ENSG00000204217_39 (sequence is synthesized)
ttttatttctgggcacaagctagtttttatgttgatacgttcctgaacatattatcttgttggacatcttttctcttgtgttttgtttgaatgtgcaatagtttataggccacaaataag

SEQ ID NO: 740009 - DNA, 120 bp, Artificial Sequence
  ENSG00000204217_40 (sequence is synthesized)
ctttcttgtaagctctcttcctaacagggcacatattcttccataatataaacacttttctgccccatctcccatacttttgaaggtcagttctatgacagtgaattttgcacaggagaa

SEQ ID NO: 740010 - DNA, 120 bp, Artificial Sequence
  ENSG00000204217_41 (sequence is synthesized)
gcagctacctgatttcttactttctctctccttatcatggagaatacagaaacattgtctgaaagggctctaaagaaggaactaccaaaacctgacttgaaatgccatttcttttaacct

SEQ ID NO: 740011 - DNA, 120 bp, Artificial Sequence
  ENSG00000204217_42 (sequence is synthesized)
tccaaatcctaaatgtttccttcaaggcatcttaataaacttatttgcttctggttttgggagttcataagagagaatagaacaaaatacaggacatcaaatattagccatttcccattt

SEQ ID NO: 740012 - DNA, 120 bp, Artificial Sequence
  ENSG00000204217_43 (sequence is synthesized)
tattttatttttctatgtaggttcatgttccatgttcatttatttaagaaatacatttttattggtaagcttatagagctacacttatggaatttttaagtaggtaaataaatggttaag

SEQ ID NO: 740013 - DNA, 120 bp, Artificial Sequence
  ENSG00000204217_44 (sequence is synthesized)
acaaaatagtgttatagccttcattctctgaataggccatctttgactcataaaattacccttactgtttattataacttcagaagtaatttatagttctgaacctatagtatcttttac

SEQ ID NO: 740014 - DNA, 120 bp, Artificial Sequence
  ENSG00000204217_45 (sequence is synthesized)
cctgttcccaagcaaagactggtgactttatctgaaaatgattcctcttcccatgacctaaaacactgtgaggaaaaatcattcaagtggcatgccaagtccctatgaaggaagggctgc

SEQ ID NO: 740015 - DNA, 120 bp, Artificial Sequence
  ENSG00000204217_46 (sequence is synthesized)
tatcaaacctaccttttttgagcaaactgagactaaacttctctcttttcaaaattgtgttatcttccttaatcctattttcataatttttccttttgccagtttttcacattatctttg

SEQ ID NO: 740016 - DNA, 120 bp, Artificial Sequence
  ENSG00000204217_47 (sequence is synthesized)
atatgtgagcaacatttattatttacattagagtataccttttagtaataaaatgacttgaaatcatattatttttaaaagccctttgcttctttcattacttataatctcctctaaaac

SEQ ID NO: 740017 - DNA, 120 bp, Artificial Sequence
  ENSG00000204217_48 (sequence is synthesized)
aacctctgcatgttttttttaaataaagcactttctgtcaaataatggacttttttctaaacagaaattattttctattaatttgcaaactgatgatttcacttttttttactttttttt

SEQ ID NO: 740018 - DNA, 120 bp, Artificial Sequence
  ENSG00000204217_49 (sequence is synthesized)
cgattatcagagtacttagtaaatgttatatagtttagttctaagatagttccagggattaaaaggttaagaggaaaacacaaatcaccaaatttctgatttatgtttttatctcctgaa

SEQ ID NO: 740019 - DNA, 120 bp, Artificial Sequence
  ENSG00000204217_50 (sequence is synthesized)
ctgtccaaaatatttgtgatttacttgtatataagccttctcatttgccatgtgctgtgatcttacaagttagatgttactatacctaccatttattcagctggattgctgaacacagtt

SEQ ID NO: 740020 - DNA, 120 bp, Artificial Sequence
  ENSG00000204217_51 (sequence is synthesized)
ctggattcatagaattaagaatatcttgttagtgcccaggatttccacgttttgtgttttattggcccttttctttattcagccccttaatctattttcagtcttctggcacgtaatttt

SEQ ID NO: 740021 - DNA, 120 bp, Artificial Sequence
  ENSG00000204217_52 (sequence is synthesized)
tttcacagttattattcttctattaacaaattatttttatctttcctagtacattttcacttagttctcttgcccttaaatatctttcacatgcattttaggatattcttttcaaatatt

SEQ ID NO: 740022 - DNA, 120 bp, Artificial Sequence
  ENSG00000204217_53 (sequence is synthesized)
tgtaggacaactttgaatcaaaataaattatgttccttctccaatttgaagcattgaggataaatgaccatttgaggtctaactgatcttttcctgccagaagagttatcttacgttctg

SEQ ID NO: 740023 - DNA, 120 bp, Artificial Sequence
  ENSG00000204217_54 (sequence is synthesized)
ctatatttgtatttgggccagttgattgtaggttgtccaacattttttaatattgggaaaattatgataaaatgctttaaaaattaatatgccagattaaaataactgaatagtttacta

SEQ ID NO: 740024 - DNA, 120 bp, Artificial Sequence
  ENSG00000204217_55 (sequence is synthesized)
tttcattcaagcatgtttaaaacaaataatttcctttcaccagtttttcttagtaaactcctgaaaaagtaggaaaggtggaaagtatatatcatttttataaattttaaattgtacatc

SEQ ID NO: 740025 - DNA, 120 bp, Artificial Sequence
  ENSG00000204217_56 (sequence is synthesized)
agacttttaaaatctgtaatatacaagcaagcaaaattattttaaatgacttaattgtatgctaatactcatctgataataaatgcttcttaaagttgacatttaactgctatcacaaag

SEQ ID NO: 740026 - DNA, 120 bp, Artificial Sequence
  ENSG00000204217_57 (sequence is synthesized)
ttttatatgtagaaaagtggggtccttttgaataaaagatcattcaactaaaaatattaaaatttatttcactggatggtaatgtaaccttaaaagcatcataataggtaaagtctaata

SEQ ID NO: 740027 - DNA, 120 bp, Artificial Sequence
  ENSG00000204217_58 (sequence is synthesized)
ttagttcccttaacaaaatcctaactgtataccagaattaggtcactgaaagaacttgatttgaattacgtttagacaaaaatgatttaattgtaaattcttaaaactttctaaatgcat

SEQ ID NO: 740028 - DNA, 120 bp, Artificial Sequence
  ENSG00000204217_59 (sequence is synthesized)
aattggcaaaaaaaaaaacccactgttaccagtgtaggaagttacaagaaggcacatactgaatgctgaagtatacatatgctatttctcttaaacctcagagcaaccatatgagcattg

SEQ ID NO: 740029 - DNA, 120 bp, Artificial Sequence
  ENSG00000204217_60 (sequence is synthesized)
taattaatattcccattttacagatgaggaaactgaagctaagagaagctaagtaatatgcccaaggtccacatctagtaacagacaaagctgggatttcagtctatgtctgcctctctc

SEQ ID NO: 740030 - DNA, 120 bp, Artificial Sequence
  ENSG00000204217_61 (sequence is synthesized)
cacatctctttcatccataccacactgcctacatgccatatgacaggatgtgtaatgggctaacgtttatttaaaaagttcaggccaggtgcagtggcttatgcctataatccccgcact

SEQ ID NO: 740031 - DNA, 76 bp, Artificial Sequence
  ENSG00000204217_62 (sequence is synthesized)
caggccaggtgcagtggcttatgcctataatccccgcactttgggaggccgagccgggtggatcatgaggtcagac

SEQ ID NO: 740032 - DNA, 60 bp, Artificial Sequence
  ENSG00000204217_63 (sequence is synthesized)
tcaggcgacagagcaagactgcctcaaaaaaaaaacataaaaattcagtcactatactct

SEQ ID NO: 740033 - DNA, 120 bp, Artificial Sequence
  ENSG00000204217_64 (sequence is synthesized)
gcctcaaaaaaaaaacataaaaattcagtcactatactctggcacaattttcatttgtatatgagccaaaccacataccttaatgatttgggaagttaggcaaatatgagatatgtagac

SEQ ID NO: 740034 - DNA, 120 bp, Artificial Sequence
  ENSG00000204217_65 (sequence is synthesized)
atatctatgctgattgttgcttgagaaataattactaattctagacaaaactcaatcctgtatcttccatcatgaatcttaaaatcatttcacttcactcctaacatttcttacattgca

SEQ ID NO: 740035 - DNA, 120 bp, Artificial Sequence
  ENSG00000204217_66 (sequence is synthesized)
gaactaatggtaaagtaaattttacggaaaaagttaagatagctttgggaacagagacctttccctaaattgattccatagcagatttgggggaattaacaaagaatttcagtctcatca

SEQ ID NO: 740036 - DNA, 120 bp, Artificial Sequence
  ENSG00000204217_67 (sequence is synthesized)
atcctttgaatccatcttcaaaacttctgcttttaataactttagaaaatttactaatctatagaactaattgagtaggatataggaaggatacaaggatataatgtcctttttataaaa

SEQ ID NO: 740037 - DNA, 120 bp, Artificial Sequence
  ENSG00000204217_68 (sequence is synthesized)
gtttagtatagcttctttacatgtatccacttgttccagaaaatgtgcattggttctgaatgtgaaaatatttaaagagagaaaggaacactcaagtaagtgtgggcttcagtgggaatt

SEQ ID NO: 740038 - DNA, 120 bp, Artificial Sequence
  ENSG00000204217_69 (sequence is synthesized)
atcacaaaacattggcaagtatttttatttaaattattttcaaatttgacttctacagccaagtggaattggtaggctgtagctgttacactgaaatttctagtctttgtaagtgcctcc

SEQ ID NO: 740039 - DNA, 120 bp, Artificial Sequence
  ENSG00000204217_70 (sequence is synthesized)
tgaaagtcatttaaaatggaaaaatatttcaatgagcttttccttttttcatatttatggacatgaatattttattggagatcattaactcctagaatttgagattatatttccatacaa

SEQ ID NO: 740040 - DNA, 120 bp, Artificial Sequence
  ENSG00000204217_71 (sequence is synthesized)
cattttataaagttatgttgaacttactacctgttatgtgcaggttattatgtaactattcacagattgcttcatatattgctttatcttcccatctaacttcttaaagttaaaatccgg

SEQ ID NO: 740041 - DNA, 120 bp, Artificial Sequence
  ENSG00000204217_72 (sequence is synthesized)
acacacatgttgattatctagaccagtcattctggaaattgtaacactcccacataaaccccaggagactttttcagaatgcaatgtttctaaatgtactgttactggcagtttactctc

SEQ ID NO: 740042 - DNA, 120 bp, Artificial Sequence
  ENSG00000204217_73 (sequence is synthesized)
cagcatataaggttgcattttaacttttagattatgaactgtgcaaactttacccaaaactatcttgcatgattccctcctaaatatattccttgattaagtaaatctggcaaatcactg

SEQ ID NO: 740043 - DNA, 120 bp, Artificial Sequence
  ENSG00000204217_74 (sequence is synthesized)
tttgagctagttacataaaatttgttatcaagagaaggcttttctacaagtttccagattaacataaagaaaagagggaatcacagggcatttaagtgcaccttcccattactttcctta

SEQ ID NO: 740044 - DNA, 69 bp, Artificial Sequence
  ENSG00000204217_75 (sequence is synthesized)
tggatcacgaggtcaggggactgagatcatcctggctaacacgatgaaacctcatctctactaaaaata

SEQ ID NO: 740045 - DNA, 64 bp, Artificial Sequence
  ENSG00000204217_76 (sequence is synthesized)
acaggagaatcgtttgcacccgggaggcggaggttgttgcagtgagccgagatcgcgccaatgc

SEQ ID NO: 740046 - DNA, 88 bp, Artificial Sequence
  ENSG00000204217_77 (sequence is synthesized)
aaaaatcacctcatagtttatgtctgacttactccaaacctcagttatctgatttgtagtctgtgtcaggaaagttttcttcatatct

SEQ ID NO: 740047 - DNA, 120 bp, Artificial Sequence
  ENSG00000204217_78 (sequence is synthesized)
ctgatttgtagtctgtgtcaggaaagttttcttcatatctattctgtctccctcctctttgattttaaatttttttcttttacccagtaggacaaaaaagagcagttggtcatcatcccc

SEQ ID NO: 740048 - DNA, 120 bp, Artificial Sequence
  ENSG00000204217_79 (sequence is synthesized)
aatattcttagtcttcagtatgcttcaggcctctcaatgaacacttaagtctcaattcttcagacaaaattgcttaagctcttctcctcagtcctattttaatgactttatatttaagaa

SEQ ID NO: 740049 - DNA, 120 bp, Artificial Sequence
  ENSG00000204217_80 (sequence is synthesized)
tatagaattatattttcttttatattcaaattcattactccagttaagtaatagtttgatagtttgatagaatcgagagttaagatgtttctatttgaaagtggattcaaccatcagacc

SEQ ID NO: 740050 - DNA, 120 bp, Artificial Sequence
  ENSG00000204217_81 (sequence is synthesized)
accagcaaatcggcacttaatttttgtgttatctaacattttctattgtggaattttatgattttatattctcattagttataactaaaaagccatgcacacagaattgtatatcatttt

SEQ ID NO: 740051 - DNA, 120 bp, Artificial Sequence
  ENSG00000204217_82 (sequence is synthesized)
gccattaaaattttttaacatattgcagcaagcttagttttatgattgagccacaaccttttacatattttttgtatgaaatattaaacactaaatgcaagattaactttcaaaagcaaa

SEQ ID NO: 740052 - DNA, 120 bp, Artificial Sequence
  ENSG00000204217_83 (sequence is synthesized)
ccctacattaatcaggtattatctatggacatttttgtagaccacttttgaaatacttattattttgcaacatagactggactatacaactttcatttaacttttaggtgactgatttaa

SEQ ID NO: 740053 - DNA, 120 bp, Artificial Sequence
  ENSG00000204217_84 (sequence is synthesized)
gttgagtgtgcatatagagaaaaacctagaaatttatctcatggcagatacatttgaaagtacttcagaagaatttatgctgtatattaaaactaggctcaaaataaatctatcgtatct

SEQ ID NO: 740054 - DNA, 120 bp, Artificial Sequence
  ENSG00000204217_85 (sequence is synthesized)
ttaaaagtccaattctgttattactgtgatgtttgtagtgttactattaaacattgtgaacatacacatttttaaaacaacttgaaacccattttaaaatctgggtaagagagaaggaat

SEQ ID NO: 740055 - DNA, 120 bp, Artificial Sequence
  ENSG00000204217_86 (sequence is synthesized)
cttcagaacaaaatcacatcattagggtgtccagtttatgattgaatttttaagcaaattactgtatttgaaactacaacttgatttggttttcagttttaaaaggcaacatgtgggttt

SEQ ID NO: 740056 - DNA, 120 bp, Artificial Sequence
  ENSG00000204217_87 (sequence is synthesized)
tatccattttatttatacctttagatttcagaaacatcttcatgttttagatgcattctacagacatcatgttacttaaaaactcagggcccctttcatccctttgtacactgaaaaagt

SEQ ID NO: 740057 - DNA, 120 bp, Artificial Sequence
  ENSG00000204217_88 (sequence is synthesized)
tcaattgttagcaagtaagcaattagatccagttgaatatttaaagtgtttgttgcacagttcatttaatgtttcatcttatttgactttttcacatagatataatatcagatttcatta

SEQ ID NO: 740058 - DNA, 120 bp, Artificial Sequence
  ENSG00000204217_89 (sequence is synthesized)
attataaaaagttgcccagttctgtaattactgaacagagggaatgactcaactaattggctacatgttgcaacaaatttaggcctttagagttgaagcactgacttaaaacgacttaca

SEQ ID NO: 740059 - DNA, 120 bp, Artificial Sequence
  ENSG00000204217_90 (sequence is synthesized)
tttctgttctttggtcaaatgaccatacatgatatgggacaaattgtttcattttgtttgttttttaataagggaacttggtaaagtagttcctgtcagataggattttctcaagagaca

SEQ ID NO: 740060 - DNA, 120 bp, Artificial Sequence
  ENSG00000204217_91 (sequence is synthesized)
atttaacgttataaagccttctaaaagtgaactaaatattttataactttagtaatagcttggatggttttgagaaaataacctgtatttatcacattgtcaaacagaatttttctttga

SEQ ID NO: 740061 - DNA, 120 bp, Artificial Sequence
  ENSG00000204217_92 (sequence is synthesized)
atcagacaagttcaagctctaaattgatgtgctatatacttaaaatcctaggaagttatctgtaaccagtctcttgtctcaggctcttcaccttgttaccaatcctcgtaagtatgtaaa

SEQ ID NO: 740062 - DNA, 120 bp, Artificial Sequence
  ENSG00000204217_93 (sequence is synthesized)
ggaaacatatttttaaagaagcttaacagtaagaaaaaattactaaaagatgcaattcaaagataggtcccagtttaacactgaattgcttgacttctgtggcttttctttttctggcca

SEQ ID NO: 740063 - DNA, 120 bp, Artificial Sequence
  ENSG00000204217_94 (sequence is synthesized)
catttatttatttaagcaatttttgtatgccttgttatttcatttccatagagattatattgtatcagtgtttatgtaagctggaatcatcctcagttttttgctgataatttttcaaat

SEQ ID NO: 740064 - DNA, 120 bp, Artificial Sequence
  ENSG00000204217_95 (sequence is synthesized)
aaagatacatggataattgtaaaatacactaactcttagggtgttgtagtagctgaaacatggagatgcgtagctgtcatgctttttctgaatggacaggagaaacataagctacggagt

SEQ ID NO: 740065 - DNA, 120 bp, Artificial Sequence
  ENSG00000204217_96 (sequence is synthesized)
attcacttctgaggatgcttttccggaaaaagaaaggctagaaaatactcgcacttcctcagaaccctctttcttgttaacgggtatcttttgttggtgtgttttgctcttacattacag

SEQ ID NO: 740066 - DNA, 120 bp, Artificial Sequence
  ENSG00000204217_97 (sequence is synthesized)
atagactatcatatatgactttatgaataatttcagttattttgcttttgtataagctgtctgaagccttgctatgctgtataagttgtgtttgatggatcagtgtgagtataaaataaa

SEQ ID NO: 740067 - DNA, 120 bp, Artificial Sequence
  ENSG00000204217_98 (sequence is synthesized)
gcaaatcacttttcttttgtattatctatggatgccactatgaaagctgacattaagccactaaagagttttctatgaataagtgtaagtaaatgctttgatatatataaacctaaataa

SEQ ID NO: 740068 - DNA, 120 bp, Artificial Sequence
  ENSG00000204217_99 (sequence is synthesized)
aaagattgtattgatacagagacattggagaaggagattttaaggcagttctttaggtttaaaaaggcttgctgtaaaatggtgcgttattccgtttattaaagatcatattaatgacaa

SEQ ID NO: 740069 - DNA, 120 bp, Artificial Sequence
  ENSG00000204217_100 (sequence is synthesized)
attacaggcgtgagccaccgcgcctgctggaaaggtcacttattattcctatagttttgtattgtttgaatctttaatttaaaatgagaatatattcatgtattatttgtgtaaccaata

SEQ ID NO: 740070 - DNA, 120 bp, Artificial Sequence
  ENSG00000204217_101 (sequence is synthesized)
gtgtaaccaataacctgcttgtttatttggaaaaagagaaaaatgacataagtagcaaggaaaaaaataatctccaatagtctctacacccatatacaaccattgttaatatttagaatg

SEQ ID NO: 740071 - DNA, 120 bp, Artificial Sequence
  ENSG00000204217_102 (sequence is synthesized)
tttctttccagtcttttctcttttatttttgcgtagctgtatttgtaatatacatccattttagatcctgcctttttgtttaacataaatattttccaggttactatatatgtttcatag

SEQ ID NO: 740072 - DNA, 120 bp, Artificial Sequence
  ENSG00000204219_0 (sequence is synthesized)
gcgcgggttgcgcgccctccgccttcgcgcctcctgcccccgaggccctactgctgcccctgtgcccctcgccccgccgggcgtcgcgggccaacatgggccaggaagaggagctgctga

SEQ ID NO: 740073 - DNA, 120 bp, Artificial Sequence
  ENSG00000204219_1 (sequence is synthesized)
ccaggaagaggagctgctgaggatcgccaaaaagctggagaagatggtggccaggaagaacacggaaggggccctggaccttctgaagaagctgcacagctgccagatgtccatccagct

SEQ ID NO: 740074 - DNA, 120 bp, Artificial Sequence
  ENSG00000204219_2 (sequence is synthesized)
actacagacaaccaggattggagttgctgttaatggggtccgcaagcactgctcagacaaggaggtggtgtccttggccaaagtccttatcaaaaactggaagcggctgctagactcccc

SEQ ID NO: 740075 - DNA, 120 bp, Artificial Sequence
  ENSG00000204219_3 (sequence is synthesized)
tggacccccaaaaggagaaaaaggagaggaaagagaaaaggcaaagaagaaggaaaaagggcttgagtgttcagactggaagccagaagcaggcctttctccaccaaggaaaaaacgaga

SEQ ID NO: 740076 - DNA, 120 bp, Artificial Sequence
  ENSG00000204219_4 (sequence is synthesized)
agaccccaaaaccaggagagactctgtggactccaagtcttctgcctcctcctctccaaaaagaccatcggtggaaagatcaaacagcagcaaatcaaaagcggagagccccaaaacacc

SEQ ID NO: 740077 - DNA, 120 bp, Artificial Sequence
  ENSG00000204219_5 (sequence is synthesized)
tagcagccccttgacccccacgtttgcctcttccatgtgtctcctggccccctgctatctcacaggggactctgtccgggacaagtgtgtggagatgctgtcagcagccctgaaggcgga

SEQ ID NO: 740078 - DNA, 120 bp, Artificial Sequence
  ENSG00000204219_6 (sequence is synthesized)
cgatgattacaaggactatggagtcaactgtgacaagatggcatcagaaatcgaagatcatatctaccaagagctcaagagcacggacatgaagtaccggaaccgcgtgcgcagccgcat

SEQ ID NO: 740079 - DNA, 120 bp, Artificial Sequence
  ENSG00000204219_7 (sequence is synthesized)
gaacgtgctcagtggggccatctccgcagggcttatagccaagatgacggcagaggaaatggccagtgatgaactgagggagttgaggaatgccatgacccaggaggccatccgtgagca

SEQ ID NO: 740080 - DNA, 120 bp, Artificial Sequence
  ENSG00000204219_8 (sequence is synthesized)
ccagatggccaagactggcggcaccaccactgacctcttccagtgcagcaaatgcaagaagaagaactgcacctataaccaggtgcagacacgcagtgctgatgagcccatgactacctt

SEQ ID NO: 740081 - DNA, 120 bp, Artificial Sequence
  ENSG00000204219_9 (sequence is synthesized)
tgtcttatgcaatgaatgtggcaatcgctggaagttctgctgatggaacagccagccatgaacaaggtgaggaagaagaaagaggaagcgctgaattatctgaactggagaagcaataaa

SEQ ID NO: 740082 - DNA, 120 bp, Artificial Sequence
  ENSG00000204219_10 (sequence is synthesized)
aattaaagtgaaggaaaatactgaactctgtctgagtgggatggtatgagttagaggaagaattctcttgcaaattaataatcggtcattagaaacaattggttaatgggggagcctaat

SEQ ID NO: 740083 - DNA, 120 bp, Artificial Sequence
  ENSG00000204219_11 (sequence is synthesized)
tggagaatgatgctgagaatttgtattgatgaacctcttttagaaactgcagagggctgggcacggtggtttatggctgtaatctgcaaactctgggaggctgaggtgggagaatcgctt

SEQ ID NO: 740084 - DNA, 120 bp, Artificial Sequence
  ENSG00000204219_12 (sequence is synthesized)
aaccccagaagtttgagtccagcccaggcaacacagcaagaccccatctctataaaaagaaaaaataaagaaactgcagcgccttagacctgaggtgtcatatctttgacagtgggctgg

SEQ ID NO: 740085 - DNA, 120 bp, Artificial Sequence
  ENSG00000204219_13 (sequence is synthesized)
cagacgtttgctttgagttccttctctcccatctggatctcccagccttttccaaattgaaaaatgccagatcaacacaaaccttaccccacccccacctccgagtcacacgtgcagaac

SEQ ID NO: 740086 - DNA, 120 bp, Artificial Sequence
  ENSG00000204219_14 (sequence is synthesized)
gcagaaccaaaggctggaggtcaggagcctggctcagagggtttgaacccagcaggtggcgggggatgaagttagagcaccacctaggacagattgtttctcgtctctctccttccttct

SEQ ID NO: 740087 - DNA, 120 bp, Artificial Sequence
  ENSG00000204219_15 (sequence is synthesized)
gccccttgcctgtccttcggccacatgtctgtctgtatcctcctgctctctgtaccaagaccacacaatagtcagagaagcctggtcaggacccaggccccagtcctcaccttgtggcct

SEQ ID NO: 740088 - DNA, 120 bp, Artificial Sequence
  ENSG00000204219_16 (sequence is synthesized)
cctctccaaaaagaccatcggtggaaagagcatgctcgctgatgcagtaactgaaatgccctcgaggtggcgcacagaagcagcgggcccggcctccagatgcctctactcagacctggg

SEQ ID NO: 740089 - DNA, 120 bp, Artificial Sequence
  ENSG00000204219_17 (sequence is synthesized)
gaggggtcctgacagtcagccaagtgccacccccaaccctaggttcaggtttcaccaaagctacagatatcctccatgtcaggcttagccctgggccctcggcctcgtgcagagcagggc

SEQ ID NO: 740090 - DNA, 120 bp, Artificial Sequence
  ENSG00000204219_18 (sequence is synthesized)
gaccatcggtggaaaggtaaaggaaaccacagctttctccatcccagtgtcctattcagcctgtgtccccttctctgtttttatggaggaagcccaaggcagaggaaaggagggaaggaa

SEQ ID NO: 740091 - DNA, 120 bp, Artificial Sequence
  ENSG00000204219_19 (sequence is synthesized)
tttggctcagttcccaggcgtgtgcattgaaagcaaaatgagtgtggctgcctgaaatgctgcccagacacgaattccagccagccagccagctcctaaccggggaggcgggaccagggc

SEQ ID NO: 740092 - DNA, 120 bp, Artificial Sequence
  ENSG00000204219_20 (sequence is synthesized)
tgggtgtgccctgccaggaaggtgggaagaaatgctccaaacagcctagtcttgctcaggtaggaggactctggaaacctctcttttaaagacacagttgatgtgttgaaaagaatttgg

SEQ ID NO: 740093 - DNA, 120 bp, Artificial Sequence
  ENSG00000204219_21 (sequence is synthesized)
aagggcgacaggcaggttcgtggtctgactataccctttgctagttggatggataacttggggcagtaacttggatggataattcagttcagctctctgagcttcagtctactgatctgt

SEQ ID NO: 740094 - DNA, 120 bp, Artificial Sequence
  ENSG00000204219_22 (sequence is synthesized)
aaaatggagacaattatgaacccctttcaaggtcattgtgaggattaaatgaggtaatgaaatacccagcactgttcccaaaccatgtaaatgctcaataaatacataatactttgtaat

SEQ ID NO: 740095 - DNA, 120 bp, Artificial Sequence
  ENSG00000204219_23 (sequence is synthesized)
aaaacattctgcacttggaccacgcctctttggaaagtgcttccacagatggtatttcctttgaacctggccacagccaaggatgggaaacaggaaggctgagccctgtcagaaaggagt

SEQ ID NO: 740096 - DNA, 120 bp, Artificial Sequence
  ENSG00000204219_24 (sequence is synthesized)
tgaacctaaatgccaccaggccatccttccctcctaaggaagctctgaaagtcttacccaagtctgtaactcagactgccccagctcctgcaaaggcagaagttttgttttcacgcatgg

SEQ ID NO: 740097 - DNA, 120 bp, Artificial Sequence
  ENSG00000204219_25 (sequence is synthesized)
gagccaaacaaagactcctcccagagtgctccttcctgccaagtctcctgaaggaacagagtgtggtcacgtgcctattgtcagtttccaactgctctctgacttgcatgtgcaccatgt

SEQ ID NO: 740098 - DNA, 120 bp, Artificial Sequence
  ENSG00000204219_26 (sequence is synthesized)
gatgtctgggccaccaggcaggctgcaggtgctccaaaagttctaaggtacttagcaagaagtacaagataagtcaggatccctggtttcaggtcccattctgccctactcatgctgagc

SEQ ID NO: 740099 - DNA, 120 bp, Artificial Sequence
  ENSG00000204219_27 (sequence is synthesized)
atgttactcacctcattgagcaaaagagtaataataatgcctttctcccaggtttgatgatgtgaggatcattttgatatgagggttatcatgtatgcataaacactttgcaaacaacta

SEQ ID NO: 740100 - DNA, 120 bp, Artificial Sequence
  ENSG00000204220_0 (sequence is synthesized)
gggtttattactactgaaggaagaacgtgagtaggttaggatttcggttgagaggcttggggtcttgcgtttcgcccaccatctcctggggacagggtggagtcgatatccgggacgggg

SEQ ID NO: 740101 - DNA, 120 bp, Artificial Sequence
  ENSG00000204220_1 (sequence is synthesized)
gggaggttgcggtgcccctcagggctacctctcaagagtgctatcatttccgcaggccagatcagaaaagggagctcaggtaccttccagagagtgagacccagcgcccttgtctcgcac

SEQ ID NO: 740102 - DNA, 120 bp, Artificial Sequence
  ENSG00000204220_2 (sequence is synthesized)
ccagtaggctttcatccccgccatggcggagctgatccagaagaagctacagggagaagtggagaaatatcaacagctacagaaggacttaagtaaatccatgtcggggaggcagaaact

SEQ ID NO: 740103 - DNA, 120 bp, Artificial Sequence
  ENSG00000204220_3 (sequence is synthesized)
ataatatcgtgaaagaggaactggccctgctggatgggtccaacgtggtctttaaacttctgggtccggtgctagtcaaacaggagctgggggaggctcgggccacagtagggaagaggc

SEQ ID NO: 740104 - DNA, 120 bp, Artificial Sequence
  ENSG00000204220_4 (sequence is synthesized)
tggactatatcacagctgaaattaagcgatacgaatcccagcttcgggatcttgagcggcagtcagagcaacagagggagacccttgctcagctgcagcaggagttccagcgggcccagg

SEQ ID NO: 740105 - DNA, 120 bp, Artificial Sequence
  ENSG00000204220_5 (sequence is synthesized)
cagcaaaggcaggggctcctggcaaggcctgaccccatggtggggggaggggaggggaggggagggaatgaggcagctctaggatctatactgtagctaataaaatgtaaaaacacctgg

SEQ ID NO: 740106 - DNA, 120 bp, Artificial Sequence
  ENSG00000204220_6 (sequence is synthesized)
atcttgagtgagggcacgctctccttagaggggcggaacagtttttggcaccttatcgcgagcggcagcttatgcaagagtgatttaaaaaagaaaggcaggtccggagccaggggctaa

SEQ ID NO: 740107 - DNA, 120 bp, Artificial Sequence
  ENSG00000204220_7 (sequence is synthesized)
gtagcggtgcggtttctttttctggattagtttccccatcttgcctaaaaatgtcctagtctagtctttttagcagaactccactccctaaacatgtcagaactacacttcccatcaagg

SEQ ID NO: 740108 - DNA, 120 bp, Artificial Sequence
  ENSG00000204220_8 (sequence is synthesized)
gtcagaaagaaacttccggcacagtcttttcccagcattccttgtttacttccgggtttattactactgaaggaagaacgccagatcagaaaagggagctcaggtaccttccagagagtg

SEQ ID NO: 740109 - DNA, 120 bp, Artificial Sequence
  ENSG00000204220_9 (sequence is synthesized)
gttgaaccattgcagaacagctctccatagtggcccctagtcctccagttcctccaaccctttccttcccttttaaccccccttcttctccctcccctggatctcaagttttccacctat

SEQ ID NO: 740110 - DNA, 120 bp, Artificial Sequence
  ENSG00000204220_10 (sequence is synthesized)
agacccaggagatgttccagactcatttttctgatattcagagagggcaagagtcttggcctatgtcacacagcagagtccaggactccagaactccaacctagcactctggccagaaag

SEQ ID NO: 740111 - DNA, 120 bp, Artificial Sequence
  ENSG00000204220_11 (sequence is synthesized)
tcagccagaggaaggaaaactgggaatgaagagtcagaggtgagaagctaaagtcatgatctcaccaagggatcaagaggtcgatattggcggcttgtgacggtaaacacggcaccatcc

SEQ ID NO: 740112 - DNA, 120 bp, Artificial Sequence
  ENSG00000204220_12 (sequence is synthesized)
tcctcctcatcccagacggacacaggggcctggaggagcaaggaaggggaagtcagacagttccacaccaccccccattgccctcagccttcaccccaggccctgctcctccctctgtac

SEQ ID NO: 740113 - DNA, 120 bp, Artificial Sequence
  ENSG00000204220_13 (sequence is synthesized)
ccctcacctgtggtggcagggcatagtaccagcgagtgcgaggaagggttgggggagctggtgaccccaggtctcccccactggggcccagacagccccaccccagccgcctcagggccc

SEQ ID NO: 740114 - DNA, 120 bp, Artificial Sequence
  ENSG00000204220_14 (sequence is synthesized)
ggtacaaagggcaggagagggaagcgagaggcagcaagccagaggcagcgactaggggtagctgaaacctcagtccaggcactgccgcatgccccgcccctcccggccaaggactatacc

SEQ ID NO: 740115 - DNA, 120 bp, Artificial Sequence
  ENSG00000204220_15 (sequence is synthesized)
agcccagagaattagtctttttcaggacccctttcaccctggtccctcgggtagcgcctccactatctcagccctaagggacccccgaaggtagcagctccaatcccagtacaggaagga

SEQ ID NO: 740116 - DNA, 120 bp, Artificial Sequence
  ENSG00000204220_16 (sequence is synthesized)
aaaggggaagtgggatgatagggggttgggggcggtagactcagagagtcacgtggccccagcccctcccccgaccgatcccgaaaaaccagccctgccagtcaacctgccctcacctag

SEQ ID NO: 740117 - DNA, 120 bp, Artificial Sequence
  ENSG00000204220_17 (sequence is synthesized)
gatctggacctaggagtttagggcctcggggccccaaatccaaattctggcccctcctgaggcccgaaatcctgctcctggccaccaccattaatccctaatgaaaacagatgaccactc

SEQ ID NO: 740118 - DNA, 120 bp, Artificial Sequence
  ENSG00000204220_18 (sequence is synthesized)
aatccctaatgaaaacagatgaccactctctacccaccctaggatctttcctccaggtcccagaaccgtggcttcccggcctctacccaggaccggggcggggcgggggggcggggggaa

SEQ ID NO: 740119 - DNA, 120 bp, Artificial Sequence
  ENSG00000204220_19 (sequence is synthesized)
aatctgagggttccctccccaatcccagagtcagaggagctggttactgtggaaacaaacccctccccgccaaacaaaaacaaggagggagacagggaccaagacacgactgctcagaga

SEQ ID NO: 740120 - DNA, 120 bp, Artificial Sequence
  ENSG00000204220_20 (sequence is synthesized)
ggtaggcacactcaggcaggcagaggtggagggccaaagacccgcagggacaggacagccagccagaagttccaggcaggaacagggcaggttcctgcgggcaggtcctgagtcacactg

SEQ ID NO: 740121 - DNA, 120 bp, Artificial Sequence
  ENSG00000204220_21 (sequence is synthesized)
acagagaaccacggagacgccaggactccccgcagcagagaaacgggccgacacccagggaggcgcgagaataactgaggcaaggaggaggagatgtagggacccagagacaagagaaaa

SEQ ID NO: 740122 - DNA, 120 bp, Artificial Sequence
  ENSG00000204227_0 (sequence is synthesized)
gtagggccccagcgcccgggccatggcggcggcggtggcgggagctgctgtctgagcagcggttgcggaccgagcgaacttggcccaggagcccgggcctagggagaggcgcggcggcgg

SEQ ID NO: 740123 - DNA, 120 bp, Artificial Sequence
  ENSG00000204227_1 (sequence is synthesized)
cgggagcgcgaacggctggagctggccttcttcgccttctcctcggctgtggagccctggtggggggtctgcgcccggtcaccatgacgacgccggcgaatgcccagaatgccagcaaaa

SEQ ID NO: 740124 - DNA, 120 bp, Artificial Sequence
  ENSG00000204227_2 (sequence is synthesized)
cgtgggaactgagtctgtatgagctgcaccggaccccgcaggaagccataatggatggcacagagattgctgtttcccctcggtcactgcattcagaactcatgtgccctatctgcctgg

SEQ ID NO: 740125 - DNA, 120 bp, Artificial Sequence
  ENSG00000204227_3 (sequence is synthesized)
acatgctgaagaatacgatgaccaccaaggagtgcctccacagattctgctctgactgcattgtcacagccctacggagcgggaacaaggagtgtcctacctgccgaaagaagctggtgt

SEQ ID NO: 740126 - DNA, 120 bp, Artificial Sequence
  ENSG00000204227_4 (sequence is synthesized)
ccaagcgatccctacggccagaccccaactttgatgccctgatctctaagatctatcctagccgggaggaatacgaggcccatcaagaccgagtgcttatccgcctgagccgcctgcaca

SEQ ID NO: 740127 - DNA, 120 bp, Artificial Sequence
  ENSG00000204227_5 (sequence is synthesized)
accagcaggcattgagctccagcattgaggaggggctacgcatgcaggccatgcacagggcccagcgtgtgaggcggccgataccagggtcagatcagaccacaacgatgagtggggggg

SEQ ID NO: 740128 - DNA, 120 bp, Artificial Sequence
  ENSG00000204227_6 (sequence is synthesized)
aaggagagcccggggagggagaaggggatggagaagatgtgagctcagactccgcccctgactctgccccaggccctgctcccaagcgaccccgtggagggggcgcaggggggagcagtg

SEQ ID NO: 740129 - DNA, 120 bp, Artificial Sequence
  ENSG00000204227_7 (sequence is synthesized)
tgaccggggagggactctgggagggggaacgctgggccccccaagccctcctggggcccccagccccccagagccaggtggagaaattgagctcgtgttccggccccaccccctgctcgt

SEQ ID NO: 740130 - DNA, 120 bp, Artificial Sequence
  ENSG00000204227_8 (sequence is synthesized)
ggagaagggagaatactgccagacgaggtatgtgaagacaactgggaatgccacagtggaccacctctccaagtacttggccctgcgcattgccctcgagcggaggcaacagcaggaagc

SEQ ID NO: 740131 - DNA, 120 bp, Artificial Sequence
  ENSG00000204227_9 (sequence is synthesized)
aggggagccaggagggcctggagggggcgcctctgacaccggaggacctgatgggtgtggcggggagggtgggggtgccggaggaggtgacggtcctgaggagcctgctttgcccagcct

SEQ ID NO: 740132 - DNA, 120 bp, Artificial Sequence
  ENSG00000204227_10 (sequence is synthesized)
ggagggcgtcagtgaaaagcagtacaccatctacatcgcacctggaggcggggcgttcacgacgttgaatggctcgctgaccctggagctggtgaatgagaaattctggaaggtgtcccg

SEQ ID NO: 740133 - DNA, 120 bp, Artificial Sequence
  ENSG00000204227_11 (sequence is synthesized)
gccactggagctgtgctatgctcccaccaaggatccaaagtgaccccaccaggggacagccagaggaaggggaccatggggtatccctgtgtcctggtctatcaccccagcttctttgtc

SEQ ID NO: 740134 - DNA, 120 bp, Artificial Sequence
  ENSG00000204227_12 (sequence is synthesized)
ccccagtacccccagcccagccagccaataagaggacacaaatgaggacacgtggcttttatacaaagtatctatatgagattcttctatattgtacagagtggggcaaaacacgccccc

SEQ ID NO: 740135 - DNA, 120 bp, Artificial Sequence
  ENSG00000204227_13 (sequence is synthesized)
atctgctgccttttctattgccctgcaacgtcccatctatacgaggtgttggagaaggtgaagaaccctcccattcacgcccgcctaccaacaacaaacgtgcttttttcctctttgaaa

SEQ ID NO: 740136 - DNA, 120 bp, Artificial Sequence
  ENSG00000204228_0 (sequence is synthesized)
acccacagcccgccatggcgtctcagctccagaaccgactccgctccgcactggccttggtcacaggtgcggggagcggcatcggccgagcggtcagtgtacgcctggccggagaggggg

SEQ ID NO: 740137 - DNA, 120 bp, Artificial Sequence
  ENSG00000204228_1 (sequence is synthesized)
ccaccgtagctgcctgcgacctggaccgggcagcggcacaggagacggtgcggctgctgggcgggccagggagcaaggaggggccgccccgagggaaccatgctgccttccaggctgacg

SEQ ID NO: 740138 - DNA, 120 bp, Artificial Sequence
  ENSG00000204228_2 (sequence is synthesized)
tgtctgaggccagggccgccaggtgcctgctggaacaagtgcaggcctgcttttctcgcccaccatctgtcgttgtgtcctgtgcgggcatcacccaggatgagtttctgctgcacatgt

SEQ ID NO: 740139 - DNA, 120 bp, Artificial Sequence
  ENSG00000204228_3 (sequence is synthesized)
ctgaggatgactgggacaaagtcatagctgtcaacctcaagggcaccttcctagtcactcaggctgcagcacaagccctggtgtccaatggttgtcgtggttccatcatcaacatcagta

SEQ ID NO: 740140 - DNA, 120 bp, Artificial Sequence
  ENSG00000204228_4 (sequence is synthesized)
gggaacgtggggcagacaaactatgcagcatccaaggctggagtgattgggctgacccagaccgcagcccgggagcttggacgacatgggatccgctgtaactctgtcctcccagggttc

SEQ ID NO: 740141 - DNA, 120 bp, Artificial Sequence
  ENSG00000204228_5 (sequence is synthesized)
attgcaacacccatgacacagaaagtgccacagaaagtggtggacaagattactgaaatgatcccgatgggacacttgggggaccctgaggatgtggcagatgtggtcgcattcttggca

SEQ ID NO: 740142 - DNA, 120 bp, Artificial Sequence
  ENSG00000204228_6 (sequence is synthesized)
tctgaagatagtggatacatcacagggacctcagtggaagtcactggaggtcttttcatgtaactgcctcaaggaccctggactctgctcacccccccaccactctgcctggcctcctgc

SEQ ID NO: 740143 - DNA, 120 bp, Artificial Sequence
  ENSG00000204228_7 (sequence is synthesized)
tgatgaggactctaagttcccaggatacaaaaggggtggcagtgtatggttcaggaatgctgaatatgggaagcaggggtgcttgtgaccctaataaattccaagtcctcttccctgcca

SEQ ID NO: 740144 - DNA, 120 bp, Artificial Sequence
  ENSG00000204228_8 (sequence is synthesized)
gaaccgactccgctccgcactggccttggtcacaggttgagggggttctttccccgggcggtttggggtattggagtgaggtcaggggcgtgcccttggagtgcgcggccgctgtgacct

SEQ ID NO: 740145 - DNA, 120 bp, Artificial Sequence
  ENSG00000204228_9 (sequence is synthesized)
ctggccccttacccacattttactttctgccctgtgacctctgatccctgccctctcctccccgtgcccggtccggcgtgttctgtcctacctcaggtgcggggagcggcatcggccgag

SEQ ID NO: 740146 - DNA, 120 bp, Artificial Sequence
  ENSG00000204231_0 (sequence is synthesized)
ggcgggaactcgcgccgagacttcccgtctgtacaaagatggctgccacattggcgctgtcattttggtactgagcagagcgacgggcttaattcgacccaatccaggccagagtctttc

SEQ ID NO: 740147 - DNA, 120 bp, Artificial Sequence
  ENSG00000204231_1 (sequence is synthesized)
tctcaggggcttcctcgtgctcagctaatcctccgatcaatccttgggaatccctgggacctcttcggtatccctactctcagccagggatcatgtcttgggccgctcgcccgcccttcc

SEQ ID NO: 740148 - DNA, 120 bp, Artificial Sequence
  ENSG00000204231_2 (sequence is synthesized)
tccctcagcggcatgccgcagggcagtgtgggccggtgggggtgcgaaaagaaatgcattgtggggtcgcgtcccggtggcggcggcgacggccctggctggatcccgcagcggcggcgg

SEQ ID NO: 740149 - DNA, 120 bp, Artificial Sequence
  ENSG00000204231_3 (sequence is synthesized)
cggcggcggtggcaggcggagaacaacaaaccccggagccggagccaggggaggctggacgggacgggatgggcgacagcgggcgggactcccgaagcccagacagctcctccccaaatc

SEQ ID NO: 740150 - DNA, 120 bp, Artificial Sequence
  ENSG00000204231_4 (sequence is synthesized)
cccttccccagggagtccctcccccttctcctcctgggccacccctacccccttcaacagctccatcccttggaggctctggggccccacccccacccccgatgccaccacccccactgg

SEQ ID NO: 740151 - DNA, 120 bp, Artificial Sequence
  ENSG00000204231_5 (sequence is synthesized)
gctctccctttccagtcatcagttcttccatggggtcccctggtctgccccctccagctcccccaggattctccgggcctgtcagcagcccccagattaactcaacagtgtcactccctg

SEQ ID NO: 740152 - DNA, 120 bp, Artificial Sequence
  ENSG00000204231_6 (sequence is synthesized)
ggggtgggtctggcccccctgaagatgtgaagccaccagtcttaggggtccggggcctgcactgtccaccccctccaggtggccctggggctggcaaacggctatgtgcaatctgcgggg

SEQ ID NO: 740153 - DNA, 120 bp, Artificial Sequence
  ENSG00000204231_7 (sequence is synthesized)
acagaagctcaggcaaacactacggggtttacagctgtgagggttgcaagggcttcttcaaacgcaccatccgcaaagaccttacatactcttgccgggacaacaaagactgcacagtgg

SEQ ID NO: 740154 - DNA, 120 bp, Artificial Sequence
  ENSG00000204231_8 (sequence is synthesized)
acaagcgccagcggaaccgctgtcagtactgccgctatcagaagtgcctggccactggcatgaagagggaggcggtacaggaggagcgtcagcggggaaaggacaaggatggggatgggg

SEQ ID NO: 740155 - DNA, 120 bp, Artificial Sequence
  ENSG00000204231_9 (sequence is synthesized)
agggggctgggggagcccccgaggagatgcctgtggacaggatcctggaggcagagcttgctgtggaacagaagagtgaccagggcgttgagggtcctgggggaaccgggggtagcggca

SEQ ID NO: 740156 - DNA, 120 bp, Artificial Sequence
  ENSG00000204231_10 (sequence is synthesized)
gcagcccaaatgaccctgtgactaacatctgtcaggcagctgacaaacagctattcacgcttgttgagtgggcgaagaggatcccacacttttcctccttgcctctggatgatcaggtca

SEQ ID NO: 740157 - DNA, 120 bp, Artificial Sequence
  ENSG00000204231_11 (sequence is synthesized)
tattgctgcgggcaggctggaatgaactcctcattgcctccttctcacaccgatccattgatgttcgagatggcatcctccttgccacaggtcttcacgtgcaccgcaactcagcccatt

SEQ ID NO: 740158 - DNA, 120 bp, Artificial Sequence
  ENSG00000204231_12 (sequence is synthesized)
ggtgctgacagagctagtgtccaaaatgcgtgacatgaggatggacaagacagagcttggctgcctgagggcaatcattctgtttaatccagatgccaagggcctctccaaccctagtga

SEQ ID NO: 740159 - DNA, 120 bp, Artificial Sequence
  ENSG00000204231_13 (sequence is synthesized)
ggtggaggtcctgcgggagaaagtgtatgcatcactggagacctactgcaaacagaagtaccctgagcagcagggacggtttgccaagctgctgctacgtcttcctgccctccggtccat

SEQ ID NO: 740160 - DNA, 120 bp, Artificial Sequence
  ENSG00000204231_14 (sequence is synthesized)
tggccttaagtgtctagagcatctgtttttcttcaagctcattggtgacacccccatcgacaccttcctcatggagatgcttgaggctccccatcaactggcctgagctcagacccagac

SEQ ID NO: 740161 - DNA, 120 bp, Artificial Sequence
  ENSG00000204231_15 (sequence is synthesized)
gtggtgcttctcacactggaggagcacacatccaagagggactccaagccctggggcagggtggggggccatgttcccagaaccttgatggggtgagaagtacagggcagaaccaagaac

SEQ ID NO: 740162 - DNA, 120 bp, Artificial Sequence
  ENSG00000204231_16 (sequence is synthesized)
ataaaccctccaagggatctgcttgatatcccaagttggaagggaccccagatacctgtgaggactggttgtctctcttcggtggccttgagtctctgaatttgtcgggttctcccatga

SEQ ID NO: 740163 - DNA, 120 bp, Artificial Sequence
  ENSG00000204231_17 (sequence is synthesized)
tttggggtgatttctcaccctctgtccttcccccagcacaaagcactggccttgcctccaggaccttgcttccttctcatcttgcctcattttgcttcccatctgaagagtggaaatggg

SEQ ID NO: 740164 - DNA, 120 bp, Artificial Sequence
  ENSG00000204231_18 (sequence is synthesized)
gaactcccccagaggtggatactggggggcaggcctcccaagctgatggacatgagagtagggccctgacaggccttcctcctctcaaacctggcagatgggggcctctctggaagaggg

SEQ ID NO: 740165 - DNA, 120 bp, Artificial Sequence
  ENSG00000204231_19 (sequence is synthesized)
aggggccctgtcactgtccagagtctctttttacacttcacctccttctgcagtcagactgaaatataaaaaaggtggtggtggtggtgaaggggctggtggagatgtaggaaccgatct

SEQ ID NO: 740166 - DNA, 120 bp, Artificial Sequence
  ENSG00000204231_20 (sequence is synthesized)
gctatttttaatttcctgtgaggatagagacttgcagttagactcaaagaagtactgtactttcccaggttgactaagaaatgccagtggtggaggtgggtgtttgggaaaggcagggcc

SEQ ID NO: 740167 - DNA, 120 bp, Artificial Sequence
  ENSG00000204231_21 (sequence is synthesized)
ctgaaatggcctgtccctagggctctccaagcactagccttcccagcttcccgccgccccccctatctcttcctgtctaacttggggaaggggcctgggctgtgaggacagggcccccac

SEQ ID NO: 740168 - DNA, 120 bp, Artificial Sequence
  ENSG00000204231_22 (sequence is synthesized)
aggggatggtttcacgagtgtagtcccggaggccttccctttacagctctcctccagccctgggcacatagcataggctggggacacaggatcctggcctgagaattgaggggaggtggc

SEQ ID NO: 740169 - DNA, 120 bp, Artificial Sequence
  ENSG00000204231_23 (sequence is synthesized)
cagcccgcagaggtggggtgctggggctgcatgatttttgccctgcgtcccttctctttggggctcctttcccctctcatacataaaatcgctttcaaattaaaatcgctgttttctgga

SEQ ID NO: 740170 - DNA, 120 bp, Artificial Sequence
  ENSG00000204231_24 (sequence is synthesized)
ttggggttgtgctccagggatggcctttcacatagactgcagtgtaaatgacagcctctggaatgtgcattgcagggccttgcttagtggtagggaatgatttccatcacttctgtgaca

SEQ ID NO: 740171 - DNA, 120 bp, Artificial Sequence
  ENSG00000204231_25 (sequence is synthesized)
gcagtctaggtctgttctacatcccctccccctcctttcccctcataaccttcctaacactacttgggactggaggtgctgccaaacaaggtctttcaaacatctgaggtggatgtgata

SEQ ID NO: 740172 - DNA, 120 bp, Artificial Sequence
  ENSG00000204231_26 (sequence is synthesized)
gctccttctgtctccactccccaaacaacccactggcagaaccataggcatgtcccaaataaataattgtttgcactaatgccagaagagaagactcacttacagggattggtttggatg

SEQ ID NO: 740173 - DNA, 120 bp, Artificial Sequence
  ENSG00000204231_27 (sequence is synthesized)
cagtgaccttggatccctttgacttcttgacatttgacccctctttgacttcccgatctttagtgaccccagtggccttaccttgcgtacccagggagccaaacttgctgacctcgccac

SEQ ID NO: 740174 - DNA, 120 bp, Artificial Sequence
  ENSG00000204231_28 (sequence is synthesized)
aagaggaggattacctttgtctctcaaggccaaggcaaccttggagcctcctcttctccgagactcctaagttacccagctatccccctcagtaagaccctcaacctggaaatctcccaa

SEQ ID NO: 740175 - DNA, 120 bp, Artificial Sequence
  ENSG00000204231_29 (sequence is synthesized)
ctggccgaggaaaaacccacatccacggatccatcccacaaacccagtgggccctgcttcccttgccaggcctctggtaaagggcaagcaagtgcagcccaaaaggggcatcctgtggct

SEQ ID NO: 740176 - DNA, 120 bp, Artificial Sequence
  ENSG00000204237_0 (sequence is synthesized)
aggggttgccggatcccgtccgcgggcgatgctgctgcggagggtggtcgagggaggccgggcggtagccgccgcggtccgtggctcgggggctcgccggttctccagcccggactgctg

SEQ ID NO: 740177 - DNA, 120 bp, Artificial Sequence
  ENSG00000204237_1 (sequence is synthesized)
ccagaggcttcctggaggtggcagctttcttcaaaggcaccatcccggagcgcaagcccctgatgggcgcagaaaattcgggacagaccacgtagaggtgggctcccaagcaggtgcgga

SEQ ID NO: 740178 - DNA, 120 bp, Artificial Sequence
  ENSG00000204237_2 (sequence is synthesized)
ctccagccgcccacaaactgctgcatgagtggctgccccaactgcgtgtgggtggagtacgcggacaggctgctgcagcacttccaggacggtggggagcgggccctggctgccctggag

SEQ ID NO: 740179 - DNA, 120 bp, Artificial Sequence
  ENSG00000204237_3 (sequence is synthesized)
gagcacgtggctgatgagaacctcaaggccttcctcaggatggagatccggctgcacaccaggtgcggaggctgagccatccctgctggactccctaccgcaggacggagtccaggacgc

SEQ ID NO: 740180 - DNA, 120 bp, Artificial Sequence
  ENSG00000204237_4 (sequence is synthesized)
agccgcagcctccttccttcacaccccctcacagactccttgtgtccaacgggaataggaagaattagttactgacttcacctgagaaaaaaataaattctctatggtggtttcacagga

SEQ ID NO: 740181 - DNA, 120 bp, Artificial Sequence
  ENSG00000204237_5 (sequence is synthesized)
ggatcccgtccgcgggcgatgctgctgcggagggtggtcgagggaggccgggcggtagccgccgcggtccgtggctcggcaagtaccaggacgggtcttggcagcgccgaagggcacgtc

SEQ ID NO: 740182 - DNA, 120 bp, Artificial Sequence
  ENSG00000204237_6 (sequence is synthesized)
cgctgtccgggggcccgcacgtaccgggaggagccccggcccctccacccgcatgtggggacggagccgggaggatcgcgcgctggccgccgccgaaggacccctcgctcctctcctcca

SEQ ID NO: 740183 - DNA, 120 bp, Artificial Sequence
  ENSG00000204237_7 (sequence is synthesized)
cttgggagaggaagcagcccggtgaacggccactttcctgtttctcagtatctgccgagcgcctgtgtgcgagccctcctgggctctggggactggccgtggacatggagcggatgatgc

SEQ ID NO: 740184 - DNA, 120 bp, Artificial Sequence
  ENSG00000204237_8 (sequence is synthesized)
ggtagcgtgtcagtccgtgatcctgggtagatagagcagggcagcgacggaagactgcctataggacattcacgctgggatgagaggggcctgagaggcctgggctttgtgacagggaaa

SEQ ID NO: 740185 - DNA, 120 bp, Artificial Sequence
  ENSG00000204237_9 (sequence is synthesized)
gtcgagtgcctcccccaccccccaccatgtgcttgagtgcacacccggcgccaggccctgatcctggcacttcttgtgaatcacaccgtgtcatacccatgacttccattgcacagtggg

SEQ ID NO: 740186 - DNA, 120 bp, Artificial Sequence
  ENSG00000204237_10 (sequence is synthesized)
gaaactgagtctagagaggtgaaataacatgtctaaagtcacaggaagtgaaaaagctgaggacatggagccagttgcccaatgacaggagagctgaaatgtcctcactgctgggggtag

SEQ ID NO: 740187 - DNA, 120 bp, Artificial Sequence
  ENSG00000204246_0 (sequence is synthesized)
tcagaacttcaagcaagcactccttctaatatgtgtcaaaagaatgattgttcagttaatttgtactgtttgtttcttggcagtaaatacatttcatgttagatcttcttttgatttcct

SEQ ID NO: 740188 - DNA, 120 bp, Artificial Sequence
  ENSG00000204246_1 (sequence is synthesized)
gaaagcagatgacatgggtgagattaaccagacacttgtgtcagaatttcttcttctgggtctttctggatacccaaagattgagattgtttactttgctctcattctagttatgtacct

SEQ ID NO: 740189 - DNA, 120 bp, Artificial Sequence
  ENSG00000204246_2 (sequence is synthesized)
agtgattctaattggcaatggtgttctaatcatagccagcatctttgattctcattttcacacaccaatgtacttcttcctgggcaacctctctttcctggatatctgctatacatcctc

SEQ ID NO: 740190 - DNA, 120 bp, Artificial Sequence
  ENSG00000204246_3 (sequence is synthesized)
ctctgttccctcaacattggtgagcttaatctcaaagaaaagaaacatttccttctctggatgtgcagtgcagatgttctttgggtttgcaatggggtcaacagaatgtctgcttcttgg

SEQ ID NO: 740191 - DNA, 120 bp, Artificial Sequence
  ENSG00000204246_4 (sequence is synthesized)
atctgcaacccactgagataccccatcatcctgagcaaggtggcgtatgtattgatggcttctgtgtcctggctgtccggtggaataaattcagctgtgcaaacattacttgccatgaga

SEQ ID NO: 740192 - DNA, 120 bp, Artificial Sequence
  ENSG00000204246_5 (sequence is synthesized)
ctgcctttctgtgggaataatattatcaatcatttcgcatgtgaaatattagctgtcctcaagctggcctgtgctgatatatccctcaatattatcaccatggtgatatcaaatatggcc

SEQ ID NO: 740193 - DNA, 120 bp, Artificial Sequence
  ENSG00000204246_6 (sequence is synthesized)
ttcctggttcttccactgatggtcatttttttctcctatatgttcatcctctacaccatcttgcaaatgaattcagccacaggaagacgcaaggcattttccacgtgctcagctcacctg

SEQ ID NO: 740194 - DNA, 120 bp, Artificial Sequence
  ENSG00000204246_7 (sequence is synthesized)
actgtggtgatcatattttacggtaccatcttctttatgtatgcgaaaccgaagtctcaagacctgattggggaagaaaaattgcaagcattagacaagctcatttctctgttttatggg

SEQ ID NO: 740195 - DNA, 120 bp, Artificial Sequence
  ENSG00000204246_8 (sequence is synthesized)
gtagtgacacccatgctgaatcctatactctatagcttgagaaataaggatgtaaaagctgctgtaaaatatttgctgaacaaaaaaccaattcactaatgaaaccaggacatgtaggtc

SEQ ID NO: 740196 - DNA, 120 bp, Artificial Sequence
  ENSG00000204248_0 (sequence is synthesized)
cacacagaagcggcagccaccgaggagggagcagtgccgggagccccgacggcgccttgctgcatggagctgggccgctgacagctgtcgctgcccgcagcctctgacctccctgggacc

SEQ ID NO: 740197 - DNA, 120 bp, Artificial Sequence
  ENSG00000204248_1 (sequence is synthesized)
ccggcgtctgaggctcatagtctgctccctgtcttctgtcagcctcagggcatccagcgtctcaggccgacctgggtccctgggacccggcgtttcggcttctcagccatggagcggtgc

SEQ ID NO: 740198 - DNA, 120 bp, Artificial Sequence
  ENSG00000204248_2 (sequence is synthesized)
agccgctgccatcgcctcctcctcctcctacctctggtgctggggctgagcgcggccccaggctgggcaggtgcaccccctgtggatgtgctccgggccctgaggttcccctccctccct

SEQ ID NO: 740199 - DNA, 120 bp, Artificial Sequence
  ENSG00000204248_3 (sequence is synthesized)
gatggtgtccggagagcgaaaggcatctgtccagctgatgtggcctaccgagtggcacgacctgcccagctcagtgcacccactcgccagcttttcccaggaggatttcccaaagatttc

SEQ ID NO: 740200 - DNA, 120 bp, Artificial Sequence
  ENSG00000204248_4 (sequence is synthesized)
tctctgctgactgttgtccggacccgccctggtctccaagctcccctcctgactctctacagtgcccagggtgtccgacagctgggcctggagctgggccgacctgtccgcttcctgtat

SEQ ID NO: 740201 - DNA, 120 bp, Artificial Sequence
  ENSG00000204248_5 (sequence is synthesized)
gaagaccagactgggcggcctcaacctccctctcagccagtcttccgaggcctcagcctagcagatggcaagtggcaccgtgtggctgtggctgtgaagggccagtctgtcaccctcatt

SEQ ID NO: 740202 - DNA, 120 bp, Artificial Sequence
  ENSG00000204248_6 (sequence is synthesized)
gttgactgcaagaagcgagtcacccggcctctcccccgaagtgctcgtccagtattggacacccatggagtgatcatctttggtgcccgtattctggatgaagaagtctttgagggtgat

SEQ ID NO: 740203 - DNA, 120 bp, Artificial Sequence
  ENSG00000204248_7 (sequence is synthesized)
gtccaggagctggccattgtcccaggggtccaggcagcctatgaatcatgtgaacagaaggagctggaatgcgaggggggccagagggaaagaccccaaaaccaacagcctcacagagcc

SEQ ID NO: 740204 - DNA, 120 bp, Artificial Sequence
  ENSG00000204248_8 (sequence is synthesized)
cagagatctccacagcagcaaccatcaagacttcacaggccacaaaatcaggaaccccagagccagcccactgagtctctctactatgactacgagcccccctattatgatgtgatgact

SEQ ID NO: 740205 - DNA, 120 bp, Artificial Sequence
  ENSG00000204248_9 (sequence is synthesized)
acggggacaacccctgattatcaggaccccaccccaggtgaagaggaagaaatcctggagtcgagcctcttgccaccccttgaggaggagcagacagatctccaggtcccccccacagcc

SEQ ID NO: 740206 - DNA, 120 bp, Artificial Sequence
  ENSG00000204248_10 (sequence is synthesized)
gacaggttccaggcagaggaatatggggagggtggcacagacccccctgaagggccctacgattacacctatggctatggggatgattatcgtgaggagacagagcttggccctgccctc

SEQ ID NO: 740207 - DNA, 120 bp, Artificial Sequence
  ENSG00000204248_11 (sequence is synthesized)
tctgcggagacagcccactcaggagccgctgcccatggaccccgagggctgaagggagagaaaggagagcctgcagtgttggaacctggtatgctcgtggaggggccccctggcccagaa

SEQ ID NO: 740208 - DNA, 120 bp, Artificial Sequence
  ENSG00000204248_12 (sequence is synthesized)
ggccctgcgggattgattggtccccctggcatccaggggaacccaggcccagttggagaccctggagagaggggcccccctggccgagcagggctccctggatcagatggggctcctggt

SEQ ID NO: 740209 - DNA, 120 bp, Artificial Sequence
  ENSG00000204248_13 (sequence is synthesized)
cctcctggcacatctctcatgctcccattccggtttggcagtggtgggggtgacaagggccctgtggtggcggcccaggaggctcaggcccaggcgatcctgcagcaggcgaggctggcg

SEQ ID NO: 740210 - DNA, 120 bp, Artificial Sequence
  ENSG00000204248_14 (sequence is synthesized)
ctccgtggaccccctggccccatgggatacacagggcgccctggacccttgggccaacctgggagccctggcctgaaaggagagtctggagacttaggacctcagggccccagaggacct

SEQ ID NO: 740211 - DNA, 120 bp, Artificial Sequence
  ENSG00000204248_15 (sequence is synthesized)
cagggcctcacaggccctcctggcaaggctgggcgaaggggccgggcaggtgctgatggagcccgagggatgcctggagatcctggagtgaagggtgaccgaggttttgatggactccca

SEQ ID NO: 740212 - DNA, 120 bp, Artificial Sequence
  ENSG00000204248_16 (sequence is synthesized)
gggctccctggagagaagggccataggggtgatactggtgcccagggccttcctggtccccctggtgaggatggagagaggggagatgacggggagattgggcctcgagggctgcctgga

SEQ ID NO: 740213 - DNA, 120 bp, Artificial Sequence
  ENSG00000204248_17 (sequence is synthesized)
gagtcgggacctcgaggtctccttggccccaaaggcccacctggtattcctggaccccctggcgtccgaggcatggatggtccccagggccccaaagggagcttgggaccccagggagag

SEQ ID NO: 740214 - DNA, 120 bp, Artificial Sequence
  ENSG00000204248_18 (sequence is synthesized)
ccaggacctcctggacaacagggcacccctgggacccagggtcttcccgggccccagggtgccatcggccctcatggagagaagggtcctcaagggaagccagggctccccggcatgcct

SEQ ID NO: 740215 - DNA, 120 bp, Artificial Sequence
  ENSG00000204248_19 (sequence is synthesized)
ggctcagacggacccccgggtcacccagggaaggaaggtccccctggaaccaaaggaaaccagggtccctctggacctcagggacctctaggatacccaggacctcgaggggtcaagggt

SEQ ID NO: 740216 - DNA, 120 bp, Artificial Sequence
  ENSG00000204248_20 (sequence is synthesized)
gtggacggaattcggggtctgaagggtcataagggtgagaagggtgaggatggctttcctgggttcaaaggtgacataggcgtgaaaggtgacaggggcgaagttggagtccctggttcc

SEQ ID NO: 740217 - DNA, 120 bp, Artificial Sequence
  ENSG00000204248_21 (sequence is synthesized)
aggggagaggatggtcctgaggggccaaagggacgcactggaccgactggagaccctgggcccccagggctcatgggcgagaagggcaagctgggtgttcctggtctgcctggctatcct

SEQ ID NO: 740218 - DNA, 120 bp, Artificial Sequence
  ENSG00000204248_22 (sequence is synthesized)
ggacgtcagggacccaaggggtccctaggatttcctggctttcctggtgccagtggagagaagggagcccggggcctgtcggggaagtcagggcctcggggagaacggggccccacgggt

SEQ ID NO: 740219 - DNA, 120 bp, Artificial Sequence
  ENSG00000204248_23 (sequence is synthesized)
ccacggggtcagcggggaccccgaggtgccactgggaagtctggagctaagggaacatctggtggtgatggcccccatgggccccctggagagaggggcctccctggacctcagggtccc

SEQ ID NO: 740220 - DNA, 120 bp, Artificial Sequence
  ENSG00000204248_24 (sequence is synthesized)
aacgggtttcctggaccgaaaggacccccgggcccccctgggaaggatgggctgccgggacacccaggccaaagaggagaagtgggtttccaagggaagaccggcccccctggtcctcca

SEQ ID NO: 740221 - DNA, 120 bp, Artificial Sequence
  ENSG00000204248_25 (sequence is synthesized)
ggagtggtgggacctcagggagcagcaggagaaaccggccctatgggggagagaggtcacccaggccccccggggccccctggagagcagggactacctgggacagctggaaaagaagga

SEQ ID NO: 740222 - DNA, 120 bp, Artificial Sequence
  ENSG00000204248_26 (sequence is synthesized)
cccaggagagagaggcctcccaggcactgctggtggacctggtttgaaggggaatgaaggtccgtctggcccccctggccctgcaggctcccctggggaacgaggtgcagcaggatcagg

SEQ ID NO: 740223 - DNA, 120 bp, Artificial Sequence
  ENSG00000204248_27 (sequence is synthesized)
gggacccattggtccgccagggcgcccaggcccgcagggtccccctggagcagcaggagagaaaggtgtcccaggtgagaagggccccattggcccgactggccgagatggagtgcaggg

SEQ ID NO: 740224 - DNA, 120 bp, Artificial Sequence
  ENSG00000204248_28 (sequence is synthesized)
tcctgtggggcttcctggtcctgctgggcctccaggtgtggctggagaggatggagacaagggtgaggtgggggaccccggacagaagggcaccaaagggaacaagggtgaacatggccc

SEQ ID NO: 740225 - DNA, 120 bp, Artificial Sequence
  ENSG00000204248_29 (sequence is synthesized)
tcctggaccccctggacccattggtcctgtggggcagcctggagcagcgggagcagatggggagcccggagctcggggaccccagggacactttggagccaaaggtgatgaaggaacaag

SEQ ID NO: 740226 - DNA, 120 bp, Artificial Sequence
  ENSG00000204248_30 (sequence is synthesized)
aggattcaatgggcccccaggacccattggcctacagggtttgccaggcccctctggggagaagggagaaacaggagatgtgggtcctatgggaccacctggccccccaggacctcgagg

SEQ ID NO: 740227 - DNA, 120 bp, Artificial Sequence
  ENSG00000204248_31 (sequence is synthesized)
tccagctggacccaatggcgctgatggcccacaaggtcccccaggaggtgttgggaacctgggtccccctggagagaagggggaaccaggagagtcaggatctccagggatccagggcga

SEQ ID NO: 740228 - DNA, 120 bp, Artificial Sequence
  ENSG00000204248_32 (sequence is synthesized)
gccaggtgtcaagggtccacgcggggaacgtggagagaaaggagagtcggggcagccaggagagccagggccaccagggcctaaaggccccacaggcgatgatggccccaaagggaaccc

SEQ ID NO: 740229 - DNA, 120 bp, Artificial Sequence
  ENSG00000204248_33 (sequence is synthesized)
tggtcctgttggttttcctggtgaccctggcccccctggagaaggtggccctcggggccaggatggtgctaagggtgaccgaggcgaggatggtgagccaggacagcctggatcccctgg

SEQ ID NO: 740230 - DNA, 120 bp, Artificial Sequence
  ENSG00000204248_34 (sequence is synthesized)
tcccaccggggagaatggacccccagggccacttggaaagcgaggtcctgctggctcgcctggttccgaggggcgacaaggagggaagggagccaagggagatcctggcgctataggtgc

SEQ ID NO: 740231 - DNA, 120 bp, Artificial Sequence
  ENSG00000204248_35 (sequence is synthesized)
cccggggaagacaggcccggtgggtcctgcaggcccagcagggaaacctggccctgatggtctgagggggctcccaggctcagtgggtcagcaaggccgacctggagctacaggccaggc

SEQ ID NO: 740232 - DNA, 120 bp, Artificial Sequence
  ENSG00000204248_36 (sequence is synthesized)
tgggcccccaggtcctgtgggacccccagggctgcctggtctccggggcgatgctggagccaagggagagaagggccacccaggtctcattggactgattgggcccccgggtgagcaggg

SEQ ID NO: 740233 - DNA, 120 bp, Artificial Sequence
  ENSG00000204248_37 (sequence is synthesized)
agagaagggagatcggggacttcctgggcctcagggctcccctgggcagaagggtgagatgggtatcccaggagcatccggccccattggtcctggaggtccccccggcctccccggacc

SEQ ID NO: 740234 - DNA, 120 bp, Artificial Sequence
  ENSG00000204248_38 (sequence is synthesized)
tgctggccccaaaggagccaaaggagccacaggcccaggcggacccaagggagagaagggtgtgcagggccctccaggacacccgggtcccccaggcgaggtgatccagccactgcccat

SEQ ID NO: 740235 - DNA, 120 bp, Artificial Sequence
  ENSG00000204248_39 (sequence is synthesized)
tcagatgcccaagaagactcggcgctcggtggatggaagccgtctgatgcaggaagatgaggccataccgaccgggggagcccccggcagtcctggggggctggaggagatctttggctc

SEQ ID NO: 740236 - DNA, 120 bp, Artificial Sequence
  ENSG00000204248_40 (sequence is synthesized)
actcgactccctgcgggaggagatcgagcagatgaggcggccaacagggacccaggacagccctgctcgcacctgccaggacctgaagctgtgccacccagagcttcccgatggagagta

SEQ ID NO: 740237 - DNA, 120 bp, Artificial Sequence
  ENSG00000204248_41 (sequence is synthesized)
ctgggtcgaccccaaccagggctgtgctcgggatgccttccgagttttctgcaacttcacagcagggggtgagacctgtgtgacgcctagggatgacgtcacgcagttctcttacgtgga

SEQ ID NO: 740238 - DNA, 120 bp, Artificial Sequence
  ENSG00000204248_42 (sequence is synthesized)
ctcagagggctccccagtgggtgtggtccagctcaccttcctgcggctgctcagcgtctcagcccaccaggacgtctcctacccctgctctggagcagcccgtgacggtcccctgagact

SEQ ID NO: 740239 - DNA, 120 bp, Artificial Sequence
  ENSG00000204248_43 (sequence is synthesized)
ccgtggggccaatgaggatgagctgagcccggagactagcccctatgtcaaagaattcagagatggctgccagacacagcaaggccggacggtgctggaggtgcgaacgcctgtgctgga

SEQ ID NO: 740240 - DNA, 120 bp, Artificial Sequence
  ENSG00000204248_44 (sequence is synthesized)
gcagctgccagtgctggatgcctccttctcagacctgggagccccaccgaggcggggaggggtgctgctggggcctgtctgcttcatgggataggaccgtctctgtctgatcctgtccat

SEQ ID NO: 740241 - DNA, 120 bp, Artificial Sequence
  ENSG00000204248_45 (sequence is synthesized)
tcggaaccaggcccacctggaatcccacaacatcagctctgtgccacctcccaagagggctcctcactatctagggagccctgggccagggcgtggagagccctcagtcggggcaggcca

SEQ ID NO: 740242 - DNA, 120 bp, Artificial Sequence
  ENSG00000204248_46 (sequence is synthesized)
ggggaggggtgaagtggttgcctggacaccccacgggaggagtggcatctggggctcttggccctcccacctggagcctgttacccgttagagagctgagacccttatttaaaactcacc

SEQ ID NO: 740243 - DNA, 120 bp, Artificial Sequence
  ENSG00000204248_47 (sequence is synthesized)
tcccaatcaccccaaacaaatggaagagaagagaaaggacatggcgtattttgtatttaaaagtaattgtattaattatttaaagtgtggaaagcaaaataacaaaaaagagaaacgcca

SEQ ID NO: 740244 - DNA, 120 bp, Artificial Sequence
  ENSG00000204248_48 (sequence is synthesized)
acaaaaatcagcagatgttgaagacaggggtctcgggggtgggctccggcacccacatcctggagtcaggactttcctcagtgactgtgtgtaggggggtttcagggctgaaccccacct

SEQ ID NO: 740245 - DNA, 120 bp, Artificial Sequence
  ENSG00000204248_49 (sequence is synthesized)
ccctcccaccttcctcccacctcacctgtcgcacccactgtgaaagttggaatatgtggtctccctggcctcagggctctgactctgccagggtggggctctctaacccacaggtgttgg

SEQ ID NO: 740246 - DNA, 120 bp, Artificial Sequence
  ENSG00000204248_50 (sequence is synthesized)
ctgcctggcccatgtgcccactgtctcttccacttggtctgggtttggcaggcactgcctgctacttgagggccaggatgctcccccagggaagaaacggaatagtgtggggtgtgtgca

SEQ ID NO: 740247 - DNA, 120 bp, Artificial Sequence
  ENSG00000204248_51 (sequence is synthesized)
gggctgcatcccgcagatggctggaatattaaaattcttctatattggctggtaaattgccatggccctgagccactgagtatgttcattgccacccctgtccctcccctgggcacccct

SEQ ID NO: 740248 - DNA, 120 bp, Artificial Sequence
  ENSG00000204248_52 (sequence is synthesized)
cactttccctgatcctgcaattaaagggttaatgtgtggcatatggaagggactcccaggaccctgtgcccagcttccatgctgactgatggttaaataatgtgattgtctcctcccagg

SEQ ID NO: 740249 - DNA, 120 bp, Artificial Sequence
  ENSG00000204248_53 (sequence is synthesized)
aaaaccaaagcccacaagcccacagatccacagtcccacacactgcaggcctgggccagctgtgtttgcttgggtttgggatggattggagggcgtccgaggcatggatggtccccaggg

SEQ ID NO: 740250 - DNA, 120 bp, Artificial Sequence
  ENSG00000204248_54 (sequence is synthesized)
ctctcctccttagttgtcctccccaccctcatctccctattcccatcaccccctcctcctagtcctcattcatcagcctttttattttcatctaaaaataaaaagagttgttatgaagaa

SEQ ID NO: 740251 - DNA, 120 bp, Artificial Sequence
  ENSG00000204252_0 (sequence is synthesized)
gttcctgtcctcaccacacggactgagactgatttgattaaagcaccagagtgtaatggccctcagagcagggctggtcctggggttccacaccctgatgaccctcctgagcccgcagga

SEQ ID NO: 740252 - DNA, 120 bp, Artificial Sequence
  ENSG00000204252_1 (sequence is synthesized)
ggcaggggccaccaaggctgaccacatgggctcctacggacccgccttctaccagtcttacggcgcctcgggccagttcacccatgaatttgatgaggaacagctgttctctgtggacct

SEQ ID NO: 740253 - DNA, 120 bp, Artificial Sequence
  ENSG00000204252_2 (sequence is synthesized)
gaagaaaagcgaggccgtgtggcgtctgcctgagtttggtgactttgcccgctttgacccgcagggcgggctggccggcatcgccgcaatcaaagcccatctggacatcctggtggagcg

SEQ ID NO: 740254 - DNA, 120 bp, Artificial Sequence
  ENSG00000204252_3 (sequence is synthesized)
ctccaaccgcagcagagccatcaacgtgcctccacgggtgaccgtgctccccaagtctcgggtggagctgggccagcccaacatcctcatctgcatcgtggacaacatcttcccccctgt

SEQ ID NO: 740255 - DNA, 120 bp, Artificial Sequence
  ENSG00000204252_4 (sequence is synthesized)
gatcaatatcacctggctgcgcaacggccaaactgtcactgagggagtggcccagaccagcttctattcccagcctgaccatttgttccgcaagttccactacctgcccttcgtgccctc

SEQ ID NO: 740256 - DNA, 120 bp, Artificial Sequence
  ENSG00000204252_5 (sequence is synthesized)
agccgaggacgtctatgactgccaggtggagcactggggcctggatgcgccactcctcaggcattgggagctccaggtgcctattccaccaccagatgccatggagaccctggtctgtgc

SEQ ID NO: 740257 - DNA, 120 bp, Artificial Sequence
  ENSG00000204252_6 (sequence is synthesized)
cctgggcctggccatcggcctggtgggcttcctcgtgggcaccgtcctcatcatcatgggcacatatgtgtccagtgtccccaggtaatgatccttctgagagaaatgacttgtgggaga

SEQ ID NO: 740258 - DNA, 120 bp, Artificial Sequence
  ENSG00000204252_7 (sequence is synthesized)
caccctgcagatcctcatgggtttgtgacagcccctgcgtgctcagtgccctttaagtgcatcccgctgtgctgactttgagtgggatcaacatctgtcctacgggtcccctcttttttg

SEQ ID NO: 740259 - DNA, 120 bp, Artificial Sequence
  ENSG00000204252_8 (sequence is synthesized)
gccccagtattcatggcagggtttgttggacacctactagcttcccttcccattcaacacacacacacattcttgctctacccaaagctctggctggcagcactaaatgctttggtggtg

SEQ ID NO: 740260 - DNA, 120 bp, Artificial Sequence
  ENSG00000204252_9 (sequence is synthesized)
tttgcactgtgtcctttccaggccttggccagttcttccaggggtgaggcatgtggtgctggggattggcagccatcctggggcccacacaggtgtgtcttgctccatttggcccattgt

SEQ ID NO: 740261 - DNA, 120 bp, Artificial Sequence
  ENSG00000204252_10 (sequence is synthesized)
gtgttactttgtgaatgagccatttcacatggacttcatgaaatttgcctcctgagttcaggtttaccctgaaagggatgcagattatcctgttcctcacgaccccctcagctaacaaca

SEQ ID NO: 740262 - DNA, 120 bp, Artificial Sequence
  ENSG00000204252_11 (sequence is synthesized)
gttctgaagggtgctgggacaggacaggctcatggggactccactcctgcctgggtttactctgtatgaagaggccactggtatcctgccatgatgttatctcctttttctacttttccc

SEQ ID NO: 740263 - DNA, 120 bp, Artificial Sequence
  ENSG00000204252_12 (sequence is synthesized)
tagagtcccatgcatgataaagagaggcccaaggcttggataaggtggccacttccctcagtggagtcagtcatgttaggtaggaggtggtagagtcggtctgcgaggtatctcgtaaga

SEQ ID NO: 740264 - DNA, 120 bp, Artificial Sequence
  ENSG00000204252_13 (sequence is synthesized)
ggggaggtccacctagacacactctaaatatgtggcctagaagattttggtctacttttctgtgaacagaatttaaaacatacaaagagataaatcaccataccacatagtttatgtcag

SEQ ID NO: 740265 - DNA, 120 bp, Artificial Sequence
  ENSG00000204252_14 (sequence is synthesized)
atcccagcactttgggaggccaaggggacaggactgcttgaggccaagaggtggaaaccatcttgggctacatagagagaccccatctctacaaagaaagatttaaaaattaaccaggca

SEQ ID NO: 740266 - DNA, 120 bp, Artificial Sequence
  ENSG00000204252_15 (sequence is synthesized)
ccccatctctacaaagaaagatttaaaaattaaccaggcatggtggctcgcacctgtattcccagccactggggaggctgaggccggaggagtgcttgagcccaggagttcaaggctgca

SEQ ID NO: 740267 - DNA, 120 bp, Artificial Sequence
  ENSG00000204252_16 (sequence is synthesized)
tgtctctaaataaataaataaataaaatataaaaataacagtcatcacccagacctactgaattagaatctcgggagtgcagggggcagcaacagggaggctgtcttttctgagatgggg

SEQ ID NO: 740268 - DNA, 88 bp, Artificial Sequence
  ENSG00000204252_17 (sequence is synthesized)
aattagaatctcgggagtgcagggggcagcaacagggaggctgtcttttctgagatggggtctcactctgtcaccaggctggagtgcc

SEQ ID NO: 740269 - DNA, 120 bp, Artificial Sequence
  ENSG00000204252_18 (sequence is synthesized)
ttccctcccaaagtactggaattacaggcattagccactgtgcccagccgaggctgtcatttttaaccggctctggatgactctgatgcagccatcctggaccttggctgtggtctggta

SEQ ID NO: 740270 - DNA, 120 bp, Artificial Sequence
  ENSG00000204252_19 (sequence is synthesized)
actggaacccagtgacgtaatcaggtgccatcgggggtcatgggaaagggggatccccaaggtctgaggtggactaggaaggctttctgaagaacctgggtctgttagggcatcagccaa

SEQ ID NO: 740271 - DNA, 120 bp, Artificial Sequence
  ENSG00000204252_20 (sequence is synthesized)
tcaaggtacaagtaaatagaggcaaaatgagggtttgaactgtgagcagttggtcctggaaaagaaagaaaccaagagattatggggactcaatgggcttcttaagagagaataagttga

SEQ ID NO: 740272 - DNA, 120 bp, Artificial Sequence
  ENSG00000204252_21 (sequence is synthesized)
aatcaatgaccagaagaccctgatggaagtggaggagaatcatctcaggcaaactttttgtgtgccagtaacagaaaccctctttgtgtgatcacatgcaaagtataggatatttgcaat

SEQ ID NO: 740273 - DNA, 120 bp, Artificial Sequence
  ENSG00000204252_22 (sequence is synthesized)
atagccatggggaggagtgcagggcccaagggtagattttagccaggcctcccaggaacagaactcggatccgaaaagcccagagaagctagagctgcccctccaacactctcggatcca

SEQ ID NO: 740274 - DNA, 120 bp, Artificial Sequence
  ENSG00000204252_23 (sequence is synthesized)
catggtctgtgttctctagacccccctgcatgttagcggtgttctctctctgtggactgactgtccttctcagtgaacatgtccacccgacagctcctgagtttatatcatctcaaccct

SEQ ID NO: 740275 - DNA, 120 bp, Artificial Sequence
  ENSG00000204252_24 (sequence is synthesized)
cacaacccacagaggctgtgtctcctagtcacagctttaaattactggaaaaataaatgactggccaaacttggagcaggtgtccatcccagccctgtgtagttagagcaggaatcaaga

SEQ ID NO: 740276 - DNA, 120 bp, Artificial Sequence
  ENSG00000204252_25 (sequence is synthesized)
tctcaacacaaatgtggctgccaagcactcagccccggggcgaggggtcaagttcttctcagagaaagaggaataagttggttctcagaagacatcacaagatacgtgtgtacccaacaa

SEQ ID NO: 740277 - DNA, 120 bp, Artificial Sequence
  ENSG00000204252_26 (sequence is synthesized)
tctctgatctctgctgatcttttgcttagacgttaacttgatgcatcattggaaaggtgtttctctcatctctgtcctaaggcttgataaagtcattaaaattgtgttcttttgactaaa

SEQ ID NO: 740278 - DNA, 120 bp, Artificial Sequence
  ENSG00000204252_27 (sequence is synthesized)
tttggtgactttgcccgctttgacccgcagggcgggctggccggcatcgccgcaatcaaagcccatctggacatcctggtggagcgctccaaccgcagcagagccatcaacggaggctcc

SEQ ID NO: 740279 - DNA, 120 bp, Artificial Sequence
  ENSG00000204252_28 (sequence is synthesized)
aggtcttcccagacccctttggcacccctctccttgaggaatgacacctctcacccggactcccgcccagggaccagtcaaatataggagctcctggcgtccccactccctccccagtct

SEQ ID NO: 740280 - DNA, 120 bp, Artificial Sequence
  ENSG00000204256_0 (sequence is synthesized)
gtgttcctggtctgcggcagccatgctgaactcgtatggagaggcgagtgggggggacagagtccaggactgcgggataggaagctggggatatggacaagcagcagcgttatagcgctc

SEQ ID NO: 740281 - DNA, 120 bp, Artificial Sequence
  ENSG00000204256_1 (sequence is synthesized)
tgggtttcgggacataggcctgggccatgcggcccccttggccccttggcgcgacccccaggaacgttcggaaagctggtcctcgtggctgggggaaaggcggggggtgggggggaagcg

SEQ ID NO: 740282 - DNA, 120 bp, Artificial Sequence
  ENSG00000204256_2 (sequence is synthesized)
ggcacgtgaccccggtcagccaatctgggtgctgctgacgtggccgcgcggccccgatgctctccccacccccccagcccgttcgggaagggaggggctgggggctacgccccctccccc

SEQ ID NO: 740283 - DNA, 120 bp, Artificial Sequence
  ENSG00000204256_3 (sequence is synthesized)
agcacggcttcgttttctgggggggggttgacaccccggattacataccccgtaccaagccgagggcaactttggaggccccctggaaggctttaggatccagattcttcgctgctgctg

SEQ ID NO: 740284 - DNA, 120 bp, Artificial Sequence
  ENSG00000204256_4 (sequence is synthesized)
ccttaccgccgagaaccaccacccgccaggcgtcttgcggccacacccctggcgggttcaggcaggctacgcccacgcgacccctcccgtttccctgctttggccaatggaggagctacg

SEQ ID NO: 740285 - DNA, 120 bp, Artificial Sequence
  ENSG00000204256_5 (sequence is synthesized)
aatggcacgacctgctcgagcttggcagtctccagttgggctgtgcatggaagcttgggaagactttgttggaaggggaggcggggagagagtgctggaggctctggggcgatggcttcc

SEQ ID NO: 740286 - DNA, 120 bp, Artificial Sequence
  ENSG00000204256_6 (sequence is synthesized)
gcacctcttccaaccaccctctttccctggagtcggcggaccacagctcagccaattggcttggagatgtggcgggttgccacttccctgtgggtctctgcggcactcttctgcctggtg

SEQ ID NO: 740287 - DNA, 120 bp, Artificial Sequence
  ENSG00000204256_7 (sequence is synthesized)
actgacaccttggaaatgaagtttatgacgtcatcgttgcggctggccaatagaaaaagctcccgcggagaggtgttccttccccttcgactcagcttcttcacccgcgtgagcgagcgc

SEQ ID NO: 740288 - DNA, 120 bp, Artificial Sequence
  ENSG00000204256_8 (sequence is synthesized)
gcgcgcgcggagggggtggggaaaagctcaagcagggtggcgcgcatgagcggcgaagctcctcctccccgcctatatataaagggctggcgcggggctcggcggcgccatttcgtgctg

SEQ ID NO: 740289 - DNA, 120 bp, Artificial Sequence
  ENSG00000204256_9 (sequence is synthesized)
gagtggagcagcctctagaacgagctggaggattctgcctaccgatacagagccttcgagtcgtccggggccgccattacaatccacctccatccgcttggaaatggccttcgtcccggc

SEQ ID NO: 740290 - DNA, 120 bp, Artificial Sequence
  ENSG00000204256_10 (sequence is synthesized)
ctatgactggtcccagcgggcagtacagaccccctagaagcccctggagctcccctttttcgggccccgcccaatcctcggagtctgtccaccccctctactccgccctcaagaggattt

SEQ ID NO: 740291 - DNA, 120 bp, Artificial Sequence
  ENSG00000204256_11 (sequence is synthesized)
caaagatggaggcggcggctccctaaaccacttttcgtgttcatccgcctccatccgagatcgaaacgggacctcgtcggccccgtaggggcccgacaagaagagggaatccctgcagac

SEQ ID NO: 740292 - DNA, 120 bp, Artificial Sequence
  ENSG00000204256_12 (sequence is synthesized)
caacagcgggctatattgacgacggtgtctgagatcggggaccgtcttttgaagagtcagtccctccttagttgcccgcctcagctgaggccgccgccattttcttgctgtccgccgtct

SEQ ID NO: 740293 - DNA, 120 bp, Artificial Sequence
  ENSG00000204256_13 (sequence is synthesized)
gcagagcgcgccaagctgcccggagctctccgagaggccccaaagagactgctttcgtgccggccaggcagggggtttgtcgcctggaggcccaagaggaacggcctccccccaacttag

SEQ ID NO: 740294 - DNA, 120 bp, Artificial Sequence
  ENSG00000204256_14 (sequence is synthesized)
cgggttatgctggaccgggcggtgaggggaaccgaggccacccggactttccgcggctgagggcagcgccggttccttgcggtcaagatgctgcaaaacgtgactccccacaataagctc

SEQ ID NO: 740295 - DNA, 120 bp, Artificial Sequence
  ENSG00000204256_15 (sequence is synthesized)
cctggggaagggaatgcagggttgctggggctgggcccagaagcagcagcaccagggaagaggattcgaaaaccctctctcttgtatgagggctttgagagccccacaatggcttcggtg

SEQ ID NO: 740296 - DNA, 120 bp, Artificial Sequence
  ENSG00000204256_16 (sequence is synthesized)
cctgctttgcaacttacccctgccaacccaccacccccggaggtgtccaatcccaaaaagccaggacgagttaccaaccagctgcaatacctacacaaggtagtgatgaaggctctgtgg

SEQ ID NO: 740297 - DNA, 120 bp, Artificial Sequence
  ENSG00000204256_17 (sequence is synthesized)
aaacatcagttcgcatggccattccggcagcctgtggatgctgtcaaactgggtctaccggattatcacaaaattataaaacagcctatggacatgggtactattaagaggagacttgaa

SEQ ID NO: 740298 - DNA, 120 bp, Artificial Sequence
  ENSG00000204256_18 (sequence is synthesized)
aacaattattattgggctgcttcagagtgtatgcaagattttaataccatgttcaccaactgttacatttacaacaagcccactgatgatattgtcctaatggcacaaacgctggaaaag

SEQ ID NO: 740299 - DNA, 120 bp, Artificial Sequence
  ENSG00000204256_19 (sequence is synthesized)
atattcctacagaaggttgcatcaatgccacaagaagaacaagagctggtagtgaccatccctaagaacagccacaagaagggggccaagttggcagcgctccagggcagtgttaccagt

SEQ ID NO: 740300 - DNA, 120 bp, Artificial Sequence
  ENSG00000204256_20 (sequence is synthesized)
acagccctgtatactcctccacctgagatacctaccactgtcctcaacattccccacccatcagtcatttcctctccacttctcaagtccttgcactctgctggacccccgctccttgct

SEQ ID NO: 740301 - DNA, 120 bp, Artificial Sequence
  ENSG00000204256_21 (sequence is synthesized)
gttactgcagctcctccagcccagccccttgccaagaaaaaaggcgtaaagcggaaagcagatactaccacccctacacctacagccatcttggctcctggttctccagctagccctcct

SEQ ID NO: 740302 - DNA, 120 bp, Artificial Sequence
  ENSG00000204256_22 (sequence is synthesized)
gggagtcttgagcctaaggcagcacggcttccccctatgcgtagagagagtggtcgccccatcaagcccccacgcaaagacttgcctgactctcagcaacaacaccagagctctaagaaa

SEQ ID NO: 740303 - DNA, 120 bp, Artificial Sequence
  ENSG00000204256_23 (sequence is synthesized)
ggaaagctttcagaacagttaaaacattgcaatggcattttgaaggagttactctctaagaagcatgctgcctatgcttggcctttctataaaccagtggatgcttctgcacttggcctg

SEQ ID NO: 740304 - DNA, 120 bp, Artificial Sequence
  ENSG00000204256_24 (sequence is synthesized)
catgactaccatgacatcattaagcaccccatggacctcagcactgtcaagcggaagatggagaaccgtgattaccgggatgcacaggagtttgctgctgatgtacggcttatgttctcc

SEQ ID NO: 740305 - DNA, 120 bp, Artificial Sequence
  ENSG00000204256_25 (sequence is synthesized)
aactgctataagtacaatcccccagatcacgatgttgtggcaatggcacgaaagctacaggatgtatttgagttccgttatgccaagatgccagatgaaccactagaaccagggccttta

SEQ ID NO: 740306 - DNA, 120 bp, Artificial Sequence
  ENSG00000204256_26 (sequence is synthesized)
ccagtctctactgccatgccccctggcttggccaaatcgtcttcagagtcctccagtgaggaaagtagcagtgagagctcctctgaggaagaggaggaggaagatgaggaggacgaggag

SEQ ID NO: 740307 - DNA, 120 bp, Artificial Sequence
  ENSG00000204256_27 (sequence is synthesized)
gaagaagagagtgaaagctcagactcagaggaagaaagggctcatcgcttagcagaactacaggaacagcttcgggcagtacatgaacaactggctgctctgtcccagggtccaatatcc

SEQ ID NO: 740308 - DNA, 120 bp, Artificial Sequence
  ENSG00000204256_28 (sequence is synthesized)
aagcccaagaggaaaagagagaaaaaagagaaaaagaagaaacggaaggcagagaagcatcgaggccgagctggggccgatgaagatgacaaggggcctagggcaccccgcccacctcaa

SEQ ID NO: 740309 - DNA, 120 bp, Artificial Sequence
  ENSG00000204256_29 (sequence is synthesized)
cctaagaagtccaagaaagcaagtggcagtgggggtggcagtgctgctttaggcccttctggctttggaccttctggaggaagtggcaccaagctccccaaaaaggccacaaagacagcc

SEQ ID NO: 740310 - DNA, 120 bp, Artificial Sequence
  ENSG00000204256_30 (sequence is synthesized)
ccacctgccctgcctacaggttatgattcagaggaggaggaagagagcaggcccatgagttacgatgagaagcggcagctgagcctggacatcaacaaattacctggggagaagctgggc

SEQ ID NO: 740311 - DNA, 120 bp, Artificial Sequence
  ENSG00000204256_31 (sequence is synthesized)
cgagttgtgcatataatccaagccagggagccctctttacgtgattcaaacccagaagagattgagattgattttgaaacactcaagccatccacacttagagagcttgagcgctatgtc

SEQ ID NO: 740312 - DNA, 120 bp, Artificial Sequence
  ENSG00000204256_32 (sequence is synthesized)
ctttcctgcctacgtaagaaaccccggaagccctacaccattaagaagcctgtgggaaagacaaaggaggaactggctttggagaaaaagcgggaattagaaaagcggttacaagatgtc

SEQ ID NO: 740313 - DNA, 120 bp, Artificial Sequence
  ENSG00000204256_33 (sequence is synthesized)
agcggacagctcaattctactaaaaagccccccaagaaagcgaatgagaaaacagagtcatcctctgcacagcaagtagcagtgtcacgccttagcgcttccagctccagctcagattcc

SEQ ID NO: 740314 - DNA, 120 bp, Artificial Sequence
  ENSG00000204256_34 (sequence is synthesized)
agctcctcctcttcctcgtcgtcgtcttcagacaccagtgattcagactcaggctaaggggtcaggccagatggggcaggaaggctccgcaggaccggacccctagaccaccctgcccca

SEQ ID NO: 740315 - DNA, 120 bp, Artificial Sequence
  ENSG00000204256_35 (sequence is synthesized)
cctgccccttccccctttgctgtgacacttcttcatctcacccccccccgcccccctctaggagagctggctctgcagtgggggagggatgcagggacatttactgaaggagggacatgg

SEQ ID NO: 740316 - DNA, 120 bp, Artificial Sequence
  ENSG00000204256_36 (sequence is synthesized)
acaaaacaacattgaattcccagccccattggggagtgatctcttggacacagagcccccattcaaaatggggcagggcaagggtgggagtgtgcaaagccctgatctggagttacctga

SEQ ID NO: 740317 - DNA, 120 bp, Artificial Sequence
  ENSG00000204256_37 (sequence is synthesized)
ggccacagctgccctattcacttctaagggccctgttttgagattgtttgttctaatttattttaagctaggtaaggctggggggagggtggggccgtggtcccctcagcctccatgggg

SEQ ID NO: 740318 - DNA, 120 bp, Artificial Sequence
  ENSG00000204256_38 (sequence is synthesized)
agggaagaagggggagctctttttttacgttgatttttttttttctactctgttttccctttttccttccgctccatttggggccctgggggtttcagtcatctccccatttggtcccct

SEQ ID NO: 740319 - DNA, 120 bp, Artificial Sequence
  ENSG00000204256_39 (sequence is synthesized)
ggactgtctttgttgattctaacttgtaaataaagaaaatattattcaagttttgagttaccttaatatttgcttttgtagtgtttcaaaaggaacatcataagaattgtcttgataatt

SEQ ID NO: 740320 - DNA, 120 bp, Artificial Sequence
  ENSG00000204256_40 (sequence is synthesized)
ttgagggaaatattactgcagtgagaaaaggcaatagctaacctataattggattgtcttaatttttaaaccagtaggcttttgctgtgtttttaataaagtaaatatgacttttgtaaa

SEQ ID NO: 740321 - DNA, 120 bp, Artificial Sequence
  ENSG00000204256_41 (sequence is synthesized)
ggagggggagggctagtctgagccgcagccgccgcctcctccgctcgccctcctccctggcgctgaccgatggaccagccgctccgtggggaggactccggaccctggtgggggggcggg

SEQ ID NO: 740322 - DNA, 120 bp, Artificial Sequence
  ENSG00000204256_42 (sequence is synthesized)
ggggttctttcgcccccgtggcggagggcccctgagaggcggatacgggtgtgcctttgggggtgatgtggcgtgtggggggaaaggtccgagctcgcctggagggggagggtttttccc

SEQ ID NO: 740323 - DNA, 120 bp, Artificial Sequence
  ENSG00000204256_43 (sequence is synthesized)
tttgacttcaaacttgaaccccagggcacagatccttaaggtcatccccactgtgctctcaagagagggctcttcttgtggtgtctggggttggcagggaaaggtgagtcttcctgcctg

SEQ ID NO: 740324 - DNA, 120 bp, Artificial Sequence
  ENSG00000204256_44 (sequence is synthesized)
agactagtttggctatttctgtctctctgggggatgccatctctctttgcaaagataattctaaatggccagttaacagatacaataggctttgagcagtggtccccaacctttttggca

SEQ ID NO: 740325 - DNA, 120 bp, Artificial Sequence
  ENSG00000204256_45 (sequence is synthesized)
ccacagacagggtttgaggggatggtttttgggatgaaactgttccacctcagatcattgggccattggattcccataaggagcatgcagcctggatatgtaccatgcgcacttcacagt

SEQ ID NO: 740326 - DNA, 120 bp, Artificial Sequence
  ENSG00000204256_46 (sequence is synthesized)
agggttcatgcttctatgagaatctaatgcttctgctgatgtgacaggcagtgatgcccacatgccggctgttcacctcctgcgtagcccagtaacaggccacggactggtactggtctg

SEQ ID NO: 740327 - DNA, 120 bp, Artificial Sequence
  ENSG00000204256_47 (sequence is synthesized)
aacagtttttccaacatgtttgtgtgtcacatttttagtaatattttttcattaaggtatgtacgtacattgtctttttaaagacatgttattgcctacttacagtcgagcaaaatgctc

SEQ ID NO: 740328 - DNA, 120 bp, Artificial Sequence
  ENSG00000204256_48 (sequence is synthesized)
tgtttcactatacagtgtcccagtagcccacctcttacttggccattgaatggaaaaacagaagctccactctgggcaggaaataggatcactgaattataacagtgggaacatactgga

SEQ ID NO: 740329 - DNA, 120 bp, Artificial Sequence
  ENSG00000204256_49 (sequence is synthesized)
aaatgaggttcatctcatggttctgaggacagttgaggaaagatggtggggtctgtttgcattcaggattgtcagctcccaggataatgggatgtgttggttggcagctgacgttcaaga

SEQ ID NO: 740330 - DNA, 120 bp, Artificial Sequence
  ENSG00000204256_50 (sequence is synthesized)
agatgggatgctcaggcagtgatgggagcctaggtgcaaaacaataagtctccttatgtgggcacacagcagtctttggttcttggcattttacttttataaaataatagtggaacagaa

SEQ ID NO: 740331 - DNA, 120 bp, Artificial Sequence
  ENSG00000204256_51 (sequence is synthesized)
gctgtgtcattgccctccatgctgcagccacccaaacggggccgcttgtacttttgggggccagggcctgatccctggctgggggaaggggactctgctctcctgacgctcattttcccc

SEQ ID NO: 740332 - DNA, 120 bp, Artificial Sequence
  ENSG00000204256_52 (sequence is synthesized)
agatttgtccttcaaaccttttacagccaatgggagcgtggagggggggcgagcgggagagggccatggggggggaggggaatggccagcctcatgcctccgtacccattggagggcaaa

SEQ ID NO: 740333 - DNA, 120 bp, Artificial Sequence
  ENSG00000204257_0 (sequence is synthesized)
ggagttggggaagctgggttggctgggttggtagctcctacctactgtgtggcaagaaggtatgggtcatgaacagaaccaaggagctgcgctgctacagatgttaccacttctgtggct

SEQ ID NO: 740334 - DNA, 120 bp, Artificial Sequence
  ENSG00000204257_1 (sequence is synthesized)
gctaccccactcctgggccgtccctgaagctcctactccaatgtggccagatgacctgcaaaaccacacattcctgcacacagtgtactgccaggatgggagtcccagtgtgggactctc

SEQ ID NO: 740335 - DNA, 120 bp, Artificial Sequence
  ENSG00000204257_2 (sequence is synthesized)
tgaggcctacgacgaggaccagcttttcttcttcgacttttcccagaacactcgggtgcctcgcctgcccgaatttgctgactgggctcaggaacagggagatgctcctgccattttatt

SEQ ID NO: 740336 - DNA, 120 bp, Artificial Sequence
  ENSG00000204257_3 (sequence is synthesized)
tgacaaagagttctgcgagtggatgatccagcaaatagggccaaaacttgatgggaaaatcccggtgtccagagggtttcctatcgctgaagtgttcacgctgaagcccctggagtttgg

SEQ ID NO: 740337 - DNA, 120 bp, Artificial Sequence
  ENSG00000204257_4 (sequence is synthesized)
ttggtctgttttgtcagtaatctcttcccacccatgctgacagtgaactggcagcatcattccgtccctgtggaaggatttgggcctacttttgtctcagctgtcgatggactcagcttc

SEQ ID NO: 740338 - DNA, 120 bp, Artificial Sequence
  ENSG00000204257_5 (sequence is synthesized)
caggccttttcttacttaaacttcacaccagaaccttctgacattttctcctgcattgtgactcacgaaattgaccgctacacagcaattgcctattgggtaccccggaacgcactgccc

SEQ ID NO: 740339 - DNA, 120 bp, Artificial Sequence
  ENSG00000204257_6 (sequence is synthesized)
tcagatctgctggagaatgtgctgtgtggcgtggcctttggcctgggtgtgctgggcatcatcgtgggcattgttctcatcatctacttccggaagccttgctcaggtgactgattcttc

SEQ ID NO: 740340 - DNA, 120 bp, Artificial Sequence
  ENSG00000204257_7 (sequence is synthesized)
cagaccagagtttgatgccagcagcttcggccatccaaacagaggatgctcagatttctcacatcctgcccaggatctcctcttagggtagaagtctctgggacatccctggggtgtgtg

SEQ ID NO: 740341 - DNA, 120 bp, Artificial Sequence
  ENSG00000204257_8 (sequence is synthesized)
tgtagatttcccacctggggactctgctgtccctgggcttgcatcccagggatcccagagtggcctgcctatcacaaccacatcccttccccccacaaggcaataaatctcatttcttta

SEQ ID NO: 740342 - DNA, 120 bp, Artificial Sequence
  ENSG00000204257_9 (sequence is synthesized)
cccgcgcccgggtgctgacctcctgcctcagcgccccctcccccactacccgcggcctagcggggtagcctcgggtggccaggcttgtttcctcctcggtgggtgtaaggtgcggcttcg

SEQ ID NO: 740343 - DNA, 120 bp, Artificial Sequence
  ENSG00000204257_10 (sequence is synthesized)
ctggtcctggcctgaatccagcggaagcgcacgctgctgagctgtcagcggaggaaaatggggcctggacctggagatatgagggtctggagagaggggccccttccctggtgtcgtgtg

SEQ ID NO: 740344 - DNA, 120 bp, Artificial Sequence
  ENSG00000204257_11 (sequence is synthesized)
tgcattaacctcattgatctgtacactgaataattccccttgataccagctccccatctcaaatactttctggttctcttcatcaccttaatttttccaccagccttggtctgcaccctg

SEQ ID NO: 740345 - DNA, 120 bp, Artificial Sequence
  ENSG00000204257_12 (sequence is synthesized)
tgttcttttggtgggccgaagtacctagcatgtagtaggcattcagaactatgtattgaatgtgatgaattcaacaggtaccaactgatacctactgaatattaacacttgtgctactat

SEQ ID NO: 740346 - DNA, 120 bp, Artificial Sequence
  ENSG00000204257_13 (sequence is synthesized)
gcccagcaagatggatgggaagagtggaaatatctgatgacgtgactatgtcttagtgagaagacagtgcatggttagacatcaatgtgagctctagacaggaagtgctgaaggaagtca

SEQ ID NO: 740347 - DNA, 120 bp, Artificial Sequence
  ENSG00000204257_14 (sequence is synthesized)
gtccttgcctggaagaagacctcccttcagagcccagctcctcgctcatctctgtctcccaaagcctgacccactgtgttcttctctgccctcccctccatatgccatggcccctccaaa

SEQ ID NO: 740348 - DNA, 120 bp, Artificial Sequence
  ENSG00000204257_15 (sequence is synthesized)
cctacctactgtgtggcaagaaggtatgggtcatgaacagaaccaaggagctgcgctgctacagatgttaccacttctgtggctgctaccccactcctgggccgtccctgaagggtttcc

SEQ ID NO: 740349 - DNA, 120 bp, Artificial Sequence
  ENSG00000204257_16 (sequence is synthesized)
ttgactgacatctccgccccacaagggccccttctcacctggatcctaaagccttccagggggcctccaaagttgccctcggcttggtacgggctcctactccaatgtggccagatgacc

SEQ ID NO: 740350 - DNA, 120 bp, Artificial Sequence
  ENSG00000204257_17 (sequence is synthesized)
gtttcctgctggctgagcgattcctgccaagagcttcaaagaagagggattattttatgcagttatggggtcacttctcccattgctgtctttgggaggcctggtaggttaaggaacaga

SEQ ID NO: 740351 - DNA, 120 bp, Artificial Sequence
  ENSG00000204257_18 (sequence is synthesized)
gacattttctcctgcattgtgactcacgaaattgaccgctacacagcaattgcctattggggtgaggctttctccctggaattctggtccttttgggggcaaaaagggatagatccatgg

SEQ ID NO: 740352 - DNA, 120 bp, Artificial Sequence
  ENSG00000204257_19 (sequence is synthesized)
gaggaggcttctttctccactggtaccttgtttagtccattcctaccctaagcccatcccagtctcccatgtcatcccagacacccacgtcatttccctgggtgggaggctccctaacta

SEQ ID NO: 740353 - DNA, 120 bp, Artificial Sequence
  ENSG00000204262_0 (sequence is synthesized)
gcagactgtgctggagctggtgctgaaaaagggggtttgcagaggctgccctggggctggtgctgaaagaagagcccacagctgacttcatggtgctacaataacctcagaatctacttt

SEQ ID NO: 740354 - DNA, 120 bp, Artificial Sequence
  ENSG00000204262_1 (sequence is synthesized)
tcactctcaggagaacccacatgtctaatatttagacatgatggcaaactgggcggaagcaagacctctcctcattcttattgttttattagggcaatttgtctcaataaaagcccagga

SEQ ID NO: 740355 - DNA, 120 bp, Artificial Sequence
  ENSG00000204262_2 (sequence is synthesized)
agaagacgaggatgaaggatatggtgaagaaatagcctgcactcagaatggccagatgtacttaaacagggacatttggaaacctgccccttgtcagatctgtgtctgtgacaatggagc

SEQ ID NO: 740356 - DNA, 120 bp, Artificial Sequence
  ENSG00000204262_3 (sequence is synthesized)
cattctctgtgacaagatagaatgccaggatgtgctggactgtgccgaccctgtaacgccccctggggaatgctgtcctgtctgttcacaaacacctggaggtggcaataccaattttgg

SEQ ID NO: 740357 - DNA, 120 bp, Artificial Sequence
  ENSG00000204262_4 (sequence is synthesized)
tagaggaagaaagggacaaaagggagaaccaggattagtgcctgttgtaacaggcatacgtggtcgtccaggaccggcaggacctccaggatcacagggaccaagaggagagcgagggcc

SEQ ID NO: 740358 - DNA, 120 bp, Artificial Sequence
  ENSG00000204262_5 (sequence is synthesized)
aaaaggaagacctggccctcgtggacctcagggaattgatggagaaccaggtgttcctggtcaacctggtgctccaggacctcctggacatccgtcccacccaggacccgatggcttgag

SEQ ID NO: 740359 - DNA, 120 bp, Artificial Sequence
  ENSG00000204262_6 (sequence is synthesized)
caggccgttttcagctcaaatggctgggttggatgaaaaatctggacttgggagtcaagtaggactaatgcctggctctgtgggtcctgttggcccaaggggaccacagggtttacaagg

SEQ ID NO: 740360 - DNA, 120 bp, Artificial Sequence
  ENSG00000204262_7 (sequence is synthesized)
acagcaaggtggtgcaggacctacaggacctcctggtgaacctggtgatcctggaccaatgggtccgattggttcacgtggaccagagggccctcctggtaaacctggggaagatggtga

SEQ ID NO: 740361 - DNA, 120 bp, Artificial Sequence
  ENSG00000204262_8 (sequence is synthesized)
acctggcagaaatggaaatcctggtgaagtgggatttgcaggatctccgggagctcgtggatttcctggggctcctggtcttccaggtctgaagggtcaccgaggacacaaaggtcttga

SEQ ID NO: 740362 - DNA, 120 bp, Artificial Sequence
  ENSG00000204262_9 (sequence is synthesized)
aggccctaaaggtgaagttggagcacctggttccaagggtgaagctggccccactggtccaatgggtgccatgggtcctctgggtccgaggggaatgccaggagagagagggagacttgg

SEQ ID NO: 740363 - DNA, 120 bp, Artificial Sequence
  ENSG00000204262_10 (sequence is synthesized)
gccacagggtgctcctggacaacgaggtgcacatggtatgcctggaaaacctggaccaatgggtcctcttgggataccaggctcttctggttttccaggaaatcctggaatgaagggaga

SEQ ID NO: 740364 - DNA, 120 bp, Artificial Sequence
  ENSG00000204262_11 (sequence is synthesized)
agcaggtcctacaggggcgcgaggccctgaaggtcctcaggggcagagaggtgaaactgggcccccaggtccagttggctctccaggtcttcctggtgcaataggaactgatggtactcc

SEQ ID NO: 740365 - DNA, 120 bp, Artificial Sequence
  ENSG00000204262_12 (sequence is synthesized)
tggtgccaaaggcccaacgggctctccaggtacctctggtcctcctggctcagcagggcctcctggatctccaggacctcagggtagcactggtcctcagggaattcgaggccaaccggg

SEQ ID NO: 740366 - DNA, 120 bp, Artificial Sequence
  ENSG00000204262_13 (sequence is synthesized)
tgatccaggagttccaggtttcaaaggagaagctggcccaaaaggggaaccagggccacatggtattcagggtccgataggcccacccggtgaagaaggcaaaagaggtcccagaggtga

SEQ ID NO: 740367 - DNA, 120 bp, Artificial Sequence
  ENSG00000204262_14 (sequence is synthesized)
cccaggaacagttggtcctccagggccagtgggagaaaggggtgctcctggcaatcgtggttttccaggctctgatggtttacctgggccaaagggtgctcaaggagaacggggtcctgt

SEQ ID NO: 740368 - DNA, 120 bp, Artificial Sequence
  ENSG00000204262_15 (sequence is synthesized)
aggttcttcaggacccaaaggaagccagggggatccaggacgtccaggggaacctgggcttccaggtgctcggggtttgacaggaaatcctggtgttcaaggtcctgaaggaaaacttgg

SEQ ID NO: 740369 - DNA, 120 bp, Artificial Sequence
  ENSG00000204262_16 (sequence is synthesized)
acctttgggtgcgccaggggaagatggccgtccaggtcctccaggctccataggaatcagagggcagcccgggagcatgggccttccaggccccaaaggtagcagtggtgaccctgggaa

SEQ ID NO: 740370 - DNA, 120 bp, Artificial Sequence
  ENSG00000204262_17 (sequence is synthesized)
acctggagaagcaggaaatgctggagttcctgggcagaggggagctcctggaaaagatggtgaagttggtccttctggtcctgtgggcccgccgggtctagctggtgaaagaggagaaca

SEQ ID NO: 740371 - DNA, 120 bp, Artificial Sequence
  ENSG00000204262_18 (sequence is synthesized)
aggacctccaggccccacaggttttcaggggcttcctggtcctccagggcctcctggagaaggtggaaaaccaggtgatcaaggtgttcctggagatcccggagcagttggcccgttagg

SEQ ID NO: 740372 - DNA, 120 bp, Artificial Sequence
  ENSG00000204262_19 (sequence is synthesized)
acctagaggagaacgaggaaatcctggggaaagaggagaacctgggataactggactccctggtgagaagggaatggctggaggacatggtcctgatggcccaaaaggcagtccaggtcc

SEQ ID NO: 740373 - DNA, 120 bp, Artificial Sequence
  ENSG00000204262_20 (sequence is synthesized)
atctgggacccctggagatacaggcccaccaggtcttcaaggtatgccgggagaaagaggaattgcaggaactcctggccccaagggtgacagaggtggcataggagaaaaaggtgctga

SEQ ID NO: 740374 - DNA, 120 bp, Artificial Sequence
  ENSG00000204262_21 (sequence is synthesized)
aggcacagctggaaatgatggtgcaagaggtcttccaggtcctttgggccctccaggtccggcaggtcctactggagaaaagggtgaacctggtcctcgaggtttagttggccctcctgg

SEQ ID NO: 740375 - DNA, 120 bp, Artificial Sequence
  ENSG00000204262_22 (sequence is synthesized)
ctcccggggcaatcctggttctcgaggtgaaaatgggccaactggagctgttggttttgccggaccccagggtcctgacggacagcctggagtaaaaggtgaacctggagagccaggaca

SEQ ID NO: 740376 - DNA, 120 bp, Artificial Sequence
  ENSG00000204262_23 (sequence is synthesized)
gaagggagatgctggttctcctggaccacaaggtttagcaggatcccctggccctcatggtcctaatggtgttcctggactaaaaggtggtcgaggaacccaaggtccgcctggtgctac

SEQ ID NO: 740377 - DNA, 120 bp, Artificial Sequence
  ENSG00000204262_24 (sequence is synthesized)
aggatttcctggttctgcgggcagagttggacctccaggccctgctggagctccaggacctgcgggacccctaggggaacccgggaaggagggacctccaggtcttcgtggggaccctgg

SEQ ID NO: 740378 - DNA, 120 bp, Artificial Sequence
  ENSG00000204262_25 (sequence is synthesized)
ctctcatgggcgtgtgggagatcgaggaccagctggcccccctggtggcccaggagacaaaggggacccaggagaagatgggcaacctggtccagatggcccccctggtccagctggaac

SEQ ID NO: 740379 - DNA, 120 bp, Artificial Sequence
  ENSG00000204262_26 (sequence is synthesized)
gaccgggcagagaggaattgttggcatgcctgggcaacgtggagagagaggcatgcccggcctaccaggcccagcgggaacaccaggaaaagtaggaccaactggtgcaacaggagataa

SEQ ID NO: 740380 - DNA, 120 bp, Artificial Sequence
  ENSG00000204262_27 (sequence is synthesized)
aggtccacctggacctgtggggcccccaggctccaatggtcctgtaggggaacctggaccagaaggtccagctggcaatgatggtaccccaggacgggatggtgctgttggagaacgtgg

SEQ ID NO: 740381 - DNA, 120 bp, Artificial Sequence
  ENSG00000204262_28 (sequence is synthesized)
tctcggggtcctataggaccacctggtcgagctgggaaacgtggattacctggaccccaaggacctcgtggtgacaaaggtgatcatggagaccgaggtgacagaggtcagaagggccac

SEQ ID NO: 740382 - DNA, 120 bp, Artificial Sequence
  ENSG00000204262_29 (sequence is synthesized)
agaggctttactggtcttcagggtcttcctggccctcctggtccaaatggtgaacaaggaagtgctggaatccctggaccatttggcccaagaggtcctccaggcccagttggtccttca

SEQ ID NO: 740383 - DNA, 120 bp, Artificial Sequence
  ENSG00000204262_30 (sequence is synthesized)
ggtaaagaaggaaaccctgggccacttgggccaattggacctccaggtgtacgaggcagtgtaggagaagcaggacctgagggccctcctggtgagcctggcccacctggccctccgggt

SEQ ID NO: 740384 - DNA, 120 bp, Artificial Sequence
  ENSG00000204262_31 (sequence is synthesized)
ccccctggccaccttacagctgctcttggggatatcatggggcactatgatgaaagcatgccagatccacttcctgagtttactgaagatcaggcggctcctgatgacaaaaacaaaacg

SEQ ID NO: 740385 - DNA, 120 bp, Artificial Sequence
  ENSG00000204262_32 (sequence is synthesized)
gacccaggggttcatgctaccctgaagtcactcagtagtcagattgaaaccatgcgcagccccgatggctcgaaaaagcacccagcccgcacgtgtgatgacctaaagctttgccattcc

SEQ ID NO: 740386 - DNA, 120 bp, Artificial Sequence
  ENSG00000204262_33 (sequence is synthesized)
gcaaagcagagtggtgaatactggattgatcctaaccaaggatctgttgaagatgcaatcaaagtttactgcaacatggaaacaggagaaacatgtatttcagcaaacccatccagtgta

SEQ ID NO: 740387 - DNA, 120 bp, Artificial Sequence
  ENSG00000204262_34 (sequence is synthesized)
ccacgtaaaacctggtgggccagtaaatctcctgacaataaacctgtttggtatggtcttgatatgaacagagggtctcagttcgcttatggagaccaccaatcacctaatacagccatt

SEQ ID NO: 740388 - DNA, 120 bp, Artificial Sequence
  ENSG00000204262_35 (sequence is synthesized)
actcagatgacttttttgcgccttttatcaaaagaagcctcccagaacatcacttacatctgtaaaaacagtgtaggatacatggacgatcaagctaagaacctcaaaaaagctgtggtt

SEQ ID NO: 740389 - DNA, 120 bp, Artificial Sequence
  ENSG00000204262_36 (sequence is synthesized)
ctcaaaggggcaaatgacttagatatcaaagcagagggaaatattagattccggtatatcgttcttcaagacacttgctctaagcggaatggaaatgtgggcaagactgtctttgaatat

SEQ ID NO: 740390 - DNA, 120 bp, Artificial Sequence
  ENSG00000204262_37 (sequence is synthesized)
agaacacagaatgtggcacgcttgcccatcatagatcttgctcctgtggatgttggcggcacagaccaggaattcggcgttgaaattgggccagtttgttttgtgtaaagtaagccaaga

SEQ ID NO: 740391 - DNA, 120 bp, Artificial Sequence
  ENSG00000204262_38 (sequence is synthesized)
cacatcgacaatgagcaccaccatcaatgaccaccgccattcacaagaactttgactgtttgaagttgatcctgagactcttgaagtaatggctgatcctgcatcagcattgtatatatg

SEQ ID NO: 740392 - DNA, 120 bp, Artificial Sequence
  ENSG00000204262_39 (sequence is synthesized)
gtcttaagtgcctggcctccttatccttcagaatatttattttacttacaatcctcaagttttaattgattttaaatatttttcaatacaacagtttaggtttaagatgaccaatgacaa

SEQ ID NO: 740393 - DNA, 120 bp, Artificial Sequence
  ENSG00000204262_40 (sequence is synthesized)
tgaccacctttgcagaaagtaaactgattgaataaataaatctccgttttcttcaatttatttcagtgtaatgaaaaagttgcttagtatttatgaggaaattcttcttcctggcaggta

SEQ ID NO: 740394 - DNA, 120 bp, Artificial Sequence
  ENSG00000204262_41 (sequence is synthesized)
gcttaaagagtggggtatatagagccacaacacatgtttattttgcttggctgcagttgaaaaatagaaattagtgcccttttgtgacctctcattccaagattgtcaattaaaaatgag

SEQ ID NO: 740395 - DNA, 120 bp, Artificial Sequence
  ENSG00000204262_42 (sequence is synthesized)
tttaaaatgtttaacttgtgatcgagacctacatgcatgtcttgatattgtgtaactataatagagactctttaaggagaatcttaaaaaaaaaaaaacgtttctcactgtcttaaatag

SEQ ID NO: 740396 - DNA, 120 bp, Artificial Sequence
  ENSG00000204262_43 (sequence is synthesized)
aatttttaaatagtatatattcagtggcattttggagaacaaagtgaatttacttcgacttcttaaatttttgtaaaagactataagtttagacatctttctcattcaaatttaaagata

SEQ ID NO: 740397 - DNA, 120 bp, Artificial Sequence
  ENSG00000204262_44 (sequence is synthesized)
tctttctcctcttgatcaatctatcaatattgatagaagtcacactagtatataccatttaatacatttacactttcttatttaagaagatattgaatgcaaaataattgacatatagaa

SEQ ID NO: 740398 - DNA, 120 bp, Artificial Sequence
  ENSG00000204262_45 (sequence is synthesized)
ctttacaaacatatgtccaaggactctaaattgagactcttccacatgtacaatctcatcatcctgaagcctataatgaagaaaaagatctagaaactgagttgtggagctgactctaat

SEQ ID NO: 740399 - DNA, 120 bp, Artificial Sequence
  ENSG00000204262_46 (sequence is synthesized)
caaatgtgatgattggaattagaccatttggcctttgaactttcataggaaaaatgacccaacatttcttagcatgagctacctcatctctagaagctgggatggacttactattcttgt

SEQ ID NO: 740400 - DNA, 120 bp, Artificial Sequence
  ENSG00000204262_47 (sequence is synthesized)
ttatattttagatactgaaaggtgctatgcttctgttattattccaagactggagataggcagggctaaaaaggtattattatttttcctttaatgatggtgctaaaattcttcctataa

SEQ ID NO: 740401 - DNA, 120 bp, Artificial Sequence
  ENSG00000204262_48 (sequence is synthesized)
aattccttaaaaataaagatggtttaatcactaccattgtgaaaacataactgttagacttcccgtttctgaaagaaagagcatcgttccaatgcttgttcactgttcctctgtcatact

SEQ ID NO: 740402 - DNA, 120 bp, Artificial Sequence
  ENSG00000204262_49 (sequence is synthesized)
gtatctggaatgctttgtaatacttgcatgcttcttagaccagaacatgtaggtccccttgtgtctcaatactttttttttcttaattgcatttgttggctctattttaatttttttctt

SEQ ID NO: 740403 - DNA, 120 bp, Artificial Sequence
  ENSG00000204262_50 (sequence is synthesized)
ttaaaataaacagctgggaccatcccaaaagacaagccatgcatacaactttggtcatgtatctctgcaaagcatcaaattaaatgcacgcttttgtcatgtcagtggtttttgttttgt

SEQ ID NO: 740404 - DNA, 120 bp, Artificial Sequence
  ENSG00000204262_51 (sequence is synthesized)
gaaattcctttgaccatattagatctatttcatttccaatagtgaaaaggagatgtggtggtatactttgtttgccatttgtttaaaagatacaacggataccttctatcatgtatgtac

SEQ ID NO: 740405 - DNA, 120 bp, Artificial Sequence
  ENSG00000204262_52 (sequence is synthesized)
tggcttataaatgaaaatctatctacaacattacccacaaaggcaacatgacaccaattatcactgcctctgcccttaaaaatgtcagagtagtattattgataaaaagggcaagcaata

SEQ ID NO: 740406 - DNA, 120 bp, Artificial Sequence
  ENSG00000204262_53 (sequence is synthesized)
gatttttcatgactgaataaactgtaataataaaacatatgtctcaaagtgtatcacatatgaatttagcctaattgttttcagtttcattctcaatatttagtttacaacatcattttc

SEQ ID NO: 740407 - DNA, 120 bp, Artificial Sequence
  ENSG00000204262_54 (sequence is synthesized)
ccctaaactggttatattttgacctgtatatcttaaatttgagtatttatatgcctaaatacatgtgtgagttttgtttgacttccaagtccaaactataagattatataagttcatata

SEQ ID NO: 740408 - DNA, 120 bp, Artificial Sequence
  ENSG00000204262_55 (sequence is synthesized)
gatgaatcagaaatatgtggtaatactattaagtcacaaacactaacaatttccaactatagaaataacagttcttatttggattttgggaatgctaccaataaaagcctgcccagacca

SEQ ID NO: 740409 - DNA, 120 bp, Artificial Sequence
  ENSG00000204262_56 (sequence is synthesized)
aaaggtcttgagaactctggccacctgccactcatctgtgctatacccaatagcagccttattaggcttttggatcctagagttgctgctatctctcgtaccacaaaaccacctgcttct

SEQ ID NO: 740410 - DNA, 120 bp, Artificial Sequence
  ENSG00000204262_57 (sequence is synthesized)
agtcatgtttccttggtagtcaggagttggagaataatggcatgtgagatctgctgtgattcaaccacggtttattcattttgcttaccctgaattaaatgaaacttaaataaaaacata

SEQ ID NO: 740411 - DNA, 120 bp, Artificial Sequence
  ENSG00000204264_0 (sequence is synthesized)
gctttcacttcctcctccgagagcggacagatctctgggtgctgggcggtcatggcgctactagatgtatgcggagccccccgagggcagcggccggaatcggctctcccggttgcggga

SEQ ID NO: 740412 - DNA, 120 bp, Artificial Sequence
  ENSG00000204264_1 (sequence is synthesized)
agcgggcgtcgctcggacccaggacactacagtttctctatgcgatctccagagctcgctttaccccggggaatgcagcccacagaattcttccagtccctgggtggggacggagaaagg

SEQ ID NO: 740413 - DNA, 120 bp, Artificial Sequence
  ENSG00000204264_2 (sequence is synthesized)
aacgttcagattgagatggcccatggcaccaccacgctcgccttcaagttccagcatggagtgattgcagcagtggattctcgggcctcagctgggtcctacattagtgccttacgggtg

SEQ ID NO: 740414 - DNA, 120 bp, Artificial Sequence
  ENSG00000204264_3 (sequence is synthesized)
aacaaggtgattgagattaacccttacctgcttggcaccatgtctggctgtgcagcagactgtcagtactgggagcgcctgctggccaaggaatgcaggctgtactatctgcgaaatgga

SEQ ID NO: 740415 - DNA, 120 bp, Artificial Sequence
  ENSG00000204264_4 (sequence is synthesized)
gatgtgccagtaccggggcatgggcctctctatgggcagtatgatctgtggctgggataagaagggtcctggactctactacgtggatgaacatgggactcggctctcaggaaatatgtt

SEQ ID NO: 740416 - DNA, 120 bp, Artificial Sequence
  ENSG00000204264_5 (sequence is synthesized)
ctccacgggtagtgggaacacttatgcctacggggtcatggacagtggctatcggcctaatcttagccctgaagaggcctatgaccttggccgcagggctattgcttatgccactcacag

SEQ ID NO: 740417 - DNA, 120 bp, Artificial Sequence
  ENSG00000204264_6 (sequence is synthesized)
agacagctattctggaggcgttgtcaatatgtaccacatgaaggaagatggttgggtgaaagtagaaagtacagatgtcagtgacctgctgcaccagtaccgggaagccaatcaataatg

SEQ ID NO: 740418 - DNA, 120 bp, Artificial Sequence
  ENSG00000204264_7 (sequence is synthesized)
gtggtggtggcagctgggcaggtctcctctgggaggtcttggccgactcagggacctaagccacgttaagtccaaggagaagaagaggcctagcctgagccaaagagagagtacgggctc

SEQ ID NO: 740419 - DNA, 120 bp, Artificial Sequence
  ENSG00000204264_8 (sequence is synthesized)
agcagccagaggaggccggtgaagtgcatcttctgcgtgttctctatttgaacaagcatttcccccagggaagtttctgggtgccccactaagtagaataaagaaaaacggttataaata

SEQ ID NO: 740420 - DNA, 120 bp, Artificial Sequence
  ENSG00000204264_9 (sequence is synthesized)
aaactccgcagtgctcagccaagcagggagcaacgctaggaagggcgggcagaaagggcacgctcttgtgggtgactacaggttaggagaccgttgaacctggaggggccctaggatgga

SEQ ID NO: 740421 - DNA, 120 bp, Artificial Sequence
  ENSG00000204264_10 (sequence is synthesized)
ccccgtggaaagattcagagactgcgccctctccctggcgccgccttcccctacacgcggcgggtatattctgttgcagttggcccaggacctgtttccaagactctgccccctcgcact

SEQ ID NO: 740422 - DNA, 120 bp, Artificial Sequence
  ENSG00000204264_11 (sequence is synthesized)
tccgtccctcctggttttgtaaagtgatgctcataggaacccccaccccgcgtgacactactcccagctcctggctgacttctagtcttctggttgaagctgcgcctttagatgacacga

SEQ ID NO: 740423 - DNA, 120 bp, Artificial Sequence
  ENSG00000204264_12 (sequence is synthesized)
ctacccacccctgtttccagcggatgcccgggcctggaggtacctcttactgtaacccatcgccaagtgggcttttgaaggcgcctgttcctttctcgctttcttcggaagacccttgac

SEQ ID NO: 740424 - DNA, 120 bp, Artificial Sequence
  ENSG00000204264_13 (sequence is synthesized)
ccatcattcccccgacccccataacgggagagcagagaagccggtccccagtgtgatggtcctggtccaggcactaactgtccttttctcggaaaaggcagggggatgtggaaaagagtc

SEQ ID NO: 740425 - DNA, 120 bp, Artificial Sequence
  ENSG00000204264_14 (sequence is synthesized)
gggaagcccctagggatgcagggaggcgggcgctgaggagtggagggtcgcctgagaggaggaggcgagagcgggagcgcggggtacagggtcgggggtagccttcagtcccggagagcg

SEQ ID NO: 740426 - DNA, 120 bp, Artificial Sequence
  ENSG00000204264_15 (sequence is synthesized)
ccagacccaaagaagaggccacatggggatggggcctgagaggaggaagtgcaagttaggacaaagagttacaggtgaggtgggggctcccaaaggaagacaagagaactttcctgccct

SEQ ID NO: 740427 - DNA, 120 bp, Artificial Sequence
  ENSG00000204264_16 (sequence is synthesized)
tgtccacacacaaatggtggagcctttttcatggggttatcacatgatataggaggtgtgtggtgtcttgggaaacctatgaaatttgcctgctggcctcctctcagcaactcactgttg

SEQ ID NO: 740428 - DNA, 120 bp, Artificial Sequence
  ENSG00000204264_17 (sequence is synthesized)
gctttatgcatggaagaaaccctttaagtcactctcaaaattttttagtaatggtaacatgtgcttgctttcatttctgttgtgctggaaaatggaaaaggttgatactggcatgcctct

SEQ ID NO: 740429 - DNA, 120 bp, Artificial Sequence
  ENSG00000204264_18 (sequence is synthesized)
tcttttccttctcccaagccatttccttctagagattggttattaactgtttcatttattgatggttagatcatttctgcatatctcctcaccctcatactccctaaaaccttttcctgg

SEQ ID NO: 740430 - DNA, 120 bp, Artificial Sequence
  ENSG00000204264_19 (sequence is synthesized)
ctcctttccacaggaggccaactctgcaacaaagtggaagtggatattgatttaggacacactgggggatctatggggtcatcccttctctcccaaagctccatcttcttccaggtgcct

SEQ ID NO: 740431 - DNA, 120 bp, Artificial Sequence
  ENSG00000204264_20 (sequence is synthesized)
agcctagtggttaatccctggatctctcagatcattgctccttactcttgtcctatgtggtccatcttagtgctaatagtatatttcacaaaacagctttttggtgataagacccttctc

SEQ ID NO: 740432 - DNA, 120 bp, Artificial Sequence
  ENSG00000204264_21 (sequence is synthesized)
ccaaatctcagcctgtgctccactcataagccagatagtacgtcaggtatttagcactgacacatccaccctggcgggacagtatcatttactaggctgcctttgtatgtttcagatact

SEQ ID NO: 740433 - DNA, 120 bp, Artificial Sequence
  ENSG00000204264_22 (sequence is synthesized)
ttaaattccaaatctttctctgatctttagatcctacaaaataattcctttccaatgcttatctctttaatcatttcctgccccatcaagttggaaagagctaacctctctttcctcact

SEQ ID NO: 740434 - DNA, 120 bp, Artificial Sequence
  ENSG00000204264_23 (sequence is synthesized)
gcagtatgatctgtggctgggataagaaggtgggtgctctccattcttcatgttcccccaccatgttccctatggatgacagatctgtttcccatcatatactcctactccctccctgac

SEQ ID NO: 740435 - DNA, 120 bp, Artificial Sequence
  ENSG00000204264_24 (sequence is synthesized)
aagatgcatggcatatagagtgcttggttatagaactgtttcagtatatccatggactatttattggcccagatatgaatcattgcatgtgttttgtaagcttgtcccttttgttaaaca

SEQ ID NO: 740436 - DNA, 120 bp, Artificial Sequence
  ENSG00000204264_25 (sequence is synthesized)
tggcatatagagtgcttggttatagaactgtttcagtatatccatggactatttattggcccagatatgaatcattgcatgtgttttgtaagcttgtcccttttgttaaacagttgattt

SEQ ID NO: 740437 - DNA, 120 bp, Artificial Sequence
  ENSG00000204264_26 (sequence is synthesized)
caagtttgtttttcctttttcatttctaaagttcgatgactttaccaaagtggtttcctaattccaatgttcttgtggtaatattaattcttttgttcactttttatgtctcatatttga

SEQ ID NO: 740438 - DNA, 120 bp, Artificial Sequence
  ENSG00000204267_0 (sequence is synthesized)
agagccggtagcgaggttgggagagacggagcggacctcagcgctgaagcagaagtccccggagctgcggtctccccgccgcggctgagccatgcggctccctgacctgagaccctggac

SEQ ID NO: 740439 - DNA, 120 bp, Artificial Sequence
  ENSG00000204267_1 (sequence is synthesized)
ctccctgctgctggtggacgcggctttactgtggctgcttcagggccctctggggactttgcttcctcaagggctgccaggactatggctggaggggaccctgcggctgggagggctgtg

SEQ ID NO: 740440 - DNA, 120 bp, Artificial Sequence
  ENSG00000204267_2 (sequence is synthesized)
ggggctgctaaagctaagagggctgctgggatttgtggggacactgctgctcccgctctgtctggccacccccctgactgtctccctgagagccctggtcgcgggggcctcacgtgctcc

SEQ ID NO: 740441 - DNA, 120 bp, Artificial Sequence
  ENSG00000204267_3 (sequence is synthesized)
cccagccagagtcgcttcagccccttggagctggctgctggtggggtacggggctgcggggctcagctggtcactgtgggctgttctgagccctcctggagcccaggagaaggagcagga

SEQ ID NO: 740442 - DNA, 120 bp, Artificial Sequence
  ENSG00000204267_4 (sequence is synthesized)
ccaggtgaacaacaaagtcttgatgtggaggctgctgaagctctccaggccggacctgcctctcctcgttgccgccttcttcttccttgtccttgctgttttgggtgagacattaatccc

SEQ ID NO: 740443 - DNA, 120 bp, Artificial Sequence
  ENSG00000204267_5 (sequence is synthesized)
tcactattctggtcgtgtgattgacatcctgggaggtgattttgacccccatgcctttgccagtgccatcttcttcatgtgcctcttctcctttggcagctcactgtctgcaggctgccg

SEQ ID NO: 740444 - DNA, 120 bp, Artificial Sequence
  ENSG00000204267_6 (sequence is synthesized)
aggaggctgcttcacctacaccatgtctcgaatcaacttgcggatccgggagcagcttttctcctccctgctgcgccaggacctcggtttcttccaggagactaagacaggggagctgaa

SEQ ID NO: 740445 - DNA, 120 bp, Artificial Sequence
  ENSG00000204267_7 (sequence is synthesized)
ctcacggctgagctcggataccaccctgatgagtaactggcttcctttaaatgccaatgtgctcttgcgaagcctggtgaaagtggtggggctgtatggcttcatgctcagcatatcgcc

SEQ ID NO: 740446 - DNA, 120 bp, Artificial Sequence
  ENSG00000204267_8 (sequence is synthesized)
tcgactcaccctcctttctctgctgcacatgcccttcacaatagcagcggagaaggtgtacaacacccgccatcaggaagtgcttcgggagatccaggatgcagtggccagggcggggca

SEQ ID NO: 740447 - DNA, 120 bp, Artificial Sequence
  ENSG00000204267_9 (sequence is synthesized)
ggtggtgcgggaagccgttggagggctgcagaccgttcgcagttttggggccgaggagcatgaagtctgtcgctataaagaggcccttgaacaatgtcggcagctgtattggcggagaga

SEQ ID NO: 740448 - DNA, 120 bp, Artificial Sequence
  ENSG00000204267_10 (sequence is synthesized)
ggcagcctgctttcctttatgatctaccaggagagcgtggggagctatgtgcagaccctggtatacatatatggggatatgctcagcaacgtgggagctgcagagaaggttttctcctac

SEQ ID NO: 740449 - DNA, 120 bp, Artificial Sequence
  ENSG00000204267_11 (sequence is synthesized)
atggaccgacagccaaatctgccttcacctggcacgcttgcccccaccactctgcagggggttgtgaaattccaagacgtctcctttgcatatcccaatcgccctgacaggcctgtgctc

SEQ ID NO: 740450 - DNA, 120 bp, Artificial Sequence
  ENSG00000204267_12 (sequence is synthesized)
aaggggctgacgtttaccctacgtcctggtgaggtgacggcgctggtgggacccaatgggtctgggaagagcacagtggctgccctgctgcagaatctgtaccagcccacagggggacag

SEQ ID NO: 740451 - DNA, 120 bp, Artificial Sequence
  ENSG00000204267_13 (sequence is synthesized)
gtgctgctggatgaaaagcccatctcacagtatgaacactgctacctgcacagccaggtggtttcagttgggcaggagcctgtgctgttctccggttctgtgaggaacaacattgcttat

SEQ ID NO: 740452 - DNA, 120 bp, Artificial Sequence
  ENSG00000204267_14 (sequence is synthesized)
gggctgcagagctgcgaagatgataaggtgatggcggctgcccaggctgcccacgcagatgacttcatccaggaaatggagcatggaatatacacagatgtaggggagaagggaagccag

SEQ ID NO: 740453 - DNA, 120 bp, Artificial Sequence
  ENSG00000204267_15 (sequence is synthesized)
ctggctgcgggacagaaacaacgtctggccattgcccgggcccttgtacgagacccgcgggtcctcatcctggatgaggctactagtgccctagatgtgcagtgcgagcaggccaaaacc

SEQ ID NO: 740454 - DNA, 120 bp, Artificial Sequence
  ENSG00000204267_16 (sequence is synthesized)
ctttggaagttcatgatattttgaatttcaatggatatttcctgggaataatgagttcaaatgaacgaatatgtggaacaaagcatcaccaacatttattttttcaggatgaggtgatgg

SEQ ID NO: 740455 - DNA, 120 bp, Artificial Sequence
  ENSG00000204267_17 (sequence is synthesized)
acaaaaccatcacagggaaattgaggcaaatagtacatgtaaaacaatacttcgggtgagtccacctatcccaaagtcgtatcaaagaagtggctgcagattggagcccaaagcctttgg

SEQ ID NO: 740456 - DNA, 120 bp, Artificial Sequence
  ENSG00000204267_18 (sequence is synthesized)
ttcctcagtttccaaatggattctcactaggtgggatcatgagtttgctttggacaccccaaattctaactatttcttttgtttcttacatcctttccctcttccccagccccttcccct

SEQ ID NO: 740457 - DNA, 120 bp, Artificial Sequence
  ENSG00000204267_19 (sequence is synthesized)
catgttacacctcttgctggtttgagacgtcaatcaccactgagaaagaattaaaccagtattttgagctggcaaaattcttagcctagtacaattccttcaattaaactgtagctcaac

SEQ ID NO: 740458 - DNA, 120 bp, Artificial Sequence
  ENSG00000204267_20 (sequence is synthesized)
ccgtggggatcgcacagtgctggtgattgctcacaggctgcagacagttcagcgcgcccaccagatcctggtgctccaggagggcaagctgcagaagcttgcccagctctaggagggaca

SEQ ID NO: 740459 - DNA, 120 bp, Artificial Sequence
  ENSG00000204267_21 (sequence is synthesized)
ggacctctattcccgcctggtgcagcagcggctgatggactgaggccccagggatactgggccctcttctcaggggcgtctccaggacccagagctgttcctgctttgagtttccctaga

SEQ ID NO: 740460 - DNA, 120 bp, Artificial Sequence
  ENSG00000204267_22 (sequence is synthesized)
gctgtgcggccagatagctgttcctgagttgcaggcacgatggagatttggacactgtgtgcttttggtggggtagagaggtggggtggggtggggtgggggctgtctgtgtccaggaaa

SEQ ID NO: 740461 - DNA, 120 bp, Artificial Sequence
  ENSG00000204267_23 (sequence is synthesized)
cttaattccctggtgactagagctttgcctggtgatgaggagtattttgtggcataatacatatattttaaaatattttccttcttacatgaactgtatacattcatatagaaaatttag

SEQ ID NO: 740462 - DNA, 120 bp, Artificial Sequence
  ENSG00000204267_24 (sequence is synthesized)
acaatataaaaaagtacaaagaagaaaagtaaaagtacccattgtttcacttcctggagataaccatagttgctattttgctgcctgtcccatcagtcgtttatctgttgtttgagatag

SEQ ID NO: 740463 - DNA, 120 bp, Artificial Sequence
  ENSG00000204267_25 (sequence is synthesized)
aaattaaccaaaaatgacataaatattcatgagattgccttcctatatccttccttgttcctaccagtgtctgctattttgaagaagctagggtctggagggacagagaacagttccctg

SEQ ID NO: 740464 - DNA, 120 bp, Artificial Sequence
  ENSG00000204267_26 (sequence is synthesized)
aacagtattaatagcgacattggtaacagctaccatttatagagttttaatgggagtaggagctatgctaagtgtttttcatgtattatcgtttttaatcattatccccaaccctatgag

SEQ ID NO: 740465 - DNA, 120 bp, Artificial Sequence
  ENSG00000204267_27 (sequence is synthesized)
gttggttattatccccattttacagatgaggaaactgaagctcaaagaggctcaatgactttcccaaggtggtcgtagtggtggagttggagtttgaacacaggcctgaccctagagtcc

SEQ ID NO: 740466 - DNA, 120 bp, Artificial Sequence
  ENSG00000204267_28 (sequence is synthesized)
acaccctgacccaatcaattatattgcatcttgggtccataaaccctaatccataatcccatcaagaaaagctctgctgctcttagctctaaataattcagaatctattctcttctctcc

SEQ ID NO: 740467 - DNA, 120 bp, Artificial Sequence
  ENSG00000204267_29 (sequence is synthesized)
agtcccgttgttatagtcttcactcatagacttaagatgatcccatcaccagagaggtttctctaccattagcttccctcttccggccattcttcacaaagtcatttttctaaattctgt

SEQ ID NO: 740468 - DNA, 120 bp, Artificial Sequence
  ENSG00000204267_30 (sequence is synthesized)
gtcacatacgatgatggcatttctggaaattccttcaggtgctctcaagccctgctgcagagatccttttcagagcacacactgttccagcccatctgtctcaccctctcctgttgtatc

SEQ ID NO: 740469 - DNA, 120 bp, Artificial Sequence
  ENSG00000204267_31 (sequence is synthesized)
cagctccacgacaaacttctgccttccccaacacctttgtgcctttgcatatggtgttttcttgcccattttctgctcgactcgcccctgattttcaagttcaagacttaactcagggtt

SEQ ID NO: 740470 - DNA, 120 bp, Artificial Sequence
  ENSG00000204267_32 (sequence is synthesized)
caggtcttccaggaggccttacttatgtcgtcagtctggggaactctccatgtgcttctatcactgtgcggttacctctttcacagcccttttaaagttctatcttccctttcccacctt

SEQ ID NO: 740471 - DNA, 120 bp, Artificial Sequence
  ENSG00000204267_33 (sequence is synthesized)
ttttgaccttccactagaccatgagcacctgggcggaaagccatatatcttattaagctttatatctgctacctggccgagggcctaattcatagtggagaataaatagtcaattgaata

SEQ ID NO: 740472 - DNA, 120 bp, Artificial Sequence
  ENSG00000204267_34 (sequence is synthesized)
aatgaataaatatctccaccatcgtactaatcttaatcctccctgcccactcccaccactgaaaatgcaacattgtacacatcactggttgttgggagggacttaccttggaaagttgct

SEQ ID NO: 740473 - DNA, 120 bp, Artificial Sequence
  ENSG00000204267_35 (sequence is synthesized)
attctaggaaagagaaaccttcatattcctggaaacagcaggtagtttccagtgctggcaatgaattccccagaactgctgttttggattttttcttgcctggcagctgttgggagcagg

SEQ ID NO: 740474 - DNA, 120 bp, Artificial Sequence
  ENSG00000204267_36 (sequence is synthesized)
gtgcagtgaggatggggtgagagtgggcagtttcttgtgcagatttgcctttctttcatcctggggctgacttgcagctccacacccatccatctctcaaatttcacagagggtaaaata

SEQ ID NO: 740475 - DNA, 120 bp, Artificial Sequence
  ENSG00000204267_37 (sequence is synthesized)
ggcatttggagagaaagaactctggcctgattcctttctctcccacaaatgtcctttattcataaaacaggaataataattcctgtatctcccaactacatggaagctgcagccctcaca

SEQ ID NO: 740476 - DNA, 120 bp, Artificial Sequence
  ENSG00000204267_38 (sequence is synthesized)
gaagaagatgatctgagaaattctttgatttcctcagtacagttatacccatgcatcataatactttaagcctggaaggcatcttaaaaataatgcaacagtcaaacctaattttacaga

SEQ ID NO: 740477 - DNA, 120 bp, Artificial Sequence
  ENSG00000204267_39 (sequence is synthesized)
gaaactgacatgaaatcacgcagctaatcatgataaagctgggtggaaaacttatcttgatgggcagtacaggaagatgcagtagaccttaagatgtcctgaaagtttcttatctcaggg

SEQ ID NO: 740478 - DNA, 120 bp, Artificial Sequence
  ENSG00000204267_40 (sequence is synthesized)
gaaactcccaggtaggctttatgtcagggacacagaaaaatgctccctgaaagtcaaaatattcgggctagacagacaaattcctgtaagtgtggtttgtctgggaaccacagatgtcac

SEQ ID NO: 740479 - DNA, 120 bp, Artificial Sequence
  ENSG00000204267_41 (sequence is synthesized)
taatcctggtttgctccagagttctttttgttcactcctaccccccatcaccatttgattgatctccttaccctgtaatttccccttcttgtcgcttacctgcagtatctttcccaccca

SEQ ID NO: 740480 - DNA, 120 bp, Artificial Sequence
  ENSG00000204267_42 (sequence is synthesized)
ggcatgccttattctttctaaaggaaagtatgaatggagaggggaaagcttgggaaactgatagatttccttggatgccaaaacacctccatagcctgtctgcccggccctatgtggaaa

SEQ ID NO: 740481 - DNA, 120 bp, Artificial Sequence
  ENSG00000204267_43 (sequence is synthesized)
cagcattgagtttcaagtcctttatgcctccacccagggatagccacttgtaatccacatggcaattgtgaaacaagcaggaaatgcgtaattgtcagaattttgtggggaaaggactag

SEQ ID NO: 740482 - DNA, 120 bp, Artificial Sequence
  ENSG00000204267_44 (sequence is synthesized)
ggaataaggaaaacaaagatcttccttgtgttttagagctgtcagctagaggagcacctgcttgagtctgatgccatctaatggtcccagaagaaactgggttttgaacctagagttcca

SEQ ID NO: 740483 - DNA, 120 bp, Artificial Sequence
  ENSG00000204267_45 (sequence is synthesized)
tggactcttaggaattagactactactactactaagcattcactggtgcttactatgtgctattgctgtgccaagtatctgaaacctgtcttcttaccttatttttcaagataattctat

SEQ ID NO: 740484 - DNA, 120 bp, Artificial Sequence
  ENSG00000204267_46 (sequence is synthesized)
gtggcaggtattactatctcaattctaagagtgagaaaatggagttttagaaacatttactaacttgcctgggtcacatagctaaggaagaggtggacttgcccagctttgcataaaact

SEQ ID NO: 740485 - DNA, 120 bp, Artificial Sequence
  ENSG00000204267_47 (sequence is synthesized)
cctcaaaagagttgcctatactccctgactccacttatcttcctactatcctctttttaaaatatattatttatttatttaaataagcaatatatgaatgtggtttgaaattcaaaagac

SEQ ID NO: 740486 - DNA, 120 bp, Artificial Sequence
  ENSG00000204267_48 (sequence is synthesized)
acaaagaagtatacagaggaaagcctcactctcaatccttctcaaggtttgctaattcctcttgcataggcaatccgttcttccagctttgtgtttatctttccagagaagtttactgtg

SEQ ID NO: 740487 - DNA, 120 bp, Artificial Sequence
  ENSG00000204267_49 (sequence is synthesized)
tattaagcaaatatgtatatctttattcttgctcagtattttcgcaaacagcagctgtctaagttcactgttctgaactttattttttaaattaaaaatatatggctatgtagtattcta

SEQ ID NO: 740488 - DNA, 120 bp, Artificial Sequence
  ENSG00000204267_50 (sequence is synthesized)
caaatctgccttcacctggcacgcttgcccccaccactctgcagggggttgtgaaattccaagacgtctcctttgcatatcccaatcgccctgacaggcctgtgctcaaggtgcctgaaa

SEQ ID NO: 740489 - DNA, 120 bp, Artificial Sequence
  ENSG00000204267_51 (sequence is synthesized)
gagggaggaaacctggacccttgctctctgctgctaatgcataattggacatcacagcctatagttcatttgcctctgagaacctggtcttgcctctgctaagaagagaaatggagggat

SEQ ID NO: 740490 - DNA, 120 bp, Artificial Sequence
  ENSG00000204271_0 (sequence is synthesized)
gagactgcggcgcagcagcgactagtgggagtccgatgtgggagaggggctgcggccaccgccaccgccgccgccaccaggaaggcggaggacgcaggagccaagagcaagggacgccgc

SEQ ID NO: 740491 - DNA, 120 bp, Artificial Sequence
  ENSG00000204271_1 (sequence is synthesized)
cacggtcatcttcgcctgccccgccgccctcttagagacactcattgcctatggatcatcctctcccagcttttgcaagcaccgggctgctcgcccgctgattttcctcctccataggct

SEQ ID NO: 740492 - DNA, 120 bp, Artificial Sequence
  ENSG00000204271_2 (sequence is synthesized)
cactgcggaggcaacggcgaggtgtccgatttgtgcacttgaggcccgcaatccgggacggtggggaatctgcgcctcctggccgggcatgaagaccccgtttggaaaggcagctgcagg

SEQ ID NO: 740493 - DNA, 120 bp, Artificial Sequence
  ENSG00000204271_3 (sequence is synthesized)
gcagcggtccaggacgggcgctggccacggcagtgtgtctgttaccatgataaagaggaaggctgcacacaagaagcataggagccgacccacctcccagcctcgggggaacatcgtggg

SEQ ID NO: 740494 - DNA, 120 bp, Artificial Sequence
  ENSG00000204271_4 (sequence is synthesized)
ctgcagaattcagcacggatggaaagatggagatgaacctctaacacagtggaaaggaaccgttctggatcaggtacctgtaaatccctctctgtatcttatcaaatatgatggatttga

SEQ ID NO: 740495 - DNA, 120 bp, Artificial Sequence
  ENSG00000204271_5 (sequence is synthesized)
ctgtgtttatggattggaacttcacagagatgaaagagtgtcatcacttgaagtccttcctaatagagttgcatcatctagaatcagtgatacacacttggcagaaataatggttggcaa

SEQ ID NO: 740496 - DNA, 120 bp, Artificial Sequence
  ENSG00000204271_6 (sequence is synthesized)
agcagtggaacatatttttgagacagaggaaggttccaaaaatgaatggagggggatggtcttagctcaggcacctgtcatgaacacatggttttacattacctatgagaaagatcctgt

SEQ ID NO: 740497 - DNA, 120 bp, Artificial Sequence
  ENSG00000204271_7 (sequence is synthesized)
attatatatgtaccagctcttagatgattataaagatggtgacctccgcatccttcaagattccaatgattctcctctggcagagagggagccaggagaagtcatagacagcctggtagg

SEQ ID NO: 740498 - DNA, 120 bp, Artificial Sequence
  ENSG00000204271_8 (sequence is synthesized)
caaacaggtggaatacgccaaagacgatggctccaagagaactggcatggtcattcatcaggtagaagcaaaaccctctgtgtacttcatcaaatttgatgatgatttccatatctatgt

SEQ ID NO: 740499 - DNA, 120 bp, Artificial Sequence
  ENSG00000204271_9 (sequence is synthesized)
ctacgatttggtaaaaacatcttagaggtcatcttgaaatttgccaaatatatgagactctaaatctgtagacacagaaagtcttgattgctttccagtttgtaagaaccatcttctccc

SEQ ID NO: 740500 - DNA, 120 bp, Artificial Sequence
  ENSG00000204271_10 (sequence is synthesized)
tttttgcacgttttgcttggcaaaaaaattggaacttctgccctctcatacgtttttggaagaaaccttttgcccatctgtccaaccttttcactggttcctctccgcaatttaactgat

SEQ ID NO: 740501 - DNA, 120 bp, Artificial Sequence
  ENSG00000204271_11 (sequence is synthesized)
tagtgagaagggtaaagtctgacatccattggctcatacttttttttatcttgggtggtgttaatagattaaaggtagctgaacacctctcacctcactctttttggcacttggactcta

SEQ ID NO: 740502 - DNA, 120 bp, Artificial Sequence
  ENSG00000204271_12 (sequence is synthesized)
cactcattgaggtgtgaagcttgctgagatatcccatgtgactggctgggtaagtgtctttgcaatctcaaatctcccccaagtggcttcaaaaatctaacttgggaaagagtgggaagc

SEQ ID NO: 740503 - DNA, 120 bp, Artificial Sequence
  ENSG00000204271_13 (sequence is synthesized)
ccattttggtctcttgttcaagttgcattctcagttctaactgtactaaaagtaaggctaataattttgctctctttccggttctttcacctattgctcaactgttttagaattaagaag

SEQ ID NO: 740504 - DNA, 120 bp, Artificial Sequence
  ENSG00000204271_14 (sequence is synthesized)
gtaattactttgcattttagtacctaaccataggctgagaaaccttgcaaaactgataagaagacaagcatttggggaccaaactccaagtggagagatcaagatttctggtggagctta

SEQ ID NO: 740505 - DNA, 120 bp, Artificial Sequence
  ENSG00000204271_15 (sequence is synthesized)
agtgaaaggttttagtcatcagtggcattagggtctctcttgtctccaatagctctggctggtatctgcagacatggagtaggttttaactgatagaagctgtgcaggcagactttagca

SEQ ID NO: 740506 - DNA, 120 bp, Artificial Sequence
  ENSG00000204271_16 (sequence is synthesized)
caaatggtctttgccagcccagaggagcattaagccaggctctagctagagccctcagtcacaggcaaaggctgggtttggctgggtttggacagatctgtccagaacctcaaaatgaaa

SEQ ID NO: 740507 - DNA, 120 bp, Artificial Sequence
  ENSG00000204271_17 (sequence is synthesized)
gaggagaaacctagaatcaaactgagatacagatttctttgctgtgctaagagagactcaagttttagatttgattcttaggagactgaattcagagtcccagcatgtgaggtgggcaag

SEQ ID NO: 740508 - DNA, 120 bp, Artificial Sequence
  ENSG00000204271_18 (sequence is synthesized)
tgtgagaaccaagaatggctgaaagcaggctatacttccttgcagggactggtgggctcatctattatggtatcccagcaggacttggaacacagtcagtggtaggtaatctgtaggctt

SEQ ID NO: 740509 - DNA, 120 bp, Artificial Sequence
  ENSG00000204271_19 (sequence is synthesized)
aatgatgttttaagtgctggcattggtagatagaaatctaatagatttttgttagtgtttggatttttaactatcctgtttcttggctggccctaagaaacttatatgcagataagggtg

SEQ ID NO: 740510 - DNA, 120 bp, Artificial Sequence
  ENSG00000204271_20 (sequence is synthesized)
agttctactgtggcagaaaagtaaacaatggaagggcctttgagctttccattattaaagagccattggcggaggttaaccaaagcctaggaaagaaaagttgaagtacaagcatggttt

SEQ ID NO: 740511 - DNA, 120 bp, Artificial Sequence
  ENSG00000204271_21 (sequence is synthesized)
ttgagagaagcacctggccaaaaccaaagctttctcattgaggttctcacagaagctccattagcagtaacagcctaataaggccatggagttctgcacatttggggctgggactcaagg

SEQ ID NO: 740512 - DNA, 120 bp, Artificial Sequence
  ENSG00000204271_22 (sequence is synthesized)
cagtacaatcatattgggactgtactgcaagatatcttccaaattagtttaagttcacaggtcatggagtccagactaccggcacagattggcatcctgctgaggatgaaacaaagaaga

SEQ ID NO: 740513 - DNA, 120 bp, Artificial Sequence
  ENSG00000204271_23 (sequence is synthesized)
tgttctcttttctcctatgttttatctgtctacttttgctttttgatgccactaagtctctactatgatgtttgactgacaacagcaatgtgggtctgtattgccctatgttctaagtcc

SEQ ID NO: 740514 - DNA, 120 bp, Artificial Sequence
  ENSG00000204271_24 (sequence is synthesized)
tggggtcatatatttgcttaaaaaaactgttctagtggctggggactagtgtgctttctaatttttttgatgtgaggttgatattgtgataatcttatgtcttcttgaccctttggactc

SEQ ID NO: 740515 - DNA, 120 bp, Artificial Sequence
  ENSG00000204271_25 (sequence is synthesized)
tttaatatgtatgacatgcaattgtggggttagattaattcaactcctgaggtcctgaaggaacttcacccagtcaagaggaagacagccaaggctgcagctgctgaaggaaccccatat

SEQ ID NO: 740516 - DNA, 120 bp, Artificial Sequence
  ENSG00000204271_26 (sequence is synthesized)
ctgggcagacatctttgtgagatctatatggctgaaatgagaaaaacgagaaattgggaaaggcagaattttggactttaattattttggactttgaattagaaatttaattttgggcag

SEQ ID NO: 740517 - DNA, 120 bp, Artificial Sequence
  ENSG00000204271_27 (sequence is synthesized)
tcctttttcccttggagtttaatagttgatggggtgggggtgaggtcatatagttcaaactaaggcatttttattatgttgttgatattgtattatttggagtattttaatgctatcttt

SEQ ID NO: 740518 - DNA, 120 bp, Artificial Sequence
  ENSG00000204271_28 (sequence is synthesized)
gggagtcattgtataattgttgtcagctatgtcaggaaatatggctggacataattgtaaattagggctgcaattgtgatcaaattttcagtctagggtgtaatgtagccttagagttaa

SEQ ID NO: 740519 - DNA, 120 bp, Artificial Sequence
  ENSG00000204271_29 (sequence is synthesized)
tttaattactgttctattttgacttatttcagagcctcttgggggcaaaaacaactgctcaccaatcttacattgatgggagcagaacttttctaagatactgttggtctccctggaagg

SEQ ID NO: 740520 - DNA, 120 bp, Artificial Sequence
  ENSG00000204271_30 (sequence is synthesized)
ggacagccacagccctgtttgttgaccagagtcttgagcattaaccattgtggcttaagagaatgaaaatgtacaagggtatgatgggatctatcctcttcctctctccatgctcctgac

SEQ ID NO: 740521 - DNA, 120 bp, Artificial Sequence
  ENSG00000204271_31 (sequence is synthesized)
tcaagaaaaggaaaagacttgcatctctcaaaaatgtttggaagaaagttctacccatcttctcttacactcattcaatcttatgcttgggaggaggaataacttgatgagattgagaaa

SEQ ID NO: 740522 - DNA, 120 bp, Artificial Sequence
  ENSG00000204271_32 (sequence is synthesized)
atggttataatggataggcagcttaggccactcttggatcttgagttcgttccacacagcaagatgtgggaaagactgcagtccttcactacatggctgggtaaacatctgctttctaga

SEQ ID NO: 740523 - DNA, 120 bp, Artificial Sequence
  ENSG00000204271_33 (sequence is synthesized)
cccaactatctctccttggggtgggggaatcccaaagtcgttagacttatgatagaagttcatttcagcctcaggtccaagccatgttctccaatccagctctatcagctataaagctgg

SEQ ID NO: 740524 - DNA, 120 bp, Artificial Sequence
  ENSG00000204271_34 (sequence is synthesized)
tatctattttgattcttttttacagttttaatatataaattgttttttagaaaaataacacatgcctatggtaaaagtcaaacagtataaaagggtatactattaaaaagtaagtctctc

SEQ ID NO: 740525 - DNA, 120 bp, Artificial Sequence
  ENSG00000204271_35 (sequence is synthesized)
ttcctccttctcacccctggcctcagttccctggtcccattttcaaaaagtaacaactgttaccagttactgatgtatcattccagagatattccatgtatttacaagcatattgtgtgt

SEQ ID NO: 740526 - DNA, 120 bp, Artificial Sequence
  ENSG00000204271_36 (sequence is synthesized)
gggtatgtgtgtatcaggttttttttttttttttacacaaatggtggcatactatacatgctgttctgaattttgcttttttcactgaacaatatattaaagctgatatcttaatcccta

SEQ ID NO: 740527 - DNA, 120 bp, Artificial Sequence
  ENSG00000204271_37 (sequence is synthesized)
agaaggggcaggggcgcagagggttgaggttaggtgaggggaggggcgcgtgctaaaccagaagaggtaaaccaatgcagtgagagagaggtggttgtgggctccacagcttctgatttg

SEQ ID NO: 740528 - DNA, 120 bp, Artificial Sequence
  ENSG00000204271_38 (sequence is synthesized)
gaggaagctgcgagaccgagagcctaggagcaccttccacgcccagggctgtggtacaggttggtgggggaggggcgccacgcggtgtttggcaggaaggggaggcctctctactgaccg

SEQ ID NO: 740529 - DNA, 120 bp, Artificial Sequence
  ENSG00000204271_39 (sequence is synthesized)
gaagcagggcgaggggaatggggaaacgcttcgtatttcaccgaaccgcagatcttagccagactgagctggggaggaaggttactgcaggcactcagccagggtgccttgatttccagc

SEQ ID NO: 740530 - DNA, 120 bp, Artificial Sequence
  ENSG00000204271_40 (sequence is synthesized)
gctttcgggaaaaacaggtgtgggtttactgggtgcgctgattaggagaaaaagctctccgtgttatgcattgattttgttaatttcctttctcggtccacctggcaactgtgctcctct

SEQ ID NO: 740531 - DNA, 120 bp, Artificial Sequence
  ENSG00000204271_41 (sequence is synthesized)
gaaaggaaccgttctggatcagctcctttgaataaacctgcccaccaccaagaacccatacatgactttcttttcattgtatcaaagtaatgtgtccaccggtgtgagcaccagcaactc

SEQ ID NO: 740532 - DNA, 120 bp, Artificial Sequence
  ENSG00000204271_42 (sequence is synthesized)
acttcttcctcagacatctctaaagctggaaagattttgagggacaatatggtttccttcaccccacaccaatgttatgaatgagaccagcagaccaacagcaaacacctagaaggaaca

SEQ ID NO: 740533 - DNA, 120 bp, Artificial Sequence
  ENSG00000204271_43 (sequence is synthesized)
gctgttcttcatgggtgactgctgtgaaaccaacaggatggcctcttttctatttaatcctaagagtgggcataaggcacagacgcatcccagagtctcctaccaagttgactctcctgt

SEQ ID NO: 740534 - DNA, 120 bp, Artificial Sequence
  ENSG00000204271_44 (sequence is synthesized)
caaggccaaatttttcaccagctccagatactgaaaggagtactttttcttcattcatagtcaaggtaaaatattgggtaggtcctttggagttctagactcagtttgagattacagaag

SEQ ID NO: 740535 - DNA, 120 bp, Artificial Sequence
  ENSG00000204271_45 (sequence is synthesized)
atatgctcaacatcctcctttgacctggtcccagtttcaccatatttgctagatgctttatagtctctggtaaggaggtgtacaattctctgattttatttcagtttttagggaatttta

SEQ ID NO: 740536 - DNA, 120 bp, Artificial Sequence
  ENSG00000204271_46 (sequence is synthesized)
ttttgttcatttcaacaagaaaaattacataaacaggtaacagctccactcaaagctgttttaaatgaacaaaatattggactttgtgaacaaatatgatactttttctttctgcaatta

SEQ ID NO: 740537 - DNA, 120 bp, Artificial Sequence
  ENSG00000204271_47 (sequence is synthesized)
ttggctagcaatcttattttactaaatctatactgacaaatttaatttggtccatttatttgagtttaaagactatttcaaactctccccagtgaaacagtcatgggccattgctatcct

SEQ ID NO: 740538 - DNA, 120 bp, Artificial Sequence
  ENSG00000204271_48 (sequence is synthesized)
caaaagaactaaatatataaatagcagctttcctcaaaaaagatgataaagtcttcttttccctttagagcataaatttcagtggcaggtaaaactattttagcaacaatatgctcactt

SEQ ID NO: 740539 - DNA, 120 bp, Artificial Sequence
  ENSG00000204271_49 (sequence is synthesized)
cttccatgatatgtttttcttccctactaagttgaaagtttttctcagtttccatagccactcacaagtttttctctacctaactgaagttgccctcttctgctggtcattaggacatta

SEQ ID NO: 740540 - DNA, 120 bp, Artificial Sequence
  ENSG00000204271_50 (sequence is synthesized)
acttttagaatgatttctgtttcagcctcttgttttgaaggcaggcttttaatttcctcagagaaattgcaatggaacgaaaatttgttctctcttttacatatgtacacttgtataaga

SEQ ID NO: 740541 - DNA, 120 bp, Artificial Sequence
  ENSG00000204271_51 (sequence is synthesized)
gctgttcttcatgggtgactgctgtgaaaccaacaggatggcctcttttctatttaatcctaagagtgggcataagacagctcaccttccaaccactggaagtgtttatagcatctccac

SEQ ID NO: 740542 - DNA, 120 bp, Artificial Sequence
  ENSG00000204271_52 (sequence is synthesized)
agtagaaatatccctgtaccaatcacacagaataattctagtcagatacagtttttgtaaggacaaaaaagaaaatagatctaaaaaggtaaataagagagatcattgcatagtccttta

SEQ ID NO: 740543 - DNA, 120 bp, Artificial Sequence
  ENSG00000204271_53 (sequence is synthesized)
cagtttaacaaaggttgtttagaaaggacccgctccatacttatccgattctccattttccactgaatttcctttccaaacaatgtgcagtattctcaatatctatcaaaattccataaa

SEQ ID NO: 740544 - DNA, 120 bp, Artificial Sequence
  ENSG00000204271_54 (sequence is synthesized)
agttatgactgccaatttatacaaactgtccaccaagatgttttctcccaaacgtcgcattctggagccaagccattaaagacttggactgtgacacagttttcattatgagaaccatac

SEQ ID NO: 740545 - DNA, 120 bp, Artificial Sequence
  ENSG00000204271_55 (sequence is synthesized)
acattggtgtaattaccctcacctcccatttactaccctataaagggaatccctatggccttaggcttacacacacatctaggagctctaaggaccaggaaaagttaaaagtggaccaac

SEQ ID NO: 740546 - DNA, 120 bp, Artificial Sequence
  ENSG00000204271_56 (sequence is synthesized)
cactcaataaggtggctcttcagacccttcagtgcctaccacgagggggaacaattccacaggaaatggcttaggcagagtcatcccaaacctaagctgcctctactggctagaaatcaa

SEQ ID NO: 740547 - DNA, 120 bp, Artificial Sequence
  ENSG00000204271_57 (sequence is synthesized)
ctgtggagttccaaccaacagtaaccagccagccgtaccccaggctttcattctcataaaagactaaactactgtaaacccaaaataaaattctaaggcccccccaaccatctgaatgga

SEQ ID NO: 740548 - DNA, 120 bp, Artificial Sequence
  ENSG00000204271_58 (sequence is synthesized)
catcctcctctgccagggcactctaaaatttaacctgaaagactggttcaggatatggcagaaagtggggggatcggacctacctcattataccctccaacattaacataaacacagacc

SEQ ID NO: 740549 - DNA, 120 bp, Artificial Sequence
  ENSG00000204271_59 (sequence is synthesized)
ttaaatatgataagaaacattctaatgtattctctctgaagccatctacctggaggcaccatcaggatgatgaaactttggtgtctacaacctcttactataacccagacatcgcatttt

SEQ ID NO: 740550 - DNA, 120 bp, Artificial Sequence
  ENSG00000204271_60 (sequence is synthesized)
attgataataaccagttgccaatcagaaaatttttaaatctacctataaattgaaagcacccccccttccagttgtcctgcctttctggaccgaatcaatgtgtatcttaaatgtattta

SEQ ID NO: 740551 - DNA, 120 bp, Artificial Sequence
  ENSG00000204271_61 (sequence is synthesized)
aatgatgtctcatgtcttctaaaatgtgtaaaatcaagctgcaccccaaccgccttgggcacatgttctcaggatatcctgagggctgtgtcacaggccatagtcacttatatttgtctc

SEQ ID NO: 740552 - DNA, 120 bp, Artificial Sequence
  ENSG00000204271_62 (sequence is synthesized)
caaggtaaggcctgcctcctaggtcttcatttcctgttcatacattgaatctgacagtggcaacatattccctttggaggaaattctgtctaggcctaaagcagtgtggtctagctttat

SEQ ID NO: 740553 - DNA, 120 bp, Artificial Sequence
  ENSG00000204271_63 (sequence is synthesized)
ggtttgattaaagacaatcacacaatgtcccatatatttcctacatcacatgtaggccatcaacagtctgatcaaggtttggctatgtcaagtccaacacagctcctaggtatcaaatga

SEQ ID NO: 740554 - DNA, 120 bp, Artificial Sequence
  ENSG00000204271_64 (sequence is synthesized)
tcataaactctggaggttcactctcactcatggcacctgtcttagcctattttctgttgcttataacaaaatacctgaaaatttatttaaaaaaataaaatgtatttcttacagttctgg

SEQ ID NO: 740555 - DNA, 120 bp, Artificial Sequence
  ENSG00000204271_65 (sequence is synthesized)
aggctgggaagttcaagattgaggggccacatctggtgagggccttcttgatggtagaaactctctgcagtcctgaggtagcacagggcatcacatggcaaggggactaagtatgctaac

SEQ ID NO: 740556 - DNA, 120 bp, Artificial Sequence
  ENSG00000204271_66 (sequence is synthesized)
atggtagcttaggtctctctttctcttcttataaaaccaccagttctacttccatgataatctgtcagtggattaatccattcacaagggcagaaccctcatgttccaatcacctgttaa

SEQ ID NO: 740557 - DNA, 120 bp, Artificial Sequence
  ENSG00000204271_67 (sequence is synthesized)
aggccatacctctgaatactgccacattggagattaagtttcaacataagttttggagggaatattcaaaccatagaagttcctttctgtgtatttttatgcatgcatgtacacatgtgt

SEQ ID NO: 740558 - DNA, 120 bp, Artificial Sequence
  ENSG00000204271_68 (sequence is synthesized)
gtagagacacagagaggaccagagaggcagaaaacgcatatatacacctgtacattaaatccatctatgtgcacatatacgaagttgtagaaatagaaccatagtatatatcctcctcta

SEQ ID NO: 740559 - DNA, 120 bp, Artificial Sequence
  ENSG00000204271_69 (sequence is synthesized)
taaatttttccacttaatagaacgtgaacatgtttgtaggttcttatatgcagagttacttctttgtatagtattccattgtgtgaataaagcataatttatttagcaaatccttgttga

SEQ ID NO: 740560 - DNA, 120 bp, Artificial Sequence
  ENSG00000204271_70 (sequence is synthesized)
atgaacaatgccaccaagaacattgtcatacacatttattgtgtacttatgcatgaatttcaatagtgacacgttaattcaaatatttatttcttatctttccaggtaaaatattgggta

SEQ ID NO: 740561 - DNA, 120 bp, Artificial Sequence
  ENSG00000204271_71 (sequence is synthesized)
ctaagagtgggcataagatagttttttccattacttctttccaccttcaccagtgcggaagaaattgttatggattcatcagatttgaagacaactgcttgcacattaaacaaccactgc

SEQ ID NO: 740562 - DNA, 120 bp, Artificial Sequence
  ENSG00000204271_72 (sequence is synthesized)
aaaaaaaattatcgcacagatggaaggaggaggcaaagcaacatggctaaatagaaccctctagtgatcaccccccggcacaggaacaccaaattgaacaactacccatgcaagaaagca

SEQ ID NO: 740563 - DNA, 89 bp, Artificial Sequence
  ENSG00000204271_73 (sequence is synthesized)
caggaacaccaaattgaacaactacccatgcaagaaagcaccttcataagaaccaaagatcagtgccctaggcatgtggaactgctgga

SEQ ID NO: 740564 - DNA, 120 bp, Artificial Sequence
  ENSG00000204271_74 (sequence is synthesized)
aggtgtgagccaccacgcccagccattatttttaacttagagaggaaccacaaaattgtttgcccagtggctgcacatttatcattaccagcaacaatgccgcatgttcctgttttccca

SEQ ID NO: 740565 - DNA, 90 bp, Artificial Sequence
  ENSG00000204271_75 (sequence is synthesized)
tgtctctctaatagtgttgagcatcttctcatgtgtaatttgtgatttgtatgtcttctttacagaagaatctattcagatcctttcgtt

SEQ ID NO: 740566 - DNA, 120 bp, Artificial Sequence
  ENSG00000204271_76 (sequence is synthesized)
ttgtatgtcttctttacagaagaatctattcagatcctttcgttataaaattggtttattgtttgttttattatttagcggtaattactgtttattttattttattattttgttttattt

SEQ ID NO: 740567 - DNA, 79 bp, Artificial Sequence
  ENSG00000204271_77 (sequence is synthesized)
ttactgtttattttattttattattttgttttattttttgagatggcgtcttgccctgttgcttaggctggagtgtgca

SEQ ID NO: 740568 - DNA, 62 bp, Artificial Sequence
  ENSG00000204271_78 (sequence is synthesized)
agcctcctgagtagctaagattacaggcatacaccaccacaccctgctaattttttttgtgt

SEQ ID NO: 740569 - DNA, 120 bp, Artificial Sequence
  ENSG00000204271_79 (sequence is synthesized)
aaagtgctgggattacaggatgagccaccatgcctggtcttatatattttagatacaagtcatttatgagacatattatttgcaaaaataatcttgcactgtggctgtctttcaaatttc

SEQ ID NO: 740570 - DNA, 120 bp, Artificial Sequence
  ENSG00000204271_80 (sequence is synthesized)
ctttcaaatttcttgactgtgttcactgaagcaaattttttttcaattttaattatgtccagtttatcttttttttcctttattaacttgtgctttggtgtaagaattaaaaatctaata

SEQ ID NO: 740571 - DNA, 120 bp, Artificial Sequence
  ENSG00000204271_81 (sequence is synthesized)
cttaattcaaggtcacaaaaatttattctatatttcctcccaagagttttatagtgtaacccttatatttgagtctttggcctattttgagttaatttttgtattttgcatgaggtaggg

SEQ ID NO: 740572 - DNA, 120 bp, Artificial Sequence
  ENSG00000204271_82 (sequence is synthesized)
gtggaagttttttgtttttttgttttttttttgcatgtagataccaagttgtcccagtaccatttattgaaaatagttatttccccttttgtcttgcctccttctcagaagttaattggc

SEQ ID NO: 740573 - DNA, 120 bp, Artificial Sequence
  ENSG00000204271_83 (sequence is synthesized)
tgcaaattaacttttgtgagggcttatgtctggactttggattctatttcattgatcaatatttatatcctatgccagtaccacatagacttgtttattgtagctttgtaataagtttta

SEQ ID NO: 740574 - DNA, 120 bp, Artificial Sequence
  ENSG00000204271_84 (sequence is synthesized)
aaatttggaaatgtgactcttcaaactttgtatacttcaagattgttttggctattctgggtccattacattttcatatgaactttagaatcaggttataaatttcttcaaagtaggcaa

SEQ ID NO: 740575 - DNA, 120 bp, Artificial Sequence
  ENSG00000204271_85 (sequence is synthesized)
ccttaattttgataagggttgcattgaatagtttgattattttgaagagtgttgtcatctttataatactgtgccttctgatgcataaaatgcctttcaccagatgtccttttaaagaag

SEQ ID NO: 740576 - DNA, 120 bp, Artificial Sequence
  ENSG00000204271_86 (sequence is synthesized)
tctgtgtttactgtttgtgatgttcagcctggctcagaagttttaaaactctaatgtgtgattagtaatattatacaatctttaaaataactgtctataatttattaagtgtgcataaca

SEQ ID NO: 740577 - DNA, 120 bp, Artificial Sequence
  ENSG00000204271_87 (sequence is synthesized)
taactctagaatatacataaatgtcaccatacctccatttgtgatttttcagattctttaattctgatgctagggactaatttcagaggattgggtaaaatactcaggtttcacaatctc

SEQ ID NO: 740578 - DNA, 120 bp, Artificial Sequence
  ENSG00000204271_88 (sequence is synthesized)
ggagaaagagtaattcatgcagagaagctgtgtgggacactggagttttattattactcaaatctgtctttccaagccttccccgggatcagagtttttaaggataatttggtggggaga

SEQ ID NO: 740579 - DNA, 120 bp, Artificial Sequence
  ENSG00000204271_89 (sequence is synthesized)
ggcttgggaagtggggtgtgctgattggtcgggttggagatggaatcatagggggtcaaagtgagtttctcttgctgtcttctgttcttgggtgaaatcgcagaactggttgagccaggt

SEQ ID NO: 740580 - DNA, 120 bp, Artificial Sequence
  ENSG00000204271_90 (sequence is synthesized)
taccagcctcaatctggttgagccagattaccagacctggagtgcagtgtctgcaaaatatgtcaatcactgatgttagattttgcaatagtgatgttattcacaggagcaatttgggga

SEQ ID NO: 740581 - DNA, 120 bp, Artificial Sequence
  ENSG00000204271_91 (sequence is synthesized)
cagcacagacaaggttctttctggggcatcagaaagtattttttgactaagtgactggctgagagaagcaatgctggccctgggtattttcttctcaagacaagtagaagggatttgcca

SEQ ID NO: 740582 - DNA, 120 bp, Artificial Sequence
  ENSG00000204271_92 (sequence is synthesized)
ctgaggtgacagtaacaatcttacggccattctttcagatgataacttccagtgcttctgtgaagtcagatgtttccctcccttttctcacaagaagaaactgagaagggaagtggcagg

SEQ ID NO: 740583 - DNA, 120 bp, Artificial Sequence
  ENSG00000204271_93 (sequence is synthesized)
tctcccaggtcccacagctaatcagcagtggggctggaactccaaccttgggctcctaacaccagaccctaaacttcctgctccagctcccctgaatctgggcaggagttatagctcaag

SEQ ID NO: 740584 - DNA, 120 bp, Artificial Sequence
  ENSG00000204271_94 (sequence is synthesized)
cctgacctggatgcattcaggataaggggtttctccatatgttgcttctggccctgagaattccatcatgatcctgggtggtccgtgatgctgtccagggtgagcccatttaccctgaga

SEQ ID NO: 740585 - DNA, 120 bp, Artificial Sequence
  ENSG00000204271_95 (sequence is synthesized)
ggatgtagtacctctccaagtaacgatggagtcaagtgtctatctctggccagcctcaggacaacaaagatgttttttcacccatcactgagctgtacattgtgaacaaactcggggaag

SEQ ID NO: 740586 - DNA, 120 bp, Artificial Sequence
  ENSG00000204271_96 (sequence is synthesized)
cagcagatactggagaaccttcttgctccacttctaccatctattgcctgtgagacatgaggaagtcagtcaacttctcttccttttggacccattaattcctgaaacaaaatgaaaggc

SEQ ID NO: 740587 - DNA, 120 bp, Artificial Sequence
  ENSG00000204271_97 (sequence is synthesized)
acagggaattgagggtggggtatggcaccaataagccatgcacctcacaggctttttgtgatgctctagtcatataatgagcaaagatacgcttgtgaagtgtaatgggatatttaagtt

SEQ ID NO: 740588 - DNA, 120 bp, Artificial Sequence
  ENSG00000204271_98 (sequence is synthesized)
taaaaaaatgttaccataaatccgtgagtgaatattactcttgcaggaaaatgcagataggaaataagtataaaatccagaaaccagtttaatgtctgcagtgctcatctatgccatgat

SEQ ID NO: 740589 - DNA, 120 bp, Artificial Sequence
  ENSG00000204271_99 (sequence is synthesized)
aggaattataagagagtttaaagctgtagtttttgggatttgaagttgaggaactttttatccattggtagtttaaagtttacatcaacaatgtcataaacctggacctttagctggcca

SEQ ID NO: 740590 - DNA, 120 bp, Artificial Sequence
  ENSG00000204271_100 (sequence is synthesized)
ttggaatgtaagaaggaaaatgctacactgaatataattacaactattcaggcacagacgcatcccagagtctcctaccaagttgactctcctgtctgtcttccttttctgccttcactt

SEQ ID NO: 740591 - DNA, 120 bp, Artificial Sequence
  ENSG00000204271_101 (sequence is synthesized)
cccaggcaagaaggggtgatttgttttgctttcccctttgggaaagggctattattaattttgtttcaaagttgaactataaactaaattccttcccaaggttagtttggcctatgccca

SEQ ID NO: 740592 - DNA, 120 bp, Artificial Sequence
  ENSG00000204271_102 (sequence is synthesized)
ggaatgaacaaggccagcttaaaggttagaagcaagatagagtcgagtcagttaggtctgatctcttttactgtcataatttccttagttgtaatttttgcaaaggcagtttcagccttg

SEQ ID NO: 740593 - DNA, 120 bp, Artificial Sequence
  ENSG00000204271_103 (sequence is synthesized)
ttccttagttgtaatttttgcaaaggcagtttcagccttgctggaacaaagcctatgattgttttctttctttctttattattattattatatttattattatactttaagttctagagt

SEQ ID NO: 740594 - DNA, 120 bp, Artificial Sequence
  ENSG00000204271_104 (sequence is synthesized)
acccattaacccgtcatttacattaggtatatctcctcatgctatccctccccgcgccccctgcctatgattgttttcaaggtacctgacttacatggcatttttaaactgacgtgggcc

SEQ ID NO: 740595 - DNA, 120 bp, Artificial Sequence
  ENSG00000204271_105 (sequence is synthesized)
tttttaaactgacgtgggcctgcttttctccttcctctcttgtcctaatagttgtatagggccaaaatgtgataatgtacatttgcttttgtctttatccattgtcctttctgcttttgt

SEQ ID NO: 740596 - DNA, 120 bp, Artificial Sequence
  ENSG00000204271_106 (sequence is synthesized)
gattaggatgtaatgaagtagttagaagcattccctcacatttctccaattggcttatgctgactttttatataaaaccgatatttgctctgccagtgcatctgaaaaatccacccgtag

SEQ ID NO: 740597 - DNA, 120 bp, Artificial Sequence
  ENSG00000204271_107 (sequence is synthesized)
atccccaaaatatatattgttttcatgttttaaatttttacccatatagtgtactatgccagtatttttgtgtcctgcttttttcactctatttttgtgaccttttcatatggatatata

SEQ ID NO: 740598 - DNA, 120 bp, Artificial Sequence
  ENSG00000204271_108 (sequence is synthesized)
aaatgccattttgaggctataccacaatgtatatattcccaaagaatgaatatctaggtaattgttagtttgggattttttgtttgtttgtttgtttgtttttaattcttgttctaaaat

SEQ ID NO: 740599 - DNA, 120 bp, Artificial Sequence
  ENSG00000204271_109 (sequence is synthesized)
atccttacacatttctccttttgcacatgagtttctgttgtgcatatgcctagaattgctgggtcatagggtgggcacatcttcgattttgctagagaataccaaacttctcttccgaat

SEQ ID NO: 740600 - DNA, 120 bp, Artificial Sequence
  ENSG00000204271_110 (sequence is synthesized)
agttacattggtctgtcaggtggaaccagaatctgatctgagtacgtcacaagatttagtgaggatccaagcagaactagagtgtgaaaacacgtgtgaagttgttgacagtgctgtgtc

SEQ ID NO: 740601 - DNA, 120 bp, Artificial Sequence
  ENSG00000204271_111 (sequence is synthesized)
atgaatcgtgaaggggcaattttaagtcagcatatggacaacaatggtcataggtagacactggataaatgaccaacttgtcctatgaacgaggtcttaattttatctaccttaggacca

SEQ ID NO: 740602 - DNA, 120 bp, Artificial Sequence
  ENSG00000204271_112 (sequence is synthesized)
agtccagagaatcagcaaaaatgattacatttaattatatcttcatgttttgtgagggctttagatctgatataaacatacaggaaaaaatcctttttaataaagctggaagagacataa

SEQ ID NO: 740603 - DNA, 120 bp, Artificial Sequence
  ENSG00000204271_113 (sequence is synthesized)
tagcatcagtttctaggcagaaaatcagccctatacaaattctaaaggccggttacaaactggacatgttttaacatggtttagaatgttttcaccgaaaaactagcactgtgcctttgt

SEQ ID NO: 740604 - DNA, 120 bp, Artificial Sequence
  ENSG00000204271_114 (sequence is synthesized)
ctctgagaaaaatagataaatgtgtcaattatgtgtttacagtttaattcatattcagttatattttgcagcttaaaaggccactaacaaaaaaatagaacataacaaaataaatctcac

SEQ ID NO: 740605 - DNA, 120 bp, Artificial Sequence
  ENSG00000204271_115 (sequence is synthesized)
ttggaatactggttgttttgtttgctgtttggttcttttagtgtactttcctttttactgtgtttttgtttctgggttaagatggtggcaaactggtgatgcttcatccacttttactct

SEQ ID NO: 740606 - DNA, 120 bp, Artificial Sequence
  ENSG00000204271_116 (sequence is synthesized)
ctcactgaataatccatgatggactggagaatctcaatgattggttcaccatactctggcagaaattcctactgactgccatataggtagggcttgactaagaaactcttggtaaccaat

SEQ ID NO: 740607 - DNA, 120 bp, Artificial Sequence
  ENSG00000204271_117 (sequence is synthesized)
gcagactcagacctcttgaaaaaaaaacagcagggccaagctggataaaagccaaaattactatgtttgccagattacactatcaggttttgtagaacagctaggactctcatataccta

SEQ ID NO: 740608 - DNA, 120 bp, Artificial Sequence
  ENSG00000204271_118 (sequence is synthesized)
taatctacaatggcctttcaatgaaggtttaaggaatttggaatctgttctgcaggcagaagggaaagtactgatgattttgagcagtgacagtaggatcagatgcatgctttaaaaggt

SEQ ID NO: 740609 - DNA, 120 bp, Artificial Sequence
  ENSG00000204271_119 (sequence is synthesized)
ccagaagtataaagggtatatgtatattagggctggagtggctggaggctgggagacaaacttattgcaagactccacataagatcatatttacctcactgagtcctgtcctcaggtaaa

SEQ ID NO: 740610 - DNA, 120 bp, Artificial Sequence
  ENSG00000204271_120 (sequence is synthesized)
tactgttaattaaaagggtttcaccatttacagagctttcagattatttatccttaatattattatccccacatgtgctcatgagcaagcctctcaggatcttctgctccagtcttgtga

SEQ ID NO: 740611 - DNA, 120 bp, Artificial Sequence
  ENSG00000204271_121 (sequence is synthesized)
ctgtattacctgggtggaaacaggatttacttaaacatttcatatctgaagtctttaattaactccacagcttggtcagttgatcgctctttactcttatgtgctcatgagcaagcctct

SEQ ID NO: 740612 - DNA, 120 bp, Artificial Sequence
  ENSG00000204272_0 (sequence is synthesized)
gaaacaggaggaagccagctctgtgcctggaggggactcgccgccatctcaggtctcttggctttgccagggcccaccggagaaaactgacgacccgtttctgtaatccttatgggagac

SEQ ID NO: 740613 - DNA, 120 bp, Artificial Sequence
  ENSG00000204272_1 (sequence is synthesized)
caaccttgtgcctccgggagatccactctcccacctggaaacgcacgggaagccaagcctccaaaaaagcgctgcctcctcgctccgcgttgggattatccggaaggaactcccaacgga

SEQ ID NO: 740614 - DNA, 120 bp, Artificial Sequence
  ENSG00000204272_2 (sequence is synthesized)
ggtagtaccactctaccctccgcacctcctcctgcatcagccggcctgaagtcgcaccctcctcctccggagaagtagagaaataaatttctcccaccctaaaccagtctttgagtgatt

SEQ ID NO: 740615 - DNA, 120 bp, Artificial Sequence
  ENSG00000204272_3 (sequence is synthesized)
gcagtatgactccatttccctggtgcattcatataatagttcacctggtgaaaacaatgaagattatttacaatgctaccctgctttttctggtgtcctgaacctggaagttgtgctttt

SEQ ID NO: 740616 - DNA, 120 bp, Artificial Sequence
  ENSG00000204272_4 (sequence is synthesized)
taagtcttatgatgtaatcagcgcgatttcacttcctgaatttcgatgaattctaagacatgggcaagatcgggttgtaagacctctgagatttaaggccatgccctggatcatggtgaa

SEQ ID NO: 740617 - DNA, 120 bp, Artificial Sequence
  ENSG00000204272_5 (sequence is synthesized)
cttaccaaagcaaacaatgcctgtgagatggtcctgcagcagccaaccagtgaactcttttggtgacatcctgttcttgttgtataactttatattcctataaatccattaaggccccaa

SEQ ID NO: 740618 - DNA, 120 bp, Artificial Sequence
  ENSG00000204272_6 (sequence is synthesized)
taaagtttgtctctaagcgctgtgttagatctatatgactacatctagtaaattgtgaattttaagtaaatattttataagaactcctatgtaaagcattactaaaattagtgttgaaat

SEQ ID NO: 740619 - DNA, 120 bp, Artificial Sequence
  ENSG00000204272_7 (sequence is synthesized)
atgaccttcttcctacatttattcatttatttatgtctatttattcatttattttagtgaaaaatataaggaaagtagaggaaggttaaatccaaaaaagaattgtttccagtacacttt

SEQ ID NO: 740620 - DNA, 120 bp, Artificial Sequence
  ENSG00000204272_8 (sequence is synthesized)
ctttaatttgctgtcagtttttgcatggaatctacatctttttatgctaatcctcatcctagtattttacatcttaactatttttttctgactgaaatggttgatgtgcttgttttttgt

SEQ ID NO: 740621 - DNA, 120 bp, Artificial Sequence
  ENSG00000204272_9 (sequence is synthesized)
taataaatattatggtgaaaaaatacaagtaaaatgggaaaacattagatagcagctttcaatatttcatatagttcataaatgtttcaggaattacaaggttatagaaaaaaatttata

SEQ ID NO: 740622 - DNA, 120 bp, Artificial Sequence
  ENSG00000204272_10 (sequence is synthesized)
gactataataatttccagggatataaaaaaataaagcttctacctttgaattgtaataataaaagataaacagacttgaaagcatatattatatctgaaaatgtcagataaacttggctt

SEQ ID NO: 740623 - DNA, 120 bp, Artificial Sequence
  ENSG00000204272_11 (sequence is synthesized)
gcttataaattaaaatataaaataataatacaatttgttcaaataagtaattaaagcttacattgtaaaatgaatatttagagagattgtgaaacctgagtattttacccaatcctctga

SEQ ID NO: 740624 - DNA, 120 bp, Artificial Sequence
  ENSG00000204272_12 (sequence is synthesized)
agtccctagcatcagaattaaagaatctgaaaaatcacaaatggaggtatggtgacatttatgtatattctagagttatgttatgcacacttaataaattatagacagttattttaaaga

SEQ ID NO: 740625 - DNA, 120 bp, Artificial Sequence
  ENSG00000204272_13 (sequence is synthesized)
ttgtataatattactaatcacacattagagttttaaaacttctgagccaggctgaacatcacaaacagtaaacacagacttctttaaaaggacatctggtgaaaggcattttatgcatca

SEQ ID NO: 740626 - DNA, 120 bp, Artificial Sequence
  ENSG00000204272_14 (sequence is synthesized)
gaaggcacagtattataaagatgacaacactcttcaaaataatcaaactattcaatgcaacccttatcaaaattaaggttgcctactttgaagaaatttataacctgattctaaagttca

SEQ ID NO: 740627 - DNA, 120 bp, Artificial Sequence
  ENSG00000204272_15 (sequence is synthesized)
tatgaaaatgtaatggacccagaatagccaaaacaatcttgaagtatacaaagtttgaagagtcacatttccaaattttaaaacttattacaaagctacaataaacaagtctatgtggta

SEQ ID NO: 740628 - DNA, 120 bp, Artificial Sequence
  ENSG00000204272_16 (sequence is synthesized)
ctggcataggatataaatattgatcaatgaaatagaatccaaagtccagacataagccctcacaaaagttaatttgcagccaattaacttctgagaaggaggcaagacaaaaggggaaat

SEQ ID NO: 740629 - DNA, 120 bp, Artificial Sequence
  ENSG00000204272_17 (sequence is synthesized)
aactattttcaataaatggtactgggacaacttggtatctacatgcaaaaaaaaaacaaaaaaacaaaaaacttccacccctacctcatgcaaaatacaaaaattaactcaaaataggcc

SEQ ID NO: 740630 - DNA, 120 bp, Artificial Sequence
  ENSG00000204272_18 (sequence is synthesized)
aaagactcaaatataagggttacactataaaactcttgggaggaaatatagaataaatttttgtgaccttgaattaagtattagatttttaattcttacaccaaagcacaagttaataaa

SEQ ID NO: 740631 - DNA, 120 bp, Artificial Sequence
  ENSG00000204272_19 (sequence is synthesized)
cctccgggagatccactctcccacctggaaacgcacgggaagccaagcctccaaaaaagcgctgcctcctcgctccgcgttgggattatccggaaggaactcccaacggagtctttgagt

SEQ ID NO: 740632 - DNA, 120 bp, Artificial Sequence
  ENSG00000204278_0 (sequence is synthesized)
gtcctagaaggttctttctgcctgttttctccccccccgcccggctgtggggcccagccactgcacttcaccggatgccgtctggttggtcctcaggactgatacagaccaggaccccag

SEQ ID NO: 740633 - DNA, 120 bp, Artificial Sequence
  ENSG00000204278_1 (sequence is synthesized)
ggccagcccgtgccaggctcctatgcttccaggagcacgggtgggtggtcctgctgcctggccggccatcctcctggggtcggtctctggccgatcctccctcctcctctcaagccctgc

SEQ ID NO: 740634 - DNA, 120 bp, Artificial Sequence
  ENSG00000204278_2 (sequence is synthesized)
acagcccggccaggcaggtgcatcttgtttggctgctgaggagccgggggttcagggaaattaaggaacgtgcccagggacccggggccagcccgtggggacgctgggattggagcccaa

SEQ ID NO: 740635 - DNA, 120 bp, Artificial Sequence
  ENSG00000204278_3 (sequence is synthesized)
gccccaggttcgccgcgcggctctcgacttcctctcctttcccccaggggcgagctcagcgaccgcagagaggtggggtcgatctccctgcgaccccagggggcccgcgaggccagtgcg

SEQ ID NO: 740636 - DNA, 80 bp, Artificial Sequence
  ENSG00000204278_4 (sequence is synthesized)
tccctgcgaccccagggggcccgcgaggccagtgcgcgggcaggagcggggacgtgctcagaagagccgggcgccgccgc

SEQ ID NO: 740637 - DNA, 120 bp, Artificial Sequence
  ENSG00000204278_5 (sequence is synthesized)
ccctcccgccggccgcccccatggcccggctgggcgcgctgctcctggccgccgccctgggtgcactgctcagcttcgcgctcctggccgccgcggtcgccagcgactactggtacatcc

SEQ ID NO: 740638 - DNA, 120 bp, Artificial Sequence
  ENSG00000204278_6 (sequence is synthesized)
atcctggaggtggcggacgccggcaatggcagcgcctggcccgggcgcgcagagctgctctcctcgcactcggggctctggcgcatctgcgaagggcagaacggctgcatcccgctggtc

SEQ ID NO: 740639 - DNA, 120 bp, Artificial Sequence
  ENSG00000204278_7 (sequence is synthesized)
gacccttttgccagtgagagcctggacgtctccacctcggtgcagcacctcatcttgctgcaccgtgcagtcattgtggtcctgcccctgagcctggtccttctcgtgtgtggctggatc

SEQ ID NO: 740640 - DNA, 120 bp, Artificial Sequence
  ENSG00000204278_8 (sequence is synthesized)
tgcggcctgctcagctccctggcccagagcgtgtctctgctgcttttcaccggctgctacttcctgctggggagtgtcctgacactggcgggggtcagcatctacatcagctactcgcac

SEQ ID NO: 740641 - DNA, 120 bp, Artificial Sequence
  ENSG00000204278_9 (sequence is synthesized)
ctggcctttgcggagacggtgcagcagtatggcccgcagcacatgcagggcgtccgcgtcagcttcggctggtccatggccctggcctggggctcctgtgccttggaggcattcagcgga

SEQ ID NO: 740642 - DNA, 120 bp, Artificial Sequence
  ENSG00000204278_10 (sequence is synthesized)
gactgaggcccagagcggcagagggacccacccagatcgcctggcgccagagagatgccgtctcaggccaaggcctccctggcctctgttctgtccactctccccgaagggcaggcttgg

SEQ ID NO: 740643 - DNA, 120 bp, Artificial Sequence
  ENSG00000204278_11 (sequence is synthesized)
tggagaagaggctgatgagagggcccgagagcccctccgatttgcaggggtggggggcaaggagctgagcgatccagatgtacccctctgccccctcccttgttctcaagcctgctaggt

SEQ ID NO: 740644 - DNA, 120 bp, Artificial Sequence
  ENSG00000204278_12 (sequence is synthesized)
acttttcactgagcacttccgggaagagcaggcacccagatctctgtccttgtcctggcacaggctgctgctgcttccggcccccgacccttcctctctgcagcaacccgggggaggtat

SEQ ID NO: 740645 - DNA, 120 bp, Artificial Sequence
  ENSG00000204278_13 (sequence is synthesized)
gccactgtgagtgccctggtgggcacactgagctggcagagatggaagtcccagaagggtggggtgggggtgtcatgccatggtggaggagtttggggccactccttgcctgcctcaaag

SEQ ID NO: 740646 - DNA, 120 bp, Artificial Sequence
  ENSG00000204278_14 (sequence is synthesized)
ggggcctggctgagggtgcttcttgaccacaggggccagggctgcctagggtggcgcagggctgggcctggagtttgggatgcaggcttgttaaacacagggcagaaccccaggttggga

SEQ ID NO: 740647 - DNA, 120 bp, Artificial Sequence
  ENSG00000204278_15 (sequence is synthesized)
ggggctcagtttgcaggcccaggcccgcaggcccactgctggtcccagggtgagacaggtgagaagagggatggccagcacacacttgagtccccttgggccacaaaggctggggcacgc

SEQ ID NO: 740648 - DNA, 120 bp, Artificial Sequence
  ENSG00000204278_16 (sequence is synthesized)
ccaccgttatgcagatggacagttgaggtggctgcaggagaagggttcccagggcctgtacaacacgtggaagcactaaacggccccgtttggggtttgggggcccttcccgagtcttga

SEQ ID NO: 740649 - DNA, 120 bp, Artificial Sequence
  ENSG00000204278_17 (sequence is synthesized)
gaggtcttgagaggtgtgctggggaaggtggcagcctcttgtagcttgatcttcctccaccctgccccacccctaggtctctttattgattcaaaggttaaggaagctcctgggggcttg

SEQ ID NO: 740650 - DNA, 120 bp, Artificial Sequence
  ENSG00000204278_18 (sequence is synthesized)
agggggtggcacagttttggtggggcccagtgaggacaaatctggggggtgagcagggcctcctcttcctcctggtgtttgaacgtttaccattccatgtgggaccattgtgccaatttg

SEQ ID NO: 740651 - DNA, 120 bp, Artificial Sequence
  ENSG00000204278_19 (sequence is synthesized)
tccttaagtaaatcacttgtgctgtgtgcagtataagccttttatttttcttagaacttttcaaaataggtaacacatgcctgtctgtcataaacagtacaaacgtgagcaaacactgtc

SEQ ID NO: 740652 - DNA, 120 bp, Artificial Sequence
  ENSG00000204278_20 (sequence is synthesized)
gcagcacctcatctgcagctcccagcttggctggatcctgcgggccttgcagactcctggctccccatttaggactcgattcttccagatggcctgctgtctacctggctggcaccttcc

SEQ ID NO: 740653 - DNA, 120 bp, Artificial Sequence
  ENSG00000204279_0 (sequence is synthesized)
cttcattctttctcactgactgggactcagctggtaggtccgcagatcagtcctcctgggaatttagttgtgagtgaatgtgaaggggagccagcgggctttggacaggtcctgcggcac

SEQ ID NO: 740654 - DNA, 120 bp, Artificial Sequence
  ENSG00000204279_1 (sequence is synthesized)
agaaaccacagtccgtggcttctgagagaaaagggcctcgccgtcgacgtccggctcctcccaggtcgcgacgccccatgggcctttgtcgtcgtttctgggccaggacgacggaggaag

SEQ ID NO: 740655 - DNA, 120 bp, Artificial Sequence
  ENSG00000204279_2 (sequence is synthesized)
gtggaccgtagaggggaggaatcacgtgaagatggggcgagtgctgggcgtgctgttggagagtgaaacatgagtggacatcaaagaacaagatccagatctagagaaagaagagatgat

SEQ ID NO: 740656 - DNA, 120 bp, Artificial Sequence
  ENSG00000204279_3 (sequence is synthesized)
ctgtggttgcccaggagctgcccagtaatgaccagcttcaacaagaggaaccaccaattgaaagtcaggattatacacctggtcaagagagagacgagggagcactggacttccaagtgc

SEQ ID NO: 740657 - DNA, 120 bp, Artificial Sequence
  ENSG00000204279_4 (sequence is synthesized)
taggcctggcagcctatctctgggaactgactcggtcaaagactgggggtgaacgtggagatggtcctaatgtcaagggagaatttctgccaaatctggagcctgttaaaataccagaag

SEQ ID NO: 740658 - DNA, 120 bp, Artificial Sequence
  ENSG00000204279_5 (sequence is synthesized)
caggtgaagggcaaccatcggtttaaatgaagacaagctgaaaccatacatgcagtctttatgttggaaacttcaccagtaaaattctctcaataaagtttcacaattgtctgcaaagaa

SEQ ID NO: 740659 - DNA, 120 bp, Artificial Sequence
  ENSG00000204287_0 (sequence is synthesized)
attcttgtctgttctgcctcactcccgagctctactgactcccaacagagcgcccaagaagaaaatggccataagtggagtccctgtgctaggatttttcatcatagctgtgctgatgag

SEQ ID NO: 740660 - DNA, 120 bp, Artificial Sequence
  ENSG00000204287_1 (sequence is synthesized)
cgctcaggaatcatgggctatcaaagaagaacatgtgatcatccaggccgagttctatctgaatcctgaccaatcaggcgagtttatgtttgactttgatggtgatgagattttccatgt

SEQ ID NO: 740661 - DNA, 120 bp, Artificial Sequence
  ENSG00000204287_2 (sequence is synthesized)
ggatatggcaaagaaggagacggtctggcggcttgaagaatttggacgatttgccagctttgaggctcaaggtgcattggccaacatagctgtggacaaagccaacctggaaatcatgac

SEQ ID NO: 740662 - DNA, 120 bp, Artificial Sequence
  ENSG00000204287_3 (sequence is synthesized)
aaagcgctccaactatactccgatcaccaatgtacctccagaggtaactgtgctcacaaacagccctgtggaactgagagagcccaacgtcctcatctgtttcatagacaagttcacccc

SEQ ID NO: 740663 - DNA, 120 bp, Artificial Sequence
  ENSG00000204287_4 (sequence is synthesized)
accagtggtcaatgtcacgtggcttcgaaatggaaaacctgtcaccacaggagtgtcagagacagtcttcctgcccagggaagaccaccttttccgcaagttccactatctccccttcct

SEQ ID NO: 740664 - DNA, 120 bp, Artificial Sequence
  ENSG00000204287_5 (sequence is synthesized)
agcactggggcttggatgagcctcttctcaagcactgggagtttgatgctccaagccctctcccagagactacagagaacgtggtgtgtgccctgggcctgactgtgggtctggtgggca

SEQ ID NO: 740665 - DNA, 120 bp, Artificial Sequence
  ENSG00000204287_6 (sequence is synthesized)
tcattattgggaccatcttcatcatcaagggattgcgcaaaagcaatgcagcagaacgcagggggcctctgtaaggcacatggaggtgatggtgtttcttagagagaagatcactgaaga

SEQ ID NO: 740666 - DNA, 120 bp, Artificial Sequence
  ENSG00000204287_7 (sequence is synthesized)
aacttctgctttaatggctttacaaagctggcaatattacaatccttgacctcagtgaaagcagtcatcttcagcattttccagccctatagccaccccaagtgtggatatgcctcttcg

SEQ ID NO: 740667 - DNA, 120 bp, Artificial Sequence
  ENSG00000204287_8 (sequence is synthesized)
attgctccgtactctaacatctagctggcttccctgtctattgccttttcctgtatctattttcctctatttcctatcattttattatcaccatgcaatgcctctggaataaaacataca

SEQ ID NO: 740668 - DNA, 120 bp, Artificial Sequence
  ENSG00000204287_9 (sequence is synthesized)
ggagtctgtctctgctatggaatgccccatggggcatctcttgtgtacttattgtttaaggtttcctcaaactgtgatttttctgaacacaataaactattttgatgatcttgggtggaa

SEQ ID NO: 740669 - DNA, 120 bp, Artificial Sequence
  ENSG00000204290_0 (sequence is synthesized)
ggaggatggtggattttccaggctacaatctgtctggtgcagtcgcctccttcctattcatcctgctgacaatgaagcagtcagaagactttagagtcattggccctgctcatcctatcc

SEQ ID NO: 740670 - DNA, 120 bp, Artificial Sequence
  ENSG00000204290_1 (sequence is synthesized)
tggccggggttggggaagatgccctgttaacctgccagctactccccaagaggaccacaatgcacgtggaggtgaggtggtaccgctcagagcccagcacacctgtgtttgtgcacaggg

SEQ ID NO: 740671 - DNA, 120 bp, Artificial Sequence
  ENSG00000204290_2 (sequence is synthesized)
atggagtggaggtgactgagatgcagatggaggagtacagaggctgggtagagtggatagagaatggcattgcaaagggaaatgtggcactgaagatacacaacatccagccctccgaca

SEQ ID NO: 740672 - DNA, 120 bp, Artificial Sequence
  ENSG00000204290_3 (sequence is synthesized)
atggacaatactggtgccatttccaggatgggaactactgtggagaaacaagcttgctgctcaaagtagcaggtctggggtctgcccctagcatccacatggagggacctggggagagtg

SEQ ID NO: 740673 - DNA, 120 bp, Artificial Sequence
  ENSG00000204290_4 (sequence is synthesized)
gagtccagcttgtgtgcactgcaaggggctggttcccagagccccaggtgtattgggaagacatccggggagagaagctgctggccgtgtctgagcatcgcatccaagataaagatggcc

SEQ ID NO: 740674 - DNA, 120 bp, Artificial Sequence
  ENSG00000204290_5 (sequence is synthesized)
tgttctatgcggaagccaccctggtggtcaggaacgcctctgcagagtctgtgtcctgcttggtccacaaccccgtcctcactgaggagaaggggtcggtcatcagcctcccagagaaac

SEQ ID NO: 740675 - DNA, 120 bp, Artificial Sequence
  ENSG00000204290_6 (sequence is synthesized)
ttaaaagtgaatggaccttcccagcccatcctcgtcagagtgggagaagatatacagctaacctgttacctgtcccccaaggcgaatgcacagagcatggaggtgaggtgggaccgatcc

SEQ ID NO: 740676 - DNA, 120 bp, Artificial Sequence
  ENSG00000204290_7 (sequence is synthesized)
caccgttaccctgctgtgcatgtgtatatggatggggaccatgtggctggagagcagatggcagagtacagagggaggactgtactggtgagtgacgccattgacgagggcagactgacc

SEQ ID NO: 740677 - DNA, 120 bp, Artificial Sequence
  ENSG00000204290_8 (sequence is synthesized)
ctgcagatactcagtgccagaccttcggacgacgggcagtaccgctgcctttttgaaaaagatgatgtctaccaggaggccagtttggatctgaaggtggtaagtctgggttcttcccca

SEQ ID NO: 740678 - DNA, 120 bp, Artificial Sequence
  ENSG00000204290_9 (sequence is synthesized)
ctgatcactgtggaggggcaagaagatggagaaatgcagccgatgtgctcttcagatgggtggttcccacagccccacgtgccatggagggacatggaaggaaagacgataccatcatct

SEQ ID NO: 740679 - DNA, 120 bp, Artificial Sequence
  ENSG00000204290_10 (sequence is synthesized)
tcccaggccctgactcaaggcagccacgggctgttccacgtgcagacattgctaagggtcacaaacatctccgctgtggacgtcacttgttccatcagcatcccctttttgggcgaggag

SEQ ID NO: 740680 - DNA, 120 bp, Artificial Sequence
  ENSG00000204290_11 (sequence is synthesized)
aaaatcgcaactttttctctctcagagtccaggatgacgtttttgtggaaaacactgcttgtttggggattgcttcttgctgtggctgtaggcctgcccaggaagaggagctgaaaagag

SEQ ID NO: 740681 - DNA, 120 bp, Artificial Sequence
  ENSG00000204291_0 (sequence is synthesized)
attctgcccgccgccgccgctgccgagcgccgcctttgttccctgcaggaagggcgagcgcggcggccagcgctcagcgacccttcgtcctccgctaagctccaacgctctgctcgacta

SEQ ID NO: 740682 - DNA, 120 bp, Artificial Sequence
  ENSG00000204291_1 (sequence is synthesized)
gccgcgcgccttccggggctccgcagacccgcgagatggcaccaaggaggaacaacgggcagtgctggtgtctgctgatgctgctctcggtctccacgcccctccctgctgtcacccaga

SEQ ID NO: 740683 - DNA, 120 bp, Artificial Sequence
  ENSG00000204291_2 (sequence is synthesized)
cccgcggtgcgacagagactgcttcccagggtcacctggacctcacgcagctcatcggtgtcccgctgccctcgtccgtatcctttgtcacaggctatggtggcttcccggcctacagtt

SEQ ID NO: 740684 - DNA, 120 bp, Artificial Sequence
  ENSG00000204291_3 (sequence is synthesized)
tcgggcctggtgccaatgttggccgcccagccaggactctcatcccatccaccttcttcagggacttcgccatcagcgtcgtggtgaagcccagcagcacccgtggtggcgtgctcttcg

SEQ ID NO: 740685 - DNA, 120 bp, Artificial Sequence
  ENSG00000204291_4 (sequence is synthesized)
ccatcactgacgccttccagaaggtcatctacctgggcctgcggctctcaggtgtggaggacggccaccagcggatcatcctctactacacggagccaggctcccatgtgtcccaagagg

SEQ ID NO: 740686 - DNA, 120 bp, Artificial Sequence
  ENSG00000204291_5 (sequence is synthesized)
ctgctgccttctcggtgcctgtgatgacccacaggtggaaccgcttcgccatgattgtccagggtgaggaagtgaccctcctcgtgaactgtgaggagcacagccgcatccccttccagc

SEQ ID NO: 740687 - DNA, 120 bp, Artificial Sequence
  ENSG00000204291_6 (sequence is synthesized)
ggtcctcccaggctttggcttttgagtccagcgctggaatcttcatgggcaatgcaggagctacagggctcgagagattcactggctccctccagcagctcaccgtgcaccccgacccca

SEQ ID NO: 740688 - DNA, 120 bp, Artificial Sequence
  ENSG00000204291_7 (sequence is synthesized)
ggactcccgaggagctgtgtgaccctgaagagtcctcggcatctggagagaccagtgggctgcaggaggcagacggagtagctgagatcttagaagccgtcacctacactcaagcctcgc

SEQ ID NO: 740689 - DNA, 120 bp, Artificial Sequence
  ENSG00000204291_8 (sequence is synthesized)
ccaaagaagcaaaagttgaacccataaacacacctccaactccatcctccccctttgaagacatggaactttctggtgaacctgtacccgaggggaccctggaaaccaccaacatgagca

SEQ ID NO: 740690 - DNA, 120 bp, Artificial Sequence
  ENSG00000204291_9 (sequence is synthesized)
tcatccagcacagcagccccaaacaagggtctggtgagatcctgaatgacacactggagggggttcattctgtggatggtgaccccattactgacagcggctcaggggctggggccttcc

SEQ ID NO: 740691 - DNA, 120 bp, Artificial Sequence
  ENSG00000204291_10 (sequence is synthesized)
ttgacattgctgaagaaaagaatttagcagcaacagcagcggggctggccgaggtgcccatcagcactgctggagaagcagaggccagcagtgtgcccaccgggggaccaaccctctcta

SEQ ID NO: 740692 - DNA, 120 bp, Artificial Sequence
  ENSG00000204291_11 (sequence is synthesized)
tgtccacggagaacccagaggaaggggtcactccaggtccagataatgaagagcgtttagcagcaacagcagcaggggaggccgaggcactcgccagcatgcctggggaagtggaggcca

SEQ ID NO: 740693 - DNA, 120 bp, Artificial Sequence
  ENSG00000204291_12 (sequence is synthesized)
gtggtgtggcccccggggagctggacctctccatgtccgcccagagcctcggggaagaggccactgtgggtccaagcagtgaagacagtttaacaacagctgcagctgcaaccgaagtgt

SEQ ID NO: 740694 - DNA, 120 bp, Artificial Sequence
  ENSG00000204291_13 (sequence is synthesized)
ccctcagtacttttgaggatgaggaagccagtggggtccccacagatggcctggctcccctcacagccaccatggcccctgagcgggcagtcacttctggtcctggtgatgaagaagact

SEQ ID NO: 740695 - DNA, 120 bp, Artificial Sequence
  ENSG00000204291_14 (sequence is synthesized)
tggcagcagccacaacagaggagcccctcatcacagctgggggtgaagagtccggcagccctccccctgatgggccaccgctgcccctgcccacagtggctcctgaaagatggatcactc

SEQ ID NO: 740696 - DNA, 120 bp, Artificial Sequence
  ENSG00000204291_15 (sequence is synthesized)
cagctcaaagagaacatgtgggaatgaaaggacaggctgggcccaaaggagaaaagggtgatgctggggaggagcttcctggccctcctgaaccttctgggcctgttggacccacggcag

SEQ ID NO: 740697 - DNA, 120 bp, Artificial Sequence
  ENSG00000204291_16 (sequence is synthesized)
gagcagaagcagagggctctggcctaggctggggctcggacgtcggctctggctctggtgacctggtgggcagtgagcagctgctgagaggtcctccaggacccccagggccacctggct

SEQ ID NO: 740698 - DNA, 120 bp, Artificial Sequence
  ENSG00000204291_17 (sequence is synthesized)
tacctgggattccaggaaaaccaggaactgatgttttcatgggaccccctggatctcctggagaggatggacctgctggtgaacctgggcccccgggccctgagggacagcctggagttg

SEQ ID NO: 740699 - DNA, 120 bp, Artificial Sequence
  ENSG00000204291_18 (sequence is synthesized)
atggagccaccggccttcccgggatgaaaggggagaagggagcaagagggcctaatggctcagttggtgaaaagggtgaccctggcaacagaggcttacctggacccccggggaaaaagg

SEQ ID NO: 740700 - DNA, 120 bp, Artificial Sequence
  ENSG00000204291_19 (sequence is synthesized)
gacaagctggccctcctggggtcatgggacccccagggcctcctggaccccctgggcccccaggccctggatgcacaatgggacttggattcgaggataccgaaggctctggaagcaccc

SEQ ID NO: 740701 - DNA, 120 bp, Artificial Sequence
  ENSG00000204291_20 (sequence is synthesized)
agctattgaatgaacccaaactctccagaccaacggctgcaattggtctcaaaggagagaaaggagaccggggacccaagggagaaagggggatggatggagccagtattgtgggacccc

SEQ ID NO: 740702 - DNA, 120 bp, Artificial Sequence
  ENSG00000204291_21 (sequence is synthesized)
atggattcatgaatttctcggacattcctgagctggtggggcctccggggccggacgggttgcctgggctgccaggatttccaggtcctagaggaccaaaaggtgacactggtttacctg

SEQ ID NO: 740703 - DNA, 120 bp, Artificial Sequence
  ENSG00000204291_22 (sequence is synthesized)
gctttccaggactaaaaggagaacagggcgagaagggagagccgggtgccatcctgacagaggacattcctctggaaaggctgatggggaaaaagggtgaacctggaatgcatggagccc

SEQ ID NO: 740704 - DNA, 120 bp, Artificial Sequence
  ENSG00000204291_23 (sequence is synthesized)
caggaccaatggggcccaaaggaccaccaggacataaaggagaatttggccttcccgggcgacctggtcgcccaggactgaatggcctcaagggtaccaaaggagatccaggggtcatta

SEQ ID NO: 740705 - DNA, 120 bp, Artificial Sequence
  ENSG00000204291_24 (sequence is synthesized)
tgcagggcccacctggcttacctggccctccaggcccccctgggccacctggagctgtgattaacatcaaaggagccattttcccaatacccgtccgaccacactgcaaaatgccagttg

SEQ ID NO: 740706 - DNA, 120 bp, Artificial Sequence
  ENSG00000204291_25 (sequence is synthesized)
atactgctcatcctgggagtccagagctcatcacttttcacggtgttaaaggagagaaaggatcctggggtcttcctggctcaaagggagaaaaaggcgaccagggagcccagggaccac

SEQ ID NO: 740707 - DNA, 120 bp, Artificial Sequence
  ENSG00000204291_26 (sequence is synthesized)
caggtcctccacttgatctagcttacctgagacactttctgaacaacttgaagggggagaatggagacaaggggttcaaaggtgaaaaaggagaaaaaggagacattaatggcagcttcc

SEQ ID NO: 740708 - DNA, 120 bp, Artificial Sequence
  ENSG00000204291_27 (sequence is synthesized)
ttatgtctgggcctccaggcctgcccggaaatccaggcccggctggccaaaaaggggagacagtcgttgggccccaaggacccccaggtgctcctggtctgcctgggccacctggctttg

SEQ ID NO: 740709 - DNA, 120 bp, Artificial Sequence
  ENSG00000204291_28 (sequence is synthesized)
gaagacctggtgatcctgggccaccggggcccccggggccaccaggacctccagctatcctgggagcagctgtggcccttccaggtccccctggccctccaggacagccagggcttcccg

SEQ ID NO: 740710 - DNA, 120 bp, Artificial Sequence
  ENSG00000204291_29 (sequence is synthesized)
gatccagaaacctggtcacagcattcagcaacatggatgacatgctgcagaaagcgcatttggttatagaaggaacattcatctacctgagggacagcactgagtttttcattcgtgtta

SEQ ID NO: 740711 - DNA, 120 bp, Artificial Sequence
  ENSG00000204291_30 (sequence is synthesized)
gagatggctggaaaaaattacagctgggagaactgatccccattcctgccgacagccctccaccccctgcgctttccagcaacccacatcagcttctgcctccaccaaaccctatttcaa

SEQ ID NO: 740712 - DNA, 120 bp, Artificial Sequence
  ENSG00000204291_31 (sequence is synthesized)
gtgccaattatgagaagcctgctctgcatttggctgctctgaacatgccattttctggggacattcgagctgattttcagtgcttcaagcaggccagagctgcaggactgttgtccacct

SEQ ID NO: 740713 - DNA, 120 bp, Artificial Sequence
  ENSG00000204291_32 (sequence is synthesized)
accgagcattcttatcttcccatttgcaagatctgtccaccattgtgaggaaagcagagagatacagccttcccatagtgaacctcaagggccaagtactttttaataattgggactcaa

SEQ ID NO: 740714 - DNA, 120 bp, Artificial Sequence
  ENSG00000204291_33 (sequence is synthesized)
ttttttctggccacggaggtcagttcaatatgcatattccaatatactcctttgatggtcgagacataatgacagatccttcttggccccagaaagtcatttggcatggctccagccccc

SEQ ID NO: 740715 - DNA, 120 bp, Artificial Sequence
  ENSG00000204291_34 (sequence is synthesized)
atggcgtccgccttgtggataactactgtgaagcatggcgaaccgcggacacagcggtcacgggacttgcctccccgctgagcacggggaagattctggaccagaaagcatacagctgtg

SEQ ID NO: 740716 - DNA, 120 bp, Artificial Sequence
  ENSG00000204291_35 (sequence is synthesized)
ctaatcggctaattgtcctatgtatcgaaaacagtttcatgacagacgctaggaagtaatggccttctgatgattcttaaagagttttcaattttttcttatgtgaagagttgacactga

SEQ ID NO: 740717 - DNA, 120 bp, Artificial Sequence
  ENSG00000204291_36 (sequence is synthesized)
aatctaaaatgtttaattgttgtaaatattacagttttttttttttactacatattctttacaacagcaaccaaagaaaacatacctcaatacactcaaaactgaagacatagaggactc

SEQ ID NO: 740718 - DNA, 120 bp, Artificial Sequence
  ENSG00000204291_37 (sequence is synthesized)
agatcaaagacaaaatctgatccatatattggtgctagattctgcaggaaaccccagcagtgtgaacgcatcccaacataggttaagagcaagttgaaaacaaaggccatggcattctgc

SEQ ID NO: 740719 - DNA, 120 bp, Artificial Sequence
  ENSG00000204291_38 (sequence is synthesized)
cactgcatccttcagacagttatatcctccttttaaaccattgttgttgagtgtaagatgtccttcatgttttcttataaagtcagtgtttagaaatgttaccctttctaagttatatac

SEQ ID NO: 740720 - DNA, 120 bp, Artificial Sequence
  ENSG00000204291_39 (sequence is synthesized)
agatcaaatgcttttttctttcacgtacatccatcatttgcaactgctgttcgtacacagaaacaggactgctcaaatgatcctatttgtattttctgatgctatcagactctaatgttt

SEQ ID NO: 740721 - DNA, 120 bp, Artificial Sequence
  ENSG00000204291_40 (sequence is synthesized)
ttttccctaaaatattattgccatcatgctttaggaattttatatttttacacaatcatattttagtatggtgtctgtttatgtaactctgacttgctggaaaagttgaaactccaaata

SEQ ID NO: 740722 - DNA, 120 bp, Artificial Sequence
  ENSG00000204291_41 (sequence is synthesized)
atctgaaactagaaaagaaatagcacataattactaccttccccttggcggctctcctccccaacccccaccccacaattttatgacttccatttggcaattgttgaattataactgcga

SEQ ID NO: 740723 - DNA, 120 bp, Artificial Sequence
  ENSG00000204291_42 (sequence is synthesized)
ctgaaacaaacaggttcatagagatgaattttctgagaaacatatatctacatgttgtataattggattttttttccatgtaagtgaacataaaaacatcttttccgggtgctttcttca

SEQ ID NO: 740724 - DNA, 120 bp, Artificial Sequence
  ENSG00000204291_43 (sequence is synthesized)
aggttacataaggcagccgcgggtggaggcagcagaggcgagcgcacgtccgtcgagggggaaaggggcgtggggaggcggccggggcggccggtatcccccgggcgtgagtgcgcagcg

SEQ ID NO: 740725 - DNA, 120 bp, Artificial Sequence
  ENSG00000204291_44 (sequence is synthesized)
gatcaatatcacccatggattcatgaatttctcggacattcctgagctggtggggcctccggggccggacgggttgcctgggctgccaggatttccaatatggggttttgccatgttgcc

SEQ ID NO: 740726 - DNA, 83 bp, Artificial Sequence
  ENSG00000204291_45 (sequence is synthesized)
cgcctgagcctggctgattttctgaactttttacattttctaaaggcacatatcatatgataacactaaaaatagtgctaact

SEQ ID NO: 740727 - DNA, 120 bp, Artificial Sequence
  ENSG00000204291_46 (sequence is synthesized)
aggcacatatcatatgataacactaaaaatagtgctaactagacgttaaaaaacaaaagagagaatggcaaccatgaccacgattgtgaccatgactctgaccatgattcttggttagca

SEQ ID NO: 740728 - DNA, 120 bp, Artificial Sequence
  ENSG00000204291_47 (sequence is synthesized)
cctggggcacatttcagagcacactttcctctaaatgagtggtcctgtgttcctgagggagtcccaggctctgcaggagagcctccaggacctccactgcagggagtaaggagggggcca

SEQ ID NO: 740729 - DNA, 120 bp, Artificial Sequence
  ENSG00000204291_48 (sequence is synthesized)
aataggcacattccaggccactgaccttcaataagggaagcttcactggacatatttgtatatattaggctttcatttaagactttatttgggggaaaaaaaaggaaggaaaagagtttc

SEQ ID NO: 740730 - DNA, 120 bp, Artificial Sequence
  ENSG00000204291_49 (sequence is synthesized)
actgctaaacaataataacaaatagttgaaagccactgctgtaatgggtaattcactctttcatccagacaagacaggaacttgtgaaaagttaaaatagcaataaagtgttgaaatgcc

SEQ ID NO: 740731 - DNA, 120 bp, Artificial Sequence
  ENSG00000204291_50 (sequence is synthesized)
cacccaagactgtgctccttcattcatccagcgtttattggcatctcctactacctgagctgttttaggcagggaacaaagcacagataagccctcctggagcttacattctgatgaagg

SEQ ID NO: 740732 - DNA, 120 bp, Artificial Sequence
  ENSG00000204291_51 (sequence is synthesized)
agggctcgagagattcactgtgagttaaagtcccactccaggtagatcagggaggtggatgaacagactcgccatgcaataaatggagcaactattattgttattattttattcttatgt

SEQ ID NO: 740733 - DNA, 120 bp, Artificial Sequence
  ENSG00000204291_52 (sequence is synthesized)
cctcaaagaagcatgcgtgttatgatgggaaataacactaggcctggaaccccaaaacctagatttccatcctcagttttcaacttaccttgtaaatttgagacagttatccagattctc

SEQ ID NO: 740734 - DNA, 120 bp, Artificial Sequence
  ENSG00000204291_53 (sequence is synthesized)
tgatcctctctgtgtttccttatctgtaagtggagataagaaaacctaccccacagtcttgtaggtcaaataagataatctgtgtgaaagcactttgtacgttttaagattttatataaa

SEQ ID NO: 740735 - DNA, 120 bp, Artificial Sequence
  ENSG00000204296_0 (sequence is synthesized)
ctgctccacacaatttctcagtgatcctctgcatctctgcctacaagggcctccctgacacccaagttcatattgctcagaaacagtgaacttgagtttttcgttttaccttgatctctc

SEQ ID NO: 740736 - DNA, 120 bp, Artificial Sequence
  ENSG00000204296_1 (sequence is synthesized)
tctgacaaagaaatccagatgatgcgagacctgatgaagacaatacatggaaaatgacagtcttggaaataactttggctgtcatcctgactctactgggacttgccatcctggctattt

SEQ ID NO: 740737 - DNA, 120 bp, Artificial Sequence
  ENSG00000204296_2 (sequence is synthesized)
tgttaacaagatgggcacgatgtaagcaaagtgaaatgtatatctccagatacagttcagaacaaagtgctagacttctggactatgaggatggtagaggatcccgacatgcatattcaa

SEQ ID NO: 740738 - DNA, 120 bp, Artificial Sequence
  ENSG00000204296_3 (sequence is synthesized)
cacaaagtgacacttcatatgataaccgagagagatccaaaagagattacacaccatcaaccaactctctagtgtctatggcatctaagttctccctgggacaaacagaactcattcttc

SEQ ID NO: 740739 - DNA, 120 bp, Artificial Sequence
  ENSG00000204296_4 (sequence is synthesized)
ttttgatgtgttttattttagcactgtctcgatcaagtattggtagtataaaatgtttacaaacaactgaagaacctccttccagaactgcaggagccatgatgcaattcacagccccta

SEQ ID NO: 740740 - DNA, 120 bp, Artificial Sequence
  ENSG00000204296_5 (sequence is synthesized)
ttcccggagctacaggacctatcaagctctctcaaaaaaccattgtgcaaactccaggacctattgtacaatatcctggatccaatgctggtccaccttcagcaccccgcggtccaccca

SEQ ID NO: 740741 - DNA, 120 bp, Artificial Sequence
  ENSG00000204296_6 (sequence is synthesized)
tggcacccataataatttcacagagaaccgcaagaatacctcaagttcacactatggacagttctggaaaaatcacactgactcctgtggttatattaacaggttacatggatgaagaac

SEQ ID NO: 740742 - DNA, 120 bp, Artificial Sequence
  ENSG00000204296_7 (sequence is synthesized)
ttgcaaaaaaatcttgttccaaaatccagattctaaaatgtggaggcactgcaaggtctcagaatagccgagaagaaaacaaggaagcactaaagaatgacatcatatttacgaattctg

SEQ ID NO: 740743 - DNA, 120 bp, Artificial Sequence
  ENSG00000204296_8 (sequence is synthesized)
gaataccaaaaagacaggaaacccaactaaaaatcagtgagatgagtataccacaaggacagggagcccaaataaagaaaagtgtgtcagatgtaccaagaggacaggagtcccaagtaa

SEQ ID NO: 740744 - DNA, 120 bp, Artificial Sequence
  ENSG00000204296_9 (sequence is synthesized)
agaagagtgagtcaggtgtcccaaaaggacaagaagcccaagtaacgaagagtgggttggttgtactgaaaggacaggaagcccaggtagagaagagtgagatgggtgtgccaagaagac

SEQ ID NO: 740745 - DNA, 120 bp, Artificial Sequence
  ENSG00000204296_10 (sequence is synthesized)
aggaatcccaagtaaagaagagtcagtctggtgtctcaaagggacaggaagcccaggtaaagaagagggagtcagttgtactgaaaggacaggaagcccaggtagagaagagtgagttga

SEQ ID NO: 740746 - DNA, 120 bp, Artificial Sequence
  ENSG00000204296_11 (sequence is synthesized)
aggtaccaaaaggacaagaaggccaagtagagaagactgaggcagatgtgccaaaggaacaagaggtccaagaaaagaagagtgaggcaggtgtactgaaaggaccagaatcccaagtaa

SEQ ID NO: 740747 - DNA, 120 bp, Artificial Sequence
  ENSG00000204296_12 (sequence is synthesized)
agaacactgaggtgagtgtaccagaaacactggaatcccaagtaaagaagagtgagtcaggtgtactaaaaggacaggaagcccaagaaaagaaggagagttttgaggataaaggaaata

SEQ ID NO: 740748 - DNA, 120 bp, Artificial Sequence
  ENSG00000204296_13 (sequence is synthesized)
atgataaagaaaaggagagagatgcagagaaagatccaaataaaaaagaaaaaggtgacaaaaacacaaaaggtgacaaaggaaaggacaaagttaaaggaaagagagaatcagaaatca

SEQ ID NO: 740749 - DNA, 120 bp, Artificial Sequence
  ENSG00000204296_14 (sequence is synthesized)
atggtgaaaaatcaaaaggctcgaaaagggcgaaggcaaatacaggaaggaagtacaacaaaaaagtggaagagtaaggataaattttttaaaggcccataagacaagtgattattatga

SEQ ID NO: 740750 - DNA, 120 bp, Artificial Sequence
  ENSG00000204296_15 (sequence is synthesized)
ttcccatactccagatacaaaccatatcccagccattgcctaaacagattacaattataaaatccctttcatcttcatatcacagtttctgctcttcagaagtttcaccctttttaatct

SEQ ID NO: 740751 - DNA, 120 bp, Artificial Sequence
  ENSG00000204296_16 (sequence is synthesized)
ctcagccacaaacctcagtttccaaatatttgttttataagttaagacgtatatgattccgtcaagaaagactggatactttctgaagtaaaacattttaattaaagaaatatatagtaa

SEQ ID NO: 740752 - DNA, 120 bp, Artificial Sequence
  ENSG00000204296_17 (sequence is synthesized)
atctatcatcatccagaagcttgagcacttgccaagaccgggaagtcaaacctgagatgccacactacagattatacacgttgtaagctaggtctcaataaattttctattcaaatcttt

SEQ ID NO: 740753 - DNA, 120 bp, Artificial Sequence
  ENSG00000204296_18 (sequence is synthesized)
tgagagatccaaaagagattacacaccatcaaccaactctctagcactgtctcgatcaagtattgctttacctcaaggatccatgagtagtataaaatgtttacaaacaactgaagaacc

SEQ ID NO: 740754 - DNA, 120 bp, Artificial Sequence
  ENSG00000204296_19 (sequence is synthesized)
acctatcaagctctctcaaaaaaccattgtgcaaactccaggacctattgtacaattggatccaatgtcagatcgcatcctcacacaatcatacagtccaccttcagcaccccggtccac

SEQ ID NO: 740755 - DNA, 120 bp, Artificial Sequence
  ENSG00000204296_20 (sequence is synthesized)
atggaggtcaaggtagacagtgacgctggaataccaaaaagacaggaaacccaactaaaaatcagtgatgagtataccacaaggacagggagcccaaataaagaaaagtgtgtcagatgt

SEQ ID NO: 740756 - DNA, 120 bp, Artificial Sequence
  ENSG00000204300_0 (sequence is synthesized)
aaaccaatagatgattccatggcagttggcagtcctgacagcaggctggccctgatagataacggaagtgaggaagggtgagagttatctatcttctctgttttatagactacttcagct

SEQ ID NO: 740757 - DNA, 120 bp, Artificial Sequence
  ENSG00000204300_1 (sequence is synthesized)
tctgctgttaccaatgcctcagcaaccactgaaagttcagatatcacccttcttgtaactaatcaaatcaaggaagagatctacaaaatagtggtggtggttccagctagaaattttcac

SEQ ID NO: 740758 - DNA, 120 bp, Artificial Sequence
  ENSG00000204300_2 (sequence is synthesized)
tcacaatggtgcatgtttcaaatagaagtatccagggtatgaacatacttttctcctcctgggccgtagtcttaatggtgatgggaatcaccttagataaatgggttgaattgatttcag

SEQ ID NO: 740759 - DNA, 120 bp, Artificial Sequence
  ENSG00000204300_3 (sequence is synthesized)
aagatgaaagagccaagatgaaccacagtccttggatgatgtgttgccctgctctttggccagaagatgacctgaaagtggtcaggattatgatgacgtcgagccttggcctttccttcc

SEQ ID NO: 740760 - DNA, 120 bp, Artificial Sequence
  ENSG00000204300_4 (sequence is synthesized)
actcttcactaccatcctcagtttcttctcaggtatctctctgctctgggcactcatactatatcacaataagctgaagcaaggtcaatccatgcacttctctagttataggatcacctg

SEQ ID NO: 740761 - DNA, 120 bp, Artificial Sequence
  ENSG00000204300_5 (sequence is synthesized)
gatcatgtatactgcttacttaaatgttttcttcttgtctgtctgtggagtcctctctctcctagagtgcaagttgtctaccagtagctgtacctgcctgaacatccataaatctgacaa

SEQ ID NO: 740762 - DNA, 120 bp, Artificial Sequence
  ENSG00000204300_6 (sequence is synthesized)
cgaatgtaaggaatctgagaattctatcgaagatatttcattaccagaatgcactgcaatgcctcgtagcattgtccgtgcacacactgtgaattccctaaacaaaaaagtccaaacacg

SEQ ID NO: 740763 - DNA, 120 bp, Artificial Sequence
  ENSG00000204300_7 (sequence is synthesized)
tcacgtaacctgggctctgtgatttggcaatctatttcttgcagtatatgctcatctttatggaaaaagctttgtgggtgtgtgctgtgtctccaaccatgttgtctctatttggaatta

SEQ ID NO: 740764 - DNA, 120 bp, Artificial Sequence
  ENSG00000204300_8 (sequence is synthesized)
tggttggggtttgtaaaaagatctggaagatggttttttaaaaaatcctggcctgctgaacgaatagtttcttctgcaacatttgttgttaatataataaatattatcatataaataata

SEQ ID NO: 740765 - DNA, 120 bp, Artificial Sequence
  ENSG00000204301_0 (sequence is synthesized)
agacgtgaggcttgcagcaggccgaggaggaagaagaggggcagtgggagcagaggaggtggctcctgccccagtgagagctctgagggtccctgcctgaagagggacagggaccggggc

SEQ ID NO: 740766 - DNA, 120 bp, Artificial Sequence
  ENSG00000204301_1 (sequence is synthesized)
ctgctgctgctgctgctgctgctgctatgtgtctcagtggtcagacccagagggctgctgtgtgggagtttcccagaaccctgtgccaatggaggcacctgcctgagcctgtctctggga

SEQ ID NO: 740767 - DNA, 120 bp, Artificial Sequence
  ENSG00000204301_2 (sequence is synthesized)
ctgtgccaatggaggcacctgcctgagcctgtctctgggacaagggacctgccagtgtgcccctggcttcctgggtgagacgtgccagtttcctgacccctgccagaacgcccagctctg

SEQ ID NO: 740768 - DNA, 120 bp, Artificial Sequence
  ENSG00000204301_3 (sequence is synthesized)
ccaaaatggaggcagctgccaagccctgcttcccgctcccctagggctccccagctctccctctccattgacacccagcttcttgtgcacttgcctccctggcttcactggtgagagatg

SEQ ID NO: 740769 - DNA, 120 bp, Artificial Sequence
  ENSG00000204301_4 (sequence is synthesized)
ccaggccaagcttgaagacccttgtcctccctccttctgttccaaaaggggccgctgccacatccaggcctcgggccgcccacagtgctcctgcatgcctggatggacaggtgagcagtg

SEQ ID NO: 740770 - DNA, 120 bp, Artificial Sequence
  ENSG00000204301_5 (sequence is synthesized)
ccagcttcgggacttctgttcagccaacccatgtgttaatggaggggtgtgtctggccacatacccccagatccagtgccactgcccaccgggcttcgagggccatgcctgtgaacgtga

SEQ ID NO: 740771 - DNA, 120 bp, Artificial Sequence
  ENSG00000204301_6 (sequence is synthesized)
tgtcaacgagtgcttccaggacccaggaccctgccccaaaggcacctcctgccataacaccctgggctccttccagtgcctctgccctgtggggcaggagggtccacgttgtgagctgcg

SEQ ID NO: 740772 - DNA, 120 bp, Artificial Sequence
  ENSG00000204301_7 (sequence is synthesized)
ggcaggaccctgccctcctaggggctgttcgaatgggggcacctgccagctgatgccagagaaagactccacctttcacctctgcctctgtcccccaggtttcataggcccagactgtga

SEQ ID NO: 740773 - DNA, 120 bp, Artificial Sequence
  ENSG00000204301_8 (sequence is synthesized)
ggtgaatccagacaactgtgtcagccaccagtgtcagaatgggggcacttgccaggatgggctggacacctacacctgcctctgcccagaaacctggacaggctgggactgctccgaaga

SEQ ID NO: 740774 - DNA, 120 bp, Artificial Sequence
  ENSG00000204301_9 (sequence is synthesized)
tgtggatgagtgtgagacccagggtccccctcactgcagaaacgggggcacctgccagaactctgctggtagctttcactgcgtgtgtgtgagtggctggggcggcacaagctgtgagga

SEQ ID NO: 740775 - DNA, 120 bp, Artificial Sequence
  ENSG00000204301_10 (sequence is synthesized)
gaacctggatgactgtattgctgccacctgtgccccgggatccacctgcattgaccgggtgggctctttctcctgcctctgcccacctggacgcacaggactcctgtgccacttggaaga

SEQ ID NO: 740776 - DNA, 120 bp, Artificial Sequence
  ENSG00000204301_11 (sequence is synthesized)
catgtgtctgagccagccgtgccatggggatgcccaatgcagcaccaaccccctcacaggctccacactctgcctgtgtcagcctggctattcggggcccacctgccaccaggacctgga

SEQ ID NO: 740777 - DNA, 120 bp, Artificial Sequence
  ENSG00000204301_12 (sequence is synthesized)
cgagtgtctgatggcccagcaaggcccaagtccctgtgaacatggcggttcctgcctcaacactcctggctccttcaactgcctctgtccacctggctacacaggctcccgttgtgaggc

SEQ ID NO: 740778 - DNA, 120 bp, Artificial Sequence
  ENSG00000204301_13 (sequence is synthesized)
tgatcacaatgagtgcctctcccagccctgccacccaggaagcacctgtctggacctacttgccaccttccactgcctctgcccgccaggcttagaagggcagctctgtgaggtggagac

SEQ ID NO: 740779 - DNA, 120 bp, Artificial Sequence
  ENSG00000204301_14 (sequence is synthesized)
caacgagtgtgcctcagctccctgcctgaaccacgcggattgccatgacctgctcaacggcttccagtgcatctgcctgcctggattctccggcacccgatgtgaggaggatatcgatga

SEQ ID NO: 740780 - DNA, 120 bp, Artificial Sequence
  ENSG00000204301_15 (sequence is synthesized)
gtgcagaagctctccctgtgccaatggtgggcagtgccaggaccagcctggagccttccactgcaagtgtctcccaggctttgaagggccacgctgtcaaacagaggtggatgagtgcct

SEQ ID NO: 740781 - DNA, 120 bp, Artificial Sequence
  ENSG00000204301_16 (sequence is synthesized)
gagtgacccatgtcccgttggagccagctgccttgatcttccaggagccttcttttgcctctgcccctctggtttcacaggccagctctgtgaggttcccctgtgtgctcccaacctgtg

SEQ ID NO: 740782 - DNA, 120 bp, Artificial Sequence
  ENSG00000204301_17 (sequence is synthesized)
ccagcccaagcagatatgtaaggaccagaaagacaaggccaactgcctctgtcctgatggaagccctggctgtgccccacctgaggacaactgcacctgccaccacgggcactgccagag

SEQ ID NO: 740783 - DNA, 120 bp, Artificial Sequence
  ENSG00000204301_18 (sequence is synthesized)
atcctcatgtgtgtgtgacgtgggttggacggggccagagtgtgaggcagagctagggggctgcatctctgcaccctgtgcccatggggggacctgctacccccagccctctggctacaa

SEQ ID NO: 740784 - DNA, 120 bp, Artificial Sequence
  ENSG00000204301_19 (sequence is synthesized)
ctgcacctgccctacaggctacacaggacccacctgtagtgaggagatgacagcttgtcactcagggccatgtctcaatggcggctcctgcaaccctagccctggaggctactactgcac

SEQ ID NO: 740785 - DNA, 120 bp, Artificial Sequence
  ENSG00000204301_20 (sequence is synthesized)
ctgccctccaagccacacagggccccagtgccaaaccagcactgactactgtgtgtctgccccgtgcttcaatgggggtacctgtgtgaacaggcctggcaccttctcctgcctctgtgc

SEQ ID NO: 740786 - DNA, 120 bp, Artificial Sequence
  ENSG00000204301_21 (sequence is synthesized)
catgggcttccagggcccgcgctgtgagggaaagctccgccccagctgtgcagacagcccctgtaggaatagggcaacctgccaggacagccctcagggtccccgctgcctctgccccac

SEQ ID NO: 740787 - DNA, 120 bp, Artificial Sequence
  ENSG00000204301_22 (sequence is synthesized)
tggctacaccggaggcagctgccagactctgatggacttatgtgcccagaagccctgcccacgcaattcccactgcctccagactgggccctccttccactgcttgtgcctccagggatg

SEQ ID NO: 740788 - DNA, 120 bp, Artificial Sequence
  ENSG00000204301_23 (sequence is synthesized)
gaccgggcctctctgcaaccttccactgtcctcctgccagaaggctgcactgagccaaggcatagacgtctcttccctttgccacaatggaggcctctgtgtcgacagcggcccctccta

SEQ ID NO: 740789 - DNA, 120 bp, Artificial Sequence
  ENSG00000204301_24 (sequence is synthesized)
tttctgccactgcccccctggattccaaggcagcctgtgccaggatcacgtgaacccatgtgagtccaggccttgccagaacggggccacctgcatggcccagcccagtgggtatctctg

SEQ ID NO: 740790 - DNA, 120 bp, Artificial Sequence
  ENSG00000204301_25 (sequence is synthesized)
ccagtgtgccccaggctacgatggacagaactgctcaaaggaactcgatgcttgtcagtcccaaccctgtcacaaccatggaacctgtactcccaaacctggaggattccactgtgcctg

SEQ ID NO: 740791 - DNA, 120 bp, Artificial Sequence
  ENSG00000204301_26 (sequence is synthesized)
ccctccaggctttgtggggctacgctgtgagggagacgtggacgagtgtctggaccagccctgccaccccacaggcactgcagcctgccactctctggccaatgccttctactgccagtg

SEQ ID NO: 740792 - DNA, 120 bp, Artificial Sequence
  ENSG00000204301_27 (sequence is synthesized)
tctgcctggacacacaggccagtggtgtgaggtggagatagacccctgccacagccaaccctgctttcatggagggacctgtgaggccacagcaggatcacccctgggtttcatctgcca

SEQ ID NO: 740793 - DNA, 120 bp, Artificial Sequence
  ENSG00000204301_28 (sequence is synthesized)
acctgcagccacagggccccttcctgcggcttccatcactgccaccacggaggcctgtgtctgccctcccctaagccaggcttcccaccacgctgtgcctgcctcagtggctatgggggt

SEQ ID NO: 740794 - DNA, 120 bp, Artificial Sequence
  ENSG00000204301_29 (sequence is synthesized)
cctgactgcctgaccccaccagctcctaaaggctgtggccctccctccccatgcctatacaatggcagctgctcagagaccacgggcttggggggcccaggctttcgatgctcctgccct

SEQ ID NO: 740795 - DNA, 120 bp, Artificial Sequence
  ENSG00000204301_30 (sequence is synthesized)
cacagctctccagggccccggtgtcagaaacccggagccaaggggtgtgagggcagaagtggagatggggcctgcgatgctggctgcagtggcccgggaggaaactgggatggaggggac

SEQ ID NO: 740796 - DNA, 120 bp, Artificial Sequence
  ENSG00000204301_31 (sequence is synthesized)
tgctctctgggagtcccagacccctggaagggctgcccctcccactctcggtgctggcttctcttccgggacgggcagtgccacccacagtgtgactctgaagagtgtctgtttgatggc

SEQ ID NO: 740797 - DNA, 120 bp, Artificial Sequence
  ENSG00000204301_32 (sequence is synthesized)
tacgactgtgagacccctccagcctgcactccagcctatgaccagtactgccatgatcacttccacaacgggcactgtgagaaaggctgcaacactgcagagtgtggctgggatggaggt

SEQ ID NO: 740798 - DNA, 120 bp, Artificial Sequence
  ENSG00000204301_33 (sequence is synthesized)
gactgcaggcctgaagatggggacccagagtgggggccctccctggccctgctggtggtactgagccccccagccctagaccagcagctgtttgccctggcccgggtgctgtccctgact

SEQ ID NO: 740799 - DNA, 120 bp, Artificial Sequence
  ENSG00000204301_34 (sequence is synthesized)
ctgagggtaggactctgggtaaggaaggatcgtgatggcagggacatggtgtacccctatcctggggcccgggctgaagaaaagctaggaggaactcgggaccccacctatcaggagaga

SEQ ID NO: 740800 - DNA, 120 bp, Artificial Sequence
  ENSG00000204301_35 (sequence is synthesized)
gcagcccctcaaacgcagcccctgggcaaggagaccgactccctcagtgctgggtttgtggtggtcatgggtgtggatttgtcccgctgtggccctgaccacccggcatcccgctgtccc

SEQ ID NO: 740801 - DNA, 120 bp, Artificial Sequence
  ENSG00000204301_36 (sequence is synthesized)
tgggaccctgggcttctactccgcttccttgctgcgatggctgcagtgggagccctggagcccctgctgcctggaccactgctggctgtccaccctcatgcagggaccgcaccccctgcc

SEQ ID NO: 740802 - DNA, 120 bp, Artificial Sequence
  ENSG00000204301_37 (sequence is synthesized)
aaccagcttccctggcctgtgctgtgctccccagtggccggggtgattctcctggccctaggggctcttctcgtcctccagctcatccggcgtcgacgccgagagcatggagctctctgg

SEQ ID NO: 740803 - DNA, 120 bp, Artificial Sequence
  ENSG00000204301_38 (sequence is synthesized)
ctgccccctggtttcactcgacggcctcggactcagtcagctccccaccgacgccggcccccactaggcgaggacagcattggtctcaaggcactgaagccaaaggcagaagttgatgag

SEQ ID NO: 740804 - DNA, 120 bp, Artificial Sequence
  ENSG00000204301_39 (sequence is synthesized)
gatggagttgtgatgtgctcaggccctgaggagggagaggaggtgggccaggctgaagaaacaggcccaccctccacgtgccagctctggtctctgagtggtggctgtggggcgctccct

SEQ ID NO: 740805 - DNA, 120 bp, Artificial Sequence
  ENSG00000204301_40 (sequence is synthesized)
caggcagccatgctaactcctccccaggaatctgagatggaagcccctgacctggacacccgtggacctgatggggtgacacccctgatgtcagcagtttgctgtggggaagtacagtcc

SEQ ID NO: 740806 - DNA, 120 bp, Artificial Sequence
  ENSG00000204301_41 (sequence is synthesized)
gggaccttccaaggggcatggttgggatgtcctgagccctgggaacctctgctggatggaggggcctgtccccaggctcacaccgtgggcactggggagacccccctgcacctggctgcc

SEQ ID NO: 740807 - DNA, 120 bp, Artificial Sequence
  ENSG00000204301_42 (sequence is synthesized)
cgattctcccggccaaccgctgcccgccgcctccttgaggctggagccaaccccaaccagccagaccgggcagggcgcacaccccttcatgctgctgtggctgctgatgctcgggaggtc

SEQ ID NO: 740808 - DNA, 120 bp, Artificial Sequence
  ENSG00000204301_43 (sequence is synthesized)
tgccagcttctgctccgtagcagacaaactgcagtggacgctcgcacagaggacgggaccacacccttgatgctggctgccaggctggcggtggaagacctggttgaagaactgattgca

SEQ ID NO: 740809 - DNA, 120 bp, Artificial Sequence
  ENSG00000204301_44 (sequence is synthesized)
gcccaagcagacgtgggggccagagataaatgggggaaaactgcgctgcactgggctgctgccgtgaacaacgcccgagccgcccgctcgcttctccaggccggagccgataaagatgcc

SEQ ID NO: 740810 - DNA, 120 bp, Artificial Sequence
  ENSG00000204301_45 (sequence is synthesized)
caggacaacagggagcagacgccgctattcctggcggcgcgggaaggagcggtggaagtagcccagctactgctggggctgggggcagcccgagagctgcgggaccaggctgggctagcg

SEQ ID NO: 740811 - DNA, 120 bp, Artificial Sequence
  ENSG00000204301_46 (sequence is synthesized)
ccggcggacgtcgctcaccaacgtaaccactgggatctgctgacgctgctggaaggggctgggccaccagaggcccgtcacaaagccacgccgggccgcgaggctgggcccttcccgcgc

SEQ ID NO: 740812 - DNA, 120 bp, Artificial Sequence
  ENSG00000204301_47 (sequence is synthesized)
gcacggacggtgtcagtaagcgtgcccccgcatgggggcggggctctgccgcgctgccggacgctgtcagccggagcaggccctcgtgggggcggagcttgtctgcaggctcggacttgg

SEQ ID NO: 740813 - DNA, 120 bp, Artificial Sequence
  ENSG00000204301_48 (sequence is synthesized)
tccgtagacttggctgcgcgggggggcggggcctattctcattgccggagcctctcgggagtaggagcaggaggaggcccgacccctcgcggccgtaggttttctgcaggcatgcgcggg

SEQ ID NO: 740814 - DNA, 120 bp, Artificial Sequence
  ENSG00000204301_49 (sequence is synthesized)
cctcggcccaaccctgcgataatgcgaggaagatacggagtggctgccgggcgcggaggcagggtctcaacggatgactggccctgtgattgggtggccctgggagcttgcggttctgcc

SEQ ID NO: 740815 - DNA, 120 bp, Artificial Sequence
  ENSG00000204301_50 (sequence is synthesized)
tccaacattccgatcccgcctccttgccttactccgtccccggagcggggatcacctcaacttgactgtggtcccccagccctccaagaaatgcccataaaccaaggaggagagggtaaa

SEQ ID NO: 740816 - DNA, 120 bp, Artificial Sequence
  ENSG00000204301_51 (sequence is synthesized)
aaatagaagaatacatggtagggaggaattccaaaaatgattacccattaaaaggcaggctggaaggccttcctggttttaagatggatcccccaaaatgaagggttgtgagtttagttt

SEQ ID NO: 740817 - DNA, 120 bp, Artificial Sequence
  ENSG00000204301_52 (sequence is synthesized)
ctctcctaaaatgaatgtatgcccaccagagcagacatcttccacgtggagaagctgcagctctggaaagagggtttaagatgctaggatgaggcaggcccagtcctcctccagaaaata

SEQ ID NO: 740818 - DNA, 120 bp, Artificial Sequence
  ENSG00000204301_53 (sequence is synthesized)
agacaggccacaggagggcagagtggagtggaaatacccctaagttggaaccaagaattgcaggcatatgggatgtaagatgttctttcctatatatggtttccaaagggtgcccctatg

SEQ ID NO: 740819 - DNA, 120 bp, Artificial Sequence
  ENSG00000204301_54 (sequence is synthesized)
atccattgtccccactgcccacaaatggctgacaaatatttattgggcacctactatgtgccaggcactgtgtaggtgctgaaaagtggccaagggccacccccgctgatgactccttgc

SEQ ID NO: 740820 - DNA, 120 bp, Artificial Sequence
  ENSG00000204301_55 (sequence is synthesized)
attccctcccctcacaacaaagaactccactgtggggatgaagcgcttcttctagccactgctatcgctatttaagaaccctaaatctgtcacccataataaagctgatttgaagtgtta

SEQ ID NO: 740821 - DNA, 120 bp, Artificial Sequence
  ENSG00000204301_56 (sequence is synthesized)
actgatgtggaaattattggaaaaagccatgccaagctcacagtgggaagtgtctctcagaagcagtcaaaggcaaggcaggatcagttgatagcatgaatggaattttcaaaaatcaca

SEQ ID NO: 740822 - DNA, 120 bp, Artificial Sequence
  ENSG00000204301_57 (sequence is synthesized)
ggcgttgcctaagggaaggtcaggagctccccaagctcaagctgcgtggtgggtggcctcagataggttattttaactctgtgtgtgtttgtatatgtatttatggacctcagatgcatg

SEQ ID NO: 740823 - DNA, 120 bp, Artificial Sequence
  ENSG00000204301_58 (sequence is synthesized)
gaattagactaatcttaagctttggttcctgatacactgacattggtttatgcctggtcttcttttattttattattctaacaatgtaacacccatgaacctaacccaagaatttcaata

SEQ ID NO: 740824 - DNA, 120 bp, Artificial Sequence
  ENSG00000204301_59 (sequence is synthesized)
ttaataataacttacatctacttaagtcctcctcctgtatcctgttccctctccagaggaagaggaagacatatgatcctatttctaaggagtaagataataatataacagccggccggg

SEQ ID NO: 740825 - DNA, 60 bp, Artificial Sequence
  ENSG00000204301_60 (sequence is synthesized)
cgaggcaggcggatcacctgaggtcgggctgggcgtggtggtgcatggctgtaatcccag

SEQ ID NO: 740826 - DNA, 64 bp, Artificial Sequence
  ENSG00000204301_61 (sequence is synthesized)
ccctgtctctactaaaaatacaaattagctgggcgtggtggtgcatggctgtaatcccagctat

SEQ ID NO: 740827 - DNA, 120 bp, Artificial Sequence
  ENSG00000204301_62 (sequence is synthesized)
tgtctcaaaaataataataataataatataatagcattctattaactgtttagtcttctaggacttgcactgtaatgccacagtccatcaggttgttgcacacagctgtgcttcatccat

SEQ ID NO: 740828 - DNA, 120 bp, Artificial Sequence
  ENSG00000204301_63 (sequence is synthesized)
ttgttgcacacagctgtgcttcatccattttcaacagaatgtaatatgtcattgtgtgaaattaccacaggacatggtttcaacatccacaaaatgattaacttgatgctctctgaggcg

SEQ ID NO: 740829 - DNA, 120 bp, Artificial Sequence
  ENSG00000204301_64 (sequence is synthesized)
ccttttagatatgagaatctaggaccctctgcaccgtcttaacccaagagtttgcttgatggagagcgggaagaataatgcaagttgcatctccaatatctcccctcccctccacagggt

SEQ ID NO: 740830 - DNA, 120 bp, Artificial Sequence
  ENSG00000204301_65 (sequence is synthesized)
acagtgtggccacagccttgggctccagggagtttccaccctaataaccatcactaaacaggggtcgaagactctggactccaacctagggtaatggggtggcatcagtatttaatgtgg

SEQ ID NO: 740831 - DNA, 120 bp, Artificial Sequence
  ENSG00000204301_66 (sequence is synthesized)
ggcgtggcctttgggctcctctctaagagttgaaggaactcaggtctcaagcctccttccctaagccttgctgccatggagtatttcccctagcagtcagcacctcacagagggaaaagg

SEQ ID NO: 740832 - DNA, 120 bp, Artificial Sequence
  ENSG00000204301_67 (sequence is synthesized)
gcctgggactctcctttagaaacagaggagagcttgggagggtacagagaggggacagtctagggagacaggggtgttagcagacattggggtgtctggactaccatccaggacttgact

SEQ ID NO: 740833 - DNA, 120 bp, Artificial Sequence
  ENSG00000204301_68 (sequence is synthesized)
aagctcattgctccacagctgcccccacttagcaaccaaagccctagagggcacaaaatatggggaattctttctagggtgaagaaaagagtcaggttttagggaggtcctgagtccccc

SEQ ID NO: 740834 - DNA, 120 bp, Artificial Sequence
  ENSG00000204301_69 (sequence is synthesized)
caggggaggcactggaaagaactggcagaatattttattccatttgggttggggcagagttcattggtgggtgtttgatggttgggatgtgagaatagaatgagaatggtatcctttaaa

SEQ ID NO: 740835 - DNA, 120 bp, Artificial Sequence
  ENSG00000204301_70 (sequence is synthesized)
gttatttagtgtaaaacctgcacaattgtacaaccatggggacaagggcaggggttaccgtagggcccacatgggcccagtgtaaatggtgtgattgcggcttgggagcagaggacgggg

SEQ ID NO: 740836 - DNA, 120 bp, Artificial Sequence
  ENSG00000204301_71 (sequence is synthesized)
ctcaaagaaaaggcattcacttgcttatttagcaagcacttaccaactgcctactatgccagatacggaggcaaatctgagtaagacagttgccatcttcatgtgactttaagtctaata

SEQ ID NO: 740837 - DNA, 120 bp, Artificial Sequence
  ENSG00000204301_72 (sequence is synthesized)
cagagagaccaacaagtctcctgttgatcatagcccacagaggtgctctgagagaaaaacgtgcaggatattacaagagcacagaggaccagccaacccagactaaaaatggaggaggtg

SEQ ID NO: 740838 - DNA, 120 bp, Artificial Sequence
  ENSG00000204301_73 (sequence is synthesized)
atggctgagatgagtcttgaaagataagcagaggctgggcgtggtggctcacgcctatagtcccagcacttcgggaagccgaggcgggtggatcacccgagattaggagttcgagatcag

SEQ ID NO: 740839 - DNA, 120 bp, Artificial Sequence
  ENSG00000204304_0 (sequence is synthesized)
ctcctccctcctccctctctctcacacacacccccgcttgggcctcctctctctctccggctccattttctccgccgccgggggccggggtctcctgtggggggcccagccggtatccca

SEQ ID NO: 740840 - DNA, 120 bp, Artificial Sequence
  ENSG00000204304_1 (sequence is synthesized)
ggtctcccttcagtgccggggtgaacccccgggggagccgggagccgggggcagacgggcgggggttggggcggagggagcagcggccccagcgagtttggggggagaagtaaccaggcg

SEQ ID NO: 740841 - DNA, 120 bp, Artificial Sequence
  ENSG00000204304_2 (sequence is synthesized)
cgagtttggggggagaagtaaccaggcggggggaggggcggagcagggagggggcctcagggcccccccccagctatggacgaacggctactggggccgccccctccaggcgggggccgg

SEQ ID NO: 740842 - DNA, 120 bp, Artificial Sequence
  ENSG00000204304_3 (sequence is synthesized)
ctgggggccctggcgagcctcccggtggcggagaccccggtgggggtagcgggggggtcccgggaggccgagggaagcaagacatcggggacattctgcagcagataatgaccatcaccg

SEQ ID NO: 740843 - DNA, 120 bp, Artificial Sequence
  ENSG00000204304_4 (sequence is synthesized)
accagagcctggacgaggcccaggccaagaaacacgccctaaactgccaccgaatgaagcctgctctctttagcgtcctgtgtgaaatcaaggagaaaactggcctcagcattcggagct

SEQ ID NO: 740844 - DNA, 120 bp, Artificial Sequence
  ENSG00000204304_5 (sequence is synthesized)
cccaggaggaggagccggtggacccacagctgatgcgcttggacaacatgcttctggcagagggtgtggctgggcccgagaaagggggcggctcagcagcagcagctgcagccgctgcag

SEQ ID NO: 740845 - DNA, 120 bp, Artificial Sequence
  ENSG00000204304_6 (sequence is synthesized)
cctctggtggtggtgtgtcccctgacaactccatcgaacactcggactatcgcagcaaacttgcccagatccgtcacatataccactcggagctggagaagtatgagcaggcatgtaatg

SEQ ID NO: 740846 - DNA, 120 bp, Artificial Sequence
  ENSG00000204304_7 (sequence is synthesized)
agttcacgacccatgtcatgaacctgctgagggagcagagccgcaccaggcccgtggcccccaaagagatggaacgcatggtgagcatcatccatcgaaagttcagcgccatccagatgc

SEQ ID NO: 740847 - DNA, 120 bp, Artificial Sequence
  ENSG00000204304_8 (sequence is synthesized)
agctgaagcagagcacctgcgaggctgtgatgatcctgcgctcccgtttcctggatgccagacgaaagcgccgtaacttcagcaaacaggccactgaggtcctaaatgagtatttctact

SEQ ID NO: 740848 - DNA, 120 bp, Artificial Sequence
  ENSG00000204304_9 (sequence is synthesized)
cccacctgagtaacccatatcctagtgaggaggccaaggaggagcttgccaagaagtgtggcatcaccgtgtctcaggtctccaactggtttggcaacaagaggattcgctataagaaaa

SEQ ID NO: 740849 - DNA, 120 bp, Artificial Sequence
  ENSG00000204304_10 (sequence is synthesized)
acatcggaaagttccaagaggaggcaaacatctatgctgtcaagaccgccgtgtcagtcacccaggggggccacagccgcaccagctccccgacacccccttcctctgcaggctctggcg

SEQ ID NO: 740850 - DNA, 120 bp, Artificial Sequence
  ENSG00000204304_11 (sequence is synthesized)
gctctttcaatctctcaggatctggagacatgtttctggggatgcctgggctcaacggagattcctattctgcttcccaggtggaatcactccgacactcgatggggccagggggctatg

SEQ ID NO: 740851 - DNA, 120 bp, Artificial Sequence
  ENSG00000204304_12 (sequence is synthesized)
gggataacctcgggggaggccagatgtacagcccacgggaaatgagggcaaatggcagctggcaagaggctgtgaccccctcttcagtgacatccccaacggagggaccagggagtgttc

SEQ ID NO: 740852 - DNA, 120 bp, Artificial Sequence
  ENSG00000204304_13 (sequence is synthesized)
gaagcacaagacagagaagggccaatggggtcatcccctccctaacgagactctctgtgctgggggtgctaattacatggcaggaagaatggggcctctaaggggagtgtggggtctgtc

SEQ ID NO: 740853 - DNA, 120 bp, Artificial Sequence
  ENSG00000204304_14 (sequence is synthesized)
tctcccttttttccatctttttcctctctcgctttctttcttacacagaaacatacacataccgagaaacctatttctcagacccctttttctcctctgtctttctctctccctctccca

SEQ ID NO: 740854 - DNA, 120 bp, Artificial Sequence
  ENSG00000204304_15 (sequence is synthesized)
cacctcacacacacatactcccacttgcaactattctgtttctctcctgggctcccccactttcccttccccaccccacttgtatgctctggaatctgtggagacgccagccctgcccaa

SEQ ID NO: 740855 - DNA, 120 bp, Artificial Sequence
  ENSG00000204304_16 (sequence is synthesized)
tcagagatgccaaaaatggggacatgacttctggacagaggacatgggccacgcccccatgcatccccacccccgcccctccggacggcttacttacctcatacgcagctcatcttaaac

SEQ ID NO: 740856 - DNA, 120 bp, Artificial Sequence
  ENSG00000204304_17 (sequence is synthesized)
caatagaatcgctcggtggacgagagtgtctgactcagatatctacctcggagggagtttctgctactttagggaattattgactgggctttggggttgaacttttttttttttaaagaa

SEQ ID NO: 740857 - DNA, 120 bp, Artificial Sequence
  ENSG00000204304_18 (sequence is synthesized)
agaaaaagaaaccctgggatccatctgttttttttgttgttgttgttgtttttgttgttgttggtggtggtggtggtggtggttcttaatttttaatttagtttggggaagtagcttgtt

SEQ ID NO: 740858 - DNA, 120 bp, Artificial Sequence
  ENSG00000204304_19 (sequence is synthesized)
tttttttttataaatatgttgatttcttgtctttttttttttttatttcttactttcccatattaggggtgatagccaaaggggttctggtaagagaaagggggacaaacagaactggta

SEQ ID NO: 740859 - DNA, 120 bp, Artificial Sequence
  ENSG00000204304_20 (sequence is synthesized)
aagaggcccccctggctccaggcctgtccatcaggaagtaaattttacagggcaccaagctttgccccctaaaatcccttaggtgttctttgttcatgcaggcaggtttctgccgcattt

SEQ ID NO: 740860 - DNA, 120 bp, Artificial Sequence
  ENSG00000204304_21 (sequence is synthesized)
gatgtggaggcagtgaagggcttgccctgctggcctctcatcccccttcttcccacaacccttgggcagggctggactcagtaattttgaggaaattgaagatgccatcttcccctgtga

SEQ ID NO: 740861 - DNA, 120 bp, Artificial Sequence
  ENSG00000204304_22 (sequence is synthesized)
gtgacatgtctttaattttttaaaaaactactatttgaaaattggagggggaagaatgggaagggagttattgccaaatatgttaaatatgggttggggtgcttgtatatgtatcttcct

SEQ ID NO: 740862 - DNA, 120 bp, Artificial Sequence
  ENSG00000204304_23 (sequence is synthesized)
caatttccccataaatgaggtatctttttgtcacaccaaaatcaaggggtagggagagggaggaggttgcaaaaagccagatgtgggggaaaagtaacatcaacactgtcccatcctcag

SEQ ID NO: 740863 - DNA, 120 bp, Artificial Sequence
  ENSG00000204304_24 (sequence is synthesized)
ccctgaactagctaccatctgatcccctcagacattctcaggattttacaagactgtcagagtggggaacccctcccattaaagatccgggcaggactggggacaggttggaagtgtgat

SEQ ID NO: 740864 - DNA, 120 bp, Artificial Sequence
  ENSG00000204304_25 (sequence is synthesized)
gggtgggggggtgggaggcatgggccgggggcagttctctcctcacttgtaaacttgtgtagtttcacagaaaaaaaacaaaatgcagttttaaataaagaaatttcttttttccctggg

SEQ ID NO: 740865 - DNA, 120 bp, Artificial Sequence
  ENSG00000204304_26 (sequence is synthesized)
ccactcccactcctcccaaggaaacacgccctaaactgccaccgaatgaagcctgctctctttagcgtcctgtgtgaaatcaaggagaaaactggtatgtgggccccccccggattgctc

SEQ ID NO: 740866 - DNA, 120 bp, Artificial Sequence
  ENSG00000204304_27 (sequence is synthesized)
aactctgggaacagaaccctgttcattatagggctagagtgtgacaacttggggccctgaggaaagtaaggagtcagggggactggggaaggaaccaaagcctgggaacttggctctcca

SEQ ID NO: 740867 - DNA, 120 bp, Artificial Sequence
  ENSG00000204304_28 (sequence is synthesized)
cccagattcctcctcctacctttctagaccatctcccaaagcccgcagcctttaacctgctgcctgcatcttccctgtgtctccctgaagctgaggagcttccccatgctctgggagctg

SEQ ID NO: 740868 - DNA, 120 bp, Artificial Sequence
  ENSG00000204304_29 (sequence is synthesized)
atcttttcccaagaactcctcattccacccccaactcattccacccccaatccgcttcctccctccgcagactgaccctcctccctccttgttctcaggccccctgctctgtttctctag

SEQ ID NO: 740869 - DNA, 120 bp, Artificial Sequence
  ENSG00000204304_30 (sequence is synthesized)
ttttgcacacttcctgcttttgttcccacttcctatctaggcaggatcatagcagagagggggccttttggggtgagagggaccgagctgagataggctggagatgtcaggggacagagg

SEQ ID NO: 740870 - DNA, 120 bp, Artificial Sequence
  ENSG00000204304_31 (sequence is synthesized)
ccattccagtgatcttagttctgcctttcttcccacgggtggccaaggaacagcctgctctttctgtgtgttggaatgttattttgtggataattggagtatagtagcatgtccccacaa

SEQ ID NO: 740871 - DNA, 120 bp, Artificial Sequence
  ENSG00000204304_32 (sequence is synthesized)
tgggcaacagcatagtgagaccaggaagcaaaaaaaaaaaaaatgctgtcactcacatcttattcagtgaaggacttcagaggcaaatgtttctacctgaccctcctttctgccccacag

SEQ ID NO: 740872 - DNA, 120 bp, Artificial Sequence
  ENSG00000204304_33 (sequence is synthesized)
tctgaggcttctcttcactgtcataccttcctctgctgcctgcaggtggaatcactccgacactcgatggggccagggggctatggggataacctcgggggaggccagatgtacagccca

SEQ ID NO: 740873 - DNA, 120 bp, Artificial Sequence
  ENSG00000204304_34 (sequence is synthesized)
cgggaaatgagggtgagtggatcctgaagctcctctctgtccagttctcacaggacagaggggcattttccctagtaatgttgtgcccacacagggttcccagggctttctctgttttct

SEQ ID NO: 740874 - DNA, 120 bp, Artificial Sequence
  ENSG00000204305_0 (sequence is synthesized)
agacagagccaggaccctggaaggaagcaggatggctgccggaacagcagttggagcctgggtgctggtcctcagtctgtggggggcagtagtaggtgctcaaaacatcacagcccggat

SEQ ID NO: 740875 - DNA, 120 bp, Artificial Sequence
  ENSG00000204305_1 (sequence is synthesized)
tggcgagccactggtgctgaagtgtaagggggcccccaagaaaccaccccagcggctggaatggaaactgaacacaggccggacagaagcttggaaggtcctgtctccccagggaggagg

SEQ ID NO: 740876 - DNA, 120 bp, Artificial Sequence
  ENSG00000204305_2 (sequence is synthesized)
cccctgggacagtgtggctcgtgtccttcccaacggctccctcttccttccggctgtcgggatccaggatgaggggattttccggtgccaggcaatgaacaggaatggaaaggagaccaa

SEQ ID NO: 740877 - DNA, 120 bp, Artificial Sequence
  ENSG00000204305_3 (sequence is synthesized)
gtccaactaccgagtccgtgtctaccagattcctgggaagccagaaattgtagattctgcctctgaactcacggctggtgttcccaataaggtggggacatgtgtgtcagagggaagcta

SEQ ID NO: 740878 - DNA, 120 bp, Artificial Sequence
  ENSG00000204305_4 (sequence is synthesized)
ccctgcagggactcttagctggcacttggatgggaagcccctggtgcctaatgagaagggagtatctgtgaaggaacagaccaggagacaccctgagacagggctcttcacactgcagtc

SEQ ID NO: 740879 - DNA, 120 bp, Artificial Sequence
  ENSG00000204305_5 (sequence is synthesized)
cccatccagccccgtgtctgggagcctgtgcctctggaggaggtccaattggtggtggagccagaaggtggagcagtagctcctggtggaaccgtaaccctgacctgtgaagtccctgcc

SEQ ID NO: 740880 - DNA, 120 bp, Artificial Sequence
  ENSG00000204305_6 (sequence is synthesized)
cagccctctcctcaaatccactggatgaaggatggtgtgcccttgccccttccccccagccctgtgctgatcctccctgagatagggcctcaggaccagggaacctacagctgtgtggcc

SEQ ID NO: 740881 - DNA, 120 bp, Artificial Sequence
  ENSG00000204305_7 (sequence is synthesized)
acccattccagccacgggccccaggaaagccgtgctgtcagcatcagcatcatcgaaccaggcgaggaggggccaactgcaggctctgtgggaggatcagggctgggaactctagccctg

SEQ ID NO: 740882 - DNA, 120 bp, Artificial Sequence
  ENSG00000204305_8 (sequence is synthesized)
gccctggggatcctgggaggcctggggacagccgccctgctcattggggtcatcttgtggcaaaggcggcaacgccgaggagaggagaggaaggccccagaaaaccaggaggaagaggag

SEQ ID NO: 740883 - DNA, 120 bp, Artificial Sequence
  ENSG00000204305_9 (sequence is synthesized)
gagcgtgcagaactgaatcagtcggaggaacctgaggcaggcgagagtagtactggagggccttgaggggcccacagacagatcccatccatcagctcccttttctttttcccttgaact

SEQ ID NO: 740884 - DNA, 120 bp, Artificial Sequence
  ENSG00000204305_10 (sequence is synthesized)
gttctggcctcagaccaactctctcctgtataatctctctcctgtataaccccaccttgccaagctttcttctacaaccagagccccccacaatgatgattaaacacctgacacatcttg

SEQ ID NO: 740885 - DNA, 120 bp, Artificial Sequence
  ENSG00000204305_11 (sequence is synthesized)
gatccccgtcccaccttctcctgtagcttcagcccaggccttccccgacaccgggccttgcgcacagcccccatccagccccgtgtctggggtgagcataggtggggagggccccaagct

SEQ ID NO: 740886 - DNA, 120 bp, Artificial Sequence
  ENSG00000204305_12 (sequence is synthesized)
cacgtgagcacgttctggaagtctgacccttagggaaagagggagtcaagcccatggccactgggatcactcacaagtgtaactctccacctcaaaacccttccaactcccagagcctgt

SEQ ID NO: 740887 - DNA, 120 bp, Artificial Sequence
  ENSG00000204305_13 (sequence is synthesized)
cagaaccaggcgaggaggggccaactgcaggtgaggggtttgataaagtcagggaagcagaagatagcccccaacacatgtgactggggggatggtcaacaagaaaggaatggtgagtgg

SEQ ID NO: 740888 - DNA, 120 bp, Artificial Sequence
  ENSG00000204305_14 (sequence is synthesized)
gccaggaccctggaaggaagcaggatggctgccggaacagcagttggagcctgggtgctggtcctcagtctgtggggtgagccactccctcaaccccactgaccctccctgcagaaagca

SEQ ID NO: 740889 - DNA, 120 bp, Artificial Sequence
  ENSG00000204305_15 (sequence is synthesized)
ctttaaccccacaccccagtcgtcctagaacttttcccagaacccgaggaagtgcctttcaaggtccctcacccaccctgtccaaattttgttagccctcattcccttcctacccctcta

SEQ ID NO: 740890 - DNA, 120 bp, Artificial Sequence
  ENSG00000204308_0 (sequence is synthesized)
gaagcctgcccaacgatcgtgggcaggaggtggtttctggtttgttggggcgtgtgtatgtgtatttggggggactgaagggtacgtggggcgaaacaaaaccggccatggcagcagcgg

SEQ ID NO: 740891 - DNA, 120 bp, Artificial Sequence
  ENSG00000204308_1 (sequence is synthesized)
aggaggaggacgggggccccgaagggccaaatcgcgagcggggcggggcgggcgcgaccttcgaatgtaatatatgtttggagactgctcgggaagctgtggtcagtgtgtgtggccacc

SEQ ID NO: 740892 - DNA, 120 bp, Artificial Sequence
  ENSG00000204308_2 (sequence is synthesized)
tgtactgttggccatgtcttcatcagtggctggagacacggccagaacggcaagagtgtccagtatgtaaagctgggatcagcagagagaaggttgtcccgctttatgggcgagggagcc

SEQ ID NO: 740893 - DNA, 120 bp, Artificial Sequence
  ENSG00000204308_3 (sequence is synthesized)
agaagccccaggatcccagattaaaaactccaccccgcccccagggccagagaccagctccggagagcagagggggattccagccatttggtgataccgggggcttccacttctcatttg

SEQ ID NO: 740894 - DNA, 120 bp, Artificial Sequence
  ENSG00000204308_4 (sequence is synthesized)
cttcaatgcccatgagcctttccgccggggtacaggtgtggatctgggacagggtcacccagcctccagctggcaggattccctcttcctgtttctcgccatcttcttctttttttggct

SEQ ID NO: 740895 - DNA, 120 bp, Artificial Sequence
  ENSG00000204308_5 (sequence is synthesized)
gctcagtatttgagctatgtctgcttcctgcccacctccagccagagaagaatcagtattgagggtccctgctgacccttccgtactcctggacccccttgacccctctatttctgttgg

SEQ ID NO: 740896 - DNA, 120 bp, Artificial Sequence
  ENSG00000204308_6 (sequence is synthesized)
ctaaggccagccctggacattgtccaggaaggcctggggaggaggagtgaagtctgtgcatagatgggagagccttctgctcagaggctcactcagtaacgttgtttaattctctgccct

SEQ ID NO: 740897 - DNA, 120 bp, Artificial Sequence
  ENSG00000204308_7 (sequence is synthesized)
ggggaaggaggatggattgagagaatgtctttctcctctcctaagtctttgctttccctgatttcttgatttgatcttcaaaggtgggcaaagttccctctgactcttcccccactcccc

SEQ ID NO: 740898 - DNA, 120 bp, Artificial Sequence
  ENSG00000204308_8 (sequence is synthesized)
atcttactgatttaatttaatttttcactccccagagtctaatatggattctgactcttaagtgcttccgccccctcactacctcctttaatacaaattcaataaaaaaggtgaaatata

SEQ ID NO: 740899 - DNA, 120 bp, Artificial Sequence
  ENSG00000204310_0 (sequence is synthesized)
tcctcttttagagaatgtccggattgctattggactttggagcgtatggctccaaatcaactcattggctaaaacttgacggaaaatggtggttaggtggccagaatggatttgtggcca

SEQ ID NO: 740900 - DNA, 120 bp, Artificial Sequence
  ENSG00000204310_1 (sequence is synthesized)
ggggcatggatgctgctgctgctgctcttcctgctgctgctcttcctgctgcccaccctgtggttctgcagccccagtgccaagtacttcttcaagatggccttctacaatggctggatc

SEQ ID NO: 740901 - DNA, 120 bp, Artificial Sequence
  ENSG00000204310_2 (sequence is synthesized)
ctcttcctggctgtgctcgccatccctgtgtgtgccgtgcgaggacgcaacgtcgagaacatgaagatcttgcgtctaatgctgctccacatcaaatacctgtacgggatccgagtggag

SEQ ID NO: 740902 - DNA, 120 bp, Artificial Sequence
  ENSG00000204310_3 (sequence is synthesized)
gtgcgaggggctcaccacttccctccctcgcagccctatgttgttgtctccaaccaccagagctctctcgatctgcttgggatgatggaggtactgccaggccgctgtgtgcccattgcc

SEQ ID NO: 740903 - DNA, 120 bp, Artificial Sequence
  ENSG00000204310_4 (sequence is synthesized)
aagcgcgagctactgtgggctggctctgccgggctggcctgctggctggcaggagtcatcttcatcgaccggaagcgcacgggggatgccatcagtgtcatgtctgaggtcgcccagacc

SEQ ID NO: 740904 - DNA, 120 bp, Artificial Sequence
  ENSG00000204310_5 (sequence is synthesized)
ctgctcacccaggacgtgagggtctgggtgtttcctgagggaacgagaaaccacaatggctccatgctgcccttcaaacgtggcgccttccatcttgcagtgcaggcccaggttcccatt

SEQ ID NO: 740905 - DNA, 120 bp, Artificial Sequence
  ENSG00000204310_6 (sequence is synthesized)
gtccccatagtcatgtcctcctaccaagacttctactgcaagaaggagcgtcgcttcacctcgggacaatgtcaggtgcgggtgctgcccccagtgcccacggaagggctgacaccagat

SEQ ID NO: 740906 - DNA, 120 bp, Artificial Sequence
  ENSG00000204310_7 (sequence is synthesized)
gacgtcccagctctggctgacagagtccggcactccatgctcactgttttccgggaaatctccactgatggccggggtggtggtgactatctgaagaagcctgggggcggtgggtgaacc

SEQ ID NO: 740907 - DNA, 120 bp, Artificial Sequence
  ENSG00000204310_8 (sequence is synthesized)
ctccccacttattctcctctttggaatcttcaacttctgaagtgaatgtggatacagcgccactcctgccccctcttggccccatccatggactcttgcctcggtgcagtctccactctt

SEQ ID NO: 740908 - DNA, 120 bp, Artificial Sequence
  ENSG00000204310_9 (sequence is synthesized)
gacccccacctcctactgtcttgtctgtgggacagttgcctccccctcatctccagtgactcagcctacacaagggaggggaacattccatccccagtggagtctcttcctatgtggtct

SEQ ID NO: 740909 - DNA, 120 bp, Artificial Sequence
  ENSG00000204310_10 (sequence is synthesized)
tctctacccctctaccccacattggccagtggactcatccattctttggaacaaatcccccccactccaaagtccatggattcaatggactcatccatttgtgaggaggacttctcgccc

SEQ ID NO: 740910 - DNA, 120 bp, Artificial Sequence
  ENSG00000204310_11 (sequence is synthesized)
tctggctggaagctgatacctgaagcactcccaggctcatcatgggagctttcctcagcaccttcaccttccctcccagtgtagcctcctgtcagtgggggctggacccttctaattcag

SEQ ID NO: 740911 - DNA, 120 bp, Artificial Sequence
  ENSG00000204310_12 (sequence is synthesized)
aggtctcatgcctgcccttgcccagatgcccagggtcgtgcactctctgggataccagttcagtctccacatttctggttttctgtccccatagtacagttcttcagtggacatgacccc

SEQ ID NO: 740912 - DNA, 120 bp, Artificial Sequence
  ENSG00000204310_13 (sequence is synthesized)
acccagccccctgcagccctgctgcaccatctcaccagacacaaggggaagaagcagacatcaggtgctgcactcacttctgccccctggggagttggggaaaggaacgaaccctggctg

SEQ ID NO: 740913 - DNA, 120 bp, Artificial Sequence
  ENSG00000204310_14 (sequence is synthesized)
gaggggataggagggcttttaatttatttctttttctgttgaggcttccccctctctgagccagttttcatttcttcctggtggcattagccactccctgcctctcactccagacctgtt

SEQ ID NO: 740914 - DNA, 120 bp, Artificial Sequence
  ENSG00000204310_15 (sequence is synthesized)
cccacaactggggaggtaggctgggagcaaaaggagagggtgggacccagttttgcgtggttggtttttattaattatctggataacagcaaaaaaactgaaaataaagagagagagaga

SEQ ID NO: 740915 - DNA, 120 bp, Artificial Sequence
  ENSG00000204310_16 (sequence is synthesized)
agcggcggcagcagccccagccctcagagagacagcagaaagggagggagggagggtgctggggggacagccccccaccattcctaccgctatgggcccaacctcccactcccacctccc

SEQ ID NO: 740916 - DNA, 120 bp, Artificial Sequence
  ENSG00000204310_17 (sequence is synthesized)
ctccatcggccggggctaggacacccccaaatcccgtcgcccccttggcaccgacaccccgacagagacagagacacagccatccgccaccaccgctgccgcagcctggctggggagggg

SEQ ID NO: 740917 - DNA, 120 bp, Artificial Sequence
  ENSG00000204310_18 (sequence is synthesized)
ctttcctctcccagggcaagtgctgttaggtcacctttactccattccctccttttttcacttggtgaggcctcacacactgtacctgcccacgcaaagtgtcactagaaggaagggaaa

SEQ ID NO: 740918 - DNA, 120 bp, Artificial Sequence
  ENSG00000204310_19 (sequence is synthesized)
tggccgacatcgggaaagacggcgaagagctaggaaaagagggaaaacactagggtcgcagggttcaaaatggctccaacctcctttggtgacgtagagagcagaacttgggtctgcccc

SEQ ID NO: 740919 - DNA, 120 bp, Artificial Sequence
  ENSG00000204310_20 (sequence is synthesized)
tcccttttagttaagggagcagaactgggattagcccgacgtttggatagtgggaacatcgatctgcggcgctggtgttaacccaactcattcggctggacgactcagccctccccatat

SEQ ID NO: 740920 - DNA, 120 bp, Artificial Sequence
  ENSG00000204310_21 (sequence is synthesized)
ggcagatgaggattcaggaagcttgaggtttaggaaggaagatattgagagggaaaggtggaaatgaaggagagtgaagtgatggaatgatcctagtaaagggataatgggagtggagga

SEQ ID NO: 740921 - DNA, 120 bp, Artificial Sequence
  ENSG00000204310_22 (sequence is synthesized)
agagaagagggggtggaaaactagatacatggctaccaaattaaggaggcacgcgcattccagaggaatcggcattcttcctcactttttatttttctagaaagcacccctgaagccaaa

SEQ ID NO: 740922 - DNA, 120 bp, Artificial Sequence
  ENSG00000204310_23 (sequence is synthesized)
tttccattggaagaaaagatgtacccatattgtatgttgtgagaaggggttgtctcagcttgggcaagtaaggagactgatacgaaggaagtaggaaagaaaaggtacagaggtaaaaga

SEQ ID NO: 740923 - DNA, 120 bp, Artificial Sequence
  ENSG00000204310_24 (sequence is synthesized)
gcatggaaaaggaaagggtcagggataaggccaaagagatctcttctctttaaaggccagagaaggcaggtggaggggggagctggactgctgggagatagtgagggacaaagggcaaag

SEQ ID NO: 740924 - DNA, 120 bp, Artificial Sequence
  ENSG00000204310_25 (sequence is synthesized)
gtgctcgccatccctgtgtgtgccgtgcgaggacgcaacgtcgagaacatgaagtgaggggcaaggggtcttgggcaatgagggaacctaagggtacaaagatcttgcgtctaatgctgc

SEQ ID NO: 740925 - DNA, 120 bp, Artificial Sequence
  ENSG00000204310_26 (sequence is synthesized)
ttataatttgcccatcagaaatagggtcttcttcccaggttggaccccggggagtttgggcttttcctacaatcactgaccctcactgtgactaaaggagcagaattaggtaacagtcct

SEQ ID NO: 740926 - DNA, 120 bp, Artificial Sequence
  ENSG00000204310_27 (sequence is synthesized)
cccactaccaatcctcttcccgagggcatgtaaactaatgcagggtaaaggtgtggctagaggggggaccttgataaaagatcccatgtgactcaagagtaaggaaagatgagaagttag

SEQ ID NO: 740927 - DNA, 120 bp, Artificial Sequence
  ENSG00000204311_0 (sequence is synthesized)
aaactacttggtgaaaccatgctttgtatttttaagatgtataattatatttaaaaacaagcaatgcttaattttgtgcctgattttcctctttaaaaatggatttatctgggggttgca

SEQ ID NO: 740928 - DNA, 120 bp, Artificial Sequence
  ENSG00000204311_1 (sequence is synthesized)
gttgatgacgttttgattttaatatgtttgctgctgctaccaagagctttgtcaagcaagttggagatggagggagattagttcctgttccaagcctcagtgaagctgacaaatatcaac

SEQ ID NO: 740929 - DNA, 120 bp, Artificial Sequence
  ENSG00000204311_2 (sequence is synthesized)
ctctaagtctggtggtaaaaaagaagcgatgctttctgtttcctagatataaatttacttcaacaccttttacactgaaagatattctcctaggagacagagaaatttcagctggtattt

SEQ ID NO: 740930 - DNA, 120 bp, Artificial Sequence
  ENSG00000204311_3 (sequence is synthesized)
catcttatcaattactgaattatgaagatgaatcagatgtttcactctatggaaggcgaggtaaccatattgtaaatgacgttgggattaacgttgctggatcagattccattgcagtga

SEQ ID NO: 740931 - DNA, 120 bp, Artificial Sequence
  ENSG00000204311_4 (sequence is synthesized)
aagcttcatttggtatagtaaccaaacatgaagtggaagtatcaacattactcaaagaaattactacacgaaaaattaactttgaccacagcttgatacgtcagtcaaggagcagcagaa

SEQ ID NO: 740932 - DNA, 120 bp, Artificial Sequence
  ENSG00000204311_5 (sequence is synthesized)
gcagtattgtgtgtggtcatggagagcatccgaaccacacgacagtgctcactgtctgtgcatgctggaattcgaggggaagcaatgcggtttcactttatggatgaacagaatcccaag

SEQ ID NO: 740933 - DNA, 120 bp, Artificial Sequence
  ENSG00000204311_6 (sequence is synthesized)
ggaagggacaaagctattgttttcccagcacatacaaccatagctttcagtgtttttgaactcttcatatacctggatggtgcctttgacctttgtgtcacttcagtgtcaaaaggagga

SEQ ID NO: 740934 - DNA, 120 bp, Artificial Sequence
  ENSG00000204311_7 (sequence is synthesized)
tttgaaagggaagaaacggcaacatttgcactgctgtacaggttgagaaatatcctatttgaaagaaatagaagagtgatggatgtcatttctcgttcacagctttacttggatgatctt

SEQ ID NO: 740935 - DNA, 120 bp, Artificial Sequence
  ENSG00000204311_8 (sequence is synthesized)
ttttctgactactatgacaaacctctcagcatgactgatatttcactcaaagaagggacccatatccgagttaacttacttaatcacaacattcccaaagggccttgcatactctgtgga

SEQ ID NO: 740936 - DNA, 120 bp, Artificial Sequence
  ENSG00000204311_9 (sequence is synthesized)
atggggaacttcaaaagggagacagtttatgggtgctttcagtgttctgttgatggtcagaagtatgtgagacttcatgcagttccttgttttgatatttggcacaagaggatgaaataa

SEQ ID NO: 740937 - DNA, 120 bp, Artificial Sequence
  ENSG00000204311_10 (sequence is synthesized)
gtccttagcaggaggccgtttcttgccgggagagagggattagagggattgtccggcgtgggtctagggtcgttgaggcctaaagttaagcctttgtggggaggacggattgggggctgg

SEQ ID NO: 740938 - DNA, 120 bp, Artificial Sequence
  ENSG00000204311_11 (sequence is synthesized)
gtcactttaagaaaaagattctaaaattacgaaggcagaattccagggagtctcccgggcctggtcctgaagcttgagaccccggatatatacgctccagggggctgcggtgcgctcttc

SEQ ID NO: 740939 - DNA, 120 bp, Artificial Sequence
  ENSG00000204311_12 (sequence is synthesized)
tttaggaacacgcggggacgtccaaacacccgctcctctcccgccgggcgggctcctttgtcttctgggctttcgtcgcgagatggaacgctggattactatccatcactgttttaatgg

SEQ ID NO: 740940 - DNA, 120 bp, Artificial Sequence
  ENSG00000204311_13 (sequence is synthesized)
gcccaagggatcaggaaaggcagcccctagccatgacctttgtgtcacttcagtgtcaaaaggaggatttgaaagggaagaaacggcaacatttgcactgctgtacaggttgagaaatat

SEQ ID NO: 740941 - DNA, 120 bp, Artificial Sequence
  ENSG00000204311_14 (sequence is synthesized)
ataacaagagattggaaacaacattaaggagactaaataatggtgcatccttgcaagagaatactatgaagccaataagaatataatacttttaatagatatttttcaagagctgagtat

SEQ ID NO: 740942 - DNA, 120 bp, Artificial Sequence
  ENSG00000204311_15 (sequence is synthesized)
caatgattaaagcaacttttattatgatgttagtgtaataacattattaagattaacaatgccaaaagtttgtataatatcaaatctcttattggtcaaataattttcaaatctatcaat

SEQ ID NO: 740943 - DNA, 120 bp, Artificial Sequence
  ENSG00000204311_16 (sequence is synthesized)
tgttttaaccaaatcaacttagaatatgacatatttcttcatctataaaatgggatattatttgggcttacctatgttacatggtcaaatgagatgaaaataatttgtatttatttttta

SEQ ID NO: 740944 - DNA, 120 bp, Artificial Sequence
  ENSG00000204311_17 (sequence is synthesized)
caattcaattattacaattggtaaactgaaatgtattgaagggtaggttatataataagctgatattttgatgagttactacttataaacgcttattttttcttttaattgcccggtgga

SEQ ID NO: 740945 - DNA, 120 bp, Artificial Sequence
  ENSG00000204311_18 (sequence is synthesized)
tcttgatgcttaagaagttctgttggctgaatagaaaatttgagttccttttaagaattctggctatgtgtttctttttgttgtaagattaattgaattactactttaagtcttggtgag

SEQ ID NO: 740946 - DNA, 120 bp, Artificial Sequence
  ENSG00000204311_19 (sequence is synthesized)
tttaattagagcctattctctcttcctctccgtctatatatgtatgtatatagattactatccatcactgttttaatggatatcttattggaagggctacatagtcagtatttcacaata

SEQ ID NO: 740947 - DNA, 120 bp, Artificial Sequence
  ENSG00000204311_20 (sequence is synthesized)
tatgaactccgcataacacctatggcaaaacatttcagcactcaggtaaaattcattttttgccacaaaattacttaaaaacaggccagaactttatatagctcttgttaaaggttaagt

SEQ ID NO: 740948 - DNA, 120 bp, Artificial Sequence
  ENSG00000204311_21 (sequence is synthesized)
agctgggataataatgaaacaaaaagatgcagcaggactccatttcaaagagagagagtctgtgtgcccaacttcagagtaagaaaccactaggtaatagtttatatagttacttatatg

SEQ ID NO: 740949 - DNA, 120 bp, Artificial Sequence
  ENSG00000204311_22 (sequence is synthesized)
taatgtggctttattttttaaataaagatttgcatataattgtttatatctgtgaatttatatttaatattaaacacagttttgtaagcatataagatggaaaatgaatgaaatgctcaa

SEQ ID NO: 740950 - DNA, 120 bp, Artificial Sequence
  ENSG00000204311_23 (sequence is synthesized)
tcaatgagctgtatgccatgaggattcaaaacagcactttggtgttgccaaaattccggtggtggacttgtgaaggaattccctttggactaggtccactgtagattgtatccgggacta

SEQ ID NO: 740951 - DNA, 120 bp, Artificial Sequence
  ENSG00000204311_24 (sequence is synthesized)
tcgttagtgcctaaattgcattgcttcccacagcactatatgcttcccttaaaattggcccattgccagtggcaaatcactatctactgtgatccttatcatagacattggtcatatttt

SEQ ID NO: 740952 - DNA, 120 bp, Artificial Sequence
  ENSG00000204311_25 (sequence is synthesized)
tacgttattagttttctgtgtatattttagtgctatagcctgccattccaagttaaacatgctcttagcatatcattttacaccgttgatctataattcattacctgagcacatgagcag

SEQ ID NO: 740953 - DNA, 120 bp, Artificial Sequence
  ENSG00000204311_26 (sequence is synthesized)
caccgtgttggtgttttaggtgcagttgtgccacaaaccttccctaaattatctaggtttgctttgatgaattaaattaaaatgagaaaagcaaaaagaaattaacctgtctgggtatca

SEQ ID NO: 740954 - DNA, 120 bp, Artificial Sequence
  ENSG00000204311_27 (sequence is synthesized)
ctgggctttcgtcgcgagatggaacgctgggtcagtgcatcccagcaaaacacgttaggagtaaacgaaggcctttccggggacctgggtagtcggttgtaatggcgtttgcctgggatg

SEQ ID NO: 740955 - DNA, 120 bp, Artificial Sequence
  ENSG00000204314_0 (sequence is synthesized)
atctctccatctctgcgctgctgccggctgcgccatccagcacccagactccagcaccggccgaggacccccactccggctgcagggaccctgtcccagcgagaccgcaggcatgtcatc

SEQ ID NO: 740956 - DNA, 120 bp, Artificial Sequence
  ENSG00000204314_1 (sequence is synthesized)
cgaaaagtcaggactcccagactcagtccctcacacttctccgccgccctacaatgcccctcagcctccagccgaacccccagccccaccgccacaggcagccccttcctcacaccatca

SEQ ID NO: 740957 - DNA, 120 bp, Artificial Sequence
  ENSG00000204314_2 (sequence is synthesized)
ccaccaccaccactaccatcagtctggcaccgccaccctcccgcgcttaggggcagggggcctggcctcttccgcggccaccgctcagcgcggtccctcctcctctgccacgctgccgag

SEQ ID NO: 740958 - DNA, 120 bp, Artificial Sequence
  ENSG00000204314_3 (sequence is synthesized)
gcccccccaccacgcccctcccggccctgctgccggggcacccccacccggctgcgctaccttgccccgcatgccacccgacccttacctgcaggagactcgcttcgagggcccacttcc

SEQ ID NO: 740959 - DNA, 120 bp, Artificial Sequence
  ENSG00000204314_4 (sequence is synthesized)
cccccgccggcgccagcccagactgcccaggcccctggcttcgtggtgcccacgcacgcggggactgtgggcacgctgccgctggggggctacgtagcgcccggataccccctgcagctg

SEQ ID NO: 740960 - DNA, 120 bp, Artificial Sequence
  ENSG00000204314_5 (sequence is synthesized)
cgtagcgcccggataccccctgcagctgcagccttgcactgcttacgtgccggtctacccggtgggcacgccatatgcaggcgggaccccggggggaacaggagtgacctccactctccc

SEQ ID NO: 740961 - DNA, 120 bp, Artificial Sequence
  ENSG00000204314_6 (sequence is synthesized)
cccgccgccccagggcccagggctggccctactggagccgaggcgcccgccacacgactacatgcccatcgcggtgctgaccaccatctgttgcttctggcctactggcatcattgccat

SEQ ID NO: 740962 - DNA, 120 bp, Artificial Sequence
  ENSG00000204314_7 (sequence is synthesized)
tctccctggccgtgggcatcgcggccatggtgctctgtaccatcctcaccgtagtcatcatcatcgccgcgcagcaccacgagaactactgggatccctaaaaacgcccctggtccggcc

SEQ ID NO: 740963 - DNA, 120 bp, Artificial Sequence
  ENSG00000204314_8 (sequence is synthesized)
ccactctgcgcccctcgatctcccaggctctttctgcagtcataccgcggacccaatgggcgccctgcacacccgtttctggggccgtcagacttggatacatcgtaaactccgcctcca

SEQ ID NO: 740964 - DNA, 120 bp, Artificial Sequence
  ENSG00000204314_9 (sequence is synthesized)
cggaacgtctcgccttgcgagcaagctcggaatccagttcctcaggaacccctccaaaacccacacccccagggacgccgctttccgggatcccggccaaacgccggaccctcagtcgct

SEQ ID NO: 740965 - DNA, 120 bp, Artificial Sequence
  ENSG00000204314_10 (sequence is synthesized)
ccaggccccctcaccctcaaagtgtagcgcccccaaccgagcaacctcggtttggtccctaaaaccccgcctcctctataagcaccgccccagctctgacaaaaccccgcctccaggtcg

SEQ ID NO: 740966 - DNA, 120 bp, Artificial Sequence
  ENSG00000204314_11 (sequence is synthesized)
gcaggctccgccttcttttcttctccgcggggtgattcagtccagtgattgggtttgtggctccaggcctcgcccacagacggacagacccctccctttcttccggcaaaaggaccgagc

SEQ ID NO: 740967 - DNA, 120 bp, Artificial Sequence
  ENSG00000204314_12 (sequence is synthesized)
cctggggtagtaaggcccccacactcctgttttttgcaagtacatttttgtccctcctccacccaggtatctgcctattttcttgctaatcccagaacctttccttttgctttttttaag

SEQ ID NO: 740968 - DNA, 120 bp, Artificial Sequence
  ENSG00000204314_13 (sequence is synthesized)
gacatttgggaagttcctggtgtaggacccttctccctgggataagaaacctgcctgtaaacgctctgtaaatactcccttccacccatcccagcccctgggcagccgggcagaagggaa

SEQ ID NO: 740969 - DNA, 120 bp, Artificial Sequence
  ENSG00000204314_14 (sequence is synthesized)
tccaggctatggacctcccaagtccccgctccccgctcccctcggcggccccgccttgttctgatctgtgtgtgagtgtgtgtgaacttctgaaagacaatattaaagagacttagttga

SEQ ID NO: 740970 - DNA, 120 bp, Artificial Sequence
  ENSG00000204314_15 (sequence is synthesized)
atctgactctgtggagcctgggactggtttcagcgagagcctctgtactgctctgtagtctctgctaggacatggacgaaaagggacgcagccgggagagcgactgccccagtcccaccc

SEQ ID NO: 740971 - DNA, 120 bp, Artificial Sequence
  ENSG00000204314_16 (sequence is synthesized)
gcctcgcctggtctagcctccgtgtttccatgacaactccaaaggaacccaaactgggggcttgaatgccgggcacccagactccagcaccggccgaggacccccactccggctgcaggg

SEQ ID NO: 740972 - DNA, 120 bp, Artificial Sequence
  ENSG00000204314_17 (sequence is synthesized)
gctgctgccggctgcgccatccagcacccagactccagcaccggccgaggacccccactccggctgcagggaccctgtcccagcgagaccgcaggcatgtcatccgaaaagtcaggtaaa

SEQ ID NO: 740973 - DNA, 120 bp, Artificial Sequence
  ENSG00000204314_18 (sequence is synthesized)
aacaataacaaaacctcccaccccctccactgtctccagactctccgtcccccttgccccaaccccctcccttacccctcctcagctgtggttctatttcattccccttctctccagctc

SEQ ID NO: 740974 - DNA, 120 bp, Artificial Sequence
  ENSG00000204314_19 (sequence is synthesized)
tcaacactcccccagtccccctcctctttctgtctccccctttctcttcctttcctctttccagtggcagcctctgccccttgccaacaacatggtcaggggggtaggttgagagggtga

SEQ ID NO: 740975 - DNA, 120 bp, Artificial Sequence
  ENSG00000204314_20 (sequence is synthesized)
aggaggtacagccaggttttgcagggatggcatcattgggagtgacagatggacaatcactggctggcatggagacatcctgtgaggaaatatggagacatgaccagatgggggttgtca

SEQ ID NO: 740976 - DNA, 120 bp, Artificial Sequence
  ENSG00000204314_21 (sequence is synthesized)
agggagcaaaatccagagggctcttcttaatctgccctaaaagaggtcccgagattctcacagaggctggggcactcctccccccactgaaggaacagcagagtggaacacatgtcatcc

SEQ ID NO: 740977 - DNA, 120 bp, Artificial Sequence
  ENSG00000204314_22 (sequence is synthesized)
cacatgtgtttatacaactgttgaattgagcacatattaacacagggttgcatgtctacgcatacgcacacacaggactagctcggataggccagcccaaaggcagctatagcaaaggag

SEQ ID NO: 740978 - DNA, 120 bp, Artificial Sequence
  ENSG00000204314_23 (sequence is synthesized)
aggggattaggtctgcaggtgagagctgggtgcatggtgatgaaaaagacagaaaagaagcagaccagagttgtgacctcaaaactagattggaaggaagaaggaggggggcagatggcc

SEQ ID NO: 740979 - DNA, 120 bp, Artificial Sequence
  ENSG00000204314_24 (sequence is synthesized)
tagatacagcccctctcttgcccctcaaattagagatggtttctcacccgtctctctctatgtgtctctcccattatctttctccatccctgaccggctgtgtttccccttaccccctcc

SEQ ID NO: 740980 - DNA, 120 bp, Artificial Sequence
  ENSG00000204314_25 (sequence is synthesized)
agggtaatgggtgctttattttgagaagccataggtaaaaattgtgcttttaaagccactctgccagccgcccaacgctggtaggctgggagagggtcagagtgatgcccctgcccccca

SEQ ID NO: 740981 - DNA, 120 bp, Artificial Sequence
  ENSG00000204315_0 (sequence is synthesized)
gttagttgtcagtatctttcccagttgttccgccccctacccccgcctcccgcaccgcgcccctctccggctgccctctccgcgtggggcaaggctccgagggcagcattcagtagccat

SEQ ID NO: 740982 - DNA, 120 bp, Artificial Sequence
  ENSG00000204315_1 (sequence is synthesized)
ttagctttggaaggagaggtgattcgaatggcccggctcctcctgtcaccatgctaggcactttggccgcgcaggtgctgacctgaacctggttcatccctttctgaccaaaactgttca

SEQ ID NO: 740983 - DNA, 120 bp, Artificial Sequence
  ENSG00000204315_2 (sequence is synthesized)
ctcaccgtggaagggactaagcatccatatggagacgccaccagtcaatacaattggagaaaaggacacctctcagccgcaacaagagtgggaaaagaaccttcgggagaaccttgattc

SEQ ID NO: 740984 - DNA, 120 bp, Artificial Sequence
  ENSG00000204315_3 (sequence is synthesized)
agttattcagattaggcagcagccccgagaccctcctaccgaaacgcttgagctggaagtaagcccagatccagccagccaaattctagagcatactcaaggagctgaaaaactggttgc

SEQ ID NO: 740985 - DNA, 120 bp, Artificial Sequence
  ENSG00000204315_4 (sequence is synthesized)
tgaacttgaaggagactctcataagtctcatggatcaaccagtcagatgccagaggcccttcaagcttctgatctctggtactgccccgatgggagctttgtcaagaagatcgtaatccg

SEQ ID NO: 740986 - DNA, 120 bp, Artificial Sequence
  ENSG00000204315_5 (sequence is synthesized)
aaactaggctcctgctgccgggtactggctttggggtttcctttcggatcagggccgccagagggctggacagagctaactatgggcgtagggccatggagggaggaaacttggggggag

SEQ ID NO: 740987 - DNA, 120 bp, Artificial Sequence
  ENSG00000204315_6 (sequence is synthesized)
ctcatagagaaatgcttggagtccatgtgtcaaggtgaggaagcagagcttcagctgcctgggcactctggacctcctgtcaggctcacactggcatccttcactcaaggccgagactcc

SEQ ID NO: 740988 - DNA, 120 bp, Artificial Sequence
  ENSG00000204315_7 (sequence is synthesized)
tgggagctggagactagcgagaaggaagccctggccagggaagaacgtgcaaggggcacagaactatttcgagctgggaaccctgaaggagctgcccgatgctatggacgggctcttcgg

SEQ ID NO: 740989 - DNA, 120 bp, Artificial Sequence
  ENSG00000204315_8 (sequence is synthesized)
ctgctcctgactttacccccacctggccctccagaacgaactgtccttcatgccaatctggctgcctgtcagttgttgctagggcagcctcagttggcagcccagagctgtgaccgggtg

SEQ ID NO: 740990 - DNA, 120 bp, Artificial Sequence
  ENSG00000204315_9 (sequence is synthesized)
ttggagcgggagcctggccatttaaaggccttataccgaaggggggttgcccaggctgcccttgggaacctggaaaaagcaactgctgacctcaagaaggtgctggcgatagatcccaaa

SEQ ID NO: 740991 - DNA, 120 bp, Artificial Sequence
  ENSG00000204315_10 (sequence is synthesized)
aaccgggcagcccaggaggaactggggaaggtggtcattcaggggaagaaccaggatgcagggctggctcagggtctgcgcaagatgtttggctgattaaaagttaaaccttaaaagaga

SEQ ID NO: 740992 - DNA, 74 bp, Artificial Sequence
  ENSG00000204316_0 (sequence is synthesized)
cggcgtgagccaccgcgcccagccctcaatctgggttttaaacccaagcagagtccggaatcggagctcgcacc

SEQ ID NO: 740993 - DNA, 120 bp, Artificial Sequence
  ENSG00000204316_1 (sequence is synthesized)
gttttaaacccaagcagagtccggaatcggagctcgcaccccttctcccaaccaggcctgcgtccctggggaaatcaggacgcagcgtccaggggttggaggagggccccggcggccgac

SEQ ID NO: 740994 - DNA, 120 bp, Artificial Sequence
  ENSG00000204316_2 (sequence is synthesized)
cccggtctgtgccgccccctggtggccagccatgggcgagcatatgactgctctcggctccgccccgccgtccaacgggcacttccggagccgggcgtctacagaccgcggccaccttcc

SEQ ID NO: 740995 - DNA, 120 bp, Artificial Sequence
  ENSG00000204316_3 (sequence is synthesized)
agccgggcgtctacagaccgcggccaccttccacctgcgcccgaggcagacggtgcaggggcctccgggacaggcgtctgaggcctgctccgcagcgcgggcccgggggcgggcctaggg

SEQ ID NO: 740996 - DNA, 120 bp, Artificial Sequence
  ENSG00000204316_4 (sequence is synthesized)
gctggccacctgtgcccgggtcctagtggcggccgcagtgtcgcaggccggagggaagatggcggcgccctggtggcgagccgcgctgtgcgagtgtcggagatggcggggcttcagcac

SEQ ID NO: 740997 - DNA, 120 bp, Artificial Sequence
  ENSG00000204316_5 (sequence is synthesized)
ctcggccgtcctgggccgccggacacccccgctggggccgatgcccaacagtgacatcgacttgagcaacctggagcggctggagaagtaccggagcttcgaccgctaccggcgccgagc

SEQ ID NO: 740998 - DNA, 120 bp, Artificial Sequence
  ENSG00000204316_6 (sequence is synthesized)
agagcaggaggcgcaggccccgcactggtggcggacctaccgagagtatttcggggagaagacagatcccaaagagaagattgatattgggctgcctccacccaaagtctcccggaccca

SEQ ID NO: 740999 - DNA, 120 bp, Artificial Sequence
  ENSG00000204316_7 (sequence is synthesized)
ccgctggatgccgtgcgggccgagtgggagaggacctgtggcccctaccacaagcagcgtctggctgagtattacggcctctaccgagacctgttccacggtgccacctttgtgccccga

SEQ ID NO: 741000 - DNA, 120 bp, Artificial Sequence
  ENSG00000204316_8 (sequence is synthesized)
gtccccctgcacgtggcctacgctgtgggtgaggatgacctgatgcctgtgtactgtggcaatgaggtgactccaaccgaggctgcccaagcgccagaggtgacctatgaggcagaagag

SEQ ID NO: 741001 - DNA, 120 bp, Artificial Sequence
  ENSG00000204316_9 (sequence is synthesized)
ggctccttgtggacgttgctactcactagcttggatgggcacctgctggagccagatgctgagtacctccactggctgctaaccaacatcccgggtaaccgggtggctgaaggacaggtg

SEQ ID NO: 741002 - DNA, 120 bp, Artificial Sequence
  ENSG00000204316_10 (sequence is synthesized)
acgtgtccctacctcccccccttccctgcccgaggctccggcatccaccgtcttgccttcctgctcttcaagcaggaccagccgattgacttctctgaggacgcacgcccctcaccctgc

SEQ ID NO: 741003 - DNA, 120 bp, Artificial Sequence
  ENSG00000204316_11 (sequence is synthesized)
tatcagctggcccagcggaccttccgcacttttgatttctacaagaaacaccaagaaaccatgactccagccggcttgtccttcttccagtgccgctgggatgactccgtcacctacatc

SEQ ID NO: 741004 - DNA, 120 bp, Artificial Sequence
  ENSG00000204316_12 (sequence is synthesized)
ttccaccagcttctggacatgcgggagccggtgtttgagttcgtgcggccgcccccttaccaccccaagcagaagcgcttcccccaccggcagcccctgcgctacctggaccggtacagg

SEQ ID NO: 741005 - DNA, 120 bp, Artificial Sequence
  ENSG00000204316_13 (sequence is synthesized)
gacagtcatgagcccacctatggcatctactaaggagccagagtgtgcgcatttcagagcatgggattgatcggcagcaagagtaaagacacagctccagaggcccacactgtggggtct

SEQ ID NO: 741006 - DNA, 120 bp, Artificial Sequence
  ENSG00000204316_14 (sequence is synthesized)
gggccctgccttaggcagcccccctctttggccccctcccgtcaggcccagggcttggagtgaaagtgactctcaggtggtggggtggggaatgtgaataaacatgatttcttgccgggc

SEQ ID NO: 741007 - DNA, 120 bp, Artificial Sequence
  ENSG00000204316_15 (sequence is synthesized)
gattataagcgtgagccaccatgcctgggcccttcgtctctaaactcatttcttcacctgtaaaactgggataatggcaccacatgccttactcagcgtgaggtggactgtgacagtcac

SEQ ID NO: 741008 - DNA, 120 bp, Artificial Sequence
  ENSG00000204316_16 (sequence is synthesized)
ctccagcccgcttcccgtatttgcagcatgtcccggcgttcacagagcttggctgcctcctctgtcccaggagagagatgcttagagctgtcctcccagggagtcatgtcagcctctagg

SEQ ID NO: 741009 - DNA, 120 bp, Artificial Sequence
  ENSG00000204316_17 (sequence is synthesized)
ggccccgcactggtggcggacctaccgagagtatttcggggagaagacagagttccagctcctaaaatatttgctcctaaaatcttgaccacctgactttccggattgggatgccgttct

SEQ ID NO: 741010 - DNA, 120 bp, Artificial Sequence
  ENSG00000204316_18 (sequence is synthesized)
tacaaaaaatacaaaaattagccagatgagatggtgtacacttgtagccccagctactcaggagactgagttggggaggttaaggctgcagtgagtcatgaccctgtttttcccacacat

SEQ ID NO: 741011 - DNA, 89 bp, Artificial Sequence
  ENSG00000204316_19 (sequence is synthesized)
cacctctgcctcctgagggtgttaggggccctgggatccacgtgtctacttgaagacagctacaggagacaaagtttgcagtaggcctc

SEQ ID NO: 741012 - DNA, 120 bp, Artificial Sequence
  ENSG00000204316_20 (sequence is synthesized)
ggacctaccgagagtatttcggggagaagacaggtgcggggcgactggagcaggggctgcagccaccgcccggggaactcgggacccgccggcgttttccccgggcgctgggcgagcctt

SEQ ID NO: 741013 - DNA, 120 bp, Artificial Sequence
  ENSG00000204316_21 (sequence is synthesized)
gagggcctgcctgcagacctgtgtgcgctatcggcagcttaatcaccccaggatttttcacaccttctgcacctcattcttggaaaattcgctccccctactattagagttccagctcct

SEQ ID NO: 741014 - DNA, 120 bp, Artificial Sequence
  ENSG00000204316_22 (sequence is synthesized)
aaaatatttgctcctaaaatcttgaccacctgactttccggattgggatgccgttctgtgcgcctcaaatactctgtagatcccaaagagaagattgatattgggctgcctccacccaaa

SEQ ID NO: 741015 - DNA, 120 bp, Artificial Sequence
  ENSG00000204316_23 (sequence is synthesized)
catcccatctcagtgtcacagacactcctgggtttggaattttgttgttctctgtctctttgatttcctggaagacgacaccatgacaatttcaaagaaaatagaacaaaatgaaggaaa

SEQ ID NO: 741016 - DNA, 120 bp, Artificial Sequence
  ENSG00000204316_24 (sequence is synthesized)
aagaggctctgtcttagcacattcctgtgaccagcctgctgtctgtggtgtgccctcctggcccggccttggcacatgttcgtttttgtggttgttgcctggacaggcaactctgcaggg

SEQ ID NO: 741017 - DNA, 120 bp, Artificial Sequence
  ENSG00000204316_25 (sequence is synthesized)
ctgcttctctacgcatccctttgcctgcctgcctgtgccaggggttgtcaagggcttttgggtcagagtgggcacccctttctccaaggctccctgcaacagctggcctgtccctggtgg

SEQ ID NO: 741018 - DNA, 120 bp, Artificial Sequence
  ENSG00000204316_26 (sequence is synthesized)
tgccttcctgctcttcaagcaggaccagccgattgacttctctgaggacgcacgcccctcaccctggtaatctacaccacccacacataacccggcctcaggccagctcccctggaacgg

SEQ ID NO: 741019 - DNA, 120 bp, Artificial Sequence
  ENSG00000204316_27 (sequence is synthesized)
tcactcttgctcagttctctcttgacctcagccttgagactggcagaagagcaggatagggtgctagcagactcccaggggcctctcagggttacctgttggggtggcggggtgaggggc

SEQ ID NO: 741020 - DNA, 120 bp, Artificial Sequence
  ENSG00000204316_28 (sequence is synthesized)
agctgggagcctggactgagctgctcctgagtttcatggactacccatgggaccttgaattcacctgccacctctgcctcctgagggtgttaggggccctgggatccacgtgtctacttg

SEQ ID NO: 741021 - DNA, 120 bp, Artificial Sequence
  ENSG00000204323_0 (sequence is synthesized)
cacagccccagcagaaggccctcacctcacaaggaacatgaggcgccttgccgggcgcgcaggccactcccaggtcactcaggattccaagttctcccccaagacgccttcagatgctga

SEQ ID NO: 741022 - DNA, 120 bp, Artificial Sequence
  ENSG00000204323_1 (sequence is synthesized)
gcggcacaagggcctccccagggactggttgcaaagcctcctgctcagcttgagagggccaccagctccccactgtttactgttgttcctgagagaggccagagggagggaccagccagg

SEQ ID NO: 741023 - DNA, 120 bp, Artificial Sequence
  ENSG00000204323_2 (sequence is synthesized)
gagtggccagagggacagaaggggtggccttcctgagggcagggtgggtgccccagacctgagagcgctgcaggactcccctccacaggctcaggtggagcctccccagggtcctcctgg

SEQ ID NO: 741024 - DNA, 120 bp, Artificial Sequence
  ENSG00000204323_3 (sequence is synthesized)
ccaggaaggcagagagccgacttctttcttcagctcccaacccaggcccagcccacggcgtgggagtcggggagagggagaggaggaggaaggaggaggagagagggagcttgtcttgtc

SEQ ID NO: 741025 - DNA, 120 bp, Artificial Sequence
  ENSG00000204323_4 (sequence is synthesized)
cctgagcagcgctctcagggcagaggtgaggcaccgggacatgaagttggaggacaagttcccaagcagggcttcctcgggctccccctcgcgacggtaatttgacacttggatctccag

SEQ ID NO: 741026 - DNA, 120 bp, Artificial Sequence
  ENSG00000204323_5 (sequence is synthesized)
gacgaccaacaacaaaaaagccaggcagagacagcagctggctgtcagcagaggagctgggctgaggcgcccaggggagcagcggcgcccacgaaggaagtacgaggacagcacgtggag

SEQ ID NO: 741027 - DNA, 120 bp, Artificial Sequence
  ENSG00000204323_6 (sequence is synthesized)
caggagatgcgcgccgtgggcgagaggctgctgctcaagctgcagagactgccccaggctgagcccgtggagatcgtggccttctcagtcatcatccttttcacagctactgttctgctg

SEQ ID NO: 741028 - DNA, 120 bp, Artificial Sequence
  ENSG00000204323_7 (sequence is synthesized)
ttgctgctgatagcctgcagctgctgctgcactcactgctgctgccctgagcggagaggcaggaaggtccaggtgcagccgacaccaccatgacggacgggcgatggctgaggagaagct

SEQ ID NO: 741029 - DNA, 120 bp, Artificial Sequence
  ENSG00000204323_8 (sequence is synthesized)
ggagaggagatggccaatgccatgacacaggccatcagcctggccctgcagcccttacccctcaagaccaggctcccctggccccagctctggcccagcccaggtacctggacactgaca

SEQ ID NO: 741030 - DNA, 120 bp, Artificial Sequence
  ENSG00000204323_9 (sequence is synthesized)
acttgagccctaccaaggaaacaagggctggtataggtgcaaacctctcatctgccagtggacactgggtgctggggagtcagctgtttcaaagactgggtcaactgcctgggcttcttc

SEQ ID NO: 741031 - DNA, 120 bp, Artificial Sequence
  ENSG00000204323_10 (sequence is synthesized)
gcctacctgcactttttaacaaaacaaggaagtaggggtccccataccttgatggagaacagtccccacctgtgggcaattggcccttggggctctgctgatacatgccaaagaggagca

SEQ ID NO: 741032 - DNA, 120 bp, Artificial Sequence
  ENSG00000204323_11 (sequence is synthesized)
aggcaatcagaggggctttgtgcaatagcttctgcatccgagctcccgccagagcgtgagcatgtcagtattctagtccagtatttgccagtttccaagtaaaagcttttgtgttacgtg

SEQ ID NO: 741033 - DNA, 120 bp, Artificial Sequence
  ENSG00000204323_12 (sequence is synthesized)
ggcactccttggcctggctttaaatagcccgctgggaagaccacctggggaccggctggaatgcgcctcctcctctttagagaacaggacccctcagctcccccacctgcgccatgaagg

SEQ ID NO: 741034 - DNA, 120 bp, Artificial Sequence
  ENSG00000204323_13 (sequence is synthesized)
ttcagtcgcgggtttacgctccaaatgacaagatatcaactgcaaaacaaagggggtcccggggttcctctccagctctctgggggcagaacagccacgtccaacggtcctacttctgct

SEQ ID NO: 741035 - DNA, 120 bp, Artificial Sequence
  ENSG00000204323_14 (sequence is synthesized)
cactgtgtgacaggataccgtgagtacccctgggtcagaccctggggctgggtgaggctggccatgcctggctggcaaattcagcttccagtcagccccctagggaagccctgggcgcaa

SEQ ID NO: 741036 - DNA, 120 bp, Artificial Sequence
  ENSG00000204323_15 (sequence is synthesized)
agctatgacactgtccacagccgcagcctgctgctgctgggaactgacacttttccccgctggaggccggggtccacccggcatgagtctgcagctctcccactttgcagcccctggagg

SEQ ID NO: 741037 - DNA, 120 bp, Artificial Sequence
  ENSG00000204323_16 (sequence is synthesized)
aggctggccagagcttctcagcaacaaaccccacttttcctgcaccagtaaattcagcctcagtccaaccttcctcctccctgttctggtgagcacagccccaggtctctcgctcacaag

SEQ ID NO: 741038 - DNA, 120 bp, Artificial Sequence
  ENSG00000204323_17 (sequence is synthesized)
gaaaagtgccccctgcaatctctccctgggtctctgggtgtggcacaagcgaaaaagctctccctgcccgctccctctttgaaggagtgtctctgctgggctacattaggccgtgtgggc

SEQ ID NO: 741039 - DNA, 120 bp, Artificial Sequence
  ENSG00000204323_18 (sequence is synthesized)
acagtgccagtcaggctgaaaacgccagaccaagtgtagacagagagggaggggagaaaggcagcccagctcctgaaccacgcgcaaactgtcccgtaagggacactgtcggcattgtcg

SEQ ID NO: 741040 - DNA, 120 bp, Artificial Sequence
  ENSG00000204323_19 (sequence is synthesized)
tccctctaagaatgagggaacctggaaagctggggcgtgaggatggcacggaggtcccggaaccaagaggggaccactgtccttgtgcaagcctgctccacctggccagagagaatgtcc

SEQ ID NO: 741041 - DNA, 120 bp, Artificial Sequence
  ENSG00000204323_20 (sequence is synthesized)
cattcagtctgaccagagggttcagtcctacactcaggctggctagactcacaagacctgtacctgtggtgacaaggactccaggtagtctcaaagagcctggtgtggccccggcctggt

SEQ ID NO: 741042 - DNA, 120 bp, Artificial Sequence
  ENSG00000204323_21 (sequence is synthesized)
ggtgatatgctgataaaagcagcttcagatccacaaatgtgggctggggctggccgagcacagccagctggcttccagggggctctcgggccctggctcctgtactgagcccactgcacg

SEQ ID NO: 741043 - DNA, 120 bp, Artificial Sequence
  ENSG00000204323_22 (sequence is synthesized)
ggcagtaccctcagcggggctgctcctggctatcttgctggtctaagctggagacaggcctccatggagagacagcgtggggcaccagtgggggtgctggctggggccctgtcctgctgt

SEQ ID NO: 741044 - DNA, 120 bp, Artificial Sequence
  ENSG00000204323_23 (sequence is synthesized)
gtaacctcagagaagttgcttgctctctcgggtctcagcttccccacgtatagaaggaaggaggcgggagcggatgatctatagcattctaggaccctatgcctctcagtacatttgaaa

SEQ ID NO: 741045 - DNA, 120 bp, Artificial Sequence
  ENSG00000204323_24 (sequence is synthesized)
actgagatcctcacctccacagaaacgcactcactccaggtgaggtgtgagaagctgggtggatctaactcagggaacccacggcttttgacaagaactcatctaattttccacggagcc

SEQ ID NO: 741046 - DNA, 84 bp, Artificial Sequence
  ENSG00000204323_25 (sequence is synthesized)
acggcttttgacaagaactcatctaattttccacggagccatcttctgcctgctaccctcatcatcacttaaaaaaacagctcc

SEQ ID NO: 741047 - DNA, 90 bp, Artificial Sequence
  ENSG00000204323_26 (sequence is synthesized)
catgccattgcactctagctgaaaaccaaaaccaacaacaaaaacatagctccccacctccagcttgcctaccttccttcagggcacaca

SEQ ID NO: 741048 - DNA, 120 bp, Artificial Sequence
  ENSG00000204323_27 (sequence is synthesized)
tccccacctccagcttgcctaccttccttcagggcacacaccgcagacaccctaggacagacacccaaaaggtgttgggggtgctagtgacggtgcacgggggtgacagcccccaaagcc

SEQ ID NO: 741049 - DNA, 120 bp, Artificial Sequence
  ENSG00000204323_28 (sequence is synthesized)
agtgagacccgtcccgggggggcattctcgtgtgccgggcacccccctatggctgtctacaatgtgctgctagatggtcagtcctcccaatagcctcaaaacacgggcatctcattccat

SEQ ID NO: 741050 - DNA, 120 bp, Artificial Sequence
  ENSG00000204323_29 (sequence is synthesized)
catgtcacaaaaggaagaagtggaggtggcattcaaggaggagcagctgaaaacactagagcaggcccctggcagagaaggaaatccagaaggtacatgccggctgccatcttgctcctg

SEQ ID NO: 741051 - DNA, 120 bp, Artificial Sequence
  ENSG00000204323_30 (sequence is synthesized)
aagggctacgaggcagaagagggggcaaggtctaagtgaccacaagtgggactaactgggggccagcagggagtccgaccttctgcagtgggtgggctgcctcagcaggcggaggttcct

SEQ ID NO: 741052 - DNA, 120 bp, Artificial Sequence
  ENSG00000204323_31 (sequence is synthesized)
caccatcctgggtgctcatgcaaagaccacatggcctcaaggatggccgcaggccaattgcagggtggagggccccgttcgatgaccttcacggtggttctaaaccagctctgccaaggc

SEQ ID NO: 741053 - DNA, 120 bp, Artificial Sequence
  ENSG00000204323_32 (sequence is synthesized)
agcggcaccgggagtgactggcctcactgacgtagccatctcagcgagaaccggctgagacctgggacaaggcaacgataattacagccaaaggtctggcaccagcccctggccacctgt

SEQ ID NO: 741054 - DNA, 120 bp, Artificial Sequence
  ENSG00000204323_33 (sequence is synthesized)
ccccaccaccacccctggattagagcaactgccttggtgaactggatcaggctgggttgggacaaggttgtctctggctcctctctaaagaggcaccagctccctcatgcccacaggaga

SEQ ID NO: 741055 - DNA, 120 bp, Artificial Sequence
  ENSG00000204323_34 (sequence is synthesized)
ggcagaaggggaaagccttctggagtggcaccttgggcctcttgggcaccctgagacaggaagaggctctcctggggcaggggtgggagtggagaggactttcctggtcaggctagagaa

SEQ ID NO: 741056 - DNA, 120 bp, Artificial Sequence
  ENSG00000204323_35 (sequence is synthesized)
acagatgacgccagcaggggaggggctggcttgagcaacctgggcctcctgaccccctcccaacagacaggacagaaaccctggcaaaacctggagggacacggtgcggcctccccctct

SEQ ID NO: 741057 - DNA, 120 bp, Artificial Sequence
  ENSG00000204323_36 (sequence is synthesized)
ggcagaacaggcatgagtgtagaaactgggctggtgggagaggttggggggcctgggggacaggggggcagttttcacctctgactgaccctggccagaagccccatgaacctgctctcg

SEQ ID NO: 741058 - DNA, 120 bp, Artificial Sequence
  ENSG00000204323_37 (sequence is synthesized)
ggagaacctgctccttctgtccccacattgatggaaggcaagagtaccagcttggcatcctatcccagtctccccaccccgagggagctgtgccagtcccaagcacccaggcaaaaccca

SEQ ID NO: 741059 - DNA, 120 bp, Artificial Sequence
  ENSG00000204323_38 (sequence is synthesized)
gtagtggtacctcaagacaagggaatggaacagcgaagccagaaaccaccaccagccgccgccttggccggcagcccccgaagcaagcccttggtctcactgtcctcaccggcttcctcc

SEQ ID NO: 741060 - DNA, 120 bp, Artificial Sequence
  ENSG00000204323_39 (sequence is synthesized)
accctgagctgtgtcagctgggtggggactgagggccaccactaggtggaagtcaccaggggtgcaatgtgtgagacctgacaaacttgttctgcgggctgcggatgggtgcgagggtgg

SEQ ID NO: 741061 - DNA, 120 bp, Artificial Sequence
  ENSG00000204323_40 (sequence is synthesized)
aatctcggtgctgcgacgagtgtggggccagccgtggaggctccaggtgttctctctgccccagcagagcccggcaggagccccaacaggaagccagcgcggcatggctgccaccgactt

SEQ ID NO: 741062 - DNA, 120 bp, Artificial Sequence
  ENSG00000204334_0 (sequence is synthesized)
gagtcagtctacaggctaggtgcacactggacagtcagggtggttgtgagctgatggagactgtaaatgaaccagaaacaggtgaagtgagcaaagatgcagtcattgtaaagcaggaga

SEQ ID NO: 741063 - DNA, 120 bp, Artificial Sequence
  ENSG00000204334_1 (sequence is synthesized)
aaaataatgaatattgccttcaggatattgatgataaattgtcagaatcagcagaggatgatggtgaagatgataccaatgatgaagatgatgatgaagatagtaaccctaaaaagaata

SEQ ID NO: 741064 - DNA, 120 bp, Artificial Sequence
  ENSG00000204334_2 (sequence is synthesized)
tcaggccccactagagttaatggcagaatttctgagagcagaaatggcccgagagtaccagctggcaaaaaaattatgtcagatgatcctaatctatgaaccagaaaatcctgaggccaa

SEQ ID NO: 741065 - DNA, 120 bp, Artificial Sequence
  ENSG00000204334_3 (sequence is synthesized)
ggagtttttcacacttattgaagaaatgttgctgatggagaaaactcagaatcatgagcaagacggtgaaaacagtgatgaagacagcagtggtgagagtaaaggagaaagcgatgagga

SEQ ID NO: 741066 - DNA, 120 bp, Artificial Sequence
  ENSG00000204334_4 (sequence is synthesized)
gctgagtgacgagagctctgacgaaggtgaagatggatcatgagtgttgctgcaatacttgaagcttcatgtattttcattaatgtataccatgcaaatataaagacaagtgacatttta

SEQ ID NO: 741067 - DNA, 80 bp, Artificial Sequence
  ENSG00000204335_0 (sequence is synthesized)
caagggcggggagggccccggcgctcagagcaggcgccagggaggcaggctgggcggcccttcgtcctcgccttcgggtg

SEQ ID NO: 741068 - DNA, 120 bp, Artificial Sequence
  ENSG00000204335_1 (sequence is synthesized)
tccatgcctcggcggcggcgtcccgctccgcagccaggggcctgcaagccgtagccatggccgcggtggccgtcctccggaacgactcgctgcaggcctttctccaggaccgcaccccca

SEQ ID NO: 741069 - DNA, 120 bp, Artificial Sequence
  ENSG00000204335_2 (sequence is synthesized)
gcgcctccccggacctgggcaagcactcgcccctggcattgctggccgccacctgtagccgcatcggccagccgggcgcggcggcgcccccggacttcctgcaggtgccctacgaccccg

SEQ ID NO: 741070 - DNA, 120 bp, Artificial Sequence
  ENSG00000204335_3 (sequence is synthesized)
cgctgggctcaccctccaggctcttccacccgtggaccgccgacatgccggcgcactcgccaggcgcactgccgcccccgcatcccagcttggggctgacgccgcagaagacgcacctgc

SEQ ID NO: 741071 - DNA, 120 bp, Artificial Sequence
  ENSG00000204335_4 (sequence is synthesized)
agccgtccttcggggctgcgcacgagcttccccttacaccccccgccgacccctcgtacccctacgagttctcgccggtcaagatgctgccctcgagcatggcggctctgcccgccagct

SEQ ID NO: 741072 - DNA, 120 bp, Artificial Sequence
  ENSG00000204335_5 (sequence is synthesized)
gcaggccgcgctgccgccaggctactccaacctgctgcctccgccgccgccaccgcccccgccgcccacctgccgccagttgtcacccaacccggcccccgacgacctcccgtggtggag

SEQ ID NO: 741073 - DNA, 80 bp, Artificial Sequence
  ENSG00000204335_6 (sequence is synthesized)
aacccggcccccgacgacctcccgtggtggagcatcccgcaggcgggcgccgggccgggggcctccggggttccgggaag

SEQ ID NO: 741074 - DNA, 120 bp, Artificial Sequence
  ENSG00000204335_7 (sequence is synthesized)
tccccgcctctgcggccgctgctgctgcggccgccgccgccctacaaagaggcctggtgttgggcccgtcggactttgcgcagtaccagagccagatcgccgcgctgctgcagaccaagg

SEQ ID NO: 741075 - DNA, 120 bp, Artificial Sequence
  ENSG00000204335_8 (sequence is synthesized)
gccacggccaggaggtgccgccgctgccgctgtcccaactgccaggcggcgggcggcgcccccgaggcggagccggggaagaagaagcagcacgtgtgccacgtgccgggctgcggcaag

SEQ ID NO: 741076 - DNA, 120 bp, Artificial Sequence
  ENSG00000204335_9 (sequence is synthesized)
caaggtgtacgggaagacgtcgcacctgaaggcgcacctgcgctggcacacgggcgagcgacccttcgtgtgcaactggctcttctgcgggaagagcttcacgcgctcggacgagctgca

SEQ ID NO: 741077 - DNA, 120 bp, Artificial Sequence
  ENSG00000204335_10 (sequence is synthesized)
gcggcacctgcggactcacacgggcgagaagcgctttgcctgtcccgagtgcggcaagcgcttcatgcgcagcgaccacctcgcgaagcacgtcaagactcaccagaataagaagctcaa

SEQ ID NO: 741078 - DNA, 120 bp, Artificial Sequence
  ENSG00000204335_11 (sequence is synthesized)
agtcgctgaggccggggttaagcgggaggacgcgcgggacctgtgagccctcccggaggtggacccccttcccagcacctctgcgagagatccggggacctgtgggcagctggcggaggg

SEQ ID NO: 741079 - DNA, 120 bp, Artificial Sequence
  ENSG00000204335_12 (sequence is synthesized)
gagactcagcagacggaccctctccgttgcctgcctcccaaaatggagccaggcttccaacttccgctgccttcggacatagggacccagttcccaggagcggggaggtagggttggggc

SEQ ID NO: 741080 - DNA, 120 bp, Artificial Sequence
  ENSG00000204335_13 (sequence is synthesized)
tggggcatttggattgtaattgggagctctgccgtacgccagggcggttccaaactctaaaccgttcccaccgtcagggagacctacagtttcgggggaccaccctggtctggccttgta

SEQ ID NO: 741081 - DNA, 120 bp, Artificial Sequence
  ENSG00000204335_14 (sequence is synthesized)
tataggaaatgctgctgaactgaatagaaaggaacttgggagatttgaaacagtgctcgggttttcgctaggaccggtttgggctttgtacaggttatttaatagctttgttaaagataa

SEQ ID NO: 741082 - DNA, 120 bp, Artificial Sequence
  ENSG00000204335_15 (sequence is synthesized)
ttataataattataacattaataaaaatgttgcttttgtcttcagctccatgcagagctacagcatgatatgtctctgtaaagtgatcagcagttgcagcgtgaaaataaatactttaac

SEQ ID NO: 741083 - DNA, 120 bp, Artificial Sequence
  ENSG00000204335_16 (sequence is synthesized)
tcaggggtcactacaggaagaccccgttgagccggtctcatttgatcttttcttcttctgggtggctgtactaagcggtcgggtttccccgggaatttgatggttcctatagtctgcctg

SEQ ID NO: 741084 - DNA, 120 bp, Artificial Sequence
  ENSG00000204344_0 (sequence is synthesized)
cttccacctccgcagagctatgacgtcatggcaggcacgccagaggccgaaggatgcaaaagtggttttctgctttcgatgatgcaatcattcagcgacagtggcgggcaaacccctccc

SEQ ID NO: 741085 - DNA, 120 bp, Artificial Sequence
  ENSG00000204344_1 (sequence is synthesized)
ggggcgggggaggtgtgagcttcacgaaggaggttgacaccaacgtggccaccggcgcccctccacgccgccaacgagtccccgggcgtgcgtgcccttggagggagccaatccgcggcc

SEQ ID NO: 741086 - DNA, 120 bp, Artificial Sequence
  ENSG00000204344_2 (sequence is synthesized)
ggcgtggggcccggcctggcggaggtgatgctggagggacgcccggggagaccgtacgtcactgctctgcgccggaagaccctattttcaggttctcttccctccattcctaccccttcc

SEQ ID NO: 741087 - DNA, 120 bp, Artificial Sequence
  ENSG00000204344_3 (sequence is synthesized)
ccggtaccataaaatcccgggatatgagctggaagaggcatcacctgatcccggagacctttggagttaagaggcggcggaagcgagggcctgtggagtcggatcctcttcggggtgagc

SEQ ID NO: 741088 - DNA, 120 bp, Artificial Sequence
  ENSG00000204344_4 (sequence is synthesized)
cagggtcggcgcgcgcggctgtctcagaactcatgcagctgttcccgcgaggcctgtttgaggacgcgctgccgcccatcgtgctgaggagccaggtgtacagccttgtgcctgacagga

SEQ ID NO: 741089 - DNA, 120 bp, Artificial Sequence
  ENSG00000204344_5 (sequence is synthesized)
ccgtggccgaccggcagctgaaggagcttcaagagcagggggagatcagaatcgtccagctgggcttcgacttggatgcccatggaattatcttcactgaggactacaggaccagagtat

SEQ ID NO: 741090 - DNA, 120 bp, Artificial Sequence
  ENSG00000204344_6 (sequence is synthesized)
agacctttggcttcagggactcagaaatcacgcatctggtgaatgctggagtcctcaccgtccgagatgctgggagctggtggctagctgtgcctggagctgggagattcatcaagtact

SEQ ID NO: 741091 - DNA, 120 bp, Artificial Sequence
  ENSG00000204344_7 (sequence is synthesized)
ttgttaaagggcgccaggctgtccttagcatggtccggaaggcaaagtaccgggaactgctcctatcagagctcctgggccggcgggcgcctgtcgtggtgcggcttggcctcacctacc

SEQ ID NO: 741092 - DNA, 120 bp, Artificial Sequence
  ENSG00000204344_8 (sequence is synthesized)
atgtgcacgacctcattggggcccagctagtggactgcatctctaccacttcaggaaccctcctccgcctgccagagacatgaagattctgctcatcattgctcagctcctcagagtggg

SEQ ID NO: 741093 - DNA, 120 bp, Artificial Sequence
  ENSG00000204344_9 (sequence is synthesized)
ccgggaggggactagaagagctgcatgatggtggctgagacagggtcaccttgggaaggcttgggagccaggatgagtgtcgggctctcgtgtgtgcaaaaggtcagatgtgactgctgc

SEQ ID NO: 741094 - DNA, 120 bp, Artificial Sequence
  ENSG00000204344_10 (sequence is synthesized)
tgtttgcctggtttctgacccagtggtggggtttgagcaatgcttctctgcccttccatggaaagtggaaccagaaatggtgccaaggctgtggctgttccctttcgtgtaaaatggtgc

SEQ ID NO: 741095 - DNA, 120 bp, Artificial Sequence
  ENSG00000204344_11 (sequence is synthesized)
tgttattactctgtcttgaaataggaaggtgggatttctggggaggctggtgaaggagggcagggttcttttctctacgtgtcatgttaaaattgccaaataaagtacctctgcctgtga

SEQ ID NO: 741096 - DNA, 120 bp, Artificial Sequence
  ENSG00000204344_12 (sequence is synthesized)
gtcactccgccagccgttcagcaagcattaggcctttcaggcgagggcactgtgccaggcactggggtgccacagagaccctgttaaaagtcccgcagaaggagcttcaagagcaggggg

SEQ ID NO: 741097 - DNA, 120 bp, Artificial Sequence
  ENSG00000204344_13 (sequence is synthesized)
agttttgtcaggtgcccccgccacgtcactatggcctctgccagccagcctggacccctgagaggcaggagttacaggctgaaggtctgacacaagcattagtgagatgctcccctcgaa

SEQ ID NO: 741098 - DNA, 120 bp, Artificial Sequence
  ENSG00000204344_14 (sequence is synthesized)
gaatagtcttgtttcttctaaggactgattctcaccccggctttggctctcctaattttagagggtcctccaaatgcagtgaggttaggaaggacgtctgcgctcagatcaagaatccag

SEQ ID NO: 741099 - DNA, 120 bp, Artificial Sequence
  ENSG00000204344_15 (sequence is synthesized)
gcctgtggggaccttagtttccagcaggaccaaatgacacagacctttggcttcagggactcagaaatcacgtgagacttgtggaaccaaccaaagtcaggcatctggtgcttccctgcc

SEQ ID NO: 741100 - DNA, 120 bp, Artificial Sequence
  ENSG00000204344_16 (sequence is synthesized)
tccctccagttccatccagcctgtcctcctgtttttttggtgaacctgccagaaaagctgccaaaaagctgactcttcttgttaataaaatgacccaagtttgtattcctccccacaaga

SEQ ID NO: 741101 - DNA, 120 bp, Artificial Sequence
  ENSG00000204344_17 (sequence is synthesized)
gcctggagctgggagattcatcaagtactttgttaaaggtatcccatctgcagctcaagcctgcagcccctcaccttttggtggctcctcaggcctctaggccttattcacctttcccct

SEQ ID NO: 741102 - DNA, 120 bp, Artificial Sequence
  ENSG00000204344_18 (sequence is synthesized)
gcctatcttacctgggccttagaaagagccctgaaatagaattcagttcttggtggcttatcaaaagcacacaggggcctggcaggaagtgtaaaagcttgatgttaatcatactgggac

SEQ ID NO: 741103 - DNA, 120 bp, Artificial Sequence
  ENSG00000204344_19 (sequence is synthesized)
aaataaaaatctaattttgagaggctgtatctggctcaggcctcctactttgtaacccatggaatatgtgaaagcatttgaaaaactatagcactgatctcacatgggcagacacactct

SEQ ID NO: 741104 - DNA, 120 bp, Artificial Sequence
  ENSG00000204344_20 (sequence is synthesized)
cagagagatgtggtgggagccatggcgcagtctgcctaggcagtggcaggagcgcagaagactctgattcctctcctcggtcctaagaccgaatgtgtgtcaggacatgtggtcagggaa

SEQ ID NO: 741105 - DNA, 120 bp, Artificial Sequence
  ENSG00000204344_21 (sequence is synthesized)
gagaagctatttaactgaaccagtaatagtagcaggaaaagaaaaagtggagggagggcagtccaggtagggggcctggaacaagcaactgcaccaacagaggcagttggtgcgagcaca

SEQ ID NO: 741106 - DNA, 120 bp, Artificial Sequence
  ENSG00000204344_22 (sequence is synthesized)
gaaccaccccaggctgggattttgttatccagtctctcttgcatggttgcccgtgtttctggagacttgtgtaaacattaatggatgaggaggagagatggttctcagagcccagccctc

SEQ ID NO: 741107 - DNA, 120 bp, Artificial Sequence
  ENSG00000204344_23 (sequence is synthesized)
agtcagacgtcagatcatgacaggccttgtacatcagtgttgtttccatcttacactgaggcgatgggctggtagagaatatcatagagagagggaatggtgtattggagatagtggatg

SEQ ID NO: 741108 - DNA, 120 bp, Artificial Sequence
  ENSG00000204344_24 (sequence is synthesized)
aggcagggaggtcagctaagaagatactgcatctgagaagtggtgaaggcctaaattaggtcagtgcagtagggagggagaggagagtgaggaagagggaggagtccaggacaactcaga

SEQ ID NO: 741109 - DNA, 120 bp, Artificial Sequence
  ENSG00000204344_25 (sequence is synthesized)
ctttccagatgactgcgtggctggtggtattaggagcacatttagttgttggactacagataatgtgtttaattttatacaagttgagttgatggtgcatgtggagcatccaaagacaaa

SEQ ID NO: 741110 - DNA, 120 bp, Artificial Sequence
  ENSG00000204344_26 (sequence is synthesized)
ccaggatgtgccccgaggacaggtagtgaaaggatcagtgttcctgagaaacccatctcgtaataatgtcccctgctccccaaaggtggacttcacccttagctcagaaagagacttcgc

SEQ ID NO: 741111 - DNA, 120 bp, Artificial Sequence
  ENSG00000204344_27 (sequence is synthesized)
actcctcagtctccaggtgcccttgaaagatgcgaagagctgtggcctccatcaactcctcagaggccctgaggtccagctggtggcccattcgccatggctaaaggactctctgtccag

SEQ ID NO: 741112 - DNA, 120 bp, Artificial Sequence
  ENSG00000204345_0 (sequence is synthesized)
gttgacttccgagcttggattcaagtccctgaagggcaccagacacctgtgatcaccaaggagaggagaggagacaggaccatgtggctgtccccatctctgctgcttctcatcctccca

SEQ ID NO: 741113 - DNA, 120 bp, Artificial Sequence
  ENSG00000204345_1 (sequence is synthesized)
ggttactccattgccgctaaaatcactggtccaacaacagtgaatggctcggagcagggctcattgactgtgcagtgtgcttatggctcaggctgggagacctacttgaagtggcggtgt

SEQ ID NO: 741114 - DNA, 120 bp, Artificial Sequence
  ENSG00000204345_2 (sequence is synthesized)
caaggagctgattggaattactgtaacatccttgttaaaacaaatggatcagagcaggaggtaaagaagaatcgagtttccatcagggacaatcagaaaaaccacgtgttcaccgtgacc

SEQ ID NO: 741115 - DNA, 120 bp, Artificial Sequence
  ENSG00000204345_3 (sequence is synthesized)
atggagaatctcaaaagagatgatgctgacagttattggtgtgggactgagagacctggaattgatcttggggtcaaagttcaagtgaccattaacccaggcacacaaactgcagtctca

SEQ ID NO: 741116 - DNA, 120 bp, Artificial Sequence
  ENSG00000204345_4 (sequence is synthesized)
gaatggacaaccacaacagcaagcctggctttcacagctgcagccacccagaagaccagcagccccctcaccaggtccccgctcaagagcacccacttcctgttcctgttcctcctggag

SEQ ID NO: 741117 - DNA, 120 bp, Artificial Sequence
  ENSG00000204345_5 (sequence is synthesized)
agagtcccaatgcccattgacgtcctgtccagggcgaaaggccctcccacagaagaaaaaacattttcttttctcttctttttttctttctagagatagagtcttgctctgtcacccagg

SEQ ID NO: 741118 - DNA, 89 bp, Artificial Sequence
  ENSG00000204345_6 (sequence is synthesized)
caagcgatcctcctgcctcaacctccagagtagctggggctacaggcacatgccaccacccccacttccaccacgttgcccaggctggt

SEQ ID NO: 741119 - DNA, 72 bp, Artificial Sequence
  ENSG00000204345_7 (sequence is synthesized)
aggctggtctcgaactcttgacctcaagagatcctcccgcttgaaaaacaacatttctatggggaattgact

SEQ ID NO: 741120 - DNA, 120 bp, Artificial Sequence
  ENSG00000204345_8 (sequence is synthesized)
cagaaaaacaacatttctatggggaattgactgtggttctagaggcagtgctggccccagcttcagggaacagcctcctagtcccctatctcctgcagccgtgccacctggggctattcc

SEQ ID NO: 741121 - DNA, 120 bp, Artificial Sequence
  ENSG00000204345_9 (sequence is synthesized)
cttctctgcacagtccctggggcctgacagagcccttcttccttctgaggtctccaatgcagtagaaaacatgagaagaatgtgtttcccccgagaggcacctatgccgtagtggacatt

SEQ ID NO: 741122 - DNA, 120 bp, Artificial Sequence
  ENSG00000204347_0 (sequence is synthesized)
ggtctgggcttcaccgtccctccagtggacttgggggctgagcataaagatgcctaggagaggctactccaagcctgggtcctggggcagcttctgggccatgctgaccttggtgggcct

SEQ ID NO: 741123 - DNA, 120 bp, Artificial Sequence
  ENSG00000204347_1 (sequence is synthesized)
ggtcacccatgcagcacagagagccgatgttggcggggaggcagctggcacctccatcaaccactcccaggcggtgctccagcgcttgcaggagctgctgcggcagggcaacgccagcga

SEQ ID NO: 741124 - DNA, 120 bp, Artificial Sequence
  ENSG00000204347_2 (sequence is synthesized)
tgtggttctgcgggtgcaggctgcgggcaccgatgaggtccgggtattccacgcccaccgcctgctgctgggactgcacagtgagctgttcctggagctgctaagtaaccagagcgaggc

SEQ ID NO: 741125 - DNA, 120 bp, Artificial Sequence
  ENSG00000204347_3 (sequence is synthesized)
ggtgctgcaggagccacaggactgcgccgctgtcttcgacaagttcatcaggtacctgtactgcggggagctgaccgtgctgctgacccaggccatccccctgcacagactggccaccaa

SEQ ID NO: 741126 - DNA, 120 bp, Artificial Sequence
  ENSG00000204347_4 (sequence is synthesized)
gtacggcgtgtcctccctgcagcgcggcgtggccgactacatgcgcgcgcacctggcgggaggcgcgggcccggcggtgggctggtaccactacgcggtgggcaccggggacgaggccct

SEQ ID NO: 741127 - DNA, 120 bp, Artificial Sequence
  ENSG00000204347_5 (sequence is synthesized)
gcgcgagagctgcctgcagttcctggcctggaacctgtcggccgtggcggccagcaccgagtggggcgccgtgagccccgagctgctctggcagctcctgcaacgctcggacctggtgct

SEQ ID NO: 741128 - DNA, 120 bp, Artificial Sequence
  ENSG00000204347_6 (sequence is synthesized)
gcaggatgaactggagctgttccacgcgctggaggcctggctgggtcgcgcgcggccgccccctgccgtggccgagcgggcgctgcgcgccatacgctaccccatgatcccaccggcaca

SEQ ID NO: 741129 - DNA, 120 bp, Artificial Sequence
  ENSG00000204347_7 (sequence is synthesized)
ccgcggtggccgacctcctgctgcaggcctaccagttccacgccgcgtcgccgctgcactacgccaagttcttcgacgtcaacggcagcgccttcctgccccgcaactacctcgcgcccg

SEQ ID NO: 741130 - DNA, 120 bp, Artificial Sequence
  ENSG00000204347_8 (sequence is synthesized)
cctggggcgccccgtgggtcatcaacaacccggcccgcgacgaccgcagcaccagcttccagacgcagctgggcccgagtggccacgacgcgggccgccgggtcacctggaacgtgctct

SEQ ID NO: 741131 - DNA, 120 bp, Artificial Sequence
  ENSG00000204347_9 (sequence is synthesized)
cgtgctcttctcgccgcgctggctgcccgtcagcctgcggcccgtttacgcggacgccgcgggcactgctctgcccgccgcgcgcccggaggacggccgaccgcggctggtggtgacgcc

SEQ ID NO: 741132 - DNA, 120 bp, Artificial Sequence
  ENSG00000204347_10 (sequence is synthesized)
gcggcggcgacgcggcgggcgtgagcttccagaagacggtgctggtgggggcgcgccagcagggccgcctgctggtccgccacgcctacagcttccaccagagcagcgaggaggccggcg

SEQ ID NO: 741133 - DNA, 120 bp, Artificial Sequence
  ENSG00000204347_11 (sequence is synthesized)
acttcctggcgcacgccgacctgcagcggcgcaactccgagtacctggttgagaacgccctgcacctgcacctcatcgtcaagcccgtataccacacccttatccggacccccaagtagc

SEQ ID NO: 741134 - DNA, 120 bp, Artificial Sequence
  ENSG00000204347_12 (sequence is synthesized)
ctcggggtctgggaataaaggcctggcctaggtggtccctgtgggtctgggaagggcaaggcgagcctggaggtggcaacaagcctggtcccctggatggccaggcgccggccaccctag

SEQ ID NO: 741135 - DNA, 120 bp, Artificial Sequence
  ENSG00000204347_13 (sequence is synthesized)
ggctggggtggagtccaggtgaggcgtggtagacaagatgcctggtttcaagagctgatttcacagctgacttgaaggaacgttcttggtcctgaataaaccgatgctcagagtggtaaa

SEQ ID NO: 741136 - DNA, 120 bp, Artificial Sequence
  ENSG00000204348_0 (sequence is synthesized)
gttggcggcgtggaggggcgccggtggccacgttggtgtcaacctccttcgtgaagctcacacctcccccgccccgggaggggtttgcccgccactgtcgctgaatgattgcatcatcga

SEQ ID NO: 741137 - DNA, 120 bp, Artificial Sequence
  ENSG00000204348_1 (sequence is synthesized)
aagcagaaaaccacttttgcatccttcggcctctggcgtgcctgccatgacgtcatagctctgcggaggtggaagttggggagctttgaggacctcatggatcccagggggaccaagaga

SEQ ID NO: 741138 - DNA, 120 bp, Artificial Sequence
  ENSG00000204348_2 (sequence is synthesized)
ggagctgagaagacagaggtagctgagcctcggaacaaactacctcgtccagcaccttctctgcccacagaccctgccctctactctgggccctttcctttctaccggcgcccttcggaa

SEQ ID NO: 741139 - DNA, 120 bp, Artificial Sequence
  ENSG00000204348_3 (sequence is synthesized)
ctgggctgcttctccctggatgctcaacgccagtaccatggagatgcccgagccctgcgctactatagcccaccccccactaacggtccaggccccaactttgacctcagagacggatac

SEQ ID NO: 741140 - DNA, 120 bp, Artificial Sequence
  ENSG00000204348_4 (sequence is synthesized)
ccggatcgataccagccccgggacgaggaggtccaggaaaggctggaccacctgctgtgctggctcctggaacaccgaggccggttggaggggggtccaggctggctggcagaggccata

SEQ ID NO: 741141 - DNA, 120 bp, Artificial Sequence
  ENSG00000204348_5 (sequence is synthesized)
gtgacgtggcgggggcacctgacaaaactgctgacgacaccgtatgagcggcaggagggctggcagctggcagcctcccggttccagggaacactatacctgagtgaagtggagacaccg

SEQ ID NO: 741142 - DNA, 120 bp, Artificial Sequence
  ENSG00000204348_6 (sequence is synthesized)
accgctcctccgggagcttatgtacatgggatacaaatttgagcagtacatgtgtgcagacaaacctggaagctccccagacccctctggggaggttaacaccaacgtggccttctgctc

SEQ ID NO: 741143 - DNA, 120 bp, Artificial Sequence
  ENSG00000204348_7 (sequence is synthesized)
tgtgctacgcagccgcctgggaagccaccctctgctcttctcaggggaggtagactgcacagacccccaagccccatccacacagcccccaacctgctatgtggagctcaagacctccaa

SEQ ID NO: 741144 - DNA, 120 bp, Artificial Sequence
  ENSG00000204348_8 (sequence is synthesized)
ggagatgcacagccctggccaatggaggagtttctacagacacaagctcctgaaatggtgggctcagtcattcctcccaggggtcccgaatgttgttgctggcttccgtaacccagacgg

SEQ ID NO: 741145 - DNA, 120 bp, Artificial Sequence
  ENSG00000204348_9 (sequence is synthesized)
ttttgtctcttccctcaagacctttcctaccatgaagatgtttgaatatgtcaggaatgaccgtgacggctggaatccctctgtgtgcatgaacttctgtgccgccttccttagctttgc

SEQ ID NO: 741146 - DNA, 120 bp, Artificial Sequence
  ENSG00000204348_10 (sequence is synthesized)
ccagagcacggttgtccaggatgaccccaggctcgttcatctcttctcttgggagcctggcggcccagtcaccgtgtctgtacaccaagatgcaccttacgccttcctgcccatatggta

SEQ ID NO: 741147 - DNA, 120 bp, Artificial Sequence
  ENSG00000204348_11 (sequence is synthesized)
tgtggaagctatgactcaggacctcccatcaccccccaagactccctctcccaaatagtaatgctttagagggaggcagtcatatctctgtgtgcagataataaaagcatatttctaaga

SEQ ID NO: 741148 - DNA, 120 bp, Artificial Sequence
  ENSG00000204348_12 (sequence is synthesized)
gatgacgaaaggagcgtcaacttgtcgtccctcaggcccgtcagtgctgggaggggcggtggcgacgcacataccagcatcacctccgccaggccgggccccacgccggccgcggattgg

SEQ ID NO: 741149 - DNA, 120 bp, Artificial Sequence
  ENSG00000204348_13 (sequence is synthesized)
agggagggtgggtgaagggcaaggaaagaggcaggatgagagcttggccgcggtggcgtctgaggggcctgaatgtttcaaggccagagcctggcgatcaggtggctcgcttagtcctaa

SEQ ID NO: 741150 - DNA, 120 bp, Artificial Sequence
  ENSG00000204348_14 (sequence is synthesized)
atcagtccttagaagaaacaagactattcttcgaggggagcatctcactaatgcttgtgtcagaccttcagcctgtaactcctgcctctcaggggtccaggctggctggcagaggccata

SEQ ID NO: 741151 - DNA, 120 bp, Artificial Sequence
  ENSG00000204348_15 (sequence is synthesized)
ggagtttctacaggttcaggatcggggtgggcagggcgagagcttaggcttgaaggctgggaaagggacttggggaggagggtgaaggcagaatggagggtgcacgaggggtcccactga

SEQ ID NO: 741152 - DNA, 120 bp, Artificial Sequence
  ENSG00000204348_16 (sequence is synthesized)
acctttcctaccatgaagatgtttgaatatgtcagggtaagggaacgatgttgcagctcccacccgtatccccaaacaccaagaccacaggtctagcatccagggcaacagcctgccttc

SEQ ID NO: 741153 - DNA, 120 bp, Artificial Sequence
  ENSG00000204348_17 (sequence is synthesized)
gtgagttgcccctgcttcatagcccccttccccttcccagaggttgagagccccccacgcctgctgctgcttctctccttgtgcagacaaacctggaagctccccagacccctctgggga

SEQ ID NO: 741154 - DNA, 120 bp, Artificial Sequence
  ENSG00000204348_18 (sequence is synthesized)
tgtccaggatgaccccaggtgaggcattcagctctgtccctcccctctggatcccaggatccagcctctggccctcaactgatgcctccatctgccccccaggctcgttcatctcttctc

SEQ ID NO: 741155 - DNA, 120 bp, Artificial Sequence
  ENSG00000204351_0 (sequence is synthesized)
agctgctgtggctccaggatgatggagacagagcgacttgtgctaccccctccagatcccctggacctaccccttcgggccgtggagctcggatgcacggggcactgggagctgctgaac

SEQ ID NO: 741156 - DNA, 120 bp, Artificial Sequence
  ENSG00000204351_1 (sequence is synthesized)
ttgcctggagctccagagagtagccttccccatggcctccctccttgtgccccagatctgcagcaagaagcagaacagttgtttctgtcatccccagcctggctgcctctgcatggtgtg

SEQ ID NO: 741157 - DNA, 120 bp, Artificial Sequence
  ENSG00000204351_2 (sequence is synthesized)
gagcactcagcccgaaaatggcagaggaagacggatccctggtctcttttggctgtcctgggagccccagtcccatccgacctacaggcccaaagacacccaaccacaggccagatactg

SEQ ID NO: 741158 - DNA, 120 bp, Artificial Sequence
  ENSG00000204351_3 (sequence is synthesized)
ggttacaaagaggtcttgctggagaacacaaatctctcggctacaacctccttgtctcttcgccggcctccagggccagcctcccagtccttatggggaaatccaactcagtatcccttc

SEQ ID NO: 741159 - DNA, 120 bp, Artificial Sequence
  ENSG00000204351_4 (sequence is synthesized)
tggccaggggggatggatgaacccaccataacagatctgaacacacgggaggaggctgaggaggagatagactttgagaaagatcttcttactattccacctggtttcaagaaaggcatg

SEQ ID NO: 741160 - DNA, 120 bp, Artificial Sequence
  ENSG00000204351_5 (sequence is synthesized)
gactttgcaccaaaagattgtccaactccagctcctggactactaagccttagctgtatgttggagcctctggatttgggtgggggtgacgaggatgagaatgaggcagtgggacagcca

SEQ ID NO: 741161 - DNA, 120 bp, Artificial Sequence
  ENSG00000204351_6 (sequence is synthesized)
ggaggtcccagaggggacactgtttcagcctctccctgcagtgctcccctggcccgagcaagcagcttggaagacctagtgttgaaggaagcgtccacagctgtatccaccccagaggcc

SEQ ID NO: 741162 - DNA, 120 bp, Artificial Sequence
  ENSG00000204351_7 (sequence is synthesized)
ccagagcctccatctcaggagcagtgggccatccctgtggacgccacctcccctgttggtgatttctatcgcctcattccccagccagccttccagtgggcatttgagccagatgtgttt

SEQ ID NO: 741163 - DNA, 120 bp, Artificial Sequence
  ENSG00000204351_8 (sequence is synthesized)
cagaaacaggccatcctgcacttggaacggcatgactctgtctttgtcgcagctcacacatctgcaggaaaaacagttgtggctgaatatgccattgccctggcccagaaacacatgaca

SEQ ID NO: 741164 - DNA, 120 bp, Artificial Sequence
  ENSG00000204351_9 (sequence is synthesized)
cgcaccatctacacttcgcccatcaaggccctgagcaaccagaagttccgggacttccgaaacacattcggggatgtggggctgctcaccggggatgtacagctgcatccggaggcctcc

SEQ ID NO: 741165 - DNA, 120 bp, Artificial Sequence
  ENSG00000204351_10 (sequence is synthesized)
tgcctcatcatgaccacagagatccttcgctccatgctgtacagtggctcagatgttattcgggacctggagtgggtcatctttgatgaggttcactatatcaacgatgtcgagcgtggg

SEQ ID NO: 741166 - DNA, 120 bp, Artificial Sequence
  ENSG00000204351_11 (sequence is synthesized)
gtcgtgtgggaggaggtgcttatcatgctacctgaccacgtttctatcatccttctgagtgccaccgtccccaacgcccttgagtttgctgactggattgggcggctgaagcgtcgtcag

SEQ ID NO: 741167 - DNA, 120 bp, Artificial Sequence
  ENSG00000204351_12 (sequence is synthesized)
atctatgtgattagcactgtaacccgccccgtgcccctggagcactatcttttcacagggaacagctccaagacccagggggagctctttttgttgctggactcccgaggagccttccat

SEQ ID NO: 741168 - DNA, 120 bp, Artificial Sequence
  ENSG00000204351_13 (sequence is synthesized)
acaaaagggtactatgcagctgtggaggccaagaaggagagaatgagcaaacacgcccagacctttggggccaagcagcccacacatcaggggggccctgcacaggaccgcggagtgtac

SEQ ID NO: 741169 - DNA, 120 bp, Artificial Sequence
  ENSG00000204351_14 (sequence is synthesized)
ctgtccctcctggcctccctccgcacacgtgcccagttgcccgtggtggtgttcaccttctcccggggccgctgtgatgagcaggcctcaggcctcacctcccttgacctcaccaccagt

SEQ ID NO: 741170 - DNA, 120 bp, Artificial Sequence
  ENSG00000204351_15 (sequence is synthesized)
caggtcctgcacatgtcagagctcctgaatcgcggcctgggtgtgcaccatagcggcatcctgcccatcctcaaggagatcgtggagatgctcttcagccgtggcctggtcaaggtcttg

SEQ ID NO: 741171 - DNA, 120 bp, Artificial Sequence
  ENSG00000204351_16 (sequence is synthesized)
tttgccacagagacctttgccatgggagtaaacatgcctgctcgtacagtagtgtttgactccatgcgcaaacacgatggctccaccttccgggacctgctccctggggagtatgtgcag

SEQ ID NO: 741172 - DNA, 120 bp, Artificial Sequence
  ENSG00000204351_17 (sequence is synthesized)
atggcaggccgggcagggcggaggggcctggaccccacaggcaccgttatcctgctctgcaagggccgagtgcccgagatggcagacctgcaccgcatgatgatggggaagccgtcccag

SEQ ID NO: 741173 - DNA, 120 bp, Artificial Sequence
  ENSG00000204351_18 (sequence is synthesized)
ctgcagtcccagttccgcctcacgtacactatgatcctcaacttgctgcgagtggatgccctcagggtggaggacatgatgaagaggagcttctctgagtttccctcccgcaaagacagc

SEQ ID NO: 741174 - DNA, 120 bp, Artificial Sequence
  ENSG00000204351_19 (sequence is synthesized)
aaggcccatgaacaggccctggctgaactgaccaagaggctgggagctttggaggagcctgacatgactggccaactggtcgacctgcctgaatattacagctggggggaggaactgaca

SEQ ID NO: 741175 - DNA, 120 bp, Artificial Sequence
  ENSG00000204351_20 (sequence is synthesized)
gagacccagcacatgatccagcgacgcatcatggagtctgtgaacgggctgaagtctctctcagcaggaagggtggtggttgtgaagaatcaggagcatcacaacgcattgggagtgatc

SEQ ID NO: 741176 - DNA, 120 bp, Artificial Sequence
  ENSG00000204351_21 (sequence is synthesized)
ctacaggtctcctcgaactccaccagcagagtattcacaaccctggtcttgtgtgataagcccttgtcccaggacccacaggacagggggccagccactgcagaggtgccctatccagat

SEQ ID NO: 741177 - DNA, 120 bp, Artificial Sequence
  ENSG00000204351_22 (sequence is synthesized)
gacctcgtgggattcaagctgttcctgcctgaagggccttgtgaccacaccgtggtcaagctccagccaggagatatggctgccatcaccaccaaggtgctccgggtgaatggggagaag

SEQ ID NO: 741178 - DNA, 120 bp, Artificial Sequence
  ENSG00000204351_23 (sequence is synthesized)
atcttggaggacttcagcaagaggcagcagccaaaattcaagaaggatcctccccttgcagccgtgaccactgctgtccaggaactgctgcgtctggctcaggcccacccagccggacct

SEQ ID NO: 741179 - DNA, 120 bp, Artificial Sequence
  ENSG00000204351_24 (sequence is synthesized)
cccaccctcgaccctgtcaatgacctgcagctcaaagatatgtcagttgtagagggtgggctccgggcccggaagctggaggagctgatccagggggctcagtgtgtacacagcccccgt

SEQ ID NO: 741180 - DNA, 120 bp, Artificial Sequence
  ENSG00000204351_25 (sequence is synthesized)
tttcctgcccagtacctgaagctgcgggagcgaatgcagatacagaaggagatggagcggctgcgcttcctactgtcggatcagtcattgctgctgcttcctgagtaccatcagcgagta

SEQ ID NO: 741181 - DNA, 120 bp, Artificial Sequence
  ENSG00000204351_26 (sequence is synthesized)
gaggtgctccgaaccctgggttatgtggacgaggcgggcactgtgaagctggcagggcgggtggcttgtgccatgagcagccatgagttgctcctcactgagctcatgtttgacaatgca

SEQ ID NO: 741182 - DNA, 120 bp, Artificial Sequence
  ENSG00000204351_27 (sequence is synthesized)
ctgagcaccctgcggcctgaggagattgctgccttgctctctggcctggtctgccagagccctggggacgctggggatcagctcccaaacaccctcaagcagggaatagaacgtgtccgg

SEQ ID NO: 741183 - DNA, 120 bp, Artificial Sequence
  ENSG00000204351_28 (sequence is synthesized)
gctgtggccaagcggattggtgaggtccaggtggcttgtggcctgaaccagacggtggaggaatttgtgggggagctgaattttgggctggttgaggttgtatatgagtgggcccggggc

SEQ ID NO: 741184 - DNA, 120 bp, Artificial Sequence
  ENSG00000204351_29 (sequence is synthesized)
atgcccttctccgagttggcagggctctcagggacccctgagggcctggtggtccgctgcattcagcgcctggctgagatgtgtcgctcactgcggggggcagcccgcctggtaggagag

SEQ ID NO: 741185 - DNA, 120 bp, Artificial Sequence
  ENSG00000204351_30 (sequence is synthesized)
cctgtgctgggtgccaagatggagacagcggctaccttgctacggcgggacatcgtatttgcggccagcctctacacccagtgaatgccccatgtaaaaacatgatgataaaacagcaaa

SEQ ID NO: 741186 - DNA, 120 bp, Artificial Sequence
  ENSG00000204351_31 (sequence is synthesized)
gatgctagggaggcccttctcctccagaggggcacgtagaggcagggaggggcagtggtctgggagtttcctccagcctgagggagaccatgaagtggtggggttgtagtgagggggctc

SEQ ID NO: 741187 - DNA, 120 bp, Artificial Sequence
  ENSG00000204351_32 (sequence is synthesized)
ccccagcctaagggagactgtgaagtggaggttgtagtaagagggcttccacagcctgagggaggcttctgggggagagaagatcttaccccagatcttaagatctgctccctcttcagg

SEQ ID NO: 741188 - DNA, 120 bp, Artificial Sequence
  ENSG00000204351_33 (sequence is synthesized)
ggggaaggatcctccccttgcagccgtgaccactgctgtccaggaactgctgcgtctggctcaggcccacccagccggacctcccaccctcgaccctgtcaatgacctgcagctcaaaga

SEQ ID NO: 741189 - DNA, 120 bp, Artificial Sequence
  ENSG00000204351_34 (sequence is synthesized)
agagtagcgtgagtgacttttgaccctaacctttgacccgcattgagtccaaacctccttcaccctcctcacagtaggatctagcttaaccttgttcatctgtgcctgtactcctgtcca

SEQ ID NO: 741190 - DNA, 120 bp, Artificial Sequence
  ENSG00000204351_35 (sequence is synthesized)
tttgctttgagagctgctctttcaaatgtggcatttctccgtggagctcccttctgtatccaagcaccagggcacttggtgactgagatgataggctttgagcctccaacctttcatcct

SEQ ID NO: 741191 - DNA, 120 bp, Artificial Sequence
  ENSG00000204351_36 (sequence is synthesized)
taggtctgggacccctttttctaaaatcagtgagtctccaatttcagtgtgcttcatgattagccagggagctttttaaaaatgcacattcctaggtccagcctccatgtttctgaaatc

SEQ ID NO: 741192 - DNA, 120 bp, Artificial Sequence
  ENSG00000204351_37 (sequence is synthesized)
caaaatctgccccaggtaattcagtagcaggtagtttttggccaagcctgattgtcctagtctgtttgacacatctgccatttctgatctgaacacaagtcccatcatctcttttgtctg

SEQ ID NO: 741193 - DNA, 120 bp, Artificial Sequence
  ENSG00000204351_38 (sequence is synthesized)
tggaggcaagaaagagccttgccaccaggatgtgggctggctaggatgggtctgaggggaagaaagggacatcttttgggaggagtgctaattgagagccctctggttgtatctttatca

SEQ ID NO: 741194 - DNA, 120 bp, Artificial Sequence
  ENSG00000204351_39 (sequence is synthesized)
acacactcagggccccttactgctttctttacccccatatggaatcctgtgcctctttatgggcagaagggcggcccctgccctcatgtgacctcccttccctctctgtgcccagcgtgg

SEQ ID NO: 741195 - DNA, 120 bp, Artificial Sequence
  ENSG00000204351_40 (sequence is synthesized)
ccctccagccctgtaagtgccccaaggatggaaaatggctgccttcttgatctggtccttccctgtcctggagcaggaaggcaggccttaacctctccttctttcctgcagggaatagaa

SEQ ID NO: 741196 - DNA, 120 bp, Artificial Sequence
  ENSG00000204352_0 (sequence is synthesized)
gcgcaggattcggagctcagaggcccgggccgccggccgcctcccctccgtggctctagggcggaggcggaggcggggaccggggtatctcgctcgcgcagcctggagcccatgctgggc

SEQ ID NO: 741197 - DNA, 120 bp, Artificial Sequence
  ENSG00000204352_1 (sequence is synthesized)
tcagcccgaccctgctttggccgctgcccgccgggtctccagcgccgccggaccctcacgccgccaccttctctccagcccagcgccgctgcggccgcagcctcctgccgagcatcttcc

SEQ ID NO: 741198 - DNA, 120 bp, Artificial Sequence
  ENSG00000204352_2 (sequence is synthesized)
agatcccaatccctgagaatcagttctgggatgtaacagagcaagcggacattattctgggaccagcaagcctcggtcactgcagccaccacactacgtggcagccagacccggtccgtt

SEQ ID NO: 741199 - DNA, 120 bp, Artificial Sequence
  ENSG00000204352_3 (sequence is synthesized)
tggaatgcctgggatggtgccgccgcatgttcctcctcagatgctcaacattccgcagacctctctgcaagcaaagcccgtggccccacaggtgcccagcccagggggcgccccgggcca

SEQ ID NO: 741200 - DNA, 120 bp, Artificial Sequence
  ENSG00000204352_4 (sequence is synthesized)
agaacagctacagcaacattcctcacgaagggaagcacacgccgctgtatgagcggtccttgcccatcaacccggcccagagcggcagccccaaccacgtggattccgcctacttccctg

SEQ ID NO: 741201 - DNA, 120 bp, Artificial Sequence
  ENSG00000204352_5 (sequence is synthesized)
gctcttctacatcgtcatcttccgacaacgacgagggcagcggaggggcgacaaaatatacaatctattggggattccgtgccactgaccaccatgtacaaggaagggattcacaggcaa

SEQ ID NO: 741202 - DNA, 120 bp, Artificial Sequence
  ENSG00000204352_6 (sequence is synthesized)
gggggacagcagcccactggcatggggggcatgtctgctcacctaacgttttctggcggatttctcatggcccagcgcaacaactgacattccctactgagcaagcagctccgccagtgt

SEQ ID NO: 741203 - DNA, 120 bp, Artificial Sequence
  ENSG00000204352_7 (sequence is synthesized)
gccctgccccagcgtcccgccgtctctcagcccctggatgagcccagggaaccggcactctactgaggacaaagcagggctcacctagcaatggaagctcttcaatacttaaggtagcta

SEQ ID NO: 741204 - DNA, 120 bp, Artificial Sequence
  ENSG00000204352_8 (sequence is synthesized)
attcaatgtttgtaaaaggcatttacaacagaaaaccaaagattgaacttcagcttcagatttgtaaaccattcacatctctgcaacttaaaacagtaaataaagattatcaatgcacaa

SEQ ID NO: 741205 - DNA, 120 bp, Artificial Sequence
  ENSG00000204356_0 (sequence is synthesized)
gtcatcgttgtgagcccgctatcagcggccagcgcgggcgcggccggagaccgtggggcccccggttgccgccccctcgggagccaccatgttggtgataccccccggactgagcgagga

SEQ ID NO: 741206 - DNA, 120 bp, Artificial Sequence
  ENSG00000204356_1 (sequence is synthesized)
agaggaggctctgcagaagaaattcaacaagctcaagaaaaagaaaaaggcattgctggctctgaagaagcaaagtagcagcagcacaaccagccaaggtggtgtcaaacgctcactatc

SEQ ID NO: 741207 - DNA, 120 bp, Artificial Sequence
  ENSG00000204356_2 (sequence is synthesized)
agagcagcctgtcatggacacagccacagcaacagagcaggcaaagcagctggtgaagtcaggagccatcagtgccatcaaggctgagaccaagaactcaggcttcaagcgttctcgaac

SEQ ID NO: 741208 - DNA, 120 bp, Artificial Sequence
  ENSG00000204356_3 (sequence is synthesized)
ccttgaggggaagttaaaggaccccgagaagggaccagtccccactttccagccgttccagaggagcatatctgctgatgatgacctgcaagagtcatccagacgtccccagaggaaatc

SEQ ID NO: 741209 - DNA, 120 bp, Artificial Sequence
  ENSG00000204356_4 (sequence is synthesized)
tctgtatgagagctttgtgtcttctagtgatcgacttcgagaactaggaccagatggagaagaggcagagggcccaggggctggtgatggtccccctcgaagctttgactggggctatga

SEQ ID NO: 741210 - DNA, 120 bp, Artificial Sequence
  ENSG00000204356_5 (sequence is synthesized)
agaacgcagtggtgcccactcctcagcctcccctccccgaagccgcagccgggaccgcagccatgagaggaaccgggacagagaccgagatcgggagcgggatcgagaccgggatcgaga

SEQ ID NO: 741211 - DNA, 120 bp, Artificial Sequence
  ENSG00000204356_6 (sequence is synthesized)
acagagagcgggacagggatcgggatcgggatcgagatcgagaccgggaacgggacagggatcgggagcgggatcgagaccgagaccgagagggtcctttccgcaggtcggattcattcc

SEQ ID NO: 741212 - DNA, 120 bp, Artificial Sequence
  ENSG00000204356_7 (sequence is synthesized)
ctgaacggcgagcccctaggaaagggaatactctctatgtatatggagaagacatgacacccacccttctccgtggggccttctctccttttggaaacatcattgacctctccatggacc

SEQ ID NO: 741213 - DNA, 120 bp, Artificial Sequence
  ENSG00000204356_8 (sequence is synthesized)
cacccagaaactgtgccttcgtcacctatgaaaagatggagtcagcagatcaggccgttgctgagctcaacgggacccaggtggagtctgtacagctcaaagtcaacatagcccgaaaac

SEQ ID NO: 741214 - DNA, 120 bp, Artificial Sequence
  ENSG00000204356_9 (sequence is synthesized)
agcccatgctggatgccgctactggcaagtctgtctggggctccctcgctgtccagaacagccctaagggttgccaccgggacaagaggacccagattgtctacagtgatgacgtctaca

SEQ ID NO: 741215 - DNA, 120 bp, Artificial Sequence
  ENSG00000204356_10 (sequence is synthesized)
aggaaaaccttgtggatggcttctagggaacagagctggattccttgtgcctcatatgccccaatgctggtctcagtaaaacactgaggtggaagcttacacatctccctcagcctctgg

SEQ ID NO: 741216 - DNA, 120 bp, Artificial Sequence
  ENSG00000204356_11 (sequence is synthesized)
tttttcagcacttgggattggggttaaacctttaaaaacggctgtcaggtttgatctcagtgtaacaacatggccagtgcctgttccccactcccttgccccaaaaggatctggaacaca

SEQ ID NO: 741217 - DNA, 120 bp, Artificial Sequence
  ENSG00000204356_12 (sequence is synthesized)
atagccgtttctctgttcttcctctttgcgttgctctgcgggcgctacgctggctccaccgccttctctgccgttcaaaccccgcggttgtccttaccctagcgagggtaggggggtcgg

SEQ ID NO: 741218 - DNA, 120 bp, Artificial Sequence
  ENSG00000204356_13 (sequence is synthesized)
tacctaaaggtgctggtgtctgtgatccctggagacaggagggaatgctggatgatcccgaccagcgggagcttggacagcagcctggtttaagcaaggggtagggaaagccaaagacaa

SEQ ID NO: 741219 - DNA, 120 bp, Artificial Sequence
  ENSG00000204356_14 (sequence is synthesized)
gagtaggcagacctgaaggggtggggttgggtacagtgtggacggcgtgtgaaccccgggtggtaacagtggagaaagatgtcttgggccctgcccctgaactaggagccaccatgttgg

SEQ ID NO: 741220 - DNA, 120 bp, Artificial Sequence
  ENSG00000204356_15 (sequence is synthesized)
ggctgggcccatttggtggagttgattgcctgagtccttgggaggtttgggctgtaggagctgggctatagagggaatattgagtctccacagggtctgaggggagaaggtaaaaccccc

SEQ ID NO: 741221 - DNA, 120 bp, Artificial Sequence
  ENSG00000204356_16 (sequence is synthesized)
tctcatgtgttctcctcaaaatactagatgccaggaagaagttggttcctcttgataaagaaagcctctccctattcacacagaaaaactcacattctcagattccttattcagtctcct

SEQ ID NO: 741222 - DNA, 120 bp, Artificial Sequence
  ENSG00000204356_17 (sequence is synthesized)
cctaggatagcaactcctggaataacttctttggtttatctgtaatgttttcctccccatcctctgcctcccctcttctgcttcagctcaacgggacccaggtggagtctgtacagctca

SEQ ID NO: 741223 - DNA, 120 bp, Artificial Sequence
  ENSG00000204356_18 (sequence is synthesized)
ggaggctctgcagaagaaattcaacaagctcaagaaaaaggtgagggactgtgtgtggacatggcctaacctttcacagactctgcactctgagaagatatgggaaaaaggcattgctgg

SEQ ID NO: 741224 - DNA, 120 bp, Artificial Sequence
  ENSG00000204356_19 (sequence is synthesized)
agaaattcaacaagctcaagaaaaagactgtaagcttcttgagggtaggaacaatgcattagcctcctggatatccctgttacgaagtcatggctgggcctcattcaatatgcaggaaat

SEQ ID NO: 741225 - DNA, 120 bp, Artificial Sequence
  ENSG00000204361_0 (sequence is synthesized)
aatcaaggagagtctctggacactataattcctgtgagaacacgagaagatggtggagaaaatactcatccataggatactcactttgtttccaaatgccatagctcgaaaattactgct

SEQ ID NO: 741226 - DNA, 120 bp, Artificial Sequence
  ENSG00000204361_1 (sequence is synthesized)
gatgttgacatttatcttaattttctggatcatttacttggcttcaaaagaccacacaaagttctcgttcaacttggaaaaccatattatcctgaaccaagggaacatcttcaaaaaata

SEQ ID NO: 741227 - DNA, 120 bp, Artificial Sequence
  ENSG00000204361_2 (sequence is synthesized)
ttcacactctgaaacaccactgtgtccagcagtttcaccaaaagagactgaacttagaataaaggacattatggagaaactagaccagcagatcccacccagacctttcacccatgtgaa

SEQ ID NO: 741228 - DNA, 120 bp, Artificial Sequence
  ENSG00000204361_3 (sequence is synthesized)
taccaccaccagtgccacacacagcacagccaccatcctcaaccctcaagatacgtactgcaggggggatcagctggacatccttctggaggtgagggaccacttgggacacaggaagca

SEQ ID NO: 741229 - DNA, 120 bp, Artificial Sequence
  ENSG00000204361_4 (sequence is synthesized)
atatggtggggatttcctgagggccaggatgtactccacagcactaatggcaggtgcttcaggaaaggtgactgacttcaacaacggcacctacctggtcagcttcactctgttctggga

SEQ ID NO: 741230 - DNA, 120 bp, Artificial Sequence
  ENSG00000204361_5 (sequence is synthesized)
gggccaggtttccctgtctctgctgctcatccaccccagtgaaggggtatcagctctctggagggcaaggaaccaaggatgtgataggatcatcttcactggcctgtttgccaacagaag

SEQ ID NO: 741231 - DNA, 120 bp, Artificial Sequence
  ENSG00000204361_6 (sequence is synthesized)
ctccaatgtcttcactgaatgtggcctgaccctaaacacaaatgctgaactgtgccagtacatggatgacagagaccaagaagccttctactgtgtgaggcctcaacatatgccctgtga

SEQ ID NO: 741232 - DNA, 120 bp, Artificial Sequence
  ENSG00000204361_7 (sequence is synthesized)
tccacaggtccaacataggagttgaaatgatgaagaactttacccccattgaggtcataccatgcaacaagagcgagaacataaaaaagaactgccagattggaatgaagactcctttcc

SEQ ID NO: 741233 - DNA, 120 bp, Artificial Sequence
  ENSG00000204361_8 (sequence is synthesized)
ccagtggttatactttgaaaaaaatgtggattacagcattttgtaaacagatcaagttcaatgaaacaaaaaatataaatgactgcttggaaagaaaacttatttatctcatgggagatt

SEQ ID NO: 741234 - DNA, 120 bp, Artificial Sequence
  ENSG00000204361_9 (sequence is synthesized)
caacactgcatcagtggatttactacttacaaaaagctgtgaaaaccctaaaatattttgatcatcatggagctgggatctttaaaacacatgttcttctggatgttgaaagacatattt

SEQ ID NO: 741235 - DNA, 120 bp, Artificial Sequence
  ENSG00000204361_10 (sequence is synthesized)
tgattcagtggaaaaaacatggtcatccatttgttaccaaaaaattattctcagtgaaagatgaaaactatatcccacgggaaattgaccaggtagcaggagacaaaaacacagccattg

SEQ ID NO: 741236 - DNA, 120 bp, Artificial Sequence
  ENSG00000204361_11 (sequence is synthesized)
tcattaccctcggccaacacttcagaccctttcccatcaacattttcatccgtagggccatcaatattcaaaaggccattgaacgtctattcttgcgaagcccggagaccaaggtgatac

SEQ ID NO: 741237 - DNA, 120 bp, Artificial Sequence
  ENSG00000204361_12 (sequence is synthesized)
ttaaaactgaaaacaccagagagatagaacaaaatgcagagatgttcagtgactttcatggctatattcagaatcttatcataagagatatttttgtggatcttaatgtgggtattattg

SEQ ID NO: 741238 - DNA, 120 bp, Artificial Sequence
  ENSG00000204361_13 (sequence is synthesized)
atgcctgggacatgacgattgcatattgcaccaacaatgcccatccaccggattatgtgattcaaaatcagattggcatgttcttaaactacatttgttagaggaaaaatacaaaaatag

SEQ ID NO: 741239 - DNA, 120 bp, Artificial Sequence
  ENSG00000204361_14 (sequence is synthesized)
cactagccactttctatagatgatctcacatatacagcgaagatagtttaatgcaatccaagttttgaggaaactaaatttgaaaaagttctattaaagttaaatatatgtaacataaca

SEQ ID NO: 741240 - DNA, 120 bp, Artificial Sequence
  ENSG00000204363_0 (sequence is synthesized)
actgggaagcttcaatatagctgtggaagtctggactctacaagatcctgctgtagacattcaacaaccaaccagaatcatggaaaagcccacttcaagcaccaatggggagaagaggaa

SEQ ID NO: 741241 - DNA, 120 bp, Artificial Sequence
  ENSG00000204363_1 (sequence is synthesized)
gagcccctgtgactccaacagcaaaaatgatgagatgcaggagacaccaaacagggacttagtcctcgaaccgagtttgaaaaagatgaaaacatcagaatattcaacagtattagtgtt

SEQ ID NO: 741242 - DNA, 120 bp, Artificial Sequence
  ENSG00000204363_2 (sequence is synthesized)
gaatgaccagtcctgagagaactccatcaatccagtccaagaggaggaggacgaaggatcctcacaggaggacgaagacctagactcatctgcagaatcttcaaagcaggatgaagacct

SEQ ID NO: 741243 - DNA, 120 bp, Artificial Sequence
  ENSG00000204363_3 (sequence is synthesized)
acaattacctgaaggatcttcacaggaggatgaagacctagggttatctgaaggatcttcacaagaggatgaagacctagactcatctgaaggatctttgatggaggaagaagacccaga

SEQ ID NO: 741244 - DNA, 120 bp, Artificial Sequence
  ENSG00000204363_4 (sequence is synthesized)
ctcatctgaaggatcgtcagaggagggtgaggaagactaattaaacatggagaaaccaaattggacaaatcctcaccaccaacggtgatgattacaataaaatcaagtttgagaagctga

SEQ ID NO: 741245 - DNA, 80 bp, Artificial Sequence
  ENSG00000204366_0 (sequence is synthesized)
cttcctcctccccgagtcctagccgacgccgccgccgccgcgcgcgcggggcctggaacacacggcacgagccgcccccg

SEQ ID NO: 741246 - DNA, 120 bp, Artificial Sequence
  ENSG00000204366_1 (sequence is synthesized)
cgcgcgcgtcccgtgcatccccgcgcctgcgcgctgcccaggccctgcccgtgtgtgggggtcgctgccggccccgggggggggtggggaaaataagggattaaaaaaacagcgcgcgga

SEQ ID NO: 741247 - DNA, 120 bp, Artificial Sequence
  ENSG00000204366_2 (sequence is synthesized)
accgggccagggttgcccacccccgccacaatggcctctggggtggaagtcctgcgcttccagctgcccggccacgaggccgcaacgctacggaacatgaaccagctccgggcagaggag

SEQ ID NO: 741248 - DNA, 120 bp, Artificial Sequence
  ENSG00000204366_3 (sequence is synthesized)
cggttctgcgacgtgaccattgtggccgacagcctcaagtttcgaggccacaaggtcatcttggccgcctgctcacccttcctgcgggaccagttcctgctgaaccccagctcggagctg

SEQ ID NO: 741249 - DNA, 120 bp, Artificial Sequence
  ENSG00000204366_4 (sequence is synthesized)
caggtctccctgatgcacagtgcacgcatcgtggccgacttgctcctctcctgctacacgggcgccttggaattcgctgttagggacatcgtcaactaccttacagccgcctcctacctg

SEQ ID NO: 741250 - DNA, 120 bp, Artificial Sequence
  ENSG00000204366_5 (sequence is synthesized)
cagatggagcacgtggtggagaaatgccggaatgccctcagccagttcattgagcccaaaataggcctcaaagaggatggggtcagtgaggctagccttgtgagcagcatcagcgccacc

SEQ ID NO: 741251 - DNA, 120 bp, Artificial Sequence
  ENSG00000204366_6 (sequence is synthesized)
aagtccctcctccctccagccaggaccccaaagccagccccgaagcccccacccccacctcctctaccccctccactcctgcggccagtgaagctggagttcccactggatgaagacttg

SEQ ID NO: 741252 - DNA, 120 bp, Artificial Sequence
  ENSG00000204366_7 (sequence is synthesized)
gagctgaaagccgaggaagaggatgaggatgaggatgaggacgtgtctgacatctgcatcgtcaaggtggagtcggccctggaggtggcacaccggctcaaaccccctggaggcctggga

SEQ ID NO: 741253 - DNA, 120 bp, Artificial Sequence
  ENSG00000204366_8 (sequence is synthesized)
agctggcccagagcagcgttccccccagcactgtagccccaccgcagggtgtggtgaaggcctgctatagcctgtcggaagatgcagaaggggagggcctgctgttgattcccggaggcc

SEQ ID NO: 741254 - DNA, 120 bp, Artificial Sequence
  ENSG00000204366_9 (sequence is synthesized)
tcgggcctggtggaagcagcagcggtggccatggctgcccggggggcggggggcagcctgggggcggggggcagccggggacccctgcctgggggcttctcaggtggaaaccccttaaag

SEQ ID NO: 741255 - DNA, 120 bp, Artificial Sequence
  ENSG00000204366_10 (sequence is synthesized)
caggtggaaaccccttaaagaacatcaagtgcaccaagtgcccggaagtgttccagggcgtggagaagctggtcttccacatgcgggcgcagcacttcatcttcatgtgccctcgctgtg

SEQ ID NO: 741256 - DNA, 120 bp, Artificial Sequence
  ENSG00000204366_11 (sequence is synthesized)
gcaagcagttcaaccacagcagcaacctcaaccgccacatgaacgtgcatcgtggtgtcaagtcacactcgtgcggcatctgcggcaagtgcttcacacagaagtccacccttcacgacc

SEQ ID NO: 741257 - DNA, 120 bp, Artificial Sequence
  ENSG00000204366_12 (sequence is synthesized)
acctcaacctgcactcgggagcgcggccctaccgctgctcctactgcgacgtgcgcttcgcccacaagcctgccattaggcggcacctcaaggagcaacacggcaagaccacggccgaga

SEQ ID NO: 741258 - DNA, 120 bp, Artificial Sequence
  ENSG00000204366_13 (sequence is synthesized)
acgtgctggaggccagtgtggccgagattaacgtcctcatccgctagccgcgcaggcgtggaggccaggaggctggggcccctgggctgcgtggaaaaagggctctttggcccaggagaa

SEQ ID NO: 741259 - DNA, 120 bp, Artificial Sequence
  ENSG00000204366_14 (sequence is synthesized)
ttggggggtggggggtctggggcagaaaggtaagagtgggaggctgagcagatgcacacatcctgagagagggaagatgattccttggagagacttgctcttgagagtgcaagaatctgg

SEQ ID NO: 741260 - DNA, 120 bp, Artificial Sequence
  ENSG00000204366_15 (sequence is synthesized)
agctgggaaaagggttcttggaggccaggggaatacggggtcccagagaaagatttccttctcttagaagtgcatgtatatgtggagggagggaaaagggtcctatagaatgagggaaga

SEQ ID NO: 741261 - DNA, 120 bp, Artificial Sequence
  ENSG00000204370_0 (sequence is synthesized)
gggttggtggatgaccttgagccctcaggaacgagatggcggttctctggaggctgagtgccgtttgcggtgccctaggaggccgagctctgttgcttcgaactccagtggtcagacctg

SEQ ID NO: 741262 - DNA, 120 bp, Artificial Sequence
  ENSG00000204370_1 (sequence is synthesized)
ctcatatctcagcatttcttcaggaccgacctatcccagaatggtgtggagtgcagcacatacacttgtcaccgagccaccattctggctccaaggctgcatctctccactggactagcg

SEQ ID NO: 741263 - DNA, 120 bp, Artificial Sequence
  ENSG00000204370_2 (sequence is synthesized)
agagggttgtcagtgttttgctcctgggtctgcttccggctgcttatttgaatccttgctctgcgatggactattccctggctgcagccctcactcttcatggtcactggggccttggac

SEQ ID NO: 741264 - DNA, 120 bp, Artificial Sequence
  ENSG00000204370_3 (sequence is synthesized)
aagttgttactgactatgttcatggggatgccttgcagaaagctgccaaggcagggcttttggcactttcagctttaacctttgctgggctttgctatttcaactatcacgatgtgggca

SEQ ID NO: 741265 - DNA, 120 bp, Artificial Sequence
  ENSG00000204370_4 (sequence is synthesized)
tctgcaaagctgttgccatgctgtggaagctctgacctttttgacttcatactttgaagaattgatgtatgcctctttgcctctgctttgtcatgccattaagctcacaataaggaagaa

SEQ ID NO: 741266 - DNA, 120 bp, Artificial Sequence
  ENSG00000204370_5 (sequence is synthesized)
gtggacagccttcttctcttaatcacaagattattttcagaatttaatctttgaggaaaaggtttgagaggaattatatctaagttgtgagactgagttctatattctggtgagttaatg

SEQ ID NO: 741267 - DNA, 120 bp, Artificial Sequence
  ENSG00000204370_6 (sequence is synthesized)
gggttgcctcccagcttcttataagactcacagtataactaaacatgatatatcagcttttgcctttcaatttatcaatctcttaaagagaatccaactttattacgattagtatatgat

SEQ ID NO: 741268 - DNA, 120 bp, Artificial Sequence
  ENSG00000204370_7 (sequence is synthesized)
caaacttccatatttgccttgggaataatggacaaagggaaatactcttaattcatgaataaaaactttgcagaaaattagacagtgtttaattttcgaaaacttccctctctagacagt

SEQ ID NO: 741269 - DNA, 120 bp, Artificial Sequence
  ENSG00000204370_8 (sequence is synthesized)
agataccacctactgatggttacatatactagggaaattttaaaattaggaaatgctgatagctcatattataaatttctaaatcctaggaagaaacgcttggagtgcttctgaatatac

SEQ ID NO: 741270 - DNA, 120 bp, Artificial Sequence
  ENSG00000204370_9 (sequence is synthesized)
agaagttccatttaagggcaagtttccctgtagatgtatcaaaatactaccaactgtaaattgagatttaattcccaaatgtattctacttgttctaaaacaatctgtccacaaatataa

SEQ ID NO: 741271 - DNA, 120 bp, Artificial Sequence
  ENSG00000204370_10 (sequence is synthesized)
ttctaaaacaatctgtccacaaatataaaactataagtaataaattgttattttcgcacaatgggaatctctaatgtgaaaatgtattctatgaaaataatttttttaaataaaatgtta

SEQ ID NO: 741272 - DNA, 90 bp, Artificial Sequence
  ENSG00000204370_11 (sequence is synthesized)
cactcttcatggtcactggcacgatctcggctcagcacgatctcagcttactgcaacctccgcctttcgggttcaagcgattctcctgcc

SEQ ID NO: 741273 - DNA, 120 bp, Artificial Sequence
  ENSG00000204370_12 (sequence is synthesized)
cagtagcaaggaaggagaaggaagcgaggaagtctgctcagctggggtcatctgggaacctatagaggctcccttaatgcggagaaaggagatgggctttcaccatgctgtgtcggccat

SEQ ID NO: 741274 - DNA, 76 bp, Artificial Sequence
  ENSG00000204370_13 (sequence is synthesized)
acaggcgcccaccaccatgcccagctaagttttgtacttttagtagagacctcaaactcctgacctcaggtgatct

SEQ ID NO: 741275 - DNA, 120 bp, Artificial Sequence
  ENSG00000204370_14 (sequence is synthesized)
gatgggttcatatacatcttattattcactcactcatatattaaaaaatatttaagtatctactatgtaccaggcactgtgctgggtcctggggatacagagatgaaaaagataccagga

SEQ ID NO: 741276 - DNA, 120 bp, Artificial Sequence
  ENSG00000204371_0 (sequence is synthesized)
agcggcgatggcggcggcggcgggagctgcagcggcggcggccgccgagggggaggcccccgctgagatgggggcgctgctgctggagaaggaaaccagaggagccaccgagagagttca

SEQ ID NO: 741277 - DNA, 120 bp, Artificial Sequence
  ENSG00000204371_1 (sequence is synthesized)
tggctctttgggggacacccctcgtagtgaagaaaccctgcccaaggccacccccgactccctggagcctgctggcccctcatctccagcctctgtcactgtcactgttggtgatgaggg

SEQ ID NO: 741278 - DNA, 120 bp, Artificial Sequence
  ENSG00000204371_2 (sequence is synthesized)
ggctgacacccctgtaggggctacaccactcattggggatgaatctgagaatcttgagggagatggggacctccgtgggggccggatcctgctgggccatgccacaaagtcattcccctc

SEQ ID NO: 741279 - DNA, 120 bp, Artificial Sequence
  ENSG00000204371_3 (sequence is synthesized)
ttcccccagcaaggggggttcctgtcctagccgggccaagatgtcaatgacaggggcgggaaaatcacctccatctgtccagagtttggctatgaggctactgagtatgccaggagccca

SEQ ID NO: 741280 - DNA, 120 bp, Artificial Sequence
  ENSG00000204371_4 (sequence is synthesized)
gggagctgcagcagcagggtctgaaccccctccagccaccacgagcccagagggacagcccaaggtccaccgagcccgcaaaaccatgtccaaaccaggaaatggacagcccccggtccc

SEQ ID NO: 741281 - DNA, 120 bp, Artificial Sequence
  ENSG00000204371_5 (sequence is synthesized)
tgagaagcggccccctgaaatacagcatttccgcatgagtgatgatgtccactcactgggaaaggtgacctcagatctggccaaaaggaggaagctgaactcaggaggtggcctgtcaga

SEQ ID NO: 741282 - DNA, 120 bp, Artificial Sequence
  ENSG00000204371_6 (sequence is synthesized)
ggagttaggttctgcccggcgttcaggagaagtgaccctgacgaaaggggaccccgggtccctggaggagtgggagacggtggtgggtgatgacttcagtctctactatgattcctactc

SEQ ID NO: 741283 - DNA, 120 bp, Artificial Sequence
  ENSG00000204371_7 (sequence is synthesized)
tgtggatgagcgcgtggactccgacagcaagtctgaagttgaagctctaactgaacaactaagtgaagaggaggaggaggaagaggaggaagaagaagaagaggaagaggaggaggaaga

SEQ ID NO: 741284 - DNA, 120 bp, Artificial Sequence
  ENSG00000204371_8 (sequence is synthesized)
ggaagaagaagaggaagatgaggagtcagggaatcagtcagataggagtggttccagtggccggcgcaaggccaagaagaaatggcgaaaagacagcccatgggtgaagccgtctcggaa

SEQ ID NO: 741285 - DNA, 120 bp, Artificial Sequence
  ENSG00000204371_9 (sequence is synthesized)
acggcgcaagcgggagcctccgcgggccaaggagccacgaggagtgaatggtgtgggctcctcaggccccagtgagtacatggaggtccctctggggtccctggagctgcccagcgaggg

SEQ ID NO: 741286 - DNA, 120 bp, Artificial Sequence
  ENSG00000204371_10 (sequence is synthesized)
gaccctctcccccaaccacgctggggtgtccaatgacacatcttcgctggagacagagcgagggtttgaggagttgcccctgtgcagctgccgcatggaggcacccaagattgaccgcat

SEQ ID NO: 741287 - DNA, 120 bp, Artificial Sequence
  ENSG00000204371_11 (sequence is synthesized)
cagcgagagggcggggcacaagtgcatggccactgagagtgtggacggagagctgtcaggctgcaatgccgccatcctcaagcgggagaccatgaggccatccagccgtgtggccctgat

SEQ ID NO: 741288 - DNA, 120 bp, Artificial Sequence
  ENSG00000204371_12 (sequence is synthesized)
ggtgctctgtgagacccaccgcgcccgcatggtcaaacaccactgctgcccgggctgcggctacttctgcacggcgggcaccttcctggagtgccaccctgacttccgtgtggcccaccg

SEQ ID NO: 741289 - DNA, 120 bp, Artificial Sequence
  ENSG00000204371_13 (sequence is synthesized)
cttccacaaggcctgtgtgtctcagctgaatgggatggtcttctgtccccactgtggggaggatgcttctgaagctcaagaggtgaccatcccccggggtgacggggtgaccccaccggc

SEQ ID NO: 741290 - DNA, 120 bp, Artificial Sequence
  ENSG00000204371_14 (sequence is synthesized)
cggcactgcagctcctgcacccccacccctgtcccaggatgtccccgggagagcagacacttctcagcccagtgcccggatgcgagggcatggggaaccccggcgcccgccctgcgatcc

SEQ ID NO: 741291 - DNA, 120 bp, Artificial Sequence
  ENSG00000204371_15 (sequence is synthesized)
cctggctgacaccattgacagctcagggccctccctgaccctgcccaatgggggctgcctttcagccgtggggctgccactggggccaggccgggaggccctggaaaaggccctggtcat

SEQ ID NO: 741292 - DNA, 120 bp, Artificial Sequence
  ENSG00000204371_16 (sequence is synthesized)
agtcagagaggcggaagaagctccgtttccaccctcggcagttgtacctgtccgtgaagcagggcgagctgcagaaggtgatcctgatgctgttggacaacctggaccccaacttccaga

SEQ ID NO: 741293 - DNA, 120 bp, Artificial Sequence
  ENSG00000204371_17 (sequence is synthesized)
gcgaccagcagagcaagcgcacgcccctgcatgcagccgcccagaagggctccgtggagatctgccatgtgctgctgcaggctggagccaacataaatgcagtggacaaacagcagcgga

SEQ ID NO: 741294 - DNA, 120 bp, Artificial Sequence
  ENSG00000204371_18 (sequence is synthesized)
cgccactgatggaggccgtggtgaacaaccacctggaggtagcccgttacatggtgcagcgtggtggctgtgtctatagcaaggaggaggacggttccacctgcctccaccacgcagcca

SEQ ID NO: 741295 - DNA, 120 bp, Artificial Sequence
  ENSG00000204371_19 (sequence is synthesized)
aaatcgggaacttggagatggtcagcctgctgctgagcacaggacaggtggacgtcaacgcccaggacagtggggggtggacgcccatcatctgggctgcagagcacaagcacatcgagg

SEQ ID NO: 741296 - DNA, 120 bp, Artificial Sequence
  ENSG00000204371_20 (sequence is synthesized)
tgatccgcatgctactgacgcggggcgccgacgtcaccctcactgacaacgaggagaacatctgcctgcactgggcctccttcacgggcagcgccgccatcgccgaagtccttctgaatg

SEQ ID NO: 741297 - DNA, 120 bp, Artificial Sequence
  ENSG00000204371_21 (sequence is synthesized)
cgcgctgtgacctccatgctgtcaactaccatggggacacccccctgcacatcgcagctcgggagagctaccatgactgcgtgctgttattcctgtcacgtggggccaaccctgagctgc

SEQ ID NO: 741298 - DNA, 120 bp, Artificial Sequence
  ENSG00000204371_22 (sequence is synthesized)
ggaacaaagagggggacacagcatgggacctgactcccgagcgctccgacgtgtggtttgcgcttcaactcaaccgcaagctccgacttggggtgggaaatcgggccatccgcacagaga

SEQ ID NO: 741299 - DNA, 120 bp, Artificial Sequence
  ENSG00000204371_23 (sequence is synthesized)
agatcatctgccgggacgtggctcggggctatgagaacgtgcccattccctgtgtcaacggtgtggatggggagccctgccctgaggattacaagtacatctcagagaactgcgagacgt

SEQ ID NO: 741300 - DNA, 120 bp, Artificial Sequence
  ENSG00000204371_24 (sequence is synthesized)
ccaccatgaacatcgatcgcaacatcacccacctgcagcactgcacgtgtgtggacgactgctctagctccaactgcctgtgcggccagctcagcatccggtgctggtatgacaaggatg

SEQ ID NO: 741301 - DNA, 120 bp, Artificial Sequence
  ENSG00000204371_25 (sequence is synthesized)
ggcgattgctccaggaatttaacaagattgagcctccgctgattttcgagtgtaaccaggcgtgctcatgctggagaaactgcaagaaccgggtcgtacagagtggcatcaaggtgcggc

SEQ ID NO: 741302 - DNA, 120 bp, Artificial Sequence
  ENSG00000204371_26 (sequence is synthesized)
tacagctctaccgaacagccaagatgggctggggggtccgcgccctgcagaccatcccacaggggaccttcatctgcgagtatgtcggggagctgatctctgatgctgaggctgatgtga

SEQ ID NO: 741303 - DNA, 120 bp, Artificial Sequence
  ENSG00000204371_27 (sequence is synthesized)
gagaggatgattcttacctcttcgacttagacaacaaggatggagaggtgtactgcatagatgcccgttactatggcaacatcagccgcttcatcaaccacctgtgtgaccccaacatca

SEQ ID NO: 741304 - DNA, 120 bp, Artificial Sequence
  ENSG00000204371_28 (sequence is synthesized)
ttcccgtccgggtcttcatgctgcaccaagacctgcgatttccacgcatcgccttcttcagttcccgagacatccggactggggaggagctagggtttgactatggcgaccgcttctggg

SEQ ID NO: 741305 - DNA, 120 bp, Artificial Sequence
  ENSG00000204371_29 (sequence is synthesized)
acatcaaaagcaaatatttcacctgccaatgtggctctgagaagtgcaagcactcagccgaagccattgccctggagcagagccgtctggcccgcctggacccacaccctgagctgctgc

SEQ ID NO: 741306 - DNA, 120 bp, Artificial Sequence
  ENSG00000204371_30 (sequence is synthesized)
ccgagctcggctccctgccccctgtcaacacatgagaacggaccacaccctctctccccagcatggatggccacagctcagccgcctcctctgccaccagctgctcgcagcccatgcctg

SEQ ID NO: 741307 - DNA, 120 bp, Artificial Sequence
  ENSG00000204371_31 (sequence is synthesized)
ggggtgctgccatcttctctccccaccaccctttcacacattcctgaccagagatcccagccaggccctggaggtctgacagcccctccctcccagagctggttcctccctgggagggca

SEQ ID NO: 741308 - DNA, 120 bp, Artificial Sequence
  ENSG00000204371_32 (sequence is synthesized)
acttcagggctggccaccccccgtgttccccatcctcagttgaagtttgatgaattgaagtcgggcctctatgccaactggttccttttgttctcaataaatgttgggtttggtaataaa

SEQ ID NO: 741309 - DNA, 120 bp, Artificial Sequence
  ENSG00000204371_33 (sequence is synthesized)
ctcttctctcggccccagagatgcggggtctaccgagagggagggggttgatgcgggcccgggggaggggtcgtgcggcccctccgggcagccgaggccgcggaaggggggggccccaca

SEQ ID NO: 741310 - DNA, 120 bp, Artificial Sequence
  ENSG00000204371_34 (sequence is synthesized)
gaggaagaggtaggccccggagcctactctctcttcccagggcccaggcatcctggaccccccaactctctactgggctgaccagccctcctgtcccttgtctcccctcccagggggagg

SEQ ID NO: 741311 - DNA, 120 bp, Artificial Sequence
  ENSG00000204371_35 (sequence is synthesized)
tttctcttcattcttttctttctcgtttctttctctttatcaagtttcagaataatcagttcctgtcttaatctctgaaagtgtccagtgaggctttttattaactcttgggttgtcata

SEQ ID NO: 741312 - DNA, 120 bp, Artificial Sequence
  ENSG00000204371_36 (sequence is synthesized)
cattggatgtgttttagtcatttattggcattcttctcagtctttgaattattccatcattgtccagaagaagcccctttaagaggcctctgtggctgtgacatgacccagtggcccagt

SEQ ID NO: 741313 - DNA, 120 bp, Artificial Sequence
  ENSG00000204371_37 (sequence is synthesized)
ggcctttgagagcctcctgacctttcagcacatttcctgcccccaactcagaatccaccatttctctaagaaactctgcttcctttatgggaaacttttttttttttttttgagacggag

SEQ ID NO: 741314 - DNA, 69 bp, Artificial Sequence
  ENSG00000204371_38 (sequence is synthesized)
gccacagcgcccggccagaagcattttttagagaatacaatctatgttcctaggagtgtttattgttat

SEQ ID NO: 741315 - DNA, 120 bp, Artificial Sequence
  ENSG00000204371_39 (sequence is synthesized)
agagaatacaatctatgttcctaggagtgtttattgttattgggttgtcgctgcttctaggacttttgagtgggcagacttaggaaatttttgttcgttttttcttttaagagacagggt

SEQ ID NO: 741316 - DNA, 120 bp, Artificial Sequence
  ENSG00000204371_40 (sequence is synthesized)
cttgctatgtcacccaggctgaagtacagtagcagttcacagacagtcatagctctctgcagcctcgaaatcctgggctcaagcaaccctcccatctcagtcacatgagtagctgggact

SEQ ID NO: 741317 - DNA, 120 bp, Artificial Sequence
  ENSG00000204371_41 (sequence is synthesized)
acaggcatgcacctccatgaccagctcctggctgtattttttggaaagagaacaattactttattttctctctggcatcagatggtagacgctactagtcccatttttgtttgtttgttt

SEQ ID NO: 741318 - DNA, 120 bp, Artificial Sequence
  ENSG00000204371_42 (sequence is synthesized)
acaggcatgagccaccgcgcccgaccctactagtcccattttttagatgaagaaactgcgacccagagacgttaagtgacttacccagggtcccacagcttgtgaatggtggagctggga

SEQ ID NO: 741319 - DNA, 120 bp, Artificial Sequence
  ENSG00000204371_43 (sequence is synthesized)
aatggtggagctgggattcacacacacagccaatcttgaccatttgctgctttggtgagcagggccagctgcccccaccctcactcccttcccacccacaggacagtggggggtggacgc

SEQ ID NO: 741320 - DNA, 120 bp, Artificial Sequence
  ENSG00000204371_44 (sequence is synthesized)
gggagagctaccatgactgcgtgctgtgagcccctgccccgcccttgatgcccctgcccccacttcttgcagcctcagaccctgcattgggcatcctgtcccctcttcaggttattcctg

SEQ ID NO: 741321 - DNA, 120 bp, Artificial Sequence
  ENSG00000204371_45 (sequence is synthesized)
ggcgggctctccccgcagtggacaacctggaccccaacttccagagcgaccagcagagcaagcgcacgcccctgcatgcagccgcccagaagggctccgtggagatctgccatgtgctgc

SEQ ID NO: 741322 - DNA, 120 bp, Artificial Sequence
  ENSG00000204371_46 (sequence is synthesized)
tgcaggtcagcacgggcccggccccatgcctcattcaccaggcccttaggcccctcccctgccccatgcctccctggtgccagccctcctgccccctcacaggctggagccaacataaat

SEQ ID NO: 741323 - DNA, 120 bp, Artificial Sequence
  ENSG00000204371_47 (sequence is synthesized)
gatgggagagatgggataatcaaccataaacctttggtgagctcttttacagtttcacttaaggcttctactccatttactcattcacatatttaagcaaggggctgctgtgtgtcaaat

SEQ ID NO: 741324 - DNA, 120 bp, Artificial Sequence
  ENSG00000204371_48 (sequence is synthesized)
gatctgtgaaccaacagacaggttcctctcttcctgcagtttacattcttgggtggtgaaagtttgatgttaaagagtcaattatatagttaatgtcttaattactcttatgataatgac

SEQ ID NO: 741325 - DNA, 120 bp, Artificial Sequence
  ENSG00000204371_49 (sequence is synthesized)
aaggtaagggaatttcaaaccactcttcctttctacctcaaagcaagcccttggggaactcatctgtcactgctctatttgtaaagtttttcctgggaatcccagtgggaaaggagatga

SEQ ID NO: 741326 - DNA, 120 bp, Artificial Sequence
  ENSG00000204371_50 (sequence is synthesized)
gggccacagaaataatagaggagggaagtgacaagggcaccagaagctttatgaccaagttctagggttcttgggtcatacctattgttgacctaaaggaaaaaactgaggcaaacttaa

SEQ ID NO: 741327 - DNA, 120 bp, Artificial Sequence
  ENSG00000204371_51 (sequence is synthesized)
cattaagtaaagtatatttggtcaggttttgaggacagcctttaggagcaaagattcaagttgccgtgaaaatacactctgattagcagcagttataagtaggggtttttttgtttgttt

SEQ ID NO: 741328 - DNA, 88 bp, Artificial Sequence
  ENSG00000204371_52 (sequence is synthesized)
gcccaggctggtctcaaactgctgggcttcagcaatcttcctgccttgacctcgcaaccagcccacaagtaggtttttaaaggaaaag

SEQ ID NO: 741329 - DNA, 120 bp, Artificial Sequence
  ENSG00000204371_53 (sequence is synthesized)
accagcccacaagtaggtttttaaaggaaaagaagattggatgacgtgaagatattgaaaaaaaacaggctgactctgggcacactgcgtaggagttagccctgctctggaaggagccgc

SEQ ID NO: 741330 - DNA, 120 bp, Artificial Sequence
  ENSG00000204371_54 (sequence is synthesized)
agcataccaagaccccatctctaaaagaagtttaaaagaatgtttcaaaggccaggcccagtgactcacgcctgtaatcccgtactttctggggaggatcacttgacaccaggagttcaa

SEQ ID NO: 741331 - DNA, 120 bp, Artificial Sequence
  ENSG00000204371_55 (sequence is synthesized)
gaccagcctgggcaacatggcaagacctcttctctaccaaaaaaaaaaattaagaagacattagttaggcattgtgacatgtgcctgtaatcccagcttcccaggaagctgaggcaggag

SEQ ID NO: 741332 - DNA, 120 bp, Artificial Sequence
  ENSG00000204371_56 (sequence is synthesized)
ataaaaggtcttttaactttattaagctttgttttctcatctgtaaaatggaaaagggcctgctctgcatggttgcagagatgagtgagtgttagtgtgcttgacactcttcctctgagg

SEQ ID NO: 741333 - DNA, 120 bp, Artificial Sequence
  ENSG00000204371_57 (sequence is synthesized)
aaatagcacccgtggttgccagtttgtggctactggagcctcacatggcatttggaggtgtggctcactaccccacccccgcctggggctccaggctaacccaggcaaaactgtaggtgc

SEQ ID NO: 741334 - DNA, 120 bp, Artificial Sequence
  ENSG00000204379_0 (sequence is synthesized)
cccatcggccccttcgccagtgtggggaacgcggcggagctgtgagccggcgactcgggtccctgaggtctggattctttctccgctactgagacacggcggacacacacaaacacagaa

SEQ ID NO: 741335 - DNA, 120 bp, Artificial Sequence
  ENSG00000204379_1 (sequence is synthesized)
ccacacagccagtcccaggagcccagtaatggagagccccaaaaagaagaaccagcagctgaaagtcgggatcctacacctgggcagcagacagaagaagatcaggatacagctgagatc

SEQ ID NO: 741336 - DNA, 120 bp, Artificial Sequence
  ENSG00000204379_2 (sequence is synthesized)
agtgcgcgacatggaaggtgatctgcaagagctgcatcagtcaaacaccggggataaatctggatttgggttccggcgtcaaggtgaagataatacctaaagaggaacactgtaaaatgc

SEQ ID NO: 741337 - DNA, 120 bp, Artificial Sequence
  ENSG00000204379_3 (sequence is synthesized)
cagaagcaggtgaagagcaaccacaagtttaaatgaagacaagctgaaacaacgcaagctggttttatattagatatttgacttaaactatctcaataaagttttgcagctttcaccaaa

SEQ ID NO: 741338 - DNA, 120 bp, Artificial Sequence
  ENSG00000204379_4 (sequence is synthesized)
ctggattctttctccgctactgagacacggcgggtaggtccacaggcagatccaactgggagttgaagtgtgagtgagagtgaagaggaaccagcaggcttccggagggttgtgtggtca

SEQ ID NO: 741339 - DNA, 120 bp, Artificial Sequence
  ENSG00000204379_5 (sequence is synthesized)
gtgactcagagtgagaaggccctcgaagtcgtcgtccctctcatgcggtgccacgcccatggaccttcttgtctcgtcacggccataactagggaggaaggagggccgaggagtggaggg

SEQ ID NO: 741340 - DNA, 120 bp, Artificial Sequence
  ENSG00000204379_6 (sequence is synthesized)
gctcaggcgaagctggggtgctgttgggggtatccgagtcccagaagcacctggaaccccgacagaagattctggactccccagacgggaccaggagagggacggcatgagcgacacaca

SEQ ID NO: 741341 - DNA, 120 bp, Artificial Sequence
  ENSG00000204381_0 (sequence is synthesized)
aaacgcgggatctcccagggaagctcggagggggacagggagctggttcccctctgcgactcgcccctctctggctggccgagtgtctggcgccaacctcgctggaggaggctgtcgggg

SEQ ID NO: 741342 - DNA, 120 bp, Artificial Sequence
  ENSG00000204381_1 (sequence is synthesized)
gcgggccagccagcggggctgccctcctcgcagtgacgtcccagggggcggaggggcgaccgactgactccgcgccctcccccccgcctcccgtgcggtccgtcggtggcctagagatgc

SEQ ID NO: 741343 - DNA, 120 bp, Artificial Sequence
  ENSG00000204381_2 (sequence is synthesized)
tgctgccgcggttgcagttgtcgcgcacgcctctgcccgccagcccgctccaccgccgtagcgcccgagtgtcggggggcgcacccgagtcgggccatgaggccgggaaccgcgctacag

SEQ ID NO: 741344 - DNA, 120 bp, Artificial Sequence
  ENSG00000204381_3 (sequence is synthesized)
gccgtgctgctggccgtgctgctggtggggctgcgggccgcgacgggtcgcctgctgagtgggcagccagtctgccggggagggacacagaggccttgttataaagtcatttacttccat

SEQ ID NO: 741345 - DNA, 120 bp, Artificial Sequence
  ENSG00000204381_4 (sequence is synthesized)
gatacttctcgaagactgaactttgaggaagccaaagaagcctgcaggagggatggaggccagctagtcagcatcgagtctgaagatgaacagaaactgatagaaaagttcattgaaaac

SEQ ID NO: 741346 - DNA, 120 bp, Artificial Sequence
  ENSG00000204381_5 (sequence is synthesized)
ctcttgccatctgatggtgacttctggattgggctcaggaggcgtgaggagaaacaaagcaatagcacagcctgccaggacctttatgcttggactgatggcagcatatcacaatttagg

SEQ ID NO: 741347 - DNA, 120 bp, Artificial Sequence
  ENSG00000204381_6 (sequence is synthesized)
aactggtatgtggatgagccatcctgcggcagcgaggtctgcgtggtcatgtaccatcagccatcggcacccgctggcatcggaggcccctacatgttccagtggaatgatgaccggtgc

SEQ ID NO: 741348 - DNA, 120 bp, Artificial Sequence
  ENSG00000204381_7 (sequence is synthesized)
aacatgaagaacaatttcatttgcaaatattctgatgagaaaccagcagttccttctagagaagctgaaggtgaggaaacagagctgacaacacctgtacttccagaagaaacacaggaa

SEQ ID NO: 741349 - DNA, 120 bp, Artificial Sequence
  ENSG00000204381_8 (sequence is synthesized)
aagtagagaagctgccttgaatctggcctacatcctaatccccagcattccccttctcctcctccttgtggtcaccacagttgtatgttgggtttggatctgtagaaaaagaaaacggga

SEQ ID NO: 741350 - DNA, 120 bp, Artificial Sequence
  ENSG00000204381_9 (sequence is synthesized)
gcagccagaccctagcacaaagaagcaacacaccatctggccctctcctcaccagggaaacagcccggacctagaggtctacaatgtcataagaaaacaaagcgaagctgacttagctga

SEQ ID NO: 741351 - DNA, 120 bp, Artificial Sequence
  ENSG00000204381_10 (sequence is synthesized)
gacccggccagacctgaagaatatttcattccgagtgtgttcgggagaagccactcccgatgacatgtcttgtgactatgacaacatggctgtgaacccatcagaaagtgggtttgtgac

SEQ ID NO: 741352 - DNA, 120 bp, Artificial Sequence
  ENSG00000204381_11 (sequence is synthesized)
tctggtgagcgtggagagtggatttgtgaccaatgacatttatgagttctccccagaccaaatggggaggagtaaggagtctggatgggtggaaaatgaaatatatggttattaggacat

SEQ ID NO: 741353 - DNA, 120 bp, Artificial Sequence
  ENSG00000204381_12 (sequence is synthesized)
ataaaaaactgaaactgacaacaatggaaaagaaatgataagcaaaatcctcttattttctataaggaaaatacacagaaggtctatgaacaagcttagatcaggtcctgtggatgagca

SEQ ID NO: 741354 - DNA, 120 bp, Artificial Sequence
  ENSG00000204381_13 (sequence is synthesized)
tgtggtccccacgacctcctgttggacccccacgttttggctgtatcctttatcccagccagtcatccagctcgaccttatgagaaggtaccttgcccaggtctggcacatagtagagtc

SEQ ID NO: 741355 - DNA, 120 bp, Artificial Sequence
  ENSG00000204381_14 (sequence is synthesized)
tcaataaatgtcacttggttggttgtatctaacttttaagggacagagctttacctggcagtgataaagatgggctgtggagcttggaaaaccacctctgttttccttgctctatacagc

SEQ ID NO: 741356 - DNA, 120 bp, Artificial Sequence
  ENSG00000204381_15 (sequence is synthesized)
agcacatattatcatacagacagaaaatccagaatcttttcaaagcccacatatggtagcacaggctggcctgtgcatcggcaattctcatatctgtttttttcaaagaataataaaatc

SEQ ID NO: 741357 - DNA, 120 bp, Artificial Sequence
  ENSG00000204381_16 (sequence is synthesized)
aaataaagagcaggaaacagagtgttagtctgtgtctacagcccttcctctgcatgtggccacaggggacctttttttgtttctcctgacatccagacttggaaatatctaactacttgc

SEQ ID NO: 741358 - DNA, 120 bp, Artificial Sequence
  ENSG00000204381_17 (sequence is synthesized)
tcaggagttccagaccttcctgggcaaaatagtgagactctgactctacaaaaaatttaaaaattagcagggcatggtggcatgcgcctgcagtcccagctactcaggaggccgaggtgg

SEQ ID NO: 741359 - DNA, 120 bp, Artificial Sequence
  ENSG00000204381_18 (sequence is synthesized)
cagtgagctaggatcacgccactgctctcctgcgtgggcaacagaatgagaccctgtctctaaacaaaaatattttttaaagaaactaaaaatgaaatttgagtctcagcttctaggctt

SEQ ID NO: 741360 - DNA, 120 bp, Artificial Sequence
  ENSG00000204381_19 (sequence is synthesized)
atgtactcccatccctgatactacacgttgttctgtttgcatgtttgttactgcagcatcaacataacatgactaataatgatgacagttctaccttttgttgacagacctcattgtttc

SEQ ID NO: 741361 - DNA, 120 bp, Artificial Sequence
  ENSG00000204381_20 (sequence is synthesized)
cgctccgggaggcggccgcagagacagcggggtagggatgctggatccccggtgccgtgggaaccctgcctgttactcctcgtctcttctgcggggttggatggctgggtcgagcgcccg

SEQ ID NO: 741362 - DNA, 120 bp, Artificial Sequence
  ENSG00000204381_21 (sequence is synthesized)
gtatgagagcgcttagagatcgggaaagaactccagttagtgtgggacgagccccacctgactccggggaatgactctctgcttccttcctcctgttgtgtcactgcagcctcggatttg

SEQ ID NO: 741363 - DNA, 120 bp, Artificial Sequence
  ENSG00000204381_22 (sequence is synthesized)
aatcaccagcaatttccctcaatcagcttcataatctcatattttaacctttcctcatatgtcttattttttaatagctcagcaactttgcttcacatatggagccccaacctctagagt

SEQ ID NO: 741364 - DNA, 120 bp, Artificial Sequence
  ENSG00000204381_23 (sequence is synthesized)
acatgaagaacaatttcatttgcaaatattctgatgtccaatcagagaccaaagaacaagggaacaaggaagccccattgaaacagtttatagacctcaacctcccaaggcacagaggac

SEQ ID NO: 741365 - DNA, 120 bp, Artificial Sequence
  ENSG00000204382_0 (sequence is synthesized)
ggacctgggaaggagcataggacagggcaaggcgggataaggaggggcaccacagcccttaaggcacgagggaacctcactgcgcatgctcctttggtgcccacctcagtgcgcatgttc

SEQ ID NO: 741366 - DNA, 120 bp, Artificial Sequence
  ENSG00000204382_1 (sequence is synthesized)
actgggcgtcttcccatcggccccttcgccagtgtggggaacgcggcggagctgtgagccggcgactcgggtccctgaggtctggattctttctccgctactgagacacggcggacacac

SEQ ID NO: 741367 - DNA, 120 bp, Artificial Sequence
  ENSG00000204382_2 (sequence is synthesized)
acacagccagtcccaggagcccagtaatggagagccccaaaaagaagaaccagcagctgaaagtcgggatcctacacctgggcagcagacagaagaagatcaggatacagctgagatccc

SEQ ID NO: 741368 - DNA, 120 bp, Artificial Sequence; identical to SEQ ID NO: 741336
  ENSG00000204382_3 (sequence is synthesized)

SEQ ID NO: 741369 - DNA, 120 bp, Artificial Sequence; identical to SEQ ID NO: 741337
  ENSG00000204382_4 (sequence is synthesized)

SEQ ID NO: 741370 - DNA, 120 bp, Artificial Sequence; identical to SEQ ID NO: 741338
  ENSG00000204382_5 (sequence is synthesized)

SEQ ID NO: 741371 - DNA, 120 bp, Artificial Sequence; identical to SEQ ID NO: 741339
  ENSG00000204382_6 (sequence is synthesized)

SEQ ID NO: 741372 - DNA, 120 bp, Artificial Sequence; identical to SEQ ID NO: 741340
  ENSG00000204382_7 (sequence is synthesized)

SEQ ID NO: 741373 - DNA, 120 bp, Artificial Sequence
  ENSG00000204382_8 (sequence is synthesized)
atggggcgggagaaggtctatgtgtgcattgtggcctatgccatgagcagtaacaggagcaaagagaacattaggaaaagataccaaacatttgctcaaagttggctggaaaagggagag

SEQ ID NO: 741374 - DNA, 120 bp, Artificial Sequence
  ENSG00000204382_9 (sequence is synthesized)
tatagtttgcagcttcatgctgtccctggatataatgaatcttctcttgttcttcgagatggattttgtatgcttgaaaatacagtccttactaaatcacttgaaaccatttaatttggt

SEQ ID NO: 741375 - DNA, 120 bp, Artificial Sequence
  ENSG00000204385_0 (sequence is synthesized)
actccggagactgagccatggggggaaagcagcgggacgaggatgacgaggcctacgggaagccagtcaaatacgacccctcctttcgaggccccatcaagaacagaagctgcacagatg

SEQ ID NO: 741376 - DNA, 120 bp, Artificial Sequence
  ENSG00000204385_1 (sequence is synthesized)
tcatctgctgcgtcctcttcctgctcttcattctaggttacatcgtggtggggattgtggcctggttgtatggagacccccggcaagtcctctaccccaggaactctactggggcctact

SEQ ID NO: 741377 - DNA, 120 bp, Artificial Sequence
  ENSG00000204385_2 (sequence is synthesized)
gtggcatgggggagaacaaagataagccgtatctcctgtacttcaacatcttcagctgcatcctgtccagcaacatcatctcagttgctgagaacggcctacagtgccccacaccccagg

SEQ ID NO: 741378 - DNA, 120 bp, Artificial Sequence
  ENSG00000204385_3 (sequence is synthesized)
tgtgtgtgtcctcctgcccggaggacccatggactgtgggaaaaaacgagttctcacagactgttggggaagtcttctatacaaaaaacaggaacttttgtctgccaggggtaccctgga

SEQ ID NO: 741379 - DNA, 120 bp, Artificial Sequence
  ENSG00000204385_4 (sequence is synthesized)
atatgacggtgatcacaagcctgcaacaggaactctgccccagtttcctcctcccctctgctccagctctggggcgctgctttccatggaccaacgttactccaccggcgctcccaggga

SEQ ID NO: 741380 - DNA, 120 bp, Artificial Sequence
  ENSG00000204385_5 (sequence is synthesized)
tcaccaatgacaccaccatacagcaggggatcagcggtcttattgacagcctcaatgcccgagacatcagtgttaagatctttgaagattttgcccagtcctggtattggattcttgttg

SEQ ID NO: 741381 - DNA, 120 bp, Artificial Sequence
  ENSG00000204385_6 (sequence is synthesized)
ccctgggggtggctctggtcttgagcctactgtttatcttgcttctgcgcctggtggctgggcccctggtgctggtgctgatcctgggagtgctgggcgtgctggcatacggcatctact

SEQ ID NO: 741382 - DNA, 120 bp, Artificial Sequence
  ENSG00000204385_7 (sequence is synthesized)
actgctgggaggagtaccgagtgctgcgggacaagggcgcctccatctcccagctgggtttcaccaccaacctcagtgcctaccagagcgtgcaggagacctggctggccgccctgatcg

SEQ ID NO: 741383 - DNA, 120 bp, Artificial Sequence
  ENSG00000204385_8 (sequence is synthesized)
tgttggcggtgcttgaagccatcctgctgctgatgctcatcttcctgcggcagcggattcgtattgccatcgccctcctgaaggaggccagcaaggctgtgggacagatgatgtctacca

SEQ ID NO: 741384 - DNA, 120 bp, Artificial Sequence
  ENSG00000204385_9 (sequence is synthesized)
tgttctacccactggtcacctttgtcctcctcctcatctgcattgcctactgggccatgactgctctgtacctggctacatcggggcaaccccagtatgtgctctgggcatccaacatca

SEQ ID NO: 741385 - DNA, 120 bp, Artificial Sequence
  ENSG00000204385_10 (sequence is synthesized)
tcctcgtgcccagggctgatgtgcgtcttccagggctactcatccaaaggcctaatccaacgttctgtcttcaatctgcaaatctatggggtcctggggctcttctggacccttaactgg

SEQ ID NO: 741386 - DNA, 120 bp, Artificial Sequence
  ENSG00000204385_11 (sequence is synthesized)
gtactggccctgggccaatgcgtcctcgctggagcctttgcctccttctactgggccttccacaagccccaggacatccctaccttccccttaatctctgccttcatccgcacactccgt

SEQ ID NO: 741387 - DNA, 120 bp, Artificial Sequence
  ENSG00000204385_12 (sequence is synthesized)
taccacactgggtcattggcatttggagccctcatcctgacccttgtgcagatagcccgggtcatcttggagtatattgaccacaagctcagaggagtgcagaaccctgtagcccgctgc

SEQ ID NO: 741388 - DNA, 120 bp, Artificial Sequence
  ENSG00000204385_13 (sequence is synthesized)
atcatgtgctgtttcaagtgctgcctctggtgtctggaaaaatttatcaagttcctaaaccgcaatgcatacatcatgatcgccatctacgggaagaatttctgtgtctcagccaaaaat

SEQ ID NO: 741389 - DNA, 120 bp, Artificial Sequence
  ENSG00000204385_14 (sequence is synthesized)
gcgttcatgctactcatgcgaaacattgtcagggtggtcgtcctggacaaagtcacagacctgctgctgttctttgggaagctgctggtggtcggaggcgtgggggtcctgtccttcttt

SEQ ID NO: 741390 - DNA, 120 bp, Artificial Sequence
  ENSG00000204385_15 (sequence is synthesized)
tttttctccggtcgcatcccggggctgggtaaagactttaagagcccccacctcaactattactggctgcccatcatgacctccatcctgggggcctatgtcatcgccagcggcttcttc

SEQ ID NO: 741391 - DNA, 120 bp, Artificial Sequence
  ENSG00000204385_16 (sequence is synthesized)
agcgttttcggcatgtgtgtggacacgctcttcctctgcttcctggaagacctggagcggaacaacggctccctggaccggccctactacatgtccaagagccttctaaagattctgggc

SEQ ID NO: 741392 - DNA, 120 bp, Artificial Sequence
  ENSG00000204385_17 (sequence is synthesized)
aagaagaacgaggcgcccccggacaacaagaagaggaagaagtgacagctccggccctgatccaggactgcaccccacccccaccgtccagccatccaacctcacttcgccttacaggtc

SEQ ID NO: 741393 - DNA, 88 bp, Artificial Sequence
  ENSG00000204385_18 (sequence is synthesized)
ccaccgtccagccatccaacctcacttcgccttacaggtctccattttgtggtaaaaaaaggttttaacactttgagaggctgaggcg

SEQ ID NO: 741394 - DNA, 120 bp, Artificial Sequence
  ENSG00000204385_19 (sequence is synthesized)
agctccgaatggattccaagaccaacaggatttataagggaaagaggcctaatctggggacattgggtggtgtgtggaaaggcagggagggcctctgtaaggggaaagatttgaggggct

SEQ ID NO: 741395 - DNA, 120 bp, Artificial Sequence
  ENSG00000204385_20 (sequence is synthesized)
gatcatcaccaggttggctctcctggggagtgtgggacaggctgagccccatggtggtggtgaggggacctgcttcttcatcctgctctgtgtctgtgtgtctgtcctttcactcctgcc

SEQ ID NO: 741396 - DNA, 120 bp, Artificial Sequence
  ENSG00000204385_21 (sequence is synthesized)
gtgtgtggacacgctcttcctctgcttccgtgagtgacacccccagccacctgtccccaaccttaaagtactgagccgttcaagcatttttttttttttttggagatttggtgcttctag

SEQ ID NO: 741397 - DNA, 120 bp, Artificial Sequence
  ENSG00000204385_22 (sequence is synthesized)
actgaggtcccaccagagtgaggatgtacagggccgcttccctccccaggccctgctggggttgacacctttgtctccagtttctttccccatagccttgaaccagaggggaagccagtc

SEQ ID NO: 741398 - DNA, 120 bp, Artificial Sequence
  ENSG00000204386_0 (sequence is synthesized)
ctctgtggagtctagctgccagggtcgcggcagctgcggggagagatgactggggagcgacccagcacggcgctcccggacagacgctgggggccgcggattctgggcttctggggaggc

SEQ ID NO: 741399 - DNA, 120 bp, Artificial Sequence
  ENSG00000204386_1 (sequence is synthesized)
tgtagggtttgggtgtttgccgcgatcttcctgctgctgtctctggcagcctcctggtccaaggctgagaacgacttcggtctggtgcagccgctggtgaccatggagcaactgctgtgg

SEQ ID NO: 741400 - DNA, 120 bp, Artificial Sequence
  ENSG00000204386_2 (sequence is synthesized)
gtgagcgggagacagatcggctcagtggacaccttccgcatcccgctcatcacagccactccgcggggcactcttctcgcctttgctgaggcgaggaaaatgtcctcatccgatgagggg

SEQ ID NO: 741401 - DNA, 120 bp, Artificial Sequence
  ENSG00000204386_3 (sequence is synthesized)
gccaagttcatcgccctgcggaggtccatggaccagggcagcacatggtctcctacagcgttcattgtcaatgatggggatgtccccgatgggctgaaccttggggcagtagtgagcgat

SEQ ID NO: 741402 - DNA, 120 bp, Artificial Sequence
  ENSG00000204386_4 (sequence is synthesized)
gttgagacaggagtagtatttcttttctactccctttgtgctcacaaggccggctgccaggtggcctctaccatgttggtatggagcaaggatgatggtgtttcctggagcacaccccgg

SEQ ID NO: 741403 - DNA, 120 bp, Artificial Sequence
  ENSG00000204386_5 (sequence is synthesized)
aatctctccctggatattggcactgaagtgtttgcccctggaccgggctctggtattcagaaacagcgggagccacggaagggccgcctcatcgtgtgtggccatgggacgctggagcgg

SEQ ID NO: 741404 - DNA, 120 bp, Artificial Sequence
  ENSG00000204386_6 (sequence is synthesized)
gacggagtcttctgtctcctcagcgatgatcatggtgcctcctggcgctacggaagtggggtcagcggcatcccctacggtcagcccaagcaggaaaatgatttcaatcctgatgaatgc

SEQ ID NO: 741405 - DNA, 120 bp, Artificial Sequence
  ENSG00000204386_7 (sequence is synthesized)
cagccctatgagctcccagatggctcagtcgtcatcaatgcccgaaaccagaacaactaccactgccactgccgaattgtcctccgcagctatgatgcctgtgatacactaaggccccgt

SEQ ID NO: 741406 - DNA, 120 bp, Artificial Sequence
  ENSG00000204386_8 (sequence is synthesized)
gatgtgaccttcgaccctgagctcgtggaccctgtggtagctgcaggagctgtagtcaccagctccggcattgtcttcttctccaacccagcacatccagagttccgagtgaacctgacc

SEQ ID NO: 741407 - DNA, 120 bp, Artificial Sequence
  ENSG00000204386_9 (sequence is synthesized)
ctgcgatggagcttcagcaatggtacctcatggcggaaagagacagtccagctatggccaggccccagtggctattcatccctggcaaccctggagggcagcatggatggagaggagcag

SEQ ID NO: 741408 - DNA, 120 bp, Artificial Sequence
  ENSG00000204386_10 (sequence is synthesized)
gccccccagctctacgtcctgtatgagaaaggccggaaccactacacagagagcatctccgtggccaaaatcagtgtctatgggacactctgagctgtgccactgccacaggggtattct

SEQ ID NO: 741409 - DNA, 120 bp, Artificial Sequence
  ENSG00000204386_11 (sequence is synthesized)
gccttcaggactctgccttcaggaacacgggtctgtagagggtctgctggagacgcctgaaagacagttccatcttcctttagactccagccttggcaaaatcaccttccctttaccagg

SEQ ID NO: 741410 - DNA, 120 bp, Artificial Sequence
  ENSG00000204386_12 (sequence is synthesized)
gaaatcacttcctttaggactgaaagctaggcgtcctctcccacaaaaaagtcctgccctcatctgagaatactgtctttccatatggctaagtgtggccccaccaccctctctgccctc

SEQ ID NO: 741411 - DNA, 120 bp, Artificial Sequence
  ENSG00000204386_13 (sequence is synthesized)
taaccgacagggctggtgaaagtccccagatggcaggatatttggtttcagagtaaggactaggtgcaccaccatgactgactatcaatcaaaatgtttgtaacttaaaatttttaatga

SEQ ID NO: 741412 - DNA, 120 bp, Artificial Sequence
  ENSG00000204386_14 (sequence is synthesized)
aggataatgaatatttgtagagtctctatggttctgtcaatgcacatcttcgtgtctgttttcctcatgtatccttgtgagcctgggtgagttctggggagagacctgatgtgcgtactg

SEQ ID NO: 741413 - DNA, 120 bp, Artificial Sequence
  ENSG00000204386_15 (sequence is synthesized)
actgcctgtgaaaatctgactttggcaaatcaaatcctcttttccttttgacatgccctctttttttgttgttgctttttttgagacagggctcgctctgtcacccaggctggagtgcag

SEQ ID NO: 741414 - DNA, 90 bp, Artificial Sequence
  ENSG00000204386_16 (sequence is synthesized)
gtgatcctcacgttcagtgacaccatgcctggttaatttttttaatttttattttcagtagagacaaggttgcgctatgttgcccaggct

SEQ ID NO: 741415 - DNA, 120 bp, Artificial Sequence
  ENSG00000204386_17 (sequence is synthesized)
attttcagtagagacaaggttgcgctatgttgcccaggctggtatggaactcctgtgcttaagcaatcctcatgcctcagcttcccaaagtgctgaggttacagctatgagccaccgcac

SEQ ID NO: 741416 - DNA, 120 bp, Artificial Sequence
  ENSG00000204386_18 (sequence is synthesized)
gagccaccgcacccagcctacattccttcttatcaccgagaaacaggttgatcttcacaggtgtaatgagtatgaagggagtgccataagatattttttattttttatttatttattttt

SEQ ID NO: 741417 - DNA, 120 bp, Artificial Sequence
  ENSG00000204386_19 (sequence is synthesized)
ctcggcctcccaaagtgttgtgattacaagcatgagccatggtgccggcgggctgatttttttaatttttagtagagacaaagtctcactatattgcctaggttggtctcaaactgctga

SEQ ID NO: 741418 - DNA, 88 bp, Artificial Sequence
  ENSG00000204386_20 (sequence is synthesized)
tgccggccatgttcctgcacccagcctgtaagatattttaaaatccacacttggccaagcgtggtggctcacacatataatcccagca

SEQ ID NO: 741419 - DNA, 120 bp, Artificial Sequence
  ENSG00000204386_21 (sequence is synthesized)
gtgagactccgtctgaaaaaaaaaaaatccacgctgttttatatttctaacatggggtaggataccatcctccatgaaatagggtgcaagtgtgtgaaatgcagatgggaatcctgtccc

SEQ ID NO: 741420 - DNA, 120 bp, Artificial Sequence
  ENSG00000204386_22 (sequence is synthesized)
agctagcctgacagagaagtgagcacttcctatggcaaattatgtaagaaaatattccccaggcagatgcttatgaaaagaatctgttcagcctgcaggtaagtgggagagcccttgctc

SEQ ID NO: 741421 - DNA, 120 bp, Artificial Sequence
  ENSG00000204386_23 (sequence is synthesized)
gagatgttccctacccatttgaccctccctgccctccagaacatcatttcacgcacagacccagggtctgactgctccactcagtgccacacacccttgctcccctcggggacagggcat

SEQ ID NO: 741422 - DNA, 120 bp, Artificial Sequence
  ENSG00000204386_24 (sequence is synthesized)
ccatggaccagggtataaagatgtctgggtgaaagagccggtgctaggttggatgggtgggcagcccaatgagcccaagggccctgaggataggggaacttagagggttggttgcctgag

SEQ ID NO: 741423 - DNA, 120 bp, Artificial Sequence
  ENSG00000204386_25 (sequence is synthesized)
tccctgaggggtagagggaacccgagaagggcaagtgtctaggacagtgatctggaaattgggatcaccaaggagttggacattcacttagcaaacatttattgggtactatatacctat

SEQ ID NO: 741424 - DNA, 120 bp, Artificial Sequence
  ENSG00000204386_26 (sequence is synthesized)
accaggcactattttaggtttcatgaatatagccacgaacaaaacagatcaaaaatctctgccctcaggatttaaattgtactggaaggagacagacaagcataataaacaagtaaactt

SEQ ID NO: 741425 - DNA, 120 bp, Artificial Sequence
  ENSG00000204386_27 (sequence is synthesized)
ttttgtctgttgcaaggtgataaatgcaatggagaaaaataaaacaggacaagaggtatagatagtgcaagtgttggattgcaccctgggaccatcggaaggcctgaggtccctagcaga

SEQ ID NO: 741426 - DNA, 120 bp, Artificial Sequence
  ENSG00000204386_28 (sequence is synthesized)
taggtggagggggctgccttgtggagagtctgagggatacccccaaatggactcctttccaaggggaagattctctgaagtcagattttctggcttgggtgggattccttgaaagacagg

SEQ ID NO: 741427 - DNA, 120 bp, Artificial Sequence
  ENSG00000204386_29 (sequence is synthesized)
gcatcctggtaggaacacattatcaggagaagagggaactctgccattggcttcccatttggcattgtcaacaggactgcgttagtccatgcaataccctcatgcaaagtagaaaaaggc

SEQ ID NO: 741428 - DNA, 120 bp, Artificial Sequence
  ENSG00000204386_30 (sequence is synthesized)
actgcctctttggacagacacaagcctgtgccagggtgcacagcttggcgagtgagcacaggttgggtttaagctctcatgcaccctgtggctgggcccctggtgcacatgtccagctgt

SEQ ID NO: 741429 - DNA, 120 bp, Artificial Sequence
  ENSG00000204386_31 (sequence is synthesized)
acaccctgggagagcttcttaattcaaacagggtgtgtatttatgggatctgactggaaccctcagtgagcaagggctgaactcaaggggaccatacatgtgattgcatttgggaagtgg

SEQ ID NO: 741430 - DNA, 120 bp, Artificial Sequence
  ENSG00000204386_32 (sequence is synthesized)
tgggttctctgtccctgcctctgagcccctagagtctccttctgtgacacccagttccctttcccacagaaacagcgggagccacggaagggccgcctcatcgtgtgtggccatgggacg

SEQ ID NO: 741431 - DNA, 120 bp, Artificial Sequence
  ENSG00000204387_0 (sequence is synthesized)
gcgaagtgggctcgtgggttggcagtatgagagttgtaatggcccgactgttgagtgagggggagcaggggatcccaacggcttgcgctgcctttgcgcagcagccggcgggcggccacg

SEQ ID NO: 741432 - DNA, 120 bp, Artificial Sequence
  ENSG00000204387_1 (sequence is synthesized)
tcgcggcctggctggggtaggagagggcggtccccagtgcagttgggtgaactaccgttgcacactggagtttctggtgtctttgcttggaactgacctagctcgtggcagggggaactc

SEQ ID NO: 741433 - DNA, 120 bp, Artificial Sequence
  ENSG00000204387_2 (sequence is synthesized)
ggctagcggccccacagcccctgctgactcaaaacaactgagttgtaagacgttcatcgccgtgttatccttgagtaaaggtgaaatgaactctggaagcccagccagggacaatgcacc

SEQ ID NO: 741434 - DNA, 120 bp, Artificial Sequence
  ENSG00000204387_3 (sequence is synthesized)
gaaggtctaaggtttggaatctccccctcatggagagaagctttgtatggctgtcatgcttagacagtgattcctgcaacttgaccttcaggctgggagaggtggagagccatgcctgtt

SEQ ID NO: 741435 - DNA, 120 bp, Artificial Sequence
  ENSG00000204387_4 (sequence is synthesized)
ctccttccttgctatggaatttgctgacacaatatcttccgcctggtgctgggcatatcctaagaacttacaactttcctgtattatcctgtgtgagcagctgtcaccttattgggggaa

SEQ ID NO: 741436 - DNA, 120 bp, Artificial Sequence
  ENSG00000204387_5 (sequence is synthesized)
aaatgcctgaaaattagggggcacttcaagtagatagcttctatttcctatatttgtcttatatacaagtatttgcttttatcaaaataattccaataaagcattttaaagtaaagaaga

SEQ ID NO: 741437 - DNA, 120 bp, Artificial Sequence
  ENSG00000204387_6 (sequence is synthesized)
tgagtgtgtcgctgatgccatcaccgcagcgctctgaccgccccctcggtccagcatttctcaggctcaacgagttcatggccaagattcctaatcttttgttctgtttcatttccccgt

SEQ ID NO: 741438 - DNA, 120 bp, Artificial Sequence
  ENSG00000204387_7 (sequence is synthesized)
tcctgcctcagtctcccaaagtgctggaattacagggaatgaactctggaagcccagccagggacaatgcaccttcacagagattctgcactaatctgagtgaaggtctaaggtttggaa

SEQ ID NO: 741439 - DNA, 120 bp, Artificial Sequence
  ENSG00000204387_8 (sequence is synthesized)
taaaggctgggtaacctgactcctcccctcatttctactgcaaaataggagtacactggggcctcccagtggagctgttctctgctgttttaaattactttctactcctccctttctaac

SEQ ID NO: 741440 - DNA, 120 bp, Artificial Sequence
  ENSG00000204387_9 (sequence is synthesized)
gtccactcctggactcatttgttagatcaatatatactgggactgttgtgttttctttgagtgtactagatctctttccagaagagcttcccttgatccagatctccctaattgggaatg

SEQ ID NO: 741441 - DNA, 120 bp, Artificial Sequence
  ENSG00000204387_10 (sequence is synthesized)
atgatttcacagactagagtctccgatgctggtcatgatgtcaaaactaagttctgactcatttagggaactggatacttgggtctccagaagggccaatgggagggccataattctgtt

SEQ ID NO: 741442 - DNA, 120 bp, Artificial Sequence
  ENSG00000204387_11 (sequence is synthesized)
gctgctgggaaacggcttaggagcagcacccggctggcgctggccggccggcgccggggactttcttccgcctggccagacagatccctgttttttgtttttcaaaattcagaaagcatc

SEQ ID NO: 741443 - DNA, 120 bp, Artificial Sequence
  ENSG00000204387_12 (sequence is synthesized)
tccgaatatttgcccagaggagtgtgaaacatactttcctggtctttctttcactttgttttatttctgtgtggacaaacaatggggaaaatgccgcgcgtctagccaggcagataagaa

SEQ ID NO: 741444 - DNA, 120 bp, Artificial Sequence
  ENSG00000204387_13 (sequence is synthesized)
gagtgtgaaacatactttcctggagttgtaagacgttcatcgccgtgttatccttgagtaaagaatgaactctggaagcccagccagggacaatgcaccttcacagagattctgcactaa

SEQ ID NO: 741445 - DNA, 120 bp, Artificial Sequence
  ENSG00000204387_14 (sequence is synthesized)
cagggctcaagtggtctttccacctcagcttcctgggactgcaggcacgtgctaccaccacgcctggctaatttttagtttttttacagaagcgggcttttgccatgttgtccaggctgg

SEQ ID NO: 741446 - DNA, 120 bp, Artificial Sequence
  ENSG00000204388_0 (sequence is synthesized)
aaacggccagcctgaggagctgctgcgagggtccgcttcgtctttcgagagtgactcccgcggtcccaaggctttccagagcgaacctgtgcggctgcaggcaccggcgtgttgagtttc

SEQ ID NO: 741447 - DNA, 120 bp, Artificial Sequence
  ENSG00000204388_1 (sequence is synthesized)
cggcgttccgaaggactgagctcttgtcgcggatcccgtccgccgtttccagcccccagtctcagagcggagcccacagagcagggcaccggcatggccaaagccgcggcgatcggcatc

SEQ ID NO: 741448 - DNA, 120 bp, Artificial Sequence
  ENSG00000204388_2 (sequence is synthesized)
gacctgggcaccacctactcctgcgtgggggtgttccaacacggcaaggtggagatcatcgccaacgaccagggcaaccgcaccacccccagctacgtggccttcacggacaccgagcgg

SEQ ID NO: 741449 - DNA, 120 bp, Artificial Sequence
  ENSG00000204388_3 (sequence is synthesized)
ctcatcggggatgcggccaagaaccaggtggcgctgaacccgcagaacaccgtgtttgacgcgaagcggctgattggccgcaagttcggcgacccggtggtgcagtcggacatgaagcac

SEQ ID NO: 741450 - DNA, 120 bp, Artificial Sequence
  ENSG00000204388_4 (sequence is synthesized)
tggcctttccaggtgatcaacgacggagacaagcccaaggtgcaggtgagctacaagggggagaccaaggcattctaccccgaggagatctcgtccatggtgctgaccaagatgaaggag

SEQ ID NO: 741451 - DNA, 120 bp, Artificial Sequence
  ENSG00000204388_5 (sequence is synthesized)
atcgccgaggcgtacctgggctacccggtgaccaacgcggtgatcaccgtgccggcctacttcaacgactcgcagcgccaggccaccaaggatgcgggtgtgatcgcggggctcaacgtg

SEQ ID NO: 741452 - DNA, 120 bp, Artificial Sequence
  ENSG00000204388_6 (sequence is synthesized)
ctgcggatcatcaacgagcccacggccgccgccatcgcctacggcctggacagaacgggcaagggggagcgcaacgtgctcatctttgacctgggcgggggcaccttcgacgtgtccatc

SEQ ID NO: 741453 - DNA, 120 bp, Artificial Sequence
  ENSG00000204388_7 (sequence is synthesized)
ctgacgatcgacgacggcatcttcgaggtgaaggccacggccggggacacccacctgggtggggaggactttgacaacaggctggtgaaccacttcgtggaggagttcaagagaaaacac

SEQ ID NO: 741454 - DNA, 120 bp, Artificial Sequence
  ENSG00000204388_8 (sequence is synthesized)
aagaaggacatcagccagaacaagcgagccgtgaggcggctgcgcaccgcctgcgagagggccaagaggaccctgtcgtccagcacccaggccagcctggagatcgactccctgtttgag

SEQ ID NO: 741455 - DNA, 120 bp, Artificial Sequence
  ENSG00000204388_9 (sequence is synthesized)
ggcatcgacttctacacgtccatcaccagggcgaggttcgaggagctgtgctccgacctgttccgaagcaccctggagcccgtggagaaggctctgcgcgacgccaagctggacaaggcc

SEQ ID NO: 741456 - DNA, 120 bp, Artificial Sequence
  ENSG00000204388_10 (sequence is synthesized)
gtggcctacggggcggcggtgcaggcggccatcctgatgggggacaagtccgagaacgtgcaggacctgctgctgctggacgtggctcccctgtcgctggggctggagacggccggaggc

SEQ ID NO: 741457 - DNA, 120 bp, Artificial Sequence
  ENSG00000204388_11 (sequence is synthesized)
gtgatgactgccctgatcaagcgcaactccaccatccccaccaagcagacgcagatcttcaccacctactccgacaaccaacccggggtgctgatccaggtgtacgagggcgagagggcc

SEQ ID NO: 741458 - DNA, 120 bp, Artificial Sequence
  ENSG00000204388_12 (sequence is synthesized)
atgacgaaagacaacaatctgttggggcgcttcgagctgagcggcatccctccggcccccaggggcgtgccccagatcgaggtgaccttcgacatcgatgccaacggcatcctgaacgtc

SEQ ID NO: 741459 - DNA, 120 bp, Artificial Sequence
  ENSG00000204388_13 (sequence is synthesized)
acggccacggacaagagcaccggcaaggccaacaagatcaccatcaccaacgacaagggccgcctgagcaaggaggagatcgagcgcatggtgcaggaggcggagaagtacaaagcggag

SEQ ID NO: 741460 - DNA, 120 bp, Artificial Sequence
  ENSG00000204388_14 (sequence is synthesized)
gacgaggtgcagcgcgagagggtgtcagccaagaacgccctggagtcctacgccttcaacatgaagagcgccgtggaggatgaggggctcaagggcaagatcagcgaggcggacaagaag

SEQ ID NO: 741461 - DNA, 120 bp, Artificial Sequence
  ENSG00000204388_15 (sequence is synthesized)
aaggttctggacaagtgtcaagaggtcatctcgtggctggacgccaacaccttggccgagaaggacgagtttgagcacaagaggaaggagctggagcaggtgtgtaaccccatcatcagc

SEQ ID NO: 741462 - DNA, 120 bp, Artificial Sequence
  ENSG00000204388_16 (sequence is synthesized)
ggactgtaccagggtgccggtggtcccgggcctggcggcttcggggctcagggtcccaagggagggtctgggtcaggccctaccattgaggaggtggattaggggcctttgttctttagt

SEQ ID NO: 741463 - DNA, 120 bp, Artificial Sequence
  ENSG00000204388_17 (sequence is synthesized)
atgtttgtctttgaggtggactgttgggactcaaggactttgctgctgttttcctatgtcatttctgcttcagctctttgctgcttcacttctttgtaaagttgtaacctgatggtaatt

SEQ ID NO: 741464 - DNA, 120 bp, Artificial Sequence
  ENSG00000204388_18 (sequence is synthesized)
agctggcttcattatttttgtagtacaaccgatatgttcattagaattctttgcatttaatgttgatactgtaagggtgtttcgttccctttaaatgaatcaacactgccaccttctgta

SEQ ID NO: 741465 - DNA, 78 bp, Artificial Sequence
  ENSG00000204388_19 (sequence is synthesized)
ccaccttctgtacgaaaacactacaaaggctgggaatgtatgtttttataatttgtttatttaaatatgaaaaataaa

SEQ ID NO: 741466 - DNA, 120 bp, Artificial Sequence
  ENSG00000204389_0 (sequence is synthesized)
aacggctagcctgaggagctgctgcgacagtccactacctttttcgagagtgactcccgttgtcccaaggcttcccagagcgaacctgtgcggctgcaggcaccggcgcgtcgagtttcc

SEQ ID NO: 741467 - DNA, 120 bp, Artificial Sequence
  ENSG00000204389_1 (sequence is synthesized)
ggcgtccggaaggaccgagctcttctcgcggatccagtgttccgtttccagcccccaatctcagagcggagccgacagagagcagggaaccggcatggccaaagccgcggcgatcggcat

SEQ ID NO: 741468 - DNA, 120 bp, Artificial Sequence
  ENSG00000204389_2 (sequence is synthesized)
cgacctgggcaccacctactcctgcgtgggggtgttccaacacggcaaggtggagatcatcgccaacgaccagggcaaccgcaccacccccagctacgtggccttcacggacaccgagcg

SEQ ID NO: 741469 - DNA, 120 bp, Artificial Sequence
  ENSG00000204389_3 (sequence is synthesized)
gctcatcggggatgcggccaagaaccaggtggcgctgaacccgcagaacaccgtgtttgacgcgaagcggctgattggccgcaagttcggcgacccggtggtgcagtcggacatgaagca

SEQ ID NO: 741470 - DNA, 120 bp, Artificial Sequence
  ENSG00000204389_4 (sequence is synthesized)
ctggcctttccaggtgatcaacgacggagacaagcccaaggtgcaggtgagctacaagggggagaccaaggcattctaccccgaggagatctcgtccatggtgctgaccaagatgaagga

SEQ ID NO: 741471 - DNA, 120 bp, Artificial Sequence
  ENSG00000204389_5 (sequence is synthesized)
gatcgccgaggcgtacctgggctacccggtgaccaacgcggtgatcaccgtgccggcctacttcaacgactcgcagcgccaggccaccaaggatgcgggtgtgatcgcggggctcaacgt

SEQ ID NO: 741472 - DNA, 120 bp, Artificial Sequence
  ENSG00000204389_6 (sequence is synthesized)
gctgcggatcatcaacgagcccacggccgccgccatcgcctacggcctggacagaacgggcaagggggagcgcaacgtgctcatctttgacctgggcgggggcaccttcgacgtgtccat

SEQ ID NO: 741473 - DNA, 120 bp, Artificial Sequence
  ENSG00000204389_7 (sequence is synthesized)
cctgacgatcgacgacggcatcttcgaggtgaaggccacggccggggacacccacctgggtggggaggactttgacaacaggctggtgaaccacttcgtggaggagttcaagagaaaaca

SEQ ID NO: 741474 - DNA, 120 bp, Artificial Sequence
  ENSG00000204389_8 (sequence is synthesized)
caagaaggacatcagccagaacaagcgagccgtgaggcggctgcgcaccgcctgcgagagggccaagaggaccctgtcgtccagcacccaggccagcctggagatcgactccctgtttga

SEQ ID NO: 741475 - DNA, 120 bp, Artificial Sequence
  ENSG00000204389_9 (sequence is synthesized)
gggcatcgacttctacacgtccatcaccagggcgaggttcgaggagctgtgctccgacctgttccgaagcaccctggagcccgtggagaaggctctgcgcgacgccaagctggacaaggc

SEQ ID NO: 741476 - DNA, 120 bp, Artificial Sequence
  ENSG00000204389_10 (sequence is synthesized)
ccagattcacgacctggtcctggtcgggggctccacccgcatccccaaggtgcagaagctgctgcaggacttcttcaacgggcgcgacctgaacaagagcatcaaccccgacgaggctgt

SEQ ID NO: 741477 - DNA, 120 bp, Artificial Sequence
  ENSG00000204389_11 (sequence is synthesized)
ggcctacggggcggcggtgcaggcggccatcctgatgggggacaagtccgagaacgtgcaggacctgctgctgctggacgtggctcccctgtcgctggggctggagacggccggaggcgt

SEQ ID NO: 741478 - DNA, 120 bp, Artificial Sequence
  ENSG00000204389_12 (sequence is synthesized)
gatgactgccctgatcaagcgcaactccaccatccccaccaagcagacgcagatcttcaccacctactccgacaaccaacccggggtgctgatccaggtgtacgagggcgagagggccat

SEQ ID NO: 741479 - DNA, 120 bp, Artificial Sequence
  ENSG00000204389_13 (sequence is synthesized)
gacgaaagacaacaatctgttggggcgcttcgagctgagcggcatccctccggcccccaggggcgtgccccagatcgaggtgaccttcgacatcgatgccaacggcatcctgaacgtcac

SEQ ID NO: 741480 - DNA, 120 bp, Artificial Sequence
  ENSG00000204389_14 (sequence is synthesized)
ggccacggacaagagcaccggcaaggccaacaagatcaccatcaccaacgacaagggccgcctgagcaaggaggagatcgagcgcatggtgcaggaggcggagaagtacaaagcggagga

SEQ ID NO: 741481 - DNA, 120 bp, Artificial Sequence
  ENSG00000204389_15 (sequence is synthesized)
cgaggtgcagcgcgagagggtgtcagccaagaacgccctggagtcctacgccttcaacatgaagagcgccgtggaggatgaggggctcaagggcaagatcagcgaggcggacaagaagaa

SEQ ID NO: 741482 - DNA, 120 bp, Artificial Sequence
  ENSG00000204389_16 (sequence is synthesized)
ggtgctggacaagtgtcaagaggtcatctcgtggctggacgccaacaccttggccgagaaggacgagtttgagcacaagaggaaggagctggagcaggtgtgtaaccccatcatcagcgg

SEQ ID NO: 741483 - DNA, 120 bp, Artificial Sequence
  ENSG00000204389_17 (sequence is synthesized)
actgtaccagggtgccggtggtcccgggcctgggggcttcggggctcagggtcccaagggagggtctgggtcaggccccaccattgaggaggtagattaggggcctttccaagattgctg

SEQ ID NO: 741484 - DNA, 120 bp, Artificial Sequence
  ENSG00000204389_18 (sequence is synthesized)
tttttgttttggagcttcaagactttgcatttcctagtatttctgtttgtcagttctcaatttcctgtgtttgcaatgttgaaattttttggtgaagtactgaacttgctttttttccgg

SEQ ID NO: 741485 - DNA, 120 bp, Artificial Sequence
  ENSG00000204389_19 (sequence is synthesized)
tttctacatgcagagatgaatttatactgccatcttacgactatttcttctttttaatacacttaactcaggccattttttaagttggttacttcaaagtaaataaactttaaaattcaa

SEQ ID NO: 741486 - DNA, 120 bp, Artificial Sequence
  ENSG00000204390_0 (sequence is synthesized)
gttggtctccatggcgatgctgaccgcctgcgcttcagcgcctaattgacaggaagggtcggcgctgggcttttaattgtgggggcttgctgggcctgcgcagttgtgggcagggggctg

SEQ ID NO: 741487 - DNA, 120 bp, Artificial Sequence
  ENSG00000204390_1 (sequence is synthesized)
gtgcggggagcgggttacgcgcgtccaggggagggtgggggcgtttgtgttgacaccgcccggccacgttacaatggagatactgtctctgacctcatgggccagtttggaaaaagatta

SEQ ID NO: 741488 - DNA, 120 bp, Artificial Sequence
  ENSG00000204390_2 (sequence is synthesized)
ctgagttggagccgtctcaaatttgcagggagggacggggtggggggtggggggaccccggttgtgcagtttgatattgagggagcccccacctactcgctggggctgcgtaatctggac

SEQ ID NO: 741489 - DNA, 120 bp, Artificial Sequence
  ENSG00000204390_3 (sequence is synthesized)
gtttccaaactgaagcgaaggcgtcgggagactaggcctcagagaaccatggctactgccaagggaatcgccataggcatcgacctgggcaccacctactcctgtgtgggggtgttccag

SEQ ID NO: 741490 - DNA, 120 bp, Artificial Sequence
  ENSG00000204390_4 (sequence is synthesized)
cacggcaaggtggagatcatcgccaacgaccagggcaaccgcaccacccccagctacgtggccttcacagacaccgagcggctcattggggatgcggccaagaaccaggtagcaatgaat

SEQ ID NO: 741491 - DNA, 120 bp, Artificial Sequence
  ENSG00000204390_5 (sequence is synthesized)
ccccagaacactgtttttgatgctaaacgtctgatcggcaggaaatttaatgatcctgttgtacaagcagatatgaaactttggccttttcaagtgattaatgaaggaggcaagcccaaa

SEQ ID NO: 741492 - DNA, 120 bp, Artificial Sequence
  ENSG00000204390_6 (sequence is synthesized)
gtccttgtgtcctacaaaggggagaataaagctttctaccctgaggaaatctcttcgatggtattgactaagttgaaggagactgctgaggcctttttgggccaccctgtcaccaatgca

SEQ ID NO: 741493 - DNA, 120 bp, Artificial Sequence
  ENSG00000204390_7 (sequence is synthesized)
gtgattaccgtgccagcctatttcaatgactctcaacgtcaggctactaaggatgcaggtgtgattgctggacttaatgtgctaagaatcatcaatgagcccacggctgctgccattgcc

SEQ ID NO: 741494 - DNA, 120 bp, Artificial Sequence
  ENSG00000204390_8 (sequence is synthesized)
tatggtttagataaaggaggtcaaggagaacgacatgtcctgatttttgatctgggtggaggcacatttgatgtgtcaattctgaccatagatgatgggatttttgaggtaaaggccact

SEQ ID NO: 741495 - DNA, 120 bp, Artificial Sequence
  ENSG00000204390_9 (sequence is synthesized)
gctggggacactcacctgggtggggaggactttgacaacaggcttgtgagccacttcgtggaggagttcaagaggaaacacaaaaaggacatcagccagaacaagcgagccgtgaggcgg

SEQ ID NO: 741496 - DNA, 120 bp, Artificial Sequence
  ENSG00000204390_10 (sequence is synthesized)
ctgcgcaccgcctgcgagagggccaagaggaccctgtcgtccagcacccaggccaacctagaaattgattcactttatgaaggcattgacttctatacatccatcaccagagctcgattt

SEQ ID NO: 741497 - DNA, 120 bp, Artificial Sequence
  ENSG00000204390_11 (sequence is synthesized)
agagttgtgtgcagacctgtttaggggtaccctggagcctgtagaaaaagcgcttcgggatgccaagatggataaggctaaaatccatgacattgttttagtagggggctccacccgcat

SEQ ID NO: 741498 - DNA, 120 bp, Artificial Sequence
  ENSG00000204390_12 (sequence is synthesized)
ccccaaggtgcagcggctgcttcaggactacttcaatggacgtgatctcaacaagagcatcaaccctgatgaggccgtagcatatggggctgcggtacaagcagccatcctgatggggga

SEQ ID NO: 741499 - DNA, 120 bp, Artificial Sequence
  ENSG00000204390_13 (sequence is synthesized)
caagtctgagaaggtacaggacctgctgctgctggacgtggctcccctgtccctggggctggagacggctgggggcgtgatgactgccctgataaagcgcaactccaccatccccaccaa

SEQ ID NO: 741500 - DNA, 120 bp, Artificial Sequence
  ENSG00000204390_14 (sequence is synthesized)
gcagacacagattttcaccacctactctgacaaccaacccggggtgctgatccaggtgtatgagggcgagagggccatgacaaaggacaacaacctgctggggcggtttgacctgactgg

SEQ ID NO: 741501 - DNA, 120 bp, Artificial Sequence
  ENSG00000204390_15 (sequence is synthesized)
aatccctccagcacccaggggagttcctcagatcgaggtgacgtttgacattgatgccaatggtattctcaatgtcacagccacggacaagagcaccggcaaggtgaacaagatcaccat

SEQ ID NO: 741502 - DNA, 120 bp, Artificial Sequence
  ENSG00000204390_16 (sequence is synthesized)
caccaatgacaagggccgcctgagcaaggaggagattgagcgcatggttctggatgctgagaaatataaagctgaagatgaggtccagagggagaaaattgctgcaaagaatgccttaga

SEQ ID NO: 741503 - DNA, 120 bp, Artificial Sequence
  ENSG00000204390_17 (sequence is synthesized)
atcctatgcttttaacatgaagagtgttgtgagtgatgaaggtttgaagggcaagattagtgagtctgataaaaataaaatattggataaatgcaacgagctcctttcgtggctggaggt

SEQ ID NO: 741504 - DNA, 120 bp, Artificial Sequence
  ENSG00000204390_18 (sequence is synthesized)
caatcaactggcagagaaagatgagtttgatcataagagaaaggaattggagcagatgtgtaaccctatcatcacaaaactctaccaaggaggatgcactgggcctgcctgcggaacagg

SEQ ID NO: 741505 - DNA, 120 bp, Artificial Sequence
  ENSG00000204390_19 (sequence is synthesized)
gtatgtgcctggaaggcctgccacaggccccacaattgaagaagtagattaattctttttagaactgaagcatcctaggatgcctctacatgtatttcattcccctcatcttcaaacatc

SEQ ID NO: 741506 - DNA, 120 bp, Artificial Sequence
  ENSG00000204390_20 (sequence is synthesized)
attattattcttgaccagacctgaatctaagttaccatcccttggaaattctggagaaggagtctcatgcaccacctatcacactccctcacatcctgtttctgactttggaatggactc

SEQ ID NO: 741507 - DNA, 120 bp, Artificial Sequence
  ENSG00000204390_21 (sequence is synthesized)
aggaaaactaggcccctctttaaaccgtgtgatgtatttgaatgtctgttatttccagccaccctaacattcttcttcctgtgtggatgcttatttgtcaatcagtaaatttgttcgtaa

SEQ ID NO: 741508 - DNA, 120 bp, Artificial Sequence
  ENSG00000204390_22 (sequence is synthesized)
agaaaattacttctggtatttaggctgtgaatgtaccttgaaggggagagttcatggagagagcatgtgttctctgattgtgaggtcactgtgaatgattaaattggtaagggtaaagta

SEQ ID NO: 741509 - DNA, 120 bp, Artificial Sequence
  ENSG00000204392_0 (sequence is synthesized)
ctcccctctactctacccagcttgcgctccccagccgcaagtcggccgcgctttgcccgtcagcgcttggagctttctgcgtcgcttcccgctgcgcctgcgcggtcccgcctcgcccca

SEQ ID NO: 741510 - DNA, 120 bp, Artificial Sequence
  ENSG00000204392_1 (sequence is synthesized)
cgcgcgggctcgcgcttcggtttccccagacctgctcgcagcaccctgctgtcttcccggtccggcccgctgcccgcggcgccagcaccatgctcttctattcttttttcaagtcccttg

SEQ ID NO: 741511 - DNA, 120 bp, Artificial Sequence
  ENSG00000204392_2 (sequence is synthesized)
tgggcaaggatgtggtcgtggaactaaagaatgacctgagcatctgtggaaccctccattctgtggatcagtatctcaacatcaaactaactgacatcagtgtcacagaccctgagaaat

SEQ ID NO: 741512 - DNA, 120 bp, Artificial Sequence
  ENSG00000204392_3 (sequence is synthesized)
tgaagaactgcttcattcggggctcagtggtccgatacgtgcagctgccagcagatgaggtcgacacacagttgctacaggatgcggcaaggaaggaagccctgcagcagaaacagtgat

SEQ ID NO: 741513 - DNA, 120 bp, Artificial Sequence
  ENSG00000204392_4 (sequence is synthesized)
ggctcctcctcctcttcccctccctctttcattggtgacccataaccccaagtcccagcccagaacccctaacccccaatacttgaaggggttttgtttttttactaatgatggttttgt

SEQ ID NO: 741514 - DNA, 120 bp, Artificial Sequence
  ENSG00000204392_5 (sequence is synthesized)
gggttttttttaagggatgagtggatgagaggagtaatagggaacagctatcctctcttgagaaggggaggataagtaggctgggaaacttcaaagccttcccagtccccagcacctgcc

SEQ ID NO: 741515 - DNA, 120 bp, Artificial Sequence
  ENSG00000204392_6 (sequence is synthesized)
tttctcactacttctctggagatggtaggagagtttcctaggtctttccagggcagcatgtgattcatttggggatggaaggaatctgtcccgcatcgggaataaaatttatgatgcaaa

SEQ ID NO: 741516 - DNA, 120 bp, Artificial Sequence
  ENSG00000204392_7 (sequence is synthesized)
cggagtttttatcttcatctttagtactgtactgtttctcaggttcattgaggaggcactgagaacaaatgggatattttttccatgatgagggaaaaaaccccaaccctgagagagatt

SEQ ID NO: 741517 - DNA, 120 bp, Artificial Sequence
  ENSG00000204394_0 (sequence is synthesized)
aggcccggaaacgctccctgtcacaaaggggggaacacgtgggcgccggctgccggggcggcgatcttagggaactagggtcacctggagagccgcccaccgtctctgcccgctcgactc

SEQ ID NO: 741518 - DNA, 120 bp, Artificial Sequence
  ENSG00000204394_1 (sequence is synthesized)
ctccgcccgggccgctcggccggtccagccgcggccggcgcctggctgtgaggtggattcccggcccagtctgaccatctccctccagtttttccacttcgttcggaccttctcataact

SEQ ID NO: 741519 - DNA, 120 bp, Artificial Sequence
  ENSG00000204394_2 (sequence is synthesized)
atgtccaccctctacgtctcccctcacccagatgccttccccagcctccgagccctcatagccgctcgctatggggaggctggggagggtcccggatggggaggagcccacccccgcatc

SEQ ID NO: 741520 - DNA, 120 bp, Artificial Sequence
  ENSG00000204394_3 (sequence is synthesized)
tgtctccagccacccccgactagcaggactccctttcccccaccccgcctgccggccctggagcaggggcccggtgggctctgggtgtggggggccacggctgtggcccagctgctgtgg

SEQ ID NO: 741521 - DNA, 120 bp, Artificial Sequence
  ENSG00000204394_4 (sequence is synthesized)
ccagcaggcctggggggcccagggggcagccgggcggctgtccttgtccaacagtgggtcagttacgccgacacggagttaataccagctgcctgtggagcaacgctgccggccctggga

SEQ ID NO: 741522 - DNA, 120 bp, Artificial Sequence
  ENSG00000204394_5 (sequence is synthesized)
ctccgaagctcggcccaggacccccaggctgtgctgggggccctgggcagggccctgagccccttggaggagtggcttcggctgcacacctacttggccggggaggcccccactctggct

SEQ ID NO: 741523 - DNA, 120 bp, Artificial Sequence
  ENSG00000204394_6 (sequence is synthesized)
gacctggcggctgtcacagccttgctgctgcctttccgatacgtcctagacccacctgcccgccggatctggaataatgtgactcgctggtttgtcacgtgtgtccggcagccagaattc

SEQ ID NO: 741524 - DNA, 120 bp, Artificial Sequence
  ENSG00000204394_7 (sequence is synthesized)
cgagccgtgctaggagaagtggttctatactcaggagccaggcctctctctcatcagccaggccccgaggctcctgccctcccaaagacagctgctcagctcaagaaagaggcaaagaaa

SEQ ID NO: 741525 - DNA, 120 bp, Artificial Sequence
  ENSG00000204394_8 (sequence is synthesized)
cgggagaagctagagaaattccaacagaagcagaagatccaacagcagcagccacctccaggggagaagaaaccaaaaccagagaagagggagaaacgggatcctggggtcattacctat

SEQ ID NO: 741526 - DNA, 120 bp, Artificial Sequence
  ENSG00000204394_9 (sequence is synthesized)
gacctcccaaccccacccggggaaaagaaagatgtcagtggccccatgcccgactcctacagccctcggtatgtggaggctgcctggtacccttggtgggagcagcagggcttcttcaag

SEQ ID NO: 741527 - DNA, 120 bp, Artificial Sequence
  ENSG00000204394_10 (sequence is synthesized)
ccagagtatgggcgtcctaatgtgtcagcagcaaatccccgaggtgtcttcatgatgtgcatcccaccccccaatgtgacaggctccctgcacctgggccatgcactcaccaacgccatc

SEQ ID NO: 741528 - DNA, 120 bp, Artificial Sequence
  ENSG00000204394_11 (sequence is synthesized)
caggactccctgactcgatggcaccgcatgcgtggggagaccaccctgtggaaccctggctgtgaccatgcaggtattgccacccaggtggtggtggagaagaagctatggcgtgagcag

SEQ ID NO: 741529 - DNA, 120 bp, Artificial Sequence
  ENSG00000204394_12 (sequence is synthesized)
ggactgagccggcaccagctgggccgcgaggcctttctacaggaagtctggaagtggaaggaggagaaaggtgaccggatttaccaccagttgaagaagcttggcagctccttggactgg

SEQ ID NO: 741530 - DNA, 120 bp, Artificial Sequence
  ENSG00000204394_13 (sequence is synthesized)
gatcgagcctgtttcaccatggaccctaaactctcagcagctgtgacagaggcctttgtccggcttcacgaggaaggcatcatctatcgcagtacccgccttgttaactggtcctgcacc

SEQ ID NO: 741531 - DNA, 120 bp, Artificial Sequence
  ENSG00000204394_14 (sequence is synthesized)
ctcaactccgccatctctgacattgaggtggataagaaggagctgacaggtcgcaccctgctctccgtgcctggctacaaggagaaggtggagttcggggtcctcgtgtcctttgcctat

SEQ ID NO: 741532 - DNA, 120 bp, Artificial Sequence
  ENSG00000204394_15 (sequence is synthesized)
aaggtccaaggctcagatagcgacgaggaggtggtggtggcaacaactcggatcgagacaatgctgggagatgtggctgtagctgtgcaccccaaagataccagataccagcacctgaag

SEQ ID NO: 741533 - DNA, 120 bp, Artificial Sequence
  ENSG00000204394_16 (sequence is synthesized)
gggaagaacgtgatccacccattcctgtctcggagccttcccattgtcttcgatgaatttgtggacatggactttggcacaggtgctgtgaagatcacccccgcacatgaccaaaatgac

SEQ ID NO: 741534 - DNA, 120 bp, Artificial Sequence
  ENSG00000204394_17 (sequence is synthesized)
ccatcagcatcatggactcccggggggccctcatcaatgtgcctccgcctttcctgggcctgcccaggtttgaggccaggaaagcggtgctggtggcgctgaaggagcggggactgttcc

SEQ ID NO: 741535 - DNA, 120 bp, Artificial Sequence
  ENSG00000204394_18 (sequence is synthesized)
gtggcattgaggacaaccccatggtggtgccactttgcaaccggtcgaaggacgtggtagagcctctgctgcggccgcagtggtacgttcgctgcggggagatggcccaggctgccagcg

SEQ ID NO: 741536 - DNA, 120 bp, Artificial Sequence
  ENSG00000204394_19 (sequence is synthesized)
ccgctgtgactcggggtgacctccgcatcctgcctgaggcccatcagcgcacatggcatgcctggatggacaacatccgggagtggtgcatttccaggcagctgtggtggggccatcgca

SEQ ID NO: 741537 - DNA, 120 bp, Artificial Sequence
  ENSG00000204394_20 (sequence is synthesized)
tcccagcctactttgtcactgtcagtgacccagcggtgccccctggggaggaccctgatgggcggtactgggtgagtggacgcaatgaggcggaggcccgggagaaggcagccaaggagt

SEQ ID NO: 741538 - DNA, 120 bp, Artificial Sequence
  ENSG00000204394_21 (sequence is synthesized)
tcggagtgtcccctgacaagatcagtctccagcaagatgaggatgtattggatacctggttctcctctggcctcttccccttatccattttgggctggcccaaccagtcagaagacctga

SEQ ID NO: 741539 - DNA, 120 bp, Artificial Sequence
  ENSG00000204394_22 (sequence is synthesized)
gtgtgttctaccccgggacactgctggagaccggtcatgacatcctcttcttctgggtggcccggatggtcatgctgggcctgaagctcacgggcaggctgccctttagagaggtctacc

SEQ ID NO: 741540 - DNA, 120 bp, Artificial Sequence
  ENSG00000204394_23 (sequence is synthesized)
tccatgccatcgtgcgagatgctcacggccggaagatgagcaagtctctaggcaatgtcatcgatcccctggacgtcatctatggaatctccctgcagggcctccacaaccagctgctga

SEQ ID NO: 741541 - DNA, 120 bp, Artificial Sequence
  ENSG00000204394_24 (sequence is synthesized)
acagcaacctggatcccagcgaggtggagaaggccaaagaagggcagaaagctgacttcccagcggggattcctgaatgtggcaccgatgctctccggtttggattatgtgcctacatgt

SEQ ID NO: 741542 - DNA, 120 bp, Artificial Sequence
  ENSG00000204394_25 (sequence is synthesized)
cccagggtcgtgacatcaacctggatgtgaaccggatactgggttaccgccacttctgcaacaagctctggaatgccaccaagtttgcccttcgtggccttgggaagggttttgtgccct

SEQ ID NO: 741543 - DNA, 120 bp, Artificial Sequence
  ENSG00000204394_26 (sequence is synthesized)
cacccacctcccagcccggaggccatgagagcctggtggaccgctggatccgcagccgcctgacagaggctgtgaggctcagcaatcaaggcttccaggcctacgacttcccggccgtca

SEQ ID NO: 741544 - DNA, 120 bp, Artificial Sequence
  ENSG00000204394_27 (sequence is synthesized)
ccactgcccagtacagcttctggctctatgagctctgtgatgtctacttggagtgcctgaaacctgtactgaatggggtggaccaggtggcagctgagtgtgcccgccagaccctgtaca

SEQ ID NO: 741545 - DNA, 120 bp, Artificial Sequence
  ENSG00000204394_28 (sequence is synthesized)
cttgcctggacgttggcctgcggctgctctcacccttcatgcccttcgtgacggaggagctgttccagaggctgccccggaggatgccgcaagctccccctagcctctgtgttaccccct

SEQ ID NO: 741546 - DNA, 120 bp, Artificial Sequence
  ENSG00000204394_29 (sequence is synthesized)
acccggagccctcagagtgctcctggaaggaccccgaggcagaagccgcccttgagctggcgctaagcatcacgcgagccgtgcgctccctgcgggccgactacaacctcacccggatcc

SEQ ID NO: 741547 - DNA, 120 bp, Artificial Sequence
  ENSG00000204394_30 (sequence is synthesized)
ggcctgactgtttcctggaagtggcggatgaggccacgggcgccctggcatcggcggtgtcgggctacgtgcaggccctggccagcgcaggtgtggtggctgttctggccctgggggctc

SEQ ID NO: 741548 - DNA, 120 bp, Artificial Sequence
  ENSG00000204394_31 (sequence is synthesized)
ccgccccccagggttgcgctgtggctctggcttctgatcgctgctccatccacctgcagcttcaggggctggtggaccctgcacgggagctgggcaagctgcaagccaagcgagttgagg

SEQ ID NO: 741549 - DNA, 120 bp, Artificial Sequence
  ENSG00000204394_32 (sequence is synthesized)
cccagcggcaggcccagcgtctgcgggaacgccgtgctgcctcgggctatcctgtcaaggtgccgctcgaagtccaggaggcagatgaagccaagctccaacagacagaagcagagctca

SEQ ID NO: 741550 - DNA, 120 bp, Artificial Sequence
  ENSG00000204394_33 (sequence is synthesized)
ggaaggtggatgaggccatcgccctattccagaagatgctgtgatccaccacccagcttcacccctcacccccagcggctcaccatggggatggcagcaataaaatattttcccacaaaa

SEQ ID NO: 741551 - DNA, 120 bp, Artificial Sequence
  ENSG00000204394_34 (sequence is synthesized)
gtgacccagcggtgccccctggggaggtgagcagagggccagagctagctgctgggacaccctgctggagtggaccctgatgggcggtactgggtgagtggacgcaatgaggcggaggcc

SEQ ID NO: 741552 - DNA, 120 bp, Artificial Sequence
  ENSG00000204394_35 (sequence is synthesized)
gtcaccactgcccagtacagcttctggctctatgagctctgtgatgtctacttggtgagaaggagcacagcggggcaggggatggtgggggcaggtgggcagcagagccctgggctcagt

SEQ ID NO: 741553 - DNA, 120 bp, Artificial Sequence
  ENSG00000204394_36 (sequence is synthesized)
tttgccagagttggccttgagacctaagccaacccatccccttcccagtcctcacaggcacagcgagggctcaaggctagacctccagccgtgagccctgtacctctcgtcccctaggag

SEQ ID NO: 741554 - DNA, 120 bp, Artificial Sequence
  ENSG00000204394_37 (sequence is synthesized)
ggatggacaacatccggtgtgtagggtcctcagtgtgggaggggcttgccgagggctgagcagggctcactcgggccaggctccatcaggccctccctgatttctcctccccgacatttg

SEQ ID NO: 741555 - DNA, 120 bp, Artificial Sequence
  ENSG00000204394_38 (sequence is synthesized)
cggagacagccgagaccctcccatcgcccccagcctcctctcctaccgtcctgtgctgcagcgcagaccccgcgtggctggggcatggggttagctgtgggcaggcctgacccgggggct

SEQ ID NO: 741556 - DNA, 120 bp, Artificial Sequence
  ENSG00000204394_39 (sequence is synthesized)
tactgggctgaccctggaaggccagtcttgtttgtcccctgcctcctgggttccgccagagagaagcagtggagtaaactgcacagacacagagaaaaccagtcatggaggccaagagct

SEQ ID NO: 741557 - DNA, 120 bp, Artificial Sequence
  ENSG00000204394_40 (sequence is synthesized)
ttggttctcccaagagccctgggaggggggcaatatcatcatcatcatctgacaaatgaagtgaccggcctgggagactgtgctctcctgcttagctccaacagacagaagcagagctca

SEQ ID NO: 741558 - DNA, 120 bp, Artificial Sequence
  ENSG00000204394_41 (sequence is synthesized)
ccctcatcaatgtgcctccgcctttcctggtgaggctgcctgaggcaagagtgcccgggtcagggagatggagggatggctgggcatcgccatgatgaggcctcattcctacccagggcc

SEQ ID NO: 741559 - DNA, 120 bp, Artificial Sequence
  ENSG00000204394_42 (sequence is synthesized)
gaaggagcggggactgttccgtggcattgaggacaaccccatggtggtgccactttgcaaccggtcgaaggacgtggtagagcctctgctgcggccgcagtgggagtggtgcatttccag

SEQ ID NO: 741560 - DNA, 120 bp, Artificial Sequence
  ENSG00000204394_43 (sequence is synthesized)
aagtgagggtgggggcctgggacgggaggaagatggagggctcctcagggttttaccgcctggccttctcacctacgtgtacccccagccggtcgaaggacgtggtagagcctctgctgc

SEQ ID NO: 741561 - DNA, 120 bp, Artificial Sequence
  ENSG00000204394_44 (sequence is synthesized)
ttggatacctggttctcctctggcctcttccccttatccattttgggctggcccaaccaggtgtgttcctggggccggggcttggcgggacaggggactggagggtgggtgttggctccc

SEQ ID NO: 741562 - DNA, 120 bp, Artificial Sequence
  ENSG00000204394_45 (sequence is synthesized)
tcctgtgcccagggcttcatcttcccagaggaaggagtgcttctgattcacataaaggcgctcaacgagctcttggggacactcagtgggacctgaggttcacagtggggtagaccagac

SEQ ID NO: 741563 - DNA, 120 bp, Artificial Sequence
  ENSG00000204394_46 (sequence is synthesized)
ggagaaacgggatcctggggtcattacctatgacctcccaaccccacccggggaaaagaaaggcccctcaaatgcctgtcctatgatgtgagtgacggagatcccgatccctctctgcca

SEQ ID NO: 741564 - DNA, 120 bp, Artificial Sequence
  ENSG00000204394_47 (sequence is synthesized)
ctcctgagagccttccacactccccgaagccccgcgatggtggatagttcctcttccccaggaactccccactgacactgcccctctgagagccaggtcctcggctcctgacagcctgcc

SEQ ID NO: 741565 - DNA, 120 bp, Artificial Sequence
  ENSG00000204394_48 (sequence is synthesized)
tggtcagaccctcagtcctatgggactcgggtgtctgcggcgaaggagctcccgtgagggtcccctctctactcaaacataggacccacctcgatcccgcagtcttcccctgtctctctt

SEQ ID NO: 741566 - DNA, 120 bp, Artificial Sequence
  ENSG00000204396_0 (sequence is synthesized)
actcacctccgcactgcagccaagggaggcccgccctggcgtgggctgctgcctgtggctttgggcaggcaggagcgaaagggccaggggttgcctgtcctcccccaccctgttgaggcc

SEQ ID NO: 741567 - DNA, 120 bp, Artificial Sequence
  ENSG00000204396_1 (sequence is synthesized)
ttcctccccctctgctgagcctcggttaattataactctgacctaagtgccctgtgacgtcaagcccgggccagccctgcccaggagacccagcaaccaggtccatgtctcagccatgct

SEQ ID NO: 741568 - DNA, 120 bp, Artificial Sequence
  ENSG00000204396_2 (sequence is synthesized)
ccccacggaggtcccccaatcccacccgggcccctcagcgttgcttctgctgcagctgttgctgccccccacatctgccttcttccccaacatctggagcctgctggctgcccctggctc

SEQ ID NO: 741569 - DNA, 120 bp, Artificial Sequence
  ENSG00000204396_3 (sequence is synthesized)
catcacccaccaagacctaactgaggaggcagcgctcaacgtcaccctgcagctcttcctggagcagccacccccaggccgcccccctcttcgtcttgaggacttcctgggtcgaacact

SEQ ID NO: 741570 - DNA, 120 bp, Artificial Sequence
  ENSG00000204396_4 (sequence is synthesized)
ccttgctgatgacctctttgccgcctactttggacctggttcttctcggcggttccgagcagccttaggtgaggtgtctcgtgccaatgcagcccaggacttcctgccaacttccaggaa

SEQ ID NO: 741571 - DNA, 120 bp, Artificial Sequence
  ENSG00000204396_5 (sequence is synthesized)
tgaccccgacctgcactttgatgctgagcgactgggtcagggacgcgcgcgcctggtaggggctctgcgggagaccgtggtggcagccagggcccttgaccacaccctggctcgccagcg

SEQ ID NO: 741572 - DNA, 120 bp, Artificial Sequence
  ENSG00000204396_6 (sequence is synthesized)
cctcggggctgcacttcatgccctgcaggatttctacagtcatagcaactgggtggagctgggcgagcagcagccacaccctcacctcctctggccaaggcaggagctccagaacctggc

SEQ ID NO: 741573 - DNA, 120 bp, Artificial Sequence
  ENSG00000204396_7 (sequence is synthesized)
acaagtggccgatcctacctgctccgattgcgaggagttgagctgccccaggaattggctgggcttcacactcctcacctctggctactttggaactcatcccccgaaacctccagggaa

SEQ ID NO: 741574 - DNA, 120 bp, Artificial Sequence
  ENSG00000204396_8 (sequence is synthesized)
atgtagccacgggggccattttgaccggagcagctcccagccaccgaggggaggcatcaacaaggacagcacatccccaggcttctcccctcaccacatgctgcacctccaggctgcaaa

SEQ ID NO: 741575 - DNA, 120 bp, Artificial Sequence
  ENSG00000204396_9 (sequence is synthesized)
actggcccttctagcctccatccaggccttcagccttctgcgaagccgcctgggagacagggatttctccaggctgctggacatcaccccagcctccagcctgagctttgtcctggacac

SEQ ID NO: 741576 - DNA, 120 bp, Artificial Sequence
  ENSG00000204396_10 (sequence is synthesized)
cacgggcagcatgggtgaggagatcaacgctgccaaaatccaggctcgccaccttgtggagcagcggagaggcagccccatggagcctgtccactatgtcctggtgccttttcatgaccc

SEQ ID NO: 741577 - DNA, 120 bp, Artificial Sequence
  ENSG00000204396_11 (sequence is synthesized)
agggttcggccctgtctttacaaccagtgaccctgacagcttctggcaacagcttaatgagatccatgccttggggggtggagacgagcctgagatgtgcctgtcagccctgcagctggc

SEQ ID NO: 741578 - DNA, 120 bp, Artificial Sequence
  ENSG00000204396_12 (sequence is synthesized)
tcttcacggatgcctcccccaaggatgcctttctcaccaaccaggtggaatccctgactcaggagcggcgctgccgggtaacattcctggtgactgaagatacatcaagggttcagggtc

SEQ ID NO: 741579 - DNA, 120 bp, Artificial Sequence
  ENSG00000204396_13 (sequence is synthesized)
gagctcggcgtgagatcttgtcccctctgcgttttgagccatacaaagcagtggccctggcctcaggaggagaggtgatcttcaccaaagaccagcacattcgagacgtggcagccattg

SEQ ID NO: 741580 - DNA, 120 bp, Artificial Sequence
  ENSG00000204396_14 (sequence is synthesized)
ttggggagagcatggctgccctggtgactcttcccctggaccctcctgttgtggtgcctgggcagccacttgtgttcagcgtggatgggctgctccagaagatcacagtccggatccacg

SEQ ID NO: 741581 - DNA, 120 bp, Artificial Sequence
  ENSG00000204396_15 (sequence is synthesized)
gagacatcagcagcttctggatcaagaaccctgcaggggtctcccagggccaggaggaaggcgggggtcctctaggtcacactcgccgctttgggcagttctggatggtgaccatggatg

SEQ ID NO: 741582 - DNA, 120 bp, Artificial Sequence
  ENSG00000204396_16 (sequence is synthesized)
accctccacagacaggaacctgggagatccaggtcacagctgaggacacccctggggtgagagtgcaagcccagacctccctggacttcctcttccactttgggatccccatggaggatg

SEQ ID NO: 741583 - DNA, 120 bp, Artificial Sequence
  ENSG00000204396_17 (sequence is synthesized)
gaccccaccctggcctctaccccctgactcagccagttgcaggtcttcagacccagctgctggtagaagtgacagggttgggttccagagccaatcctggggatcctcagccgcatttct

SEQ ID NO: 741584 - DNA, 120 bp, Artificial Sequence
  ENSG00000204396_18 (sequence is synthesized)
cccacgtcatccttcgaggggtcccagagggtgccgaactaggccaggtgcccttggagcccgtgggacctccggagcgaggtctcctcgcagcctcgctgtcgcccacgctgctgtcca

SEQ ID NO: 741585 - DNA, 120 bp, Artificial Sequence
  ENSG00000204396_19 (sequence is synthesized)
cccctagacccttctccctggagctgattggccaggacgcagcggggcggcgcctgcacagggctgcccctcagcctagcactgtagtccctgtccttctggagcttagtggcccctcgg

SEQ ID NO: 741586 - DNA, 120 bp, Artificial Sequence
  ENSG00000204396_20 (sequence is synthesized)
gtttcttggccccgggcagcaaagtcccgctcagtctccgcatcgccagcttctcgggccctcaggatcttgaccttaggactttcgtcaaccccagcttctccctcacctccaacctct

SEQ ID NO: 741587 - DNA, 120 bp, Artificial Sequence
  ENSG00000204396_21 (sequence is synthesized)
ccagggctcacctggaactgaatgagtcggcctggggccgcctgtggctggaggtcccagattcagcggccccggattccgtggtgatggtgactgtgactgcagggggacgagaagcca

SEQ ID NO: 741588 - DNA, 120 bp, Artificial Sequence
  ENSG00000204396_22 (sequence is synthesized)
acccagtacccccgactcatgctttcctccggctcctggtatcggccccagccccgcaggaccggcacaccacccctaccggctcatctgacccgatcctcaccacggccacccctgcct

SEQ ID NO: 741589 - DNA, 120 bp, Artificial Sequence
  ENSG00000204396_23 (sequence is synthesized)
tttcccccttcacattggtgactcaaggcagggctggggcagggctggctgcgggcagcccctggtggggcacagttggaggggtgctgcttctgctaggcctggcctcctggtgacaca

SEQ ID NO: 741590 - DNA, 120 bp, Artificial Sequence
  ENSG00000204396_24 (sequence is synthesized)
ggggaagccaggctggagcagacacgacttttgaggtaaagcaggttcccatggagacccgcagagccggcctgccctggaatcgcggctgcttcctcctcccttgagagccttctgtct

SEQ ID NO: 741591 - DNA, 60 bp, Artificial Sequence
  ENSG00000204396_25 (sequence is synthesized)
gaggcagccccatggagcctgtccactatgtcctggtgccttttcatgacccagagacgg

SEQ ID NO: 741592 - DNA, 120 bp, Artificial Sequence
  ENSG00000204396_26 (sequence is synthesized)
tacaggtgtgagccaccgtgcccggccgccattttcaattctctccatttcctatagacagagattggtatcaagatggggttgttggggccaggcttctgggaagcatctgagataact

SEQ ID NO: 741593 - DNA, 120 bp, Artificial Sequence
  ENSG00000204396_27 (sequence is synthesized)
tctgagataactagctacattgtattccttttccattgattagaagttagactctctggcttgagtctgactgtgtgtctttaggctggtcatgtaaactttctttgcctcgatttcatc

SEQ ID NO: 741594 - DNA, 86 bp, Artificial Sequence
  ENSG00000204396_28 (sequence is synthesized)
ttaggctggtcatgtaaactttctttgcctcgatttcatcatctgtaaaatgggtatcagttatcacatcagggtggggcaggatg

SEQ ID NO: 741595 - DNA, 120 bp, Artificial Sequence
  ENSG00000204396_29 (sequence is synthesized)
aagtgccagtcacaggggatatgattggttagcttgggctcagaggcctgacacctccctcatcctgcctaactcccagagttgaaatgatgatcaaataaaatgcctactggactgaga

SEQ ID NO: 741596 - DNA, 120 bp, Artificial Sequence
  ENSG00000204397_0 (sequence is synthesized)
acacaagaagggtaggagagaaaagccatggccgacaaggtcctgaaggagaagagaaagctgtttatccattccatgggtgaaggtacaataaatggcttactggatgaattattacag

SEQ ID NO: 741597 - DNA, 120 bp, Artificial Sequence
  ENSG00000204397_1 (sequence is synthesized)
acaagggtgctgaaccaggaagagatggagaaagtaaaacgtgaaaatgctacagttatggataagacccgagctttgattgactccgttattccgaaaggggcacaggcatgccaaatt

SEQ ID NO: 741598 - DNA, 120 bp, Artificial Sequence
  ENSG00000204397_2 (sequence is synthesized)
cacatgctcaagcccagaaggcagaatcaagctttgctttctagaagacgctcaaaggatatggaaacaaaagttgcagaggtgccatgttcagaatacaataataaagtggagtgaaag

SEQ ID NO: 741599 - DNA, 120 bp, Artificial Sequence
  ENSG00000204397_3 (sequence is synthesized)
atatacttcaggcagttttgaaatgcagtggctttttcttagaaccaattttattgagcggttctggaggaacatacttctgctccccttgcataaaggatctctatatcctagaatccc

SEQ ID NO: 741600 - DNA, 120 bp, Artificial Sequence
  ENSG00000204397_4 (sequence is synthesized)
aggtttaggtaaagagttgcaaactggaactcataaattatcatagtcttcacccagtctgtctcttagaatttatttcccactgacacaaacaagccattttgtctgcttgtataaccc

SEQ ID NO: 741601 - DNA, 120 bp, Artificial Sequence
  ENSG00000204397_5 (sequence is synthesized)
ctggcagagacgctgggactctcagcaggtccgatacctggaaattagcttagtacacaagactcccaattactattttcttccttcccagctcttcaggcagtgcaggacaacccagct

SEQ ID NO: 741602 - DNA, 120 bp, Artificial Sequence
  ENSG00000204397_6 (sequence is synthesized)
gagaaaagccatggccggtgagtcttttactgttccaagaacaggtccctgggaagaaagagttgtggaaagggctggctcttctggaagccataattagtatctgtggaagtttagaca

SEQ ID NO: 741603 - DNA, 120 bp, Artificial Sequence
  ENSG00000204397_7 (sequence is synthesized)
aagaagggtaggagagaaaagccatggccgagttaaataaacatgggacacaagaggatgatctctgctttccagggactgatgtggaaatggtaaactcagtcttcaggtcactccatg

SEQ ID NO: 741604 - DNA, 120 bp, Artificial Sequence
  ENSG00000204397_8 (sequence is synthesized)
cacatatatggggactactgagggaaacaagtaggacagcaatacagtaagaagagggattacccaactgtgaggagggggacatttcactgatgaaatctaaatgaggtcactttctgt

SEQ ID NO: 741605 - DNA, 120 bp, Artificial Sequence
  ENSG00000204397_9 (sequence is synthesized)
taagggtcagtgactcacactcaagttcacctagggcctgtcttcgtgcctaacatttgatttctttactagtcatgttaatctgcagaatatcttcttatctctgcctttgggccatat

SEQ ID NO: 741606 - DNA, 120 bp, Artificial Sequence
  ENSG00000204397_10 (sequence is synthesized)
ttctgtagcagaggccctattgcatgtcccttgactcttttttgtgttccttcatcctcagtgccctcttctgattaaagttcattttctgttctgagtacatggtagctaatttcctta

SEQ ID NO: 741607 - DNA, 120 bp, Artificial Sequence
  ENSG00000204397_11 (sequence is synthesized)
aggtcatgagaactatctagaaagcttcatacaatatgttccagtgttcctggcaaggcacgatatttattgattgatttattattttgtgtccagggtgtccctaagcccttatgtagt

SEQ ID NO: 741608 - DNA, 120 bp, Artificial Sequence
  ENSG00000204397_12 (sequence is synthesized)
tgtttgacatgagctttagggtctgtattcaaatactttttataaattcttttcaaacttttgccctcagagaagaataaagtatatttaagtgacgatgatacgttcaggaaatacatt

SEQ ID NO: 741609 - DNA, 120 bp, Artificial Sequence
  ENSG00000204406_0 (sequence is synthesized)
tgctgctactgctgctgcttggccctggctggagacatctcactacacccaggagcagccacttccccagctctcctcctcctccttcgcctcctcctcctccactccccccctttatta

SEQ ID NO: 741610 - DNA, 120 bp, Artificial Sequence
  ENSG00000204406_1 (sequence is synthesized)
ccctttgtgtcatcctccacagctccagggaaggcactcaaaagtggggggcaggaaagatgtacattgaagatgtcagtttctacatgtgggaagtagacattgaaggctttatggttt

SEQ ID NO: 741611 - DNA, 120 bp, Artificial Sequence
  ENSG00000204406_2 (sequence is synthesized)
acagacaagatctttagaagataagcactaaaggaccaaggaaataaataccagaaatcaagaagagcacacactattttccttcatcaatccatagaaccctaatgcttctttagttcc

SEQ ID NO: 741612 - DNA, 120 bp, Artificial Sequence
  ENSG00000204406_3 (sequence is synthesized)
atcaaacacagaggaatgaccaccatggcagatggcaacagaggatgtcaacaattttttggagagagaagaggtactcccttatagggactcgtaaagacatagagcatctggaaatta

SEQ ID NO: 741613 - DNA, 120 bp, Artificial Sequence
  ENSG00000204406_4 (sequence is synthesized)
actgcctccattacactgctgagtcacacacaacgcttgttatgttttcatcacttctctccagaaggctacattattggaattttgaagtcatgaaaacatcagatgaaccaacctgca

SEQ ID NO: 741614 - DNA, 120 bp, Artificial Sequence
  ENSG00000204406_5 (sequence is synthesized)
acaccttggattcagattggaagataaagagaaagtttaaagaatgtggcctataaaggcgggtacctggaaatattaaccgactcacactgtaaaaatgagaccagtttctaaacaata

SEQ ID NO: 741615 - DNA, 120 bp, Artificial Sequence
  ENSG00000204406_6 (sequence is synthesized)
gagattgtcttagtacaacatcaaggttcaagacaaatgttgaactaaaaactttacactccccacccccacttcagacaggtaccagcattggtgaattatgattttccttagtcagaa

SEQ ID NO: 741616 - DNA, 120 bp, Artificial Sequence
  ENSG00000204406_7 (sequence is synthesized)
gcactcatttttacccatgtagaccatccttaggaattaaatattggttatttaatgtagattataatgggaagctgatttttttcacaatggcatatttcaaggacttggttccaaact

SEQ ID NO: 741617 - DNA, 120 bp, Artificial Sequence
  ENSG00000204406_8 (sequence is synthesized)
gagctgaagcttcccaatgcgttttgtacagtctgggaaaaactgtgctgcactggcccacttttgaaggccatcatgctctgtaatataaggatatcatcttattgctgatatctttgg

SEQ ID NO: 741618 - DNA, 120 bp, Artificial Sequence
  ENSG00000204406_9 (sequence is synthesized)
agagtccctagcagacacagaaaatgaatggaggcaaagagtgtgacggaggggacaaggaaggaggtcttccagctatacaagttcctgtgggttggcagcgtcgtgtggatcaaaatg

SEQ ID NO: 741619 - DNA, 120 bp, Artificial Sequence
  ENSG00000204406_10 (sequence is synthesized)
gagtgctttatgtcagtcccagtgggtctttgttatcttgcttggagcaggttaaaacatacctgcttactgatggaacatgcaagtgtggcttggaatgtcctcttattcttcccaagg

SEQ ID NO: 741620 - DNA, 120 bp, Artificial Sequence
  ENSG00000204406_11 (sequence is synthesized)
tatttaattttgatcctggagctgctgtgaaacagagaaccgcagaagatgttaaggcagatgaagatgtcacaaagctatgcatacataaaagaaaaattattgcagtggccacacttc

SEQ ID NO: 741621 - DNA, 120 bp, Artificial Sequence
  ENSG00000204406_12 (sequence is synthesized)
ataaaagcatggaagccccacatccttctctggtgctcaccagtcccggaggaggaacaaatgcaactccagtagtaccttctcgggcagcaactccaagatcagtaagaaataagtctc

SEQ ID NO: 741622 - DNA, 120 bp, Artificial Sequence
  ENSG00000204406_13 (sequence is synthesized)
atgaaggaattacaaattctgtaatgcctgaatgtaagaatcctttcaagttaatgattggatcatcaaatgccatgggaaggctatatgtacaagaactgcctggaagccaacaacaag

SEQ ID NO: 741623 - DNA, 120 bp, Artificial Sequence
  ENSG00000204406_14 (sequence is synthesized)
aactccaccctgtctacccccgacagagattgggcagcagtgaacatggacagaaatctccattccgtggcagccatggaggcctgcccagcccagcgtcatcaggttcccagatatatg

SEQ ID NO: 741624 - DNA, 120 bp, Artificial Sequence
  ENSG00000204406_15 (sequence is synthesized)
gagatggttcaatctctccaaggactgacccacttggaagtcctgatgttttcacaagaagtaatcctggttttcatggagctcccaattctagtcctattcacctgaataggactcctc

SEQ ID NO: 741625 - DNA, 120 bp, Artificial Sequence
  ENSG00000204406_16 (sequence is synthesized)
tttctccaccttcagtaatgctacatggttctcctgtacagtcatcctgtgcaatggctggaaggactaatatacctctttccccaaccttgactacaaagagtccagtaatgaaaaaac

SEQ ID NO: 741626 - DNA, 120 bp, Artificial Sequence
  ENSG00000204406_17 (sequence is synthesized)
caatgtgtaatttttcaactaatatggaaataccacgagcaatgttccaccacaaaccaccccaaggcccacctccccctcctccaccttcttgtgctcttcagaaaaagccattaacat

SEQ ID NO: 741627 - DNA, 120 bp, Artificial Sequence
  ENSG00000204406_18 (sequence is synthesized)
ctgagaaagatccacttggcattcttgaccctattcctagtaaaccagtgaatcagaaccctgttatcattaatccaaccagtttccattcaaatgtccactctcaggtacctatgatga

SEQ ID NO: 741628 - DNA, 120 bp, Artificial Sequence
  ENSG00000204406_19 (sequence is synthesized)
atgtaagcatgcctcctgctgttgttcctttgccaagtaatctcccattgccaactgtaaaacctggtcacatgaatcatgggagtcatgtacaaagagttcagcattcagcttcaacct

SEQ ID NO: 741629 - DNA, 120 bp, Artificial Sequence
  ENSG00000204406_20 (sequence is synthesized)
ccctgtccccttctccagtgacatcccccgtgcacatgatggggactggaattggaaggattgaggcatcgccccaaagatcacgctcatcttccacatcatcagatcatggaaatttca

SEQ ID NO: 741630 - DNA, 120 bp, Artificial Sequence
  ENSG00000204406_21 (sequence is synthesized)
tgatgccacctgtaggaccccaggccacttctagtggtattaaggttccacccaggtcaccaaggtcaacaatagggtccccaaggccatcaatgccatcaagcccttctaccaagtccg

SEQ ID NO: 741631 - DNA, 120 bp, Artificial Sequence
  ENSG00000204406_22 (sequence is synthesized)
atggacatcatcagtacaaggatatccctaacccattaattgctggaataagtaatgtactaaataccccaagcagtgcagcttttcctactgcatctgccggaagtagttctgtaaaga

SEQ ID NO: 741632 - DNA, 120 bp, Artificial Sequence
  ENSG00000204406_23 (sequence is synthesized)
gtcagcctggtttgctgggaatgcctttaaatcagatcttgaaccagcacaatgctgcctcctttccagcaagtagtttactctcagcagcagccaaagcacagctagcaaatcaaaaca

SEQ ID NO: 741633 - DNA, 120 bp, Artificial Sequence
  ENSG00000204406_24 (sequence is synthesized)
aacttgctggtaacaacagtagcagcagtagcaattctggagctgttgccggcagtggcaacactgaaggacatagcactttaaacaccatgttccctcctactgccaacatgcttctcc

SEQ ID NO: 741634 - DNA, 120 bp, Artificial Sequence
  ENSG00000204406_25 (sequence is synthesized)
caacaggtgaagggcaaagtggtcgagcagcactaagagataagctgatgtctcagcaaaaagacgcattgcggaaaagaaaacaaccacctacgacagtgttgagtttgctcagacagt

SEQ ID NO: 741635 - DNA, 120 bp, Artificial Sequence
  ENSG00000204406_26 (sequence is synthesized)
ctcaaatggatagttctgcagttcctaaacctggacctgacttgctaaggaagcagggtcagggttcatttcccatcagttcaatgtctcagttactacagtctatgagttgtcaaagct

SEQ ID NO: 741636 - DNA, 120 bp, Artificial Sequence
  ENSG00000204406_27 (sequence is synthesized)
ctcacttgagtagcaatagtaccccgggttgtggggcctcaaatactgctttgccttgctctgctaaccagctgcattttacagatcccagtatgaactctagtgttcttcagaacatac

SEQ ID NO: 741637 - DNA, 120 bp, Artificial Sequence
  ENSG00000204406_28 (sequence is synthesized)
ctttaagaggggaagccgtgcactgccacaatgcaaacactaactttgttcacagtaacagtccagtccccaaccaccatcttgcaggtttaataaatcagattcaggctagcgggaact

SEQ ID NO: 741638 - DNA, 120 bp, Artificial Sequence
  ENSG00000204406_29 (sequence is synthesized)
cagtcaagaatttcaacgtcctccactccagtgataccaaacagcattgttagcagctataatcaaacaagttctgaagcaggcggttcaggaccatcatcctccatagccatagcgggc

SEQ ID NO: 741639 - DNA, 120 bp, Artificial Sequence
  ENSG00000204406_30 (sequence is synthesized)
accaaccaccctgccatcacaaagacaacatctgttcttcaagatggcgtcatagtcaccactgcagctggaaacccactgcagagtcagctacccattgggagtgattttccttttgtt

SEQ ID NO: 741640 - DNA, 120 bp, Artificial Sequence
  ENSG00000204406_31 (sequence is synthesized)
ggccaggagcacgcacttcattttccatccaacagcacttcaaacaaccatcttccacaccccttgaaccccagcctcctcagttctctacctatctctttgccagtgaatcaacagcat

SEQ ID NO: 741641 - DNA, 120 bp, Artificial Sequence
  ENSG00000204406_32 (sequence is synthesized)
ctcctaaaccagaatctattaaatatcctccagccttcagcaggagaaggtgatatgtcatcaataaacaatactttgagtaaccatcaactgactcatctacagtcgctgttaaacaac

SEQ ID NO: 741642 - DNA, 120 bp, Artificial Sequence
  ENSG00000204406_33 (sequence is synthesized)
aatcagatgtttcctccaaatcagcaacagcagcaacttctccaggggtaccagaatctccaggcgttccaaggacagtccacaattccttgcccagctaacaataaccccatggcttgt

SEQ ID NO: 741643 - DNA, 120 bp, Artificial Sequence
  ENSG00000204406_34 (sequence is synthesized)
ctgtttcagaactttcaggtgagaatgcaggaagatgcagctctcctaaacaaaagaataagcactcagcctgggctcacagcacttcctgagaatccaaacactacacttccacctttt

SEQ ID NO: 741644 - DNA, 120 bp, Artificial Sequence
  ENSG00000204406_35 (sequence is synthesized)
caagatacaccttgtgagttgcaaccgaggattgacccatctcttggtcaacaggtgaaggatggcctcgttgtgggtggcccaggtgatgcttccgtagatgccatttacaaagcagtt

SEQ ID NO: 741645 - DNA, 120 bp, Artificial Sequence
  ENSG00000204406_36 (sequence is synthesized)
gtcgatgcagccagcaaaggaatgcaggttgtcatcaccactgcagtcaacagtacaactcagatcagccccattccagctctgagtgccatgagtgccttcactgcctcaattggtgac

SEQ ID NO: 741646 - DNA, 120 bp, Artificial Sequence
  ENSG00000204406_37 (sequence is synthesized)
ccattaaatctctccagtgctgtcagtgcggtcattcatggacggaacatgggaggtgttgatcatgatggtaggctgaggaattcaagaggggctcggctgcccaagaatctagaccat

SEQ ID NO: 741647 - DNA, 120 bp, Artificial Sequence
  ENSG00000204406_38 (sequence is synthesized)
gggaaaaatgtgaacgaaggagatgggtttgaatatttcaagtcagcaagttgccacacatccaaaaaacagtgggacggggagcaaagccccagaggggagcgaaacaggtggaagtac

SEQ ID NO: 741648 - DNA, 120 bp, Artificial Sequence
  ENSG00000204406_39 (sequence is synthesized)
gaggaatttttagatcatccaggccatatccacagtagtccttgtcatgaaaggcccaacaatgtctctacactgccatttctgcctggggaacagcacccaatactgttaccaccaaga

SEQ ID NO: 741649 - DNA, 120 bp, Artificial Sequence
  ENSG00000204406_40 (sequence is synthesized)
aactgtccaggggataaaattctagaggaaaatttcaggtataataactacaaaagaactatgatgagttttaaggagagactagagaacactgtggaaagatgtgcacacataaatggg

SEQ ID NO: 741650 - DNA, 120 bp, Artificial Sequence
  ENSG00000204406_41 (sequence is synthesized)
aatagacctcgacagagtcggggatttggagagctgctaagcactgcaaagcaagacctggtcctagaggagcagtctccaagttcctcaaatagtttggaaaattctctggtcaaagac

SEQ ID NO: 741651 - DNA, 120 bp, Artificial Sequence
  ENSG00000204406_42 (sequence is synthesized)
tacatccattacaatggagactttaatgccaaaagcgttaatgggtgtgtgcctagcccttcagatgctaaaagcattagtagtgaagatgacctaaggaacccagactccccctcttca

SEQ ID NO: 741652 - DNA, 120 bp, Artificial Sequence
  ENSG00000204406_43 (sequence is synthesized)
aatgaattgatacattatagaccaaggacgttcaatgttggcgacttggtctggggccaaatcaaaggactgacttcctggcctggaaaattagtaagagaagacgacgttcacaattca

SEQ ID NO: 741653 - DNA, 120 bp, Artificial Sequence
  ENSG00000204406_44 (sequence is synthesized)
tgtcaacaaagccccgaggaagggaaggtctgggtaatgtggtttggtcttcataccttcactcaggtggagcccgagaagttgaagacactaacagaaggtttggaagcctacagccgt

SEQ ID NO: 741654 - DNA, 120 bp, Artificial Sequence
  ENSG00000204406_45 (sequence is synthesized)
gtccggaaaaggaacagaaaaagtggaaagctaaataaccatttagaagctgctattcatgaggccatgagtgaactggacaaaatgtctgggactgtacaccaaatcccacagggtgac

SEQ ID NO: 741655 - DNA, 120 bp, Artificial Sequence
  ENSG00000204406_46 (sequence is synthesized)
agacaaatgagaccccccaaacccaagaggaggaagatctccagataacagagactactccactaatgcgcagtgtttattaaaggaacatgcacagatgtatctgtatataggtattga

SEQ ID NO: 741656 - DNA, 120 bp, Artificial Sequence
  ENSG00000204406_47 (sequence is synthesized)
tatagccacagttatatcaatatttagactatggcagatagctaccaccaccacagggtgctaaaagaaacagtgatacaaaatttttttgatcaggaaggataatgaatgctggaaaag

SEQ ID NO: 741657 - DNA, 120 bp, Artificial Sequence
  ENSG00000204406_48 (sequence is synthesized)
ccaatcaaagtctctgtgtgatgagagtgatcaatggtcaagagattactgagaaactctttttctataatactaaattgtgattataagaaatagtccaaatgtttctgaagaattttc

SEQ ID NO: 741658 - DNA, 120 bp, Artificial Sequence
  ENSG00000204406_49 (sequence is synthesized)
aatgttgtatatagaaaatacagaatttcatggtgatatcagaaatgtaaatattgtacagtattgtcatgtacaagcgtacctaatgcacactttatcttttattgtacaaagaaatag

SEQ ID NO: 741659 - DNA, 120 bp, Artificial Sequence
  ENSG00000204406_50 (sequence is synthesized)
tgtacaaaattctttggtttctatggagtacacctaccagagactaccagtgtaaagtgataaataaaaatacaacctaaatgcttttctatgataatgtaaaagatgctgtttttgtat

SEQ ID NO: 741660 - DNA, 120 bp, Artificial Sequence
  ENSG00000204406_51 (sequence is synthesized)
ttaacagcagagaaaaggcatgatgatgtaatatctgaattatgacatacactgcacaccactgagtgtccatttatattgtctgtttggaatgaaccttgcctggaagcactggactca

SEQ ID NO: 741661 - DNA, 120 bp, Artificial Sequence
  ENSG00000204406_52 (sequence is synthesized)
atttcgggtgtctaggaaattgcaactttgcagatttctaaagggatgagggctcacaggtctaaattaagaattcagaaactgcaaccatttgttgcatattttttttacctaagtttt

SEQ ID NO: 741662 - DNA, 120 bp, Artificial Sequence
  ENSG00000204406_53 (sequence is synthesized)
aaaatagaataggttttataaaaaaaaatcttagatggaatattttactcagccatttctgtagttaacatttgatagccacctgttgaagcagatagcttatactgactgcaccaccgc

SEQ ID NO: 741663 - DNA, 120 bp, Artificial Sequence
  ENSG00000204406_54 (sequence is synthesized)
tggtgctcagaattgagggtttttttgcaaatgatatctgacaaggtaaaactttctatttccgtacatggaggcaaaaaccccactttgcaaccattatcagaggtaagattgataata

SEQ ID NO: 741664 - DNA, 120 bp, Artificial Sequence
  ENSG00000204406_55 (sequence is synthesized)
attcatttttttgtagtggcaaatataaatatgaatcatcaaagcaagtttcatatccattcatcagtattacttaacccagaagttaaggtggcttacggaattattagcaatggtaat

SEQ ID NO: 741665 - DNA, 120 bp, Artificial Sequence
  ENSG00000204406_56 (sequence is synthesized)
agcaatggtaatttttttatcagtattgtgtaacatatcagatttattttatttaaagaattatttataccattaacagattcttatatatattaatgtggcaaaaatgtgcaggttaaa

SEQ ID NO: 741666 - DNA, 120 bp, Artificial Sequence
  ENSG00000204406_57 (sequence is synthesized)
attatttatattatattaagtaagaaaaaatgtgaaacaaatgtagagagaaaatactacattacaagtatacaaacctaaaactgtgagccattgtaaagtacaaggtaattaataaga

SEQ ID NO: 741667 - DNA, 120 bp, Artificial Sequence
  ENSG00000204406_58 (sequence is synthesized)
cgcctcctcctcctccactccccccctttattaccctttgtgtcatcctccacagctccagggaaggcactcaaaagtggggggcaggaaaggatcgttaaacaccagttcagcgggagt

SEQ ID NO: 741668 - DNA, 120 bp, Artificial Sequence
  ENSG00000204406_59 (sequence is synthesized)
gacactacagaatctggactctatgacttgttttgggagtaacaggagggtgtgatgaggaatttctgtgaaggtgacttctggatcctcagcttcaattactgaaactatggagagaca

SEQ ID NO: 741669 - DNA, 120 bp, Artificial Sequence
  ENSG00000204406_60 (sequence is synthesized)
aagttggaaacccacatgcctatagaggccaggctgatgggaatgaagcaggaagctattgcagtgaactggagcgccaaatcctttctggaggagcagccactgctccattccagataa

SEQ ID NO: 741670 - DNA, 120 bp, Artificial Sequence
  ENSG00000204406_61 (sequence is synthesized)
tcctccagccttcagcaggagaaggcaagtctgagatcaacctccaccctttaggttttctcaacccgaatgtaaacgctgctttagcttttctctccagtgacatggatgggcaggtat

SEQ ID NO: 741671 - DNA, 120 bp, Artificial Sequence
  ENSG00000204406_62 (sequence is synthesized)
ttagcagccttgcttcagaaccaagcccaagcagctgccatgcttcccctgccatctttcaatctgaccatctcagatcttttgcaacagcaaaatacccctttaccctcattaacacag

SEQ ID NO: 741672 - DNA, 120 bp, Artificial Sequence
  ENSG00000204406_63 (sequence is synthesized)
atgacagccccaccagaccatttgccaagcaatcagtcagacaacagccgagctgagacccttttaaccagccccctggggaaccctttaccaagctttgcaggcagtgacactactttt

SEQ ID NO: 741673 - DNA, 120 bp, Artificial Sequence
  ENSG00000204406_64 (sequence is synthesized)
aaccccctgttcctcccagctgtcaatggggcctcaggattaatgaccttgaatccccagctgttgggaggtgtcctgaactcggcatcggccaacaccgctaatcatccagaggtttcc

SEQ ID NO: 741674 - DNA, 120 bp, Artificial Sequence
  ENSG00000204406_65 (sequence is synthesized)
atagcaacctcctcccaggcaaccactaccacaaccactacatcatcagcagtggcagcactgactgtctcaacacttggtgggacagcagtggtgtcaatggcagaaacattgctgaat

SEQ ID NO: 741675 - DNA, 120 bp, Artificial Sequence
  ENSG00000204406_66 (sequence is synthesized)
atatctaataatgctgggaatacacctggtccagctaaactcaacagtaactctgtggtgccacagctacttaaccctctactggggacaggtctacttggtgatatgtcatcaataaac

SEQ ID NO: 741676 - DNA, 120 bp, Artificial Sequence
  ENSG00000204406_67 (sequence is synthesized)
tgtcatcctccacagctccagggaaggcactcaaaagtggggggcaggaaagcccacatatgacagtggacatagaggacaacgcagatatagaacatttcttttatcacaagtcttgct

SEQ ID NO: 741677 - DNA, 120 bp, Artificial Sequence
  ENSG00000204406_68 (sequence is synthesized)
ggccttccaaagtgctgggattacagtcgtgtgccaccgcgcttggccgtttattgaataggtttttctttaccattgattttcagtgtctccttggtcttataattgtatttccatatg

SEQ ID NO: 741678 - DNA, 120 bp, Artificial Sequence
  ENSG00000204406_69 (sequence is synthesized)
cttggtcttataattgtatttccatatgtgtatgggtcagcttctgaactcactattgtgttgcattggtgaagtagttctgaatcttcccttaattgctgtaagtttagataagtcttg

SEQ ID NO: 741679 - DNA, 120 bp, Artificial Sequence
  ENSG00000204406_70 (sequence is synthesized)
gtagttgataatgtaagacatgtcacatagtactctgttagaaatttcataatcagtttggcatgttctataagaaatcttgtggggattttgatggaattgatctaattattataattt

SEQ ID NO: 741680 - DNA, 120 bp, Artificial Sequence
  ENSG00000204406_71 (sequence is synthesized)
aattttatgtccaagaccatggaatacctctccttatattttactctactttaacgtctctcaaagttttgaaatcttccctgtaactttcttatgtgtagtcttggtactttaaaattc

SEQ ID NO: 741681 - DNA, 120 bp, Artificial Sequence
  ENSG00000204406_72 (sequence is synthesized)
cctttattaccctttgtgtcatcctccacagctccagggaaggcactcaaaagtggggggcaggaaagggttttgctttgtcatcctggccagagtgcagtggcacaatcacagctcact

SEQ ID NO: 741682 - DNA, 120 bp, Artificial Sequence
  ENSG00000204406_73 (sequence is synthesized)
cttagcactatgattctatagaaaaatctggctatgtgtctttttttatgtgtatttctgaattacaagtgatctttaagggaacctagcatattgcctggaacatagtaggtgttcaaa

SEQ ID NO: 741683 - DNA, 120 bp, Artificial Sequence
  ENSG00000204406_74 (sequence is synthesized)
aatgttgaaagaatgggcgaatattctctagtgcctgggataagacagcatgctagatgtaatgtgagcctatgtatgtatgttaactgtctctgctggaaaacaaagtactttagaatt

SEQ ID NO: 741684 - DNA, 120 bp, Artificial Sequence
  ENSG00000204406_75 (sequence is synthesized)
aaactgattttatctggctttcaccattttatagaacaaaataggcaaattatttctttgaactctggtttcttcatctgtaaagtatggtgacaatacctatcttataagtttgttgtg

SEQ ID NO: 741685 - DNA, 120 bp, Artificial Sequence
  ENSG00000204406_76 (sequence is synthesized)
aagagtgaatgagataatgtatgtaaagcttatattgttatagtggctataagagtttagttgagaaattagtgttacagttactattactattatttttactaataaagggtgggtaaa

SEQ ID NO: 741686 - DNA, 120 bp, Artificial Sequence
  ENSG00000204406_77 (sequence is synthesized)
tttattatgataagaaatgatcctttccccattgtgaaattctcttcatttctttagtatttataattttatttacagaatgctagggatttgtctattgggaagattaacagctaagag

SEQ ID NO: 741687 - DNA, 120 bp, Artificial Sequence
  ENSG00000204406_78 (sequence is synthesized)
gatttcatgtgtttccattatttgttgtcaatctgtgtcattttgaatattgttcgactttcacttggttttataaccattggactccaaactgcaaaataagccatacgaggcagggtt

SEQ ID NO: 741688 - DNA, 120 bp, Artificial Sequence
  ENSG00000204406_79 (sequence is synthesized)
tcctggtttgtgagacatgtccttggtctatgccaatataaaagccatctccctagcttttgtttgtattcaggtaaatgaagtttatcttggaaaaatccaaaaaggcaaaaataaatg

SEQ ID NO: 741689 - DNA, 120 bp, Artificial Sequence
  ENSG00000204406_80 (sequence is synthesized)
gattttttttcttgctgctgaacagaagtaggtgaatggataggaaaaggtaactagaagttgtacgaagtagaaggctgtcttctaatgtgttttcttatcctagtttgctatccttat

SEQ ID NO: 741690 - DNA, 120 bp, Artificial Sequence
  ENSG00000204406_81 (sequence is synthesized)
tatttgtttgagaaaactcaaaaatggatattggctactcccttttaaaaaaaaagctaataatttaagctttctaataaaaaaaaggcttgaaaacctgatttccagaatttttaatct

SEQ ID NO: 741691 - DNA, 120 bp, Artificial Sequence
  ENSG00000204406_82 (sequence is synthesized)
tgaaattgttttttgagtttcttgtagaactaaaccatttttatcattgacattaaggttttgaacccaaatctattgtatctcttcagccaccattaaggaaacaaatttatttaaaag

SEQ ID NO: 741692 - DNA, 120 bp, Artificial Sequence
  ENSG00000204406_83 (sequence is synthesized)
taggcatattagaaaaagacctgtattttgtgcaatagagtcctcagaaattgttataaaaactgtacagaagcacctaagaggtaaatgtgttgaggcatcagaaaatttgactatgaa

SEQ ID NO: 741693 - DNA, 120 bp, Artificial Sequence
  ENSG00000204406_84 (sequence is synthesized)
aacattattcaacactaatgatttatgagaaatgacaaggaggaaataaaagatggttgtaaagacattattgttcactatgaaaacagtgtgctatgaaaaccagattgctactgggaa

SEQ ID NO: 741694 - DNA, 120 bp, Artificial Sequence
  ENSG00000204406_85 (sequence is synthesized)
tgagaaaactgctgaggtttttaataataagctagtgtgtaggtataataccgtcatgctggagaagcattctaacccacatgtctttgttgctgatagtaaaagcgttttccttcctag

SEQ ID NO: 741695 - DNA, 120 bp, Artificial Sequence
  ENSG00000204406_86 (sequence is synthesized)
tgttgccatttacacctgccatccttcacatcttgtgttatgtgttatgttttgatgtcactatttaatgaagaactattcaatgatctcttatgttaaatatatatatggtttagaaga

SEQ ID NO: 741696 - DNA, 120 bp, Artificial Sequence
  ENSG00000204406_87 (sequence is synthesized)
tatttgaaattattagtgccttcttgatattcttagtttaaagaatctcataaaactttatgttttatgtgtctaacagtatacttatcccatagggggcttccagcttttcactcactc

SEQ ID NO: 741697 - DNA, 120 bp, Artificial Sequence
  ENSG00000204406_88 (sequence is synthesized)
atcatatttctttttagataactcgacacaaatgaaaattttattttatctatttagcagaaaagtcacacaaagttcataactatttaaaagtacaccatatttattgagcatacctta

SEQ ID NO: 741698 - DNA, 120 bp, Artificial Sequence
  ENSG00000204406_89 (sequence is synthesized)
aataattttgatgggacatttttagtctcattgcattatacagttttgatatcccctacctcagtttacttcatttcaggtctgagttcatgtgcaaagtgtatgtatttcattgatgta

SEQ ID NO: 741699 - DNA, 120 bp, Artificial Sequence
  ENSG00000204406_90 (sequence is synthesized)
tttcaattcatctataatggaaaagaccaacatttacttatattcttgtttcttctgatggtcaagtttagacttatttaatactgttttggtcatttattttttttgtttcatgtatct

SEQ ID NO: 741700 - DNA, 120 bp, Artificial Sequence
  ENSG00000204406_91 (sequence is synthesized)
ttgtaatacatctgacctgtactgttactgctgggggtgtcaaagcatataggttaaaaatttattagtgtcagaaaagtgtgagcatataaatagctaaaaaggataaggatacatgtc

SEQ ID NO: 741701 - DNA, 120 bp, Artificial Sequence
  ENSG00000204406_92 (sequence is synthesized)
tagaaatgatatgaatatgaccaactagtgtaaactaacaggaagtatgtgcttaataaaaatctaagtagaatttttaaagtattaaacctaataaaattaaatactaattaacgtgca

SEQ ID NO: 741702 - DNA, 120 bp, Artificial Sequence
  ENSG00000204406_93 (sequence is synthesized)
ttgtatccttcaatccagtcaagttgatactcagtattaaccatcacaggaagcaaggggtatatgggagtctctgtactttccactccattttgctatgaaactaaaactgctctgaaa

SEQ ID NO: 741703 - DNA, 120 bp, Artificial Sequence
  ENSG00000204406_94 (sequence is synthesized)
aagaagaggaagaggaagaggaagaagaaatggaaaaactttaaaagggaaattttttaaatgacattttataaatttacatttaaaattaagtttagacttacacaaacacaaataaca

SEQ ID NO: 741704 - DNA, 120 bp, Artificial Sequence
  ENSG00000204406_95 (sequence is synthesized)
ttaagtttagacttacacaaacacaaataacatctgtcaatatcccactacacactttgaaaatgctagattatgatatattcttaaaaatggaatcggtagatcaaatagtaaataaat

SEQ ID NO: 741705 - DNA, 120 bp, Artificial Sequence
  ENSG00000204406_96 (sequence is synthesized)
tgaaagattataccagtttacatttctaccaacagtgtttgaaagaatgagaatgtcactttctctatagttttgtcaacatttgacattaactttattttttacaaaacctgatacaat

SEQ ID NO: 741706 - DNA, 120 bp, Artificial Sequence
  ENSG00000204406_97 (sequence is synthesized)
ccaaatttttcttgtggaggggtctttgaattttatgtagactgataagaatcataatcatattaagaatattaaatctataaatcatatatatcacaattatgtcttcttttttatttt

SEQ ID NO: 741707 - DNA, 120 bp, Artificial Sequence
  ENSG00000204406_98 (sequence is synthesized)
gttttgtgtgctttatttttgttatataatgctatcatttttatgagcttaaatctatcatctttttcatggcttttgggttttgatgtttctttgtaccttggctttattttaaaaaaa

SEQ ID NO: 741708 - DNA, 120 bp, Artificial Sequence
  ENSG00000204406_99 (sequence is synthesized)
aactattatagaaagtcagaaacagaggagttgacaggataataaaatgaaccccaatgtacctcaaatctggcttcattaattgagaattcatggccaatcttgtttcatttatacccc

SEQ ID NO: 741709 - DNA, 120 bp, Artificial Sequence
  ENSG00000204406_100 (sequence is synthesized)
ctgtattattctgaagcaaatcccaggcattatatgattttctctgttactatttcagtgtatatactaactttagatggaattttgcctaacccatgttttacatctgccatagtttgg

SEQ ID NO: 741710 - DNA, 120 bp, Artificial Sequence
  ENSG00000204406_101 (sequence is synthesized)
ctgaaatcactgacttccactacaatatacttatgttatatcaaacatcagcattaagcctgggcaacatagaccctgtctctgaaaagaaaaattaactgggcatggtgatgtgtgcct

SEQ ID NO: 741711 - DNA, 120 bp, Artificial Sequence
  ENSG00000204406_102 (sequence is synthesized)
gtgtgcctataattctagctattcagaggctgaagcgggcgaatggcttgagccaaggagttttgaggctatagtgagccatgactgcaccattgcactccagtctgggcaacagagtga

SEQ ID NO: 741712 - DNA, 120 bp, Artificial Sequence
  ENSG00000204406_103 (sequence is synthesized)
ctttaaaaaagaaaatcagcattagctaagattattgttatttaatttactattttaaaatggcctctataagaatttaattattttaatatggcatgcctcaccagcctcccttatgcc

SEQ ID NO: 741713 - DNA, 120 bp, Artificial Sequence
  ENSG00000204406_104 (sequence is synthesized)
atcctctcctacactccctgctctagccttttaattccctgagcaagtaagcccctagaaacttctctatatgctattctctctatccaaaatgttcttgccccaaacttccccacctcc

SEQ ID NO: 741714 - DNA, 120 bp, Artificial Sequence
  ENSG00000204406_105 (sequence is synthesized)
ttacaggctcagtaggatggctcatacctgtaatcccatcactttgggaggcctgtgtgctacaatcgcttaagtccaggagtttgagaccagcctgagcagcatcgtgagacctcgtcg

SEQ ID NO: 741715 - DNA, 120 bp, Artificial Sequence
  ENSG00000204406_106 (sequence is synthesized)
acagatgaagaaattaagactgagagaggttaggtctgttgtctaaggtcacacacaactagcaattatagtagctggtattcaaacctgatcagtctggcttcaaagtgcattctcttt

SEQ ID NO: 741716 - DNA, 120 bp, Artificial Sequence
  ENSG00000204406_107 (sequence is synthesized)
ctagtatgcttttgaactgcctagaaaaataatggcaatttctgaaatgcaacagtatgattcacgatagttgctaggcattgtaccaatcagaattcttagttttaaacaatagaagcc

SEQ ID NO: 741717 - DNA, 120 bp, Artificial Sequence
  ENSG00000204406_108 (sequence is synthesized)
agctttgtctaaagcagaaaaggaatatttggtaatatcatagagcctgcagaatctataggggtgctggagaactagacttaagaaactggtagaaatgaagaaatgtaaagccttgcc

SEQ ID NO: 741718 - DNA, 120 bp, Artificial Sequence
  ENSG00000204406_109 (sequence is synthesized)
aatgtcataccataggaaaattctgctttgaagtctgctgctgatacagtttccactggacagcctttaacatgccactgggttctgctgcctttggacactcaatgaagtttgctgttt

SEQ ID NO: 741719 - DNA, 120 bp, Artificial Sequence
  ENSG00000204406_110 (sequence is synthesized)
cagtgtgactgcagcttccatgagtaacctctgcctcactctcacaaaattcaaagtcctgggtgggagcattagtttggttaacaaaggtcacatgactgatgatcaataatcaaataa

SEQ ID NO: 741720 - DNA, 120 bp, Artificial Sequence
  ENSG00000204406_111 (sequence is synthesized)
ctaggaaagggactatcccagactttttgagatttcccaaaataaggaatgtgttcagacactgggcagccatcaacagatgtcatttacacgtatgtgtgcatgtagacacacgcacac

SEQ ID NO: 741721 - DNA, 120 bp, Artificial Sequence
  ENSG00000204406_112 (sequence is synthesized)
tttaattattaatcctactgattatataatatttattttgaatgattatgacaatgaattcttttgtgttgttagctttcttttccatgttaattttaggtgaccaaccttctactgcaa

SEQ ID NO: 741722 - DNA, 120 bp, Artificial Sequence
  ENSG00000204406_113 (sequence is synthesized)
aacaaaatgcacgtttctaaaccaaatcgatgatttgatttggtatctattgatgattatggcttgagaactaaattttgtaaacaaggcctgatcaggctcacttattttaattatctg

SEQ ID NO: 741723 - DNA, 120 bp, Artificial Sequence
  ENSG00000204406_114 (sequence is synthesized)
gtcagatacttacaattgctaaaacattataggactaatttcaacctttaattttaggtgctctaaaatagatctaaaatctaaaaatagatgaaggaatcatatgacactgcagctcaa

SEQ ID NO: 741724 - DNA, 120 bp, Artificial Sequence
  ENSG00000204406_115 (sequence is synthesized)
tatataaggactgcctaatgaatagagcaaagactaagtagtctttccatgatgtaaaattaaaaaactaattatacaagataaaactaaataataaagctactctttccttaccactta

SEQ ID NO: 741725 - DNA, 120 bp, Artificial Sequence
  ENSG00000204406_116 (sequence is synthesized)
gtaagactttgagaagtaaaaaagaaaagcattacccaagtaagcatagcacttagtttctgtttcaggaattctcgggtacaaagagaggcatcgaatctccgaagaatcacatttatt

SEQ ID NO: 741726 - DNA, 120 bp, Artificial Sequence
  ENSG00000204406_117 (sequence is synthesized)
cttaaaggaaaaaggatggaaaagaaaagagacgtggtttcagagagaagaggtactcccttatagggactcgtaaagacatagagcatctggaaattaactgcctccattacactgctg

SEQ ID NO: 741727 - DNA, 120 bp, Artificial Sequence
  ENSG00000204406_118 (sequence is synthesized)
gtcacacacaacgcttgttatgttttcatcacttctctccagaaggtttcagaatctcctcttcaactacctacaatgaagaaataaatcacctccaacagtcaaaagtctgaaattaag

SEQ ID NO: 741728 - DNA, 120 bp, Artificial Sequence
  ENSG00000204406_119 (sequence is synthesized)
cacatatgacagtggacatagaggacaacgcagatatagaacatttcttttatcacagtaagttctttggataacactgctctagaacaatactttctaaaatgtgtcccatgaatcaca

SEQ ID NO: 741729 - DNA, 120 bp, Artificial Sequence
  ENSG00000204406_120 (sequence is synthesized)
gtggtgatccgtaagctgtcactggtctgcaacaaaataagtacaaatatggagactttttagaacattttatggcaacttcacgttgctgcaacatccaagtacatgatcacttttaca

SEQ ID NO: 741730 - DNA, 120 bp, Artificial Sequence
  ENSG00000204406_121 (sequence is synthesized)
gtcattttagaaatttagtattttagaatttagtaattcattttcattgtattttacataagtattaattagcaaaagattagaaagaaagaaaaacaagagtttgctcacagtgaatac

SEQ ID NO: 741731 - DNA, 120 bp, Artificial Sequence
  ENSG00000204406_122 (sequence is synthesized)
tttgagaaacactacccttgggtatgtttaggtggaattgcaagatcacagtgtatgcttatgttcaactttattggataaattcactacgttttccaaaattattgtgtcaatattata

SEQ ID NO: 741732 - DNA, 120 bp, Artificial Sequence
  ENSG00000204406_123 (sequence is synthesized)
ttcccaccatcagagtatgagagtttccattgttttgctgtttctctgtccctggcttttgtgtccctcattttagatttaaattttgccaggtgatggatgtgaaatggcatcttataa

SEQ ID NO: 741733 - DNA, 120 bp, Artificial Sequence
  ENSG00000204406_124 (sequence is synthesized)
ttttaatttacagttccccaattgctaatgagataaatatatttttatatgtatataatgcattcatgattctactttagattcatagggattctttttatgttctgatactgatctgct

SEQ ID NO: 741734 - DNA, 120 bp, Artificial Sequence
  ENSG00000204406_125 (sequence is synthesized)
aattttaacttagtagaaattttcttatttttgtatgtgtgtgtgcgtgtattgtgtttaaggtctcctagaattcttttttgtctgtttaagttttaaagctttatctttcacatttag

SEQ ID NO: 741735 - DNA, 120 bp, Artificial Sequence
  ENSG00000204406_126 (sequence is synthesized)
gtctttatacccatctgcaccttgattaaatttccgttcagggtttgggataaggatctaattatttttgccttctttgattaacaatcccttcactgcttattgaataggtttttcttt

SEQ ID NO: 741736 - DNA, 120 bp, Artificial Sequence
  ENSG00000204406_127 (sequence is synthesized)
aaccaaccagccacccgtcagagagggacatgcgcaatgtacattgaagatgtcagtttctacatgtgggaagtagacattgaaggctttatggtttacagacaagatctttagaagata

SEQ ID NO: 741737 - DNA, 120 bp, Artificial Sequence
  ENSG00000204406_128 (sequence is synthesized)
gctttttgttatcatcactttggattctttggatttgaaattaggattcttcatgactcattgaggtctcacaagcttctggagcataaaatgaagaggggatggttatagtcaacaaaa

SEQ ID NO: 741738 - DNA, 120 bp, Artificial Sequence
  ENSG00000204406_129 (sequence is synthesized)
gttgaaggaatacttccagcagatgtacattgaagatgtcagtttctacatgtgggaagtagacattgaaggctttatggtttacagacaagatctttagaagataagcactaaagataa

SEQ ID NO: 741739 - DNA, 120 bp, Artificial Sequence
  ENSG00000204406_130 (sequence is synthesized)
tgtcaaaagaagggatctattatccctttattcttggaaccaccagtccctgccccaaacccttaaacccctagagagcactgcctcgtcctctagcctggggctcacacaacagtctgc

SEQ ID NO: 741740 - DNA, 120 bp, Artificial Sequence
  ENSG00000204406_131 (sequence is synthesized)
cactcaggctgctaggagattctccaatagcaggctcagcacctcaaactgcccaccacctctcctactgctcctctcccacccaccacccaaactcctcagtcctgtcatgtagcagag

SEQ ID NO: 741741 - DNA, 120 bp, Artificial Sequence
  ENSG00000204406_132 (sequence is synthesized)
ttccagtaactcaggaaaatggagaccaaggtcattccttaagttggtttcttggggccacagcacagagcatgccacctgggctcacttttgatagcaacagctcttagttattcccct

SEQ ID NO: 741742 - DNA, 120 bp, Artificial Sequence
  ENSG00000204406_133 (sequence is synthesized)
aggtctcctgtgtctctctgtccctctgttcctactttcaacctacccccaagcctgatggaatgcaactggctaccctgggcttcatgacctcaaagtaggaacccttcgttctggggg

SEQ ID NO: 741743 - DNA, 120 bp, Artificial Sequence
  ENSG00000204406_134 (sequence is synthesized)
taggttcattttgtctctcttgtaatggtgggattgcctgcccagttccttcatgcagtcacatgaagtaatcttttgtgtagtttagttgacacatgtttataagttaaaagttgatgt

SEQ ID NO: 741744 - DNA, 120 bp, Artificial Sequence
  ENSG00000204406_135 (sequence is synthesized)
ggctagtatgtttaaaccattaatgtccattttttttgcaccaacctgtttttctactgttttttcctacacatttttgtttattcacagacagacagacatgtgtgtttgtatgctggg

SEQ ID NO: 741745 - DNA, 120 bp, Artificial Sequence
  ENSG00000204406_136 (sequence is synthesized)
tgtgtctgtatgtgtgtatgtgttgatatgtaaattttttagcctttgcttttctgtcttcaggctgagtttgtgttgaccaagccttctttttggtattttgagctaattcagtttgtg

SEQ ID NO: 741746 - DNA, 120 bp, Artificial Sequence
  ENSG00000204406_137 (sequence is synthesized)
cttccctcccattgtatactttacataagtagaccatgtaaagtatgtttgtgcccatgatttcactggttgctatggctttgatatgggtgctaggtgtagtagtttcagtccacgtgg

SEQ ID NO: 741747 - DNA, 120 bp, Artificial Sequence
  ENSG00000204406_138 (sequence is synthesized)
gtttttttcatctctcttagagttatatggttttgtgtaagcagttaatgtaaatattgttagcattacaggtcatacagtgctgtaacatttttttaaatgttgcacctactttacaat

SEQ ID NO: 741748 - DNA, 120 bp, Artificial Sequence
  ENSG00000204406_139 (sequence is synthesized)
taaaaaattggtcactcgcacttcaattttgcccatagagccatttctttgtctttgtattgaagccaattcatttttttaaatgaaggctaggccttctatgttaccaaaatttttatt

SEQ ID NO: 741749 - DNA, 120 bp, Artificial Sequence
  ENSG00000204406_140 (sequence is synthesized)
ccctaaaataaactttttaagaaacaaatccaagaatggaaacagatgaaaaattttttcttctttaaagaacataatagttcctgctggaaaaggaaatctaattttattttgtgtccc

SEQ ID NO: 741750 - DNA, 120 bp, Artificial Sequence
  ENSG00000204406_141 (sequence is synthesized)
ttaacagtcctaggaagcacaaggagaataaactaaacctctaagaaggttttaaaaattatttcaaatgagtgaaaattaactgagcagcttttgtgtgatttgtcttgtttgtagcat

SEQ ID NO: 741751 - DNA, 120 bp, Artificial Sequence
  ENSG00000204406_142 (sequence is synthesized)
taaaagcaaaccagggtttttatttatttaaaggaacatttttggcttgtacttttcagtgccattatgaatgaaaatgttttaagaacattcatcccttgtgatatcatgggccacttt

SEQ ID NO: 741752 - DNA, 120 bp, Artificial Sequence
  ENSG00000204406_143 (sequence is synthesized)
tagtcttttatttggaccctgactttgagtttttgctatgcctgttttttaagtaaacacagccttcttatttgaacgtaacactgcagaattgcaggaagagaaaagggcagttagtta

SEQ ID NO: 741753 - DNA, 120 bp, Artificial Sequence
  ENSG00000204406_144 (sequence is synthesized)
tttcactttctgtaagttttaggaagattcttatatcctacgaggtgactcatgtttcattttagaccatgatagcacattgttgttaactttggtaatcttccatgcagtttgcagtgt

SEQ ID NO: 741754 - DNA, 120 bp, Artificial Sequence
  ENSG00000204406_145 (sequence is synthesized)
tcccttgcaagtcacaagcatatatgcattaagattttaaaatctaagatgcttaagatgttggtggcattgctctttctgaaaagaaagacaaaatactagaccttgctgaaaattgga

SEQ ID NO: 741755 - DNA, 120 bp, Artificial Sequence
  ENSG00000204406_146 (sequence is synthesized)
tatcttatttactttgcccatttatgcccgaatggtgtaatgcaagactcaagacttttcaatgtagtatatcaaatgagttgtgcattgattcatttgggggacatgaacaaaaattat

SEQ ID NO: 741756 - DNA, 120 bp, Artificial Sequence
  ENSG00000204406_147 (sequence is synthesized)
caaccagccagaactgtaatatttaattagttcatctttttctttcattcactctatcacatttgcattagccaaagagataagaacattagtaattcatatgtgtaaacaacccagaag

SEQ ID NO: 741757 - DNA, 120 bp, Artificial Sequence
  ENSG00000204406_148 (sequence is synthesized)
tgaatattaaatcagtgagccaaaaagcaataaacaactcgagcatgggaaatcctgctaacagtggggagtctgatatagaaaaaatatataaaaagcattatcttcaaatatgaaaga

SEQ ID NO: 741758 - DNA, 120 bp, Artificial Sequence
  ENSG00000204406_149 (sequence is synthesized)
ttaatttgtatctactgtaaatatgtattaccagccttatctgcatttatacacactgtgtgtgtacctcagtgaccttttataaaccggaaaaatggttgatttaataatttgttatgt

SEQ ID NO: 741759 - DNA, 120 bp, Artificial Sequence
  ENSG00000204406_150 (sequence is synthesized)
aaatacaaagttgtctataaattggaaaatttgatgccagatggcttcataatatacaaatgtgttttgtaacatcatgcctttatggattaagtataaatacactggattgtctatgta

SEQ ID NO: 741760 - DNA, 120 bp, Artificial Sequence
  ENSG00000204406_151 (sequence is synthesized)
ctgggactacagcccacatatgacagtggacatagaggacaacgcagatatagaacatttcttttatcacaatggagtctcgctcttgtcaccaggctagagtgcagtggcacaatctca

SEQ ID NO: 741761 - DNA, 89 bp, Artificial Sequence
  ENSG00000204406_152 (sequence is synthesized)
tcggcctccgaaagtgccggaattataccaagatttaacaaaataacagacatatattaaaatattaagaatcattttgttcaaagtca

SEQ ID NO: 741762 - DNA, 87 bp, Artificial Sequence
  ENSG00000204406_153 (sequence is synthesized)
atatattaaaatattaagaatcattttgttcaaagtcaaaaatcactaatacgggcctttttctttctctctgtgtttagatatatc

SEQ ID NO: 741763 - DNA, 120 bp, Artificial Sequence
  ENSG00000204406_154 (sequence is synthesized)
gtatatgtaaatgtgtgaatatttagcaggaagccacaattattgaggcaggtattgtggtaagtcactttatattctcatttaatccttctaataatctagtgaaataactactatttt

SEQ ID NO: 741764 - DNA, 120 bp, Artificial Sequence
  ENSG00000204406_155 (sequence is synthesized)
tatccccatttttgagatgagaaaagtgacttctagagagaggaagcaacttgtgcaggattacgcagtcattaaattatagactttggaacttacataagatctctcagtgctttatga

SEQ ID NO: 741765 - DNA, 120 bp, Artificial Sequence
  ENSG00000204406_156 (sequence is synthesized)
tattgtagctaacagatatgctcaatatgtttttacctgttgtagaatccagatcattaaaagaaaagatatttgctctgtgataattcagcattacgtttatcctcttaagttttctcc

SEQ ID NO: 741766 - DNA, 120 bp, Artificial Sequence
  ENSG00000204406_157 (sequence is synthesized)
ggcttccctctgtctttagaatgcgttctgtgtctaaacttttgaaaaacaaagcccattgcttttgtcctacaaatatttcatagaggatgctacgttggctatctctctttttaagtt

SEQ ID NO: 741767 - DNA, 120 bp, Artificial Sequence
  ENSG00000204406_158 (sequence is synthesized)
gaaaatagaataagaatttaacttcacatgagaacataagaataagaatgctctaggttttgtaatcattaagtttagtttttaaaaaatgttcattgtgaatcataatcctaaatttga

SEQ ID NO: 741768 - DNA, 120 bp, Artificial Sequence
  ENSG00000204406_159 (sequence is synthesized)
aagatcatgtgaagaaaatgttaaaagcttattggacagtacatttaaaaaagtcttgcatgttcagacattttcatcctctagaggaaatcatagctaaatatacgtatctgtacttct

SEQ ID NO: 741769 - DNA, 120 bp, Artificial Sequence
  ENSG00000204406_160 (sequence is synthesized)
cggctgagttccttcccccaccctccagccctgagccctgagagggggattgagcctgagagaggagaaggagtttcttcttcttcgaaaacccccatccacgactcctaccccctcacc

SEQ ID NO: 741770 - DNA, 120 bp, Artificial Sequence
  ENSG00000204406_161 (sequence is synthesized)
cctccaactcgcctccctccctccaccctcctcctctttggccgtgagaggaggagagaaagaaaccaaaagcctcttagcaacacagaccctttgctgctgctgttgctgctgctgctg

SEQ ID NO: 741771 - DNA, 120 bp, Artificial Sequence
  ENSG00000204406_162 (sequence is synthesized)
gaagatttactcctagtcatcagtgggacccccatgaagtcagccagaaagcctatatccaacttatgtacctttgcaaacttgtctggattttgactgtatgtgcaaaacagattgtac

SEQ ID NO: 741772 - DNA, 120 bp, Artificial Sequence
  ENSG00000204406_163 (sequence is synthesized)
ttagcgattcattaaacatcttttgatcatctgctgtctgccaggcactgtgctaggcatctgaaaaacaaagatggtccctgcagtttaatgtgaagagctatcttaattgtattccac

SEQ ID NO: 741773 - DNA, 120 bp, Artificial Sequence
  ENSG00000204406_164 (sequence is synthesized)
aagtgtattggtcgtatctttgttttggtgtttctacctaaataaattttatattaactaaatggatactgttaggtggaaaaatgcatgtttaagaaagatattgctgttattttatta

SEQ ID NO: 741774 - DNA, 120 bp, Artificial Sequence
  ENSG00000204406_165 (sequence is synthesized)
aaatacaaatatataaagaaaaattttccacttaatactgtattctagggatttatattctgtatatagttaacacattttagacaatgaaaatagcctatgtggttgcctttgctggat

SEQ ID NO: 741775 - DNA, 120 bp, Artificial Sequence
  ENSG00000204406_166 (sequence is synthesized)
ttttattgctaaccgtaattcttttaagatgaccaacaatgttcattaagttatctcattaaatttttccaaaaaaaaaaaaacaccccaaaccctctaaacttaaatctttttctcaaa

SEQ ID NO: 741776 - DNA, 120 bp, Artificial Sequence
  ENSG00000204406_167 (sequence is synthesized)
agtaacttttttcttttttatctcatataacagattatcattcatgattcattggaagacattgtacattttcattttgagttttcagatattttctaccaaattttagcaaatctaaca

SEQ ID NO: 741777 - DNA, 120 bp, Artificial Sequence
  ENSG00000204406_168 (sequence is synthesized)
gcatgatttaattattctgcagtaattagtgtgcactatttaggagttttggaatttttagtatgtagtagaaatatcattgcaaaatcctcataagaaacttcccaattctagttctaa

SEQ ID NO: 741778 - DNA, 120 bp, Artificial Sequence
  ENSG00000204406_169 (sequence is synthesized)
gtcagttgtaatttttaatctttattaagtggtataatctctatagctttagtaaaatgatttggaattttcttagtagatagatgtttcaaaaacaaagaatcttatctcagttcctgt

SEQ ID NO: 741779 - DNA, 120 bp, Artificial Sequence
  ENSG00000204406_170 (sequence is synthesized)
catggctttcatgtgtaatcgaaaagtatattagaaaaagtactggattaaatttgcctttcttaaagtataccttttacaaaagtattgatttgcagttaaaaagaaggtggggatgcc

SEQ ID NO: 741780 - DNA, 120 bp, Artificial Sequence
  ENSG00000204406_171 (sequence is synthesized)
tctgctggtgcagtatcttgtgaagataaatagactcctgagtggtgaattctgatctctttcacgttcattcttaactttctattttagtaataatcatagttaccattgattataagt

SEQ ID NO: 741781 - DNA, 120 bp, Artificial Sequence
  ENSG00000204406_172 (sequence is synthesized)
acccagcactgtgataaattgaattcacattacatttatgacactttctaattcaaaacacagtcacagtagagtttttatcaatctgtacactggtaagcgatggtaaaattatggccc

SEQ ID NO: 741782 - DNA, 120 bp, Artificial Sequence
  ENSG00000204406_173 (sequence is synthesized)
tgatagcttcacagactaatggaaaatttctgaaagtttacaagtacagaaaaacaaagaaaaaaaacccagtcttttataaggaatgtagatacagaccattgtacaatttaaaatata

SEQ ID NO: 741783 - DNA, 120 bp, Artificial Sequence
  ENSG00000204406_174 (sequence is synthesized)
cataatgtcagtcttttctttgtatggcaaaaatgacatttgggaactgctcatggtgactcaacgcttgtaatgtaatcccagctactcggaggctgaggcgggagaattatttgagcc

SEQ ID NO: 741784 - DNA, 120 bp, Artificial Sequence
  ENSG00000204406_175 (sequence is synthesized)
gggaccttgtctctaaaaataaaaaataaggtcaggtggaatagctcaagcctgtaattccaacaactgggaggtgaggtaggaggatttatcacttgaggctagtagttcagggtcagc

SEQ ID NO: 741785 - DNA, 120 bp, Artificial Sequence
  ENSG00000204406_176 (sequence is synthesized)
ctgtgcaatgtagtgagatctgatccctacaaaatcaaaatagtagctgagcttggtgtggtgcacactgtagtcccagctactcaggaggctggagaggatctcttgaactcaggttga

SEQ ID NO: 741786 - DNA, 80 bp, Artificial Sequence
  ENSG00000204406_177 (sequence is synthesized)
gcaaataaaaaaacagtaaaaaaaagttcagttcaatccttatctgtattaaacttcctttaacttgtgtggagttacat

SEQ ID NO: 741787 - DNA, 120 bp, Artificial Sequence
  ENSG00000204406_178 (sequence is synthesized)
tccttatctgtattaaacttcctttaacttgtgtggagttacatttaatattttcttatatgaagttcaaaggttataacaatttctgatccaatgaatatttactataaaatttttaat

SEQ ID NO: 741788 - DNA, 120 bp, Artificial Sequence
  ENSG00000204406_179 (sequence is synthesized)
atgtgttgatggtgtaaaagcccataaaaaatgggaagtttatattgtcttgtgctttggtgtatgtatacacattaccttctggactctatcatacattttcataattactacattaca

SEQ ID NO: 741789 - DNA, 120 bp, Artificial Sequence
  ENSG00000204406_180 (sequence is synthesized)
tatataggattaagtttaatgtactctttttagtactaaagtcagaaatattttggtataagaatgatcaacttgttgggttctctaggtgcctaaattatttcatatttatacttaaaa

SEQ ID NO: 741790 - DNA, 120 bp, Artificial Sequence
  ENSG00000204406_181 (sequence is synthesized)
gctactgaattaaaatactttttaatacagttctctttgggtagttgagttttacatcctttacttttaagagaaaaaaaattaaaaactttttttcctgtttttattacttaagtaact

SEQ ID NO: 741791 - DNA, 120 bp, Artificial Sequence
  ENSG00000204406_182 (sequence is synthesized)
tttgtgtctcttctaagtaaatacatgttcatattataaatttatacaggttgagtattcctaatccagaattccaaaatccgaaatgcttaaaaatctgaaactttttgagcactgaca

SEQ ID NO: 741792 - DNA, 120 bp, Artificial Sequence
  ENSG00000204406_183 (sequence is synthesized)
tgatgctcaaagaaaatgctcactgaagcattttggattttggattttgaggttagggatgttcaatagatatataaggcaaatattcccaaatctgtaaaaatccaaaattctaaatac

SEQ ID NO: 741793 - DNA, 120 bp, Artificial Sequence
  ENSG00000204406_184 (sequence is synthesized)
ttctggtccacaaaaccttttgaataagggatatcaacttttattgactctatcgtcctgcaaatattatgccagtacataatgacctgcagagtttggaaacatttttaaatgctaaag

SEQ ID NO: 741794 - DNA, 120 bp, Artificial Sequence
  ENSG00000204406_185 (sequence is synthesized)
aaatattctttatcatctgttatatattagaaaagtttattgcaaatgttttgttgcttataagaataatccgaataatcagtagtgtgatcttaaataatttctttaaacaacccaaag

SEQ ID NO: 741795 - DNA, 120 bp, Artificial Sequence
  ENSG00000204406_186 (sequence is synthesized)
ataattcagttaaaagtaaatattctaactctaacacttagagtatttctgtttgaggtatttctatgtcatgtaagatgtcagaagctggaatgactcactgtaactcactataactct

SEQ ID NO: 741796 - DNA, 120 bp, Artificial Sequence
  ENSG00000204406_187 (sequence is synthesized)
tcaaagagacagtgagatccaggcttaacttatattatggtataatttattcaaagttggatatcacaaattttgatttgtatccttatttcagttgacctatataaccttttattagag

SEQ ID NO: 741797 - DNA, 120 bp, Artificial Sequence
  ENSG00000204406_188 (sequence is synthesized)
aacctgtaattaagttcagtgtcattgagtagattattagaatacattgttttaaaggactaatatgagttatgtaaatcagtcaccaaccttgaaatggtgaaaagtttttgtacacat

SEQ ID NO: 741798 - DNA, 120 bp, Artificial Sequence
  ENSG00000204406_189 (sequence is synthesized)
atgcttcactgaattcttctgctaaccaatcaagattctagcaatgggaggaaaattttctgtgtggtgctaatgttaaaacttaagttcatgtgtagcttttaaaaaaaaaatttaata

SEQ ID NO: 741799 - DNA, 120 bp, Artificial Sequence
  ENSG00000204406_190 (sequence is synthesized)
tctgtatctcagaagttagaagtaatcccaaagtgttttttaagattgactgtgtgctaaattatacttagggttatccttgtattcacaattactgttttttatacaccatgagtccag

SEQ ID NO: 741800 - DNA, 120 bp, Artificial Sequence
  ENSG00000204406_191 (sequence is synthesized)
aagtatctactaatctgttggccatcaactaacttaatccatacattcttaatattattaggatctaaaaataataatttagactgtataagtacatttactgatgttgggggagggaaa

SEQ ID NO: 741801 - DNA, 120 bp, Artificial Sequence
  ENSG00000204410_0 (sequence is synthesized)
cttttgcaggctcgtggcggtcggtcagcggggcgttctcccacctgtagcgactcagagcctccaagctcatggcctccttaggagcgaacccaaggaggacaccgcagggaccgagac

SEQ ID NO: 741802 - DNA, 120 bp, Artificial Sequence
  ENSG00000204410_1 (sequence is synthesized)
ctggggcggcctcctccggcttccccagcccggccccagtgccgggccccagggaggccgaggaggaggaagtcgaggaggaggaggagctggccgagatccatctgtgtgtgctgtgga

SEQ ID NO: 741803 - DNA, 120 bp, Artificial Sequence
  ENSG00000204410_2 (sequence is synthesized)
attcaggatacttgggcattgcctactatgatactagtgactccactatccacttcatgccagatgccccagaccacgagagcctcaagcttctccagagagttctggatgagatcaatc

SEQ ID NO: 741804 - DNA, 120 bp, Artificial Sequence
  ENSG00000204410_3 (sequence is synthesized)
cccagtctgttgttacgagtgccaaacaggatgagaatatgactcgatttctgggaaagcttgcctcccaggagcacagagagcctaaaagacctgaaatcatatttttgccaagtgtgg

SEQ ID NO: 741805 - DNA, 120 bp, Artificial Sequence
  ENSG00000204410_4 (sequence is synthesized)
attttggtctggagataagcaaacaacgcctcctttctggaaactactccttcatcccagacgccatgactgccactgagaaaatcctcttcctctcttccattattccctttgactgcc

SEQ ID NO: 741806 - DNA, 120 bp, Artificial Sequence
  ENSG00000204410_5 (sequence is synthesized)
tcctcacagttcgagcacttggagggctgctgaagttcctgggtcgaagaagaatcggggttgaactggaagactataatgtcagcgtccccatcctgggctttaagaaatttatgttga

SEQ ID NO: 741807 - DNA, 120 bp, Artificial Sequence
  ENSG00000204410_6 (sequence is synthesized)
ctcatctggtgaacatagatcaagacacttacagtgttctacagatttttaagagtgagtctcacccctcagtgtacaaagtggccagtggactgaaggaggggctcagcctctttggaa

SEQ ID NO: 741808 - DNA, 120 bp, Artificial Sequence
  ENSG00000204410_7 (sequence is synthesized)
tcctcaacagatgccactgtaagtggggagagaagctgctcaggctatggttcacacgtccgactcatgacctgggggagctcagttctcgtctggacgtcattcagttttttctgctgc

SEQ ID NO: 741809 - DNA, 120 bp, Artificial Sequence
  ENSG00000204410_8 (sequence is synthesized)
cccagaatctggacatggctcagatgctgcatcggctcctgggtcacatcaagaacgtgcctctgattctgaaacgcatgaagttgtcccacaccaaggtcagcgactggcaggttctct

SEQ ID NO: 741810 - DNA, 120 bp, Artificial Sequence
  ENSG00000204410_9 (sequence is synthesized)
acaagactgtgtacagtgccctgggcctgagggatgcctgccgctccctgccgcagtccatccagctctttcgggacattgcccaagagttctctgatgacctgcaccatatcgccagcc

SEQ ID NO: 741811 - DNA, 120 bp, Artificial Sequence
  ENSG00000204410_10 (sequence is synthesized)
tcattgggaaagtagtggactttgagggcagccttgctgaaaatcgcttcacagtcctccccaacatagatcctgaaattgatgagaaaaagcgaagactgatgggacttcccagtttcc

SEQ ID NO: 741812 - DNA, 120 bp, Artificial Sequence
  ENSG00000204410_11 (sequence is synthesized)
ttccttctttctattccccgcctgccttccatggtagaggccagtgactttgagattaatggactggacttcatgtttctctcagaggagaagctgcactatcgtagtgcccgaaccaag

SEQ ID NO: 741813 - DNA, 120 bp, Artificial Sequence
  ENSG00000204410_12 (sequence is synthesized)
gagctggatgcattgctgggggacctgcactgcgagatccgggaccaggagacgctgctgatgtaccagctacagtgccaggtgctggcacgagcagctgtcttaacccgagtattggac

SEQ ID NO: 741814 - DNA, 120 bp, Artificial Sequence
  ENSG00000204410_13 (sequence is synthesized)
cttgcctcccgcctggacgtcctgctggctcttgccagtgctgcccgggactatggctactcaaggccgcgttactccccacaagtccttggggtacgaatccagaatggcagacatcct

SEQ ID NO: 741815 - DNA, 120 bp, Artificial Sequence
  ENSG00000204410_14 (sequence is synthesized)
ctgatggaactctgtgcccgaacctttgtgcccaactccacagaatgtggtggggacaaagggagggtcaaagtcatcactggacccaactcatcagggaagagcatatacctcaaacag

SEQ ID NO: 741816 - DNA, 120 bp, Artificial Sequence
  ENSG00000204410_15 (sequence is synthesized)
gtaggcttgatcacattcatggccctggtaggcagctttgtgccagcagaggaggccgaaattggggcagtagacgccatcttcacacgaattcatagctgcgaatccatctcccttggc

SEQ ID NO: 741817 - DNA, 120 bp, Artificial Sequence
  ENSG00000204410_16 (sequence is synthesized)
ctctccaccttcatgatcgacctcaaccaggtggcgaaagcagtgaacaatgccactgcacagtcgctggtccttattgatgaatttggaaagggaaccaacacggtggatgggctcgcg

SEQ ID NO: 741818 - DNA, 120 bp, Artificial Sequence
  ENSG00000204410_17 (sequence is synthesized)
cttctggccgctgtgctccgacactggctggcacgtggacccacatgcccccacatctttgtggccaccaactttctgagccttgttcagctacaactgctgccacaagggcccctggtg

SEQ ID NO: 741819 - DNA, 120 bp, Artificial Sequence
  ENSG00000204410_18 (sequence is synthesized)
cagtatttgaccatggagacctgtgaggatggcaacgatcttgtcttcttctatcaggtttgcgaaggtgttgcgaaggccagccatgcctcccacacagctgcccaggctgggcttcct

SEQ ID NO: 741820 - DNA, 120 bp, Artificial Sequence
  ENSG00000204410_19 (sequence is synthesized)
gacaagcttgtggctcgtggcaaggaggtctcagacttgatccgcagtggaaaacccatcaagcctgtcaaggatttgctaaagaagaaccaaatggaaaattgccagacattagtggat

SEQ ID NO: 741821 - DNA, 120 bp, Artificial Sequence
  ENSG00000204410_20 (sequence is synthesized)
aagtttatgaaactggatttggaagatcctaacctggacttgaacgttttcatgagccaggaagtgctgcctgctgccaccagcatcctctgagagtccttccagtgtcctccccagcct

SEQ ID NO: 741822 - DNA, 120 bp, Artificial Sequence
  ENSG00000204410_21 (sequence is synthesized)
cctgagactccggtgggctgccatgccctctttgtttccttatctccctcagacgcagagtttttagtttctctagaaattttgtttcatattaggaataaagtttattttgaagaaaga

SEQ ID NO: 741823 - DNA, 120 bp, Artificial Sequence
  ENSG00000204410_22 (sequence is synthesized)
agcggttaggagggcggggcgcgtgcgcgcgcacctcgctcacgcgccggcgcgctccttttgcaggctcgtggcggtcggtcagcggggcgttctcccacctgtagcgactcaggttac

SEQ ID NO: 741824 - DNA, 120 bp, Artificial Sequence
  ENSG00000204410_23 (sequence is synthesized)
tgaaaaggcgggaaaacgctgcgatggcggcagctgggggaggaggaagataagcgcgtgaggctggggtcctggcgcgtggttggcagaggcagagacataagacgtgcacgactcgcc

SEQ ID NO: 741825 - DNA, 120 bp, Artificial Sequence
  ENSG00000204410_24 (sequence is synthesized)
aggtttttttgtcattgttcttcttgtatcattacagactcatggccttttatagctatatttctctttctcccgactctgtacaaactcctttgttttagagtttgcacaaccctctat

SEQ ID NO: 741826 - DNA, 120 bp, Artificial Sequence
  ENSG00000204410_25 (sequence is synthesized)
caaagcacctaccacctcacttttaaatcttctgcatgtatttctgtcttccttcctagactgtgagcacatctgggacagggaccatatctttttttgtttatttgttttgttttgaga

SEQ ID NO: 741827 - DNA, 69 bp, Artificial Sequence
  ENSG00000204410_26 (sequence is synthesized)
gggaccatatctttttttgtttaatggcgtgatctggctataacctccacctcccgggttcaagagatt

SEQ ID NO: 741828 - DNA, 76 bp, Artificial Sequence
  ENSG00000204410_27 (sequence is synthesized)
tcagcctcccaagtagctggaattacatgtgcatgccaccaagcccagtgaggctgatctcgaactcctgacctca

SEQ ID NO: 741829 - DNA, 120 bp, Artificial Sequence
  ENSG00000204410_28 (sequence is synthesized)
caggcatgagccactgtgcctggccaggaccatatcttaattgtctttgtagtttcagtgtttggtacagtgcctctcactgtttctttttgcctttgagatcttccctctttgttactg

SEQ ID NO: 741830 - DNA, 120 bp, Artificial Sequence
  ENSG00000204410_29 (sequence is synthesized)
atggactggacttcatggtaagaccctcaacctctgtaaggtgagtgatgaggaaaatgagtcagcagctgaggaagagcgttactctacagcagcactgcccaatatgggatctctcct

SEQ ID NO: 741831 - DNA, 120 bp, Artificial Sequence
  ENSG00000204410_30 (sequence is synthesized)
ctgtagttttactctgagctttaccagcactgagacaaaggaaagagaagtcagagttaggggctggaggtggggttagaaagatggggaaggagaggaggaccaagagatgcaaagtcc

SEQ ID NO: 741832 - DNA, 120 bp, Artificial Sequence
  ENSG00000204410_31 (sequence is synthesized)
acagctttgaacccctgtacccagtttctctcagaggagaagctgcactatcgtagtgcccgaaccaaggagctggatgcattgctgggggacctgcactgcgagatccgggatccccct

SEQ ID NO: 741833 - DNA, 120 bp, Artificial Sequence
  ENSG00000204410_32 (sequence is synthesized)
gcgccggcgcgctccttttgcaggctcgtggcggtcggtcagcggggcgttctcccacctgtagcgactcagggccctcagaccccttccttccaaaggagcctccaagctcatggcctc

SEQ ID NO: 741834 - DNA, 120 bp, Artificial Sequence
  ENSG00000204410_33 (sequence is synthesized)
tatatgcattgtaagatgtttaaaaaaagcagcagccaggggaaggaggggagtgggcaacttggggatgcttccaacaggcccctcctcttcctgctctctgtctcgctcactctgact

SEQ ID NO: 741835 - DNA, 120 bp, Artificial Sequence
  ENSG00000204410_34 (sequence is synthesized)
ctatcttttcctctgaatgtcttgaggtctcagattgtatctgcaacctgtttccagatccccctaggggcctctgcctctccttcactttcccctggaactgacctccagctcccttcc

SEQ ID NO: 741836 - DNA, 120 bp, Artificial Sequence
  ENSG00000204410_35 (sequence is synthesized)
atcatcacagatctcccctctgccttatgtcatcctaaacctttgtgctcctcatgccctatgacctgtccccccaagatctctcctgctccctaccctttaataacctgcagcttattg

SEQ ID NO: 741837 - DNA, 120 bp, Artificial Sequence
  ENSG00000204410_36 (sequence is synthesized)
ggaagcctctgcttaagtcatgtctagggatgagggcctcccctgaggagtggtgacactttttggacagggttttattgttggaattctccccattaagttaaagccttttatcaccaa

SEQ ID NO: 741838 - DNA, 120 bp, Artificial Sequence
  ENSG00000204410_37 (sequence is synthesized)
ctccgcgtgacaggaatgagggtggggcgcgtggagtttcccacaatctgtactttagttaaatacccgagaattcacctcctgtgtccacagctctccacgcccctcagccctgccccg

SEQ ID NO: 741839 - DNA, 120 bp, Artificial Sequence
  ENSG00000204410_38 (sequence is synthesized)
cagccctgtagcagaagtacttagtgctttgcattctgcgcgccaccctaccccggcctcctctgtgaatcgttgcttccgaaccgccctcactttttgcatccgcagagcctccaagct

SEQ ID NO: 741840 - DNA, 120 bp, Artificial Sequence
  ENSG00000204410_39 (sequence is synthesized)
gtattccagactgtctgtaccctagacatgctgtccaattttattctaccctcttttttttttttttggagacagcctcgctctgtcgcccaggctgaagtgccatggggcgatcttggc

SEQ ID NO: 741841 - DNA, 120 bp, Artificial Sequence
  ENSG00000204410_40 (sequence is synthesized)
cttcctgacaagcttgtggctcgtggcaaggaggtgatgagatccaaatgtgcaaccacctccacatcagagctccctttcattcctagtcctactgggcctgggtctaggtccacagga

SEQ ID NO: 741842 - DNA, 120 bp, Artificial Sequence
  ENSG00000204414_0 (sequence is synthesized)
agcatcccaaggcccgactccccgcaccactcagggtcctgtggacagctcacctagcggcaatggctgcaggctcccggacgtccctgctcctggcttttgccctgctctgcctgccct

SEQ ID NO: 741843 - DNA, 120 bp, Artificial Sequence
  ENSG00000204414_1 (sequence is synthesized)
ggcttcaagaggctggtgccgtccaaaccgttcccttatccaggctttttaaagaggctatgctccaagcccatcgcgcacaccagctggccattgacacctaccaggagtttataagct

SEQ ID NO: 741844 - DNA, 120 bp, Artificial Sequence
  ENSG00000204414_2 (sequence is synthesized)
cttggggaatggaagcctatatcacaaaggaacagaagtattcattcctgcatgactcccagacctccttctgcttctcagactctattccgacatcctccaacatggaggaaacgcagc

SEQ ID NO: 741845 - DNA, 120 bp, Artificial Sequence
  ENSG00000204414_3 (sequence is synthesized)
acagcgatgactatcacctcctaaaggacctagaggaaggcatccaaatgctgatggggaggctggaagacggcagccacctgactgggcagaccctcaagcagacctacagcaagtttg

SEQ ID NO: 741846 - DNA, 120 bp, Artificial Sequence
  ENSG00000204414_4 (sequence is synthesized)
acacaaactcgcacaaccatgacgcactgctcaagaactacgggctgctccactgcttcaggaaggacatggacaaggtcgagacattcctgcgcatggtgcagtgccgctctgtggagg

SEQ ID NO: 741847 - DNA, 120 bp, Artificial Sequence
  ENSG00000204414_5 (sequence is synthesized)
gcagctgtggcttctaggggcccgcgtggcatcctgtgacccctccccagtgcctctcctggccctgaaggtgccactccagtgcccaccagccttgtcttaataaaattaagttgtatt

SEQ ID NO: 741848 - DNA, 120 bp, Artificial Sequence
  ENSG00000204414_6 (sequence is synthesized)
aggatcccaaggcccaactccccgaaccactcagggtcctgtggacagctcacctagctgcaatggctacaggctcccggacgtccctgctcctggcttttgccctgctctgcctgccct

SEQ ID NO: 741849 - DNA, 120 bp, Artificial Sequence
  ENSG00000204414_7 (sequence is synthesized)
cgcaccactcagggtcctgtggacagctcacctagcggcaatggctgcagactctattccgacatcctccaacatggaggaaacgcagcagaaatccaacttagagctgctccacatctc

SEQ ID NO: 741850 - DNA, 120 bp, Artificial Sequence
  ENSG00000204414_8 (sequence is synthesized)
gcagtcaggcgctgacccaagagaactcaccttattcttcatttcccctcgtgaatcctccaggcctttctctacaccctgaaggggaaggaggaaaatggataaatgagagagggaggg

SEQ ID NO: 741851 - DNA, 120 bp, Artificial Sequence
  ENSG00000204414_9 (sequence is synthesized)
ggtgcgggtcaggggtggcaagaaggggtgactttcccccactggggaagtaatgggaggagactaaggagctcagggttgttttctgaagcgaaaatgcaggcagatgagcataggctg

SEQ ID NO: 741852 - DNA, 120 bp, Artificial Sequence
  ENSG00000204414_10 (sequence is synthesized)
ggagacctgtggtcagagcccccgggcagcacagccactgccggtccttcccctgcagaacttagagctgctccacatctccctgctgctcatcgagtcgcggctggagcccgtgcggtt

SEQ ID NO: 741853 - DNA, 120 bp, Artificial Sequence
  ENSG00000204414_11 (sequence is synthesized)
caccactcagggtcctgtggacagctcacctagcggcaatggctgcaggtaagcgcccctaaaatccctttgggcacaacgtgtcctgaggggagaggcggcgccctgcagatgggacgg

SEQ ID NO: 741854 - DNA, 120 bp, Artificial Sequence
  ENSG00000204414_12 (sequence is synthesized)
gggcactaacctcaggtttggggcttctgaatgtgaatatcgccatctaaggccagatatttggccaatctctgaatgttcctggtccctggagggatggagagagagaaaaagaaaaca

SEQ ID NO: 741855 - DNA, 120 bp, Artificial Sequence
  ENSG00000204414_13 (sequence is synthesized)
cgatgactatcacctcctaaaggacctagaggaaggcatccaaatgctgatgggggtgagggtggcaccaggggtccccaatcctggaagcccactggcttcgagggctgggggagagaa

SEQ ID NO: 741856 - DNA, 120 bp, Artificial Sequence
  ENSG00000204420_0 (sequence is synthesized)
acatcctaaccatggctgtgtttctgcagctgctaccgctgctgctctcgagggcccaagggaaccctggggcttctctggacggccgccctggggaccgggtgaatctctcctgcggag

SEQ ID NO: 741857 - DNA, 120 bp, Artificial Sequence
  ENSG00000204420_1 (sequence is synthesized)
gagtctctcatcccatccgctgggtctgggcacccagcttcccggcctgcaagggcctgtccaaaggacgccgaccgatcctgtgggcctcttcgagcgggacccccaccgtgcctcccc

SEQ ID NO: 741858 - DNA, 120 bp, Artificial Sequence
  ENSG00000204420_2 (sequence is synthesized)
tccagcctttcgtcggccgcctacgctccctggactctggtatccggcggctggagctcctcttgagcgcgggggactcgggcacttttttctgcaagggccgccacgaggacgagagcc

SEQ ID NO: 741859 - DNA, 120 bp, Artificial Sequence
  ENSG00000204420_3 (sequence is synthesized)
gtacagtgcttcacgtgctgggggacaggacctattgcaaggcccccgggcctacccatgggtccgtgtatccccagctcctgatcccgctgctgggcgctgggttggtgctcggactgg

SEQ ID NO: 741860 - DNA, 120 bp, Artificial Sequence
  ENSG00000204420_4 (sequence is synthesized)
gagctttgggcctggtctggtggctgcacaggcgcctgcccccgcaaccgattcgaccactccctagatttgctccacttgtgaaaaccgagccccagaggccagtaaaggaggaagagc

SEQ ID NO: 741861 - DNA, 120 bp, Artificial Sequence
  ENSG00000204420_5 (sequence is synthesized)
ccaagattccaggggacctggaccaggaaccgagcctgctctatgcggatctggaccatctagccctcagcaggccccgccggctgtccacagcggaccctgctgatgcctccaccatct

SEQ ID NO: 741862 - DNA, 120 bp, Artificial Sequence
  ENSG00000204420_6 (sequence is synthesized)
atgcagttgtagtttgaagggaagcccttactccaaacctcccaagctaggggatcccagctccccataatccctctcccctccttggttcctcacctggaagaggaaggcaccatggta

SEQ ID NO: 741863 - DNA, 120 bp, Artificial Sequence
  ENSG00000204420_7 (sequence is synthesized)
tagaaataagtgctagactgggagttgggagacctgggttccaggctgtctctgccactggtcttacttctaaacttactcccatctctcctataacctccatgtctccctcaccaccag

SEQ ID NO: 741864 - DNA, 69 bp, Artificial Sequence
  ENSG00000204420_8 (sequence is synthesized)
cccatctctcctataacctccatgtctccctcaccaccagtgtcctctctatacccaatcaagccctag

SEQ ID NO: 741865 - DNA, 67 bp, Artificial Sequence
  ENSG00000204420_9 (sequence is synthesized)
ctgtgttagccaggatggtcttgatctgctaacctcgtgatccacccgccttctttaagctgttttt

SEQ ID NO: 741866 - DNA, 120 bp, Artificial Sequence
  ENSG00000204420_10 (sequence is synthesized)
taagctgtttttctttgttgctggtgttttctttttggactcctcttccttgctccatatccctacagtatttcccaccattctaggtttgtccctttctcttcttctgggacactctca

SEQ ID NO: 741867 - DNA, 120 bp, Artificial Sequence
  ENSG00000204420_11 (sequence is synthesized)
tcaacagtcagtcctcagccccctcctctgcaaatgacactcagaactctctctggctcagatctcagatttgggattaacaaacttccacttagacattctgcctgactgacctcaggc

SEQ ID NO: 741868 - DNA, 120 bp, Artificial Sequence
  ENSG00000204420_12 (sequence is synthesized)
atttcgcactctgaatgtcaaacccaactcattgtcatctctgaagctgctcacttaattctcctctgtattctctttaacaacccagttgcccaacccagaaactgggagtcacgcaga

SEQ ID NO: 741869 - DNA, 120 bp, Artificial Sequence
  ENSG00000204420_13 (sequence is synthesized)
cctcctttctctcttactcccacacaatgagccatgaagtccagtctttctatcttaacatcactgtcaaacccacactgtattccatgcccagcgctgccacgtgaatgtactctgctc

SEQ ID NO: 741870 - DNA, 120 bp, Artificial Sequence
  ENSG00000204420_14 (sequence is synthesized)
acttccttcctggattacccatagccccacctcatcctcctacccttgctttcctccctgaagtcagagagatcctactcaagagataactgctcctgacagcccttattacagaactga

SEQ ID NO: 741871 - DNA, 120 bp, Artificial Sequence
  ENSG00000204420_15 (sequence is synthesized)
agtactctccttagcttcagctctgtgcccacgtgccttggctttggatacaaggtactacagcactttgtccactctccaggcttacctgtgtcattccacatgcacatcttagaaaat

SEQ ID NO: 741872 - DNA, 120 bp, Artificial Sequence
  ENSG00000204420_16 (sequence is synthesized)
gccagccttagagaattctccctagccccaaaatgtctttgcccagtgcaattccttcttcctgtattacccctttccctccttcacactatctgcctggctaattcttatttatcctta

SEQ ID NO: 741873 - DNA, 120 bp, Artificial Sequence
  ENSG00000204420_17 (sequence is synthesized)
gttcaagtatggccttttctgggaaggtgaccctccttggccaccccttgcatatactttgatgccctagggcgcaccccctttatttccctcatagaaacagccttctgtaaattgttc

SEQ ID NO: 741874 - DNA, 120 bp, Artificial Sequence
  ENSG00000204420_18 (sequence is synthesized)
catgacaacctgtatttcaatttgtaagaaatttgcatgtactgtgagctccccaacgtcaggagactgacccttttgatatcattgctaagcctcattaaatgaatgaatgaaaatgaa

SEQ ID NO: 741875 - DNA, 120 bp, Artificial Sequence
  ENSG00000204420_19 (sequence is synthesized)
tggggatgggaaggggatagccagaatctctgaggaaaatggaccaaaaaaaaaaaggcctgaaccccaaggaagactgtggagaccatcttgtcttcctccccttcctcctccagagcc

SEQ ID NO: 741876 - DNA, 120 bp, Artificial Sequence
  ENSG00000204420_20 (sequence is synthesized)
cctgcccccgcaaccgattcgaccactccctagatttggtgagactaattccaccccattttctttctcctacatgcccactccccacccctcaattcctgagtctgagcccttgctggg

SEQ ID NO: 741877 - DNA, 120 bp, Artificial Sequence
  ENSG00000204420_21 (sequence is synthesized)
tttcctgggaggtgacctgacccttaggtcttcttataataaatgtacattttatcagactcagacatttattactcaaaatggaaagagggtctggctggctctgtcgcccaggctgga

SEQ ID NO: 741878 - DNA, 87 bp, Artificial Sequence
  ENSG00000204420_22 (sequence is synthesized)
agggtctggctgatcacagttcactgcaacctcgacctcctgagctcaagcgatcctccctcctcagcctcctaagtagctgggatt

SEQ ID NO: 741879 - DNA, 120 bp, Artificial Sequence
  ENSG00000204421_0 (sequence is synthesized)
agagctggatccttgaaaatctactctatcagctgctgtggttgccaccattctcaggaccctcgccatgaaagcccttatgctgctcaccctgtctgttctgctctgctgggtctcagc

SEQ ID NO: 741880 - DNA, 120 bp, Artificial Sequence
  ENSG00000204421_1 (sequence is synthesized)
tgacattcgctgtcactcctgctacaaggtccctgtgctgggctgtgtggaccggcagtcctgccgcctggagccaggacagcaatgcctgacaacacatgcataccttggtaagatgtg

SEQ ID NO: 741881 - DNA, 120 bp, Artificial Sequence
  ENSG00000204421_2 (sequence is synthesized)
ggttttctccaatctgcgctgtggcacaccagaagagccctgtcaggaggccttcaaccaaaccaaccgcaagctgggtctgacatataacaccacctgctgcaacaaggacaactgcaa

SEQ ID NO: 741882 - DNA, 120 bp, Artificial Sequence
  ENSG00000204421_3 (sequence is synthesized)
tggctggccttggcctctggctgctgcactgagactcattccattggctgcccctcctcccacctgccttggcctgagcctctctccctgtgtctctgtatcccctggctttacagaatc

SEQ ID NO: 741883 - DNA, 120 bp, Artificial Sequence
  ENSG00000204421_4 (sequence is synthesized)
gtctctccctagctcccatttctttaattaaacactgttccgagtggtctcctcatccatccttcccacctcacacccttcactctcctttttctgggtcccttcccacttccttccagg

SEQ ID NO: 741884 - DNA, 120 bp, Artificial Sequence
  ENSG00000204421_5 (sequence is synthesized)
acctccattggctcctagaagggctccccactttgcttcctatactctgctgtcccctacttgaggagggattgggatctgggcctgaaatggggcttctgtgttgtccccagtgaaggc

SEQ ID NO: 741885 - DNA, 120 bp, Artificial Sequence
  ENSG00000204421_6 (sequence is synthesized)
tcccacaaggacctgatgacctcactgtacagagctgactccccaaacccaggctcccatatgtaccccatcccccatactcacctctttccattttgagtaataaatgtctgagtctga

SEQ ID NO: 741886 - DNA, 120 bp, Artificial Sequence
  ENSG00000204421_7 (sequence is synthesized)
atgaaagcccttatgctgctcaccctgtctgttctgctctgctgggtctcagatggttgcagtgacatctaagagcctccatggaaacagagcgttttcttgagccttctgaagagggga

SEQ ID NO: 741887 - DNA, 120 bp, Artificial Sequence
  ENSG00000204424_0 (sequence is synthesized)
gagaacttggcaggctctccccatggcagtcttattcctcctcctgttcctatgtggaactccccaggctgcagacaacatgcaggccatctatgtggccttgggggaggcagtagagct

SEQ ID NO: 741888 - DNA, 120 bp, Artificial Sequence
  ENSG00000204424_1 (sequence is synthesized)
gccatgtccctcaccacctactctacatggggacgaacacctgtcatggttctgcagccctgcagcaggctccttcaccaccctggtagcccaagtccaagtgggcaggccagccccaga

SEQ ID NO: 741889 - DNA, 120 bp, Artificial Sequence
  ENSG00000204424_2 (sequence is synthesized)
ccctggaaaaccaggaagggaatccaggctcagactgctggggaactattctttgtggttggagggatccaaagaggaagatgccgggcggtactggtgcgctgtgctaggtcagcacca

SEQ ID NO: 741890 - DNA, 120 bp, Artificial Sequence
  ENSG00000204424_3 (sequence is synthesized)
cctgcaatgtcctcctgtgctctgtggtccccagcagacgcatggactctgtgacctggcaggaagggaagggtcccgtgaggggccgtgttcagtccttctggggcagtgaggctgccc

SEQ ID NO: 741891 - DNA, 120 bp, Artificial Sequence
  ENSG00000204424_4 (sequence is synthesized)
tgctcttggtgtgtcctggggaggggctttctgagcccaggagccgaagaccaagaatcatccgctgcctcatgactcacaacaaaggggtcagctttagcctggcagcctccatcgatg

SEQ ID NO: 741892 - DNA, 120 bp, Artificial Sequence
  ENSG00000204424_5 (sequence is synthesized)
cttctcctgccctctgtgccccttccacgggctgggacatgccttggattctgatgctgctgctcacaatgggccagggagttgtcatcctggccctcagcatcgtgctctggaggcaga

SEQ ID NO: 741893 - DNA, 120 bp, Artificial Sequence
  ENSG00000204424_6 (sequence is synthesized)
gggtccgtggggctccaggcagagatgcctcgattcctcagttcaaacccgaaatccaggtctatgagaacatccatttggcccgtcttggcccacctgcccacaagcccaggtgatttt

SEQ ID NO: 741894 - DNA, 120 bp, Artificial Sequence
  ENSG00000204427_0 (sequence is synthesized)
agggggacctgctgctggaagagcagcggcccgagccggggccatggcgaagctgctgagctgcgtcctaggcccccggctctacaaaatctaccgggagagggactctgaaagggcccc

SEQ ID NO: 741895 - DNA, 120 bp, Artificial Sequence
  ENSG00000204427_1 (sequence is synthesized)
ggccagcgtccctgagacgccaacggcagtcactgccccccattccagctcctgggatacgtactatcagccccgtgccctggagaaacatgctgacagcatcctggcactggcttcagt

SEQ ID NO: 741896 - DNA, 120 bp, Artificial Sequence
  ENSG00000204427_2 (sequence is synthesized)
attctggtccatctcttattactcctctcccttcgccttcttctacttgtacaggaaaggttacttgagtttgtccaaagtggtgccgttttctcactatgctgggacattgctgctact

SEQ ID NO: 741897 - DNA, 120 bp, Artificial Sequence
  ENSG00000204427_3 (sequence is synthesized)
tctggcaggtgtggcctgcctccgaggcattggccgctggaccaacccccagtaccggcagttcatcaccatcttggaagcaacacatcggaaccagtcttcagaaaacaagaggcagct

SEQ ID NO: 741898 - DNA, 120 bp, Artificial Sequence
  ENSG00000204427_4 (sequence is synthesized)
tgccaactacaactttgacttccggagctggccagtcgacttccactgggaagaacccagcagccggaaggagtctcgagggggcccttcccgccggggtgtggccctgcttcgcccaga

SEQ ID NO: 741899 - DNA, 120 bp, Artificial Sequence
  ENSG00000204427_5 (sequence is synthesized)
gcccctgcaccgggggacagcagacaccctcctcaaccgggttaagaagctgccttgtcagatcaccagctacctggtggcgcacaccctagggcgccggatgctgtatccaggctctgt

SEQ ID NO: 741900 - DNA, 120 bp, Artificial Sequence
  ENSG00000204427_6 (sequence is synthesized)
gtacctgctgcagaaggccctcatgcctgtgctgctgcagggccaggcccgactggtggaagagtgtaatgggcgccgggcaaagctgctggcctgtgatggcaatgagattgacaccat

SEQ ID NO: 741901 - DNA, 120 bp, Artificial Sequence
  ENSG00000204427_7 (sequence is synthesized)
gtttgtggaccggcgggggacagctgagccccagggacagaagctggtgatctgctgtgaggggaatgctgggttttatgaggtgggctgcgtctccacgcccctggaagctggatattc

SEQ ID NO: 741902 - DNA, 120 bp, Artificial Sequence
  ENSG00000204427_8 (sequence is synthesized)
gaatgaggctaatgccatggatgtggtggtccagtttgccatccaccgcctaggcttccagccccaggacatcatcatctacgcctggtccatcggcggcttcactgccacgtgggcagc

SEQ ID NO: 741903 - DNA, 120 bp, Artificial Sequence
  ENSG00000204427_9 (sequence is synthesized)
catgtcctacccagatgttagtgccatgatcctggatgcctcctttgatgacctggtgcccttggccttgaaggtcatgccagacagctggaggggcctggtgaccaggaccgtgaggca

SEQ ID NO: 741904 - DNA, 120 bp, Artificial Sequence
  ENSG00000204427_10 (sequence is synthesized)
gcatctcaatctaaacaacgcggagcagctgtgcagataccagggtcctgtactgctgatccggagaaccaaggatgagatcatcaccaccacggttcctgaggacatcatgtccaaccg

SEQ ID NO: 741905 - DNA, 120 bp, Artificial Sequence
  ENSG00000204427_11 (sequence is synthesized)
aggcaatgacctcctgctgaagctcctgcagcatcggtatccccgggtgatggcagaggagggtcttcgagtggtgaggcagtggttggaggcctcctcacagctggaggaagcctcaat

SEQ ID NO: 741906 - DNA, 120 bp, Artificial Sequence
  ENSG00000204427_12 (sequence is synthesized)
ttatagccgatgggaggtggaagaggactggtgtctgtctgtcctccgctcctaccaggcagaacacgggcccgacttcccctggagcgtgggggaggacatgagtgcagatggacggcg

SEQ ID NO: 741907 - DNA, 120 bp, Artificial Sequence
  ENSG00000204427_13 (sequence is synthesized)
gcagctggctttgtttctggctcggaagcatctgcacaactttgaggccactcactgcaccccactcccagcccagaacttccagatgccctggcacctctagggaccaactgggactca

SEQ ID NO: 741908 - DNA, 120 bp, Artificial Sequence
  ENSG00000204427_14 (sequence is synthesized)
ttatggaagaatggggtgagaggagacatgaggaaagaccctcttatttgtgattctctgtgttcatgttgctgtttatagtttgtggaaagtgggggaccatcccccttctcaccactg

SEQ ID NO: 741909 - DNA, 120 bp, Artificial Sequence
  ENSG00000204427_15 (sequence is synthesized)
ttcctcttgcacgtttcccctcattcatgtggctgtacttaaccttctccaacatacatcctgcattacatgaatggattattcctaataattaataaaaaggtattttttctactatca

SEQ ID NO: 741910 - DNA, 120 bp, Artificial Sequence
  ENSG00000204427_16 (sequence is synthesized)
cataatgggaaataaggggagcctgcttgtcaagccagttatccgcaaaatctgcgctctgtgtgcttcctgagttaaagtcacgcctacggactggccgcctcctttctttttcgctct

SEQ ID NO: 741911 - DNA, 120 bp, Artificial Sequence
  ENSG00000204427_17 (sequence is synthesized)
ttaccgctttctcattccgactgccactctttgttctttcctctccgcgtccccccgaccctgtgtgtcgtggttcgtgccggtcccagttgagtcttgagtcccgggaagagaccctgc

SEQ ID NO: 741912 - DNA, 120 bp, Artificial Sequence
  ENSG00000204427_18 (sequence is synthesized)
gcggactggggagccgttgaattttgctgtcagactcccagtttcctcttcttcagtgcctcttcatgcctcccccggctctgtttttatcttccctttaccctcgccttgaatttcaga

SEQ ID NO: 741913 - DNA, 120 bp, Artificial Sequence
  ENSG00000204427_19 (sequence is synthesized)
atgacttttacagatcctgtatccgtcggtcctcccctcaacccccgcccaacctagcctggagacccgagtcattgtattctggagagctggcgggtggtggatacgtactatcagccc

SEQ ID NO: 741914 - DNA, 120 bp, Artificial Sequence
  ENSG00000204427_20 (sequence is synthesized)
gcgaggagaggcccactggggtggaggggccatttcaggagtgctctgggagtgggcgctccattgtaaaatagctgtcactcattgggcctagtgctgtatggtttgtgtagatcattt

SEQ ID NO: 741915 - DNA, 120 bp, Artificial Sequence
  ENSG00000204427_21 (sequence is synthesized)
ttaaagcattatttatttggggacctttaatatgttgtacttatattttaacagaatcataatctgatgataactttgcatttacttattatgtatagacagttacatcataaaactctc

SEQ ID NO: 741916 - DNA, 120 bp, Artificial Sequence
  ENSG00000204427_22 (sequence is synthesized)
agaattctgtacatacaggatatgtgtgcactgagccacaatataaaatgtttatcttacaaaggttgcagtaagaaaagtttgcaaaacactagcctggtacatatttcattaaggctt

SEQ ID NO: 741917 - DNA, 120 bp, Artificial Sequence
  ENSG00000204427_23 (sequence is synthesized)
tatttatgtttgaagaaaagaggctcagagaggtctggagtctcaaatgtagtaagtaaagaactgggatatgaacaaaagctccttcagtgaggctgaaaaggagcagtgggggtgggg

SEQ ID NO: 741918 - DNA, 120 bp, Artificial Sequence
  ENSG00000204427_24 (sequence is synthesized)
caaggatgagatcatcaccaccacgtgagtgcgtgggaatctcggccctcaggaaccccagagatggccaggaacttgtcccttctacctctgcccaccagaaacctgggtatctagacc

SEQ ID NO: 741919 - DNA, 120 bp, Artificial Sequence
  ENSG00000204427_25 (sequence is synthesized)
ggaaggcttggagttatttgcatctaagctggggggtacttctgctcttccttcccccagggatggagaaagggctgtgggccacaaggtctcagtccctcctccccctgtgttacagct

SEQ ID NO: 741920 - DNA, 120 bp, Artificial Sequence
  ENSG00000204427_26 (sequence is synthesized)
ttgtttctggtgagctaaggagtgggaagtgggaagggttcttgaatggccagggctcacatagggggactggggataccctataagcattggaagtggcagcttttgtagagtgggtgg

SEQ ID NO: 741921 - DNA, 120 bp, Artificial Sequence
  ENSG00000204427_27 (sequence is synthesized)
gcctgcccttcctgggaaggggtgggctggaactgggaactgttctgagatggctcccttttcttgggtggggagtaagtcgccccattgttggaagcaggaggactcctttgtctgggg

SEQ ID NO: 741922 - DNA, 120 bp, Artificial Sequence
  ENSG00000204427_28 (sequence is synthesized)
gagagcccagaggtggggtgagtgtgaggaaggcagtagaggtctggggaccccaatgctatagcacctccctgaaggaaccactactggggataatctcatgtcctagctccacgctaa

SEQ ID NO: 741923 - DNA, 120 bp, Artificial Sequence
  ENSG00000204428_0 (sequence is synthesized)
agtcatgcgttttatggcaggccctgcagggagccagagtctgggtcccctgtgcttccacagcagcccccaagccctctacacggtcctcttaatagtgctggtcatgatgagcttggt

SEQ ID NO: 741924 - DNA, 120 bp, Artificial Sequence
  ENSG00000204428_1 (sequence is synthesized)
gtttggtaagtttgttcctgtcaattgggaaccccctcaaccacttccattccccaaatacctgcgctgctaccgatgcctcttggagaccaaggagttagggtgccttctgggatctga

SEQ ID NO: 741925 - DNA, 120 bp, Artificial Sequence
  ENSG00000204428_2 (sequence is synthesized)
tgagtgactgccgaagtaaggagcagatgagtgattgttcaaatacccgaacttctccggtgtctggcttctggatattctctcaatactgcttcctggatttctgcaatgaccctcaaa

SEQ ID NO: 741926 - DNA, 120 bp, Artificial Sequence
  ENSG00000204428_3 (sequence is synthesized)
acagagggctctatactccttagtgtgactgcagcaaactttggtgtaaaattccaccagtttccagccaccttcctgacttctatctgggcttggccaggacttctagtccctcatacc

SEQ ID NO: 741927 - DNA, 120 bp, Artificial Sequence
  ENSG00000204428_4 (sequence is synthesized)
agccctccttgcctccctccagccactggaccccagccttggctcttcctcttggttgacgcccttcagcacacttactgctactctgtacccccagccctactgcccaccaggtttcct

SEQ ID NO: 741928 - DNA, 120 bp, Artificial Sequence
  ENSG00000204428_5 (sequence is synthesized)
atgcagaccttcccagttgctggggcgctggaccctgctatactggacacaaggtaggagcactcagaagggacaccgtcatctgctgctgtcgccatggcgattattcaacgccctgcc

SEQ ID NO: 741929 - DNA, 120 bp, Artificial Sequence
  ENSG00000204428_6 (sequence is synthesized)
tcttcaccccaggaaaaccttcgcggaacccgtcaccatggaaacgaactctctggactcttagcgcgccctgggctggccctgctgggtggacaggagaggagcaaaacgcaacaaaga

SEQ ID NO: 741930 - DNA, 120 bp, Artificial Sequence
  ENSG00000204428_7 (sequence is synthesized)
ccgcagtccggccctaatatagtttttaaattcattcattccaaggcttttgggaggcgctcagtggcgtgcagtttcctctcgaatttctttcttcccgcagtctttctgggcgggcgt

SEQ ID NO: 741931 - DNA, 120 bp, Artificial Sequence
  ENSG00000204428_8 (sequence is synthesized)
gtttcttcccatcttcccccttatcatcctgggactggataattcttgaatagtctgggaggtagcagggaacccgagttcggagcctcgaccagaacctccagacgggaaattggagca

SEQ ID NO: 741932 - DNA, 120 bp, Artificial Sequence
  ENSG00000204428_9 (sequence is synthesized)
ggtggtgtcgttccaggacgctgaggaccacctcctcccctaacgcacagcccaacgatcctaaaagtttcttccccagggaacagagcttgagcggggggccacccccccgtcctaccg

SEQ ID NO: 741933 - DNA, 120 bp, Artificial Sequence
  ENSG00000204428_10 (sequence is synthesized)
atgcagaccttcccagttgctggggcgctggaccctgctatactggacacaaggtttcttccccagggaacagagcttgagcggggggccacccccccgtcctaccggagttctgaggtg

SEQ ID NO: 741934 - DNA, 120 bp, Artificial Sequence
  ENSG00000204428_11 (sequence is synthesized)
ggggagccgcttcgggctccggatgtccgctggggcccgacgcttgggtcccgacgcgcggttcgcactttccaggtttcttccccagggaacagagcttgagcggggggccaccccccc

SEQ ID NO: 741935 - DNA, 120 bp, Artificial Sequence
  ENSG00000204428_12 (sequence is synthesized)
atggcaggccctgcagggagccagagtctgggtcccctgtgcttccacagcagcccccaagccctctacacggtcctcttaatagtgctggtcatgatgagcttggtgtttggtaagtgg

SEQ ID NO: 741936 - DNA, 120 bp, Artificial Sequence
  ENSG00000204428_13 (sequence is synthesized)
ctccaagggttcagaagggtctcctggcctggatggagaaacccacagacaccaagtgtctgggtacacctgtccaggatgctcaggtaaacccatgcaggaggagagatgggacagatg

SEQ ID NO: 741937 - DNA, 120 bp, Artificial Sequence
  ENSG00000204428_14 (sequence is synthesized)
aggtaaacccatgcaggaggagagatgggacagatgggtttggtagggaatgcctgctcatggactgatgtgcaatctgaagatttttaaaaatttattattattattatttttgagatg

SEQ ID NO: 741938 - DNA, 120 bp, Artificial Sequence
  ENSG00000204428_15 (sequence is synthesized)
ggagggttagggagtgtgctggatgagaaaaccagaatccacaggatagaacaagactgagtccagcctgctgggctccccacttggctgcaaagcaccagccacagagacacaggattc

SEQ ID NO: 741939 - DNA, 120 bp, Artificial Sequence
  ENSG00000204428_16 (sequence is synthesized)
aaagtgttggtttagcactttcctctgcctaacaccaagtgctctgctgggtctggggatttgttaacatgtggtctggccttaggaccagaggaaaagggggatgtatgtgtatgcagt

SEQ ID NO: 741940 - DNA, 120 bp, Artificial Sequence
  ENSG00000204428_17 (sequence is synthesized)
tggggaaggaagcagagaattggggctttgatggttttctgagacaggaagggagggaggagtggggctgagtggcctggaatcaggcagtggtagggtgtgaggtagaatggggtgtga

SEQ ID NO: 741941 - DNA, 120 bp, Artificial Sequence
  ENSG00000204435_0 (sequence is synthesized)
ggaggaagcgaccaggtccggcacgaaggagggagaggtggcctgaggagcggaggggggatgtgtggattccggtgaaagggacctgacaatcgcccccaacccctgacgtgaagatga

SEQ ID NO: 741942 - DNA, 120 bp, Artificial Sequence
  ENSG00000204435_1 (sequence is synthesized)
gcagctcagaggaggtgtcctggatttcctggttctgtgggctccgtggcaatgaattcttctgtgaagtggatgaagactacatccaggacaaatttaatcttactggactcaatgagc

SEQ ID NO: 741943 - DNA, 120 bp, Artificial Sequence
  ENSG00000204435_2 (sequence is synthesized)
aggtccctcactatcgacaagctctagacatgatcttggacctggagcctgatgaagaactggaagacaaccccaaccagagtgacctgattgagcaggcagccgagatgctttatggat

SEQ ID NO: 741944 - DNA, 120 bp, Artificial Sequence
  ENSG00000204435_3 (sequence is synthesized)
gactttggttactgtcctcgtgtgtactgtgagaaccagccaatgcttcccattggcctttcagacatcccaggtgaagccatggtgaagctctactgccccaagtgcatggatgtgtac

SEQ ID NO: 741945 - DNA, 120 bp, Artificial Sequence
  ENSG00000204435_4 (sequence is synthesized)
acacccaagtcatcaagacaccatcacacggatggcgcctacttcggcactggtttccctcacatgctcttcatggtgcatcccgagtaccggcccaagagacctgccaaccagtttgtg

SEQ ID NO: 741946 - DNA, 120 bp, Artificial Sequence
  ENSG00000204435_5 (sequence is synthesized)
cccaggctctacggtttcaagatccatccgatggcctaccagctgcagctccaagccgccagcaacttcaagagcccagtcaagacgattcgctgattccctcccccacctgtcctgcag

SEQ ID NO: 741947 - DNA, 120 bp, Artificial Sequence
  ENSG00000204435_6 (sequence is synthesized)
tctttgacttttcctttcttttttgccaccctttcaggaaccctgtatggtttttagtttaaattaaaggagtcgttatcgtggtgggaatatgaaataaagtagaagaaaaggccatga

SEQ ID NO: 741948 - DNA, 120 bp, Artificial Sequence
  ENSG00000204435_7 (sequence is synthesized)
tgtggattccggtgaaagggacctgacaatcgcccccaacccgtgagaaaaggaggagcccagttcttgcttgagaatgataaacttggaaacccttgggaaaggcgtgggggtcatgca

SEQ ID NO: 741949 - DNA, 120 bp, Artificial Sequence
  ENSG00000204435_8 (sequence is synthesized)
cttccccaccctccctaatttccactccccccaccccacttcgcctgccgcggtcgggtccgcggcctgcgctgtagcggtcgccgccgttccctggaagtagcaacttccctaccccac

SEQ ID NO: 741950 - DNA, 120 bp, Artificial Sequence
  ENSG00000204435_9 (sequence is synthesized)
ccccacaatgcccttcgccttcctcaacgtggcccccgctccaagcccattttctggagccaggaatccactctgtgggttaggaaaggccctcaggaggcggagggaaacctgtggaat

SEQ ID NO: 741951 - DNA, 120 bp, Artificial Sequence
  ENSG00000204435_10 (sequence is synthesized)
gccgagaagccgtgtaatgaaataacgtcacgcctgcccctcaccattactctgaccagggttcgaaggtcacacttagagcctaaggggaaatggagaagtgcaaagggacgagcagaa

SEQ ID NO: 741952 - DNA, 120 bp, Artificial Sequence
  ENSG00000204435_11 (sequence is synthesized)
gagttggggctcaacacattggagcctgagtcctgaggggaggttaggtaggaatagggggatacctggcctgctgagtctggctgtctcccaggcctttcagacatcccaggtgaagcc

SEQ ID NO: 741953 - DNA, 120 bp, Artificial Sequence
  ENSG00000204435_12 (sequence is synthesized)
tggcaaaactggggcccaagtcctgagtctgccaccgtccagcaatataacgttgggctagtcaatttgtgtctttttcttttttttgagactgggtctcactctgtcaccgaggctgga

SEQ ID NO: 741954 - DNA, 77 bp, Artificial Sequence
  ENSG00000204435_13 (sequence is synthesized)
tttttttgagactgggtctcactctgtcaccgaggctggagggtagtggtgcgatctcggctcagcctcccaagtag

SEQ ID NO: 741955 - DNA, 120 bp, Artificial Sequence
  ENSG00000204435_14 (sequence is synthesized)
ggttcctgcagcaagaagtcatgtttaagccctgtttaaggaagctagctgagaagaggggaagaaccccagaacttgggcctgggaattgaattctgattgggggtcatcctgaaggga

SEQ ID NO: 741956 - DNA, 120 bp, Artificial Sequence
  ENSG00000204435_15 (sequence is synthesized)
ttgttttcagggagggagacagaccttgaatcagagagttgtgatagactgcctcttcctcaaggaacaaacaacaaatggctctgatggtttgtagcctgcctaattggaagaaaggca

SEQ ID NO: 741957 - DNA, 120 bp, Artificial Sequence
  ENSG00000204435_16 (sequence is synthesized)
acacagaagtttgagagcccatctagtccagagaaggggcctctggacagaggtgggaggagtgggggacagagtggtatgggttgggctgcgaagggagttgcctcttctttacatcta

SEQ ID NO: 741958 - DNA, 120 bp, Artificial Sequence
  ENSG00000204435_17 (sequence is synthesized)
aaggtgatggtgtgttggactccaggggccctcatggcccagcccaccctccccagattgaaaaccaggacagatttgtgctcagtggattgggtggtgtttttagtatggagcagaaca

SEQ ID NO: 741959 - DNA, 120 bp, Artificial Sequence
  ENSG00000204435_18 (sequence is synthesized)
gaattcctaggactgcgtgtgatgaaatgcaaggtcaaaaggaaaagacaaagcatatttcaaagatgagaaatatttgtttggatatctatgactgtctgtttatactgtaaggggctt

SEQ ID NO: 741960 - DNA, 120 bp, Artificial Sequence
  ENSG00000204435_19 (sequence is synthesized)
tgcgtgcactatttttctcttcaaatctctattcacttgcctgaattttgaaatttcctttggttctctgatttctttaaccccaaattcatgctttattttgatcctccacctgactct

SEQ ID NO: 741961 - DNA, 120 bp, Artificial Sequence
  ENSG00000204435_20 (sequence is synthesized)
tgtctagttttgtgacgtatatcacttgttctcatgttttctaaatccgcaattcagacctattccaaaatgcgtttcctcatgggtctggtttgttgtctgtttctcctgctttgcacc

SEQ ID NO: 741962 - DNA, 120 bp, Artificial Sequence
  ENSG00000204438_0 (sequence is synthesized)
cagagacccttgacgggcatactgtttcctccgggctcctgcctcatgaggggagaggtgcggcttggctccaatggcgccattttgcggtacggaagctacacagcaacacgtatagga

SEQ ID NO: 741963 - DNA, 120 bp, Artificial Sequence
  ENSG00000204438_1 (sequence is synthesized)
gactctccccgagatcttctagggagtgacccatctatttttgtttgggaagaggaaactccgaaatgggatcgcggaagacttaaagggccaggctgatttttttttcctactgcaggt

SEQ ID NO: 741964 - DNA, 120 bp, Artificial Sequence
  ENSG00000204438_2 (sequence is synthesized)
ctctgaggctgtggttgctacagggtcaccacgagcttggcttacttgtctcatccttcccttgcctggtatcattttctcagttctcccaaaagccatgtcccggcccttgctcatcac

SEQ ID NO: 741965 - DNA, 120 bp, Artificial Sequence
  ENSG00000204438_3 (sequence is synthesized)
cttcaccccagccactgaccccagcgacctctggaaggatgggcagcagcagccacagcccgagaagccagagtccaccctggatggggctgcagcccgagctttctatgaggccctgat

SEQ ID NO: 741966 - DNA, 120 bp, Artificial Sequence
  ENSG00000204438_4 (sequence is synthesized)
tggggatgagagcagcgctcctgactcccagagatctcagactgaacctgccagagaaagaaagagaaagaaaagaagaataatgaaggcaccagcagcagaagcagtggcagaaggagc

SEQ ID NO: 741967 - DNA, 120 bp, Artificial Sequence
  ENSG00000204438_5 (sequence is synthesized)
atcaggaagacatggacaagggagatcccttgaggctgaggataagatgactcaccggatactgagggcagcccaggagggggacctgccagaacttaggagactgctggaaccgcatga

SEQ ID NO: 741968 - DNA, 120 bp, Artificial Sequence
  ENSG00000204438_6 (sequence is synthesized)
ccttctggtggaccccactgatgtgtgctgctcgagcgggccagggggcagctgtgagctatctcctgggccgtggggctgcctgggtgggggtctgtgagctgagtggcagggatgcgg

SEQ ID NO: 741969 - DNA, 120 bp, Artificial Sequence
  ENSG00000204438_7 (sequence is synthesized)
ctcagctcgctgaagaagctggcttccctgaggtagcccgcatggtcagggagagccatggagagacaaggagcccggaaaaccggtctcctactccctccctccagtactgcgagaact

SEQ ID NO: 741970 - DNA, 120 bp, Artificial Sequence
  ENSG00000204438_8 (sequence is synthesized)
gtgacacccacttccaagattccaaccaccgcacatccactgctcacctgctgtcactgtcgcagggtcctcagcctcccaaccttccacttggggtgcccatctccagcccgggcttca

SEQ ID NO: 741971 - DNA, 120 bp, Artificial Sequence
  ENSG00000204438_9 (sequence is synthesized)
aactgctgctgagggggggctgggagccaggaatggggctgggaccccggggtgagggccgtgccaatcccatccccactgtcctcaagagggaccaggaaggactaggctacagatcag

SEQ ID NO: 741972 - DNA, 120 bp, Artificial Sequence
  ENSG00000204438_10 (sequence is synthesized)
caccccagccccgagtgacacatttcccagcttgggatacccgagctgtggctgggagggagagaccccctcgggtggccacactgagctggagggaggagagaaggagggaggagaaag

SEQ ID NO: 741973 - DNA, 120 bp, Artificial Sequence
  ENSG00000204438_11 (sequence is synthesized)
acagggcttgggagcgggatctaaggacttacatgaacctcgagttctgactttggtaaagtctgaccctagtctgctgctgaagtctgaacttgggcctctgacctgggccctttgact

SEQ ID NO: 741974 - DNA, 120 bp, Artificial Sequence
  ENSG00000204438_12 (sequence is synthesized)
tccccttcctgggatctgctcagatgcagatcctgaagtttttggtcaataggctctgtcttcgtgagagacgggctgagagtcagaaataaatcaaccatttgtggtttattcactttt

SEQ ID NO: 741975 - DNA, 120 bp, Artificial Sequence
  ENSG00000204438_13 (sequence is synthesized)
cggggcccgggagtctgggcaatacagttttgtgctcactgggtgaagaggctgacttagggcggggaaaggagggagccaggctggatctctttccgcagctctcctcacgttcccctc

SEQ ID NO: 741976 - DNA, 120 bp, Artificial Sequence
  ENSG00000204438_14 (sequence is synthesized)
tagtcccggcgcggcgctgctgcccaggggactggcctatcctcggccaatccgctgggtccttattgcctgttgggcccctagtgcgaatcagtcccgccagagacccttgacgggcat

SEQ ID NO: 741977 - DNA, 120 bp, Artificial Sequence
  ENSG00000204438_15 (sequence is synthesized)
tattttgaggaagccaaacagaagcctgggagccacatgcaagtcccacctgagtcagaaggggcagcctctccaggtggcatgataaggtcacctccctgccaatctgggttcactttc

SEQ ID NO: 741978 - DNA, 120 bp, Artificial Sequence
  ENSG00000204438_16 (sequence is synthesized)
aggtcccagaccctcctgggagtcccccacctattctttcaacccccctggaccaagaattgcccagcttcgtgcaagtctcacttcccccaggaggagttccctgactacagccaattc

SEQ ID NO: 741979 - DNA, 120 bp, Artificial Sequence
  ENSG00000204438_17 (sequence is synthesized)
actgatttcacaaacataagtccatatactatgtgccaagaatacaggtaaagacattcccaaccctcaaagagttcacagctggagagggaaagtgccatgttatcaatttttttcttt

SEQ ID NO: 741980 - DNA, 65 bp, Artificial Sequence
  ENSG00000204438_18 (sequence is synthesized)
gctggagagggaaagtgccatgttatcaatttttttcttttttttttgagatgcagtttcgctcc

SEQ ID NO: 741981 - DNA, 120 bp, Artificial Sequence
  ENSG00000204438_19 (sequence is synthesized)
cggcttcccaaagtgctggggttgcaggcatgagccaccactcccggcccatgttatcaaatattataatgcagggtgataagggaagtcaaggcctctagagatgagaatgggtagggt

SEQ ID NO: 741982 - DNA, 120 bp, Artificial Sequence
  ENSG00000204438_20 (sequence is synthesized)
tttgctggaagaggccagtgtgataggaaggcccacgattatcaagcttgtacacttagttgaactgggaccagaactctagcccccaaatctaaactttaaacttctttgttccaccca

SEQ ID NO: 741983 - DNA, 120 bp, Artificial Sequence
  ENSG00000204438_21 (sequence is synthesized)
cacatcaaagtccggagaccccatgtgccgctcccagcgacaagggactcggagcagcgacgacttcagactcaccggctggacggggaccaggactggggtggggtagggaagttgcta

SEQ ID NO: 741984 - DNA, 120 bp, Artificial Sequence
  ENSG00000204438_22 (sequence is synthesized)
cttccagggaacggcggcgaccgctacagcgcaggccgcggacccgaccgcggcaggcgaagtggggtggggggagtggaaattagggagggtggggaagagggcaacacgcaagcgcca

SEQ ID NO: 741985 - DNA, 120 bp, Artificial Sequence
  ENSG00000204438_23 (sequence is synthesized)
agggtcaggtgccgcggtggatgccgggacacggagtccccggtagagaaagaaactggctaaatgagagaaagcgaactaccaatcccaggatgacccgcgcacgacctggctgtcacg

SEQ ID NO: 741986 - DNA, 120 bp, Artificial Sequence
  ENSG00000204438_24 (sequence is synthesized)
cgccacctgggcgcgcggagctttgctcgtttactattgaaaaagttccagcgcgggaaactgaacccggagctttgcgcacgcccgagccctcaagtaataatggcgccattttgcggt

SEQ ID NO: 741987 - DNA, 120 bp, Artificial Sequence
  ENSG00000204439_0 (sequence is synthesized)
ctggtgcagctgcttccgggcttcgcggctcccggcggctccccaaggccgcggccccgacgctgggcccgggagcggtccccgcgcacagcgcccggacgcgtaggtcccgaagtaggc

SEQ ID NO: 741988 - DNA, 120 bp, Artificial Sequence
  ENSG00000204439_1 (sequence is synthesized)
aggcccgcgctttgcttcgtaactggggatctctgaggacatcttagttctgaccttgtggaggccgcgtctctgctgcgtgttcgcgggccagtcgggccactttgtagaaatcatagc

SEQ ID NO: 741989 - DNA, 120 bp, Artificial Sequence
  ENSG00000204439_2 (sequence is synthesized)
cctctaaatcaagggacgaacgctgctggctggagtttgctggacactttcattccacctcctaacaaagagaattcctattccttgaggtcccttggggcagcagttaaagactacacg

SEQ ID NO: 741990 - DNA, 120 bp, Artificial Sequence
  ENSG00000204439_3 (sequence is synthesized)
atccaggagcacctaggacctggggccaccttcctgcccgctttattggatggagcactgcctccccagtttctgggacaccttggggtgtggccttggtgagtgaaacttggggtgctg

SEQ ID NO: 741991 - DNA, 120 bp, Artificial Sequence
  ENSG00000204439_4 (sequence is synthesized)
cctgctgggaaggaaatccggaaacgcagagaggactctctggtggtgacccaggccttgtcagatctgagattcttggaatctcagattgtgggggtgtggatggtgaatgaatttggg

SEQ ID NO: 741992 - DNA, 120 bp, Artificial Sequence
  ENSG00000204439_5 (sequence is synthesized)
tatgcccccctttaccccagaactgaagaggaagcaaactacttgccacacttgaggctgcatgactattcagagaagggaggagccacttctgaattcagagtaggactgcatcaccag

SEQ ID NO: 741993 - DNA, 120 bp, Artificial Sequence
  ENSG00000204439_6 (sequence is synthesized)
gcaaatacctgttctgagccagaaagactctggcttctgaggagatcctgagagtctgagtagtgccaggaagcagcctcagaatttgggggcccattacacaccccagccatgttcctg

SEQ ID NO: 741994 - DNA, 120 bp, Artificial Sequence
  ENSG00000204439_7 (sequence is synthesized)
cgacggcttggtggctggctacctcgcccttggggccgccggaaaccaatgaggcctgacccgccttacccagaacccagacgggtggacagctcctcggagaattcaggaagtgactgg

SEQ ID NO: 741995 - DNA, 120 bp, Artificial Sequence
  ENSG00000204439_8 (sequence is synthesized)
gatagtgccccagaaaccatggaagatgtggggcatcccaagactaaggactcgggggcattgagggtttctggggctgcttccgaaccaagcaaggaggagccccaagttgagcagcta

SEQ ID NO: 741996 - DNA, 120 bp, Artificial Sequence
  ENSG00000204439_9 (sequence is synthesized)
gggagcaaaagaatggattccctcaagtgggaccagcctatctctagcactcaagagtctgggagactggaggctggaggggccagtcccaaactcagatgggatcatgtggattcaggt

SEQ ID NO: 741997 - DNA, 120 bp, Artificial Sequence
  ENSG00000204439_10 (sequence is synthesized)
cgtgagaagctgttgggctggctgcggggggaaccaggagctccctcccggtacttggggggcccagaagagtgtctgcagatctccaccaacctgaccctgcatcttctggagctgctg

SEQ ID NO: 741998 - DNA, 120 bp, Artificial Sequence
  ENSG00000204439_11 (sequence is synthesized)
gcctctgccctgctggccctgtgctcacgaccactgcgggcagccttggacacactgggcctgcgtggaccgctgggcctctggctacatggcctactgtccttcctggctgccctgcat

SEQ ID NO: 741999 - DNA, 120 bp, Artificial Sequence
  ENSG00000204439_12 (sequence is synthesized)
gggctccatgctgttctgagcctacttactgcccaccctttgcacttcgcctgcctctttggtctcctgcaggccttggtgctggctgtcagcctccgggagcccaatggggatgaggcg

SEQ ID NO: 742000 - DNA, 120 bp, Artificial Sequence
  ENSG00000204439_13 (sequence is synthesized)
gccactgactgggagagtgaggggttggagagggaaggtgaggagcagaggggagacccgggaaaggggctgtgaccgtggggtgggggcaaagggtgaagagagtgtgggctttaggag

SEQ ID NO: 742001 - DNA, 120 bp, Artificial Sequence
  ENSG00000204439_14 (sequence is synthesized)
aaaagtgtgaggcatgacccaaattgtaagcatagggacctcagggatggggaagaaacccgagtacgagggtgcagggccccccttcatacacaggagagaacagaactatttagggtg

SEQ ID NO: 742002 - DNA, 120 bp, Artificial Sequence
  ENSG00000204439_15 (sequence is synthesized)
tttgtgtttatggacagtgagggcactgctcttggattcaccagctgttatttttgcttttacttttctcccaccttcagttttttttttttttccacctccactttttaaaagcaaaaa

SEQ ID NO: 742003 - DNA, 120 bp, Artificial Sequence
  ENSG00000204439_16 (sequence is synthesized)
aaaaaaaaagtatgatggtggtgaataaagaccaaagggtcctctctacctttgaaaactctcctggggtggaggagaccagggcaggatagacagacctctgcagtaagagagtggttg

SEQ ID NO: 742004 - DNA, 120 bp, Artificial Sequence
  ENSG00000204439_17 (sequence is synthesized)
ggaaacccagggtgttccttggatctcaggatctgagccatcgagggaagagtggggctgctaggcaagtggattagggggtctggatagggccccacaggtgacagggagcctgcaggg

SEQ ID NO: 742005 - DNA, 120 bp, Artificial Sequence
  ENSG00000204439_18 (sequence is synthesized)
cggatctggtgatcatgggagccagagggagtggggacagtgcaggcagtattggcaggagggccagtgcagaagggctggtagctcaggcagtgtgggggaagcactgaagcctgtagt

SEQ ID NO: 742006 - DNA, 120 bp, Artificial Sequence
  ENSG00000204439_19 (sequence is synthesized)
ccccacttgggggctaggggtttgctcactcagcaataaataactgtgtcacatcaaatcctaaatataccactacaaagtgagagttactgccactctgttcttactgacaccgtccag

SEQ ID NO: 742007 - DNA, 120 bp, Artificial Sequence
  ENSG00000204442_0 (sequence is synthesized)
aaaaaagtgtttctccaggacgaagatggcggcaacttagcccgcggactgaagatgactgtggctctcgggaggcccagcccaggcgattcggcccggagctccgcgggaggcggcgtc

SEQ ID NO: 742008 - DNA, 80 bp, Artificial Sequence
  ENSG00000204442_1 (sequence is synthesized)
gcggcggcagcacttagagcgcggggtggggggtgggggggagggagcgccccgccggaggcagcccaggctccggactc

SEQ ID NO: 742009 - DNA, 120 bp, Artificial Sequence
  ENSG00000204442_2 (sequence is synthesized)
ggaggcagcccaggctccggactctgggagagccagcgcggagcaggagcgggaggcggaggagaagaagaaggagaaggaaaggaaggaggaggaagaggaggagaagaagaggaggag

SEQ ID NO: 742010 - DNA, 120 bp, Artificial Sequence
  ENSG00000204442_3 (sequence is synthesized)
gaggaggaggaggggaggcgctccgggcgccgtcagtgggcagcggaggcgcggcatgcccctggcaggggagagcgggctgggctccgcggggccatggggacccgcgcgctgacaatg

SEQ ID NO: 742011 - DNA, 120 bp, Artificial Sequence
  ENSG00000204442_4 (sequence is synthesized)
cctgggtgaccggagccgcgccagccaccctgtcacctccaccatcgccccctgcacccagcctcgccgccggccaccagcaccagcctcctccgtctctctctctctctctctctccat

SEQ ID NO: 742012 - DNA, 120 bp, Artificial Sequence
  ENSG00000204442_5 (sequence is synthesized)
tattgtttcccactctacagaggatggggtcggctgatgattaggaagcaagtcagaccttccttcaaagcctggtaatatttatgtaggcaaaagagacagagagagataaaagagagg

SEQ ID NO: 742013 - DNA, 120 bp, Artificial Sequence
  ENSG00000204442_6 (sequence is synthesized)
gagagggagagagagagagaggagagagggagaggggaagagagagaaagagagagaggagagagaagaaacgggaggaggggataaggaaattaaaccctttaagtcaatgcatattgt

SEQ ID NO: 742014 - DNA, 120 bp, Artificial Sequence
  ENSG00000204442_7 (sequence is synthesized)
ggtgacaccggcacaggcgccctcacggtggagtcggccagggctgtgcgttcccaaaatatgaccaggggtgcttggatgtgtcggcagtatgacgacggcttaaaaatctggttggca

SEQ ID NO: 742015 - DNA, 120 bp, Artificial Sequence
  ENSG00000204442_8 (sequence is synthesized)
gcaccccgagagaacgagaaaccgttcatcgattccgagagggctcagaaatggcgactgtctctggcatctctcttgtttttcacagtcctgctctctgatcacttgtggttctgcgcc

SEQ ID NO: 742016 - DNA, 120 bp, Artificial Sequence
  ENSG00000204442_9 (sequence is synthesized)
gaggccaagctgacccgggcccgggacaaggagcaccagcagcagcagcggcagcagcagcagcagcagcagcagcagaggcagcggcagcagcagcagcagcagcggcggcagcaggag

SEQ ID NO: 742017 - DNA, 120 bp, Artificial Sequence
  ENSG00000204442_10 (sequence is synthesized)
ccctcctggcccgcgctcctggcgagcatgggggagtcctcgcccgccgcccaggcacacagactcctctccgcctcctcgtcccccaccctgcccccctccccgggagacggcggcggc

SEQ ID NO: 742018 - DNA, 120 bp, Artificial Sequence
  ENSG00000204442_11 (sequence is synthesized)
ggcggcggcaagggcaaccgaggcaaagacgaccggggcaaggctctttttctaggaaactctgccaagcccgtgtggcgcctggagacttgttacccccagggcgcgtcctcgggccag

SEQ ID NO: 742019 - DNA, 120 bp, Artificial Sequence
  ENSG00000204442_12 (sequence is synthesized)
tgcttcacggtggagaatgcggacgcggtgtgcgccaggaactggagtcggggggcggccgggggggacgggcaggaggtgaggagcaagcatcccactccgctctggaacttgtcggat

SEQ ID NO: 742020 - DNA, 120 bp, Artificial Sequence
  ENSG00000204442_13 (sequence is synthesized)
ttttacctttcgttttgtaattcctacacactttgggagttgttctcggggttgtccagtcccaacactttgaactgcagtctggatgtggtgctcaaggaaggcggcgagatgaccact

SEQ ID NO: 742021 - DNA, 120 bp, Artificial Sequence
  ENSG00000204442_14 (sequence is synthesized)
tgcaggcagtgcgtcgaggcttaccaggactatgaccaccatgctcaggagaaatacgaagagtttgaaagcgtgctccacaaatatttacagtcggaggagtactcggtgaaatcctgt

SEQ ID NO: 742022 - DNA, 120 bp, Artificial Sequence
  ENSG00000204442_15 (sequence is synthesized)
aagattgtctacaaagcctggctctgttcccagtattttgaagtcacacagtttaactgcagaaagacaattccttgcaagcaatactgtttggaggttcagacgaggtgtccatttata

SEQ ID NO: 742023 - DNA, 120 bp, Artificial Sequence
  ENSG00000204442_16 (sequence is synthesized)
tgtccatttatattgcccgacaatgatgaagtcatctacggaggcctctccagtttcatctgtacagggctttatgaaacctttctaaccaatgatgaaccagaatgctgtgacgtcagg

SEQ ID NO: 742024 - DNA, 120 bp, Artificial Sequence
  ENSG00000204442_17 (sequence is synthesized)
agagaagaaaaatcaaataacccatccaaagggaccgtagagaaaagtggctcctgtcacaggacatcgctcacagtgtcatcagcaacaagactgtgcaacagcagactcaagctgtgt

SEQ ID NO: 742025 - DNA, 120 bp, Artificial Sequence
  ENSG00000204442_18 (sequence is synthesized)
gttcttgtactgattctcttacacacagtgctcacagcctcggcagcacagaacacagccggactgagctttggaggcatcaacacgctggaagaaaactcaaccaatgaggagtaacgg

SEQ ID NO: 742026 - DNA, 120 bp, Artificial Sequence
  ENSG00000204442_19 (sequence is synthesized)
aaggacgagtgtcaccacagcagcagctggcccgccgtgaaaaatggcaactgctgtctcatgtaacagaaactgggtgcttttaccctcgaattacttattgcaaggcctttagggtaa

SEQ ID NO: 742027 - DNA, 120 bp, Artificial Sequence
  ENSG00000204442_20 (sequence is synthesized)
aatttaaacagatgggcctgaatccaaacaaggacacaaccacagctttttattgactaaaaggctggaaagtgactttaaatttctcacaccattttatacactgtgttttaatgtttg

SEQ ID NO: 742028 - DNA, 120 bp, Artificial Sequence
  ENSG00000204442_21 (sequence is synthesized)
gaggttttatttgctttcgttttggtttgggtttatttgtttgtttattttttgcacttgttaatacaggatttattttgggggatggtttctcagaggtaaactaagtcttttcactgt

SEQ ID NO: 742029 - DNA, 120 bp, Artificial Sequence
  ENSG00000204442_22 (sequence is synthesized)
ctctatctctctatatatttctagtcattgtgtgtgttcatcagatagttctgtctttatgtcctgtcagcttctattagaggaatgattgctatgacctcatggtatagcaaaaaacaa

SEQ ID NO: 742030 - DNA, 89 bp, Artificial Sequence
  ENSG00000204442_23 (sequence is synthesized)
ccctaagtctcccttctacccacagaaccaacaacacccttcccggcctttcctttccctcgccctcttctcgtcccctaagcaaacaa

SEQ ID NO: 742031 - DNA, 120 bp, Artificial Sequence
  ENSG00000204442_24 (sequence is synthesized)
ttcctttccctcgccctcttctcgtcccctaagcaaacaacatccgcttgcttctgtctgtgtaaccacagtgaatgggtgtgcacgcttggtgggcctctgagcccctgttgcacaaac

SEQ ID NO: 742032 - DNA, 120 bp, Artificial Sequence
  ENSG00000204442_25 (sequence is synthesized)
cagaaacagagcggagccaagggggcctgacaagagttcctttttagctgaacaaacaagtgctctccataataggtggaatcagacagttaacacatttttatgttgaaaacaaaataa

SEQ ID NO: 742033 - DNA, 120 bp, Artificial Sequence
  ENSG00000204442_26 (sequence is synthesized)
aaggaaaaaattaaaaaaaactatcatgaactgtattgctccagttcccatccccaagtggcccagccctttcttgctggtccagttggacaggagcagctatctagaatcaggatgcgg

SEQ ID NO: 742034 - DNA, 120 bp, Artificial Sequence
  ENSG00000204442_27 (sequence is synthesized)
ggagtgaggaagtttttcttttgacaatgaaggtgggctttcattgtgatttttgttctgttgcagtaatataggagcacattttggccattgtaattacagggaacaaacaaagggatt

SEQ ID NO: 742035 - DNA, 120 bp, Artificial Sequence
  ENSG00000204442_28 (sequence is synthesized)
gcggacacatatctggacttcttttcctcccttattgttgtggaagagacactagaaatgctcaaacacctgcaatatacagaatatacacaattttattccagtatttccctaacatat

SEQ ID NO: 742036 - DNA, 120 bp, Artificial Sequence
  ENSG00000204442_29 (sequence is synthesized)
ggtttaaaattattccaggtatacagtgtatgcaattctgcattatcacagaggaacaacttcttttttaaaaaataaataggtcagccatttttattaacgtgcaaaaactttatcact

SEQ ID NO: 742037 - DNA, 120 bp, Artificial Sequence
  ENSG00000204442_30 (sequence is synthesized)
ctaacatgctctaggtagttgaggaaaagaggtctgatcactgtttgtattttattttctttgtgggaacatttcacctgctgagtgtacatgaatttgctttctataaaaggcttttat

SEQ ID NO: 742038 - DNA, 120 bp, Artificial Sequence
  ENSG00000204442_31 (sequence is synthesized)
gagtttacagtagaatcagtggaaggaagagttaataagggctgtttttaaaaaaacaaacaaacaaacaaaacaaataattaaaaaaaaaattttacattccttcctattctctaacta

SEQ ID NO: 742039 - DNA, 120 bp, Artificial Sequence
  ENSG00000204442_32 (sequence is synthesized)
cacttgggaagtgcacttcagataagtttgcagtgtgactgagagatgaaggaaatccatagaaaaggtcctcttagtgaacaaaatttagttattaactttatagctatgaaatttccc

SEQ ID NO: 742040 - DNA, 120 bp, Artificial Sequence
  ENSG00000204442_33 (sequence is synthesized)
cgggcatttgtttttgttcaaacagactttaacctctgcatcatacttaaccctgcgacatgcgtacagtatgcatattttgttttgaaaaaaaatgtttcgttccagtctgttaagaat

SEQ ID NO: 742041 - DNA, 120 bp, Artificial Sequence
  ENSG00000204442_34 (sequence is synthesized)
attcaaaaataataaaggtattgcttaataaaattgctagaattgtttagcagtacatgcacaatattttactagattctttgttttaatagtgttttgttgagactgaaaatcttaaaa

SEQ ID NO: 742042 - DNA, 120 bp, Artificial Sequence
  ENSG00000204442_35 (sequence is synthesized)
tggtctgcgcaaatacaaaaaaaaagaaaacaccaaaaatgcaaaattctcccgtttttgttccttttttaaaatttttttttctgcaaatgcaaatacattcacatgtggacagataca

SEQ ID NO: 742043 - DNA, 120 bp, Artificial Sequence
  ENSG00000204442_36 (sequence is synthesized)
tacacataggcatcatattttagtgtatggaaacatggtgcttttctggggacacaagctgaggaagtgaatggctcgggggagacacattaattgcatggaattgttgactgtgaaaca

SEQ ID NO: 742044 - DNA, 120 bp, Artificial Sequence
  ENSG00000204442_37 (sequence is synthesized)
cttgtagaaatgagcactttggtatcccaaccaatggtggaatacagatttcaatggcgctggggggacgagaagcagaggaattgaggctgcaagtgattcctgaggaagagctcacag

SEQ ID NO: 742045 - DNA, 120 bp, Artificial Sequence
  ENSG00000204442_38 (sequence is synthesized)
aagggaatggctaggaaggagtctgttctgacctttatctacctctgctgtggtaaggccactccatgtgccatctcaccatctcttcagcgttcctcatgctgcttctccccgtgccat

SEQ ID NO: 742046 - DNA, 120 bp, Artificial Sequence
  ENSG00000204442_39 (sequence is synthesized)
aggcgtttccattcttgcaggaaaatgacaatgcaagtgcaaattccactcacttttattggtatgacaataaattattctttctaaacacttagcaaaatgacgaaaagcagtattcct

SEQ ID NO: 742047 - DNA, 120 bp, Artificial Sequence
  ENSG00000204442_40 (sequence is synthesized)
taaaatataggttttcattttctcaatatattttgaactgactaaagttctttacaaagacaagaggatcagaaggttccacttacccgtgttttagcgtttgtttggagataatgccaa

SEQ ID NO: 742048 - DNA, 120 bp, Artificial Sequence
  ENSG00000204442_41 (sequence is synthesized)
ccaaaaggtggaaaactaaaaccaccattgctttacataagaggtacacactgccccccaccccccaaaaaaaaacacagctttgaaagttgggagaaacactgcagtcttcattgtaaa

SEQ ID NO: 742049 - DNA, 120 bp, Artificial Sequence
  ENSG00000204442_42 (sequence is synthesized)
tataaagtgataatttaggtgaggaaggaacggtaaggagggaaggggaatgagtcctttctccccatcaagtcagccagcattggaatagtctctaattctggcggaatattttctttg

SEQ ID NO: 742050 - DNA, 120 bp, Artificial Sequence
  ENSG00000204442_43 (sequence is synthesized)
tcatgttcatctattcttattacaggagaatgatttcagtgcctagtatttattagtgtaagtgtgtaaccactttcccgcaatatttccactggacatgttgaagcaaagcagcttctt

SEQ ID NO: 742051 - DNA, 120 bp, Artificial Sequence
  ENSG00000204442_44 (sequence is synthesized)
ctggggtcaggcagaggatccaaataggcaacgactcctttcccaagctcagaaacaatcactgatgatgcagatttcactacatccgttgattctttgtagtagttttcctggcacaca

SEQ ID NO: 742052 - DNA, 120 bp, Artificial Sequence
  ENSG00000204442_45 (sequence is synthesized)
cttgagcatgcttaaggttgtgcatatgttcattttgaacaaataagttcagcccctgctcctttgtaatcatcatcttgtttagtttttcctgtagaggatgtctaccgtatactggct

SEQ ID NO: 742053 - DNA, 120 bp, Artificial Sequence
  ENSG00000204442_46 (sequence is synthesized)
aatgaactacaatattaaaataattatttctgcaagcaagttgaaaaccaagaaaacaatatttgtttcataaatgtatggcatagatttccctgtttattattctttttatctgcaata

SEQ ID NO: 742054 - DNA, 120 bp, Artificial Sequence
  ENSG00000204442_47 (sequence is synthesized)
gagaaatttcagtttctggaatatgttggtactgctaagctaaatggcaaataacatagagttcaatgtcattctttattgcatttacatttggtgatacgttatattgaacttttcttg

SEQ ID NO: 742055 - DNA, 120 bp, Artificial Sequence
  ENSG00000204442_48 (sequence is synthesized)
cattaaaaagatagtatttttcccctctctcacaaggcagtaagtgaaagttgttcttttaaatggcatcattacaaaaagtaatttggtttcttaccaataaattggtaccttaggtac

SEQ ID NO: 742056 - DNA, 120 bp, Artificial Sequence
  ENSG00000204442_49 (sequence is synthesized)
tagaacctgtagtcattaaaacaaaagaaaataggcagatagcagaaacaaaagaatgacaggaaagaaggaaggaaagaggggagtgagggagggagggaagaagggagggatagagtc

SEQ ID NO: 742057 - DNA, 120 bp, Artificial Sequence
  ENSG00000204442_50 (sequence is synthesized)
ggggaatgagggggaaaggaggtttcatatgaatgaataagtacatacttttttccgggggaaaaaaacataaatgaaataagcaattggatgccagacccatgtgccaaatacctgaat

SEQ ID NO: 742058 - DNA, 120 bp, Artificial Sequence
  ENSG00000204442_51 (sequence is synthesized)
tggcatatggtatttgatatctgaacaacatcaaaaacgttaaccagtctgaagcatgatttacattctttctcagtaacaaagacatttacaattttcctgctactcaaagcattaaat

SEQ ID NO: 742059 - DNA, 120 bp, Artificial Sequence
  ENSG00000204442_52 (sequence is synthesized)
caacacagaactgaaagctgcattttgttttatttatttagaactgcagtcaggtatttaatttcttttctgtgtgtttgtttgttttttgagatggcatcttgctctgttgctcaagct

SEQ ID NO: 742060 - DNA, 71 bp, Artificial Sequence
  ENSG00000204442_53 (sequence is synthesized)
tttgttttttgagatggcatcttgctctgttgctcaagctggaatgcagcggcaagatctctgcctctcga

SEQ ID NO: 742061 - DNA, 84 bp, Artificial Sequence
  ENSG00000204442_54 (sequence is synthesized)
ccaggctagtcttgaactcctgaccttgggagatccgccgattaccacacccagccaggtatttaatttcataagtgtgcatat

SEQ ID NO: 742062 - DNA, 120 bp, Artificial Sequence
  ENSG00000204442_55 (sequence is synthesized)
ccacacccagccaggtatttaatttcataagtgtgcatatgcatatatgaggcgttagggttatatactatggcatatctttagagagatataaagatatatatacatacacacacacac

SEQ ID NO: 742063 - DNA, 120 bp, Artificial Sequence
  ENSG00000204442_56 (sequence is synthesized)
acacacacacacacacacacacatcgcttgcaaataaaacttcaaccaaaacattatgtagtccataacagcacatgtataccataatgatgaatgatcctacttgtttgtcaaagttag

SEQ ID NO: 742064 - DNA, 120 bp, Artificial Sequence
  ENSG00000204442_57 (sequence is synthesized)
agcagcatggtcatttaaaaaccatatctactttgacaagggaaacagactctcaaaatatctccattaatgaataaatcacaattttgaaacaggcagaatctccatcttccaagcttt

SEQ ID NO: 742065 - DNA, 120 bp, Artificial Sequence
  ENSG00000204442_58 (sequence is synthesized)
aacaatgtttataaaaaacctaatatagcaggtaggtattgggtgacaatgaataaaaagactttcagtgggggggaaggaaaataactaagtatagttttcaagcaatgtcttcatgac

SEQ ID NO: 742066 - DNA, 120 bp, Artificial Sequence
  ENSG00000204442_59 (sequence is synthesized)
atttataagaactatcaaacagctacaaattctagaaattctccaaataatgagaaaatgtatagataatcttcttagccttggaataaaacttaaggcatgaaacaaaatatgaactat

SEQ ID NO: 742067 - DNA, 120 bp, Artificial Sequence
  ENSG00000204442_60 (sequence is synthesized)
ggtttttattcttgagatactgtacttcagggctatgtttaccacagacaagacattcagattaaactcagaagaaaatcacctggttattttgtcctgggtcacacaggtaggtaatgc

SEQ ID NO: 742068 - DNA, 120 bp, Artificial Sequence
  ENSG00000204442_61 (sequence is synthesized)
aaatgatggaactcaagcatcttctgattacaaattacacaagctggctccgaggcacagtgggatccctaggtctcagacacacttgaagagttgaatggattttcttcatactccaag

SEQ ID NO: 742069 - DNA, 120 bp, Artificial Sequence
  ENSG00000204442_62 (sequence is synthesized)
atatttgtagaatcactcaatcttaaatgaaaaaatcaaaatgatcaggaagatctagcgaatgtctcagagttcgtttgtcatgttacattttgttccatgactttgctgtgttattca

SEQ ID NO: 742070 - DNA, 120 bp, Artificial Sequence
  ENSG00000204442_63 (sequence is synthesized)
atattttggaggtaaaggagaagagggtctatgggaatattttaataaaatatagatttttaatttttatttttaatgtggagaaaaggcacaggatcttagggcaaagccatggtttag

SEQ ID NO: 742071 - DNA, 120 bp, Artificial Sequence
  ENSG00000204442_64 (sequence is synthesized)
ggatgagctttggctccaggtgacacagggaggtcaatgatgtatttgtacgtgacacctcatgcaagaagaatacttcgtggcaacattggaggcttaaaagagataagtaatataaat

SEQ ID NO: 742072 - DNA, 120 bp, Artificial Sequence
  ENSG00000204442_65 (sequence is synthesized)
gtgcctggacaaaacaggtgctcagtagtagttagttatcatgactattcattcacaaagtgaaactggattggcttgctcatagggactgctcctggaagttgttcagagtttctgaat

SEQ ID NO: 742073 - DNA, 120 bp, Artificial Sequence
  ENSG00000204442_66 (sequence is synthesized)
ttctttggcttatctcttaattacattttttttttaacaacacctcacatccttaagctagcagactgaccatcaatagattttcaatacagtttgaaagtcttaacatatattacagaa

SEQ ID NO: 742074 - DNA, 120 bp, Artificial Sequence
  ENSG00000204442_67 (sequence is synthesized)
ctaaagtgagctctgatgacttttaatataaacagcattggctattttcgatttccactcccaaaaggctactactgacaagcaaaagttaaaggcatctacacaaattgaagtggttct

SEQ ID NO: 742075 - DNA, 120 bp, Artificial Sequence
  ENSG00000204442_68 (sequence is synthesized)
acaagcaagtgtaaattgatcaacagtggtagtagaaataatgatgcaacttcaaagtggttgtttaaggcactcatagatcaaaaaatatatataaatatttgatgcctctgaattcct

SEQ ID NO: 742076 - DNA, 120 bp, Artificial Sequence
  ENSG00000204442_69 (sequence is synthesized)
aacagtgaaaaagttagaaaacctgttcagtttttgataaagtatatggaaatagattaagcagggctcttgagtaaattatttcattgatttgtatctatttaggtaggtgagagttgc

SEQ ID NO: 742077 - DNA, 120 bp, Artificial Sequence
  ENSG00000204442_70 (sequence is synthesized)
atagaatcagtggcgagaaggatcagtgaaataaatttacaacttcagtgaagaccaggtaatgagcattgatctatgaatacagactttcttcagtgactatttcccctaaaactccca

SEQ ID NO: 742078 - DNA, 120 bp, Artificial Sequence
  ENSG00000204442_71 (sequence is synthesized)
gctcaccgcagcactgctgcttcaagattccagttattggcgtgctagccaagtagaaggtcatttttaccgaaacgcaaatttcaacttatggccattttctactgaccatttcactgc

SEQ ID NO: 742079 - DNA, 120 bp, Artificial Sequence
  ENSG00000204442_72 (sequence is synthesized)
aaaatggataaaacaataggaaatataaactacagcaaaagttaaagctctatatggacgttaaaagaaaacctcttgctttctttttcttcctttttctcttgttttctttttctacct

SEQ ID NO: 742080 - DNA, 120 bp, Artificial Sequence
  ENSG00000204442_73 (sequence is synthesized)
ttttctgcatatggcatttattttcatatcatgataagcattctcatgtttgcacttaattttccttatttctatttttcttagatttgttgatgttgtgtggcatattaaaagtaggaa

SEQ ID NO: 742081 - DNA, 120 bp, Artificial Sequence
  ENSG00000204442_74 (sequence is synthesized)
ggactgtataaactcatgtattatttttaaattgtttttctgaatgtactcaagtacttttttatgtgaatatgaacacggaataaaagtactaaaaccagttaattatgagagactaag

SEQ ID NO: 742082 - DNA, 120 bp, Artificial Sequence
  ENSG00000204442_75 (sequence is synthesized)
aatgtggaaaggaacattccggagtatattagtagctaaagaaatgccttggatcttaaatttcaacttctaaaattattaaaatacaaatattaaaaagatatagaggccactgctaaa

SEQ ID NO: 742083 - DNA, 120 bp, Artificial Sequence
  ENSG00000204444_0 (sequence is synthesized)
agagtggactgagcagccagtaggggagagagcagttaaggcacacagagcaccagctccctcctgcctgaagatgttccaccaaatttgggcagctctgctctacttctatggtattat

SEQ ID NO: 742084 - DNA, 120 bp, Artificial Sequence
  ENSG00000204444_1 (sequence is synthesized)
ccttaactccatctaccagtgccctgagcacagtcaactgacaactctgggcgtggatgggaaggagttcccagaggtccacttgggccagtggtactttatcgcaggggcagctcccac

SEQ ID NO: 742085 - DNA, 120 bp, Artificial Sequence
  ENSG00000204444_2 (sequence is synthesized)
caaggaggagttggcaacttttgaccctgtggacaacattgtcttcaatatggctgctggctctgccccgatgcagctccaccttcgtgctaccatccgcatgaaagatgggctctgtgt

SEQ ID NO: 742086 - DNA, 120 bp, Artificial Sequence
  ENSG00000204444_3 (sequence is synthesized)
atctcagaactgaaggccgccctgacatgaagactgagctcttttccagctcatgcccaggtggaatcatgctgaatgagacaggccagggttaccagcgctttctcctctacaatcgct

SEQ ID NO: 742087 - DNA, 120 bp, Artificial Sequence
  ENSG00000204444_4 (sequence is synthesized)
caccacatcctcccgaaaagtgtgtggaggaattcaagtccctgacttcctgcctggactccaaagccttcttattgactcctaggaatcaagaggcctgtgagctgtccaataactgac

SEQ ID NO: 742088 - DNA, 120 bp, Artificial Sequence
  ENSG00000204444_5 (sequence is synthesized)
ctgtaacttcatctaagtccccagatgggtacaatgggagctgagttgttggagggagaagctggagacttccagctccagctcccactcaagataataaagataatttttcaatcctca

SEQ ID NO: 742089 - DNA, 120 bp, Artificial Sequence
  ENSG00000204444_6 (sequence is synthesized)
cccaaacctgccaccgacggccacttccgtttccccgatagtatttggggatctcgaagcgatacttccggctccccccaggtccccaagctttacttttgtggggcacgacgagaaagt

SEQ ID NO: 742090 - DNA, 120 bp, Artificial Sequence
  ENSG00000204444_7 (sequence is synthesized)
ggtaaggggttaaaatctcataaaacaggattaggactcaccaagtcttctggtgttacagggtgaaagaggctcgtgtgatgtcaccagagggatgtggctaagagctgtgatgtcacc

SEQ ID NO: 742091 - DNA, 120 bp, Artificial Sequence
  ENSG00000204444_8 (sequence is synthesized)
tgagggaggcaggatgggttctgggctactcaaaagagaggtttctgagtttgcactggataaagggggcagagggtcatacgtggagggaaaagagccttagagactcccctttgacac

SEQ ID NO: 742092 - DNA, 120 bp, Artificial Sequence
  ENSG00000204444_9 (sequence is synthesized)
agggaatgaaagaacacgttctcccccaccccattactatcaactttgcttttctccctggacttcccttctgtccttctttttccctccccccatcacagaggcctgtgagctgtccaa

SEQ ID NO: 742093 - DNA, 120 bp, Artificial Sequence
  ENSG00000204449_0 (sequence is synthesized)
ctaatcttccagttgccccctattgactttaaaccaaagctttgattcatgaccactgggatccagccagcgggggatttcttttcctggtggactgtacccaggatctcacatttgctt

SEQ ID NO: 742094 - DNA, 120 bp, Artificial Sequence
  ENSG00000204449_1 (sequence is synthesized)
aagcagcccccacaattgggttcttataaaaggacacggaagagacaagctcagttttctctgaaggagaaggactgcacttagaactgcattttggcgacctctgaaattcagtactgc

SEQ ID NO: 742095 - DNA, 120 bp, Artificial Sequence
  ENSG00000204449_2 (sequence is synthesized)
agtgaatgagcttctgaccttgaggtgaacttaacaaaattatttttggaaaaatcgttgtgggaaccattaaaagaactccaggaaacatgaattctggaatcttacaggtctttcagg

SEQ ID NO: 742096 - DNA, 120 bp, Artificial Sequence; identical to SEQ ID NO: 555731
  ENSG00000204449_3 (sequence is synthesized)

SEQ ID NO: 742097 - DNA, 120 bp, Artificial Sequence
  ENSG00000204449_4 (sequence is synthesized)
agtgctctgaatgcacaaagtcaacagagcagataaacctcaaaaccaacattcatttgaagaagatggcttctcttgccagaaaagtcagtctctggctattcctgagctctgaggagc

SEQ ID NO: 742098 - DNA, 120 bp, Artificial Sequence; identical to SEQ ID NO: 555733
  ENSG00000204449_5 (sequence is synthesized)

SEQ ID NO: 742099 - DNA, 120 bp, Artificial Sequence; identical to SEQ ID NO: 555734
  ENSG00000204449_6 (sequence is synthesized)

SEQ ID NO: 742100 - DNA, 120 bp, Artificial Sequence; identical to SEQ ID NO: 555735
  ENSG00000204449_7 (sequence is synthesized)

SEQ ID NO: 742101 - DNA, 120 bp, Artificial Sequence; identical to SEQ ID NO: 555736
  ENSG00000204449_8 (sequence is synthesized)

SEQ ID NO: 742102 - DNA, 120 bp, Artificial Sequence; identical to SEQ ID NO: 555737
  ENSG00000204449_9 (sequence is synthesized)

SEQ ID NO: 742103 - DNA, 120 bp, Artificial Sequence
  ENSG00000204449_10 (sequence is synthesized)
atcatgaagaagccaacagtgatatctttctgtatgaaattttgagaagcatgtgtattggatgtgaccatcaagatgtaccctatttcactgcaacacctagaagttttcttgcatggg

SEQ ID NO: 742104 - DNA, 120 bp, Artificial Sequence
  ENSG00000204449_11 (sequence is synthesized)
gtgttcagactttcacctcgggcaaatattactgggaggtccatgtaggggactcctggaattgggcttttggtgtctgtaatatgtatcggaaggagaagaatcagaatgagaagatag

SEQ ID NO: 742105 - DNA, 120 bp, Artificial Sequence
  ENSG00000204449_12 (sequence is synthesized)
atggaaaggagggactctttcttcttgggtgtattaagaatgacattcaatgcagtctctttaccacctccccacttatgctgcaatatatcccaaaacctaccagccgagtaggattat

SEQ ID NO: 742106 - DNA, 120 bp, Artificial Sequence; identical to SEQ ID NO: 555741
  ENSG00000204449_13 (sequence is synthesized)

SEQ ID NO: 742107 - DNA, 120 bp, Artificial Sequence; identical to SEQ ID NO: 555742
  ENSG00000204449_14 (sequence is synthesized)

SEQ ID NO: 742108 - DNA, 120 bp, Artificial Sequence; identical to SEQ ID NO: 555743
  ENSG00000204449_15 (sequence is synthesized)

SEQ ID NO: 742109 - DNA, 120 bp, Artificial Sequence; identical to SEQ ID NO: 555744
  ENSG00000204449_16 (sequence is synthesized)

SEQ ID NO: 742110 - DNA, 120 bp, Artificial Sequence; identical to SEQ ID NO: 555745
  ENSG00000204449_17 (sequence is synthesized)

SEQ ID NO: 742111 - DNA, 120 bp, Artificial Sequence
  ENSG00000204450_0 (sequence is synthesized)
acatggattcagacgacctgcaagtcttccagaatgagctcatttgctgcatttgcgtgaactacttcatagatccggtcaccattgactgtgggcacagcttttgcaggccctgcctct

SEQ ID NO: 742112 - DNA, 120 bp, Artificial Sequence
  ENSG00000204450_1 (sequence is synthesized)
gcctctgctcagaagaaggcagagcaccaatgcgctgcccttcgtgcagaaaaatctcagagaagcccaacttcaacaccaatgtggtactcaaaaagctgtcttccctagccagacaga

SEQ ID NO: 742113 - DNA, 120 bp, Artificial Sequence
  ENSG00000204450_2 (sequence is synthesized)
ccagacctcagaacatcaacagctcagacaatatctgtgtgctccatgaggagactaaggagctcttctgtgaggctgacaagagattgctctgtgggccctgctctgagtcaccagagc

SEQ ID NO: 742114 - DNA, 120 bp, Artificial Sequence
  ENSG00000204450_3 (sequence is synthesized)
acatggctcacagccacagcccaataggatgggctgctgaggaatgcagggagaaacttataaaggaaatggactatttatgggaaatcaatcaagagacaagaaacaatctaaatcagg

SEQ ID NO: 742115 - DNA, 120 bp, Artificial Sequence
  ENSG00000204450_4 (sequence is synthesized)
aaactagaacatttcattcgttaaaggactatgtgtcagtaaggaagaggataatcactattcaatatcaaaagatgcctatatttctcgatgaggaggagcaacggcatctgcaggcac

SEQ ID NO: 742116 - DNA, 120 bp, Artificial Sequence
  ENSG00000204450_5 (sequence is synthesized)
tggaaagagaagcagaagagcttttccaacaactacaagacagtcaagtgagaatgacccaacatttagaaaggatgaaagacatgtacagagagctgtgggagacatgccacgtgcctg

SEQ ID NO: 742117 - DNA, 120 bp, Artificial Sequence
  ENSG00000204450_6 (sequence is synthesized)
tggtgcataactggagtcctagacatgctcaacaacttcagagtggatagtgctctgagcacggaaatgattccttgctatataagcctttctgaggatgtgagatatgtgatatttgga

SEQ ID NO: 742118 - DNA, 120 bp, Artificial Sequence
  ENSG00000204450_7 (sequence is synthesized)
gatgaccatctcagtgctcccacggatccccagggagtggacagctttgctgtgtggggagcgcaagcattcacctccggcaagcattactgggaggtggatgtgaccctctcctccaac

SEQ ID NO: 742119 - DNA, 120 bp, Artificial Sequence
  ENSG00000204450_8 (sequence is synthesized)
tggattctgggagtctgtcaagattccaggactgcagatgccaatttcgttattgattctgatgaaagattttttttaatttcctcaaagaggagcaatcactatagtctctccaccaac

SEQ ID NO: 742120 - DNA, 120 bp, Artificial Sequence
  ENSG00000204450_9 (sequence is synthesized)
tctccacctttaattcagtatgtgcaaaggcctctgggtcaagttggggtgtttctggattatgataatggatctgtgagtttttttgatgtttctaaaggttctcttatctatggtttt

SEQ ID NO: 742121 - DNA, 120 bp, Artificial Sequence
  ENSG00000204450_10 (sequence is synthesized)
cctccttcctccttctcttcccctctgaggcctttcttttgctttggttgtacatgaaaagttggtttcacgatgatttattgtgacctcccacatatgaggcaaatactgtcctaagac

SEQ ID NO: 742122 - DNA, 120 bp, Artificial Sequence
  ENSG00000204450_11 (sequence is synthesized)
actatgtgcgagagcctgtgagctcattgtaacttcatggaatgtaattactatgtggttatgaatgggataaccaccttgaatgtgtacttttgttaattaaattattttaattaataa

SEQ ID NO: 742123 - DNA, 120 bp, Artificial Sequence
  ENSG00000204463_0 (sequence is synthesized)
gggggtggggcgatgcttaagtgtccacgcatccgtagtgcgacgcacgcaggcgtagtacggtcccccgggcgacagcggtggcggctcctcggggtgctcggctccctcccacctagg

SEQ ID NO: 742124 - DNA, 120 bp, Artificial Sequence
  ENSG00000204463_1 (sequence is synthesized)
ccggccccggcccgactcgccctcagaaactcactgtttggggctgcggactttctcgtcgtgccccacaaaagtaaagcttggggacctggggggagccggaagtatcgcttcgagatc

SEQ ID NO: 742125 - DNA, 120 bp, Artificial Sequence
  ENSG00000204463_2 (sequence is synthesized)
cccaaatactatcggggaaacggaagtggccgtcggtggcagagacctgtcggccatggagcctaatgatagtaccagtaccgctgtggaggagcctgacagcttggaggtgttggtgaa

SEQ ID NO: 742126 - DNA, 120 bp, Artificial Sequence
  ENSG00000204463_3 (sequence is synthesized)
gaccttggactctcaaactcgtacctttattgtgggggcccagatgaatgtaaaagagtttaaggagcacattgctgcctctgtcagcatcccatctgaaaaacaacggctcatttacca

SEQ ID NO: 742127 - DNA, 120 bp, Artificial Sequence
  ENSG00000204463_4 (sequence is synthesized)
gggacgagttctgcaagatgataagaagcttcaggaatacaatgttgggggaaaggttatccacctggtggaacgggctcctcctcagactcacctcccttctggggcatcttctgggac

SEQ ID NO: 742128 - DNA, 120 bp, Artificial Sequence
  ENSG00000204463_5 (sequence is synthesized)
ggggtctgcctcagccactcatggtgggggatccccccctggtactcgggggcctggggcctctgttcatgaccggaatgccaacagctatgtcatggttggaaccttcaatcttcctag

SEQ ID NO: 742129 - DNA, 120 bp, Artificial Sequence
  ENSG00000204463_6 (sequence is synthesized)
tgacggctctgctgtggatgttcacatcaacatggaacaggccccgattcagagtgagccccgggtacggctggtgatggctcagcacatgatcagggatatacagaccttactatcccg

SEQ ID NO: 742130 - DNA, 120 bp, Artificial Sequence
  ENSG00000204463_7 (sequence is synthesized)
gatggagtgtcgaggagggccccaaccgcagcacagtcagccgcccccgcagccaccggctgtgaccccggagccagtagccttgagctctcaaacatcagaaccagttgaaagtgaagc

SEQ ID NO: 742131 - DNA, 120 bp, Artificial Sequence
  ENSG00000204463_8 (sequence is synthesized)
acctccccgggagcccatggaggcagaagaagtggaggagcgtgccccagcccagaacccggagctcactcctggcccagccccagcgggcccaacacctgccccggaaacaaatgcacc

SEQ ID NO: 742132 - DNA, 120 bp, Artificial Sequence
  ENSG00000204463_9 (sequence is synthesized)
caaccatccttcccctgcggagtatgtcgaggtgctccaggagctacagcggctggagagtcgcctccagcccttcttgcagcgctactacgaggttctgggtgctgctgccaccacgga

SEQ ID NO: 742133 - DNA, 120 bp, Artificial Sequence
  ENSG00000204463_10 (sequence is synthesized)
ctacaataacaatcacgagggccgggaggaggatcagcggttgatcaacttggtaggggagagcctgcgactgctgggcaacacctttgttgcactgtctgacctgcgctgcaatctggc

SEQ ID NO: 742134 - DNA, 120 bp, Artificial Sequence
  ENSG00000204463_11 (sequence is synthesized)
ctgcacgcccccacgacacctgcatgtggtccggcctatgtctcactacaccacccccatggtgctccagcaggcagccattcccatacagatcaatgtgggaaccactgtgaccatgac

SEQ ID NO: 742135 - DNA, 120 bp, Artificial Sequence
  ENSG00000204463_12 (sequence is synthesized)
aggaaatgggactcggccccccccaactcccaatgcagaggcacctccccctggtcctgggcaggcctcatccgtggctccgtcttctaccaatgtcgagtcctcagctgagggggctcc

SEQ ID NO: 742136 - DNA, 120 bp, Artificial Sequence
  ENSG00000204463_13 (sequence is synthesized)
cccgccaggtccagctcccccgccagccaccagccacccgagggtcatccggatttcccaccagagtgtggaacccgtggtcatgatgcacatgaacattcaagattctggcacacagcc

SEQ ID NO: 742137 - DNA, 120 bp, Artificial Sequence
  ENSG00000204463_14 (sequence is synthesized)
tggtggtgttccgagtgctcccactggccccctgggaccccctggtcatggccaaaccctgggacagcaggtgccaggcttcccaacagctccaacccgggtggtgattgcccggcccac

SEQ ID NO: 742138 - DNA, 120 bp, Artificial Sequence
  ENSG00000204463_15 (sequence is synthesized)
gcgccggtctgggtaccaatgcctcgttggcccagatggtgagcggccttgtggggcagcttcttatgcagccagtccttgtggctcaggggaccccaggtatggctccaccgccagccc

SEQ ID NO: 742139 - DNA, 120 bp, Artificial Sequence
  ENSG00000204463_16 (sequence is synthesized)
ctgccactgcttctgccagtgctggcaccaccaacacagctaccacagctggccccgctcctggggggcctgcccagcctccacccacccctcaaccctccatggctgatcttcagttct

SEQ ID NO: 742140 - DNA, 120 bp, Artificial Sequence
  ENSG00000204463_17 (sequence is synthesized)
ctcagcttctggggaacctgctagggcctgcagggccaggggctggagggtctggtgtggcttctcccaccatcactgtggcgatgcctggtgtccctgcctttctccaaggcatgactg

SEQ ID NO: 742141 - DNA, 120 bp, Artificial Sequence
  ENSG00000204463_18 (sequence is synthesized)
acttcttgcaggcaacacagacagcccctccaccacccccacctcctccacccccaccacctgccccagagcagcagaccatgcccccaccaggctccccttctggtggcgcagggagtc

SEQ ID NO: 742142 - DNA, 120 bp, Artificial Sequence
  ENSG00000204463_19 (sequence is synthesized)
ctggaggcctgggtcttgagagcctgtcaccggagttttttacctcagtggtgcagggtgtgctcagctccctgctgggctccctgggggctcgggctggcagcagtgaaagtattgctg

SEQ ID NO: 742143 - DNA, 120 bp, Artificial Sequence
  ENSG00000204463_20 (sequence is synthesized)
ccttcatacaacgcctcagtggatccagcaacatctttgagcctggagctgatggggcccttggattctttggggccttgctttctcttctgtgccagaacttctctatggtggacgtag

SEQ ID NO: 742144 - DNA, 120 bp, Artificial Sequence
  ENSG00000204463_21 (sequence is synthesized)
tgatgcttctccatgggcatttccagccactacaacggctccagccccagctgcgatccttcttccaccagcactacctgggtggtcaggagcccacacccagtaacatccggatggcaa

SEQ ID NO: 742145 - DNA, 120 bp, Artificial Sequence
  ENSG00000204463_22 (sequence is synthesized)
cccacacattgatcacggggctagaagagtatgtgcgggagagtttttccttggtgcaggttcagccaggtgtggacatcatccggacaaacctggaatttctccaagagcagtttaata

SEQ ID NO: 742146 - DNA, 120 bp, Artificial Sequence
  ENSG00000204463_23 (sequence is synthesized)
gcattgctgcgcatgtgctgcattgcacagatagtggatttggggcccggttgctggagttgtgtaaccaaggcctgtttgaatgcctggccctaaacctgcactgcttggggggacagc

SEQ ID NO: 742147 - DNA, 120 bp, Artificial Sequence
  ENSG00000204463_24 (sequence is synthesized)
agatggagcttgctgctgttatcaatggccgaattcgtcgtatgtctcgtggggtgaatccctccttggtgagctggctgaccactatgatgggactgaggcttcaggtggtactggagc

SEQ ID NO: 742148 - DNA, 120 bp, Artificial Sequence
  ENSG00000204463_25 (sequence is synthesized)
acatgcctgtaggccctgatgccattctcagatacgttcgcagggttggtgatcccccccagccacttcctgaggagccaatggaagttcagggagcagaaagagcttcccctgagcctc

SEQ ID NO: 742149 - DNA, 120 bp, Artificial Sequence
  ENSG00000204463_26 (sequence is synthesized)
agcgggagaatgcttccccagcccctggaacaacagcagaagaggccatgtcccgaggtccacctcctgctcctgaggggggctcccgggatgaacaggatggagcttcagctgagacag

SEQ ID NO: 742150 - DNA, 120 bp, Artificial Sequence
  ENSG00000204463_27 (sequence is synthesized)
aaccttgggcagctgcagtccccccagaatgggtccctattatccagcaggacattcagagccagcggaaggtgaaaccgcagccccctctgagtgatgcctacctcagtggtatgcctg

SEQ ID NO: 742151 - DNA, 120 bp, Artificial Sequence
  ENSG00000204463_28 (sequence is synthesized)
ccaagagacgcaagacgatgcagggtgagggcccccagctgcttctctcagaggctgtgagccgggcagctaaggcagccggagctcggcccctgacgagccccgagagcctgagccggg

SEQ ID NO: 742152 - DNA, 120 bp, Artificial Sequence
  ENSG00000204463_29 (sequence is synthesized)
acctggaggcaccagaggttcaggagagctacaggcagcagctccggtctgatatacaaaaacgactgcaggaagaccccaactacagtccccagcgcttccccaatgcccagcgggcct

SEQ ID NO: 742153 - DNA, 120 bp, Artificial Sequence
  ENSG00000204463_30 (sequence is synthesized)
ttgctgatgatccttagctctttgctctatggcccttcctcatcaggggaccgtttcccccctcttccttcacagtatttaagaaataaaagtcggatttttctggctgctttctctcta

SEQ ID NO: 742154 - DNA, 81 bp, Artificial Sequence
  ENSG00000204463_31 (sequence is synthesized)
gtgggttagttgtgccgttctgctggaacaccgtgggaaggcagtagacgcgggcagtcagctagcagagacctgtcggcc

SEQ ID NO: 742155 - DNA, 120 bp, Artificial Sequence
  ENSG00000204463_32 (sequence is synthesized)
tcatcttcctgtcccccggcccagccaggcagtggtaccttcttgccattatataaccactgggtaagagcccctagtgacatgttaggggaaggggccctgggaattcattgactctga

SEQ ID NO: 742156 - DNA, 120 bp, Artificial Sequence
  ENSG00000204463_33 (sequence is synthesized)
tatgtgcgggagagttttgtgagtaacccttctctattcctttcctctcctgggtctggtcaaggcagctgcctcctccactcccagtcttatgattcttgattttgggatctttgtgtt

SEQ ID NO: 742157 - DNA, 120 bp, Artificial Sequence
  ENSG00000204463_34 (sequence is synthesized)
atcttgtctctcagtccttggtgcaggttcagccaggtgtggacatcatccggacaaacctggaatttctccaagagcagtttaatagcattgctgcgcatgtgctgcattgcacaggtc

SEQ ID NO: 742158 - DNA, 120 bp, Artificial Sequence
  ENSG00000204463_35 (sequence is synthesized)
cctgaggtttccattctctgcagttttcatttttcttttctaaactgacattctgtaacctggatctaatctatttctaaaggtggttgagggttttgtgttctaaatctgctttctgtc

SEQ ID NO: 742159 - DNA, 120 bp, Artificial Sequence
  ENSG00000204463_36 (sequence is synthesized)
cctcagcgtcgtatgtctcgtggggtgaatccctccttggtgagctggctgaccactatgatgggactgaggcttcaggtggtactggagcacatgcctgtaggccctgatgccattctc

SEQ ID NO: 742160 - DNA, 120 bp, Artificial Sequence
  ENSG00000204463_37 (sequence is synthesized)
cagctccctaagccgtcgatctcctgccctttgtgtttctctccctgtgccccggaatcagaagggggatggggacaggtgtgaatgtgtgtgtgtgcaggagaaactttttaggtattg

SEQ ID NO: 742161 - DNA, 120 bp, Artificial Sequence
  ENSG00000204463_38 (sequence is synthesized)
gggcagggattaatgctagggagtctttcgggtacactctggtctgggcaacagcgggccttccttccttcgttcttctttagagacctgtcggccatggagcctaatgatagtaccagt

SEQ ID NO: 742162 - DNA, 120 bp, Artificial Sequence
  ENSG00000204463_39 (sequence is synthesized)
cctggtcatggccaaaccctgggctccaccctcatccagctgccctccctgccccctgagttcatgcacgccgtcgcccaccagatcactcatcaggccatggtggcagctgttgcctcc

SEQ ID NO: 742163 - DNA, 120 bp, Artificial Sequence
  ENSG00000204463_40 (sequence is synthesized)
ccacatcctggactcttaatttcccctctctccactagcatggagactcagtggagtggttgactcatggaaagggtgagccggatggtggcactggatctgacgttgatcctcttttcc

SEQ ID NO: 742164 - DNA, 120 bp, Artificial Sequence
  ENSG00000204463_41 (sequence is synthesized)
gcggccgcaggtaatgacctggaaggggaggcttgggaggtagggcacagtccatggtggcagctggctggcaagggcctggccctcagccctcttcggtctgtctcttctgccacccac

SEQ ID NO: 742165 - DNA, 120 bp, Artificial Sequence
  ENSG00000204463_42 (sequence is synthesized)
agtgtggggcgaccaccgctttcgcgttgtcccaggattttccgacctctggggcgcttgtcctgccgtgaccggtgatgacactagtctctggtctcgtgcttccttcctaatctgact

SEQ ID NO: 742166 - DNA, 120 bp, Artificial Sequence
  ENSG00000204463_43 (sequence is synthesized)
ggctccctgcttattgtgattggcgtcgtggagcccctcccacctctcgtcctccagctccctaagccgtcgatctcctgccctttgtgtttctctccctgtgccccggaatcagaaggg

SEQ ID NO: 742167 - DNA, 120 bp, Artificial Sequence
  ENSG00000204463_44 (sequence is synthesized)
tccctaagccgtcgatctcctgccctttgtgtttctctccctgtgccccggaatcagaagggggatggggacaggtgtgaatgtgtgtgtgtgcaggagaaactttttagagacctgtcg

SEQ ID NO: 742168 - DNA, 120 bp, Artificial Sequence
  ENSG00000204469_0 (sequence is synthesized)
tcagccgcggagtgagcgagggagacgggaggagccgaacccggcgccatccgccgccatcctcccccgccccaccgccatcccgtcccggggagcccctaggcccgggtcccggatccc

SEQ ID NO: 742169 - DNA, 120 bp, Artificial Sequence
  ENSG00000204469_1 (sequence is synthesized)
tccccgcgcacccggccaggctctggcacgttttgggggaggtgcctgcaggacccaacatactcaatgagcttccagcgcaatgtccgatcgctcggggccgactgccaagggaaagga

SEQ ID NO: 742170 - DNA, 120 bp, Artificial Sequence
  ENSG00000204469_2 (sequence is synthesized)
tggaaagaagtattcctcgctcaacctgtttgatacgtataagggcaagtccttagagatccagaaacccgctgttgcccctcgccatggcctgcagagtctcgggaaagttgccattgc

SEQ ID NO: 742171 - DNA, 120 bp, Artificial Sequence
  ENSG00000204469_3 (sequence is synthesized)
ccggcgtatgccacctccagccaaccttccaagcctgaaagccgagaacaaaggcaatgaccccaatgtctcactagtgccaaaagacggaacaggatgggcaagcaaacaggagcagtc

SEQ ID NO: 742172 - DNA, 120 bp, Artificial Sequence
  ENSG00000204469_4 (sequence is synthesized)
cgaccccaagagttccgatgcctcaaccgctcagccgccggaatcgcagccactgccggcttcacagacgcctgcctccaaccagccgaaacgacccccagcagcccccgagaacactcc

SEQ ID NO: 742173 - DNA, 120 bp, Artificial Sequence
  ENSG00000204469_5 (sequence is synthesized)
tttggttccaagcggggtaaagtcctgggcacaagccagcgtcacccatggagcacatggagatggtggaagggcatcaagcctactgtcacgattctctcgagaggaatttccgaccct

SEQ ID NO: 742174 - DNA, 120 bp, Artificial Sequence
  ENSG00000204469_6 (sequence is synthesized)
gcaggcggctggcgaccaggacaaggctgccaaggaaagggagtctgccgaacagtcgtctgggcccggaccaagcctccgcccccaaaattctacaacttggagggacggaggtgggcg

SEQ ID NO: 742175 - DNA, 120 bp, Artificial Sequence
  ENSG00000204469_7 (sequence is synthesized)
tggccctgatgagctggagggcccggactccaaacttcatcatggtcatgatccccggggtgggctacagccttcaggcccaccccagttccctccctaccgcggaatgatgccgccttt

SEQ ID NO: 742176 - DNA, 120 bp, Artificial Sequence
  ENSG00000204469_8 (sequence is synthesized)
catgtatcccccatatctcccgttccctccgccctatggaccccaggggccttaccgataccccactcctgatgggcccagccgttttccccgtgtggcgggcccccgaggctcagggcc

SEQ ID NO: 742177 - DNA, 120 bp, Artificial Sequence
  ENSG00000204469_9 (sequence is synthesized)
accaatgcgcttagtagagcctgtgggtcgtccctctattctcaaagaggataatctcaaagagtttgatcagttggatcaggagaatgatgatggttgggcaggggcccatgaagaggt

SEQ ID NO: 742178 - DNA, 120 bp, Artificial Sequence
  ENSG00000204469_10 (sequence is synthesized)
tgactacactgaaaagctcaagttcagcgatgaggaagatgggcgagactctgatgaggagggtgctgagggccacagggattcccaatcagcttctggtgaggaacggccccctgaagc

SEQ ID NO: 742179 - DNA, 120 bp, Artificial Sequence
  ENSG00000204469_11 (sequence is synthesized)
agatggcaaaaagggcaactcccccaacagcgaaccgcccactcctaagacggcctgggcagaaacctctcggcctccagagacagagccgggacctcctgccccaaagcctcccctacc

SEQ ID NO: 742180 - DNA, 120 bp, Artificial Sequence
  ENSG00000204469_12 (sequence is synthesized)
cccacctcaccggggccccgccgggaactggggcccccctggggactacccagatcgtgggggtcctccctgcaagcccccagcacctgaagatgaggatgaggcatggcggcagcgacg

SEQ ID NO: 742181 - DNA, 120 bp, Artificial Sequence
  ENSG00000204469_13 (sequence is synthesized)
aaagcagtcgtcatctgagatttccctggcagtggagcgggcccggcgacggcgagaagaagaggagcggcgcatgcaagaagagcgccgggcagcctgtgctgagaagctcaagcgact

SEQ ID NO: 742182 - DNA, 120 bp, Artificial Sequence
  ENSG00000204469_14 (sequence is synthesized)
cgatgaaaagtttggggcacctgacaagcggctcaaagcagagcctgctgccccacctgctgccccttctaccccagctccaccacctgcagtccctaaagaactccctgcacctccagc

SEQ ID NO: 742183 - DNA, 120 bp, Artificial Sequence
  ENSG00000204469_15 (sequence is synthesized)
tccacctccagcatcagccccaacaccagagacagaacctgaagagccagcacaggcccctcctgcccaatctactcctactccaggtgtggctgcggctcccactctggtgagtggtgg

SEQ ID NO: 742184 - DNA, 120 bp, Artificial Sequence
  ENSG00000204469_16 (sequence is synthesized)
tggcagtaccagtagcaccagcagtggcagcttcgaagccagcccagtggaaccacaactgccctcaaaagagggtcctgaaccaccagaagaggttcctcctcctaccacacccccagt

SEQ ID NO: 742185 - DNA, 120 bp, Artificial Sequence
  ENSG00000204469_17 (sequence is synthesized)
tccaaaggtggaacccaagggtgatgggattggtcccacccgccagccccctagtcagggcttgggctaccccaaatatcagaagtcgttgcctcctcgtttccagcggcagcagcagga

SEQ ID NO: 742186 - DNA, 120 bp, Artificial Sequence
  ENSG00000204469_18 (sequence is synthesized)
gcagctcctgaagcagcagcagcagcaccagtggcagcagcatcaacagggctctgcccctcctaccccagtgcccccatcaccaccacagcctgtgaccctgggggctgtgccagctcc

SEQ ID NO: 742187 - DNA, 120 bp, Artificial Sequence
  ENSG00000204469_19 (sequence is synthesized)
acaggctccacccccgccccccaaggccctgtacccaggtgctctgggccggcccccacccatgcccccaatgaactttgatccccgatggatgatgattcctccttatgtggacccccg

SEQ ID NO: 742188 - DNA, 120 bp, Artificial Sequence
  ENSG00000204469_20 (sequence is synthesized)
gctcctccagggtcgtccccctctagacttctaccctcctggtgtgcatccctctggcctagttccccgagagcgttcagacagtgggggctcaagctcagagccatttgaccgtcatgc

SEQ ID NO: 742189 - DNA, 120 bp, Artificial Sequence
  ENSG00000204469_21 (sequence is synthesized)
acctgctatgttacgggaacggggcactccaccggtggatccaaagttggcctgggtaggagatgtcttcaccgccacacccgctgaaccccgcccacttacctcacctctgcgccaggc

SEQ ID NO: 742190 - DNA, 120 bp, Artificial Sequence
  ENSG00000204469_22 (sequence is synthesized)
tgcggatgaggatgacaaggggatgaggagcgagactcctccagtacctcccccaccaccctatctggccagttatccaggctttcctgagaatggagcccctgggcccccaatctctcg

SEQ ID NO: 742191 - DNA, 120 bp, Artificial Sequence
  ENSG00000204469_23 (sequence is synthesized)
ctttcctctggaggaaccagggccccgtccactcccctggcccccaggcagtgatgaagtggccaagatacaaactccaccacccaagaaggagccccctaaggaggagactgcacagct

SEQ ID NO: 742192 - DNA, 120 bp, Artificial Sequence
  ENSG00000204469_24 (sequence is synthesized)
gacggggccagaagcaggccgaaagcctgcccgcggagtcgggagtggaggccagggccccccaccaccacgcagagagagtcgcacagagacccgctggggccctcgtccagggagcag

SEQ ID NO: 742193 - DNA, 120 bp, Artificial Sequence
  ENSG00000204469_25 (sequence is synthesized)
tcgtcgtggaatccctccagaggagccaggggccccaccccgccgggctgggcctataaagaaacctccaccacctacaaaagtagaagagctgcctcccaagcccctcgaacaggggga

SEQ ID NO: 742194 - DNA, 120 bp, Artificial Sequence
  ENSG00000204469_26 (sequence is synthesized)
tgaaacccccaaacccccaaagccagacccactcaagataaccaaggggaagctagggggccccaaggagaccccacccaatggaaatctttcccctgccccaaggcttcggagggacta

SEQ ID NO: 742195 - DNA, 120 bp, Artificial Sequence
  ENSG00000204469_27 (sequence is synthesized)
ttcgtatgaaagagtgggtcctacctcttgccggggtcggggccgaggcgagtattttgccagagggaggggttttcgggggacctatgggggacgagggcggggagcccgaagccggga

SEQ ID NO: 742196 - DNA, 120 bp, Artificial Sequence
  ENSG00000204469_28 (sequence is synthesized)
tcgaggagatgatgggcgtggaggtgggacagggggaccaaaccaccctcctgctccccgaggccgcactgccagcgagacacggagcgagggttcagagtatgaggaaatccccaagcg

SEQ ID NO: 742197 - DNA, 120 bp, Artificial Sequence
  ENSG00000204469_29 (sequence is synthesized)
gcgccggcagcggggctcagaaacaggcagcgagacccatgagagtgatctggctccttcagacaaggaggctcccacacccaaggagggaacactcacccaggtccctctcgctccccc

SEQ ID NO: 742198 - DNA, 120 bp, Artificial Sequence
  ENSG00000204469_30 (sequence is synthesized)
accaccaggagccccaccttcaccagccccagcccgcttcactgcccggggtgggcgagtcttcactcccagaggggtgccatctcgccggggccgaggaggagggaggccccctcctca

SEQ ID NO: 742199 - DNA, 120 bp, Artificial Sequence
  ENSG00000204469_31 (sequence is synthesized)
agtttgcccaggctggagccctccagccaagtctctggctcccaagaaacctcccacaggccctttgccaccaagtaaggagcctttgaaagagaagttgatcccagggcctctgtcccc

SEQ ID NO: 742200 - DNA, 120 bp, Artificial Sequence
  ENSG00000204469_32 (sequence is synthesized)
tgtggcgcgcggaggcagcaatggaggtagcaatgtgggcatggaagatggggagcgaccccgaaggaggcgacatgggagggctcagcagcaggataaaccgcctcgtttccggaggct

SEQ ID NO: 742201 - DNA, 120 bp, Artificial Sequence
  ENSG00000204469_33 (sequence is synthesized)
gaagcaggaacgggagaatgccgcaagggggtctgagggcaagccctccctaacccttccagcctccgctcctggacctgaggaggccctcacaacagtcacagtggccccagcacctcg

SEQ ID NO: 742202 - DNA, 120 bp, Artificial Sequence
  ENSG00000204469_34 (sequence is synthesized)
ccgggcagctgccaagtctcctgatctgtcaaaccagaactcagaccaagccaatgaggaatgggagactgcatcagagagcagtgacttcaccagtgagcgccgaggggacaaagaggc

SEQ ID NO: 742203 - DNA, 120 bp, Artificial Sequence
  ENSG00000204469_35 (sequence is synthesized)
acccccaccagtactgctgacacccaaggctgtgggaactcctgggggaggtggaggtggagccgtaccaggtatttcagccatgtcccgcggagatctgagccagagagccaaggattt

SEQ ID NO: 742204 - DNA, 120 bp, Artificial Sequence
  ENSG00000204469_36 (sequence is synthesized)
gagtaaacggagcttctcaagtcagcggccaggcatggaacggcagaatcggcgccctggcccagggggcaaggctggcagcagtggcagcagcagtggaggaggcggtgggggtcctgg

SEQ ID NO: 742205 - DNA, 120 bp, Artificial Sequence
  ENSG00000204469_37 (sequence is synthesized)
aggaaggaccgggccaggacgaggcgacaagaggagctggccctctcccaagaaccgaagtcgtcctccagaggagcgtcccccggggcttcccctgcctcccccacctcccagcagttc

SEQ ID NO: 742206 - DNA, 120 bp, Artificial Sequence
  ENSG00000204469_38 (sequence is synthesized)
tgctgtcttccgcctggaccaagttatccacagcaaccctgctggcatccaacaggctctggcccagcttagtagccgtcaagggagtgtaactgcaccagggggtcatccaaggcacaa

SEQ ID NO: 742207 - DNA, 120 bp, Artificial Sequence
  ENSG00000204469_39 (sequence is synthesized)
gcctgggcttccccaagcccctcagggcccctctcctaggcccccaacccgatacgagccccagagggtcaacagcggcctcagttctgacccccactttgaggagccggggccaatggt

SEQ ID NO: 742208 - DNA, 120 bp, Artificial Sequence
  ENSG00000204469_40 (sequence is synthesized)
gagaggggtgggtgggactcctcgggactctgccggggttagtccctttccccctaaacgtcgggagcggcctcccagaaaaccagagctgctacaggaggaatctttgccacctcctca

SEQ ID NO: 742209 - DNA, 120 bp, Artificial Sequence
  ENSG00000204469_41 (sequence is synthesized)
tagctctggattcttgggctctaagcctgagggcccaggccctcaggcagagtccagagatacaggcacagaggccctgacccctcacatctggaaccgtttacatactgccactagccg

SEQ ID NO: 742210 - DNA, 120 bp, Artificial Sequence
  ENSG00000204469_42 (sequence is synthesized)
aaagagttaccggcccagctccatggagccttggatggagcccctgagtccttttgaggatgtggctggcacagaaatgagtcagtctgacagtggggtggacctgagtggggattctca

SEQ ID NO: 742211 - DNA, 120 bp, Artificial Sequence
  ENSG00000204469_43 (sequence is synthesized)
ggtgtcatcaggtccctgcagccagcgaagttcccctgatggaggactcaagggggcagcagagggaccccccaagaggcctggaggctcctcacccctgaatgctgttccttgtgaggg

SEQ ID NO: 742212 - DNA, 120 bp, Artificial Sequence
  ENSG00000204469_44 (sequence is synthesized)
tccacctggctctgaacctcctaggagaccaccacctgccccccacgatggggacagaaaggagctgccccgggagcagcctctgccccctggccccattggcacagaacgatcacagcg

SEQ ID NO: 742213 - DNA, 120 bp, Artificial Sequence
  ENSG00000204469_45 (sequence is synthesized)
tacagaccgaggcacagagcctggccccattcggccatcccatcgacctggtcccccagtccagtttggcactagtgacaaggactcagacttacgcctagtggtaggagacagcttgaa

SEQ ID NO: 742214 - DNA, 120 bp, Artificial Sequence
  ENSG00000204469_46 (sequence is synthesized)
agcagagaaggagctaacagcatcagtcactgaggccattcctgtatcacgagactgggagctgcttcccagtgctgctgcctctgctgagccacaatccaagaacctggattctgggca

SEQ ID NO: 742215 - DNA, 120 bp, Artificial Sequence
  ENSG00000204469_47 (sequence is synthesized)
ctgtgtcccggagcccagctcctcaggccagcgcctgtatcctgaggttttctatggcagtgctgggccttccagttctcagatctctgggggagccatggactctcaattacatccaaa

SEQ ID NO: 742216 - DNA, 120 bp, Artificial Sequence
  ENSG00000204469_48 (sequence is synthesized)
cagtggaggcttccgccctgggacaccctcactgcacccttacagatcacagcccctatacctaccccccggcccagcccctccctcagcactgctctctgggttagctctcaagggcca

SEQ ID NO: 742217 - DNA, 120 bp, Artificial Sequence
  ENSG00000204469_49 (sequence is synthesized)
gtttctggatttctccacaatgcaagctacagagctggggaagttgccggctggaggagttctctaccctccaccttccttcctctactctccggctttctgccccagtcctttgcctga

SEQ ID NO: 742218 - DNA, 120 bp, Artificial Sequence
  ENSG00000204469_50 (sequence is synthesized)
cacatcgttgcttcaggtacgccaggatctgccatccccttcggatttttattctactcctctgcagcctggtggccaaagtggctttctcccttcaggggctcctgcccagcagatgct

SEQ ID NO: 742219 - DNA, 120 bp, Artificial Sequence
  ENSG00000204469_51 (sequence is synthesized)
tctacccatggtagactcacagctgcctgtggtgaactttggctccctgccgccagcaccacctcctgccccacctcccctttctctgttacctgtgggccctgctctgcagccccccag

SEQ ID NO: 742220 - DNA, 120 bp, Artificial Sequence
  ENSG00000204469_52 (sequence is synthesized)
cctggctgtgcggcccccacctgctcctgctactcgggtgctgccttcacctgccaggcccttccccgctagcttggggcgagcagagctgcatccagtggaactaaagccgttccagga

SEQ ID NO: 742221 - DNA, 120 bp, Artificial Sequence
  ENSG00000204469_53 (sequence is synthesized)
ttatcaaaaactgagcagcaaccttgggggacctggatcatcacggactcccccaactggaaggtccttctctggcctcaattcccgtctcaaggccacgccttccacctacagtggagt

SEQ ID NO: 742222 - DNA, 120 bp, Artificial Sequence
  ENSG00000204469_54 (sequence is synthesized)
cttccgcacccagcgcgtcgacctttaccagcaggcctccccaccagatgccctgcgctggatacctaagccttgggagcggacagggccgccacctcgagaagggccctcccgacgggc

SEQ ID NO: 742223 - DNA, 120 bp, Artificial Sequence
  ENSG00000204469_55 (sequence is synthesized)
agaggagcctgggtcccgaggggacaaggagcctgggttgcccccaccccgctgagggagttcctcttgccccctacccccggggcttgtatatagattataaatatataagggggaaag

SEQ ID NO: 742224 - DNA, 120 bp, Artificial Sequence
  ENSG00000204469_56 (sequence is synthesized)
gggtgggcggggaggggttctggggctggggcctcacttcccctcctcccccttcccctggtcccctgtccctggggctgtttgttaaaaaagagtaataaaaggatttaaaaaaaaaaa

SEQ ID NO: 742225 - DNA, 120 bp, Artificial Sequence
  ENSG00000204469_57 (sequence is synthesized)
gagcggcctcccagaaaaccagagctgctacaggaggtaagggatgggtttgagattgtgcttcactgcactcttactcgtgaaaattcttctgggttatgttttctctgttttctttcc

SEQ ID NO: 742226 - DNA, 120 bp, Artificial Sequence
  ENSG00000204469_58 (sequence is synthesized)
tgtttctttcactgtgtttttactccagaattctcagtattagtctcccatgtgtctcccttgttgtccccacaccctgtgtcaccccactctgtcctggcttcctataattcccaattc

SEQ ID NO: 742227 - DNA, 120 bp, Artificial Sequence
  ENSG00000204469_59 (sequence is synthesized)
tggagcccctgagtccttttgaggatgtggctggcacagaagtgagtgagggtgggagggtgtgtctgagctgggacttttttgagcactggtcataccccccacctgctctgggttgag

SEQ ID NO: 742228 - DNA, 120 bp, Artificial Sequence
  ENSG00000204469_60 (sequence is synthesized)
tctggagctgttctctcacttggctgtcccctttctgcagtttgtatgtgtgcatcagtcaggtattggggtgctttctaccctgacttaactagctccttctccactcctctcagatga

SEQ ID NO: 742229 - DNA, 120 bp, Artificial Sequence
  ENSG00000204469_61 (sequence is synthesized)
gggccttccagttctcaggtaggccccgcttcccattgcatgaccccttcagtgaataataatttttttctgcctggtatgtatttataatcaagcctttctacgttgcagagttgtgag

SEQ ID NO: 742230 - DNA, 120 bp, Artificial Sequence
  ENSG00000204469_62 (sequence is synthesized)
ataccactttgtcacatcatttttctccctactttttgcttctatgggtgggatggtgatcttttttcttgaccacagatactaaagctgtttcaaccgtgctcctctcctgcagatctc

SEQ ID NO: 742231 - DNA, 120 bp, Artificial Sequence
  ENSG00000204469_63 (sequence is synthesized)
ctccctgcccccaacatgcacacccaaatttcttgttacagatgcttctacccatggtagactcacagctgcctgtggtgaactttggctccctgccgccagcaccacctcctgccccac

SEQ ID NO: 742232 - DNA, 120 bp, Artificial Sequence
  ENSG00000204469_64 (sequence is synthesized)
cgggacaatgtctcctgccttcttgtgatcacaggactcagacttacgcctagtggtaggagacagcttgaaagcagagaaggagctaacagcatcagtcactgaggtaagtgggagtaa

SEQ ID NO: 742233 - DNA, 120 bp, Artificial Sequence
  ENSG00000204469_65 (sequence is synthesized)
gagtttggtggaaaggcccaagatttctggggaagattgctgggagtgaccagggcgtccaggatgccagacatccctctccacgaggcctctccttcccaggccattcctgtatcacga

SEQ ID NO: 742234 - DNA, 120 bp, Artificial Sequence
  ENSG00000204469_66 (sequence is synthesized)
ttccgcacccagcgcgtcgacctttaccagcaggtgaaggagaaacccttgtggccccaactctaaattcgagttgccacctgatttcctgtccttccgtctcatcgctgacctctcact

SEQ ID NO: 742235 - DNA, 67 bp, Artificial Sequence
  ENSG00000204469_67 (sequence is synthesized)
gattttcctgcctcagcctccagagtagcgggactacaggcacacgccaacacacccatggtctcga

SEQ ID NO: 742236 - DNA, 69 bp, Artificial Sequence
  ENSG00000204469_68 (sequence is synthesized)
cctgtctcacaagaaatacataaataaaaatgaaaactatttcctataggccaagactgaagaaagtac

SEQ ID NO: 742237 - DNA, 120 bp, Artificial Sequence
  ENSG00000204469_69 (sequence is synthesized)
atgaaaactatttcctataggccaagactgaagaaagtactgttgttctaatggtttcatagaaagttaatgccaccaccataggctcatgagaggccatgaagtgctttaatgggtctt

SEQ ID NO: 742238 - DNA, 120 bp, Artificial Sequence
  ENSG00000204469_70 (sequence is synthesized)
ctgtccctctgagcagctactgttggacccttttacagatgtatcccccatatctcccgttccctccgccctatggaccccaggggccttaccgataccccactcctgatgggcccaggt

SEQ ID NO: 742239 - DNA, 120 bp, Artificial Sequence
  ENSG00000204469_71 (sequence is synthesized)
gagcaatccaggtctgggtttgtggctgggggcaggggaagcttattgggggaggagatggttttctagccaggaggctcagtctaggatcagtctcgcatgtggttatacaacatgcca

SEQ ID NO: 742240 - DNA, 120 bp, Artificial Sequence
  ENSG00000204472_0 (sequence is synthesized)
aggcttctgagaagactggtgggagagaaggagagcctgcagacagaggcctccagcttggtctgtctccccacctctaccagcatctgctgagctatgagccaaaccagggatttacag

SEQ ID NO: 742241 - DNA, 120 bp, Artificial Sequence
  ENSG00000204472_1 (sequence is synthesized)
ggaggaaaagctttcggactgctgaaggcccagcaggaagagaggctggatgagatcaacaagcaattcctagacgatcccaaatatagcagtgatgaggatctgccctccaaactggaa

SEQ ID NO: 742242 - DNA, 120 bp, Artificial Sequence
  ENSG00000204472_2 (sequence is synthesized)
tcatgtccctgaaacgaatgctggagaaacttggagtccccaagactcacctagagctaaagaaattaattggagaggtgtccagtggctccggggagacgttcagctaccctgactttc

SEQ ID NO: 742243 - DNA, 120 bp, Artificial Sequence
  ENSG00000204472_3 (sequence is synthesized)
tcaggatgatgctgggcaagagatctgccatcctaaaaatgatcctgatgtatgaggaaaaagcgagagaaaaggaaaagccaacaggccccccagccaagaaagctatctctgagttgc

SEQ ID NO: 742244 - DNA, 120 bp, Artificial Sequence
  ENSG00000204472_4 (sequence is synthesized)
cctgatttgaagggaaaagggatgatgggattgaaggggcttctaatgacccagatatggaaacagaagacaaaattgtaagccagagtcaacaaattaaataaattaccccctcctcca

SEQ ID NO: 742245 - DNA, 120 bp, Artificial Sequence
  ENSG00000204472_5 (sequence is synthesized)
ctccttccacgttgtctcctccacctagcagttggttggcaaccccttcctcagtcccctgctgaaaaccctccagtcagcgcttatcccttctgctctctcccctcacccagagaaata

SEQ ID NO: 742246 - DNA, 120 bp, Artificial Sequence
  ENSG00000204472_6 (sequence is synthesized)
tgggggtaggagggttaggatttccacaagaacaaggcaggaacagcagagataaaaagtttacttttgtggtagcaaaaggggaacctgcctttattgccctcctgccacactgcggtc

SEQ ID NO: 742247 - DNA, 120 bp, Artificial Sequence
  ENSG00000204472_7 (sequence is synthesized)
ttcctcatgatttgggagggggcccacctaccacagtgggaggaaggagaatggggatgcggaagtgggagaggagagagagggtctccccaccttctccccatccccatcctctgcccc

SEQ ID NO: 742248 - DNA, 120 bp, Artificial Sequence
  ENSG00000204475_0 (sequence is synthesized)
ctcacacgcttagctagcctgccacaagctggccccttggcctcctagagaccctgacatctcctccagcagcatctgtcctctctcctcagggaggcaagcatttgatgctcgaggtcc

SEQ ID NO: 742249 - DNA, 120 bp, Artificial Sequence
  ENSG00000204475_1 (sequence is synthesized)
ctggcagttgtggtccttggcaagtgatgtgtgagtcccgtgtgtcataggaagctccccatccccatctggtgaccaaaggcctggctacaagtagtgagtccttcctcctccacccag

SEQ ID NO: 742250 - DNA, 120 bp, Artificial Sequence
  ENSG00000204475_2 (sequence is synthesized)
acctcactgctcagatccccttcgccaactgggacatcttccgacatggcctggatgctgttgctcatcttgatcatggtccatccaggatcctgtgctctctgggtgtcccagccccct

SEQ ID NO: 742251 - DNA, 120 bp, Artificial Sequence
  ENSG00000204475_3 (sequence is synthesized)
gagattcgtaccctggaaggatcctctgccttcctgccctgctccttcaatgccagccaagggagactggccattggctccgtcacgtggttccgagatgaggtggttccagggaaggag

SEQ ID NO: 742252 - DNA, 120 bp, Artificial Sequence
  ENSG00000204475_4 (sequence is synthesized)
gccatgacgccagcatctacgtgtgcagagtggaggtgctgggccttggtgtcgggacagggaatgggactcggctggtggtggagaaagaacatcctcagctaggggctggtacagtcc

SEQ ID NO: 742253 - DNA, 120 bp, Artificial Sequence
  ENSG00000204475_5 (sequence is synthesized)
tcctccttcgggctggattctatgctgtcagctttctctctgtggccgtgggcagcaccgtctattaccagggcaaatgtctgacctggaaaggtccaagaaggcagctgccggctgtgg

SEQ ID NO: 742254 - DNA, 120 bp, Artificial Sequence
  ENSG00000204475_6 (sequence is synthesized)
tcccagcgcccctcccaccaccatgtgggagctcagcacatctgcttcccccagtcccaggaggctgagcctgattgtcctgagaaatgggaaggatcagatatgactcctccttggcaa

SEQ ID NO: 742255 - DNA, 120 bp, Artificial Sequence
  ENSG00000204475_7 (sequence is synthesized)
ctgccctttcctgccaggcccacacataccctcttctggctgttaggggagcttgggtccctgaacactgtcattcacccaataaattactatttgaccccagagtgggtggaagggtga

SEQ ID NO: 742256 - DNA, 120 bp, Artificial Sequence
  ENSG00000204475_8 (sequence is synthesized)
caaatgccactgtcacatgggaacacactgccactcctcagatgggccccgaggagtgattccagagcccagatgtccctagtcctcttcaaaagaccccaataaatctgccccaccact

SEQ ID NO: 742257 - DNA, 120 bp, Artificial Sequence
  ENSG00000204475_9 (sequence is synthesized)
caccgtctattaccagggcaaatatgccaaatctactctctccggattcccccaactctgaactttcccttccaccaggtctgacctggaaaggtccaagaaggcagctgccggctgtgg

SEQ ID NO: 742258 - DNA, 120 bp, Artificial Sequence
  ENSG00000204475_10 (sequence is synthesized)
gagaccctgacatctcctccagcagcatctgtcctctctcctcagggaggcaagcatttgatgctcgaggtccctggcagttgtggtccttggcaagtgatgtgatcctgtgctctctgg

SEQ ID NO: 742259 - DNA, 120 bp, Artificial Sequence
  ENSG00000204478_0 (sequence is synthesized)
acccaaagtcttcaagcctggagtttctgcttggtttttcctgaggtctgagcaccctgcaaactgagtccagatctggtaagtccctaatctctgaagatgagcatccggactccaccc

SEQ ID NO: 742260 - DNA, 120 bp, Artificial Sequence
  ENSG00000204478_1 (sequence is synthesized)
agactcctggagctggcggggcggagcctgctgagggacgaggccttggccatctccaccctggaggagctgcccacggaactttttcccccattgttcatggaggccttcagcaggaga

SEQ ID NO: 742261 - DNA, 120 bp, Artificial Sequence
  ENSG00000204478_2 (sequence is synthesized)
cactgtgaggccctgaagctgatggtgcaggcctggcctttcctccgccttcctctggggtctctgatgaaaaggccttgcccagagaccttccaagctgtgctcgatgggcttgatgca

SEQ ID NO: 742262 - DNA, 120 bp, Artificial Sequence
  ENSG00000204478_3 (sequence is synthesized)
cttcaagtgctggatttacaggatgtcagtgagaacttctggatggtttggtctgaagccatggcccgtaggtgcttaccaaatgccatgatgaacagaaaaccactgcaggactgtcca

SEQ ID NO: 742263 - DNA, 120 bp, Artificial Sequence
  ENSG00000204478_4 (sequence is synthesized)
gccatgatgaacagaaaaccactgcaggactgtccaaggatgagaggacagcagcccttgactgtgttcatagacctttgcctcaagaacaggactctggatgaatacttcacctgcctc

SEQ ID NO: 742264 - DNA, 120 bp, Artificial Sequence
  ENSG00000204478_5 (sequence is synthesized)
tttctatgggtcaagcagagggaaggtttagtacacctgtgctgtaagaagctgaaaatgttgggaatgctcttccacaatatcagaaacatcctgaaaacagtcaacctagactgtatc

SEQ ID NO: 742265 - DNA, 120 bp, Artificial Sequence
  ENSG00000204478_6 (sequence is synthesized)
tcctggcagagtttaccccatacctcggccagatgaggaatcttcggaagctcgttctctctgacatagattctcgctacatttccccagagcagaagaaggagtttgttacccagttca

SEQ ID NO: 742266 - DNA, 120 bp, Artificial Sequence
  ENSG00000204478_7 (sequence is synthesized)
ccactcagttcctcaagctgcgctgcctccaaaagctttatatgaactctgtttctttcctcgaaggccacctggaccagatgctcagctgtctaaagacctcgttaaacatcctcgcaa

SEQ ID NO: 742267 - DNA, 120 bp, Artificial Sequence
  ENSG00000204478_8 (sequence is synthesized)
taactaactgtgtgcttttggaatcagacttgaagcatctgtccaagtacccgagcattggtcaactaaagaccctggacctgagtggcaccagactggccaatttcagccttgtgccgc

SEQ ID NO: 742268 - DNA, 120 bp, Artificial Sequence
  ENSG00000204478_9 (sequence is synthesized)
tccaagttctcctagaaaaagttgcagccacccttgagtacctggacttagatgactgtggcatcgtagactcccaagtcaacgccatcctgcctgccctgagccgctgctttgagctca

SEQ ID NO: 742269 - DNA, 120 bp, Artificial Sequence
  ENSG00000204478_10 (sequence is synthesized)
ccaccttcagcttccgtggaaatcccatctccacggccaccctggagaacctgctgtgccacacaatcagactcaacaacttatgcctggagctgtatcctgccccgcgggagagttatg

SEQ ID NO: 742270 - DNA, 120 bp, Artificial Sequence
  ENSG00000204478_11 (sequence is synthesized)
atgttcgtggtatcgtctgccggagcagatttgcccaacttggggctgagctgatggggagagtgagggccttaagggagcccgagaggatcttgttctgtaccgactactgccctcagt

SEQ ID NO: 742271 - DNA, 120 bp, Artificial Sequence
  ENSG00000204478_12 (sequence is synthesized)
gtggcaacaggtcactttacgacctggaggtagatcggtgttgctgttgaatgcctgcctatttgggtggatatatcaaactcttttttctgaacacttgaaaactaaaacctaggtctt

SEQ ID NO: 742272 - DNA, 120 bp, Artificial Sequence
  ENSG00000204479_0 (sequence is synthesized)
gagtttttcactggagatttgtcagaatgagcctccagtccccatccagactcctggagctggcaggccagagcctgctgaggaaccagttcttgaccatcttcatcctggacgagctgc

SEQ ID NO: 742273 - DNA, 120 bp, Artificial Sequence
  ENSG00000204479_1 (sequence is synthesized)
ccagggaggtcttccctctgatgttcatggaggcctccagcatgagacattttgaggccctgaagctgatggtgcaggcctggcccttcctccgcctccctctgggatccctgatgaaga

SEQ ID NO: 742274 - DNA, 120 bp, Artificial Sequence
  ENSG00000204479_2 (sequence is synthesized)
tccctctgggatccctgatgaagacacctcatctggagaccttgcaagctgtgctgaagggacttgatacactgctggcccagaagcttcgccccaggaggtggaaacttcaagtgctgg

SEQ ID NO: 742275 - DNA, 120 bp, Artificial Sequence
  ENSG00000204479_3 (sequence is synthesized)
tctggactatatggtctggagccagggccctctcctgctccccagaggccatgagtaagaggcagacagtggaggactatccaaggacgggagagcaccagcccttgaaggtgttcatag

SEQ ID NO: 742276 - DNA, 120 bp, Artificial Sequence
  ENSG00000204479_4 (sequence is synthesized)
acctctgccaaaaggaaagtacactggatgaatgcctgagctacctctgcaggtggatccactacagaagaggtctagtgcacctgtgttgtaataaggtgcagaattactcaatgccca

SEQ ID NO: 742277 - DNA, 120 bp, Artificial Sequence
  ENSG00000204479_5 (sequence is synthesized)
cttcaagtttcagaaatttattgaaaagggtatacccagacagtatccaggagttggaaattaagagaaagtgctctctgaataaaacaggaaagtttgccccttacttgagccagatga

SEQ ID NO: 742278 - DNA, 120 bp, Artificial Sequence
  ENSG00000204479_6 (sequence is synthesized)
ttttagccttcggttatgacgatgagttatatgtaagcggccaacagcagttcgttcctgacttggactgtccattcctctgcctgtactaccctcagatgctttatataagaaagatca

SEQ ID NO: 742279 - DNA, 120 bp, Artificial Sequence
  ENSG00000204479_7 (sequence is synthesized)
gtaatatcaaagagcacctggagcacctgctcaggtgcctcaagaaccccttgggaacctttatattctgtcatgcttacctagctgatcaggacatggagtgtctgtctcagtacccaa

SEQ ID NO: 742280 - DNA, 120 bp, Artificial Sequence
  ENSG00000204479_8 (sequence is synthesized)
gcctcagtcagctaaaggagctgcatctgattcatatcctaatgtggactaccaatcttgagccccttggagctctgctagagaaagttgctgctactctcgagatcctcacgttaaagg

SEQ ID NO: 742281 - DNA, 120 bp, Artificial Sequence
  ENSG00000204479_9 (sequence is synthesized)
actgtcagatccaggactcccagctcagggtcctcctgcctgccctgagccgctgctcccagctcaccaccttctactttcgcggaaatgagacctccacgaatgctctgaaagacctgc

SEQ ID NO: 742282 - DNA, 120 bp, Artificial Sequence
  ENSG00000204479_10 (sequence is synthesized)
tgtgtcacacaggtgggctgagcaagttaggtctggagttgtatcctgcccctctggagtgtcttgacaacaggggtcatgtcaattgggagatcctcgccccaattcgggctgagctga

SEQ ID NO: 742283 - DNA, 120 bp, Artificial Sequence
  ENSG00000204479_11 (sequence is synthesized)
tgtgtacactcagggaagtcaggcagcccaagaggatcttttttggtcccatcccctgcccttcctgtggctcatggccatctgagaaagtggacttccatctttgctcttagtgaaggc

SEQ ID NO: 742284 - DNA, 120 bp, Artificial Sequence
  ENSG00000204479_12 (sequence is synthesized)
agtggacttccatctttgctcttagtgaaggcctgattagtgggatggatatgctttcttcaggacccttaggcactaaaatctaggacacaggtgggtttttttgtttttttgtttttt

SEQ ID NO: 742285 - DNA, 120 bp, Artificial Sequence
  ENSG00000204480_0 (sequence is synthesized)
atgagcttccaggccccacgcagactcctggagctggcagggcagagcctgctgagggaccaggccttggccatctccgtcctggatgagctgcccagggagctcttcccccgactgttc

SEQ ID NO: 742286 - DNA, 120 bp, Artificial Sequence
  ENSG00000204480_1 (sequence is synthesized)
gtggaggccttcactagcagatgctgcgaggttctgaaggtgatggtgcaggcctggcccttcccctgcctccctctggggtccctgatgaagacgcctgatctggagatcttacattat

SEQ ID NO: 742287 - DNA, 120 bp, Artificial Sequence
  ENSG00000204480_2 (sequence is synthesized)
gtagtggatgggattgattgcctgcttgcccaaaaggttcgccccaggaggtggaaacttcaagtgctggaaatgcgggatgttgatgagaatttttggaccatatggtctggagccagg

SEQ ID NO: 742288 - DNA, 120 bp, Artificial Sequence
  ENSG00000204480_3 (sequence is synthesized)
cccctgtcctgctccccagaggccatgagtaagagacagacagtggaggactgtccaaggacaggagagaagcagcccttgaaggtgttcatggatgtttgcctcaaggaaaaatccgtg

SEQ ID NO: 742289 - DNA, 120 bp, Artificial Sequence
  ENSG00000204480_4 (sequence is synthesized)
gatgaagatctgagcttcttctctgggtgggtgcagcacagaagacgttcagtacacctgtgctgtactaaggtggtaaattattcaatgaacattctaaatttcagaaacatattagaa

SEQ ID NO: 742290 - DNA, 120 bp, Artificial Sequence
  ENSG00000204480_5 (sequence is synthesized)
acagtatacccagacagtatccaagtattggaaatttggaacatgtgctggccgtgtatggtagcagaggttagccgttacctgagccagatgaagaatcttcgaaaactcttcatctcc

SEQ ID NO: 742291 - DNA, 120 bp, Artificial Sequence
  ENSG00000204480_6 (sequence is synthesized)
gatggctgtggttacctgccaagctttgagagccaaggacagttagttgctgaattcagctctgtgttcctcaggctggagtacctccagatgctttatatgagaaggatccgcttcttc

SEQ ID NO: 742292 - DNA, 120 bp, Artificial Sequence
  ENSG00000204480_7 (sequence is synthesized)
gaaggctacctggaccagctgatcaggtgcctcaagagcccgttggagacattggcattaacttatggctccctagatgaagaggacttgaaatgtctgccctggtacccaagtctcagt

SEQ ID NO: 742293 - DNA, 120 bp, Artificial Sequence
  ENSG00000204480_8 (sequence is synthesized)
caactgaagcagctgaatctgagtcatggtacactgcgcttcatccgtcttgagcccctccgagctctgctagagaaagttgctgccactcttcagaccctcttcttagtggactgtggg

SEQ ID NO: 742294 - DNA, 120 bp, Artificial Sequence
  ENSG00000204480_9 (sequence is synthesized)
attggggactccaaactcagggtcatcctgcctgccctgagccgctgctccaacctcaccactttctgctttcacggcaatgacacgtccatggatggtctgaaggacctgctgcgccac

SEQ ID NO: 742295 - DNA, 120 bp, Artificial Sequence
  ENSG00000204480_10 (sequence is synthesized)
acaggcaggctgagcaatttgagcctggaaacatatcctgcccctcgggagagtcttgacaacaggggtcgtgtcatttcggagctcctcaccccacttcaggctgagctgatgcgtata

SEQ ID NO: 742296 - DNA, 120 bp, Artificial Sequence
  ENSG00000204480_11 (sequence is synthesized)
ctgagggaagtaagggagcccaacaggatcttctttggtcccgtctcctgcccttgctgtggcatgtcacccactgagcaactggagttcaatttttgcttgcggggaaggcctgcctag

SEQ ID NO: 742297 - DNA, 120 bp, Artificial Sequence
  ENSG00000204481_0 (sequence is synthesized)
acccacagcactcattcctggagctactgcttggttccctgagaggtcccagaactctgcaaagtgagtccagcgctgagatttttcttgcagatctatcaggatgagcatccaggcccc

SEQ ID NO: 742298 - DNA, 120 bp, Artificial Sequence
  ENSG00000204481_1 (sequence is synthesized)
acccagactcctggagctggcagggcagagcctgctgagagaccaggccttgtccatctctgccatggaggagctgcccagggtgctctatctcccactcttcatggaggccttccgcag

SEQ ID NO: 742299 - DNA, 120 bp, Artificial Sequence
  ENSG00000204481_2 (sequence is synthesized)
gagacacttccagactctgacggtgatggtgcaggcctggcccttcacctgcctccctctgggatcactgatgaagacgcttcatttggagaccttaaaagcattgctggaagggcttca

SEQ ID NO: 742300 - DNA, 120 bp, Artificial Sequence
  ENSG00000204481_3 (sequence is synthesized)
cttcaagtgctggatttgcgggatgttgatgagaatttctgggccagatggcctggagcctgggccctgtcctgcttcccagagaccatgagtaagaggcagacagcagaggactgtcca

SEQ ID NO: 742301 - DNA, 120 bp, Artificial Sequence
  ENSG00000204481_4 (sequence is synthesized)
agagaccatgagtaagaggcagacagcagaggactgtccaaggatgggagagcaccagcccttaaaggtgttcatagacatctgcctcaaggaaataccccaggatgaatgcctgagata

SEQ ID NO: 742302 - DNA, 120 bp, Artificial Sequence
  ENSG00000204481_5 (sequence is synthesized)
cctctttcagtgggtttaccaaaggagaggtttagtacacctgtgctgtagtaagctggtcaattatctaacgccgattaaacatctcagaaagtcattgaaaataatatacctgaatag

SEQ ID NO: 742303 - DNA, 120 bp, Artificial Sequence
  ENSG00000204481_6 (sequence is synthesized)
tattcaacagctggaaattcgcaacatgtcctggccacgtctgataagaaagcttcgttgttacctgaaggagatgaagaatcttcgcaaactcgttttctccaggtgccatcattccat

SEQ ID NO: 742304 - DNA, 120 bp, Artificial Sequence
  ENSG00000204481_7 (sequence is synthesized)
gtcagataatgaactcgaaggacggttagtcaccaaattcagctctgtgttcctcaggctggaacacctccagttgcttaaaataaaattgatcaccttcttcagtgggcacctggaaca

SEQ ID NO: 742305 - DNA, 120 bp, Artificial Sequence; identical to SEQ ID NO: 218081
  ENSG00000204481_8 (sequence is synthesized)

SEQ ID NO: 742306 - DNA, 120 bp, Artificial Sequence
  ENSG00000204481_9 (sequence is synthesized)
agctacgtgctgctgttccgcatcagtcttgaacccctcggagctctgctagagaaaattgctgcctctctcgaaaccctcatcttggagggctgtcagatccactactcccaactcagt

SEQ ID NO: 742307 - DNA, 120 bp, Artificial Sequence
  ENSG00000204481_10 (sequence is synthesized)
gccatcctgcctggcctgagccactgctcccagctcaccaccttctactttggcagaaattgtatgtctatgggtgccctgaaggacctgttgtgccacaccagtgggctgagcaagtta

SEQ ID NO: 742308 - DNA, 120 bp, Artificial Sequence
  ENSG00000204481_11 (sequence is synthesized)
agcctggagacgtatcctgcccctgaggagagtttgaattccttggttcgtgtcgattgggagatcttcgccctacttcgggctgagctgatgtgtacactgagggaagtcaggcagccc

SEQ ID NO: 742309 - DNA, 120 bp, Artificial Sequence
  ENSG00000204481_12 (sequence is synthesized)
aagaggatcttcattggtcccaccccctgcccttcctgtggctcatcaccgtctgaggaactggagctccatctttgctgctagggaaggcgtgcctagcggggtagagaaatccaaagt

SEQ ID NO: 742310 - DNA, 120 bp, Artificial Sequence
  ENSG00000204481_13 (sequence is synthesized)
tctcttccaggcactgggacactaaaatctactatgtaggtgcaaactatttttctcttttcttatttatttcattttttaataattccaaaatttttattaaagacaatttgagacagg

SEQ ID NO: 742311 - DNA, 120 bp, Artificial Sequence
  ENSG00000204481_14 (sequence is synthesized)
gtttctctgtgttgctctgggatcctcctgcctcagctgggcttatgggatcctcctgcctcagcttcctaaagtgctgggattactggcatgagtgactgtgtccaggccacatgcaac

SEQ ID NO: 742312 - DNA, 120 bp, Artificial Sequence
  ENSG00000204481_15 (sequence is synthesized)
ttaaaggaagcacagggaagtgctcagtgtgagggaaaaaaacataacagcagggggcaaggctggaggaaaatgttgaggtgacatcaatgagaacttcagggacccgtgtcctacaga

SEQ ID NO: 742313 - DNA, 120 bp, Artificial Sequence
  ENSG00000204481_16 (sequence is synthesized)
gtcggaaagagaagctaaagttctacagtgatgagaatgttatccctgcaaggatggttaccaaggaatatcagaaataaagagcacctgaatgaaaacttttaacctgttgtagcaatt

SEQ ID NO: 742314 - DNA, 120 bp, Artificial Sequence
  ENSG00000204481_17 (sequence is synthesized)
tatccaccagaaatatctagttattgagttactgatggaaaaataatgaaatactactttgtctgtgattgagtttcagctgtagaacatcaaagcaaccaaatagaatttgatcatttt

SEQ ID NO: 742315 - DNA, 120 bp, Artificial Sequence
  ENSG00000204481_18 (sequence is synthesized)
ggggtcacctggggtagaagctagagagagacatcatgtacaagctagttagtgggggtttcagctctattgggggtgcacgtgtgaatttcctgttacaaagtgtgtttcaagttgata

SEQ ID NO: 742316 - DNA, 120 bp, Artificial Sequence; identical to SEQ ID NO: 218092
  ENSG00000204481_19 (sequence is synthesized)

SEQ ID NO: 742317 - DNA, 120 bp, Artificial Sequence
  ENSG00000204482_0 (sequence is synthesized)
gctggggaggaacccaggctgggggagaagttaaagccagaggaggggcaggaatgtctgaggtggcaacacttctcttcagccagacagcactggccagtttggagtctgtccatcctg

SEQ ID NO: 742318 - DNA, 120 bp, Artificial Sequence
  ENSG00000204482_1 (sequence is synthesized)
caggccacaagctctggatgaggaacttgaggcaagtcaccagcccctgatcatttcgcctaaaagagcaaggactagagttcctgacctccaggccagtccctgatccctgacctaatg

SEQ ID NO: 742319 - DNA, 120 bp, Artificial Sequence
  ENSG00000204482_2 (sequence is synthesized)
ttatcgcggaatgatgatatatgtatctacgggggcctggggctgggcgggctcctgcttctggcagtggtccttctgtccgcctgcctgtgttggctgcatcgaagagtaaagaggctg

SEQ ID NO: 742320 - DNA, 120 bp, Artificial Sequence
  ENSG00000204482_3 (sequence is synthesized)
tgcatctctgcagaggctgccagtgcccagcagtgagggacctgacctcaggggcagagacaagagaggcaccaaggaggatccaagagctgactatgcctgcattgctgagaacaaacc

SEQ ID NO: 742321 - DNA, 120 bp, Artificial Sequence
  ENSG00000204482_4 (sequence is synthesized)
cacctgagcaccccagacaccttcctcaacccaggcgggtggacagggtccccctgtggtccagccagtaaaaaccatggtccccccacttctgtgtctcagtcctctcagtccatctcg

SEQ ID NO: 742322 - DNA, 120 bp, Artificial Sequence
  ENSG00000204482_5 (sequence is synthesized)
agcctccgttcaaattgatcatcatcaaaacttatgtggctttttgacctttgaatagggaattttttaaattttttaaaaattaaaataaaaaaaacacatggctcacccttccaccca

SEQ ID NO: 742323 - DNA, 120 bp, Artificial Sequence
  ENSG00000204482_6 (sequence is synthesized)
gactagagttcctgacctccaggccagtccctgatccctgacctaatgttatcgcggaatgatgaacactgcctggccctggagccactgggaagccaacaggggagtccacgcctgctg

SEQ ID NO: 742324 - DNA, 120 bp, Artificial Sequence
  ENSG00000204482_7 (sequence is synthesized)
atgttatcgcggaatgatgatatatgtatctacgggggcctggggctgggcgggctcctgcttctggcagtggtccttctgtccgcctgcctgtgttggctgcatcgaagagaggctgcc

SEQ ID NO: 742325 - DNA, 120 bp, Artificial Sequence
  ENSG00000204482_8 (sequence is synthesized)
ggtgacctagtaaagtccaggcttgaatctcgggtctttacttgggcaacgggcaccatgataccctatgttctggggattagcagtgaggaatggaaagtgcccagctcagggttggca

SEQ ID NO: 742326 - DNA, 120 bp, Artificial Sequence
  ENSG00000204482_9 (sequence is synthesized)
ggtaagtaaagtgtctcttgcatctgcatagagagagtcctgggagcttaggaagtgatggggaacagtgatgtatgcagctcatgactaggtggacaggcctctggggacagctggtac

SEQ ID NO: 742327 - DNA, 120 bp, Artificial Sequence
  ENSG00000204482_10 (sequence is synthesized)
aggagggaaagggacctcacgggaggcccagaaacctggtaagaggtgaggtattaaggtctgggatggagaagctctgagggtatatttttctgcctctaaaactgttggagagggaat

SEQ ID NO: 742328 - DNA, 120 bp, Artificial Sequence
  ENSG00000204482_11 (sequence is synthesized)
ctgagaaagctgcaaccaaccaggaggctggggtacgctggagaaggaatgggcttcctaaccttgagccctcttccctgaagatatatgtatctacgggggcctggggctgggcgggct

SEQ ID NO: 742329 - DNA, 120 bp, Artificial Sequence
  ENSG00000204482_12 (sequence is synthesized)
cctgcttctggcagtggtccttctgtccgcctgcctgtgttggctgcatcgaagaggtgagcgctgcactccctccctccccctgcagcagtgccccctgtgcccccacccccacacgct

SEQ ID NO: 742330 - DNA, 120 bp, Artificial Sequence
  ENSG00000204482_13 (sequence is synthesized)
ggctggagaggagctgggtgagtctggggacagggaagggggagggcaagagagatcctgagtgggtgagtggggagaagcatggctgagcgctgagaggagggttggggacgggagaca

SEQ ID NO: 742331 - DNA, 120 bp, Artificial Sequence
  ENSG00000204482_14 (sequence is synthesized)
aggagagagaaagtaggagcatgagagaggcagagaaaatcgaggcaaaagagaaagagaaaatgagacagaaaccaagagaaaaagtgagacagaggataggagagacagggagaaaat

SEQ ID NO: 742332 - DNA, 120 bp, Artificial Sequence
  ENSG00000204482_15 (sequence is synthesized)
gagagtgagagagacacaaagagaagagcaatgaaagagagagagagagagaggctccagaaccaggcacagtggctcacgtctgtcattccagctatcgcaaggctgaggcaggaagat

SEQ ID NO: 742333 - DNA, 120 bp, Artificial Sequence
  ENSG00000204482_16 (sequence is synthesized)
ttccagctatcgcaaggctgaggcaggaagatagcttgagctcaggggttgaagacaatcctggacaacatagtgggactctgtctccaaagaaaaaagagagagagagagagagagaga

SEQ ID NO: 742334 - DNA, 120 bp, Artificial Sequence
  ENSG00000204482_17 (sequence is synthesized)
agtaagaaaggctggaggtgggagcagaactcacagggaaggatctgacggcatcgcctcccatcagcaccttctgtcctggtcccaggcccagggctcctcagagcaggaactccacta

SEQ ID NO: 742335 - DNA, 120 bp, Artificial Sequence
  ENSG00000204482_18 (sequence is synthesized)
atgaggaacttgaggcaagtcaccagcccctgatcatttcgcctaaaagagcaaggactagagttcctgacctccaggccagtccctgatccctgacctaatgttatcgcggaatgatgc

SEQ ID NO: 742336 - DNA, 120 bp, Artificial Sequence
  ENSG00000204482_19 (sequence is synthesized)
atgatatatgtatctacgggggcctggggctgggcgggctcctgcttctggcagtggtccttctgtccgcctgcctgtgttggctgcatcgaagagaggctggagaggagctgggcccag

SEQ ID NO: 742337 - DNA, 120 bp, Artificial Sequence
  ENSG00000204498_0 (sequence is synthesized)
ccttcccgcctcccgtctccgagcttcttaaacacaggccttgggcctacggctctgggggtacttgggggggcgggggcaggtctgatgagtaacccctccccccaggttccagaggaa

SEQ ID NO: 742338 - DNA, 120 bp, Artificial Sequence
  ENSG00000204498_1 (sequence is synthesized)
gaagcctccacatctgtctgccggcccaagagttccatggcctccacttcccgccgccaacgccgagaacgtcgctttcgtcgttacttgtctgcaggacggctggtccgggcccaggcc

SEQ ID NO: 742339 - DNA, 120 bp, Artificial Sequence
  ENSG00000204498_2 (sequence is synthesized)
ctcctccagcgacacccaggcctcgatgtagatgctgggcagcccccaccactgcaccgggcctgtgcccgccacgatgcccctgccctgtgcctgctgcttcggctcggggctgaccct

SEQ ID NO: 742340 - DNA, 120 bp, Artificial Sequence
  ENSG00000204498_3 (sequence is synthesized)
gcccaccaggaccgccatggggacacggcactgcatgctgctgcccgccagggcccagatgcctacaccgatttcttcctcccgctgctaagccgctgtccctccgccatgggaataaag

SEQ ID NO: 742341 - DNA, 120 bp, Artificial Sequence
  ENSG00000204498_4 (sequence is synthesized)
aataaggatggggagacccctggccaaattttgggctggggacccccctgggattctgctgaagaggaggaagaagatgatgcctccaaggagcgggaatggagacagaagctccagggt

SEQ ID NO: 742342 - DNA, 120 bp, Artificial Sequence
  ENSG00000204498_5 (sequence is synthesized)
gagctggaggacgagtggcaggaagtcatggggaggtttgaaggtgatgcctcccatgaaacccaggaacctgagtccttctcagcctggtcagatcgcctggcccgggaacatgcccag

SEQ ID NO: 742343 - DNA, 120 bp, Artificial Sequence
  ENSG00000204498_6 (sequence is synthesized)
gcagcagcgagaagcagagggatcccgtcgacccccacgtgctgagggctccagccagagctggcgacagcaggaggaggagcagcggctcttcagggagcgagcccgggccaaggagga

SEQ ID NO: 742344 - DNA, 120 bp, Artificial Sequence
  ENSG00000204498_7 (sequence is synthesized)
agagctgcgtgagagccgagccaggagggcgcaggaggctctaggggaccgagaacccaagccaaccagggccgggcccagggaagagcaccccagaggagcggggaggggcagcctctg

SEQ ID NO: 742345 - DNA, 120 bp, Artificial Sequence
  ENSG00000204498_8 (sequence is synthesized)
gcgatttggtgatgtgccctggccctgccctgggggaggggacccagaggccatggctgcagccctggtggccaggggcccccctttggaggaacagggggctctgaggaggtacttgag

SEQ ID NO: 742346 - DNA, 120 bp, Artificial Sequence
  ENSG00000204498_9 (sequence is synthesized)
ggtccagcaggtccgctggcaccctgaccgcttcctgcagcgattccgaagccagattgagacctgggagctgggccgtgtgatgggagcagtgacagccctttctcaggccctgaatcg

SEQ ID NO: 742347 - DNA, 120 bp, Artificial Sequence
  ENSG00000204498_10 (sequence is synthesized)
ccatgcagaggccctcaagtgaccctagggaagaagcaagaaacttcggggctgcagcctcaggatgaggcagaaggaagggtaagggaaaggatggggaccacaaggaagagccaggtg

SEQ ID NO: 742348 - DNA, 120 bp, Artificial Sequence
  ENSG00000204498_11 (sequence is synthesized)
ctgctcagcagaggatatgggtgggagcgaaagttgtaacaagtgggggtggggggtgcgggccgccaccactgctccttgactctgccgtttcctaataagacctggttccacatctca

SEQ ID NO: 742349 - DNA, 120 bp, Artificial Sequence
  ENSG00000204498_12 (sequence is synthesized)
agggatgaggcaggggcggagacgggggagtactgaggtgagagaaggagaacttgattggtggtaacagaggaagcataaagggttgtgaatgcggtgaaaagcccaagagttccatgg

SEQ ID NO: 742350 - DNA, 120 bp, Artificial Sequence
  ENSG00000204498_13 (sequence is synthesized)
tgttgccggttcacctccccacccctctcccatcatcccctgcctacaccgatttcttcctcccgctgctaagccgctgtccctccgccatgggaataaagaataaggatggggagaccc

SEQ ID NO: 742351 - DNA, 120 bp, Artificial Sequence
  ENSG00000204498_14 (sequence is synthesized)
aggtttgaaggtgagaagtccactgctatccacagctgcccttccccactggctgctttccatctgcatgaatgcgtcacactaggctcctctgccccctcctctgtgcttccctgcttc

SEQ ID NO: 742352 - DNA, 120 bp, Artificial Sequence
  ENSG00000204501_0 (sequence is synthesized)
acccaaagtcttcaagcctggagttcctgcttggttcttcctgaggtctgagcaccttctagactacatccagatctgttttccctgcagattcatgaagatgagcatccggactccacc

SEQ ID NO: 742353 - DNA, 120 bp, Artificial Sequence
  ENSG00000204501_1 (sequence is synthesized)
cagactcctggagcttgcagggcggagcctgctgagggaccaagctttggccatgtccaccctggaggagctgcccacagaacttttccccccactgttcatggaggccttcagcaggag

SEQ ID NO: 742354 - DNA, 120 bp, Artificial Sequence
  ENSG00000204501_2 (sequence is synthesized)
acgctgtgaggccctgaagctgatggtgcaggcctggcccttccgccgcctccctctgaggcctctgataaagatgccttgtctggaggccttccaagctgtgctcgatgggcttgatgc

SEQ ID NO: 742355 - DNA, 120 bp, Artificial Sequence
  ENSG00000204501_3 (sequence is synthesized)
actgcttacccaaggggttcgtcccaggaggtggaaactccaagtgctggatttacaggatgtctgtgagaacttctggatggtttggtctgaagctatggcccatgggtgcttcctcaa

SEQ ID NO: 742356 - DNA, 120 bp, Artificial Sequence
  ENSG00000204501_4 (sequence is synthesized)
tgccaagaggaacaaaaaaccagtgcaggactgtccaaggatgagaggacggcagcccttgactgtgttcgtagaactttggctcaagaacaggactctggatgaatacctcacctacct

SEQ ID NO: 742357 - DNA, 120 bp, Artificial Sequence
  ENSG00000204501_5 (sequence is synthesized)
ccttctatgggtcaagcagaggaaagatttactacacctgtgctgtaagaagctgaaaattttgggaatgcccttccgcaatatcagaagcatcctgaaaatggtgaacctagactgtat

SEQ ID NO: 742358 - DNA, 120 bp, Artificial Sequence
  ENSG00000204501_6 (sequence is synthesized)
ccaggaggtggaagtgaattgcaagtgggtactgcccatcctgacacagtttaccccatacctgggccacatgaggaatcttcagaagctcgttctctcccacatggatgtctctcgcta

SEQ ID NO: 742359 - DNA, 120 bp, Artificial Sequence
  ENSG00000204501_7 (sequence is synthesized)
gcctccaaaagctttatatgaactctgtttctttcctcgaaggccacctggaccagctgctcagctgtctgaagacctcgttaaaagtcctcacaataactaactgtgtgcttttggaat

SEQ ID NO: 742360 - DNA, 120 bp, Artificial Sequence
  ENSG00000204501_8 (sequence is synthesized)
cagacttgaagcatctatcccagtgcccgagtatcagtcaactaaagaccctggacctgagtggcatcagactgaccaattatagtcttgtgcctctccaaattctcctagaaaaagttg

SEQ ID NO: 742361 - DNA, 120 bp, Artificial Sequence
  ENSG00000204501_9 (sequence is synthesized)
cagccacccttgagtacctggatttagatgactgtggcatcatagactcccaagtcaacgccatcctgcctgccctgagccgctgctttgagctcaacaccttcagcttctgtggaaatc

SEQ ID NO: 742362 - DNA, 120 bp, Artificial Sequence
  ENSG00000204501_10 (sequence is synthesized)
ccatctgcatggccaccctggagaacctgctgagccacacaatcatactcaaaaacttatgtgtggagctgtatcctgccccccgagagagttatggtgctgatggtactctctgctgga

SEQ ID NO: 742363 - DNA, 120 bp, Artificial Sequence
  ENSG00000204501_11 (sequence is synthesized)
gcagatttgctcaaattagggctgagctgatgaacagagtgagggacttaaggcaccccaagaggatcttgttctgtactgactactgccctgactgtggcaacaggtcattttatgacc

SEQ ID NO: 742364 - DNA, 120 bp, Artificial Sequence
  ENSG00000204501_12 (sequence is synthesized)
tggaggcagatcaatactgctgttgaatgcctgcctatttggatgggtatgtcaaacgctttcttctggacacttggaaactaaaacctaggtcttaggtacatcctaaagggagcacag

SEQ ID NO: 742365 - DNA, 120 bp, Artificial Sequence
  ENSG00000204501_13 (sequence is synthesized)
aacccatcatttcacacataggctctgaaagtgggaaaggaaagctgatcaagcaggggccggacttgggggaaatgttgccatggattcgatgggactttggggacctgtgtcctgtag

SEQ ID NO: 742366 - DNA, 120 bp, Artificial Sequence
  ENSG00000204501_14 (sequence is synthesized)
attcgaaaatgggaatctgaatgtctagagtggaattcaggcttgagaatacatgagggagttactcttgcatggatggttgtaaagaaacaatcagaaataaaggaaaactgagcagaa

SEQ ID NO: 742367 - DNA, 120 bp, Artificial Sequence
  ENSG00000204505_0 (sequence is synthesized)
acccaaagtcttcaagcctggagttcctgcttggttcttcctgaggtctgagcaccttctaaactacatccagatctgttttccctgcagattcatgaagatgagcatccggactccacc

SEQ ID NO: 742368 - DNA, 120 bp, Artificial Sequence
  ENSG00000204505_1 (sequence is synthesized)
cagactcctggagctggcggggcggagcctgctgagggaccaagccttggccatgtccaccctggaggagctgcccacagaacttttccccccactgttcatggaggccttcagcaggag

SEQ ID NO: 742369 - DNA, 120 bp, Artificial Sequence
  ENSG00000204505_2 (sequence is synthesized)
acgctgtgaggccctgaagctgatggtgcaggcctggcccttccgccgcctccctctgaggcctctgataaagatgccttgtctggaggccttccaagctgtgctcgatgggctggatgc

SEQ ID NO: 742370 - DNA, 120 bp, Artificial Sequence
  ENSG00000204505_3 (sequence is synthesized)
acttcaagtgctggatttacaggatgtctgtgagaacttctggatggtttggtctgaagctatggcccgtgggtccttcctcaatgccaagaggaacaaaacaccagtgcaggactgtcc

SEQ ID NO: 742371 - DNA, 120 bp, Artificial Sequence
  ENSG00000204505_4 (sequence is synthesized)
tgccaagaggaacaaaacaccagtgcaggactgtccaaggatgagaggacagcagcccttgactgtgttcgtagaactttggctcaagaacaggactctggatgaatacctcacctacct

SEQ ID NO: 742372 - DNA, 120 bp, Artificial Sequence; identical to SEQ ID NO: 742357
  ENSG00000204505_5 (sequence is synthesized)

SEQ ID NO: 742373 - DNA, 120 bp, Artificial Sequence; identical to SEQ ID NO: 742358
  ENSG00000204505_6 (sequence is synthesized)

SEQ ID NO: 742374 - DNA, 120 bp, Artificial Sequence
  ENSG00000204505_7 (sequence is synthesized)
acccagttcaccactcagttcctcaagctgcactgcctccaaaagctttatatgaactctgtttctttcctcgaaggccacctggaccagctgctcagctgtctgaagacctcgttaaag

SEQ ID NO: 742375 - DNA, 120 bp, Artificial Sequence
  ENSG00000204505_8 (sequence is synthesized)
atcagacttgaagcatctatcccagtgcccgagtatcagtcaactaaagaccctggacctgagtggcatcagactgaccaattacagtcttgtgcctctccaaattctcctagaaaaagt

SEQ ID NO: 742376 - DNA, 120 bp, Artificial Sequence
  ENSG00000204505_9 (sequence is synthesized)
tgcagccacccttgagtacttggatttagatgactgtggcatcatagactcccaagtcaacgccatcctgcctgccctgagccgctgctttgagctcaatgccttcagcttctgtggaaa

SEQ ID NO: 742377 - DNA, 120 bp, Artificial Sequence
  ENSG00000204505_10 (sequence is synthesized)
tcccatctccatggccaccctggagaacctgctgagccacacaatcatactcaaaaacttatgcgtggaggtgtatcctgccccgcgggagagttatggtgctgatggtactctctgctg

SEQ ID NO: 742378 - DNA, 120 bp, Artificial Sequence
  ENSG00000204505_11 (sequence is synthesized)
gagcagatttgctcaaattagggctgagctgatgaacagagtgagggacttaaggcaccccaagaggatctttttctgtattgacaactgccctgactgtggcaacaggtcattttatga

SEQ ID NO: 742379 - DNA, 120 bp, Artificial Sequence
  ENSG00000204505_12 (sequence is synthesized)
cctggaggcagatcaatactgctgttgaatgcctgcctatttggatgggtatgtcaaacgctttcttctggacacttggaaactaaaacctaggtcttaggtacatcctaaagggagcac

SEQ ID NO: 742380 - DNA, 120 bp, Artificial Sequence
  ENSG00000204505_13 (sequence is synthesized)
agaacccatcatttcacacataggctctgaaagtgggaaaggaaagctgatcaagcaggggcaggacttgggggaaatgttgccatggattcgatgggactttggggacctgtatcctgt

SEQ ID NO: 742381 - DNA, 120 bp, Artificial Sequence
  ENSG00000204505_14 (sequence is synthesized)
agagtcgaaaatgggaatctgaatgtctagagtggaattcaggcttgagaatacatgagggagttactcttgcatggatggttgtaaagaaacaatcagaaataaaggaaaactgagcag

SEQ ID NO: 742382 - DNA, 120 bp, Artificial Sequence
  ENSG00000204510_0 (sequence is synthesized)
tttggcctgagagtgatgccttttctctggatttgtcctctagagttttcccttgcagattcatcaagatgagcatcagggccccacccagactcctggagctggcaaggcagaggctgc

SEQ ID NO: 742383 - DNA, 120 bp, Artificial Sequence
  ENSG00000204510_1 (sequence is synthesized)
tgagggaccaggccttggccatctccaccatggaggagctgcccagggagctcttccccacgctgttcatggaggccttcagcaggagacgctgtgaaaccctgaaaacaatggtgcagg

SEQ ID NO: 742384 - DNA, 120 bp, Artificial Sequence
  ENSG00000204510_2 (sequence is synthesized)
cctggcctttcacccgcctccctctagggtccctgatgaagtcgcctcatctggagtcattaaaatctgtgctggaaggggttgatgtgctgttgacccaagaggttcgccccaggcagt

SEQ ID NO: 742385 - DNA, 120 bp, Artificial Sequence
  ENSG00000204510_3 (sequence is synthesized)
caaaacttcaagtgctggacttgaggaatgtggatgagaacttctgcgacatattttctggagctactgcatccttcccggaggctctgagtcagaagcaaacagcagataactgtccag

SEQ ID NO: 742386 - DNA, 120 bp, Artificial Sequence
  ENSG00000204510_4 (sequence is synthesized)
ggacaggcaggcagcagccattcatggtgttcatagacctttgtctcaagaacaggacactagatgaatgcctcacccacctcttagagtggggcaagcagagaaaaggcttactgcatg

SEQ ID NO: 742387 - DNA, 120 bp, Artificial Sequence
  ENSG00000204510_5 (sequence is synthesized)
tgtgttgcaaggagctgcaggtttttggaatgcccatccacagtatcatagaggtcctgaacatggtggagcttgactgtatccaggaggtggaagtgtgctgcccctgggagctgtcca

SEQ ID NO: 742388 - DNA, 120 bp, Artificial Sequence
  ENSG00000204510_6 (sequence is synthesized)
ctcttgtgaagtttgccccttacctgggccagatgaggaatctccgcaaacttgttctcttcaacatccgtgcatctgcctgcattcccccagacaacaaggggcagttcattgcccgat

SEQ ID NO: 742389 - DNA, 120 bp, Artificial Sequence
  ENSG00000204510_7 (sequence is synthesized)
tcacctctcagttcctcaagctggactatttccagaatctgtctatgcactccgtctctttcctcgaaggccacctggaccagctgctcaggtgtctccaggcctccttggagatggtcg

SEQ ID NO: 742390 - DNA, 120 bp, Artificial Sequence
  ENSG00000204510_8 (sequence is synthesized)
ttatgaccgactgcctgctgtcagagtcagacttgaagcatctctcttggtgcccgagcatccgtcaattaaaggagctggacctgaggggtgtcacgctgacccatttcagccctgagc

SEQ ID NO: 742391 - DNA, 120 bp, Artificial Sequence
  ENSG00000204510_9 (sequence is synthesized)
ccctcacaggtctgctggagcaagctgtggccaccctgcagaccctggacttagaggactgtgggatcatggattcccaactcagcgccatcctgcctgtcctgagccgctgctcccagc

SEQ ID NO: 742392 - DNA, 120 bp, Artificial Sequence
  ENSG00000204510_10 (sequence is synthesized)
tcagcaccttcagcttctgtgggaacctcatctccatggctgcccttgagaacctgctgcgccacaccgtcgggctgagcaagctaagcctggagctgtatcctgcccctctggagagtt

SEQ ID NO: 742393 - DNA, 120 bp, Artificial Sequence
  ENSG00000204510_11 (sequence is synthesized)
atgacacccagggtgctctctgctgggggagatttgctgaacttggggctgagctgatgaacacactgagggacttaaggcagcccaagatcattgtgttctgcaccgtcccctgccctc

SEQ ID NO: 742394 - DNA, 120 bp, Artificial Sequence
  ENSG00000204510_12 (sequence is synthesized)
gctgtggcatcagggcctcctatgacctggagcccagtcactgcctctgttgaatgcctgccatcagggtggatatatttcaagctttcttctggtcatttcggagctgaaacctaggcc

SEQ ID NO: 742395 - DNA, 120 bp, Artificial Sequence; identical to SEQ ID NO: 645712
  ENSG00000204510_13 (sequence is synthesized)

SEQ ID NO: 742396 - DNA, 120 bp, Artificial Sequence
  ENSG00000204511_0 (sequence is synthesized)
agttcctggtggccgttggacagctcacacagctccctgccaggtcacccgccatggtcctccctctgccctggctctctcggtaccatttccttcgcctccttctgccctcctggtcct

SEQ ID NO: 742397 - DNA, 120 bp, Artificial Sequence
  ENSG00000204511_1 (sequence is synthesized)
tggcaccccagggctcccatgggtgctgctcccaaaaccccaaagcaagcatggaagagcagaccagctccagaggaaatgggaagatgacgtcccctcccaggggccctgggacccacc

SEQ ID NO: 742398 - DNA, 120 bp, Artificial Sequence
  ENSG00000204511_2 (sequence is synthesized)
aagatccagaagctgaaggaacagatgaggaggcaccaagagagccttggaggaggcgcctaagtttcccccagtgcccacagcaccctccggcgctgaaaatacacgcaccacccacca

SEQ ID NO: 742399 - DNA, 120 bp, Artificial Sequence
  ENSG00000204511_3 (sequence is synthesized)
ggagccttgggatcataaacaccccagcgtcttcccaggccagagaaagtggaagagaccacaaagcgcaggcaattggcaggcagtgggggagccagggctctgcagtcttagtcccat

SEQ ID NO: 742400 - DNA, 120 bp, Artificial Sequence
  ENSG00000204511_4 (sequence is synthesized)
tcccctttgatctcacagcaggcagggcacccaggccttataggaattcaccctggaccatgccctaaaataacctcaccccaaatacaataaagggacgaagcacttatagataccaca

SEQ ID NO: 742401 - DNA, 120 bp, Artificial Sequence
  ENSG00000204514_0 (sequence is synthesized)
attttgattggtgttggatttatttgtaggagaggctcctgagcgctaggtccgcactgtggtgactgaacccagaagtcggggagcagttgtcctccgctgcacagaggctactctgga

SEQ ID NO: 742402 - DNA, 120 bp, Artificial Sequence
  ENSG00000204514_1 (sequence is synthesized)
gctctgtgacggcgcccagcgtgacccactcctgggccaggatacggaccgtcgtgcccatatctcctggctggtcgccctatcctcccgactctgcttaaaaccacgtggttcgatggc

SEQ ID NO: 742403 - DNA, 120 bp, Artificial Sequence
  ENSG00000204514_2 (sequence is synthesized)
tgccgcggctacgctgaggctctccgctcagggcacagtgacttttgaagatgtggctgtgaactttacctgggaggaatggaatctccttagtgaggctcagagatgcctgtaccgtga

SEQ ID NO: 742404 - DNA, 120 bp, Artificial Sequence
  ENSG00000204514_3 (sequence is synthesized)
tgtgacgctggagaacctggcacttatatcctccctgggttgttggtgtggagtggaagatgaggcggcaccttctaagcagagtatttatatacaaagagagactcaggtcaggactcc

SEQ ID NO: 742405 - DNA, 120 bp, Artificial Sequence
  ENSG00000204514_4 (sequence is synthesized)
tatggcaggtgtgtctcccaagaaggcccacccctgtgagatgtgtggcccgatcttgggagacattttgcatgtggcagatcatcagggaacacatcacaagcagaaactgcacaggtg

SEQ ID NO: 742406 - DNA, 120 bp, Artificial Sequence
  ENSG00000204514_5 (sequence is synthesized)
tgaggcctgggggaataaattgtatgacagtggaaactttcatcagcaccagaatgagcacattggagagaaaccctacagagggagtgttgaggaggcgttgtttgcaaagaggtgtaa

SEQ ID NO: 742407 - DNA, 120 bp, Artificial Sequence
  ENSG00000204514_6 (sequence is synthesized)
gttgcatgtgtcaggggagtcatctgtcttcagtgagagtgggaaggactttttgcccaggtcaggattactccagcaggaggccagtcacactggggagaagtcaaacagcaaaactga

SEQ ID NO: 742408 - DNA, 120 bp, Artificial Sequence
  ENSG00000204514_7 (sequence is synthesized)
gtgtgtgtctcccattcagtgtgggggagctcactacagctgtggagaatccatgaaacattttagcaccaaacatatactcagtcagcaccagagactgctcactagagaagagtgtta

SEQ ID NO: 742409 - DNA, 120 bp, Artificial Sequence
  ENSG00000204514_8 (sequence is synthesized)
tgtgtgctgtgaatgtgggaagtcctttagcaaatatgctagcttgagtaatcatcagagagttcacactgaaaaaaaacatgaatgtggagaatgtgggaaatcctttagcaaatatgt

SEQ ID NO: 742410 - DNA, 120 bp, Artificial Sequence
  ENSG00000204514_9 (sequence is synthesized)
tagcttcagtaatcatcagagagttcacactgaaaaaaaacatgaatgtggagaatgtgggaaatcctttagcaaatatgttagcttcagtaatcatcagagagttcacactgggaaaag

SEQ ID NO: 742411 - DNA, 120 bp, Artificial Sequence
  ENSG00000204514_10 (sequence is synthesized)
accttatgaatgtggagaatgtgggaaatcgtttagcaaatatgctagcttcagtaatcatcagagagttcacactgaaaaaaaacattatgaatgtggagaatgtgggaaatcctttag

SEQ ID NO: 742412 - DNA, 120 bp, Artificial Sequence
  ENSG00000204514_11 (sequence is synthesized)
caaatatgttagcttcagtaatcatcagagagttcacactgggaaaagaccttatgaatgtggagaatgtgggaaatcgtttagcaaatatgctagcttcagtaatcatcagagagttca

SEQ ID NO: 742413 - DNA, 120 bp, Artificial Sequence
  ENSG00000204514_12 (sequence is synthesized)
cactgacaaaaaacattatgaatgtggagaatgtgggaaatcctttagtcaaaagagcagcctcattcaacatcagcgatttcacactggagaaaaaccttatgggtgtgaagaatgtgg

SEQ ID NO: 742414 - DNA, 120 bp, Artificial Sequence
  ENSG00000204514_13 (sequence is synthesized)
gaaatcttttagttcagaaggacatcttaggagccatcaacgagttcacgccggagaaagacctttcaagtgtggagaatgtgtgaaatctttcagtcataagcgcagccttgttcacca

SEQ ID NO: 742415 - DNA, 120 bp, Artificial Sequence
  ENSG00000204514_14 (sequence is synthesized)
tcagcgagttcacagtggagaaagaccttatcagtgtggagaatgtgggaaatctttcagtcaaaagggcaacctcgttctacaccagcgagttcacactggagcaagaccttatgagtg

SEQ ID NO: 742416 - DNA, 120 bp, Artificial Sequence
  ENSG00000204514_15 (sequence is synthesized)
tggagaatgtgggaaatcatttagttcaaaaggacatcttaggaaccatcagcaaattcacactggggacagactttatgagtgtggagagtgtgggaaatcttttagtcataaaggcac

SEQ ID NO: 742417 - DNA, 120 bp, Artificial Sequence
  ENSG00000204514_16 (sequence is synthesized)
cctcattctacatcagcgagttcaccctagagaaagatcttatgggtgtggagaatgtgggaaatcttttagttcaatcgggcaccttaggagccatcagcgcgttcatactggagagag

SEQ ID NO: 742418 - DNA, 120 bp, Artificial Sequence
  ENSG00000204514_17 (sequence is synthesized)
gccttatgagtgtggagaatgtgggaaatcttttagtcataagcgcagccttgttcaccatcagcgcatgcacactggagaaagaccttacaagtgtggagactgtgggaaatcttttaa

SEQ ID NO: 742419 - DNA, 120 bp, Artificial Sequence
  ENSG00000204514_18 (sequence is synthesized)
tgaaaaaggacaccttaggaatcatcagcgagttcacactacagaaagaccttttaagtgtggggaatgtgggaaatgttttagtcacaagggtaacctcattctacaccagcatggcca

SEQ ID NO: 742420 - DNA, 120 bp, Artificial Sequence
  ENSG00000204514_19 (sequence is synthesized)
tactggagaaagaccttatgtatgtagggaatgtggaaaattatttaagaagaagtctcacctccttgtacaccagagaattcacaatggagaaaagccatatgcttgtgaagcttgtca

SEQ ID NO: 742421 - DNA, 120 bp, Artificial Sequence
  ENSG00000204514_20 (sequence is synthesized)
gaaattttttagaaacaagtaccaactcattgcacatcagagagttcacactggagaaaggccttatgaatgcaatgattgtggaaaatcatttacccacagctctacattctgtgttca

SEQ ID NO: 742422 - DNA, 120 bp, Artificial Sequence
  ENSG00000204514_21 (sequence is synthesized)
taagcgaattcacactggagaaaagccttatgagtgcagtgaatgtggaaaatctttcgctgaaagctccagtttcacaaaacacaaaagagttcacactggagaaaagccttatgagtg

SEQ ID NO: 742423 - DNA, 120 bp, Artificial Sequence
  ENSG00000204514_22 (sequence is synthesized)
cagtgaatgtggaaaatcttttgctgaaagctccagtctcactaaacacaagagagttcacactggagaaaagccttataaatgtgagaaatgtgggaaattatttaacaagaagtctca

SEQ ID NO: 742424 - DNA, 120 bp, Artificial Sequence
  ENSG00000204514_23 (sequence is synthesized)
cctccttgtacaccagagttcacactggagaaaagccatatgagtgtgaggattgtcagaaagtttttagcaagaaggaccacctcattgcacaccagagagttcacactggagaaaggc

SEQ ID NO: 742425 - DNA, 120 bp, Artificial Sequence
  ENSG00000204514_24 (sequence is synthesized)
catatgaatgcagtgattgtgggaagtcatctacccacagctctgcattctgtgttcataagagagttcacactggtcacaccaccttatgagtgcagtgaatgtgggaaatcctttgct

SEQ ID NO: 742426 - DNA, 120 bp, Artificial Sequence
  ENSG00000204514_25 (sequence is synthesized)
gaaactttcagtctcattaaacacaggagagttcacactggagtaaggtcttgtgattgcagcaaatgtgggaaaaaagttacctgaaggtcttttctccttgaatatcagagagttcac

SEQ ID NO: 742427 - DNA, 120 bp, Artificial Sequence
  ENSG00000204514_26 (sequence is synthesized)
gacaaataaaatacatttgggcaattttgtagccacacctctttgctccttcaagatcagagttaacactggatcagggccttaccagtgtgacatgtgagatatttatgtagaaatcta

SEQ ID NO: 742428 - DNA, 120 bp, Artificial Sequence
  ENSG00000204514_27 (sequence is synthesized)
gcttcataacacacaggagacttcccactgcagaaatgccttttgaatgtaatgaatgcaagaaagccttcagcctttttattggagcctcaaacattgacatgagaaaaacaccataga

SEQ ID NO: 742429 - DNA, 120 bp, Artificial Sequence
  ENSG00000204514_28 (sequence is synthesized)
tgtatatggaatgttatttctttttcaatgtaaccctttgagagtgccacctacctagattgaatgtcatttattgagcatctgcaaaagttccaagtgtgtggcagctacagtgcattt

SEQ ID NO: 742430 - DNA, 120 bp, Artificial Sequence
  ENSG00000204514_29 (sequence is synthesized)
ttcactatacccaggtaccttgctagattttttttgagacaggttgtcactgtgtcgctcaggatggcgtgcagtggtgtgttcacatttcactgcacccttgatctgggcttaagtgat

SEQ ID NO: 742431 - DNA, 120 bp, Artificial Sequence
  ENSG00000204514_30 (sequence is synthesized)
tctgggcttaagtgattctgttgcctcggcctcctgagtagctgaaaccacaggcatgcactaccatgctccactaatttttttaagttttggagagacagggtctcaccatgttgccca

SEQ ID NO: 742432 - DNA, 120 bp, Artificial Sequence
  ENSG00000204514_31 (sequence is synthesized)
cccaggctggtcttaaactcctggctcaagcgatccttccaccttggcctccaaacatgctgggattacaggtgtgagttactgtgcctggccttttttttttttttttttaacttttaa

SEQ ID NO: 742433 - DNA, 120 bp, Artificial Sequence
  ENSG00000204514_32 (sequence is synthesized)
ggatttgttgagtagcttcagcacttcttcctttgtcatttttttctgtctgataagtcatgccatggacgttacccatttttatcccagaggcctcttacgttgacttgaaaagacgga

SEQ ID NO: 742434 - DNA, 120 bp, Artificial Sequence
  ENSG00000204514_33 (sequence is synthesized)
ctatgtctttcagagatcttgtgggtatcacatcaatcttgacaaattttctaccctccaagtcatgatcctaagaacagcttgcctcccatttctccggtttgtgctattatgaaggcc

SEQ ID NO: 742435 - DNA, 120 bp, Artificial Sequence
  ENSG00000204514_34 (sequence is synthesized)
ttattgtttcagccttcttcaatcttgagggttgttgtcactgtatgggtggttcagaaataagtaggtcctgttactatgaagggggtcacagcttttgttggcatagctaaactttgt

SEQ ID NO: 742436 - DNA, 120 bp, Artificial Sequence
  ENSG00000204514_35 (sequence is synthesized)
ggctcatggaacagtatgaatgcagaatgtagctttctccacttgtggactgctttgcatagctgccagaggcctccagagaagaccttcagggctttgtggtctttatctgtagcacgg

SEQ ID NO: 742437 - DNA, 120 bp, Artificial Sequence
  ENSG00000204514_36 (sequence is synthesized)
atactaaaatttgtgggttcataggtcagctggatacagggcattttttgtgacaatttctggcattttttgaacaagacaaaattcttttacgaggtatattgcattgtacttggtacg

SEQ ID NO: 742438 - DNA, 120 bp, Artificial Sequence
  ENSG00000204514_37 (sequence is synthesized)
gctgagggaagtctgttgcccagctcttgcaatgcagacacatgccctgatatccagaattctgtaggataacatcacagattgtaatgctatcaggtgaaattataattttatagaatt

SEQ ID NO: 742439 - DNA, 88 bp, Artificial Sequence
  ENSG00000204514_38 (sequence is synthesized)
attgtaatgctatcaggtgaaattataattttatagaattactttatttataggcagtggaggagacagaataatgtaactgcaactc

SEQ ID NO: 742440 - DNA, 86 bp, Artificial Sequence
  ENSG00000204514_39 (sequence is synthesized)
ctcgaactcctgaccttgtgatctgctgagccaccacgtgcagcgtaatgcatgtcttttaaaagggcatccacaatgatccagtc

SEQ ID NO: 742441 - DNA, 120 bp, Artificial Sequence
  ENSG00000204514_40 (sequence is synthesized)
aatgcatgtcttttaaaagggcatccacaatgatccagtcactacgtatatgatgaatatgcagatacaggaattatcaggacttccataatgatgaatattgtattgttgaggccattg

SEQ ID NO: 742442 - DNA, 120 bp, Artificial Sequence
  ENSG00000204514_41 (sequence is synthesized)
tcagaggaaataatctaaaggttttgtgaattcctgtactcattctgggctgttctcctcaaggtcattcctgcattaacaggaggaagatgatagggagaagggagatctcagttcagt

SEQ ID NO: 742443 - DNA, 120 bp, Artificial Sequence
  ENSG00000204514_42 (sequence is synthesized)
gatgtggcctttgtgaccagccagccacttaatcaggtggaaatggccttagtgccacatcaatatttgctaccgtggaggctagttttcccacttagggcatgagaagaattggtgtag

SEQ ID NO: 742444 - DNA, 120 bp, Artificial Sequence
  ENSG00000204514_43 (sequence is synthesized)
tggtgtagtcagtatagagttgccaaacctgttttccaaaaataatggtaaatctatatttttcttttgaactgcatttttttaattattattattatttattttgagacggagtcttgc

SEQ ID NO: 742445 - DNA, 62 bp, Artificial Sequence
  ENSG00000204514_44 (sequence is synthesized)
gcccgccaccatacccagctaattttttgtatctttactagagatggggtttcaccatgtta

SEQ ID NO: 742446 - DNA, 70 bp, Artificial Sequence
  ENSG00000204514_45 (sequence is synthesized)
attgtaggtgggactggaagcatgtgccaccatgcccggccaagttttgtatttttagtagagacggagt

SEQ ID NO: 742447 - DNA, 120 bp, Artificial Sequence
  ENSG00000204514_46 (sequence is synthesized)
actcctgacctcaggtgatatgcctgcctcagcctcccagagtggtgggaatacaggtgtgagccactgctgccagtctgaagtatattttaaagctgtgatgagttataaatgacattc

SEQ ID NO: 742448 - DNA, 120 bp, Artificial Sequence
  ENSG00000204514_47 (sequence is synthesized)
agtaagctatgcatatttaagctgtagcatgtgataaatcttgagtttcatataatcccatgaaaccattaacatagtcacaataatgaacttaacacctttatatttacttggaacctt

SEQ ID NO: 742449 - DNA, 120 bp, Artificial Sequence
  ENSG00000204514_48 (sequence is synthesized)
tttataaaggctttctttctgttctccagacaaccaatgatttactttgctgtacagtagagtactttccattttctggaatgttagatgagtgatgtaataaagtgtttcctcttataa

SEQ ID NO: 742450 - DNA, 87 bp, Artificial Sequence
  ENSG00000204514_49 (sequence is synthesized)
ttgcaggatctcactctattccccaggctagagtgcgatggcaccatctcggctgattgcaacctccattttccaggaaggctcttt

SEQ ID NO: 742451 - DNA, 120 bp, Artificial Sequence
  ENSG00000204514_50 (sequence is synthesized)
ctcggctgattgcaacctccattttccaggaaggctctttaattccccctgattacaaaggttttgtgtgaacataatttggtgtaataaaaaaaaatttacaccacaagagacaaacat

SEQ ID NO: 742452 - DNA, 120 bp, Artificial Sequence
  ENSG00000204514_51 (sequence is synthesized)
tcaggagcatggacacagcttcctgcttcagttctgtgggtaggttcttggttggtaggtctgaggtgtacatactgccctactcctttcttggagcagccccaacacctgctttactgc

SEQ ID NO: 742453 - DNA, 120 bp, Artificial Sequence
  ENSG00000204514_52 (sequence is synthesized)
aggctcccagggagggattcccagtcagaagcccaccttgttagtcctgtggatgtttgggtgtccttgtccagatttcaggttcctgtgtacccacagtctacttcctttctctagctg

SEQ ID NO: 742454 - DNA, 120 bp, Artificial Sequence
  ENSG00000204514_53 (sequence is synthesized)
ctattttcttatgccttcctgtggcaggaattgccttcacagactacatcactgcctatatagaccagaggctgttcttgcaagaccttctttagaaattctccttgaaatactcagttt

SEQ ID NO: 742455 - DNA, 120 bp, Artificial Sequence
  ENSG00000204514_54 (sequence is synthesized)
actggatggatcagcggacaacacacagaccggtaatctgggtcaatcagttctgccatcccacccagaacagaaaacagcatgaaaaactcactttaaccccctatgaatccatctcca

SEQ ID NO: 742456 - DNA, 120 bp, Artificial Sequence
  ENSG00000204514_55 (sequence is synthesized)
accagactgatcagcactccccacttcccaagcccctacccgccaaattttgaaaactctgatcccagaatgctcagggagactgatttgaataataaaactcctgtctcccgaacagca

SEQ ID NO: 742457 - DNA, 120 bp, Artificial Sequence
  ENSG00000204514_56 (sequence is synthesized)
cttaaaaccacgtggttcgatggctgccgcggctacgctgaggctctccgctcagcagcttcttcttggcacaatcctgaactgggcagaacgtccttcccaaactcgcggaagacaaat

SEQ ID NO: 742458 - DNA, 120 bp, Artificial Sequence
  ENSG00000204514_57 (sequence is synthesized)
ggctcctgtgacaccctgagcttacgtttctttacaaacgatgcttctctgacactctttctgtagaatttctctccaatatgctgcttctggtgctgatgaaggtatgcagtgtcatcc

SEQ ID NO: 742459 - DNA, 120 bp, Artificial Sequence
  ENSG00000204514_58 (sequence is synthesized)
aagttttttccacatgctccactcctgttcagcttctgcttgtgatgagtttcctggtggtcagcaaagtgaaaaacatcctccaagatgaggccacacatttcacaggggtgagccttc

SEQ ID NO: 742460 - DNA, 120 bp, Artificial Sequence
  ENSG00000204514_59 (sequence is synthesized)
ggtgcctcctcatcttttgatccacaccaacaacctgaaagcaagaaaatgctggtcaagtgcaaagtacctccggcgggaaggcacagcccacccacaagtacgtctcacaaattgagg

SEQ ID NO: 742461 - DNA, 120 bp, Artificial Sequence
  ENSG00000204514_60 (sequence is synthesized)
gcccacccacaagtacgtctcacaaattgaggaattaatctatagaaatatttgcaggaacacaatgttggcttcaagttgaagatggggctgctggctgggcatggtggctcacacctg

SEQ ID NO: 742462 - DNA, 120 bp, Artificial Sequence
  ENSG00000204514_61 (sequence is synthesized)
gaggctaaagcaggagaatcatttgaacccagaaggcagaggtttgtagtgagcagtgattacgccactgcaccccagcctggacaacagagtgagactcaatcacaaaaaaaaaaaaaa

SEQ ID NO: 742463 - DNA, 87 bp, Artificial Sequence
  ENSG00000204514_62 (sequence is synthesized)
atcaggtttacaagcatgagccaccatgcctggttcagcatgtcatattctaagcaatacgaaaagaatgaaggccaggtgcagtca

SEQ ID NO: 742464 - DNA, 78 bp, Artificial Sequence
  ENSG00000204514_63 (sequence is synthesized)
ttagctgggcgtggtggtgtgtacatgaacccaggaggcccaagttgcagcgagccaagactgcaccactgcactcca

SEQ ID NO: 742465 - DNA, 120 bp, Artificial Sequence
  ENSG00000204514_64 (sequence is synthesized)
agtcgcttaagaccgaggacagcagacattctgatgttttccacattgacagcactcataaggcctttctccagtatgaactctcctgtgtttaacgagacgggatgcttcagcaaacga

SEQ ID NO: 742466 - DNA, 120 bp, Artificial Sequence
  ENSG00000204514_65 (sequence is synthesized)
tttcccatattcactgcactcataaggcctttctcctgtgtgaactctgatgatgaaggagggtagagcttcgctgaaatgtttttccacatttggtgcattcataaggcctttctccag

SEQ ID NO: 742467 - DNA, 120 bp, Artificial Sequence
  ENSG00000204514_66 (sequence is synthesized)
tgtgaattctcctgtgtttaatgagactggaacattcagaaaaggattttccacattcactgcacttataaggcttttgtccagaatgaactcttttatgaacatgaagcgcagagctgg

SEQ ID NO: 742468 - DNA, 120 bp, Artificial Sequence
  ENSG00000204514_67 (sequence is synthesized)
aaagaaatgatttcccacattcactgcattcatacggcctttctccagtgtgaatcctctgatgtatagtcacgctgtgcttattgccaaataatttcccacatacctcacacgcatatg

SEQ ID NO: 742469 - DNA, 120 bp, Artificial Sequence
  ENSG00000204514_68 (sequence is synthesized)
gcctttctccagtgtgaactctctcatgaaccagaagatgatacttcctgttaaataatttcccacattccctacaattgtaaggtctttccccagtgtgaagtctctggtgttcagtga

SEQ ID NO: 742470 - DNA, 120 bp, Artificial Sequence
  ENSG00000204514_69 (sequence is synthesized)
ggtgggatctgtacctaaatgatttcccacattccttgcactcatagggcctttctccagtatgacctcgctgatggtgaacgaggttgcccttttgaccaaaagatttcccacattctc

SEQ ID NO: 742471 - DNA, 120 bp, Artificial Sequence
  ENSG00000204514_70 (sequence is synthesized)
cacacttgtaaggcctttctccagtgtgaacacgctgatggttaataaagcagaacttctgacgaaaagatttcccacattccccacagtgataagctctctctccagtgtgaccttgct

SEQ ID NO: 742472 - DNA, 120 bp, Artificial Sequence
  ENSG00000204514_71 (sequence is synthesized)
ggctgcccttctgactaaaagatttcccgcactcctcacagggataagctgtctgtccagtgtggactcgctgatgttgaataaggctgctctttcgactataagatttcccacactctc

SEQ ID NO: 742473 - DNA, 120 bp, Artificial Sequence
  ENSG00000204514_72 (sequence is synthesized)
cacaatcataaggtccttttgcagtgtgatctcgctgatgattactgaagctgacatatctgctaaaggattttccacaatcactgcacacataacatccatctctagtgaaaagtttct

SEQ ID NO: 742474 - DNA, 120 bp, Artificial Sequence
  ENSG00000204514_73 (sequence is synthesized)
ggtgtggaataactgagtgtttggtgctgaaggcttttgtgcgttttccacaactgtaattagtttttccctcctgaaagggtgggccatgcatagtttcactgtctgtcttctctacag

SEQ ID NO: 742475 - DNA, 120 bp, Artificial Sequence
  ENSG00000204514_74 (sequence is synthesized)
ggcacttatatcctccctggtctatgcaacaaggtccagccagatgaagcctgtagccaggtagaactgtggtaatatcacctcctgactttgatccgttttatctctaagcatttcaca

SEQ ID NO: 742476 - DNA, 120 bp, Artificial Sequence
  ENSG00000204514_75 (sequence is synthesized)
acctggtagcaaatcctgggttaatcttacaagggtgtttacattggttgacagaaatgggaatacctccatataacctgtcatggacttggtatcctggcttcagagattctccagggt

SEQ ID NO: 742477 - DNA, 120 bp, Artificial Sequence
  ENSG00000204514_76 (sequence is synthesized)
cctcggatcaaaggactgaaaaaaatggcacttaagagtcccaggacaccacaagctagagaacctgtagatggcgtcaggaccaatgagggaatggaacaccctccacttccctgtgtg

SEQ ID NO: 742478 - DNA, 120 bp, Artificial Sequence
  ENSG00000204514_77 (sequence is synthesized)
ggttccctaagtgcttctgcagccaggagtgcctgaggggaaaggcagacattacaaacatgtcacaggatttgataagctcaggactccctgaaccctttcttgtccctggaaccaggt

SEQ ID NO: 742479 - DNA, 120 bp, Artificial Sequence
  ENSG00000204514_78 (sequence is synthesized)
aaccctaaggctggttgtctgacctgcttttctcagtgcaaaatgtcatctctaccatctatgtgatctacaaaacggattcaacctcccaaggccccaaagtcctcatcctctctctct

SEQ ID NO: 742480 - DNA, 120 bp, Artificial Sequence
  ENSG00000204514_79 (sequence is synthesized)
tttggatcatgtccctcctttcttcaaaactctccatggcttctagaatcctcatgatgaatgcacagcccctggcctgcttgctctaccaggaagagctccatctcacacgttgttcct

SEQ ID NO: 742481 - DNA, 120 bp, Artificial Sequence
  ENSG00000204514_80 (sequence is synthesized)
gacagatgcctgtgaaccccaggttccatccttccagctctgtccatctgcaggccattgcctgcacccctacctgtgcctgtcactctccccactgcatcccactggtgtcagaaacag

SEQ ID NO: 742482 - DNA, 78 bp, Artificial Sequence
  ENSG00000204514_81 (sequence is synthesized)
aacctttcagccgtcttttttcattcctgggcataggctgaattaactttggaaaagaattcagttcatggtttcact

SEQ ID NO: 742483 - DNA, 120 bp, Artificial Sequence
  ENSG00000204514_82 (sequence is synthesized)
tgaattaactttggaaaagaattcagttcatggtttcactctgaaacaaaattgataatagccctttcctgaaaagacccctttcttgcctggggaccagcctgtctttgcaggactaac

SEQ ID NO: 742484 - DNA, 120 bp, Artificial Sequence
  ENSG00000204514_83 (sequence is synthesized)
aaattagctacaagaatagaaattacggtttaggggtcatgcagcttctggctccaagagtctgaacctccccaagttgctcctgaagataaccttactattgtaaaacctaatgtgagt

SEQ ID NO: 742485 - DNA, 120 bp, Artificial Sequence
  ENSG00000204514_84 (sequence is synthesized)
tcttcagcagcattccatgggttgctcagggagatcacactcccttgaagcagtggagcataatcaaacatcttggctcctcctgaaacccgcagccacccgtttcagttaagttaaaga

SEQ ID NO: 742486 - DNA, 120 bp, Artificial Sequence
  ENSG00000204514_85 (sequence is synthesized)
tcttaagtagtttagacacacgcctttgttcaaggaaattcacagaaacggccagtgctttacatcttatggaatgactcacgagttctcctttactgattaatccttttcctgatcgct

SEQ ID NO: 742487 - DNA, 120 bp, Artificial Sequence
  ENSG00000204514_86 (sequence is synthesized)
tcctccccctccaatcagccataagaacaaagagcttgtaaaccaataaactgggtggagcccaagagctctgggccgccaggaagcctccaatgctctggccacctggacccgcctttt

SEQ ID NO: 742488 - DNA, 120 bp, Artificial Sequence
  ENSG00000204514_87 (sequence is synthesized)
atacttggcaaatgtaaatggtttctggtatgatttggataaacccctgaagtcatgccctcccccagcatggcactcctgagggacaggctccctttgagcctatcgtgatgagcctga

SEQ ID NO: 742489 - DNA, 120 bp, Artificial Sequence
  ENSG00000204514_88 (sequence is synthesized)
attgaaccacatcttgtcaaacatggaggactctccatctcacacccagtacataggacccgacgatgtaactatgaaaggagagatagcagagatgaacagccaacactagctcaggac

SEQ ID NO: 742490 - DNA, 120 bp, Artificial Sequence
  ENSG00000204514_89 (sequence is synthesized)
cgtgaacccactggacggttacaaggagaggcctcctgtgagcgcctcagtgttcctacgccgggtaccggctacagacccacgagcaggagccgctccctcgctggtttaggacctggg

SEQ ID NO: 742491 - DNA, 120 bp, Artificial Sequence
  ENSG00000204514_90 (sequence is synthesized)
tgacgatggggtgacctgagggcacagaaggcaccacaattacctgagttgggcgcctcggcacagccgctgccatcggactacttggggaagcacggcccgggagcagtggtcgccgtc

SEQ ID NO: 742492 - DNA, 120 bp, Artificial Sequence
  ENSG00000204514_91 (sequence is synthesized)
acggggctgcagagccgcctctgggcaccgaggacgattcctctccaccttctaggttcagtcaccgcggtcccacccagcactcaggggccacaaactggggaaacacccgcatcgccg

SEQ ID NO: 742493 - DNA, 120 bp, Artificial Sequence
  ENSG00000204514_92 (sequence is synthesized)
ccttctttccgagtgctcactggctctgaccggctgtcgtttaaagcagagctttctgggtaatgtagttccccactttccatgacacaacatggttaccaggttctgaaatgttcatgg

SEQ ID NO: 742494 - DNA, 120 bp, Artificial Sequence
  ENSG00000204514_93 (sequence is synthesized)
ctcagatgcacctccaagcctttgtacctattggttcctctacctgtattactctagctggggtgaagcctgtaatacacagcatttacctgagctaggtccctcagtgtggctgctgcc

SEQ ID NO: 742495 - DNA, 120 bp, Artificial Sequence
  ENSG00000204514_94 (sequence is synthesized)
atcaactgtgggtggagcaggcatcaccccagccagtgcctatgagcctcagacctgccacttgggagcagagatgactactcctcttgtgccttctcagtcccaacccagtactccctg

SEQ ID NO: 742496 - DNA, 120 bp, Artificial Sequence
  ENSG00000204514_95 (sequence is synthesized)
gcctgacaagcatgcccagaaatccctcatcctgggccttgcaactagcgccttctgggtaaagtacttcccagagctctcagccaacaatggtggtatcctccaagagcaaaccgaatg

SEQ ID NO: 742497 - DNA, 120 bp, Artificial Sequence
  ENSG00000204514_96 (sequence is synthesized)
cagaccatgttacattctgagggctgctggaaagccctgctcacacctcaaaggaggaagattattgattctttgtaaaagcatcaaataggtatcacatcagactctaggaagctcatc

SEQ ID NO: 742498 - DNA, 120 bp, Artificial Sequence
  ENSG00000204514_97 (sequence is synthesized)
ctgcacccagagaataaaaatactatttgagatgctcccaaactttacttatctaagtggccatatcattggcatcattcagacttacaatgtgtgcactcagagctgagaacattaagt

SEQ ID NO: 742499 - DNA, 120 bp, Artificial Sequence
  ENSG00000204514_98 (sequence is synthesized)
attgattgctctttaaattcacgtagactgaatcattacagtcagttttgcgagtttcattgttttgttgggaacaaaagaaaattctccataagacatgatgacaggatgggtacaaaa

SEQ ID NO: 742500 - DNA, 120 bp, Artificial Sequence
  ENSG00000204514_99 (sequence is synthesized)
aacagtgagcaaaaatgaataagacctaatatttgctaccataacagggtggctatagtcaaaataatttaattatatatttaaaaataactaaaagagtataactggactgtttataat

SEQ ID NO: 742501 - DNA, 120 bp, Artificial Sequence
  ENSG00000204514_100 (sequence is synthesized)
acagaggataaatgttgaggtgactgagaccccatttaccctatgtgattatcacatatggcatggctacatcaaaatatctaatgtaatctacaaatatatacactactatatacccac

SEQ ID NO: 742502 - DNA, 120 bp, Artificial Sequence
  ENSG00000204514_101 (sequence is synthesized)
tctatgcaacaaggtccagccagatgaagcctgtagccaggtagaactgtgaaatgggaatacctccatataacctgtcatggacttggtatcctggcttcagagattctccagggtcct

SEQ ID NO: 742503 - DNA, 120 bp, Artificial Sequence
  ENSG00000204516_0 (sequence is synthesized)
attcagttggccactgctgagcagctgagaaggtggcgacgtaggggccatggggctgggccgggtcctgctgtttctggccgtcgccttcccttttgcacccccggcagccgccgctga

SEQ ID NO: 742504 - DNA, 120 bp, Artificial Sequence
  ENSG00000204516_1 (sequence is synthesized)
gccccacagtcttcgttacaacctcatggtgctgtcccaggatggatctgtgcagtcagggtttctcgctgagggacatctggatggtcagcccttcctgcgctatgacaggcagaaacg

SEQ ID NO: 742505 - DNA, 120 bp, Artificial Sequence
  ENSG00000204516_2 (sequence is synthesized)
cagggcaaagccccagggacagtgggcagaaaatgtcctgggagctaagacctgggacacagagaccgaggacttgacagagaatgggcaagacctcaggaggaccctgactcatatcaa

SEQ ID NO: 742506 - DNA, 120 bp, Artificial Sequence
  ENSG00000204516_3 (sequence is synthesized)
ggaccagaaaggaggcttgcattccctccaggagattagggtctgtgagatccatgaagacagcagcaccaggggctcccggcatttctactacgatggggagctcttcctctcccaaaa

SEQ ID NO: 742507 - DNA, 120 bp, Artificial Sequence
  ENSG00000204516_4 (sequence is synthesized)
cctggagactcaagaatcgacagtgccccagtcctccagagctcagaccttggctatgaacgtcacaaatttctggaaggaagatgccatgaagaccaagacacactatcgcgctatgca

SEQ ID NO: 742508 - DNA, 120 bp, Artificial Sequence
  ENSG00000204516_5 (sequence is synthesized)
ggcagactgcctgcagaaactacagcgatatctgaaatccggggtggccatcaggagaacagtgccccccatggtgaatgtcacctgcagcgaggtctcagagggcaacatcaccgtgac

SEQ ID NO: 742509 - DNA, 120 bp, Artificial Sequence
  ENSG00000204516_6 (sequence is synthesized)
atgcagggcttccagcttctatccccggaatatcacactgacctggcgtcaggatggggtatctttgagccacaacacccagcagtggggggatgtcctgcctgatgggaatggaaccta

SEQ ID NO: 742510 - DNA, 120 bp, Artificial Sequence
  ENSG00000204516_7 (sequence is synthesized)
ccagacctgggtggccaccaggattcgccaaggagaggagcagaggttcacctgctacatggaacacagcgggaatcacggcactcaccctgtgccctctgggaaggcgctggtgcttca

SEQ ID NO: 742511 - DNA, 120 bp, Artificial Sequence
  ENSG00000204516_8 (sequence is synthesized)
gagtcaacggacagactttccatatgtttctgctgctatgccatgttttgttattattattattctctgtgtcccttgttgcaagaagaaaacatcagcggcagagggtccagagcttgt

SEQ ID NO: 742512 - DNA, 120 bp, Artificial Sequence
  ENSG00000204516_9 (sequence is synthesized)
gagcctgcaggtcctggatcaacacccagttgggacaggagaccacagggatgcagcacagctgggatttcagcctctgatgtcagctactgggtccactggttccactgagggcaccta

SEQ ID NO: 742513 - DNA, 120 bp, Artificial Sequence
  ENSG00000204516_10 (sequence is synthesized)
ggccaggattcaactccctgcctggatctcaccagcactttccctctgtttcctgacctatgaaacagagaaaataacatcacttatttattgttgttggatgctgcaaagtgttagtag

SEQ ID NO: 742514 - DNA, 120 bp, Artificial Sequence
  ENSG00000204516_11 (sequence is synthesized)
gtatgaggtgtttgctgctctgccacgtagagagccagcaaagggatcatgaccaactcaacattccattggaggctatatgatcaaacagcaaattgtttatcatgaatgcaggatgtg

SEQ ID NO: 742515 - DNA, 120 bp, Artificial Sequence
  ENSG00000204516_12 (sequence is synthesized)
ggcaaactcacgactgctcctgccaacagaaggtttgctgagggcattcactccatggtgctcattggagttatctactgggtcatctagagcctattgtttgaggaatgcagtcttaca

SEQ ID NO: 742516 - DNA, 120 bp, Artificial Sequence
  ENSG00000204516_13 (sequence is synthesized)
agcctactctggacccagcagctgactccttcttccacccctcttcttgctatctcctataccaataaatacgaagggctgtggaagatcagagcccttgttcacgagaagcaagaagcc

SEQ ID NO: 742517 - DNA, 120 bp, Artificial Sequence
  ENSG00000204516_14 (sequence is synthesized)
ccctgaccccttgttccaaatatactcttttgtctttctctttattcccacgttcgccctttgttcagtccaatacagggttgtggggcccttaacagtgccatattaattggtatcatt

SEQ ID NO: 742518 - DNA, 65 bp, Artificial Sequence
  ENSG00000204516_15 (sequence is synthesized)
tctgcctcccaggttcaagcacttctcgtacctcagactcccgaatagctgggattacagacaag

SEQ ID NO: 742519 - DNA, 120 bp, Artificial Sequence
  ENSG00000204516_16 (sequence is synthesized)
tggcatcccaaagtgctgggattacaagaatgagccaccgtgcctggcctattttattatattgtaatatattttattatattagccaccatgcctgtcctattttcttatgttttaata

SEQ ID NO: 742520 - DNA, 120 bp, Artificial Sequence
  ENSG00000204516_17 (sequence is synthesized)
ccatgcctgtcctattttcttatgttttaatatattttaatatattacatgtgcagtaattagattatcatgggtgaactttatgagtgagtatcttggtgatgactcctcctgaccagc

SEQ ID NO: 742521 - DNA, 120 bp, Artificial Sequence
  ENSG00000204516_18 (sequence is synthesized)
ccaggaccagctttcttgtcaccttgaggtcccctcgccccgtcacaccgttatgcattactctgtgtctactattatgtgtgcataatttataccgtaaatgtttactctttaaataga

SEQ ID NO: 742522 - DNA, 120 bp, Artificial Sequence
  ENSG00000204516_19 (sequence is synthesized)
agggacctgtctcttcccgctggatctggctgggggtggggatgaggaatagggtcagggaggctcagcagggtggtgagccggaactcagcccacacagggaggcatggaggagggcca

SEQ ID NO: 742523 - DNA, 120 bp, Artificial Sequence
  ENSG00000204518_0 (sequence is synthesized)
atggctgtcccctggctagtgctactcttggcattgcccatctttttcctgggggtctttgtctgggctgtctttgagcacttcctcaccacggatatccctgctaccttgcagcatcct

SEQ ID NO: 742524 - DNA, 120 bp, Artificial Sequence
  ENSG00000204518_1 (sequence is synthesized)
gccaagttgagattcctgcattgcatattcctctacctggtcactttggggaatatatttgagaagctgggaatttgctccatgcccaaatttattcgttttttacatgatagcgtgaga

SEQ ID NO: 742525 - DNA, 120 bp, Artificial Sequence
  ENSG00000204518_2 (sequence is synthesized)
attaaaaaggaccctgaacttgtggtgaccgacctgcgttttgggacgatacccgtgaggctgttccagccgaaggcagcatcctccagaccccggcgaggcatcatcttctaccatgga

SEQ ID NO: 742526 - DNA, 120 bp, Artificial Sequence
  ENSG00000204518_3 (sequence is synthesized)
ggggccacagtatttgggagcctggattgttaccatggcctgtgcaattatctggcccgggagactgaatctgtacttctgatgattgggtaccgcaagcttcctgaccaccattcccct

SEQ ID NO: 742527 - DNA, 120 bp, Artificial Sequence
  ENSG00000204518_4 (sequence is synthesized)
gcccttttccaagactgcatgaatgcctccattcacttcctgaaggccctggaaacctatggggtggacccctccagggttgtggtctgtggagaaagcgtcggaggtgcagcggtggcc

SEQ ID NO: 742528 - DNA, 120 bp, Artificial Sequence
  ENSG00000204518_5 (sequence is synthesized)
gccatcacccaggccttggtgggcagatcagatcttccccggatccgggctcaggttctgatttatccagttgtccaggcattctgtttgcagttgccatcctttcagcagaaccaaaat

SEQ ID NO: 742529 - DNA, 120 bp, Artificial Sequence
  ENSG00000204518_6 (sequence is synthesized)
cggaagttcatggtgacttctctgtgtaactatctggccattgacctctcctggcgtgacgccatcttgaacggcacttgtgtacccccagacgtctggaggaagtacgagaagtggctc

SEQ ID NO: 742530 - DNA, 120 bp, Artificial Sequence
  ENSG00000204518_7 (sequence is synthesized)
agccctgacaacatccccaagaaatttaagaacagaggctaccaaccctggtctcccggcccttttaatgaagctgcctatctagaagccaaacatatgctggatgtagaaaattcaccc

SEQ ID NO: 742531 - DNA, 120 bp, Artificial Sequence
  ENSG00000204518_8 (sequence is synthesized)
ctgatagcagatgatgaggtcatcgctcagcttcctgaggccttcctggtgagctgtgagaatgacatactccgtgatgacagcttgctctataagaagcgcttggaggaccagggggtc

SEQ ID NO: 742532 - DNA, 120 bp, Artificial Sequence
  ENSG00000204518_9 (sequence is synthesized)
cgcgtgacatggtaccacctgtatgatggttttcacggatccattatcttttttgataagaaggctctctctttcccatgttccctgaagattgtgaatgctgtagtcagttatataaag

SEQ ID NO: 742533 - DNA, 120 bp, Artificial Sequence
  ENSG00000204518_10 (sequence is synthesized)
ggcatatgatagtaaccctggggccccgaggaggaaggggcaagtatggactctaccagaaaccgggtgctttagtgagttctattttattgactaaagaggtgctacatcaatgcttgg

SEQ ID NO: 742534 - DNA, 120 bp, Artificial Sequence
  ENSG00000204518_11 (sequence is synthesized)
ggcagctgggaagggtgagaagtaagctaacagtcttgcttagtattcaagaaaatccaaactgtgtctgtttccttccagcactaacaatgtccattgctggatctagcgacattctct

SEQ ID NO: 742535 - DNA, 120 bp, Artificial Sequence
  ENSG00000204518_12 (sequence is synthesized)
aacattcccatttaggtgaaataaatatcaaaaggagaaaaaaatgcctttaaaaatttctcaaagccccaacatataagatctgtgcagaataaatgccaacaactggtcataccgtca

SEQ ID NO: 742536 - DNA, 120 bp, Artificial Sequence
  ENSG00000204519_0 (sequence is synthesized)
ggaacttccggcgtcctcctcgtggcggtcattttggcctctgtcctgtttgtccagcccgccagtttctgcagtggaggtcgcgactgagggacgggacagagaagtcgcgaaagtggg

SEQ ID NO: 742537 - DNA, 120 bp, Artificial Sequence
  ENSG00000204519_1 (sequence is synthesized)
ccagaggttctgcgacaccacctcgggtgagctgcgccaggcccgggatagggactgttgtgttcgaatgcccgccccggtcggccgccgctccccgcctagtccacggagctcaatggc

SEQ ID NO: 742538 - DNA, 120 bp, Artificial Sequence
  ENSG00000204519_2 (sequence is synthesized)
ggcagtcgcgctgagggactcggctcagggtatgacctttgaggatgtggccatttatttctcccaagaagagtgggagctccttgatgagtctcagaggttcctgtactgcgatgtgat

SEQ ID NO: 742539 - DNA, 120 bp, Artificial Sequence
  ENSG00000204519_3 (sequence is synthesized)
gctggagaactttgcacatgtaacatccctgggttattgccatggaatggagaatgaggcgatagcttctgagcagagtgtatctatacaggtcaggacttctaagggcaatacacccac

SEQ ID NO: 742540 - DNA, 120 bp, Artificial Sequence
  ENSG00000204519_4 (sequence is synthesized)
ccagaaaactcacctcagtgagattaagatgtgtgtcccagtcttgaaagacattttgcctgcggctgagcaccaaaccacatcccctgtgcaaaagtcatacttgggtagcacaagcat

SEQ ID NO: 742541 - DNA, 120 bp, Artificial Sequence
  ENSG00000204519_5 (sequence is synthesized)
gagaggcttctgcttcagtgctgaccttcaccagcatcaaaagcattacaatgaagaagagccctggaaaaggaaggtggatgaggctacatttgtgaccggctgcagattccatgtgtt

SEQ ID NO: 742542 - DNA, 120 bp, Artificial Sequence
  ENSG00000204519_6 (sequence is synthesized)
gaattatttcacctgtggggaggccttcccagcccccacggacctactccaacacgaagccactcccagtggtgaggagccacacagtagcagcagcaagcatatacaggcatttttcaa

SEQ ID NO: 742543 - DNA, 120 bp, Artificial Sequence
  ENSG00000204519_7 (sequence is synthesized)
tgcaaaaagttattacaagtggggtgaatacagaaaagcttcaagccacaaacacacacttgttcagcatcagagtgtctgttctgaaggagggctttatgagtgtagcaaatgtgagaa

SEQ ID NO: 742544 - DNA, 120 bp, Artificial Sequence
  ENSG00000204519_8 (sequence is synthesized)
agccttcacttgcaagaacacacttgttcagcaccagcaaattcacactggacaaaagatgtttgagtgtagtgaatgtgaggaatcctttagcaaaaagtgccacctaatcttacacaa

SEQ ID NO: 742545 - DNA, 120 bp, Artificial Sequence
  ENSG00000204519_9 (sequence is synthesized)
gataattcacactggagaaaggccttatgaatgcagtgatcgtgagaaagcctttatccataaatctgaattcattcaccaccagagacgtcacactggaggagtgcgtcatgagtgtgg

SEQ ID NO: 742546 - DNA, 120 bp, Artificial Sequence
  ENSG00000204519_10 (sequence is synthesized)
tgaatgtaggaaaacctttagctacaaatctaacctcattgaacaccagagagttcacactggagaaaggccttatgaatgtggcgagtgcgggaaatcctttagacaaagctctagcct

SEQ ID NO: 742547 - DNA, 120 bp, Artificial Sequence
  ENSG00000204519_11 (sequence is synthesized)
ttttcgacaccagagagttcactctggagaaaggccttatcagtgctgtgagtgtgggaaatcctttagacaaatcttcaatctcattcgacatagaagagttcacactggagaaatgcc

SEQ ID NO: 742548 - DNA, 120 bp, Artificial Sequence
  ENSG00000204519_12 (sequence is synthesized)
ttatcagtgcagtgattgtgggaaatcttttagctgcaaatcggaactcattcaacaccagagaattcacagtggagaaagaccttatgaatgcagagaatgtgggaaatcctttagaca

SEQ ID NO: 742549 - DNA, 120 bp, Artificial Sequence
  ENSG00000204519_13 (sequence is synthesized)
attctctaacctcattcgacaccgcagcattcacactggtgataggccttatgagtgcagtgaatgtgagaaatcctttagccgcaaatttatcctgattcaacaccaaagagttcacac

SEQ ID NO: 742550 - DNA, 120 bp, Artificial Sequence
  ENSG00000204519_14 (sequence is synthesized)
tggagaaagaccttatgaatgcagtgaatgtggaaaatcctttacccgcaaatctgacctcattcaacaccggagaattcatactggcacaagaccttatgagtgcagtgaatgtggcaa

SEQ ID NO: 742551 - DNA, 120 bp, Artificial Sequence
  ENSG00000204519_15 (sequence is synthesized)
atcttttagacagcgctctggcctcattcagcaccggagacttcatactggagaaaggccttatgaatgtagtgaatgtggaaagtcttttagccaaagtgctagcctcattcaacacca

SEQ ID NO: 742552 - DNA, 120 bp, Artificial Sequence
  ENSG00000204519_16 (sequence is synthesized)
gagagttcacactggagaaaggccttatgaatgtagtgaatgtgggaaatcctttagccagagctctagcctcattcaacaccagagaggtcacactggagaaagaccttatgagtgcag

SEQ ID NO: 742553 - DNA, 120 bp, Artificial Sequence
  ENSG00000204519_17 (sequence is synthesized)
tcaatgtgggaaaccctttacccacaaatcagaccttattcagcaccaaagagttcacactggagaaaggccttatgaatgcagtgaatgtgggaaatcctttagccgcaaatctaacct

SEQ ID NO: 742554 - DNA, 120 bp, Artificial Sequence
  ENSG00000204519_18 (sequence is synthesized)
cattcgacatcggagagttcacactgaagaaaggccttaaatgtgaagggaatgtgctatttctttattcagtataatagcactggaggagactgtggtagccatcttcgtaaatttaaa

SEQ ID NO: 742555 - DNA, 120 bp, Artificial Sequence
  ENSG00000204519_19 (sequence is synthesized)
ctttgagcacccacagtggggtattcttcataagtttcaggtatgtgggaagctctgaggaggttcattgtaatttctaatctgccgaggcctatagcctgatttatgtcactgccaatt

SEQ ID NO: 742556 - DNA, 120 bp, Artificial Sequence
  ENSG00000204519_20 (sequence is synthesized)
tctgaggctgaagccatttcacatttcacccctaccacctggcaggtgcacaccatgtgcatgagtcacttccccacagtgctcagagaagcaaacctctgtactctcccatttgcttgg

SEQ ID NO: 742557 - DNA, 120 bp, Artificial Sequence
  ENSG00000204519_21 (sequence is synthesized)
ggaaattattaatagcccaagcatgtagggtcttcatgtcttttctctgactttagagtatacacctgacccagttgtggtccagagaatctgagttgtgctgtcagctttctaaggatt

SEQ ID NO: 742558 - DNA, 120 bp, Artificial Sequence
  ENSG00000204519_22 (sequence is synthesized)
acttttttaaggaacattgtcggtctcacatgatgcttgtaatgaatttttccacattctgattcaccagcctggaaactgcttggtgcacattgctttaatttataatgtttttataaa

SEQ ID NO: 742559 - DNA, 120 bp, Artificial Sequence
  ENSG00000204519_23 (sequence is synthesized)
ggttttaaaaaaatttacgcacctttaatcttgggtgttctattcattgcatagaatgacttgtaagcagaatagtgatgtcagcatgaaggggtgaatagattttgtggagatctcaaa

SEQ ID NO: 742560 - DNA, 120 bp, Artificial Sequence
  ENSG00000204519_24 (sequence is synthesized)
ctttctgtactcagaagggacaatgtgatggcagaagacagctctttgttctgtattgctctaattggcctgctgcccaaggcctcaaagtaaagactgccaggctttgtgttcctgtat

SEQ ID NO: 742561 - DNA, 120 bp, Artificial Sequence
  ENSG00000204519_25 (sequence is synthesized)
tgtggcctggtgccatttttgtcaggtcagaggtcaccatgaaaaggaggcagttgtgacaatccccagtgcttctgtgaacgtgaattttgttcagttgtccacaggagatccacataa

SEQ ID NO: 742562 - DNA, 120 bp, Artificial Sequence
  ENSG00000204519_26 (sequence is synthesized)
ttcctagcactggtgaggggaatctgttgcccaggtcctgcaaaggagccaggtgccatggcatataagtcagtgtagactggtgccatttgttgtcagactataggtgtggaggtgaaa

SEQ ID NO: 742563 - DNA, 120 bp, Artificial Sequence
  ENSG00000204519_27 (sequence is synthesized)
ttacaggttcaacagtaattgggacagaaactccaggtaaatggggagtggagaagactgcagtaaattagatggaatgactcttctaaaagttcatctacaaattttccagtgaatatg

SEQ ID NO: 742564 - DNA, 120 bp, Artificial Sequence
  ENSG00000204519_28 (sequence is synthesized)
gttgtgtaggatcagtgcatacagaaattctcaggatcttctgtttactatcgctgagatcattatcagaaaatagtctggccgggcatggtgtaatcctaacactttgggaggccaagg

SEQ ID NO: 742565 - DNA, 120 bp, Artificial Sequence
  ENSG00000204519_29 (sequence is synthesized)
aaagaaaatagtctataaaggttttgtggctccttgtatcctgtctgggctgttcacctcaaggccattgctatgcaggtaggagaacaagaatagagagaaggatcattccgcggtcca

SEQ ID NO: 742566 - DNA, 120 bp, Artificial Sequence
  ENSG00000204519_30 (sequence is synthesized)
gggatgtggcttttgtgactcagccaacattcctattaattcaggtggcaacagccttcattgcttgccaaaatttgctgcccctgaggcaaggttgcctctctcagggcatgaggagag

SEQ ID NO: 742567 - DNA, 120 bp, Artificial Sequence
  ENSG00000204519_31 (sequence is synthesized)
agagagatggtgaagtccatatcaggttgccaccctgattaaaaaaaaaggaacatctaggctcttaattttgagccactttttaaagctttttgaaggtctaatttgtataactgacat

SEQ ID NO: 742568 - DNA, 120 bp, Artificial Sequence
  ENSG00000204519_32 (sequence is synthesized)
gcaacaaagtacacgtatccaaagtgtacagtttggtaaagccatgaaaccatcattacaaccataaaaatgaatttgtgtgtcacccatatatttaccttgtatctttttataatcttt

SEQ ID NO: 742569 - DNA, 120 bp, Artificial Sequence
  ENSG00000204519_33 (sequence is synthesized)
tctttttataatctttctcccttccccagctcttcaggttcaactgatttcctttacagtaaattagtttgcattttctggagtttttactgagatacatacacacacacacacacacac

SEQ ID NO: 742570 - DNA, 120 bp, Artificial Sequence
  ENSG00000204519_34 (sequence is synthesized)
gcatatacgtatacgtatatatatacatatgtgtttatatatgtgtgtgtgtatatatatatacttactggttttcttcatgctgtataattattttgagattcaaaaatgatgaatctt

SEQ ID NO: 742571 - DNA, 120 bp, Artificial Sequence
  ENSG00000204519_35 (sequence is synthesized)
tgtattgctgagtatcatgctgttctatggataagtcagtgtttatccatgtgtttagggacatttatattatttatagatttttgtatattacaaataaagctgctgtaaatacttgaa

SEQ ID NO: 742572 - DNA, 120 bp, Artificial Sequence
  ENSG00000204519_36 (sequence is synthesized)
tctgagagagaaatgctggcttcaggagagctcaagtcagaggatcccagcagggattttatacccttctggggtaacacagttgagccagagtgcctacctaatcatgtatgccaacca

SEQ ID NO: 742573 - DNA, 120 bp, Artificial Sequence
  ENSG00000204520_0 (sequence is synthesized)
actgcttgagccgctgagagggtggcgacgtcggggccatggggctgggcccggtctttctgcttctggctggcatcttcccttttgcacctccgggagctgctgctgagccccacagtc

SEQ ID NO: 742574 - DNA, 120 bp, Artificial Sequence
  ENSG00000204520_1 (sequence is synthesized)
ttcgttataacctcacggtgctgtcctgggatggatctgtgcagtcagggtttcttgctgaggtacatctggatggtcagcccttcctgcgctatgacaggcagaaatgcagggcaaagc

SEQ ID NO: 742575 - DNA, 120 bp, Artificial Sequence
  ENSG00000204520_2 (sequence is synthesized)
cccagggacagtgggcagaagatgtcctgggaaataagacatgggacagagagaccagggacttgacagggaacggaaaggacctcaggatgaccctggctcatatcaaggaccagaaag

SEQ ID NO: 742576 - DNA, 120 bp, Artificial Sequence
  ENSG00000204520_3 (sequence is synthesized)
aaggcttgcattccctccaggagattagggtctgtgagatccatgaagacaacagcaccaggagctcccagcatttctactacgatggggagctcttcctctcccaaaacctggagactg

SEQ ID NO: 742577 - DNA, 120 bp, Artificial Sequence
  ENSG00000204520_4 (sequence is synthesized)
aggaatggacagtgccccagtcctccagagctcagaccttggccatgaacgtcaggaatttcttgaaggaagatgccatgaagaccaagacacactatcacgctatgcatgcagactgcc

SEQ ID NO: 742578 - DNA, 120 bp, Artificial Sequence
  ENSG00000204520_5 (sequence is synthesized)
gtgccccccatggtgaatgtcacccgcagcgaggcctcagagggcaacatcaccgtgacatgcagggcttccagcttctatccccggaatatcatactgacctggcgtcaggatggggta

SEQ ID NO: 742579 - DNA, 120 bp, Artificial Sequence
  ENSG00000204520_6 (sequence is synthesized)
tctttgagccacgacacccagcagtggggggatgtcctgcctgatgggaatggaacctaccagacctgggtggccaccaggatttgccgaggagaggagcagaggttcacctgctacatg

SEQ ID NO: 742580 - DNA, 120 bp, Artificial Sequence
  ENSG00000204520_7 (sequence is synthesized)
gaacacagcgggaatcacagcactcaccctgtgccctctgggaaagtgctggtgcttcagagtcattggcagacattccatgtttctgctgttgctgctggctgctgctatttttgttat

SEQ ID NO: 742581 - DNA, 120 bp, Artificial Sequence
  ENSG00000204520_8 (sequence is synthesized)
tattattttctatgtccgttgttgtaagaagaaaacatcagctgcagagggtccagagctcgtgagcctgcaggtcctggatcaacacccagttgggacgagtgaccacagggatgccac

SEQ ID NO: 742582 - DNA, 120 bp, Artificial Sequence
  ENSG00000204520_9 (sequence is synthesized)
acagctcggatttcagcctctgatgtcagctcttgggtccactggctccactgagggcacctagactctacagccaggcggctggaattgaattccctgcctggatctcacaagcacttt

SEQ ID NO: 742583 - DNA, 120 bp, Artificial Sequence
  ENSG00000204520_10 (sequence is synthesized)
ccctcttggtgcctcagtttcctgacctatgaaacagagaaaataaaagcacttatttattgttgttggaggctgcaaaatgttagtagatatgaggcatttgcagctgtgccatattaa

SEQ ID NO: 742584 - DNA, 120 bp, Artificial Sequence
  ENSG00000204520_11 (sequence is synthesized)
gtatcatttcagtgaaggtcactccagtctttcatggaggccaaactaagggtgtaaattaggatcctcactgaagtggcgggaccctaagaggctttttcctggccccttagttgtggg

SEQ ID NO: 742585 - DNA, 120 bp, Artificial Sequence
  ENSG00000204520_12 (sequence is synthesized)
ttttcctgcgggcggcgcagccggtttccatcagaaccgcccagaggcggacgctgccttcctggggtgacggagcagcaggaagcgttttcggatcctggaatacgtgggcggcccgtg

SEQ ID NO: 742586 - DNA, 120 bp, Artificial Sequence
  ENSG00000204520_13 (sequence is synthesized)
ggaggggctgaggcgcagtttcctactcacccggatccgaatcctccgcggtgctgtttcaagagagccggattccagatcacgctccagcccggactcggaattcctgccctgcgggtc

SEQ ID NO: 742587 - DNA, 120 bp, Artificial Sequence
  ENSG00000204520_14 (sequence is synthesized)
tgcattttcataacgggcaggtgtgagtgccctgcagctggagaccagaagcctgaaggcagctcggccctccccagcccacagcgccgttattccgtttctatatcagtaaacacattt

SEQ ID NO: 742588 - DNA, 120 bp, Artificial Sequence
  ENSG00000204520_15 (sequence is synthesized)
acacatttcattttccgtagaccagggcggggtgacgggtgatcccagtcctcgcagtgaattccgggcagcaaaattcaaaacacatgcggccaaggccgggcacggtggttcacgcct

SEQ ID NO: 742589 - DNA, 86 bp, Artificial Sequence
  ENSG00000204520_16 (sequence is synthesized)
agcactttgggaggtcgaggcgggcgatcacctgaggtcgggagctcgagaccaacctgataaaattagacgggcttggtggtgaa

SEQ ID NO: 742590 - DNA, 65 bp, Artificial Sequence
  ENSG00000204520_17 (sequence is synthesized)
ctctactaaaaatataaaattagacgggcttggtggtgtggaggcggaggttgcggtgagccgag

SEQ ID NO: 742591 - DNA, 120 bp, Artificial Sequence
  ENSG00000204520_18 (sequence is synthesized)
actccgtcgcaaaaactttcgggggcggagcggagccccgccctgggttatgtaagcgaccgcgctgggccgtttctctttcttttccggaccctgcagtggcgcctaaagtctgagaga

SEQ ID NO: 742592 - DNA, 120 bp, Artificial Sequence
  ENSG00000204524_0 (sequence is synthesized)
ggttccgtccacgccggctctagggagggggcggtgttccgtggccgcctccctggcggcgctggggaaatgagcaggtaggaggccgacagcgacctccgcgtctcggagcgaaccgtg

SEQ ID NO: 742593 - DNA, 120 bp, Artificial Sequence
  ENSG00000204524_1 (sequence is synthesized)
agcctccccgtaacgagagagtttgactgtcagccaaggtcaccgggcccggcgcagggaaggggtggggctcggctgagcccgcgagacccgccctgctcgccgcagcccccgccccgc

SEQ ID NO: 742594 - DNA, 120 bp, Artificial Sequence
  ENSG00000204524_2 (sequence is synthesized)
tagggccacagggtcccggtatggcgatggctttgacggacccggcgcaggtgtctgtgacctttgatgatgtggctgtgactttcacccaggaggagtggggccagctggacctagctc

SEQ ID NO: 742595 - DNA, 120 bp, Artificial Sequence
  ENSG00000204524_3 (sequence is synthesized)
agcggaccctgtaccaggaggtgatgctggaaaactgtgggctcctggtatctctggggtgtcctgttcccagacctgagctgatctaccacctagagcatgggcaggagccatggacca

SEQ ID NO: 742596 - DNA, 120 bp, Artificial Sequence
  ENSG00000204524_4 (sequence is synthesized)
ggaaggaagacctctcccaaggcacctgtccaggtgacaaaggaaaacccaagagcacagaacctaccacctgtgagctagccttgtctgaaggaatctctttttggggacaactaacac

SEQ ID NO: 742597 - DNA, 120 bp, Artificial Sequence
  ENSG00000204524_5 (sequence is synthesized)
aaggagcttcaggggactcccagttggggcaacccaaggatcaggatgggttttcagaaatgcagggagaacgcttgagaccagggttagattcccaaaaggagaagcttcctggaaaaa

SEQ ID NO: 742598 - DNA, 120 bp, Artificial Sequence
  ENSG00000204524_6 (sequence is synthesized)
tgagccccaaacatgatggtttagggacagctgatagtgtgtgttcaaggattatacaggatcgagtctccttaggagatgatgtccatgactgtgactcacatggatcaggtaaaaatc

SEQ ID NO: 742599 - DNA, 120 bp, Artificial Sequence
  ENSG00000204524_7 (sequence is synthesized)
cagttattcaggaagaggaaaatatctttaaatgcaatgaatgtgaaaaagtgtttaacaagaaacgcctgcttgctcggcatgagaggattcactctggagtgaagccctatgaatgca

SEQ ID NO: 742600 - DNA, 120 bp, Artificial Sequence
  ENSG00000204524_8 (sequence is synthesized)
cagagtgtggaaaaacctttagcaagagtacatacctcctgcagcaccacatggtccacactggggagaagccctataagtgcatggagtgtgggaaggcttttaatcggaagtcacacc

SEQ ID NO: 742601 - DNA, 120 bp, Artificial Sequence
  ENSG00000204524_9 (sequence is synthesized)
ttacccagcaccagcggattcacagtggagagaagccttataagtgcagtgaatgtggaaaggccttcacccaccgctccacttttgtcttgcataacaggagccacactggagaaaaac

SEQ ID NO: 742602 - DNA, 120 bp, Artificial Sequence
  ENSG00000204524_10 (sequence is synthesized)
cctttgtgtgcaaagagtgtggcaaagcctttcgagataggccaggtttcattcgacactacatcatccacagtggtgagaatccctacgagtgcttcgaatgtggcaaggtcttcaaac

SEQ ID NO: 742603 - DNA, 120 bp, Artificial Sequence
  ENSG00000204524_11 (sequence is synthesized)
acagatcatacctcatgtggcaccagcagactcataccggggagaagccctatgagtgcagtgaatgtgggaaggccttctgtgagagcgcagcgctgattcaccactatgtcatccaca

SEQ ID NO: 742604 - DNA, 120 bp, Artificial Sequence
  ENSG00000204524_12 (sequence is synthesized)
ctggagagaagccctttgagtgcctcgagtgtgggaaggctttcaaccaccgatcctacctcaaaaggcaccagcggattcacactggggagaagccatatgtgtgtagtgaatgcggaa

SEQ ID NO: 742605 - DNA, 120 bp, Artificial Sequence
  ENSG00000204524_13 (sequence is synthesized)
aggccttcacccactgctctactttcatcttgcataaaagggcccacactggagaaaaacctttcgagtgcaaagagtgtgggaaagcctttagcaatagggcagacctcattcgccact

SEQ ID NO: 742606 - DNA, 120 bp, Artificial Sequence
  ENSG00000204524_14 (sequence is synthesized)
tcagcatccacactggagagaagccctatgagtgcatggagtgtggaaaggccttcaaccgcaggtcaggcctcacaaggcaccagcggattcatagtggagagaagccctatgaatgca

SEQ ID NO: 742607 - DNA, 120 bp, Artificial Sequence
  ENSG00000204524_15 (sequence is synthesized)
tcgagtgtgggaaaacattttgctggagcacaaacctcattcgacactctatcatccacactggagagaagccgtatgagtgcagtgaatgtggaaaggccttcagtcgcagctcgtccc

SEQ ID NO: 742608 - DNA, 120 bp, Artificial Sequence
  ENSG00000204524_16 (sequence is synthesized)
tcactcagcatcaaaggatgcatactgggagaaatcctatcagtgtaacagatgtgggaagaccttttacaagtgggcagacctcagtcaacatccaagaacttttattggggaaaaact

SEQ ID NO: 742609 - DNA, 120 bp, Artificial Sequence
  ENSG00000204524_17 (sequence is synthesized)
ttttgaatgtcaccactgaggaaaatcttttgcaagaggaagcatcttacatggcatctgatcgtacataccaaagagaaaccccacaagtgtcttcactgtgagaaaaccttctgttgc

SEQ ID NO: 742610 - DNA, 120 bp, Artificial Sequence
  ENSG00000204524_18 (sequence is synthesized)
caaatgtcatttgtcacctaaggagtcatattagaaaatcacgcagcttagagccttattctccatccgaattcatcctggaaaaacacccagtggttattacgcacttgggaaaacctt

SEQ ID NO: 742611 - DNA, 120 bp, Artificial Sequence
  ENSG00000204524_19 (sequence is synthesized)
tagctccatctttctcattagtttacagtgcaatgttatctcaggaatttttataaacagaaagaggtgacatagaaaagaaaatgaaatgcagacactgcttttatactgttgtcttgt

SEQ ID NO: 742612 - DNA, 120 bp, Artificial Sequence
  ENSG00000204524_20 (sequence is synthesized)
atgtacatttctgtcctgtgtcaggaaagttagtaagggaaggtctggaaacttactcaatgtctttgttctacaacattgtctcttcttaagaagcattgtttttatgagaaataatga

SEQ ID NO: 742613 - DNA, 120 bp, Artificial Sequence
  ENSG00000204524_21 (sequence is synthesized)
agccttgagttatgaaatacttttatatttaaggattaaaagaaacatgaatgcgcacattttattgtaccacttaatactgtttaggtctttgattttttaaaaaaattcttttttaat

SEQ ID NO: 742614 - DNA, 120 bp, Artificial Sequence
  ENSG00000204524_22 (sequence is synthesized)
gggttttaaacactaacactgagaatttttcttgattcccatctgttggtttacttgattgctatagctgtatggtaaatctcaaaattaggtaatgtgatttcttttttcttactattt

SEQ ID NO: 742615 - DNA, 120 bp, Artificial Sequence
  ENSG00000204524_23 (sequence is synthesized)
ttatttaaaattcatttagcattcctagtttgactttccatatacactttaggattggtttttctgtttttcaaatattcttgcttggattttgatagaaattgagttaaatctatagat

SEQ ID NO: 742616 - DNA, 120 bp, Artificial Sequence
  ENSG00000204524_24 (sequence is synthesized)
caatgtgttggaaattggcatcttagtcttccaattcatgaacatagcctatcttttcattatttaaattttctttgatatatttcattactgttttatagtttacacagtataactcct

SEQ ID NO: 742617 - DNA, 120 bp, Artificial Sequence
  ENSG00000204524_25 (sequence is synthesized)
gcacatttaaaataagaattatagctgcatagttttttgagtgattgtaaatggcattgatatttaaagtttcaatattcacatgatgttggctagtatacagaaacattattttttcaa

SEQ ID NO: 742618 - DNA, 120 bp, Artificial Sequence
  ENSG00000204524_26 (sequence is synthesized)
tcttattttgctgtcttgcaaccttcctaaactcattatttcttgccatttcttttgggagaatccttaggattttaaatatagaaatgtcatttgcaatttgggacagttttatttctt

SEQ ID NO: 742619 - DNA, 120 bp, Artificial Sequence
  ENSG00000204524_27 (sequence is synthesized)
gcttcccatctgtataccttttatttgcttttctcatgttattgtactaggtaggatttccagtgtgatgttgaatacgaatagtgacaagttatccatgccttgttcctgatattaggg

SEQ ID NO: 742620 - DNA, 120 bp, Artificial Sequence
  ENSG00000204524_28 (sequence is synthesized)
ggaaatgttcagtttctcattattatgatgttgaaagttgcttccaaagagtttctctatcgagtttagaaagtttccctctattcctaatttgctgggatttttttggttattattaat

SEQ ID NO: 742621 - DNA, 120 bp, Artificial Sequence
  ENSG00000204524_29 (sequence is synthesized)
aagtgttgaattttgtcatatgctttttctccaccaattgatttaattatgtgatgttacttctatagtcagttgatatgatgtgttaccttgattgagtttcaagtattgaaccagcct

SEQ ID NO: 742622 - DNA, 120 bp, Artificial Sequence
  ENSG00000204524_30 (sequence is synthesized)
cacatctttgtgataagccctacttgatcatggagtataattttgtttgtgtactatgctacagtatttcatttgctagtattttgttgaggaagctttcctctgatttcatgagtgata

SEQ ID NO: 742623 - DNA, 120 bp, Artificial Sequence
  ENSG00000204524_31 (sequence is synthesized)
atctgtagttttctttcttcaactgttactgtttggttttgatgtctagatgataactaacctcctaacatgaattggaaggaattctcttctgtttttttggaagatcatgtgtagaat

SEQ ID NO: 742624 - DNA, 120 bp, Artificial Sequence
  ENSG00000204524_32 (sequence is synthesized)
tggtgttatttgttcctttaatgtttggtagctttctccagtgaagaagtgggacctggagattttccttttgaatgctttttaattatgtatttattttatttaataggtatagaacta

SEQ ID NO: 742625 - DNA, 120 bp, Artificial Sequence
  ENSG00000204524_33 (sequence is synthesized)
ttcagagtatttcatattggatgaatttttatagattttcttaaggaagtgttcattttatgtaaatgttctaatttgtagcattctttgaaatatttccttttatcctcttgatggcag

SEQ ID NO: 742626 - DNA, 120 bp, Artificial Sequence
  ENSG00000204524_34 (sequence is synthesized)
caggatctgtacttatgttccttgttgtattcttgatattggaaatgtatcacttattattgtcagtctttgtagacatatgtcaatttcattgatcatttcaaagaaatagcactttat

SEQ ID NO: 742627 - DNA, 120 bp, Artificial Sequence
  ENSG00000204524_35 (sequence is synthesized)
atcactgatttttctccagtctctgttcttaatttcactgatatctgctctgatgtgtattgtatcctttctcctacttgctctggttgtatttgactcagtggtttcctgacgtggatg

SEQ ID NO: 742628 - DNA, 120 bp, Artificial Sequence
  ENSG00000204524_36 (sequence is synthesized)
tttaggttattgatttgaggctttttttcttttttaatataagctttaagttctatacatttttcttacactgctgttagtttcatcccacaagtcttaatatgcttttgattatcttac

SEQ ID NO: 742629 - DNA, 120 bp, Artificial Sequence
  ENSG00000204524_37 (sequence is synthesized)
tcagttctaagattgcctgattccttttgagacatcttctctaacccaggaattatttagaagtatattgtttaatagtgtttggagtattccctgctatttgttattgatttctaattt

SEQ ID NO: 742630 - DNA, 120 bp, Artificial Sequence
  ENSG00000204524_38 (sequence is synthesized)
gttttgcatttgatgttactgttgaaatttgttgactttttttccttatgacccaggatataggctgtcttgttttacatagctgcttgaaaagaatgtgtgttctcggtcatttggtgg

SEQ ID NO: 742631 - DNA, 120 bp, Artificial Sequence
  ENSG00000204524_39 (sequence is synthesized)
agtttctgtaaaagtttgtatgatcctgttagttggtggtgttatttaggtctcctgtatccttgctgattttctgtctagtatttctatcaattgccaagagaaggatgttgaagtcct

SEQ ID NO: 742632 - DNA, 120 bp, Artificial Sequence
  ENSG00000204524_40 (sequence is synthesized)
gagctataattgtggaattacctattcctcctttaagttctatcagtttttgctccacataatttaaagctctgttgtttggtatatacacatgtaggtttgcttagtattcttggtgta

SEQ ID NO: 742633 - DNA, 120 bp, Artificial Sequence
  ENSG00000204524_41 (sequence is synthesized)
ttgacccttttataattaagtaatgtccctttttgttcctgttaatactcttatcaatttttatctgatatttgtgtggtcagtcttacgttttggttaatgcttgcatgatttacactt

SEQ ID NO: 742634 - DNA, 120 bp, Artificial Sequence
  ENSG00000204524_42 (sequence is synthesized)
cactgtgtctggccccagtttgcatatttctgtcttttattggtgtatttagaccatttaaagtttacaataattatgttagtgctatgtctgctattttatgattagttttttgtgttt

SEQ ID NO: 742635 - DNA, 120 bp, Artificial Sequence
  ENSG00000204524_43 (sequence is synthesized)
cctgttgcttctttcttggtttgtttgggtttttttttttttgtctttaacattttttagaattccatttgatatatttgtagtgttttttaaatatatttctttgtatttttgtattaa

SEQ ID NO: 742636 - DNA, 120 bp, Artificial Sequence
  ENSG00000204524_44 (sequence is synthesized)
ttttttagtggttgctttaagtagtataatgtacatatgtaacataattacagttaatggtatgaaaaatttagcactttgatgtatagaaaccttacttggtcccttcaccttgcctgt

SEQ ID NO: 742637 - DNA, 120 bp, Artificial Sequence
  ENSG00000204524_45 (sequence is synthesized)
taatataattgtctaaagtaattcctcttcaaaattgagcaccatgttggaaaatgtaatttttgcttccactgtcaaatatattttacaaaagtcacaggaagtattgcttgttgatct

SEQ ID NO: 742638 - DNA, 120 bp, Artificial Sequence
  ENSG00000204524_46 (sequence is synthesized)
ctttacccattccactattctttcttgaaattctaagccaccttctattaacattttctttctgtttggcgaacttgtgtaaccttttttctagggtcagtctgctggtgtctctaaaag

SEQ ID NO: 742639 - DNA, 120 bp, Artificial Sequence
  ENSG00000204524_47 (sequence is synthesized)
tgtctttatgttcccttcattcctgagggatatttttgtgggataataggatttagggtctgcagttcttttagtacttgagaaacatgtttgttccttctgtccgctatggtttcagat

SEQ ID NO: 742640 - DNA, 120 bp, Artificial Sequence
  ENSG00000204524_48 (sequence is synthesized)
gagaaatctgttgccatttgaaccattgttccctagttcataatgtgccatttttatcaacctgcgttcaaagtgttttgttttttttgtagtgttcagaagtttggttatgaggtgtgt

SEQ ID NO: 742641 - DNA, 120 bp, Artificial Sequence
  ENSG00000204524_49 (sequence is synthesized)
gacatggaatttttttgagtgtatcatgtttggtttttgtttagctttttgatttgtcggtttatgccctttgccaaatttgggaatttttaaccattatttcttgaaatattttttcat

SEQ ID NO: 742642 - DNA, 120 bp, Artificial Sequence
  ENSG00000204524_50 (sequence is synthesized)
ccctactctttctcctctctgtgatatgaatggtagagcttttgttactgtctcagaggtctcttgtgctttcatgtttaccccctttttctggtctatttttccctttttttcatattg

SEQ ID NO: 742643 - DNA, 120 bp, Artificial Sequence
  ENSG00000204524_51 (sequence is synthesized)
gttaatttctgttgactttttttcagctcactgattctttttttctgccatatgcagtctactgttgagcttgtccaatgagttttcgttttggtttttgtatttttcagttgtttaatt

SEQ ID NO: 742644 - DNA, 79 bp, Artificial Sequence
  ENSG00000204524_52 (sequence is synthesized)
tttggttcttttgtacatctttgatttctttgcttagtttataatactaaagggctcagaaaacagaaaaaactaaatt

SEQ ID NO: 742645 - DNA, 120 bp, Artificial Sequence
  ENSG00000204524_53 (sequence is synthesized)
tataatactaaagggctcagaaaacagaaaaaactaaattccagagtcatggttttctggtggtttgtctcaatatttgaatagaaatcctaaattatctggaggagtagaagtcctgta

SEQ ID NO: 742646 - DNA, 120 bp, Artificial Sequence
  ENSG00000204524_54 (sequence is synthesized)
atcttttatattgggcttcttaaatatttctgtcaacagatcttatatcagggtgatctgcatatcattcagagttacgtactccacgggaaggttgtatgtaaaatcctccagctctgt

SEQ ID NO: 742647 - DNA, 120 bp, Artificial Sequence
  ENSG00000204524_55 (sequence is synthesized)
aagccttgttatatcctcaatggagaaggggtcattccttttctaagatcactcttacacttttttattagacacacacacacccttccccaaccaaacttgtctaagtcctctgtcttt

SEQ ID NO: 742648 - DNA, 120 bp, Artificial Sequence
  ENSG00000204524_56 (sequence is synthesized)
catactcttgtttagtctttaacttctccttattaaccagcttctttcccataatgtatagctttagtcggatctcaagcctcgtttccaacctatttcacccttccttgcctatcaagc

SEQ ID NO: 742649 - DNA, 120 bp, Artificial Sequence
  ENSG00000204524_57 (sequence is synthesized)
tctggttattctttcttccacacacatgccctgagtaactattctgtgcactgtcgccacccctttacatttccttttactccccagatactactaaatggcttccaccaccgttgcctg

SEQ ID NO: 742650 - DNA, 120 bp, Artificial Sequence
  ENSG00000204524_58 (sequence is synthesized)
acttaagcacgtctcagaaaggtcccttttgaccccctcactctctttttggacctccatactgctaaatctctgacttgaaggtcctttcctggcttctgtgaattcctggcttttttc

SEQ ID NO: 742651 - DNA, 120 bp, Artificial Sequence
  ENSG00000204524_59 (sequence is synthesized)
ctttttagggtctgtgtctttcttccatctgtaaaacagctttacttcccagcatccatcatgatcattgctgttttctaacttgtccttcaccccatgactgagttaatttgcgctgaa

SEQ ID NO: 742652 - DNA, 120 bp, Artificial Sequence
  ENSG00000204524_60 (sequence is synthesized)
gacactttactctcaattatctacagtgtttccctaaatctgtgtctccaggttggatgtttctcatgtcgttaaccactggtcatccttccacaccttttctgtatttgcactcactga

SEQ ID NO: 742653 - DNA, 120 bp, Artificial Sequence
  ENSG00000204524_61 (sequence is synthesized)
gcctatatgcatgtatcatgtggccatgaccttggccgtggggatgcacccataatcatcataagagaacacaaattattactgtgtatcagacattgtttcgaatgttttacatgcgtc

SEQ ID NO: 742654 - DNA, 120 bp, Artificial Sequence
  ENSG00000204524_62 (sequence is synthesized)
agctcttttaacctttatgacaactccataatgttatttcccccctttaactgattagaaaactgaggtacagaaagattaaggaatttgtcaaagatttcacaattatgaaatttgggt

SEQ ID NO: 742655 - DNA, 120 bp, Artificial Sequence
  ENSG00000204524_63 (sequence is synthesized)
ttggggactggaagccactgcactggcttcagaatccatgtccttaaccactttattgcttctcataaggtgggtctttgtttcctggtcatcacttgtttttactaaaatgggtcaaac

SEQ ID NO: 742656 - DNA, 120 bp, Artificial Sequence
  ENSG00000204524_64 (sequence is synthesized)
tgtgctcatttatttataatctactattcttatttgacagtacatcttggccattccttcaagcaaatgagataaaccagactcactctttaatgcctgcataagctattgtgactgtag

SEQ ID NO: 742657 - DNA, 120 bp, Artificial Sequence
  ENSG00000204524_65 (sequence is synthesized)
aaaagacggagaatgtctgggtttgaggatatgtgggaggggtggggagaaggagtagagaagggctaaggcatgcatgttgttttaggtgtgtttgagatgcctgaagaacatcagtgt

SEQ ID NO: 742658 - DNA, 120 bp, Artificial Sequence
  ENSG00000204524_66 (sequence is synthesized)
atccccctaatttctgtcatgttactcaaaccagacacattgtggccatttctttttcctttatcattcccacgtccggccactgccccattcctttttgttccgtagtagaccctcaat

SEQ ID NO: 742659 - DNA, 120 bp, Artificial Sequence
  ENSG00000204524_67 (sequence is synthesized)
atatatgtgtgtgttggtaaatggccatacacagcagggtattttttattattattttcagttccctcagcgcgtttaccacaaagctgtgcatataggtggcaccatatatggcgtacc

SEQ ID NO: 742660 - DNA, 120 bp, Artificial Sequence
  ENSG00000204524_68 (sequence is synthesized)
ttgacctcgaagagaatctacatggacttttatggacctacgtacacaattttagaaatcataataaatgaatgctggagtcctcaagaccccttccagatttgatttgctaggaagact

SEQ ID NO: 742661 - DNA, 120 bp, Artificial Sequence
  ENSG00000204524_69 (sequence is synthesized)
cacaggactcagcattttgtcatactcaatggctatgatttaccacaccgaaagaatccagagcaaactcagcaaaaggctcaaacccaagtccagaggaaaccaggcacaatctttgag

SEQ ID NO: 742662 - DNA, 120 bp, Artificial Sequence
  ENSG00000204524_70 (sequence is synthesized)
aatcttaatgaaatcacacaggatgtgcttcattgaagctccatctgggacttaaaacaacacacgtgagatgtgttccaggaagtcgtcttgagcacccattgctcagagtttatattg

SEQ ID NO: 742663 - DNA, 120 bp, Artificial Sequence
  ENSG00000204524_71 (sequence is synthesized)
gacttgctttctagcacataccacaattgtagacctccagaagaacaggaggtgttcagcgtaagacaatttaggcacacggagctacttctcattactgggaacaatgggaaacttccc

SEQ ID NO: 742664 - DNA, 120 bp, Artificial Sequence
  ENSG00000204524_72 (sequence is synthesized)
aaaacctaaagtacagactccagccaaggatgaaccttgcaagatcaaagaatagcagtctctggcctgctctgttctctttttcacagtaacttaaatggaaaaatgctgagttagctt

SEQ ID NO: 742665 - DNA, 120 bp, Artificial Sequence
  ENSG00000204524_73 (sequence is synthesized)
aagtttctgtaacaaacattaagcaaataaaattttctataacagaaataagccatagctttgagatgaaggcttatatacgtgtaaaccattgtaaccaagaaaaaaaaaaaaagtcag

SEQ ID NO: 742666 - DNA, 120 bp, Artificial Sequence
  ENSG00000204524_74 (sequence is synthesized)
agtcacagtgaaaatacttaacaaactagccaggatttaattcagtgatgacagggaacagaggaagtcttgtgagaaaggatcttgcctctgcctagtatctttcacagataggcttca

SEQ ID NO: 742667 - DNA, 120 bp, Artificial Sequence
  ENSG00000204524_75 (sequence is synthesized)
agtggtttgatttgcagatacaccctttcttggcctttatttcggcaaagatgtgatgggtaggtaaatgccgtgttctttccctagcacgtatgtcagtttctcatccactctttgttc

SEQ ID NO: 742668 - DNA, 120 bp, Artificial Sequence
  ENSG00000204524_76 (sequence is synthesized)
ttgctattgaaagttgtagcttctggctacaacagagatagttgaagaatatggagttcgccataatttatcattaaatgtggataatttgagattaaagaatatgttgttgcaggctta

SEQ ID NO: 742669 - DNA, 120 bp, Artificial Sequence
  ENSG00000204525_0 (sequence is synthesized)
tccccagaggccgagatgcgggtcatggcgccccgagccctcctcctgctgctctcgggaggcctggccctgaccgagacctgggcctgctcccactccatgaggtatttcgacaccgcc

SEQ ID NO: 742670 - DNA, 120 bp, Artificial Sequence
  ENSG00000204525_1 (sequence is synthesized)
gtgtcccggcccggccgcggagagccccgcttcatctcagtgggctacgtggacgacacgcagttcgtgcggttcgacagcgacgccgcgagtccgagaggggagccgcgggcgccgtgg

SEQ ID NO: 742671 - DNA, 120 bp, Artificial Sequence
  ENSG00000204525_2 (sequence is synthesized)
gtggagcaggaggggccggagtattgggaccgggagacacagaagtacaagcgccaggcacaggctgaccgagtgagcctgcggaacctgcgcggctactacaaccagagcgaggacggg

SEQ ID NO: 742672 - DNA, 120 bp, Artificial Sequence
  ENSG00000204525_3 (sequence is synthesized)
tctcacaccctccagaggatgtctggctgcgacctggggcccgacgggcgcctcctccgcgggtatgaccagtccgcctacgacggcaaggattacatcgccctgaacgaggacctgcgc

SEQ ID NO: 742673 - DNA, 120 bp, Artificial Sequence
  ENSG00000204525_4 (sequence is synthesized)
tcctggaccgccgcggacaccgcggctcagatcacccagcgcaagttggaggcggcccgtgcggcggagcagctgagagcctacctggagggcacgtgcgtggagtggctccgcagatac

SEQ ID NO: 742674 - DNA, 120 bp, Artificial Sequence
  ENSG00000204525_5 (sequence is synthesized)
ctggagaacgggaaggagacgctgcagcgcgcagaacccccaaagacacacgtgacccaccaccccctctctgaccatgaggccaccctgaggtgctgggccctgggcttctaccctgcg

SEQ ID NO: 742675 - DNA, 120 bp, Artificial Sequence
  ENSG00000204525_6 (sequence is synthesized)
tgggcagctgtggtggtgccttctggacaagagcagagatacacgtgccatatgcagcacgaggggctgcaagagcccctcaccctgagctgggagccatcttcccagcccaccatcccc

SEQ ID NO: 742676 - DNA, 120 bp, Artificial Sequence
  ENSG00000204525_7 (sequence is synthesized)
atcatgggcatcgttgctggcctggctgtcctggttgtcctagctgtccttggagctgtggtcaccgctatgatgtgtaggaggaagagctcaggtggaaaaggagggagctgctctcag

SEQ ID NO: 742677 - DNA, 120 bp, Artificial Sequence
  ENSG00000204525_8 (sequence is synthesized)
gctgcgtgcagcaacagtgcccagggctctgatgagtctctcatcacttgtaaagcctgagacagctgcctgtgtgggactgagatgcaggatttcttcacacctctcctttgtgacttc

SEQ ID NO: 742678 - DNA, 120 bp, Artificial Sequence
  ENSG00000204525_9 (sequence is synthesized)
aagagcctctggcatctctttctgcaaaggcacctgaatgtgtctgcgttcctgttagcataatgtgaggaggtggagagacagcccacccccgtgtccaccgtgacccctgtccccaca

SEQ ID NO: 742679 - DNA, 120 bp, Artificial Sequence
  ENSG00000204525_10 (sequence is synthesized)
ctgacctgtgttccctccccgatcatctttcctgttccagagaggtggggctggatgtctccatctctgtctcaaattcatggtgcactgagctgcaacttcttacttccctaatgaagt

SEQ ID NO: 742680 - DNA, 120 bp, Artificial Sequence
  ENSG00000204525_11 (sequence is synthesized)
taagaacctgaatataaatttgtgttctcaaatatttgctatgaagcgttgatggattaattaaataagtcaattcctagaagttgagagagcaaataaagacctgagaaccttccagaa

SEQ ID NO: 742681 - DNA, 120 bp, Artificial Sequence
  ENSG00000204525_12 (sequence is synthesized)
ttccccatgtttcctgatcctgccctgggtctgcagtcgtagttctggaaacttctcttgggtccaagactaggaggttcccctaagatcacatggccctgcctcctcccagtcccctca

SEQ ID NO: 742682 - DNA, 120 bp, Artificial Sequence
  ENSG00000204525_13 (sequence is synthesized)
tagggcattttcttcccacaggtggaaaaggagggagctgctctcaggctgcgtgtaagtgatggcggcgggcgtgtggaggagctcacctactccataattcctcttgtcccacatctc

SEQ ID NO: 742683 - DNA, 120 bp, Artificial Sequence
  ENSG00000204525_14 (sequence is synthesized)
gggttttcttgtcccactgggagtttcaagccccaggtagaagtgtgccccgccttgttactggaagcaccatccacacatgggccatcccagcctgggaccctgtgtgccagcacttac

SEQ ID NO: 742684 - DNA, 120 bp, Artificial Sequence
  ENSG00000204525_15 (sequence is synthesized)
tcttttgtgaagcacatgtgacaatgaaggacggatgtatcaccttgatgattatggtgttggggtcctgattccagcattcatgagtcaggggaaggtccctgctaaggacagacctta

SEQ ID NO: 742685 - DNA, 120 bp, Artificial Sequence
  ENSG00000204525_16 (sequence is synthesized)
gcgcaggtcacgacccctccccatcccccacggacggcccgggtcgcccagagtctccccgtctgagatccaccccaaggtggatctgcggaacccgcccagaccctcgaccggagagag

SEQ ID NO: 742686 - DNA, 120 bp, Artificial Sequence
  ENSG00000204525_17 (sequence is synthesized)
gccctcctcctgctgctctcgggaggcctggccctgaccgagacctgggcctgtgagtgcggggttgggagggaagcggcctctgcggagaggagcgaggggccctcccggcgagggcgc

SEQ ID NO: 742687 - DNA, 120 bp, Artificial Sequence
  ENSG00000204531_0 (sequence is synthesized)
gagtagtcccttcgcaagccctcatttcaccaggcccccggcttggggcgccttccttccccatggcgggacacctggcttcggatttcgccttctcgccccctccaggtggtggaggtg

SEQ ID NO: 742688 - DNA, 120 bp, Artificial Sequence
  ENSG00000204531_1 (sequence is synthesized)
atgggccaggggggccggagccgggctgggttgatcctcggacctggctaagcttccaaggccctcctggagggccaggaatcgggccgggggttgggccaggctctgaggtgtggggga

SEQ ID NO: 742689 - DNA, 120 bp, Artificial Sequence
  ENSG00000204531_2 (sequence is synthesized)
ttcccccatgccccccgccgtatgagttctgtggggggatggcgtactgtgggccccaggttggagtggggctagtgccccaaggcggcttggagacctctcagcctgagggcgaagcag

SEQ ID NO: 742690 - DNA, 120 bp, Artificial Sequence
  ENSG00000204531_3 (sequence is synthesized)
gagtcggggtggagagcaactccgatggggcctccccggagccctgcaccgtcacccctggtgccgtgaagctggagaaggagaagctggagcaaaacccggaggagtcccaggacatca

SEQ ID NO: 742691 - DNA, 120 bp, Artificial Sequence
  ENSG00000204531_4 (sequence is synthesized)
aagctctgcagaaagaactcgagcaatttgccaagctcctgaagcagaagaggatcaccctgggatatacacaggccgatgtggggctcaccctgggggttctatttgggaaggtattca

SEQ ID NO: 742692 - DNA, 120 bp, Artificial Sequence
  ENSG00000204531_5 (sequence is synthesized)
gaagctgacaacaatgaaaatcttcaggagatatgcaaagcagaaaccctcgtgcaggcccgaaagagaaagcgaaccagtatcgagaaccgagtgagaggcaacctggagaatttgttc

SEQ ID NO: 742693 - DNA, 120 bp, Artificial Sequence
  ENSG00000204531_6 (sequence is synthesized)
ctgcagtgcccgaaacccacactgcagcagatcagccacatcgcccagcagcttgggctcgagaaggatgtggtccgagtgtggttctgtaaccggcgccagaagggcaagcgatcaagc

SEQ ID NO: 742694 - DNA, 120 bp, Artificial Sequence
  ENSG00000204531_7 (sequence is synthesized)
agcgactatgcacaacgagaggattttgaggctgctgggtctcctttctcagggggaccagtgtcctttcctctggccccagggccccattttggtaccccaggctatgggagccctcac

SEQ ID NO: 742695 - DNA, 120 bp, Artificial Sequence
  ENSG00000204531_8 (sequence is synthesized)
ttcactgcactgtactcctcggtccctttccctgagggggaagcctttccccctgtctccgtcaccactctgggctctcccatgcattcaaactgaggtgcctgcccttctaggaatggg

SEQ ID NO: 742696 - DNA, 120 bp, Artificial Sequence
  ENSG00000204531_9 (sequence is synthesized)
ggacagggggaggggaggagctagggaaagaaaacctggagtttgtgccagggtttttgggattaagttcttcattcactaaggaaggaattgggaacacaaagggtgggggcaggggag

SEQ ID NO: 742697 - DNA, 120 bp, Artificial Sequence
  ENSG00000204531_10 (sequence is synthesized)
tttggggcaactggttggagggaaggtgaagttcaatgatgctcttgattttaatcccacatcatgtatcacttttttcttaaataaagaagcctgggacacagtagatagacacactta

SEQ ID NO: 742698 - DNA, 120 bp, Artificial Sequence
  ENSG00000204531_11 (sequence is synthesized)
ggaaaaaaggaaagtgcacttggaagagatccaagtgggcaacttgaagaacaagtgccaaatagcacttctgtcatgctggatgtcagggctctttgtccactttgtatagccgctggc

SEQ ID NO: 742699 - DNA, 120 bp, Artificial Sequence
  ENSG00000204531_12 (sequence is synthesized)
ttatagaaggtgctcgataaatctcttgaatttaaaaatcaattaggatgcctctatagtgaaaaagatacagtaaagatgagggataatcaatttaaaaaatgagtaagtacacacaaa

SEQ ID NO: 742700 - DNA, 120 bp, Artificial Sequence
  ENSG00000204531_13 (sequence is synthesized)
gcactttatccattcttatgacacctgttacttttttgctgtgtttgtgtgtatgcatgccatgttatagtttgtgggaccctcaaagcaagctggggagagtatatactgaatttagct

SEQ ID NO: 742701 - DNA, 120 bp, Artificial Sequence
  ENSG00000204531_14 (sequence is synthesized)
tctgagacatgatgctcttcctttttaattaacccagaacttagcagcttatctatttctctaatctcaaaacatccttaaactgggggtgatacttgagtgagagaattttgcaggtat

SEQ ID NO: 742702 - DNA, 120 bp, Artificial Sequence
  ENSG00000204531_15 (sequence is synthesized)
ggaattataggcgtgagccaccgcgcccagcaaagaacttctaaccttcataacctgacaggtgttctcgaggccagggtctctctttctgtcctttcacgatgctctgcatcccttgga

SEQ ID NO: 742703 - DNA, 120 bp, Artificial Sequence
  ENSG00000204531_16 (sequence is synthesized)
ctctctttctgtcctttcacgatgctctgcatcccttggatgtgccagtttctgggggaagagtagtcctttgttacatgcatgagtcagtgaacagggaatgggtgaatgacatttgtg

SEQ ID NO: 742704 - DNA, 120 bp, Artificial Sequence
  ENSG00000204531_17 (sequence is synthesized)
ggtaggttatttctagaagttaggtgggcagcttggaaggcagaggcacttctacagactattccttggggccacacgtaggttcttgaatcccgaatggaaaggggagattgataactg

SEQ ID NO: 742705 - DNA, 120 bp, Artificial Sequence
  ENSG00000204531_18 (sequence is synthesized)
aggggcagactaccctcacccatgaagaggagtagggagagggagaagatgctttgagctccctctgggaagaggtggtaagcttggatctcagggtcacaagggccctgcgtgctccct

SEQ ID NO: 742706 - DNA, 120 bp, Artificial Sequence
  ENSG00000204531_19 (sequence is synthesized)
cactttgcttctcttttgactggcctcccccagggaaggtattcagccaaacgaccatctgccgctttgaggctctgcagcttagcttcaagaacatgtgtaagctgcggcccttgctgc

SEQ ID NO: 742707 - DNA, 120 bp, Artificial Sequence
  ENSG00000204531_20 (sequence is synthesized)
ggttgccgggaatctggacctgagcgagaagcacgatccccggccgcccccgctcttgcatccccctggtcctactgctgtgcttgctggcgacggttcgttccggaagtcagtcccagg

SEQ ID NO: 742708 - DNA, 120 bp, Artificial Sequence
  ENSG00000204532_0 (sequence is synthesized)
atggctgcaaattgcacatcctcatggagtctaggagaatcctgcaacagccctgggtcagagccaccacagtccatgccatccccagcaactcaacttggaaatcatgacagtgatcct

SEQ ID NO: 742709 - DNA, 120 bp, Artificial Sequence
  ENSG00000204532_1 (sequence is synthesized)
gagacttgtcacgtgaacttcaggatgttcagctgcccgaaggagtcggaccccatccaggctctgaggaaactcactgagctgtgccatctgtggctgaggcccgacctccacaccaaa

SEQ ID NO: 742710 - DNA, 120 bp, Artificial Sequence
  ENSG00000204532_2 (sequence is synthesized)
gagcagatcctggacatgctggtgatggagcagttcatgatctccatgccccaggagctccaggtcttagtcatgatgaacggtgtgcagagctgcaaagacctggaggacctgctacga

SEQ ID NO: 742711 - DNA, 120 bp, Artificial Sequence
  ENSG00000204532_3 (sequence is synthesized)
aataacagaagacccaagaaatggtctgtagtcagttttcttggcaaggaatatcttatgcaggaatcagatgtggagatggctgaagcccccgccagtgtcagagatgatccgagacac

SEQ ID NO: 742712 - DNA, 120 bp, Artificial Sequence
  ENSG00000204532_4 (sequence is synthesized)
gtgtccagccagcggacctcctctgtgaaccagatgtgtccggaggaaggccaggccagccaagagctgcagaccctgcccagggtccctgcactgttcaggaggcaggaagaggacttc

SEQ ID NO: 742713 - DNA, 120 bp, Artificial Sequence
  ENSG00000204532_5 (sequence is synthesized)
ctgctgccagagactactgtcatgaaaggtgacccaaaggctctgagacccaagccgaccttggagaaggacctggaggaagacagggaggagaacccaggacttacatccccagagcct

SEQ ID NO: 742714 - DNA, 120 bp, Artificial Sequence
  ENSG00000204532_6 (sequence is synthesized)
ccccaaaaaagagcctctgtggaaaatgtggatgctgacacaccttctgcctgcgttgtggagagagaagcttcgactcacagcgggagcagaggagacgctctgaatctgagaggtctc

SEQ ID NO: 742715 - DNA, 120 bp, Artificial Sequence
  ENSG00000204532_7 (sequence is synthesized)
aaaagaagcaaaccagacgccacctccatttcccaagaagagcctcaaggagaagccacacctgtgggcaacagagaatccccgggacaagctgagatcaatccagttcattccccaggc

SEQ ID NO: 742716 - DNA, 120 bp, Artificial Sequence
  ENSG00000204532_8 (sequence is synthesized)
cctgcgggcccagtcagtcaccccagtggccaagaagtcaaggaactgctgccctttgcatgtgaggtgtgcggcaagaggtttaagtatcgcggcaagttagccgtccacacgagatca

SEQ ID NO: 742717 - DNA, 120 bp, Artificial Sequence
  ENSG00000204532_9 (sequence is synthesized)
cacacaggcgagagactctttcagtgtaatctctgcgggaagcgcttcatgcagcgcataggcctgcaatttcaccagcgaacccacactggcgagaggccctacacgtgtgacatctgc

SEQ ID NO: 742718 - DNA, 120 bp, Artificial Sequence
  ENSG00000204532_10 (sequence is synthesized)
cagaagcagttcacccagaagtcctacttgaagtgtcacaagagaagccacacaggggagaagcccttcgaatgtaaagactgcaagaaagttttcacctacaaggcaaatctgaaggag

SEQ ID NO: 742719 - DNA, 120 bp, Artificial Sequence
  ENSG00000204532_11 (sequence is synthesized)
caccagcgcatccactctggagagaaaccccacaaatgttccaagtgtccaagagccttcggtcggccggcgaccttaagacgccaccagaaaacacatcgagaagccacttcacagtga

SEQ ID NO: 742720 - DNA, 120 bp, Artificial Sequence
  ENSG00000204532_12 (sequence is synthesized)
ggaggcagaagtcaggaaggagacttctgaatgaacagtgaatctattactgagaaaaaccaggggtggcctgtgtatataggtcgcaattagacaccggcttctggaagagctttccca

SEQ ID NO: 742721 - DNA, 120 bp, Artificial Sequence
  ENSG00000204532_13 (sequence is synthesized)
gtctgtcttctgcaccaagaaagtgtgaatgaagatttttcaccgatgttgtcagatgacgtttgacagatgaagggcgcctggcacgcagaggagtgccctagataggaattcctagga

SEQ ID NO: 742722 - DNA, 120 bp, Artificial Sequence
  ENSG00000204532_14 (sequence is synthesized)
tgtttgtttaaatctttttcctccccgggggaattttggtttttgtttcattatttctattgttttaggtttattttggtttgtgttgctgttctttcaataaacatcttattagttttc

SEQ ID NO: 742723 - DNA, 120 bp, Artificial Sequence
  ENSG00000204536_0 (sequence is synthesized)
aggggcagaggcggggccgggagcgaggcgtagggggtgtggccaaagcgcagtagggggctctcgcggttggggaacatagatggctggagacagaatctagagccttcaaataatgtg

SEQ ID NO: 742724 - DNA, 120 bp, Artificial Sequence
  ENSG00000204536_1 (sequence is synthesized)
gagatgtttccaccttcaggttccactgggctgattcccccctcccactttcaagctcggcccctttcaactctgccaagaatggctcccacctggctctcagacattcccctggtccaa

SEQ ID NO: 742725 - DNA, 120 bp, Artificial Sequence
  ENSG00000204536_2 (sequence is synthesized)
cccccaggccatcaagatgtctcagagaggcggctagacacccagagacctcaagtgaccatgtgggaacgggatgtttccagtgacaggcaggagccagggcggagaggcaggtcctgg

SEQ ID NO: 742726 - DNA, 120 bp, Artificial Sequence
  ENSG00000204536_3 (sequence is synthesized)
gggctggaggggtcacaggccctgagccagcaggctgaggtgatcgttcggcagctgcaagagctgcggcggctggaggaggaggtccggctcctgcgggagacctcgctgcagcagaag

SEQ ID NO: 742727 - DNA, 120 bp, Artificial Sequence
  ENSG00000204536_4 (sequence is synthesized)
atgaggctagaggcccaggccatggagctagaggctctggcacgggcggagaaggccggccgagctgaggctgagggcctgcgtgctgctttggctggggctgaggttgtccggaagaac

SEQ ID NO: 742728 - DNA, 120 bp, Artificial Sequence
  ENSG00000204536_5 (sequence is synthesized)
ttggaagaggggagccagcgggagctggaagaggttcagaggctgcaccaagagcagctgtcctctttgacacaggctcacgaggaggctctttccagtttgaccagcaaggctgagggc

SEQ ID NO: 742729 - DNA, 120 bp, Artificial Sequence
  ENSG00000204536_6 (sequence is synthesized)
ttggagaagtctctgagtagtctggaaaccagaagagcaggggaagccaaggagctggccgaggctcagagggaggccgagctgcttcggaagcagctgagcaagacccaggaagacttg

SEQ ID NO: 742730 - DNA, 120 bp, Artificial Sequence
  ENSG00000204536_7 (sequence is synthesized)
gaggctcaggtgaccctggttgagaatctaagaaaatatgttggggaacaagtgccttctgaggtccacagccagacatgggaactggagcgacagaagcttctggaaaccatgcagcac

SEQ ID NO: 742731 - DNA, 120 bp, Artificial Sequence
  ENSG00000204536_8 (sequence is synthesized)
ttgcaggaggaccgggacagcctgcatgccaccgcggagctgctgcaggtgcgggtgcagagcctcacacacatcctcgccctgcaggaggaggagctgaccaggaaggttcaaccttca

SEQ ID NO: 742732 - DNA, 120 bp, Artificial Sequence
  ENSG00000204536_9 (sequence is synthesized)
gattccctggagcctgagtttaccaggaagtgccagtccctgctgaaccgctggcgggagaaggtgtttgccctcatggtgcagctaaaggcccaggagctggaacacagtgactctgtt

SEQ ID NO: 742733 - DNA, 120 bp, Artificial Sequence
  ENSG00000204536_10 (sequence is synthesized)
gaggtggagcgtatgggtgccaagggcctgcagttggagctgagccgtgctcaggaggccaggcgtcggtggcagcagcagacagcctcagccgaggagcagctgaggcttgtggtcaat

SEQ ID NO: 742734 - DNA, 120 bp, Artificial Sequence
  ENSG00000204536_11 (sequence is synthesized)
gctgtcagcagctctcagatctggctcgagaccaccatggctaaggtggaaggggctgccgcccagcttcccagcctcaacaaccgactcagctatgctgtccgcaaggtccacaccatt

SEQ ID NO: 742735 - DNA, 120 bp, Artificial Sequence
  ENSG00000204536_12 (sequence is synthesized)
cggggcctgattgctcgaaagcttgcccttgctcagctgcgccaggagagctgtcccctaccaccaccggtcacagacgtgagccttgagttgcagcagttgcgggaagaacggaaccgc

SEQ ID NO: 742736 - DNA, 120 bp, Artificial Sequence
  ENSG00000204536_13 (sequence is synthesized)
ctggatgcagaactgcagctgagtgcccgcctcatccagcaggaggtgggccgggctcgggagcaaggggaggcagagcggcagcagctgagcaaggtggcccagcagctggagcaggag

SEQ ID NO: 742737 - DNA, 120 bp, Artificial Sequence
  ENSG00000204536_14 (sequence is synthesized)
ctgcagcagacccaggagtccctggctagcttggggctgcagctggaggtagcacgccagggccagcaggagagcacagaggaggctgccagtctgcggcaggagctgacccagcagcag

SEQ ID NO: 742738 - DNA, 120 bp, Artificial Sequence
  ENSG00000204536_15 (sequence is synthesized)
gaactctacgggcaagccctgcaagaaaaggtggctgaagtggaaactcggctgcgggagcaactctcagacacagagaggaggctgaacgaggctcggagggagcatgccaaggccgtg

SEQ ID NO: 742739 - DNA, 120 bp, Artificial Sequence
  ENSG00000204536_16 (sequence is synthesized)
gtctccttacgccagattcagcgcagagccgcccaggaaaaggagcggagccaggaactcaggcgtctgcaggaggaggcccggaaggaggaggggcagcgactggcccggcgcttgcag

SEQ ID NO: 742740 - DNA, 120 bp, Artificial Sequence
  ENSG00000204536_17 (sequence is synthesized)
gagctagagagggataagaacctcatgctggccaccttgcagcaggaaggtctcctctcccgttacaagcagcagcgactgttgacagttcttccttccctactggataagaagaaatct

SEQ ID NO: 742741 - DNA, 120 bp, Artificial Sequence
  ENSG00000204536_18 (sequence is synthesized)
gtggtgtccagccccaggcctccagagtgttcagcatctgcacctgtagcagcagcagtgcccaccagggagtccataaaagggtccctctctgtcctgctcgatgacctgcaggacctg

SEQ ID NO: 742742 - DNA, 120 bp, Artificial Sequence
  ENSG00000204536_19 (sequence is synthesized)
agtgaagccatttccaaagaggaagctgtttgtcaaggagacaaccttgacagatgctccagctccaatccccagatgagcagctaagcagctgacagttggagggaaagccagcctggg

SEQ ID NO: 742743 - DNA, 120 bp, Artificial Sequence
  ENSG00000204536_20 (sequence is synthesized)
ggctgggaggatcctggagaagtgggtggggacagaccagcccttccccatcctggggttgccctgggggataccagctgagtctgaattctgctctaaataaagacgactacagaagga

SEQ ID NO: 742744 - DNA, 120 bp, Artificial Sequence
  ENSG00000204536_21 (sequence is synthesized)
gtgcccactatgtgttaggactcgagaaagaggaggcgggcagcaggcatggaagctaaggggatagtagagagaagctgagagaacagccgcaggaaagatttgaataagatgtcagga

SEQ ID NO: 742745 - DNA, 120 bp, Artificial Sequence
  ENSG00000204536_22 (sequence is synthesized)
cgctggcttttctgcctggggatctaggcggcctggattcccaaggtcttggggagggtctagccctgcatgtggccacattcagctggggccaggccttgggccagcactttaacaggg

SEQ ID NO: 742746 - DNA, 120 bp, Artificial Sequence
  ENSG00000204536_23 (sequence is synthesized)
aaggacccaagagtcatggcctgctggtgtctggatgggcttccctcaggccttgctgagccatggagagaactctggagatggcgctcaagacccctgcactgtgtacctcctttctca

SEQ ID NO: 742747 - DNA, 120 bp, Artificial Sequence
  ENSG00000204536_24 (sequence is synthesized)
ggggtgtggccaaagcgcagtagggggctctcgcggttggggaacatagatggctggagacagaatctagagccttcaaataatgtggagatgtttccaccttcaggtcagtgggaccag

SEQ ID NO: 742748 - DNA, 66 bp, Artificial Sequence
  ENSG00000204536_25 (sequence is synthesized)
cctcactccaggaaaaagtgacatcccagagccaggagcaggccatcctgcagcgatccctgcagg

SEQ ID NO: 742749 - DNA, 120 bp, Artificial Sequence
  ENSG00000204536_26 (sequence is synthesized)
gacgttcgggaagagtcggttgggggcgggaaggggctgagcgggggtcctgggagggttcaaggggtccaaaggggaagggggtacaggggccaggtgaagggacagatgaagagatca

SEQ ID NO: 742750 - DNA, 120 bp, Artificial Sequence
  ENSG00000204536_27 (sequence is synthesized)
tgtggccaaagcgcagtagggggctctcgcggttggggctttctctttggaaggtggcctgaaaattgaattggagtgtctttgtttctcctcttgtccaggggaacatagatggctgga

SEQ ID NO: 742751 - DNA, 120 bp, Artificial Sequence
  ENSG00000204536_28 (sequence is synthesized)
aaataataaagcagtgtgctaagtgctagggatgaggataacaatagtgaataagacaaatcctgacttaaatttgtaattaataaggaatctaaaatcctaagaggggagatagattga

SEQ ID NO: 742752 - DNA, 120 bp, Artificial Sequence
  ENSG00000204536_29 (sequence is synthesized)
ccaccagctgatggtaaagcatggtatgaggcaagatgaagaagtgcaaactagaggtagagacccagcactgtggcagtgtgggttcattctgatggaagaaagcctttacagaggaca

SEQ ID NO: 742753 - DNA, 120 bp, Artificial Sequence
  ENSG00000204536_30 (sequence is synthesized)
tgctgtgggagctggccatgctgtcgtattatctgtaaacattcttattcttgtttcatgtgtcttttcccagatgtactgggatatcattctgccattttgctccagaataggattaca

SEQ ID NO: 742754 - DNA, 120 bp, Artificial Sequence
  ENSG00000204536_31 (sequence is synthesized)
taagacataaggttattattttcccctcaaagtgtgttcaaagcttcattacaggaagtaatgaaggtatccaggagtagcacagatgaattatcacatcgtgaacacacccatgtagcc

SEQ ID NO: 742755 - DNA, 88 bp, Artificial Sequence
  ENSG00000204536_32 (sequence is synthesized)
gcgcagtagggggctctcgcggttggggaacatagatggctggagacagaatctagagccttcaaataatgtggagatgtttccacct

SEQ ID NO: 742756 - DNA, 120 bp, Artificial Sequence
  ENSG00000204536_33 (sequence is synthesized)
ctactaaaaatacaaaaaattagccggtcatagtggctcattcctgtagtcccagctactctggaggatgaggtgggaggatcacctgaggctgggaggtcgaggcgaggccacagtgaa

SEQ ID NO: 742757 - DNA, 120 bp, Artificial Sequence
  ENSG00000204536_34 (sequence is synthesized)
gccacagtgaactgtgatcccatcactgcactctagcctgggtgacaaagcgagatcttttctcaaaaaaaaagaaagtagtaagaaaaattcaaaagataatgtgacggagagactgtg

SEQ ID NO: 742758 - DNA, 120 bp, Artificial Sequence
  ENSG00000204536_35 (sequence is synthesized)
gggtgagtcagcctcaggtaggatgctcagagacagcctctctgaggaggtgacagcatctgaggagagtggcatggtcagttggtgggtcttgtggggtgggtcaagggctattcccat

SEQ ID NO: 742759 - DNA, 120 bp, Artificial Sequence
  ENSG00000204536_36 (sequence is synthesized)
ccatctttgagtgggcacatggaatgtggaacatggaacactgggctcagattccatcctcagaacctaagcttctgtctccctgcgtggcattcattctttttcttttctttttttttt

SEQ ID NO: 742760 - DNA, 120 bp, Artificial Sequence
  ENSG00000204536_37 (sequence is synthesized)
gggaccatagaaacttaaggaggagggtagaggcactgcccagaatcctgaaagtatgagtaaagcctcagagcccctctcagtctgtctctttcagtaaattctctccacttgatagtt

SEQ ID NO: 742761 - DNA, 120 bp, Artificial Sequence
  ENSG00000204536_38 (sequence is synthesized)
gcttgggttccatgaggaaccaggttgagacaagcaagtgaatttggggtatctcctactttggggaagtaggaaaagagctaagcatcgggtggacctggctataattcaaggattatg

SEQ ID NO: 742762 - DNA, 120 bp, Artificial Sequence
  ENSG00000204536_39 (sequence is synthesized)
gctaactgggtgaagcctcgggtatctaggggagcagtggtgggagagtagagccggctagcgtacagggggcgagggcaggctattgagagatgggggtgagggtcaggaccagaataa

SEQ ID NO: 742763 - DNA, 120 bp, Artificial Sequence
  ENSG00000204536_40 (sequence is synthesized)
gggggtacaggggccaggtgaagggacagatgaagagatcagaacagccttagagctcacgggctaactgggtgaagcctcgggggaacatagatggctggagacagaatctagagcctt

SEQ ID NO: 742764 - DNA, 120 bp, Artificial Sequence
  ENSG00000204538_0 (sequence is synthesized)
agactcagcccaccccagctttgggggccagtacatagccatgatcctcaactggaagctcctggggatcctggtcctttgcctgcacaccagaggcatctcaggcagcgagggccaccc

SEQ ID NO: 742765 - DNA, 120 bp, Artificial Sequence
  ENSG00000204538_1 (sequence is synthesized)
ctctcacccacccgcagaggaccgagaggaggcaggctccccaacattgcctcagggccccccagtccccggtgacccttggccaggggcaccccctctctttgaagatcctccgcctac

SEQ ID NO: 742766 - DNA, 120 bp, Artificial Sequence
  ENSG00000204538_2 (sequence is synthesized)
ccgccccagtcgtccctggagagacctgcctgaaactggagtctggctccctgaaccgcctagaacggatcctcctcaacctccccggcctgacgacccttggccggcaggaccccagcc

SEQ ID NO: 742767 - DNA, 120 bp, Artificial Sequence
  ENSG00000204538_3 (sequence is synthesized)
gaggtggacaaccgacctcaggaggagccagacctagacccaccccgggaagagtacagataatggagtcccctcagccgttctgttcccaggcatctccaggcacccacgccctctcca

SEQ ID NO: 742768 - DNA, 120 bp, Artificial Sequence
  ENSG00000204538_4 (sequence is synthesized)
ccctctgattccccgtgaattcttcccaatttagcctgtctccttaaacctcttcctcattccctcggttttattctgaacccgtaaggtggtgttctcaatatttcctgtcccctcctg

SEQ ID NO: 742769 - DNA, 120 bp, Artificial Sequence
  ENSG00000204538_5 (sequence is synthesized)
agatccatacttagtcctcacatcgcccgttttttcctctgacagcctaagcctactctcctacctcgcctccaggcctcggccgcacctacctcccacccggtcttcctgcccgcgcga

SEQ ID NO: 742770 - DNA, 120 bp, Artificial Sequence
  ENSG00000204538_6 (sequence is synthesized)
tcgctggggcagggctatggtactgtgttcccttctgccacctggtggccggcggcaggaactatcagtagacagctgctgcttccatgaaacggaaaaataaaaatcatgttttcttaa

SEQ ID NO: 742771 - DNA, 120 bp, Artificial Sequence
  ENSG00000204539_0 (sequence is synthesized)
atcagtcaggaggccgtgcagtccgagatgggctcgtctcgggcaccctggatggggcgtgtgggtgggcacgggatgatggcactgctgctggctggtctcctcctgccagggaccttg

SEQ ID NO: 742772 - DNA, 120 bp, Artificial Sequence
  ENSG00000204539_1 (sequence is synthesized)
gctaagagcattggcaccttctcagacccttgtaaggaccccacgcgtatcacctcccctaacgacccctgcctcactgggaagggtgactccagcggtttcagtagctacagtggctcc

SEQ ID NO: 742773 - DNA, 120 bp, Artificial Sequence
  ENSG00000204539_2 (sequence is synthesized)
agcagttctggcagctccatttccagtgccagaagctctggtggtggctccagtggtagctccagcggatccagcattgcccagggtggttctgcaggatcttttaagccaggaacgggg

SEQ ID NO: 742774 - DNA, 120 bp, Artificial Sequence
  ENSG00000204539_3 (sequence is synthesized)
tattcccaggtcagctactcctccggatctggctctagtctacaaggtgcatccggttcctcccagctggggagcagcagctctcactcgggaaacagcggctctcactcgggaagcagc

SEQ ID NO: 742775 - DNA, 120 bp, Artificial Sequence
  ENSG00000204539_4 (sequence is synthesized)
agctctcattcgagcagcagcagcagctttcagttcagcagcagcagcttccaagtagggaatggctctgctctgccaaccaatgacaactcttaccgcggaatactaaacccttcccag

SEQ ID NO: 742776 - DNA, 120 bp, Artificial Sequence
  ENSG00000204539_5 (sequence is synthesized)
cctggacaaagctcttcctcttcccagacctttggggtatccagcagtggccaaagcgtcagctccaaccagcgtccctgtagttcggacatccccgactctccctgcagtggagggccc

SEQ ID NO: 742777 - DNA, 120 bp, Artificial Sequence
  ENSG00000204539_6 (sequence is synthesized)
atcgtctcgcactccggcccctacatccccagctcccactctgtgtcagggggtcagaggcctgtggtggtggtggtggaccagcacggttctggtgcccctggagtggttcaaggtccc

SEQ ID NO: 742778 - DNA, 120 bp, Artificial Sequence
  ENSG00000204539_7 (sequence is synthesized)
ccctgtagcaatggtggccttccaggcaagccctgtcccccaatcacctctgtagacaaatcctatggtggctacgaggtggtgggtggctcctctgacagttatctggttccaggcatg

SEQ ID NO: 742779 - DNA, 120 bp, Artificial Sequence
  ENSG00000204539_8 (sequence is synthesized)
acctacagtaagggtaaaatctaccctgtgggctacttcaccaaagagaaccctgtgaaaggctctccaggggtcccttcctttgcagctgggccccccatctctgagggcaaatacttc

SEQ ID NO: 742780 - DNA, 120 bp, Artificial Sequence
  ENSG00000204539_9 (sequence is synthesized)
tccagcaaccccatcatccccagccagtcggcagcttcctcggccattgcattccagccagtggggactggtggggtccagctctgtggaggcggctccacgggctccaagggaccctgc

SEQ ID NO: 742781 - DNA, 120 bp, Artificial Sequence
  ENSG00000204539_10 (sequence is synthesized)
catttccagcagctccggtttaccctaccatccctgcggcagtgcttcccagagcccctgctccccaccaggcaccggctccttcagcagcagctccagttcccaatccagtggcaaaat

SEQ ID NO: 742782 - DNA, 120 bp, Artificial Sequence
  ENSG00000204539_11 (sequence is synthesized)
catccttcagccttgtggcagcaagtccagctcttctggtcacccttgcatgtctgtctcctccttgacactgactgggggccccgatggctctccccatcctgatccctccgctggtgc

SEQ ID NO: 742783 - DNA, 120 bp, Artificial Sequence
  ENSG00000204539_12 (sequence is synthesized)
caagccctgtggctccagcagtgctggaaagatcccctgccgctccatccgggatatcctagcccaagtgaagcctctggggccccagctagctgaccctgaagttttcctaccccaagg

SEQ ID NO: 742784 - DNA, 120 bp, Artificial Sequence
  ENSG00000204539_13 (sequence is synthesized)
agagttactcaacagtccataagaagtcaactgttgtgtgtgtgcatgccttgggcacaaacaagcacatacactatatcccatatgggagaagtccagtgcccaggcatagggttagct

SEQ ID NO: 742785 - DNA, 120 bp, Artificial Sequence
  ENSG00000204539_14 (sequence is synthesized)
cagtttccctccttcccaaaagagtggttctgctttctccactaccccaaggttgcagactctctcttatcaccccttcctccttcctcttctcaaaatggtagattcaaagctcctctc

SEQ ID NO: 742786 - DNA, 120 bp, Artificial Sequence
  ENSG00000204539_15 (sequence is synthesized)
ttgattctctcctactgtttaaattcccattccaccacagtgcccctcagccagatcaccaccccttacaattccctctactgtgtggaaatggtccattgagtaacacccccatcagct

SEQ ID NO: 742787 - DNA, 120 bp, Artificial Sequence
  ENSG00000204539_16 (sequence is synthesized)
tctcaactgggaaacccctgaaatgctctcagagcacctctgacgcctgaagaagttataccttcctcttcccctttaccaaataaagcaaagtcaaaccatcatctggaaacagtggcc

SEQ ID NO: 742788 - DNA, 120 bp, Artificial Sequence
  ENSG00000204539_17 (sequence is synthesized)
acttttcactgacctttcttcgacatctagtcaacccacccaatatgccactgggctctcgctcccaattccaccccaccctccattacagagctcaccacgccctcctagatcaccgtc

SEQ ID NO: 742789 - DNA, 120 bp, Artificial Sequence
  ENSG00000204539_18 (sequence is synthesized)
cccaacacacccattgcctctcaaggcccttatctcagccccttcctgtggccacttccctcagtgctcagatgattccctgggtgagggagacactggggcaccctcagaggttgaagc

SEQ ID NO: 742790 - DNA, 120 bp, Artificial Sequence
  ENSG00000204539_19 (sequence is synthesized)
aggctccctgctgtccctggatcctggacagatggctcagtaaactgtggggactaggtgcagactttttgccttcttggagtcctgggtctcctctgagagtctgggtggtgctcttcc

SEQ ID NO: 742791 - DNA, 120 bp, Artificial Sequence
  ENSG00000204539_20 (sequence is synthesized)
tacgcctctagaggtctctgtgttcctcattttccttcaaaagcgggctgtgtttctcttctaccttccagctgctcccacagaggaggaagacaataaatatttgttgaactgaaagca

SEQ ID NO: 742792 - DNA, 120 bp, Artificial Sequence
  ENSG00000204540_0 (sequence is synthesized)
gttgttgtgtcccagccttcccaagcttccaggtgtcccagaaacccaggaaatcgagactcatgactcccagagaggatggcatctagaagtagacgatcaagggtggaatctacagtc

SEQ ID NO: 742793 - DNA, 120 bp, Artificial Sequence
  ENSG00000204540_1 (sequence is synthesized)
cgtgagccctgacttcttgccttcgtctcaaatagactctgcagccagccatctatgcagcgccccagtggctttgaaatgcaacagaaaccatcacccccggaccgtgggctccatgcc

SEQ ID NO: 742794 - DNA, 120 bp, Artificial Sequence
  ENSG00000204540_2 (sequence is synthesized)
agtgggcaaagcacagcctgggaagaattggtttgcagccaggcagtcctccatccagtcttgactttggcacttgtgatatgacttgcacagaccaaaaaagtcactctcaaagagctc

SEQ ID NO: 742795 - DNA, 120 bp, Artificial Sequence
  ENSG00000204540_3 (sequence is synthesized)
gccacatggagccagcaaaccatttctggcatgcaggggacctccaagcaatgatatccaaggaattccatctggcagccacccaggatgactgcagaaaaggaaggacacaggaggata

SEQ ID NO: 742796 - DNA, 120 bp, Artificial Sequence
  ENSG00000204540_4 (sequence is synthesized)
tcctggttccctcttcccacccagagctgtttgcatcagtcctgccaatggctccggaagaagctgccaggctccagcaacctcagccccttcctcctccctcaggaatccacctatccg

SEQ ID NO: 742797 - DNA, 120 bp, Artificial Sequence
  ENSG00000204540_5 (sequence is synthesized)
cctctaggaccttggctccaactctattgtactcgtctcctccctcccattctccttttggtctcagctccttgatctaagcctcccagagagacccctagaacgtttccctcaaggacc

SEQ ID NO: 742798 - DNA, 120 bp, Artificial Sequence
  ENSG00000204540_6 (sequence is synthesized)
tttctgcctggaagtctgttagcctttcagaagtaacatgtccaaaataaaatttgattcctcccaggttgttccctgcctggtccgctaccccacagtaaggaacaccttattatgcaa

SEQ ID NO: 742799 - DNA, 120 bp, Artificial Sequence
  ENSG00000204540_7 (sequence is synthesized)
agcgatcgcgcgggcaggaagaccgggtgggagccccacccagccccagccccaggaggaggagcctgtctggatggacgcagcctgaactgacccacaaacagaccaaaaaagtcactc

SEQ ID NO: 742800 - DNA, 120 bp, Artificial Sequence
  ENSG00000204540_8 (sequence is synthesized)
agccccacccagccccagccccaggaggaggagcctgtctggatggacgcagcctgaactgacccacaaacagaccaaaaaagtcactctcaaagagctctcggcatgcaggggacctcc

SEQ ID NO: 742801 - DNA, 120 bp, Artificial Sequence
  ENSG00000204540_9 (sequence is synthesized)
cttccaggtgtcccagaaacccaggaaatcgagactcatgactcccagagaggatggcatctagaagagcagagccattccctacttggaagctgctgctgctgaactgaaagctgctgc

SEQ ID NO: 742802 - DNA, 120 bp, Artificial Sequence
  ENSG00000204540_10 (sequence is synthesized)
gccgctgtttcccgagtgagagctgctgctccccagctgggaggaaccggatgcaccttgtagactagagccagatccggaggagtagctgacctgggaataccccgttcctggcttaaa

SEQ ID NO: 742803 - DNA, 120 bp, Artificial Sequence
  ENSG00000204540_11 (sequence is synthesized)
tactcagctgacaggaatctggttggagttgttgtgtcccagccttcccaagcttccaggtgtcccagaaacccaggaaatcgagactcatgactcccagagaggatggcatctagaaga

SEQ ID NO: 742804 - DNA, 120 bp, Artificial Sequence
  ENSG00000204540_12 (sequence is synthesized)
cagaagcctcccctgactagtccagctcaccgtgactcttctgaactcacggcgtttactgccaaggctattacgttggcgctcgctcatgtcattattaggaaatatgcatttttactg

SEQ ID NO: 742805 - DNA, 120 bp, Artificial Sequence
  ENSG00000204540_13 (sequence is synthesized)
ggaacaacgcccaactggcctcctactcagctgacaggaatctggttggagttgttgtgtcccagccttcccaagcttccaggtgtcccagaaacccaggaaatcgagactcatgactcc

SEQ ID NO: 742806 - DNA, 120 bp, Artificial Sequence
  ENSG00000204540_14 (sequence is synthesized)
cagagaggatggcatctagaagctggaaggtagaagagaaacacagcccgcttttgaaggaaaatgaggaacacagagacctctagaggcgtaggaagagcaccacccagactctcagag

SEQ ID NO: 742807 - DNA, 120 bp, Artificial Sequence
  ENSG00000204540_15 (sequence is synthesized)
gagacccaggactccaagaaggcaaaaagtctgcacctagtccccacagtttactgagccatctgtccaggatccagggacagcagggagcctgcttcaacctctgagggtgccccagtg

SEQ ID NO: 742808 - DNA, 120 bp, Artificial Sequence
  ENSG00000204540_16 (sequence is synthesized)
tctccctcacccagggaatcatctgagcactgagggaagtggccacaggaaggggctgagataagggccttgagaggcaatgggtgtgttggggacggtgatctaggagggcgtggtgag

SEQ ID NO: 742809 - DNA, 120 bp, Artificial Sequence
  ENSG00000204540_17 (sequence is synthesized)
ctctgtaatggagggtggggtggaattgggagcgagagcccagtggcatattgggtgggttgactagatgtcgaagaaaggtcagtgaaaagtggccactgtttccagatgatggtttga

SEQ ID NO: 742810 - DNA, 120 bp, Artificial Sequence
  ENSG00000204540_18 (sequence is synthesized)
ctttgctttatttggtaaaggggaagaggaaggtataacttcttcaggcgtcagaggtgctctgagagcatttcaggggtttcccagttgagaagctgatgggggtgttactcaatggac

SEQ ID NO: 742811 - DNA, 120 bp, Artificial Sequence
  ENSG00000204540_19 (sequence is synthesized)
catttccacacagtagagggaattgtaaggggtggtgatctggctgaggggcactgtggtggaatgggaatttaaacagtaggagagaatcaagagaggagctttgaatctaccattttg

SEQ ID NO: 742812 - DNA, 120 bp, Artificial Sequence
  ENSG00000204540_20 (sequence is synthesized)
agaagaggaaggaggaaggggtgataagagagagtctgcaaccttggggtagtggagaaagcagaaccactcttttgggaaggagggaaactgagctaaccctatgcctgggcactggac

SEQ ID NO: 742813 - DNA, 120 bp, Artificial Sequence
  ENSG00000204540_21 (sequence is synthesized)
ttctcccatatgggatatagtgtatgtgcttgtttgtgcccaaggcatgcacacacacaacagttgacttcttatggactgttgagtaactctccttggggtaggaaaacttcagggtca

SEQ ID NO: 742814 - DNA, 120 bp, Artificial Sequence
  ENSG00000204540_22 (sequence is synthesized)
gctagctggggccccagaggcttcacttgggctaggatatcccggatggagcggcaggggatctttccagcactgctggagccacagggcttggcaccagcggagggatcaggatgggga

SEQ ID NO: 742815 - DNA, 120 bp, Artificial Sequence
  ENSG00000204540_23 (sequence is synthesized)
gagccatcggggcccccagtcagtgtcaaggaggagacagacatgcaagggtgaccagaagagctggacttgctgccacaaggctgaaggatgattttgccactggattgggaactggag

SEQ ID NO: 742816 - DNA, 120 bp, Artificial Sequence
  ENSG00000204540_24 (sequence is synthesized)
ctgctgctgaaggagccggtgcctggtggggagcaggggctctgggaagcactgccgcagggatggtagggtaaaccggagctgctggaaatgctagaactgctggggactcgagaactg

SEQ ID NO: 742817 - DNA, 120 bp, Artificial Sequence
  ENSG00000204540_25 (sequence is synthesized)
gagggagagcagggtcccttggagcccgtggagccgcctccacagagctggaccccaccagtccccactggctggaatgcaatggccgaggaagctgccgactggctggggatgatgggg

SEQ ID NO: 742818 - DNA, 120 bp, Artificial Sequence
  ENSG00000204540_26 (sequence is synthesized)
ttgctggagaagtatttgccctcagagatggggggcccagctgcaaaggaagggacccctggagagcctttcacagggttctctttggtgaagtagcccacagggtagattttaccctta

SEQ ID NO: 742819 - DNA, 120 bp, Artificial Sequence
  ENSG00000204540_27 (sequence is synthesized)
ctgtaggtcatgcctggaaccagataactgtcagaggagccacccaccacctcgtagccaccataggatttgtctacagaggtgattgggggacagggcttgcctggaaggccaccattg

SEQ ID NO: 742820 - DNA, 120 bp, Artificial Sequence
  ENSG00000204540_28 (sequence is synthesized)
ggggccggagtgcgagacgatgggccctccactgcagggagagtcggggatgtccgaactacagggacgctggttggagctgacgctttggccactgctggataccccaaaggtctggga

SEQ ID NO: 742821 - DNA, 120 bp, Artificial Sequence
  ENSG00000204540_29 (sequence is synthesized)
agaggaagagctttgtccaggctgggaagggtttagtattccgcggtaagagttgtcattggttggcagagcagagccattccctacttggaagctgctgctgctgaactgaaagctgct

SEQ ID NO: 742822 - DNA, 120 bp, Artificial Sequence
  ENSG00000204540_30 (sequence is synthesized)
aatggagctgccagaactgctggagccactgtagctactgaaaccgctggagtcacccttcccagtgaggcaggggtcgttaggggaggtgatacgcgtggggtccttacaagggtctga

SEQ ID NO: 742823 - DNA, 120 bp, Artificial Sequence
  ENSG00000204540_31 (sequence is synthesized)
gaaggtgccaatgctcttagccaaggtccctgtggaggaaagcagtggttagtaagggccaaggaggcttggcttcctccctcacctttctgccttatctcagtcatcggcctctcgggt

SEQ ID NO: 742824 - DNA, 120 bp, Artificial Sequence
  ENSG00000204540_32 (sequence is synthesized)
ttctcccaagcagagcgcagggagagtttagggatggagaaaggaggaagaactggctattgtctctaaaggatattgaggtggccgaataaaggcatttctttgtttgggaagggtggg

SEQ ID NO: 742825 - DNA, 120 bp, Artificial Sequence
  ENSG00000204540_33 (sequence is synthesized)
gggaagggtgggcaaacaccaaccagaaaaatagaaaattaggtgccaaagtgagtggcctcaaaggaatacattgaatataagagggggctgggcacagtggctcacgccggtaatccc

SEQ ID NO: 742826 - DNA, 120 bp, Artificial Sequence
  ENSG00000204540_34 (sequence is synthesized)
gttcaagaccagcctgggcaacatagaccccgtctgtattttgttttttaattaaaattttttttaaaaagaagagggaatggagaaggggcaggaacaagtaggtctaaaagaaaggac

SEQ ID NO: 742827 - DNA, 120 bp, Artificial Sequence
  ENSG00000204540_35 (sequence is synthesized)
gggcaggaacaagtaggtctaaaagaaaggaccctgaagagacagagaattggggaaactgaggctctgaggagtccaggcgtaaattcttaggggaaaaatcctgggccagacagtggg

SEQ ID NO: 742828 - DNA, 120 bp, Artificial Sequence
  ENSG00000204540_36 (sequence is synthesized)
accaaagggaagaagacaaaaggcaaaacaatggagggctgagaagtggagacacatatagaaggagacactggaaaaagacaaagctgggggcagaggggctgaaataaaggaaagggc

SEQ ID NO: 742829 - DNA, 120 bp, Artificial Sequence
  ENSG00000204540_37 (sequence is synthesized)
actcgaggactaagatttggtcaccagcttcttcgtgagagcccaggctggggtcaggaatggaaaccctatttcctatctcagcactggccatgccagtaaagctgggtgggggccagg

SEQ ID NO: 742830 - DNA, 120 bp, Artificial Sequence
  ENSG00000204540_38 (sequence is synthesized)
atgtggggtcactacctgttgcttcagaacctgctggtaccagtgtgtcaggacaccgcaccctgagccagccctgctctcgctggcccagcccagggaaccaggacgaaaccccacgaa

SEQ ID NO: 742831 - DNA, 120 bp, Artificial Sequence
  ENSG00000204540_39 (sequence is synthesized)
cctccgaggctcctggccacaatcagcttccctctctgagcacacctgcctctgtccagcccctcatctgacttctgctgccttgacttccctcagggatgtggagccacatctttcctt

SEQ ID NO: 742832 - DNA, 120 bp, Artificial Sequence
  ENSG00000204540_40 (sequence is synthesized)
atctttcctttcctttgctcaaaaccccaggcccaacttaccccgtggttcctccatgactctttcacctgcgttccttctgccttccctagcccctccaggtcccacgtgttacaaaca

SEQ ID NO: 742833 - DNA, 120 bp, Artificial Sequence
  ENSG00000204540_41 (sequence is synthesized)
gagccacatactagcaagttactgaacctctctgagctttagtttatacattcagaggggccaaattttccctgccttcccacagcattactatgaagaaaactaaatgagatcatccac

SEQ ID NO: 742834 - DNA, 120 bp, Artificial Sequence
  ENSG00000204540_42 (sequence is synthesized)
agaaacccaggaaatcgagactcatgactcccagagaggatggcatctagaagccccacccagccccagccccaggaggaggagcctgtctggatggacgcagcctgaactgacccacaa

SEQ ID NO: 742835 - DNA, 120 bp, Artificial Sequence
  ENSG00000204540_43 (sequence is synthesized)
acagaccaaaaaagtcactctcaaagagctctcggtaggtttgtaaatacttaactgatggtaaaatgtcatgaacccctacccccgatggatctgaaccgttcacttgacccactttaa

SEQ ID NO: 742836 - DNA, 120 bp, Artificial Sequence
  ENSG00000204540_44 (sequence is synthesized)
actgaccagacttctccaaataagctccatccacccctggttggggtaccccactagctttgtcctcaggccaacctgcaacccaaagtgggttacaccttggcccccaggcacacagac

SEQ ID NO: 742837 - DNA, 120 bp, Artificial Sequence
  ENSG00000204540_45 (sequence is synthesized)
ggtgagccagatgcaccttctgcgtcccctgaattcctgtccccaaccccatgcgtccagttcacctccgccatcttgagtatccctcatcaccccaaactgcagtccctgcctctgttc

SEQ ID NO: 742838 - DNA, 120 bp, Artificial Sequence
  ENSG00000204540_46 (sequence is synthesized)
ccacctcacctctggtgtgcaggcaaaggaccaggatccccaggagcttccagttgaggatcatggctatgtactggcccccaaagctggggtgggctgagtctgggtgcctgggaaccc

SEQ ID NO: 742839 - DNA, 120 bp, Artificial Sequence
  ENSG00000204540_47 (sequence is synthesized)
caagaggctttataggggaggagtggaggagggaccagcccagtggcacaggaataccatcagaacagaactggtcaaacccgttgggaaggcctgggctgatgtgtcacccctgaaggt

SEQ ID NO: 742840 - DNA, 120 bp, Artificial Sequence
  ENSG00000204540_48 (sequence is synthesized)
ggcgtcccttattttagtcctccagcccaggacccagctgcctgctctccctatcatgacccagagcctgcgtcaccccaccctggttttcacaccctccatccacatcctggagcagtc

SEQ ID NO: 742841 - DNA, 120 bp, Artificial Sequence
  ENSG00000204540_49 (sequence is synthesized)
aatacccacttggcatctccgtaatcacagagatgtccaccttcatcccttgcaactattggaagccaaagaatgggagcaaaccacgcgatgggcgttgggaagcaccgtaattacagg

SEQ ID NO: 742842 - DNA, 120 bp, Artificial Sequence
  ENSG00000204540_50 (sequence is synthesized)
gtcccagaaacccaggaaatcgagactcatgactcccagagaggatggcatctagaagactctgcagccagccatctatgcagcgccccagtggctttgaaatgcaacagaaaccatcac

SEQ ID NO: 742843 - DNA, 120 bp, Artificial Sequence
  ENSG00000204542_0 (sequence is synthesized)
gagatcgggtgctgagcaggatgcagggccgcgtggcagggagctgcgctcctctgggcctgctcctggtctgtcttcatctcccaggcctctttgcccggagcatcggtgttgtggagg

SEQ ID NO: 742844 - DNA, 120 bp, Artificial Sequence
  ENSG00000204542_1 (sequence is synthesized)
agaaagtttcccaaaacttggggaccaacttgcctcagctcggacaaccttcctccactggcccctctaactctgaacatccgcagcccgctctggaccctaggtctaatgacttggcaa

SEQ ID NO: 742845 - DNA, 120 bp, Artificial Sequence
  ENSG00000204542_2 (sequence is synthesized)
gggttcctctgaagctcagcgtgcctgcatcagatggcttcccacctgcaggaggttctgcagtgcagaggtggcctccatcgtgggggctgcctgccatggattcctggccccctgagg

SEQ ID NO: 742846 - DNA, 120 bp, Artificial Sequence
  ENSG00000204542_3 (sequence is synthesized)
atccttggcagatgatggctgctgcggctgaggaccgcctgggggaagcgctgcctgaagaactctcttacctctccagtgctgcggccctcgctccgggcagtggccctttgcctgggg

SEQ ID NO: 742847 - DNA, 120 bp, Artificial Sequence
  ENSG00000204542_4 (sequence is synthesized)
ccgttctaattcactgggagccgggggaaaaatcctttcccaacgccctccctggtctctcatccacagggttctgcctgatcacccctggggtaccctgaatcccagtgtgtcctgggg

SEQ ID NO: 742848 - DNA, 120 bp, Artificial Sequence
  ENSG00000204542_5 (sequence is synthesized)
aggtggaggccctgggactggttggggaacgaggcccatgccacaccctgagggaatctggggtatcaataatcaacccccaggtaccagctggggaaatattaatcggtatccaggagg

SEQ ID NO: 742849 - DNA, 120 bp, Artificial Sequence
  ENSG00000204542_6 (sequence is synthesized)
cagctggggaaatattaatcggtatccaggaggcagctgggggaatattaatcggtatccaggaggcagctgggggaatattcatctatacccaggtatcaataacccatttcctcctgg

SEQ ID NO: 742850 - DNA, 120 bp, Artificial Sequence
  ENSG00000204542_7 (sequence is synthesized)
agtcctccgccctcctggctcttcttggaacatcccagctggcttccctaatcctccaagccctaggttgcagtggggctagagcacgatagagggaaacccaacattgggagttagagt

SEQ ID NO: 742851 - DNA, 120 bp, Artificial Sequence
  ENSG00000204542_8 (sequence is synthesized)
cctgctcccgccccttgctgtgtgggctcaatccaggccctgtcagcatgtttccagcactatccccacttttcagtgcctcccctgctcatctccaataaaataaaagcacttatggaa

SEQ ID NO: 742852 - DNA, 120 bp, Artificial Sequence
  ENSG00000204544_0 (sequence is synthesized)
agagaaagaggcaactacattgcctggaggaagcctaaggaacccaggcatccagctgcccacgcctgagtccaagattcttcccaggaacacaaacgtaggagacccacgctcctggaa

SEQ ID NO: 742853 - DNA, 120 bp, Artificial Sequence
  ENSG00000204544_1 (sequence is synthesized)
gcaccagcctttatctcttcaccttcaagtcccctttctcaagaatcctctgttctttgccctctaaagtcttggtacatctaggacccaggcatcttgctttccagccacaaagagaca

SEQ ID NO: 742854 - DNA, 120 bp, Artificial Sequence
  ENSG00000204544_2 (sequence is synthesized)
gatgaagatgcagaaaggaaatgttctccttatgtttggtctactattgcatttagaagctgcaacaaattccaatgagactagcacctctgccaacactggatccagtgtgatctccag

SEQ ID NO: 742855 - DNA, 120 bp, Artificial Sequence
  ENSG00000204544_3 (sequence is synthesized)
tggagccagcacagccaccaactctgggtccagtgtgacctccagtggggtcagcacagccaccatctcagggtccagcgtgacctccaatggggtcagcatagtcaccaactctgagtt

SEQ ID NO: 742856 - DNA, 120 bp, Artificial Sequence
  ENSG00000204544_4 (sequence is synthesized)
agttccatacaacctccagtgggatcagcacagccaccaactctgagttcagcacagtgtccagtgggatcagcatagccaccaactctgagtccagcacaacctccagtggggccagca

SEQ ID NO: 742857 - DNA, 62 bp, Artificial Sequence
  ENSG00000204544_5 (sequence is synthesized)
caccaactctgagtccagcacactagcacagccaccaactctgactccagcacaacctccag

SEQ ID NO: 742858 - DNA, 67 bp, Artificial Sequence
  ENSG00000204544_6 (sequence is synthesized)
tgagagtgtccagtagggccagcactgccaccaactctgagtccagcacaacctccagtggggccag

SEQ ID NO: 742859 - DNA, 80 bp, Artificial Sequence
  ENSG00000204544_7 (sequence is synthesized)
cagcactgccaccaactctgagctgagtccagaacgacctccaatggggctggcacagccaccaactctgagtccagcac

SEQ ID NO: 742860 - DNA, 78 bp, Artificial Sequence
  ENSG00000204544_8 (sequence is synthesized)
ggcacagccaccaactctgagtccagcacagtgtccagtgggatcagcacagtcaccaattctgagtccagcacaccc

SEQ ID NO: 742861 - DNA, 120 bp, Artificial Sequence
  ENSG00000204544_9 (sequence is synthesized)
tgggatcagcacagtcaccaattctgagtccagcacaccctccagtggggccaacacagccaccaactctgagtccagtacgacctccagtggggccaacacagccaccaactctgactc

SEQ ID NO: 742862 - DNA, 90 bp, Artificial Sequence
  ENSG00000204544_10 (sequence is synthesized)
aactctgggtccagcacgacctccagtgggacagtgtccagtggggccagcacagccaccacctctgagtccagcacgacctccagtggg

SEQ ID NO: 742863 - DNA, 120 bp, Artificial Sequence
  ENSG00000204544_11 (sequence is synthesized)
gcacagccaccaactctgagtccagcacagtgtccagtggggccagcactgccaccaattctgagtccagcacaacctccagtggggccaacacagccaccaactctgggtccagtgtga

SEQ ID NO: 742864 - DNA, 120 bp, Artificial Sequence
  ENSG00000204544_12 (sequence is synthesized)
cagtgtgacctctgcaggctctggaacagcagctctgactggaatgcacacaacttcccatagtgcatctactgcagtgagtgaggcgaagcctggtgggtccctggtgccgtgggaaat

SEQ ID NO: 742865 - DNA, 120 bp, Artificial Sequence
  ENSG00000204544_13 (sequence is synthesized)
cttcctcatcaccctggtctcggttgtggcggccgtggggctctttgctgggctcttcttctgtgtgagaaacagcctgtccctgagaaacacctttaacacagctgtctaccaccctca

SEQ ID NO: 742866 - DNA, 120 bp, Artificial Sequence
  ENSG00000204544_14 (sequence is synthesized)
ccacaggcccaggtggagtcctaactggttctggaggagaccagtatcctcgatagccatggagatgagcgggaggaacagcgggccctgagcagccccggaagcaagtgccgcattctt

SEQ ID NO: 742867 - DNA, 120 bp, Artificial Sequence
  ENSG00000204544_15 (sequence is synthesized)
caggaaggaagagacctgggcacccaagacctggtttcctttcattcatcccaggagacccctcccagctttgtttgagatcctgaaaatcttgaagaaggtattcctcacctttcttgc

SEQ ID NO: 742868 - DNA, 120 bp, Artificial Sequence
  ENSG00000204544_16 (sequence is synthesized)
ctttaccagacactggaaagagaatactatattgctcatttagctaagaaataaatacatctcatctaacacacacgacaaagagaagctgtgcgtgccccggggtgggtatctagctct

SEQ ID NO: 742869 - DNA, 120 bp, Artificial Sequence
  ENSG00000204544_17 (sequence is synthesized)
gagatgaactcagttataggagaaaacctccatgctggactccatctggcattcaaaatctccacagtaaaatccaaagacctcattcttatctgtgtgtctgcattttctaatcctttt

SEQ ID NO: 742870 - DNA, 120 bp, Artificial Sequence
  ENSG00000204544_18 (sequence is synthesized)
tgccccaggcaaggtccctgtatctctgagacaccccgattggctggagaattgacttgggagagataaggagggagggcgggtgccagcatgctatgggctcctgcgtgaggcctgtgg

SEQ ID NO: 742871 - DNA, 120 bp, Artificial Sequence
  ENSG00000204544_19 (sequence is synthesized)
tacacagagattaggttgtgatacatgaagagccaagagcaggatgaggtggaggcgttacaactacctgctctgtgtgtggggggggaggggggaggggggtacgcatattcacttgaa

SEQ ID NO: 742872 - DNA, 120 bp, Artificial Sequence
  ENSG00000204544_20 (sequence is synthesized)
gtcgaggttcccagggcatttccatgtgctccaggcctgactacccatcagggtggaggagctggtgacactcatctccctgagtgctccctggtttcccaagggaaagactttctggcc

SEQ ID NO: 742873 - DNA, 120 bp, Artificial Sequence
  ENSG00000204544_21 (sequence is synthesized)
tgctgaggtcgaatcttccaagaggctcttgcaaagacccgagattctcataaatccccgcccagaagagctgcacgtatccctttcatgagtccagggaagagggtcctccaggtcttg

SEQ ID NO: 742874 - DNA, 120 bp, Artificial Sequence
  ENSG00000204544_22 (sequence is synthesized)
gaagacagaggggagctgctttagaggctaagttgctttgagcccacaaggtaatggagggctcctacttgggacagagccctcagcagagaattagcagtctgttggtgggttcacccc

SEQ ID NO: 742875 - DNA, 120 bp, Artificial Sequence
  ENSG00000204544_23 (sequence is synthesized)
aactcacagcagtagaaactgctccatcttccaccacttattgggtttctccagtgtcagcaaaccaaagaattggatcttaccaatgcggctataggaaaacagcctgttgcatggtaa

SEQ ID NO: 742876 - DNA, 120 bp, Artificial Sequence
  ENSG00000204544_24 (sequence is synthesized)
cggctataggaaaacagcctgttgcatggtaagagtgataccatcttgaagtgaaaccaccacaatggccattttttttttagatggagttttgcagtggtgcaatcatagctcattgca

SEQ ID NO: 742877 - DNA, 120 bp, Artificial Sequence
  ENSG00000204544_25 (sequence is synthesized)
cagcctcctgagtagctgggactacagtttcgtgtgccaccatgcctggctaatttttagaattttttgtagggacagggcctcactctgttgcacaagctggtcttgaactcctggcct

SEQ ID NO: 742878 - DNA, 120 bp, Artificial Sequence
  ENSG00000204544_26 (sequence is synthesized)
gagattacaggtgtgagccactgcacctcgccagatgtccaatgtctgactcctgcataccaaggtgttctgtatcaagggctttaaaacaatgcctgtagcgtaattaacctctcacaa

SEQ ID NO: 742879 - DNA, 120 bp, Artificial Sequence
  ENSG00000204544_27 (sequence is synthesized)
gctttaaaacaatgcctgtagcgtaattaacctctcacaaagatgcttatctaacctccccagcagtcatgggtttcagcaagaaagtctgtgatgtgaccagttgcacatgttttcccc

SEQ ID NO: 742880 - DNA, 120 bp, Artificial Sequence
  ENSG00000204544_28 (sequence is synthesized)
taaaagcttactctagaaaggatattttttggagagggagtgtgggaatccaccatcttgtggccacctcagacatcacttctctttggaagactccattaaatatttctctgtgagaaa

SEQ ID NO: 742881 - DNA, 120 bp, Artificial Sequence
  ENSG00000204544_29 (sequence is synthesized)
atgtgaccactactggggccagctctgcttctcttccatagagtgaggatcatcattttactcgaatcacttcagcctaacaagcaacaaattccaatgagactagcacctctgccaaca

SEQ ID NO: 742882 - DNA, 120 bp, Artificial Sequence
  ENSG00000204548_0 (sequence is synthesized)
ggagtcctctgtctgttttaccagttgagaagcctcctatccctccctgatcattcatcattcatgaagctccttcttctgcttttgactgttactctgctcctggcccaggtcacccca

SEQ ID NO: 742883 - DNA, 120 bp, Artificial Sequence
  ENSG00000204548_1 (sequence is synthesized)
catgaaatgttggggcaagtcaggcaggtgcagaacaacatgtaaagaaagtgaagtatactatatattatgcaaaactgaggctaagtgctgtgtggatcccaagtatgtacctgtaaa

SEQ ID NO: 742884 - DNA, 120 bp, Artificial Sequence
  ENSG00000204548_2 (sequence is synthesized)
accaaaattaacagacacaaatacaagcctggaatcaacttctgcagtctgacacctctcttccaaccttgagtctcaacatcatgggatcctgcagttctattaaatcattcttggcaa

SEQ ID NO: 742885 - DNA, 120 bp, Artificial Sequence
  ENSG00000204548_3 (sequence is synthesized)
agctgtccttgagcctcgactctgggtgagccctctgggtcttagatttgagatgcaattttcaaacttgaagatcacggtgagcagagagatctctgagctactgccaatcctaatgtc

SEQ ID NO: 742886 - DNA, 120 bp, Artificial Sequence
  ENSG00000204560_0 (sequence is synthesized)
gcggtacgggaagacagctttgggatgtcggaagatcctagaggtcccaaggtagctgacttgcgaagctgaggctccagccgagggctccaggcctctgaccggcccagcagtgagcgc

SEQ ID NO: 742887 - DNA, 120 bp, Artificial Sequence
  ENSG00000204560_1 (sequence is synthesized)
ggctgcccgacgcttcagggccgggagcagggagcgtgagtcgccatggcgacgccggcgggtctggagcgctgggttcaggacgagctgcactcggtgttggggctgagcgagcggcac

SEQ ID NO: 742888 - DNA, 120 bp, Artificial Sequence
  ENSG00000204560_2 (sequence is synthesized)
gtcgcccagtttctgatcggtaccgcacagcgctgcacctctgccgaggagttcgtgcagcgcctacgagacactgataccttggatctcagtgggccggcccgggacttcgccctgaga

SEQ ID NO: 742889 - DNA, 120 bp, Artificial Sequence
  ENSG00000204560_3 (sequence is synthesized)
ctctggaacaaggtaccacgaaaggcagtggtagaaaagccagctcgggcagcagagcgagaggcccgggccctgctggagaagaaccgatcttataggttactggaagacagtgaagag

SEQ ID NO: 742890 - DNA, 120 bp, Artificial Sequence
  ENSG00000204560_4 (sequence is synthesized)
agcagtgaggagactgtgagtagggctggaagcagcctccagaagaaacgtaaaaagcggaaacacctcaggaagaagcgtgaggaagaagaggaggaagaggcttctgagaaagggaag

SEQ ID NO: 742891 - DNA, 120 bp, Artificial Sequence
  ENSG00000204560_5 (sequence is synthesized)
aagaaaacaggggggagtaaacagcagacagagaagccagagtcggaagatgagtgggaacggacagagcgtgaacgccttcaggacctggaggagcgtgatgcctttgctgagcgggtt

SEQ ID NO: 742892 - DNA, 120 bp, Artificial Sequence
  ENSG00000204560_6 (sequence is synthesized)
cgacagcgggacaaggatcggactcgaaatgtcctggaacggtcagacaagaaggcttatgaagaggctcagaagcgcctcaagatggccgaggaagaccggaaggccatggtccctgag

SEQ ID NO: 742893 - DNA, 120 bp, Artificial Sequence
  ENSG00000204560_7 (sequence is synthesized)
ctgcggaagaaatctcgccgagagtacctggctaagcgggagcgagagaagcttgaggacctggaggcggagctggctgatgaggagttcctttttggggacgtggagctgagccggcac

SEQ ID NO: 742894 - DNA, 120 bp, Artificial Sequence
  ENSG00000204560_8 (sequence is synthesized)
gagcggcaggagctcaaatataagcggcgagtgcgggatctcgcccgggagtaccgggcagctggggagcaggagaagctggaggccaccaatcgctaccacatgcccaaggaaacccga

SEQ ID NO: 742895 - DNA, 120 bp, Artificial Sequence
  ENSG00000204560_9 (sequence is synthesized)
ggacagccagcccgagctgtggatctagtggaggaggaatcaggagcccctggggaggagcagcggcgctgggaggaggcgcggcttggggcagcgtccctgaagtttggggcccgagat

SEQ ID NO: 742896 - DNA, 120 bp, Artificial Sequence
  ENSG00000204560_10 (sequence is synthesized)
gctgcctctcaggagcccaagtatcaactggtgctggaggaggaggagaccattgagtttgtccgggccactcagctccagggtgatgaggagccgtcagctccacccacttcaactcag

SEQ ID NO: 742897 - DNA, 120 bp, Artificial Sequence
  ENSG00000204560_11 (sequence is synthesized)
gcccagcagaaagagtccatccaggccgtccgccgcagcctcccggtgttcccatttcgagaggagctcctggctgctattgcaaatcaccaagtcctcatcattgaaggcgagacaggc

SEQ ID NO: 742898 - DNA, 120 bp, Artificial Sequence
  ENSG00000204560_12 (sequence is synthesized)
tcagggaagaccacccagatcccgcagtatctctttgaggagggttatacaaacaagggtatgaagattgcctgcacccaaccccggagagtggctgccatgagtgtggccgcccgagtg

SEQ ID NO: 742899 - DNA, 120 bp, Artificial Sequence
  ENSG00000204560_13 (sequence is synthesized)
gcccgggagatgggtgtgaagcttgggaatgaggttggctacagcatccgctttgaggactgcacatcagagcgaactgtcctccgctacatgacagatgggatgcttctccgggagttc

SEQ ID NO: 742900 - DNA, 120 bp, Artificial Sequence
  ENSG00000204560_14 (sequence is synthesized)
aggcacacgaaaggaccctacacacagacattctctttggattgatcaaggatgttgctcgcttccgacctgagctcaaggtcctggtggcttcagccacaatggacactgcccgttttt

SEQ ID NO: 742901 - DNA, 120 bp, Artificial Sequence
  ENSG00000204560_15 (sequence is synthesized)
ccaccttctttgatgacgcccctgtgtttcgaatccccggacgcaggtttcctgtggacatcttctacaccaaggctccagaggctgactacttggaagcttgtgtagtatctgtgttgc

SEQ ID NO: 742902 - DNA, 120 bp, Artificial Sequence
  ENSG00000204560_16 (sequence is synthesized)
agatccatgtgacccagccccctggggatatcctggtgttcctgacaggacaggaggagattgaggctgcctgtgagatgctccaggatcgctgccgccgcctgggctccaaaatccggg

SEQ ID NO: 742903 - DNA, 120 bp, Artificial Sequence
  ENSG00000204560_17 (sequence is synthesized)
agctcctggtgctgcccatttatgccaatctgccctctgacatgcaggcccgtatcttccagcccacaccacctggggcacgaaaggtggttgtggcaacgaacattgctgagacatcac

SEQ ID NO: 742904 - DNA, 120 bp, Artificial Sequence
  ENSG00000204560_18 (sequence is synthesized)
tcaccattgagggcatcatttatgtgctggatccagggttctgtaagcagaagagctacaacccccgcacaggcatggaatcgctcactgtcacaccctgcagcaaggcctcagccaatc

SEQ ID NO: 742905 - DNA, 120 bp, Artificial Sequence
  ENSG00000204560_19 (sequence is synthesized)
agcgagctggcagggcaggtcgggtggctgcagggaagtgcttccgcctgtataccgcctgggcctatcagcacgagcttgaggaaaccacagtgcctgagatccagaggaccagcttgg

SEQ ID NO: 742906 - DNA, 120 bp, Artificial Sequence
  ENSG00000204560_20 (sequence is synthesized)
gcaatgtcgtgttgctgctcaagagcttagggatccatgacctaatgcactttgatttcctggaccctccaccatatgagacactgctgctggctttggagcagctgtatgctctgggag

SEQ ID NO: 742907 - DNA, 120 bp, Artificial Sequence
  ENSG00000204560_21 (sequence is synthesized)
ccctcaaccaccttggggagctcaccacgtctggtcgaaagatggcagagctgccggtggaccccatgctgtccaaaatgatcttagcctctgagaagtacagctgttcagaggagatcc

SEQ ID NO: 742908 - DNA, 120 bp, Artificial Sequence
  ENSG00000204560_22 (sequence is synthesized)
tgacagtggctgccatgctctctgtcaacaactccatcttctaccgaccaaaggacaaggtcgtccatgctgacaatgcccgtgtcaacttctttctccctggcggtgaccacctggttc

SEQ ID NO: 742909 - DNA, 120 bp, Artificial Sequence
  ENSG00000204560_23 (sequence is synthesized)
tgctaaatgtttacacacagtgggctgagagtggttactcttcccagtggtgctatgagaactttgtacagttcagatcgatgcgccgagcccgggatgtgcgggaacagctggaagggc

SEQ ID NO: 742910 - DNA, 120 bp, Artificial Sequence
  ENSG00000204560_24 (sequence is synthesized)
tcttggaacgtgtggaagttggtctcagttcctgccagggggactatatccgtgtacgcaaggccatcactgctggttacttttaccacacggcacggttgactcggagtggctaccgca

SEQ ID NO: 742911 - DNA, 120 bp, Artificial Sequence
  ENSG00000204560_25 (sequence is synthesized)
cagtgaaacagcagcagacagtcttcattcatcccaactcctccctctttgagcaacagccacgctggctgctctaccacgaacttgtcttgaccaccaaagagttcatgagacaggtac

SEQ ID NO: 742912 - DNA, 120 bp, Artificial Sequence
  ENSG00000204560_26 (sequence is synthesized)
tggagattgagagcagttggcttctggaggtggctccccattattataaggccaaggagctagaagatccccatgctaagaaaatgcccaaaaaaataggcaaaacacgagaagagctag

SEQ ID NO: 742913 - DNA, 120 bp, Artificial Sequence
  ENSG00000204560_27 (sequence is synthesized)
ggtaagagaaggacgtaaacagaacctgacaccagctccttttccttctatacattatttaatacctattaaataaaattatttttggaataaagcttgtgggaacatttgggatctaga

SEQ ID NO: 742914 - DNA, 120 bp, Artificial Sequence
  ENSG00000204560_28 (sequence is synthesized)
tttttctagtaagagcagctgctgagtctaagcagactcttgactgaactagagggtatggctaacttgtcctggcctcagtgtgcagcctctacatcttgtctcctattatctgctgag

SEQ ID NO: 742915 - DNA, 120 bp, Artificial Sequence
  ENSG00000204560_29 (sequence is synthesized)
gctgggataggttgcagatcatggggccctggccttctctgactttctgttgctctacataagtgggatggctgacttctccttagagccccctccgtcaacagtcattcttgaactctt

SEQ ID NO: 742916 - DNA, 120 bp, Artificial Sequence
  ENSG00000204560_30 (sequence is synthesized)
ctgaacaatatgtgcctttttgactcttcagaggctgtgaatttctggtcttggaagatcacagtggagcaattggacagataggattttatccttcatatcccttgcaaaagatctcta

SEQ ID NO: 742917 - DNA, 120 bp, Artificial Sequence
  ENSG00000204560_31 (sequence is synthesized)
agaacccatggagagccagccagcgcaagagtgtctgatgcagatgtttttgcccatcgagccagcctgctttgtggaatggctggggacttcaccatcacagttaggcgtggtgatggt

SEQ ID NO: 742918 - DNA, 120 bp, Artificial Sequence
  ENSG00000204564_0 (sequence is synthesized)
gcgcgggacatctccgtttccctccctcagccccttccccccctacccccccgccccggcctcctttccccttcacgaagccggctctggggcgcgctcacccctgtgaggaggccggag

SEQ ID NO: 742919 - DNA, 120 bp, Artificial Sequence
  ENSG00000204564_1 (sequence is synthesized)
gtcggactcaggaggctccttctccactcccggaagatcatgtaccagcccagccggggtgcggcccggcgtctcggcccttgcctgcgcgcctaccaggctcgaccccaggaccagctt

SEQ ID NO: 742920 - DNA, 120 bp, Artificial Sequence
  ENSG00000204564_2 (sequence is synthesized)
tatccagggactctaccattcccacccctttggccccactccacgacaaccacttccccatcttctcctctattctggtctcccctgcccccacgccttcccacccagcgtcttccccag

SEQ ID NO: 742921 - DNA, 120 bp, Artificial Sequence
  ENSG00000204564_3 (sequence is synthesized)
gttcccccactacctctccctcagatccaggccctcagctcagcatgggtggttctccctccaggaaagggggaggagggaccaggacctgagttgcatagcggctgcctggatgggctt

SEQ ID NO: 742922 - DNA, 120 bp, Artificial Sequence
  ENSG00000204564_4 (sequence is synthesized)
agaagcctttttgagggacctccctgcccctatcctggggcttggatacctttccaagtccctggaactgcccacccttcccctgccaccccgtcaggagatcctagtatggaggaacat

SEQ ID NO: 742923 - DNA, 120 bp, Artificial Sequence
  ENSG00000204564_5 (sequence is synthesized)
atgtggaattcatcaatgagatcctcaacatacgtaccaagggccggacatggtacattctttcactgaccctctgccgtttcctggcctggaattattttgcacaccttcgtttggagg

SEQ ID NO: 742924 - DNA, 120 bp, Artificial Sequence
  ENSG00000204564_6 (sequence is synthesized)
ttttacagctgacccgccaccctgagaactggaccctgcaagcccggtggcggcttgtggggctgcccgtccacttgctctttttgcggttctacaagcgtgacaaagacgagcattacc

SEQ ID NO: 742925 - DNA, 120 bp, Artificial Sequence
  ENSG00000204564_7 (sequence is synthesized)
ggacctatgatgcctactccactttctacctgaattccagtggcctcatttgtcgccatcgtctagataaactgatgccttcacactcacctccaacgcctgtgaagaagctgctagtgg

SEQ ID NO: 742926 - DNA, 120 bp, Artificial Sequence
  ENSG00000204564_8 (sequence is synthesized)
gagccctggtggccctggggctgtcagagccagaacctgacttaaacctgtgttccaagccctgatccttgaccttggagtggaggcagcactgaagactgctacgcccaagagaaggag

SEQ ID NO: 742927 - DNA, 120 bp, Artificial Sequence
  ENSG00000204564_9 (sequence is synthesized)
gtggaggcagccaagaatctcaggagccagcttcctctcctcgtttctctccttccttcctttccatctcatgctgtgtaaagctgctgtgtaatttaacttgtaaataataaagtttaa

SEQ ID NO: 742928 - DNA, 120 bp, Artificial Sequence
  ENSG00000204564_10 (sequence is synthesized)
ctgactatatgagatagaatttcacatatcactttctctagatcccaaatgttcccacaagctttattccaaaaataattttatttaataggtattaaataatgtatagaaggaaaagga

SEQ ID NO: 742929 - DNA, 120 bp, Artificial Sequence
  ENSG00000204564_11 (sequence is synthesized)
caagcccggtggcggcttgtggggctgcccgtccacttgctctttttgcggttctacaagcgtgacaaagacgagcattaccgctgatgccttcacactcacctccaacgcctgtgaaga

SEQ ID NO: 742930 - DNA, 120 bp, Artificial Sequence
  ENSG00000204564_12 (sequence is synthesized)
agcgcgcgctgggttccgcgcaggcgcagagacacccgccgccccttcccacctgtgccctgcagcgcgtggacaggctaggggtcgcgggagcgggagggaggcgctgccgggcctgtc

SEQ ID NO: 742931 - DNA, 120 bp, Artificial Sequence
  ENSG00000204564_13 (sequence is synthesized)
tgtcgcgcaaggacgtcggtcctcccaggtttgagggcggtcaggcggggtcaaggccaggcagcggggcgcgtctgcgttgcgcccgactctccgcggttacctgtgcctagaggtgat

SEQ ID NO: 742932 - DNA, 120 bp, Artificial Sequence
  ENSG00000204564_14 (sequence is synthesized)
ttgaagggcaggggccgagagattcgtagccctgctgcggcgccgtcccggagttccccggcccagaccagacccgcggggcgccctcagcagcccgcccgtcttgcactcggagagcgg

SEQ ID NO: 742933 - DNA, 120 bp, Artificial Sequence
  ENSG00000204564_15 (sequence is synthesized)
tcctggcaggaaggccggccagtgtgcacccggttcgggcccctgcgcccgggctggcaagatggccacgcccccagcagagacggcgcctctaggacaccatcggggaccgaggaccag

SEQ ID NO: 742934 - DNA, 120 bp, Artificial Sequence
  ENSG00000204564_16 (sequence is synthesized)
gccggaggtcggactcaggaggctccttctccactcccggaagatcatgtaccagcccagccggggtgcggcccggcgtctcggcccttgcctgcgcgcctaccaggctcgaccccagag

SEQ ID NO: 742935 - DNA, 120 bp, Artificial Sequence
  ENSG00000204568_0 (sequence is synthesized)
aattcctgtcctgggcgtacgtcaagatggcggcgtctgtattaaacaccgtgctgaggcggcttcctatgctatctctcttccgaggttctcacagagttcaggttcccctccagactc

SEQ ID NO: 742936 - DNA, 120 bp, Artificial Sequence
  ENSG00000204568_1 (sequence is synthesized)
tttgcaccaaagctccctctgaggaagattctttgtcctcagttcccatttctccttataaggatgagccctggaaatatctggaatcagaagaataccaggagcgatatggttctcgcc

SEQ ID NO: 742937 - DNA, 120 bp, Artificial Sequence
  ENSG00000204568_2 (sequence is synthesized)
ccgtctgggctgactaccgccgcaaccacaagggtggtgtacccccacagcggactcggaagacatgtattcgtcggaataaagttgttgggaatccctgccccatctgtcgagatcaca

SEQ ID NO: 742938 - DNA, 120 bp, Artificial Sequence
  ENSG00000204568_3 (sequence is synthesized)
agttgcatgttgactttaggaacgtgaagctcttggagcaatttgtctgcgcccacacgggtatcatcttctatgctccatacacaggagtctgtgtgaagcagcacaagcggttgaccc

SEQ ID NO: 742939 - DNA, 120 bp, Artificial Sequence
  ENSG00000204568_4 (sequence is synthesized)
aggccatccagaaagccagggatcatggtctcctcatttaccacatcccccaggttgaaccacgggaccttgacttcagtacctctcatggggctgtgagtgctactccgccagccccca

SEQ ID NO: 742940 - DNA, 120 bp, Artificial Sequence
  ENSG00000204568_5 (sequence is synthesized)
ggctttaccagggtcatctccaagaagagagtggccccccacctgagtcaatgcccaagatgccccctagaacaccagcggaagcctcctccactgggcagacaggccctcagagtgctc

SEQ ID NO: 742941 - DNA, 64 bp, Artificial Sequence
  ENSG00000204568_6 (sequence is synthesized)
gaagcctcctccactgggcagacaggccctcagagtgctctgtaggagctgtagactgggaaga

SEQ ID NO: 742942 - DNA, 69 bp, Artificial Sequence
  ENSG00000204568_7 (sequence is synthesized)
atggtgaaacctcgtctttaactattggggaggctaaggtaggatcacttgatcccaggaggcggaggt

SEQ ID NO: 742943 - DNA, 89 bp, Artificial Sequence
  ENSG00000204568_8 (sequence is synthesized)
tgggtgacgactgggaagagagctagagggactaggagataatgtgtatgtaggtttatgtgatgggatatcaccctgaagagttgtgt

SEQ ID NO: 742944 - DNA, 120 bp, Artificial Sequence
  ENSG00000204568_9 (sequence is synthesized)
gtaggtttatgtgatgggatatcaccctgaagagttgtgtcttttgtggccagtgacaaatccaggaaatgaatgttgctgatagggataaatcttgaggctgagggcgggtggtacaga

SEQ ID NO: 742945 - DNA, 120 bp, Artificial Sequence
  ENSG00000204568_10 (sequence is synthesized)
tgtgtatgggaaaccccaacccctatatattgtaaatagatgggctgggctaaacattgttgccgtttcatacttctaccaactcagcttttacacaataaagctctactgtctctggtt

SEQ ID NO: 742946 - DNA, 120 bp, Artificial Sequence
  ENSG00000204568_11 (sequence is synthesized)
ccacaagggtggtgtacccccacagcggactcggaagacatgtattgtgagtttctgagagtgggatgtggagtgcggggaggccacaagtaacagtaacagcagcactttttctgacgt

SEQ ID NO: 742947 - DNA, 66 bp, Artificial Sequence
  ENSG00000204568_12 (sequence is synthesized)
tcacaagttgcatgttgactttagggtaaggagagtcttttctttttagggtaagaaaaataaaga

SEQ ID NO: 742948 - DNA, 120 bp, Artificial Sequence
  ENSG00000204569_0 (sequence is synthesized)
attctggggttcgtttagaggtttgaattttctcggagaaagacaggccggccacgaggaaaacagaaacaagccgcagcaacatctaagcccttgaaaggatcctgagagaggggggaa

SEQ ID NO: 742949 - DNA, 120 bp, Artificial Sequence
  ENSG00000204569_1 (sequence is synthesized)
agggaaaacagcagccaccagcccaaccacttgtgtcttctgccccttcccacctatcttgcccaccccaccagcccacgctgcttgggacttgaaatctgtggccgaaggaccgtcact

SEQ ID NO: 742950 - DNA, 120 bp, Artificial Sequence
  ENSG00000204569_2 (sequence is synthesized)
acataacttcaaaaataatcaaccaccctcccttcccaaaccacccaaattcactcatccagcgtttacttttttgaatccactcagaacttttttctgcgacccccctccctaaatgga

SEQ ID NO: 742951 - DNA, 120 bp, Artificial Sequence
  ENSG00000204569_3 (sequence is synthesized)
gttgggtgggggggaaatgaatactgagttggcctttattttttaaaagactttttgatccaatgaggccccctaaataattgagttttgggtcctggttggttgttttattttttttcc

SEQ ID NO: 742952 - DNA, 120 bp, Artificial Sequence
  ENSG00000204569_4 (sequence is synthesized)
tccaaaattttaccccctcccccctgagcccgaggtgctgacgtcgcaaaaaaattggataaaaccaccatcatgggttcgggtcccatagaccccaaagaacttctcaagggcctggac

SEQ ID NO: 742953 - DNA, 120 bp, Artificial Sequence
  ENSG00000204569_5 (sequence is synthesized)
agcttccttaaccgagatggggaagtcaaaagtgtggatgggatttccaagatcttcagtttgatgaaggaagcacgaaagatggtgagtcgatgcacttacttgaacattctcctgcag

SEQ ID NO: 742954 - DNA, 120 bp, Artificial Sequence
  ENSG00000204569_6 (sequence is synthesized)
acccgttcaccagaaatattggtcaaatttattgacgttggcggctacaaacttcttaacaattggctgacgtattcaaagacaaccaacaacattcccctcctccagcaaattctactg

SEQ ID NO: 742955 - DNA, 120 bp, Artificial Sequence
  ENSG00000204569_7 (sequence is synthesized)
accctgcagcatctaccgctcactgtagaccatctcaagcagaacaacacagctaaactggtgaagcagctgagcaagtcaagtgaggatgaagagctccggaaattggcctcagtcctt

SEQ ID NO: 742956 - DNA, 120 bp, Artificial Sequence
  ENSG00000204569_8 (sequence is synthesized)
gtcagcgactggatggctgtcatccgctctcagagcagtacccagcctgctgagaaagataagaagaaacgtaaagatgaaggaaaaagtcgaactacccttcctgagcgacctttgaca

SEQ ID NO: 742957 - DNA, 120 bp, Artificial Sequence
  ENSG00000204569_9 (sequence is synthesized)
gaggtgaaggctgagacccgggctgaggaggccccagagaagaagagggagaagcccaagtctcttcgcaccacagcacccagtcatgccaagttccgttccactggactagagctggag

SEQ ID NO: 742958 - DNA, 120 bp, Artificial Sequence
  ENSG00000204569_10 (sequence is synthesized)
acaccatccttggtgcctgtgaagaagaatgccagcacagtggtggtttctgacaagtacaaccttaaacccatccccctcaaacgtcagagcaacgtagctgctccaggagatgccact

SEQ ID NO: 742959 - DNA, 120 bp, Artificial Sequence
  ENSG00000204569_11 (sequence is synthesized)
ccccctgcagagaagaaatacaagccactcaacacaacacctaatgccaccaaagagatcaaagtgaagatcatcccgccacagcctatggagggcctgggctttctggatgctcttaat

SEQ ID NO: 742960 - DNA, 120 bp, Artificial Sequence
  ENSG00000204569_12 (sequence is synthesized)
tcagcccctgttccaggcatcaaaattaagaagaaaaaaaaagtactgtcacctacggctgccaagccaagcccctttgaagggaaaacgagcacagaaccaagcacagccaaaccttct

SEQ ID NO: 742961 - DNA, 120 bp, Artificial Sequence
  ENSG00000204569_13 (sequence is synthesized)
tccccagaaccagcaccaccttctgaggcaatggacgcagaccgtccaggcaccccggttccccctgttgaagtcccggagctcatggatacagcctctttggagccaggagctctggat

SEQ ID NO: 742962 - DNA, 120 bp, Artificial Sequence
  ENSG00000204569_14 (sequence is synthesized)
gccaagccagtggagagtcctggagatcctaaccaactgacccggaaaggcaggaagaggaaaagtgtgacatggcctgaggaaggcaaactgagagaatatttctattttgaattggat

SEQ ID NO: 742963 - DNA, 120 bp, Artificial Sequence
  ENSG00000204569_15 (sequence is synthesized)
gaaactgaacgagtaaatgtgaataagatcaaggactttggtgaggcggctaagcgagagatactgtcagaccgacatgcatttgagacagcgcggcgtctgagccatgataacatggag

SEQ ID NO: 742964 - DNA, 120 bp, Artificial Sequence
  ENSG00000204569_16 (sequence is synthesized)
gagaaggtgccctgggtgtgcccccggcccctggttctgccctcacctcttgtcacccctggaagcaatagtcaggagcgatatatccaggctgagcgggagaagggaatccttcaggag

SEQ ID NO: 742965 - DNA, 120 bp, Artificial Sequence
  ENSG00000204569_17 (sequence is synthesized)
ctcttcctgaacaaggagagtcctcatgagcctgatcctgagccctacgagcccataccccctaaactcatccccctagatgaggagtgttccatggatgagactccgtatgttgagact

SEQ ID NO: 742966 - DNA, 120 bp, Artificial Sequence
  ENSG00000204569_18 (sequence is synthesized)
tcttatgggaagcatgggtgctggaaagggcccccaaggccctggaggaggaggcattaatgtccaagagatcctcacctccatcatgggtagcccaaacagtcatccttcagaggaact

SEQ ID NO: 742967 - DNA, 120 bp, Artificial Sequence
  ENSG00000204569_19 (sequence is synthesized)
actgaaacaaccagactattcggacaagatcaagcagatgctggtgccacatggactcctaggccctggcccaatagccaatggtttcccaccagggggtcctgggggccccaagggcat

SEQ ID NO: 742968 - DNA, 120 bp, Artificial Sequence
  ENSG00000204569_20 (sequence is synthesized)
gcagcactttccccctggacctgggggacctatgccaggtccccatggaggccctggtgggccagtgggtccacgtcttctgggtcctccaccccctccccggggaggtgatcccttctg

SEQ ID NO: 742969 - DNA, 120 bp, Artificial Sequence
  ENSG00000204569_21 (sequence is synthesized)
ggatggcccgggcgaccctatgcggggtggcccaatgcgggggggtccaggaccaggtcctggaccataccatagaggccgaggtggccgaggaggaaacgaacctcctcctcctcctcc

SEQ ID NO: 742970 - DNA, 120 bp, Artificial Sequence
  ENSG00000204569_22 (sequence is synthesized)
tccattccgaggcgccagaggaggtcgctctggaggaggacccccaaatggacgagggggccctggtgggggcatggttggaggtggtgggcatcgtcctcacgaaggccctggtggggg

SEQ ID NO: 742971 - DNA, 120 bp, Artificial Sequence
  ENSG00000204569_23 (sequence is synthesized)
catgggcaacagcagtggacatcgtccccacgaaggccctggcggtggcatgggaagtgggcatcgcccccatgaaggccctggtggtagcatgggtgggggtggaggacatcgtcccca

SEQ ID NO: 742972 - DNA, 120 bp, Artificial Sequence
  ENSG00000204569_24 (sequence is synthesized)
cgaaggccctggcggtggcatcagtggtggcagtggccatcgtccccatgaaggccctggcggaggaatgggtgccggtggtggacatcgcccccacgaaggccctggcggaagcatggg

SEQ ID NO: 742973 - DNA, 120 bp, Artificial Sequence
  ENSG00000204569_25 (sequence is synthesized)
tggaagtggtggacatcgtccccatgaaggccctggacacggggggccccatggccaccggcctcatgatgtccctggtcaccgaggccatgaccatcgagggccgccacctcatgagca

SEQ ID NO: 742974 - DNA, 120 bp, Artificial Sequence
  ENSG00000204569_26 (sequence is synthesized)
ccgtggccatgatggtcctggccacgggggagggggccaccgagggcacgatggaggccacagccatggaggagacatgtcaaaccgccctgtctgccgacatttcatgatgaagggcaa

SEQ ID NO: 742975 - DNA, 120 bp, Artificial Sequence
  ENSG00000204569_27 (sequence is synthesized)
ctgccgctatgagaacaactgtgccttctaccacccgggtgtcaatgggccccccctgccctagggaccatttgcctgccctgttcacacaacccctgtggactgcagcctcgctctttc

SEQ ID NO: 742976 - DNA, 120 bp, Artificial Sequence
  ENSG00000204569_28 (sequence is synthesized)
caccctgttatggcttctgtgaggcccattttcccttttccccagctgatgaggagccggccccctcagttcccacttgcttgggttcctgggggttttctgatcactggtgcgcattga

SEQ ID NO: 742977 - DNA, 120 bp, Artificial Sequence
  ENSG00000204569_29 (sequence is synthesized)
tgtacatattttcctccagtctggggaggagagagactggaaacgttcctggactgctgaagaggagacccagttggcttcactttttgagaagattcgccctgtaccccaaaccccttt

SEQ ID NO: 742978 - DNA, 120 bp, Artificial Sequence
  ENSG00000204569_30 (sequence is synthesized)
ccagtattacccttaatgcttgagaacctaaagctggttatcctggcgaacacccctacccttctattgcgggtccccacatgcacacagaactctgacacaggatcagctgcacttaag

SEQ ID NO: 742979 - DNA, 120 bp, Artificial Sequence
  ENSG00000204569_31 (sequence is synthesized)
aaatcatcccagctaagttcattattcctcatggggtggggagatgctgaaaggggtattgtatatcccactgcactgagagggctcaatcagctggatttgagttctggaacacacatc

SEQ ID NO: 742980 - DNA, 120 bp, Artificial Sequence
  ENSG00000204569_32 (sequence is synthesized)
atccccacccctcccccagcgtgggctcaccattcttagtcctttctcaagtgggaccttcaactttctgtgaacacccagtctgcgtcctgggtctgctaggttcgatgatggcgaact

SEQ ID NO: 742981 - DNA, 120 bp, Artificial Sequence
  ENSG00000204569_33 (sequence is synthesized)
cgtatctgcatccggtgcaagttttagctggcagaggtgagaccggtggtgctggtctgcctttgccaactatagccagtctggagacttgataaaatacttcagtgagaccagcttctc

SEQ ID NO: 742982 - DNA, 120 bp, Artificial Sequence
  ENSG00000204569_34 (sequence is synthesized)
atcaacttgggcccggcgtgctgggcctgaaagtcacactacatgcactgcctttgggagtcagctcactccctgctcccacctggaaccttgccagcgtgaaggaggcttccaggtact

SEQ ID NO: 742983 - DNA, 120 bp, Artificial Sequence
  ENSG00000204569_35 (sequence is synthesized)
tcaccctgtcaaccacctctgaatccccaccaggcgccttcctgggtggattcaacaagatgattttgccctttcccagttctctccttcactttggcatcagttgttttctatgaaaac

SEQ ID NO: 742984 - DNA, 120 bp, Artificial Sequence
  ENSG00000204569_36 (sequence is synthesized)
agtggattggttgggttttgtgcagggtcttgggttagagccaaaatggatttgaggatgagtatttttttttttggttttgtatattttgtacattaataataaacagtggaaagagaa

SEQ ID NO: 742985 - DNA, 120 bp, Artificial Sequence
  ENSG00000204569_37 (sequence is synthesized)
cccataccccctaaactcatccccctagatgaggtaagtcaatgttctgtgatgatggaagttgtgatggtcattgaattcggtgcatctttcatatgagaatgtctctgttctgtcaat

SEQ ID NO: 742986 - DNA, 120 bp, Artificial Sequence
  ENSG00000204569_38 (sequence is synthesized)
cctgattttttttgttcttctttcaggagtgttccatggatgagactccgtatgttgagactctggaacctggggggtcaggtggctcacctgatggggcaggaggctccaagttgcctc

SEQ ID NO: 742987 - DNA, 120 bp, Artificial Sequence
  ENSG00000204569_39 (sequence is synthesized)
aaattttaccccctcccccctgagcccgaggtgctgacgtcgcaaaaaaattggatagaaccagtgggcctcctgcatttggtcgctttgtgtaatgagaatcgggggaagaaaccacca

SEQ ID NO: 742988 - DNA, 120 bp, Artificial Sequence
  ENSG00000204569_40 (sequence is synthesized)
ctattgggatgtggcctttaggtgctcccagtctgcttcacctctgacagtgttcatctaaataaaatccttttctgctttgttttttcacaacagagaaagataagaagaaacgtaaag

SEQ ID NO: 742989 - DNA, 89 bp, Artificial Sequence
  ENSG00000204569_41 (sequence is synthesized)
cctaatgccaccaaagagatcaaagtgaagatcatcccgccacagcgtgagtctaaagtggggaagatgtactttgaattaggagcaaa

SEQ ID NO: 742990 - DNA, 120 bp, Artificial Sequence
  ENSG00000204569_42 (sequence is synthesized)
agacagagtcttcctttatataggaactgttgggggactgtgcctgggaccctggactaattgccttgcccttggctttccagtcagttcattaacttccttttctttcacaatagccaa

SEQ ID NO: 742991 - DNA, 120 bp, Artificial Sequence
  ENSG00000204571_0 (sequence is synthesized)
atgggctgctgtggctgttctggaggctgtggctctggctgtgggggctgtggctccggcagtgggggctgtggctctggctgtgggggctgtggctccagctgctgtgtgcccatttgc

SEQ ID NO: 742992 - DNA, 120 bp, Artificial Sequence
  ENSG00000204571_1 (sequence is synthesized)
tgctgcaagcctgtgtgctgctgtgtgccagcctgttcctgctccagctgtggctcctgtgggggctccaaagggggctgtggctcttgtgggagctccaagggtgggtgtggttcttgt

SEQ ID NO: 742993 - DNA, 120 bp, Artificial Sequence
  ENSG00000204571_2 (sequence is synthesized)
tccaaaccctgctgctgccaatccagctgctgccagtccagctgctgcaagccctgctgctgccaatccagctgctgccagtctagctgcttcaagccctgctgctgccagtccagctgc

SEQ ID NO: 742994 - DNA, 120 bp, Artificial Sequence
  ENSG00000204571_3 (sequence is synthesized)
tgcaaactctgctgctgctcctcaggctgtggatcaacctgctcccagtccagctgctgcaagccctgctgctcccagtccagctgctgtgtccctatttgctgtcagtacaagatctga

SEQ ID NO: 742995 - DNA, 120 bp, Artificial Sequence
  ENSG00000204571_4 (sequence is synthesized)
caggcccaggagtgaggcgactgaggcgcccaggctgtaagccatgaggaggtccactgtcctccctgtgtggtgcaccatggaggctcagactccatcctcaaggctggcaagaagaca

SEQ ID NO: 742996 - DNA, 74 bp, Artificial Sequence
  ENSG00000204571_5 (sequence is synthesized)
ctggggggctcaaggcacagagctccttattagccaaagtcacccaagttccccaacctctaaggatttcctta

SEQ ID NO: 742997 - DNA, 120 bp, Artificial Sequence
  ENSG00000204571_6 (sequence is synthesized)
cttccctggacgccatggtgttccctgcacttgggtgtggaccatcttcttcttctccctgggctgactgagatgctaggtctgaccccacaaggccaggccgacattcctgagtgatca

SEQ ID NO: 742998 - DNA, 120 bp, Artificial Sequence
  ENSG00000204571_7 (sequence is synthesized)
ctaagaaccagtttctcaaccaccactgggattctgggtcctcctgggctgctgcctgttctcctgtgacccacctgtgagcaagaaggtctccttccttcctgttgtctccatctattt

SEQ ID NO: 742999 - DNA, 120 bp, Artificial Sequence
  ENSG00000204571_8 (sequence is synthesized)
tttggtgaaagcatttcttatggtttctctgaatcagttcatcccacacatcatcctgaggcacctgcacctgctctagctcatcatccatgcatgcacctctttccatggctcggctct

SEQ ID NO: 743000 - DNA, 120 bp, Artificial Sequence
  ENSG00000204572_0 (sequence is synthesized)
gatccaccctcaatctaccagaatcatgggctgctgtggctgctccggaggctgtggctccggctgtgggggttgtggctccggctgtgggggctgtggctccggctgtgggggctatgg

SEQ ID NO: 743001 - DNA, 120 bp, Artificial Sequence
  ENSG00000204572_1 (sequence is synthesized)
ctctggctgtgggggctgtggctccagctgctgtgtgcccgtctgctgctgcaagcccgtgtgctgctgtgtgccagcctgttcctgctccagctgtggctcctgtgggggctccaaggg

SEQ ID NO: 743002 - DNA, 120 bp, Artificial Sequence
  ENSG00000204572_2 (sequence is synthesized)
ggactgtggctcttgtgggggctccaaagggggctgtggttcctgtgggggctccaaggggggctgtggctcctgtgggggctccaaggggggctgtggttcttgtgggggctccaaggg

SEQ ID NO: 743003 - DNA, 120 bp, Artificial Sequence
  ENSG00000204572_3 (sequence is synthesized)
gggctgtggctcctgtgggggctccaaaggtggctgtggttcctgtgggggctccaaggggggctgtggttcttgtggctgctcccagtgcaattgctgtaagccctgctgctgctcctc

SEQ ID NO: 743004 - DNA, 120 bp, Artificial Sequence
  ENSG00000204572_4 (sequence is synthesized)
caagccctgctgctgtcagtccagctgctgtgtccccgtgtgctgccagtgtaagatctgaggctctgaacccagaccttcaggtttcacctgtttggtgaaagcatttgttatgatttc

SEQ ID NO: 743005 - DNA, 120 bp, Artificial Sequence
  ENSG00000204572_5 (sequence is synthesized)
cctgaattaattcatcccacgcatcctccctgaggcacctgccccttctccagctcatcatccatgcacgcacctccttccatggctcagctctccactgggccctgccttcagcctcct

SEQ ID NO: 743006 - DNA, 120 bp, Artificial Sequence
  ENSG00000204572_6 (sequence is synthesized)
cactccggaaatgcatgtttccttgatgcaggaggtggccttgcctggacgcgggcacccagccaactgccatggtgttccctgcacttgggtgtggaccatcttcttcttctccctcgg

SEQ ID NO: 743007 - DNA, 120 bp, Artificial Sequence
  ENSG00000204572_7 (sequence is synthesized)
ctgactgagatgcaaggtctgaccccacaaggccaggccaatgttgctcagtgatcactaagaaccagcttctcaaccaccattgggaccctggatcctccagggccgctcgctgcctgt

SEQ ID NO: 743008 - DNA, 120 bp, Artificial Sequence
  ENSG00000204572_8 (sequence is synthesized)
tctccagtggccacctgtgaccaggaaggtctccttccttcctgttgtctccatctatttaaaaacaataacaaagtaatgaatgaatttccttacaataaagcctctcatgtctgtaaa

SEQ ID NO: 743009 - DNA, 120 bp, Artificial Sequence
  ENSG00000204574_0 (sequence is synthesized)
ggaaatagcaccgggcgccgccacagtagctgtaactgccaccgcgatgccgaaggcgcccaagcagcagccgccggagcccgagtggatcggggacggagagagcacgagcccatcaga

SEQ ID NO: 743010 - DNA, 120 bp, Artificial Sequence
  ENSG00000204574_1 (sequence is synthesized)
caaagtggtgaagaaagggaagaaggacaagaagatcaaaaaaacgttctttgaagagctggcagtagaagataaacaggctggggaagaagagaaagtgctcaaggagaaggagcagca

SEQ ID NO: 743011 - DNA, 120 bp, Artificial Sequence
  ENSG00000204574_2 (sequence is synthesized)
gcagcagcaacagcaacagcagcaaaaaaaaaagcgagatacccgaaaaggcaggcggaagaaggatgtggatgatgatggagaagagaaagagctcatggagcgtcttaagaagctctc

SEQ ID NO: 743012 - DNA, 120 bp, Artificial Sequence
  ENSG00000204574_3 (sequence is synthesized)
agtgccaaccagtgatgaggaggatgaagtacccgccccaaaaccccgcggagggaagaaaaccaagggtggtaatgtttttgcagccctgattcaggatcagagtgaggaagaggagga

SEQ ID NO: 743013 - DNA, 120 bp, Artificial Sequence
  ENSG00000204574_4 (sequence is synthesized)
ggaagaaaaacatcctcctaagcctgccaagccggagaagaatcggatcaataaggccgtatctgaggaacagcagcctgcactcaagggcaaaaagggaaaggaagagaagtcaaaagg

SEQ ID NO: 743014 - DNA, 120 bp, Artificial Sequence
  ENSG00000204574_5 (sequence is synthesized)
gaaggctaagcctcaaaataaattcgctgctctggacaatgaagaggaggataaagaagaagaaattataaaggaaaaggagcctcccaaacaagggaaggagaaggccaagaaggcaga

SEQ ID NO: 743015 - DNA, 120 bp, Artificial Sequence
  ENSG00000204574_6 (sequence is synthesized)
gcagggttcagaggaagaaggagaaggggaagaagaggaggaggaaggaggagagtctaaggcagatgatccctatgctcatcttagcaaaaaggagaagaaaaagctgaaaaaacagat

SEQ ID NO: 743016 - DNA, 120 bp, Artificial Sequence
  ENSG00000204574_7 (sequence is synthesized)
ggagtatgagcgccaagtggcttcattaaaagcagccaatgcagctgaaaatgacttctccgtgtcccaggcggagatgtcctcccgccaagccatgttagaaaatgcatctgacatcaa

SEQ ID NO: 743017 - DNA, 120 bp, Artificial Sequence
  ENSG00000204574_8 (sequence is synthesized)
gctggagaagttcagcatctccgctcatggcaaggagctgttcgtcaatgcagacctgtacattgtagccggccgccgctacgggctggtaggacccaatggcaagggcaagaccacact

SEQ ID NO: 743018 - DNA, 120 bp, Artificial Sequence
  ENSG00000204574_9 (sequence is synthesized)
cctcaagcacattgccaaccgagccctgagcatccctcccaacattgatgtgttgctgtgtgagcaggaggtggtagcagatgagacaccagcagtccaggctgttcttcgagctgacac

SEQ ID NO: 743019 - DNA, 120 bp, Artificial Sequence
  ENSG00000204574_10 (sequence is synthesized)
caagcgattgaagctgctggaagaggagcggcggcttcagggacagctggaacaaggggatgacacagctgctgagaggctagagaaggtgtatgaggaattgcgggccactggggcggc

SEQ ID NO: 743020 - DNA, 120 bp, Artificial Sequence
  ENSG00000204574_11 (sequence is synthesized)
agctgcagaggccaaagcacggcggatcctggctggcctgggctttgaccctgaaatgcagaatcgacccacacagaagttctcagggggctggcgcatgcgtgtctccctggccagggc

SEQ ID NO: 743021 - DNA, 120 bp, Artificial Sequence
  ENSG00000204574_12 (sequence is synthesized)
actgttcatggagcccacactgctgatgctggatgagcccaccaaccacctggacctcaacgctgtcatctggcttaataactacctccagggctggcggaagaccttgctgatcgtctc

SEQ ID NO: 743022 - DNA, 120 bp, Artificial Sequence
  ENSG00000204574_13 (sequence is synthesized)
ccatgaccagggcttcttggatgatgtctgcactgatatcatccacctcgatgcccagcggctccactactataggggcaattacatgaccttcaaaaagatgtaccagcagaagcagaa

SEQ ID NO: 743023 - DNA, 120 bp, Artificial Sequence
  ENSG00000204574_14 (sequence is synthesized)
gctgaaggcaggcgggaagtccaccaagcaggcggaaaaacaaacgaaggaagccctgactcggaagcagcagaaatgccgacggaaaaaccaagatgaggaatcccaggaggcccctga

SEQ ID NO: 743024 - DNA, 120 bp, Artificial Sequence
  ENSG00000204574_15 (sequence is synthesized)
gctcctgaagcgccctaaggagtacactgtgcgcttcacttttccagaccccccaccactcagccctccagtgctgggtctgcatggtgtgacattcggctaccagggacagaaaccact

SEQ ID NO: 743025 - DNA, 120 bp, Artificial Sequence
  ENSG00000204574_16 (sequence is synthesized)
ctttaagaacttggattttggcatcgacatggattcaaggatttgcattgtgggccctaatggtgtggggaagagtacgctactcctgctgctgactggcaagctgacaccgacccatgg

SEQ ID NO: 743026 - DNA, 120 bp, Artificial Sequence
  ENSG00000204574_17 (sequence is synthesized)
ggaaatgagaaagaaccaccggctgaaaattggcttcttcaaccagcagtatgcagagcagctgcgcatggaggagacgcccactgagtacctgcagcggggcttcaacctgccctacca

SEQ ID NO: 743027 - DNA, 120 bp, Artificial Sequence
  ENSG00000204574_18 (sequence is synthesized)
ggatgcccgcaagtgcctgggccgcttcggcctggagagtcacgcccacaccatccagatctgcaaactctctggtggtcagaaggcgcgagttgtgtttgctgagctggcctgtcggga

SEQ ID NO: 743028 - DNA, 120 bp, Artificial Sequence
  ENSG00000204574_19 (sequence is synthesized)
acctgatgtcctcatcttggacgagccaaccaataacctggacatagagtctattgatgctctaggggaggccatcaatgaatacaagggtgctgtgatcgttgtcagccatgatgcccg

SEQ ID NO: 743029 - DNA, 120 bp, Artificial Sequence
  ENSG00000204574_20 (sequence is synthesized)
actcatcacagaaaccaattgccagctgtgggtggtggaggagcagagtgttagccaaatcgatggtgactttgaagactacaagcgggaggtgttggaggccctgggtgaagtcatggt

SEQ ID NO: 743030 - DNA, 120 bp, Artificial Sequence
  ENSG00000204574_21 (sequence is synthesized)
cagccggccccgagagtgagctttccttcccagaagtctcccgagagacatatttgtgtggcctagaagtcctctgtggtctcccctcctctgaagactgcctctggcctgcagctgacc

SEQ ID NO: 743031 - DNA, 120 bp, Artificial Sequence
  ENSG00000204574_22 (sequence is synthesized)
tggcaaccattcaggcacatgaaggtggagtgtgaccttgatgtgaccgggatcccactctgattgcatccatttctctgaaagacttgtttgttctgcttctcttcatataactgagct

SEQ ID NO: 743032 - DNA, 120 bp, Artificial Sequence
  ENSG00000204574_23 (sequence is synthesized)
ggccttatccttggcatccccctaaacaaacaagaggtgaccaccttattgtgaggttccatccagccaagtttatgtggcctattgtctcaggactctcatcactcagaagcctgcctc

SEQ ID NO: 743033 - DNA, 120 bp, Artificial Sequence
  ENSG00000204574_24 (sequence is synthesized)
tgatttaccctacagcttcaggcccagctgccccccagtctttgggtggtgctgttcttttctggtggatttaatgctgactcactggtacaaacagctgttgaagctcagagctggagg

SEQ ID NO: 743034 - DNA, 120 bp, Artificial Sequence
  ENSG00000204574_25 (sequence is synthesized)
tgagcttctgaggcctttgccattatccagcccaagatttggtgcctgcagcctcttgtctggttgaggacttggggcaggaaaggaatgctgctgaacttgaatttccctttacaaggg

SEQ ID NO: 743035 - DNA, 120 bp, Artificial Sequence
  ENSG00000204574_26 (sequence is synthesized)
gaagaaataaaggaaaggagttgctgccgacctgtcactgtttggagattgatgggagttggaactgttctcagtcttgatttgctttattcagttttctagcagcttttaatagtcccc

SEQ ID NO: 743036 - DNA, 120 bp, Artificial Sequence
  ENSG00000204574_27 (sequence is synthesized)
tcttccccactaaatggatcttgtttgcagtcttgctgacagtgtttgctgtttaaggatcataggattcctttcccccaacccttcacgcaaggaaaaagcaaagtgattcataccttc

SEQ ID NO: 743037 - DNA, 120 bp, Artificial Sequence
  ENSG00000204574_28 (sequence is synthesized)
ggaaatagcaccgggcgccgccacagtagctgtaactgccaccgcgatgccgaaggcgcccaagcagcagccgccggagcccgagtggatcggggacggagagagcacgagcccatcagt

SEQ ID NO: 743038 - DNA, 86 bp, Artificial Sequence
  ENSG00000204574_29 (sequence is synthesized)
gatgtatggagctgcagcacctttttcccttgccctcctcttaactactttgtcttcccttgcagacccatggggaaatgagaaag

SEQ ID NO: 743039 - DNA, 120 bp, Artificial Sequence
  ENSG00000204574_30 (sequence is synthesized)
actttgtcttcccttgcagacccatggggaaatgagaaagaaccaccggctggtaagttggcattgggatttagggaatgataatctgatggaggaagtgtgactttaaccgaccacctc

SEQ ID NO: 743040 - DNA, 75 bp, Artificial Sequence
  ENSG00000204574_31 (sequence is synthesized)
caaacagctgttgaagctcagagctggagacggagtcttgctctgtcgccatcctggaatgcagtagcgtccctg

SEQ ID NO: 743041 - DNA, 63 bp, Artificial Sequence
  ENSG00000204574_32 (sequence is synthesized)
atgttggctaggatggtctccatctcctgaccttgggattcgagcttattcttaaaatacagt

SEQ ID NO: 743042 - DNA, 120 bp, Artificial Sequence
  ENSG00000204574_33 (sequence is synthesized)
agaaaaccaaggtaagccatctgtgtggtaaacggagactccaaggatgcaaccttgaccatcctactgacttctgtggccctttcattctctagggtggtaatgtttttgcagccctga

SEQ ID NO: 743043 - DNA, 120 bp, Artificial Sequence
  ENSG00000204576_0 (sequence is synthesized)
aacccaagcgggacaaggacttttggggggaggtcaaagggcacgaagttgtgcctgcagctgttaccatagtaaccgaggaccggatgtggcgatcttacggtgcgacagtcctcttct

SEQ ID NO: 743044 - DNA, 120 bp, Artificial Sequence
  ENSG00000204576_1 (sequence is synthesized)
caggccctctggcccgagagcctgttgactctgtgacacactctgaggagctggttgtggtgttttccagcgagggaagaaaagagtaattttttcaaagcatttatagaaacgcagcaa

SEQ ID NO: 743045 - DNA, 120 bp, Artificial Sequence
  ENSG00000204576_2 (sequence is synthesized)
agggaaggtgtgaggttgccgccatgcctggcagagacggagggaggcagttggctccggaatgcggccgccgcagatgttctccgcaaccttccggaagtggaatggcgggagcctcag

SEQ ID NO: 743046 - DNA, 120 bp, Artificial Sequence
  ENSG00000204576_3 (sequence is synthesized)
cattgctgcccaccgaccccccggaagcggaaacagaatccccgcgtgccccttcctcactaccctccaaatcccgctgcagccattgccgcagacacgatgccgaaacgaaagaagcag

SEQ ID NO: 743047 - DNA, 120 bp, Artificial Sequence
  ENSG00000204576_4 (sequence is synthesized)
aatcatcaccagccaccgacacagcagcagcccccgctgcccgagcgggaagagactggagatgaggaggatgggagtcccatcggaccacccagccttctgggccctccccccatggcc

SEQ ID NO: 743048 - DNA, 120 bp, Artificial Sequence
  ENSG00000204576_5 (sequence is synthesized)
aatggaaaacctggcgaccctaagtcagctcttcacagaggtcctccaggatcaaggggaccactgattccaccactgctgagtctcccacctcctccttggggtagaggcccaattcgg

SEQ ID NO: 743049 - DNA, 120 bp, Artificial Sequence
  ENSG00000204576_6 (sequence is synthesized)
agagggcttggccccaggtctagcccatatggtcgtggttggtggggagtcaatgcagaacctccttttccggggccaggccatgggggtcccaccaggggaagctttcacaaggaacag

SEQ ID NO: 743050 - DNA, 120 bp, Artificial Sequence
  ENSG00000204576_7 (sequence is synthesized)
agaaaccctcgaaggctcaaaagctggtctcttatcaagaatacctgcccgcccaaggatgacccccaggttatggaagacaaatccgaccgccctgtctgccgacattttgccaaaaag

SEQ ID NO: 743051 - DNA, 120 bp, Artificial Sequence
  ENSG00000204576_8 (sequence is synthesized)
ggccactgtcgatatgaggacctctgtgccttctaccatccaggcgtcaatggacctcctctgtgagactgtgccttcccatccaggctggaaggagctctctgtgacctagcggccatt

SEQ ID NO: 743052 - DNA, 120 bp, Artificial Sequence
  ENSG00000204576_9 (sequence is synthesized)
ggtccagagtggtgttgcatcactggtgcgcggcatacgcgctttcttctgatccagcctgtagagactcgcctttgggacccatctttgcttcctttcagttgcctcctggatcttctt

SEQ ID NO: 743053 - DNA, 120 bp, Artificial Sequence
  ENSG00000204576_10 (sequence is synthesized)
tcccgtcatcaaatgactgctgaacaggaaacctctttggtgctgtttcttgtgcatctgtccacctgttccccagtattgccctcaattcctgagagccctggagcggtttcctaccat

SEQ ID NO: 743054 - DNA, 120 bp, Artificial Sequence
  ENSG00000204576_11 (sequence is synthesized)
tcccttcttttagctgcttgttttaagtcctttttatgtgacattccctacccccaatgttgtcagctgcttgtgaaactcagccaggttgtctaacctggggtcaagtttgggtgactg

SEQ ID NO: 743055 - DNA, 120 bp, Artificial Sequence
  ENSG00000204576_12 (sequence is synthesized)
gtgcagagttacttcctaaaaggccactctccctgcctttggatttcatagtttctctgtcagtagcatgatccccaccgctatggtctatctatgatcaccgtgctttgtgaaactgtg

SEQ ID NO: 743056 - DNA, 120 bp, Artificial Sequence
  ENSG00000204576_13 (sequence is synthesized)
catccccttgtagcctttctcagtgtccgtggcatttttgtgacttcccagcactagaataagttttcctgccaaaatgagtgaggcgcttggtgccctctggactttcccacttcccaa

SEQ ID NO: 743057 - DNA, 120 bp, Artificial Sequence
  ENSG00000204576_14 (sequence is synthesized)
catgggagaattgtgaactttccatcagactgcctccctggccctccccattcttctcctgttggttattctgagtctgacacagacccatgacatgtcttataaagcctccaatggctt

SEQ ID NO: 743058 - DNA, 120 bp, Artificial Sequence
  ENSG00000204576_15 (sequence is synthesized)
tatcctacctagatcccttccagcccattttaattagactatgtcattgtgaggccaccagtccattcatttgaattctgtgaatctccaccttgcctatctttgggtagaagctggaca

SEQ ID NO: 743059 - DNA, 120 bp, Artificial Sequence
  ENSG00000204576_16 (sequence is synthesized)
gtactgttgccctcttccaatcctcttcccctacatccctggcactggttgttttctgtgaaaacagcagtgaacaggttcagttttgaactggccctgaggaaatgggtcaggagttgt

SEQ ID NO: 743060 - DNA, 86 bp, Artificial Sequence
  ENSG00000204576_17 (sequence is synthesized)
cagttttgaactggccctgaggaaatgggtcaggagttgtattggcaagagggaggggtgagagctgttggagaactgagaatgag

SEQ ID NO: 743061 - DNA, 120 bp, Artificial Sequence
  ENSG00000204576_18 (sequence is synthesized)
ggcgaccctaagtcaggtgaggaggaaggggccctgatccttgtattaggtcgtagagaagacagcaagggaggggataaaacccaggaaggacttaaaaataaaagatcagggattcca

SEQ ID NO: 743062 - DNA, 120 bp, Artificial Sequence
  ENSG00000204576_19 (sequence is synthesized)
tccctaaatgaatggagagaagttgtatatttgctgatttaaaaactcaatgttgtaaaaatgtcacttcttcccaaattgataaacagatttcatgcattccaagtcagaacacccata

SEQ ID NO: 743063 - DNA, 65 bp, Artificial Sequence
  ENSG00000204576_20 (sequence is synthesized)
aagacatagtgtattattccacttatctgaggtgtctaaagtcaaattcaggggctgggcatggt

SEQ ID NO: 743064 - DNA, 74 bp, Artificial Sequence
  ENSG00000204576_21 (sequence is synthesized)
tgtcaaaacaaaaaataaaaataaagtcaacttcaaagaaacagtagaatgatggttaccagaggctgggggaa

SEQ ID NO: 743065 - DNA, 120 bp, Artificial Sequence
  ENSG00000204576_22 (sequence is synthesized)
aacaaaaaataaaaataaagtcaacttcaaagaaacagtagaatgatggttaccagaggctgggggaaggaagctggaggaaggggagttttgtttaatgggtacagagtttcagttttg

SEQ ID NO: 743066 - DNA, 120 bp, Artificial Sequence
  ENSG00000204576_23 (sequence is synthesized)
agactccatctcaaaaaacaaacaaaaacttggagatctgtttcacatcaatatgaatatatgtaacactactgaactgtacacttaaaaatagttaagatggtaatttttatgtgtttt

SEQ ID NO: 743067 - DNA, 120 bp, Artificial Sequence
  ENSG00000204576_24 (sequence is synthesized)
aacactactgaactgtacacttaaaaatagttaagatggtaatttttatgtgttttttaccacaataaaaaccgaacaaaacaaggcatgatgattcatgcctgtaatcccagcacttta

SEQ ID NO: 743068 - DNA, 120 bp, Artificial Sequence
  ENSG00000204576_25 (sequence is synthesized)
ttcaagaccagcctgggcagtgtggcaagacccaatctctcattaaataaataataataaccaaacaaaaaaataaccaccacttttcacactcaccatggcaaaatttaaaaacctaac

SEQ ID NO: 743069 - DNA, 120 bp, Artificial Sequence
  ENSG00000204576_26 (sequence is synthesized)
aattccaagtgttgtcaaggctataggacaactgctggtgagagtgcaaattggtataaccactgtgaaaaaaaagtttggcattatgtatgaaacttgagcataacatatactttataa

SEQ ID NO: 743070 - DNA, 120 bp, Artificial Sequence
  ENSG00000204576_27 (sequence is synthesized)
gccagtaatacctctactacgtatatattcaacagaaatgcatacgtatgtgtaacaacatgtataaaaatgtttatagtggcatttctcgttatagccccaaactggataccacccaca

SEQ ID NO: 743071 - DNA, 120 bp, Artificial Sequence
  ENSG00000204576_28 (sequence is synthesized)
tgtccatcatcagtagaatggataaataaattgttgtgtatgcatgcaatgggactacactgcaacgaaaatgaatgaactgctgctacaggcaacctggatgaatctcacaaacatgat

SEQ ID NO: 743072 - DNA, 120 bp, Artificial Sequence
  ENSG00000204576_29 (sequence is synthesized)
gttgagcgaaaggagccagacataaaagaatgcagactgtatgattccatttttgtgaagttcaaaaacaggcaaaaactaacctatggtgtcaggatagtggttacctttggggaggag

SEQ ID NO: 743073 - DNA, 120 bp, Artificial Sequence
  ENSG00000204576_30 (sequence is synthesized)
ggtgggtaatgggaaaaggggcacaaggggaggatcttttgaggtgctaataaggctttatctcttcacctggtggtggaaactcaagtgtgtctactttgtgagaactgggttgtgcac

SEQ ID NO: 743074 - DNA, 120 bp, Artificial Sequence
  ENSG00000204577_0 (sequence is synthesized)
tgcgtctctgctgatctgagtctgcctgcagcatggacctgggtcttccctgaagcatctccagggctggagagacgactgccatgcactgagggctcatccctctgcagagcgcggggt

SEQ ID NO: 743075 - DNA, 120 bp, Artificial Sequence
  ENSG00000204577_1 (sequence is synthesized)
caccgggaggagacgccatgacgcccgccctcacagccctgctctgccttgggctgagtctgggccccaggacccgcatgcaggcagggcccttccccaaacccaccctctgggctgagc

SEQ ID NO: 743076 - DNA, 120 bp, Artificial Sequence
  ENSG00000204577_2 (sequence is synthesized)
caggctctgtgatcagctgggggagccccgtgaccatctggtgtcaggggagcctggaggcccaggagtaccaactggataaagagggaagcccagagccctgggacagaaataacccac

SEQ ID NO: 743077 - DNA, 120 bp, Artificial Sequence
  ENSG00000204577_3 (sequence is synthesized)
tggaacccaagaacaaggccagattctccatcccatccatgacacagcaccatgcagggagataccgctgccactattacagctctgcaggctggtcagagcccagcgaccccctggagc

SEQ ID NO: 743078 - DNA, 120 bp, Artificial Sequence
  ENSG00000204577_4 (sequence is synthesized)
tggtgatgacaggattctacaacaaacccaccctctcagccctgcccagccctgtggtggcctcaggggggaatatgaccctccgatgtggctcacagaagggatatcaccattttgttc

SEQ ID NO: 743079 - DNA, 120 bp, Artificial Sequence
  ENSG00000204577_5 (sequence is synthesized)
tgatgaaggaaggagaacaccagctcccccggaccctggactcacagcagctccacagtggggggttccaggccctgttccctgtgggccccgtgacccccagccacaggtggaggttca

SEQ ID NO: 743080 - DNA, 120 bp, Artificial Sequence
  ENSG00000204577_6 (sequence is synthesized)
catgctattactattatacaaacaccccctgggtgtggtcccaccccagtgaccccctggagattctgccctcaggcgtgtctaggaagccctccctcctgaccctgcagggccctgtcc

SEQ ID NO: 743081 - DNA, 120 bp, Artificial Sequence
  ENSG00000204577_7 (sequence is synthesized)
tggcccctgggcagagcctgaccctccagtgtggctctgatgtcggctacgacagatttgttctgtataaggagggggaacgtgacttcctccagcgccctggccagcagccccaggctg

SEQ ID NO: 743082 - DNA, 120 bp, Artificial Sequence
  ENSG00000204577_8 (sequence is synthesized)
ggctctcccaggccaacttcaccctgggccctgtgagccgctcctacgggggccagtacaggtgctatggtgcacacaacctctcctccgagtggtcggcccccagtgaccccctggaca

SEQ ID NO: 743083 - DNA, 120 bp, Artificial Sequence
  ENSG00000204577_9 (sequence is synthesized)
tcctgatcacaggacagatctatgacaccgtctccctgtcagcacagccgggccccacagtggcctcaggagagaacatgaccctgctgtgtcagtcacgggggtattttgacactttcc

SEQ ID NO: 743084 - DNA, 120 bp, Artificial Sequence
  ENSG00000204577_10 (sequence is synthesized)
ttctgaccaaagaaggggcagcccatcccccactgcgtctgagatcaatgtacggagctcataagtaccaggctgaattccccatgagtcctgtgacctcagcccacgcggggacctaca

SEQ ID NO: 743085 - DNA, 120 bp, Artificial Sequence
  ENSG00000204577_11 (sequence is synthesized)
ctccagcctcccacccacagggccgccctccacacctggtctgggaagatacctggaggttttgattggggtctcggtggccttcgtcctgctgctcttcctcctcctcttcctcctcct

SEQ ID NO: 743086 - DNA, 120 bp, Artificial Sequence
  ENSG00000204577_12 (sequence is synthesized)
cctccgtcagcgtcacagcaaacacaggacatctgaccagagaaagactgatttccagcgtcctgcaggggctgcggagacagagcccaaggacaggggcctgctgaggaggtccagccc

SEQ ID NO: 743087 - DNA, 120 bp, Artificial Sequence
  ENSG00000204577_13 (sequence is synthesized)
agctgctgacgtccaggaagaaaacctctatgctgctgtgaaggacacacagtctgaggacagggtggagctggacagtcagagcccacacgatgaagacccccaggcagtgacgtatgc

SEQ ID NO: 743088 - DNA, 120 bp, Artificial Sequence
  ENSG00000204577_14 (sequence is synthesized)
cccggtgaaacactccagtcctaggagagaaatggcctctcctccctcctcactgtctggggaattcctggacacaaaggacagacaggtggaagaggacaggcagatggacactgaggc

SEQ ID NO: 743089 - DNA, 120 bp, Artificial Sequence
  ENSG00000204577_15 (sequence is synthesized)
tgctgcatctgaagcctcccaggatgtgacctacgcccagctgcacagcttgacccttagacggaaggcaactgagcctcctccatcccaggaaggggaacctccagctgagcccagcat

SEQ ID NO: 743090 - DNA, 120 bp, Artificial Sequence
  ENSG00000204577_16 (sequence is synthesized)
ctacgccactctggccatccactagcccggggggtacgcagaccccacactcagcagaaggagactcaggactgctgaaggcacgggagctgcccccagtggacaccagtgaaccccagt

SEQ ID NO: 743091 - DNA, 120 bp, Artificial Sequence
  ENSG00000204577_17 (sequence is synthesized)
cagcctggacccctaacacagaccatgaggagacgctgggaacttgtgggactcacctgactcaaagatgactaatatcgtcccattttggaaataaagcaacagacttctcaacaatca

SEQ ID NO: 743092 - DNA, 120 bp, Artificial Sequence
  ENSG00000204577_18 (sequence is synthesized)
atgagttaataacaaaaaaacaaaaaacaaaaacagacgtaaaggccgggtgtggtactcaggaggctgagtggggaggattccttgaacacaagaagttaaggctgctgaggctgcagt

SEQ ID NO: 743093 - DNA, 120 bp, Artificial Sequence
  ENSG00000204577_19 (sequence is synthesized)
actgcactccagcctgtgtgacagagcgagaccttgtctctaaaaaaaaaaacagtgaatgttttaaactgaatgataatgtaaatattatacatcgaacttatgacatgggaaaattaa

SEQ ID NO: 743094 - DNA, 69 bp, Artificial Sequence
  ENSG00000204577_20 (sequence is synthesized)
ctgaatgataatgtaaatattatacatcgaacttatgacatgggaaaattaagaagcataaattgcggg

SEQ ID NO: 743095 - DNA, 120 bp, Artificial Sequence
  ENSG00000204577_21 (sequence is synthesized)
caggaaggcctgtgaggctgcagccaaatgggcaaggtcagagtgaggagcagaggccagaaccacagggagggagcggccagaccctccacggccttagggcgtccctgagattccatc

SEQ ID NO: 743096 - DNA, 120 bp, Artificial Sequence
  ENSG00000204577_22 (sequence is synthesized)
aggaaagggatgtaatcggatcaccccgggaacagtgaggaaaattgactccaggaggtcagggggactcaaggacaccccccaccactgtctctctccagcagagcccacacgatgaag

SEQ ID NO: 743097 - DNA, 120 bp, Artificial Sequence
  ENSG00000204577_23 (sequence is synthesized)
gccctcacagccctgctctgccttggtgagatttcaagatggggagggggagatccgagtcttggaggaaccccaccccacacacaagccctggtccatcaggagacctcaaaagctcag

SEQ ID NO: 743098 - DNA, 120 bp, Artificial Sequence
  ENSG00000204577_24 (sequence is synthesized)
gactgcttgtgagggttggaggtcacgaaggaaagacctggctcgcgcctgcacacagtaggtgctcacatcaatgacatcattcccactcctgacgtcctcatgtcaaggtctgggaag

SEQ ID NO: 743099 - DNA, 120 bp, Artificial Sequence
  ENSG00000204577_25 (sequence is synthesized)
gtgactgaatctggaaaggacccagagtgatgtgttgaaggacgggctgaaggcatgagggagaccccatggggaggctctgacatgggaggaggagcccttgaccacgttcacctggaa

SEQ ID NO: 743100 - DNA, 120 bp, Artificial Sequence
  ENSG00000204580_0 (sequence is synthesized)
ggctttaggaagttatttaactgatctctgccctagtttcttcatgtgttaaatatggatagtaatagtatctaccttatgaagtgactgtgaagataaaattatggattctgtttaagg

SEQ ID NO: 743101 - DNA, 120 bp, Artificial Sequence
  ENSG00000204580_1 (sequence is synthesized)
gtttaggccagtgtctggcacaggggaagcattctaaaaatatagctgatgctgttaaacaatgactgttgttgttgttttactgttattatccccaaagcggcccattctgtctgttgc

SEQ ID NO: 743102 - DNA, 120 bp, Artificial Sequence
  ENSG00000204580_2 (sequence is synthesized)
tgtcagctatgactcagtcccctgattaacttacgcaccacccattttatcccctgcagagatgctgcccccacccccttaggcccgagggatcaggagctatgggaccagaggccctgt

SEQ ID NO: 743103 - DNA, 120 bp, Artificial Sequence
  ENSG00000204580_3 (sequence is synthesized)
catctttactgctgctgctcttggtggcaagtggagatgctgacatgaagggacattttgatcctgccaagtgccgctatgccctgggcatgcaggaccggaccatcccagacagtgaca

SEQ ID NO: 743104 - DNA, 120 bp, Artificial Sequence
  ENSG00000204580_4 (sequence is synthesized)
tctctgcttccagctcctggtcagattccactgccgcccgccacagcaggttggagagcagtgacggggatggggcctggtgccccgcagggtcggtgtttcccaaggaggaggagtact

SEQ ID NO: 743105 - DNA, 120 bp, Artificial Sequence
  ENSG00000204580_5 (sequence is synthesized)
tgcaggtggatctacaacgactgcacctggtggctctggtgggcacccagggacggcatgccgggggcctgggcaaggagttctcccggagctaccggctgcgttactcccgggatggtc

SEQ ID NO: 743106 - DNA, 120 bp, Artificial Sequence
  ENSG00000204580_6 (sequence is synthesized)
gccgctggatgggctggaaggaccgctggggtcaggaggtgatctcaggcaatgaggaccctgagggagtggtgctgaaggaccttgggccccccatggttgcccgactggttcgcttct

SEQ ID NO: 743107 - DNA, 120 bp, Artificial Sequence
  ENSG00000204580_7 (sequence is synthesized)
acccccgggctgaccgggtcatgagcgtctgtctgcgggtagagctctatggctgcctctggagggatggactcctgtcttacaccgcccctgtggggcagacaatgtatttatctgagg

SEQ ID NO: 743108 - DNA, 120 bp, Artificial Sequence
  ENSG00000204580_8 (sequence is synthesized)
ccgtgtacctcaacgactccacctatgacggacataccgtgggcggactgcagtatgggggtctgggccagctggcagatggtgtggtggggctggatgactttaggaagagtcaggagc

SEQ ID NO: 743109 - DNA, 120 bp, Artificial Sequence
  ENSG00000204580_9 (sequence is synthesized)
tgcgggtctggccaggctatgactatgtgggatggagcaaccacagcttctccagtggctatgtggagatggagtttgagtttgaccggctgagggccttccaggctatgcaggtccact

SEQ ID NO: 743110 - DNA, 120 bp, Artificial Sequence
  ENSG00000204580_10 (sequence is synthesized)
gtaacaacatgcacacgctgggagcccgtctgcctggcggggtggaatgtcgcttccggcgtggccctgccatggcctgggagggggagcccatgcgccacaacctagggggcaacctgg

SEQ ID NO: 743111 - DNA, 120 bp, Artificial Sequence
  ENSG00000204580_11 (sequence is synthesized)
gggaccccagagcccgggctgtctcagtgccccttggcggccgtgtggctcgctttctgcagtgccgcttcctctttgcggggccctggttactcttcagcgaaatctccttcatctctg

SEQ ID NO: 743112 - DNA, 120 bp, Artificial Sequence
  ENSG00000204580_12 (sequence is synthesized)
atgtggtgaacaattcctctccggcactgggaggcaccttcccgccagccccctggtggccgcctggcccacctcccaccaacttcagcagcttggagctggagcccagaggccagcagc

SEQ ID NO: 743113 - DNA, 120 bp, Artificial Sequence
  ENSG00000204580_13 (sequence is synthesized)
ccgtggccaaggccgaggggagcccgaccgccatcctcatcggctgcctggtggccatcatcctgctcctgctgctcatcattgccctcatgctctggcggctgcactggcgcaggctcc

SEQ ID NO: 743114 - DNA, 120 bp, Artificial Sequence
  ENSG00000204580_14 (sequence is synthesized)
tcagcaaggctgaacggagggtgttggaagaggagctgacggttcacctctctgtccctggggacactatcctcatcaacaaccgcccaggtcctagagagccacccccgtaccaggagc

SEQ ID NO: 743115 - DNA, 120 bp, Artificial Sequence
  ENSG00000204580_15 (sequence is synthesized)
tccccagaacagcgtcccccattatgccgaggctgacattgttaccctgcagggcgtcaccgggggcaacacctatgctgtgcctgcactgcccccaggggcagtcggggatgggccccc

SEQ ID NO: 743116 - DNA, 120 bp, Artificial Sequence
  ENSG00000204580_16 (sequence is synthesized)
cagagtggatttccctcgatctcgactccgcttcaaggagaagcttggcgagggccagtttggggaggtgcacctgtgtgaggtcgacagccctcaagatctggttagtcttgatttccc

SEQ ID NO: 743117 - DNA, 120 bp, Artificial Sequence
  ENSG00000204580_17 (sequence is synthesized)
ccttaatgtgcgtaagggacaccctttgctggtagctgtcaagatcttacggccagatgccaccaagaatgccaggaatgatttcctgaaagaggtgaagatcatgtcgaggctcaagga

SEQ ID NO: 743118 - DNA, 120 bp, Artificial Sequence
  ENSG00000204580_18 (sequence is synthesized)
cccaaacatcattcggctgctgggcgtgtgtgtgcaggacgaccccctctgcatgattactgactacatggagaacggcgacctcaaccagttcctcagtgcccaccagctggaggacaa

SEQ ID NO: 743119 - DNA, 120 bp, Artificial Sequence
  ENSG00000204580_19 (sequence is synthesized)
ggcagccgagggggcccctggggacgggcaggctgcgcaggggcccaccatcagctacccaatgctgctgcatgtggcagcccagatcgcctccggcatgcgctatctggccacactcaa

SEQ ID NO: 743120 - DNA, 120 bp, Artificial Sequence
  ENSG00000204580_20 (sequence is synthesized)
ctttgtacatcgggacctggccacgcggaactgcctagttggggaaaatttcaccatcaaaatcgcagactttggcatgagccggaacctctatgctggggactattaccgtgtgcaggg

SEQ ID NO: 743121 - DNA, 120 bp, Artificial Sequence
  ENSG00000204580_21 (sequence is synthesized)
ccgggcagtgctgcccatccgctggatggcctgggagtgcatcctcatggggaagttcacgactgcgagtgacgtgtgggcctttggtgtgaccctgtgggaggtgctgatgctctgtag

SEQ ID NO: 743122 - DNA, 120 bp, Artificial Sequence
  ENSG00000204580_22 (sequence is synthesized)
ggcccagccctttgggcagctcaccgacgagcaggtcatcgagaacgcgggggagttcttccgggaccagggccggcaggtgtacctgtcccggccgcctgcctgcccgcagggcctata

SEQ ID NO: 743123 - DNA, 120 bp, Artificial Sequence
  ENSG00000204580_23 (sequence is synthesized)
tgagctgatgcttcggtgctggagccgggagtctgagcagcgaccacccttttcccagctgcatcggttcctggcagaggatgcactcaacacggtgtgaatcacacatccagctgcccc

SEQ ID NO: 743124 - DNA, 120 bp, Artificial Sequence
  ENSG00000204580_24 (sequence is synthesized)
tccctcagggagcgatccaggggaagccagtgacactaaaacaagaggacacaatggcacctctgcccttcccctcccgacagcccatcacctctaatagaggcagtgagactgcaggtg

SEQ ID NO: 743125 - DNA, 120 bp, Artificial Sequence
  ENSG00000204580_25 (sequence is synthesized)
ggctgggcccacccagggagctgatgccccttctccccttcctggacacactctcatgtccccttcctgttcttccttcctagaagcccctgtcgcccacccagctggtcctgtggatgg

SEQ ID NO: 743126 - DNA, 120 bp, Artificial Sequence
  ENSG00000204580_26 (sequence is synthesized)
gatcctctccaccctcctctagccatcccttggggaagggtggggagaaatataggatagacactggacatggcccattggagcacctgggccccactggacaacactgattcctggaga

SEQ ID NO: 743127 - DNA, 120 bp, Artificial Sequence
  ENSG00000204580_27 (sequence is synthesized)
ggtggctgcgcccccagcttctctctccctgtcacacactggaccccactggctgagaatctgggggtgaggaggacaagaaggagaggaaaatgtttccttgtgcctgctcctgtactt

SEQ ID NO: 743128 - DNA, 120 bp, Artificial Sequence
  ENSG00000204580_28 (sequence is synthesized)
gtcctcagcttgggcttcttcctcctccatcacctgaaacactggacctgggggtagccccgccccagccctcagtcacccccacttcccacttgcagtcttgtagctagaacttctcta

SEQ ID NO: 743129 - DNA, 120 bp, Artificial Sequence
  ENSG00000204580_29 (sequence is synthesized)
agcctatacgtttctgtggagtaaatattgggattggggggaaagagggagcaacggcccatagccttggggttggacatctctagtgtagctgccacattgatttttctataatcactt

SEQ ID NO: 743130 - DNA, 120 bp, Artificial Sequence
  ENSG00000204580_30 (sequence is synthesized)
ggggtttgtacatttttggggggagagacacagatttttacactaatatatggacctagcttgaggcaattttaatcccctgcactaggcaggtaataataaaggttgagttttccacaa

SEQ ID NO: 743131 - DNA, 120 bp, Artificial Sequence
  ENSG00000204580_31 (sequence is synthesized)
agaagtaggaggggcgtcttcccctcgtgggccctgagcgggactgcagccagccccctggggcgccagctttggaggcccccgacagctgctctcgggagccgcctcccgacacccgag

SEQ ID NO: 743132 - DNA, 120 bp, Artificial Sequence
  ENSG00000204580_32 (sequence is synthesized)
ctcccgctcccggctcccggctcctggctccctccgcctcccccgcccctcgccccgccgccgaagaggccccgctcccgggtcggacgcctgggtctgccgggaagagcgatgagagag

SEQ ID NO: 743133 - DNA, 120 bp, Artificial Sequence
  ENSG00000204580_33 (sequence is synthesized)
agcctagagctggggcgaggtgggcatcaccactaggaatttctcctgaggcagtgagaagaggggacaaaggtttcaggactctctagctccttctgctctccccagtggacccctctg

SEQ ID NO: 743134 - DNA, 120 bp, Artificial Sequence
  ENSG00000204580_34 (sequence is synthesized)
tctggcactgccatgccacttagctggggtcagcgtgggcctggggtgtggaatgtcccaccagggtatgacgggctgtagcttgcctggcaggcctgttggggctttcccagagcacag

SEQ ID NO: 743135 - DNA, 120 bp, Artificial Sequence
  ENSG00000204580_35 (sequence is synthesized)
ctcctggaaggaggggctgtgggctgccaggtgaggtgacttgggaagccttggccccacccccaggctggccccacccccagtccagcgtctcctgggcctagattccccagctgctgt

SEQ ID NO: 743136 - DNA, 120 bp, Artificial Sequence
  ENSG00000204580_36 (sequence is synthesized)
cctttggttctgtttcacagttctcagcctcccctccctttctccacagccaggctgctcagtccctctctgcgggggcctagaggctcggtgaggggagcgggacttggttgccatggt

SEQ ID NO: 743137 - DNA, 120 bp, Artificial Sequence
  ENSG00000204580_37 (sequence is synthesized)
cacattgaagccagccgcagctggcccgggcagctgctcctcctgggcccggggccccggacgctcggacaaagccaggcagcgttggcagccccagacccgaccccaaaggcctgagac

SEQ ID NO: 743138 - DNA, 120 bp, Artificial Sequence
  ENSG00000204580_38 (sequence is synthesized)
gcccgtccccctcgaggcccgggcccccccacacccgcctgggccaaacccaccaacacccaggcctacagtggggactatatggagcctgagaagccaggcgccccgcttctgccccca

SEQ ID NO: 743139 - DNA, 120 bp, Artificial Sequence
  ENSG00000204580_39 (sequence is synthesized)
ggaagggagggagccgaggcgagggggaggcggcgcctgggcccgagccgccccagccctggctcctctccccggaacaggcccccgacagctgctctcgggagccgcctcccgacaccc

SEQ ID NO: 743140 - DNA, 120 bp, Artificial Sequence
  ENSG00000204580_40 (sequence is synthesized)
cccctctcactcagtgcggaggaactgagccccgggaggaggtgctcctgtgcagccccactgagtcagctcatctatcgcctgccctccacctggccagtccctgcgggcatctaactg

SEQ ID NO: 743141 - DNA, 120 bp, Artificial Sequence
  ENSG00000204580_41 (sequence is synthesized)
ctaagcctccgctcagccaacacccagttggtcagtctggtcacagtccagcaaaaagagggactgccactctaacccaccagtgacaccactcttcccggctggatggtcaattagctc

SEQ ID NO: 743142 - DNA, 120 bp, Artificial Sequence
  ENSG00000204580_42 (sequence is synthesized)
acaagctgttctgtcccgctccatcctctgcccagtagctctctcagttgctttgcctactcagtctcactgtttcatcttccctgggtctcttggtccccttccttttgactgtgtgtg

SEQ ID NO: 743143 - DNA, 120 bp, Artificial Sequence
  ENSG00000204580_43 (sequence is synthesized)
attttcagtgtgcctccatccttctcctgctcctcttcttcctcctcccgaccactcaactttgtcctggcctcatttttggcctcttctggccagtgatcagaccctctggcccactac

SEQ ID NO: 743144 - DNA, 120 bp, Artificial Sequence
  ENSG00000204580_44 (sequence is synthesized)
gacccccgggtcccttagaacgcccttcagagagaggaactgagaggagaaggagaagagagtgggcccgccttcagggtctggggccttccaggttgggtcgtaggggcgggagcgcac

SEQ ID NO: 743145 - DNA, 120 bp, Artificial Sequence
  ENSG00000204580_45 (sequence is synthesized)
aggctgcgagagaggagcaaagctgggctgggccgagcctgtgggaacctgcttcttcctctgtgccctggggctgctcccctttgcctctcccaccaggaaccgatcccagaagtagga

SEQ ID NO: 743146 - DNA, 120 bp, Artificial Sequence
  ENSG00000204580_46 (sequence is synthesized)
aatactcattccttgcattatatctacccatcacccaccgaaacttctcaattaggggtgccccaaataacttgagcccctttctgcctcttgttctctgcgtatccatctttcctttgt

SEQ ID NO: 743147 - DNA, 120 bp, Artificial Sequence
  ENSG00000204580_47 (sequence is synthesized)
aagccccttgcccgtgactattattgagccagtatgacagtactggttgttaaaatattgaaatacttctgtattagttgagaaatagcctcttctctaagcctccagatacctgtcctc

SEQ ID NO: 743148 - DNA, 120 bp, Artificial Sequence
  ENSG00000204580_48 (sequence is synthesized)
agtggttgcctattgagaatcacccatgcttctgctcctttgcacaacagtccactgcctctgcctcccttgggtctcctcctcatttacctccctcctttctttttgttccttctcccc

SEQ ID NO: 743149 - DNA, 120 bp, Artificial Sequence
  ENSG00000204580_49 (sequence is synthesized)
agatgtggtgaacaattcctctccggcactgggaggcaccttcccgccagccccctggtggccgcctggcccacctcccaccaacttcagcagcttggagctggagcccagaggccagca

SEQ ID NO: 743150 - DNA, 120 bp, Artificial Sequence
  ENSG00000204580_50 (sequence is synthesized)
gaatctgtttcctgagcaggggactggagggtggggagtgtggagaatgggcatccaggatcccttctcctgctgggaagctgtcactctgaggagggggctagccagcattgtctcctc

SEQ ID NO: 743151 - DNA, 120 bp, Artificial Sequence
  ENSG00000204580_51 (sequence is synthesized)
catgccaatgagccagtggagagatacaagaagggacctgaaacctgcccaggcctgatgcagggatgggggatggagccttagtgcctctgacccccatcctctcaccctgccccagat

SEQ ID NO: 743152 - DNA, 120 bp, Artificial Sequence
  ENSG00000204580_52 (sequence is synthesized)
ctggaggggtaggtgttctgggggaatgaatccctgggggcttggtgggacaggaaggcgggaagaagctgctcttcgagtgaccctggggctgtctgttagcaggtccctcagccgttg

SEQ ID NO: 743153 - DNA, 120 bp, Artificial Sequence
  ENSG00000204580_53 (sequence is synthesized)
gaacgtccttgggcttctgaactagtgcccatgtgtgcctcggcctttcccaagggccagcttcttcctgagatgctgcccccacccccttaggcccgagggatcaggagctatgggacc

SEQ ID NO: 743154 - DNA, 120 bp, Artificial Sequence
  ENSG00000204580_54 (sequence is synthesized)
acttttcaaatgctactaaggaaagttagacatggaacttaatagttttcacaggtattcacgagtcctcaggagtccagagacctcagtttgagaacactatcctagcactgaccttga

SEQ ID NO: 743155 - DNA, 120 bp, Artificial Sequence
  ENSG00000204580_55 (sequence is synthesized)
agattccccagctgctgttctctggaggggtgtctgaaggtggctattcactgagcgatggggttggacttgaaggaatgccaagagatgctgcccccacccccttaggcccgagggatc

SEQ ID NO: 743156 - DNA, 120 bp, Artificial Sequence
  ENSG00000204580_56 (sequence is synthesized)
agattccccagctgctgttctctggaggggttcctggggcggagatgtgcagtggagcgagaacttcctgtgaccgtgacattgtctaggtggcccccgacagctgctctcgggagccgc

SEQ ID NO: 743157 - DNA, 120 bp, Artificial Sequence
  ENSG00000204580_57 (sequence is synthesized)
cctgggacctctacttcccctccaacccctctgcccatgccagtgaaacccctgcaggctgagggggcaaatgaagtggggtttaaatactggagatggaggcagacctggggccagatg

SEQ ID NO: 743158 - DNA, 120 bp, Artificial Sequence
  ENSG00000204580_58 (sequence is synthesized)
actgccggtgagcgccagcttcagggtcccacccccccatgcctggctcttggctgaacatttcttcccagcgcttccagcagccagaggcaggcgcccaagctcgctggctgttgctga

SEQ ID NO: 743159 - DNA, 120 bp, Artificial Sequence
  ENSG00000204580_59 (sequence is synthesized)
gtgtttctttcttgggattgttgtctgggactgcaagcagggtatgtttttatctactgtgaggttcctggggcggagatgtgcagtggagcgagaacttcctgtgaccgtgacattgtc

SEQ ID NO: 743160 - DNA, 120 bp, Artificial Sequence
  ENSG00000204580_60 (sequence is synthesized)
gcttttgtgtacttgtctggttgggacttcgtgtttctttcttgggattgttgtctgggactgcaagcaggagatgctgcccccacccccttaggcccgagggatcaggagctatgggac

SEQ ID NO: 743161 - DNA, 120 bp, Artificial Sequence
  ENSG00000204580_61 (sequence is synthesized)
aagtggagatgctgacatgaagggacattttgatcctggtgaggagactgaatcatgggtccctgagggccagggcttgggaggtagagagttgggggccttgacctgttacatgcctgc

SEQ ID NO: 743162 - DNA, 120 bp, Artificial Sequence
  ENSG00000204580_62 (sequence is synthesized)
tttttactcagccaagtgccgctatgccctgggcatgcaggaccggaccatcccagacagtgacatctctgcttccagctcctggtcagattccactgccgcccgccacagcaggttgga

SEQ ID NO: 743163 - DNA, 120 bp, Artificial Sequence
  ENSG00000204580_63 (sequence is synthesized)
gttctctgccaggtgtcacctccttagagagccttttctggccacccacctcactgctctgtccatacttcctgcctcttgttcttcgcagctgttttccctgctgggatctcagtccta

SEQ ID NO: 743164 - DNA, 120 bp, Artificial Sequence
  ENSG00000204580_64 (sequence is synthesized)
caagggtggggagtgacgttcaccactgagaacgcgcctggcacagagcgggcactcagccaacttctgctgaatgaacagagggaatgggctgaaatgaaggggaagctgaggcagggg

SEQ ID NO: 743165 - DNA, 120 bp, Artificial Sequence
  ENSG00000204580_65 (sequence is synthesized)
tgcagggctgtgaggattggggagaatctgggcacaatgggatgataggcttggagacaaatggatggagccaggcaaggagaagagggcagctgagcctgaagtctgaggatggaacat

SEQ ID NO: 743166 - DNA, 120 bp, Artificial Sequence
  ENSG00000204580_66 (sequence is synthesized)
agaagtaggaggggcgtcttcccctcgtgggccctgagcgggactgcagccagccccctggggcgccagctttggagagatgctgcccccacccccttaggcccgagggatcaggagcta

SEQ ID NO: 743167 - DNA, 120 bp, Artificial Sequence
  ENSG00000204580_67 (sequence is synthesized)
agaggcagccaccttctggaagtgggaactggggggactggatgtctgggtctcaggaaggcagagcagggataactgggcccaagatgccctgaacctgataagaggtggcagtcgagt

SEQ ID NO: 743168 - DNA, 120 bp, Artificial Sequence
  ENSG00000204580_68 (sequence is synthesized)
ccctcaggactccagggcctggagacttcagtacagggctctgagaccagtacaggttaggatagcttttcctgcagcaggggaggggagagtagttacttgggtttgtaaggagatgcc

SEQ ID NO: 743169 - DNA, 120 bp, Artificial Sequence
  ENSG00000204580_69 (sequence is synthesized)
tgtgttaaaaggcagattttgattgagcaggtcaagggtgagcctgagattctgatttcttccatgcttccagagatgctgcccccacccccttaggcccgagggatcaggagctatggg

SEQ ID NO: 743170 - DNA, 120 bp, Artificial Sequence
  ENSG00000204580_70 (sequence is synthesized)
ccagaggcaggcgcccaagctcgctggctgttgctgagggcctgtaggtgtgtccaggactgagtggtgtggtggagacagagatgctgcccccacccccttaggcccgagggatcagga

SEQ ID NO: 743171 - DNA, 120 bp, Artificial Sequence
  ENSG00000204580_71 (sequence is synthesized)
tggaggagagggaagatgggtccgaggcgggggacagaaggggcagagttgtcatcttggagactaaagaatatttgttccctgactctcatccacactgccacaatgcaggtgtacctg

SEQ ID NO: 743172 - DNA, 120 bp, Artificial Sequence
  ENSG00000204580_72 (sequence is synthesized)
gtcagggacactgagaggtgggtgtgtgcatgccacatttagcctcgctgtttacagccagttcaagatgctgcccccacccccttaggcccgagggatcaggagctatgggaccagagg

SEQ ID NO: 743173 - DNA, 120 bp, Artificial Sequence
  ENSG00000204580_73 (sequence is synthesized)
ggacaaagccaggcagcgttggcagccccagacccgaccccaaaggcctgagactggggtgactgggacctaagagaatcctgagctggagagctacgtcatctcaatctcctccttcgc

SEQ ID NO: 743174 - DNA, 120 bp, Artificial Sequence
  ENSG00000204580_74 (sequence is synthesized)
cggacgcctgggtctgccgggaagagcgatgagaggtagggagagcggcggcggaacccgcgggcggaggcctggggctcttggggtgggggcgcgcggcggcgcctgcagggcgagggg

SEQ ID NO: 743175 - DNA, 120 bp, Artificial Sequence
  ENSG00000204580_75 (sequence is synthesized)
aaggtcctagagagccacccccgtaccaggagccccggcctcgtgggaatccgccccactccgctccctgtgtccccaatggctctggtgcacctgtgtgaggtcgacagccctcaagat

SEQ ID NO: 743176 - DNA, 120 bp, Artificial Sequence
  ENSG00000204580_76 (sequence is synthesized)
agttagacatggaacttaatagttttcacaggtattcacgagtcctcaggagtccagagacctcagtttgagaacactatcctagcactgaccttgacttccagggtgaccttgagagat

SEQ ID NO: 743177 - DNA, 120 bp, Artificial Sequence
  ENSG00000204580_77 (sequence is synthesized)
ctcagccgttggaacgtccttgggcttctgaactagtgcccatgtgtgcctcggcctttcccaagggccagcttcttcctggcccccgacagctgctctcgggagccgcctcccgacacc

SEQ ID NO: 743178 - DNA, 120 bp, Artificial Sequence
  ENSG00000204580_78 (sequence is synthesized)
tggaacatcagagctgcgacagagccagaggtctcagctgcagatcttcatttcacccatgcctggctgcgccccacagtgctgtgtgctcggtgccacccctcatgggtctctaagtgg

SEQ ID NO: 743179 - DNA, 120 bp, Artificial Sequence
  ENSG00000204580_79 (sequence is synthesized)
ccactgtgggctgggccagggagcagctggtgggtgggaagtaagatctgacctggactccatcccacccaccccctgtttcctggcccacaggtgatctcaggcaatgaggaccctgag

SEQ ID NO: 743180 - DNA, 120 bp, Artificial Sequence
  ENSG00000204583_0 (sequence is synthesized)
agtagccttgtgggactggcccctgtccagacgcctacactgagcctctcatgtggggagatgagcgtctttctcctgggaccgaaggagggaacaagacggagaaggaagaggcggggc

SEQ ID NO: 743181 - DNA, 120 bp, Artificial Sequence
  ENSG00000204583_1 (sequence is synthesized)
tgcgactgtgcccagcgtactgccgggctgccgggtccctgctctgggtacttctctgctttcgggcgtctcgtctagaagctgcagcttggcctgtctcacctctacacagaggggctg

SEQ ID NO: 743182 - DNA, 120 bp, Artificial Sequence
  ENSG00000204583_2 (sequence is synthesized)
ctggcgcctgacggaaaaaggtccacacacccgatggccggcccggggtggacgctgctgctactgctgctgctgctgctgctgctggggtccatggcagggtatgggccacagaagaag

SEQ ID NO: 743183 - DNA, 120 bp, Artificial Sequence
  ENSG00000204583_3 (sequence is synthesized)
ttgaacctgtcccataagggcatcggggagccatgcaggagacacgaggagtgccagagcaactgctgtaccatcaacagcctggccccacacacgctctgcacccctaagaccatcttc

SEQ ID NO: 743184 - DNA, 120 bp, Artificial Sequence
  ENSG00000204583_4 (sequence is synthesized)
gcacgactcagagtgccagagcagctgctgcgtccgcaacaacagcccgcaggagttgtgcacgccccaaagcgtcttcctgcagtgtgtgccctggcgcaagcccaacggcgacttctg

SEQ ID NO: 743185 - DNA, 120 bp, Artificial Sequence
  ENSG00000204583_5 (sequence is synthesized)
cagcagccatcaggagtgtcacagccagtgctgcatccagctgagggagtacagccccttccgctgcattccccggaccgggatcctggcccagtgcctgcccctgtgatgtgagctcga

SEQ ID NO: 743186 - DNA, 120 bp, Artificial Sequence
  ENSG00000204583_6 (sequence is synthesized)
acctgggcgcgagggaccggcctgggccctgggatgttcacgcaggaccgcgttgcgcgggggctggttccagcggaagcttcccttacggtttgtgctgctgtttctggggctctgaaa

SEQ ID NO: 743187 - DNA, 120 bp, Artificial Sequence
  ENSG00000204583_7 (sequence is synthesized)
atctgtgggaactgaaaggctgtgaccagcctggtggcgcgaagtgtctgtgagaacaaatcccaggcactggggtgtagcctgattgttaaacatcaataaaggctcctggccgactga

SEQ ID NO: 743188 - DNA, 120 bp, Artificial Sequence
  ENSG00000204583_8 (sequence is synthesized)
ccgggcccccagcactgacctgccagaaccacggcagtctgggtttgttccagaaacttctcaggaaacccaagtttgaaggatggtgacacaggggagccaaggagagggcaggccttt

SEQ ID NO: 743189 - DNA, 120 bp, Artificial Sequence
  ENSG00000204583_9 (sequence is synthesized)
ggtaagtcccgggcgggggctcagcctccaggccctcccttggccgccacagggaagtcgcacagaaacacagcaactggaccgggaccgcggctgtgagaggtgggctctgagcaccca

SEQ ID NO: 743190 - DNA, 120 bp, Artificial Sequence
  ENSG00000204583_10 (sequence is synthesized)
ggcacccctgctgggagaggccggcgcttcaccgcccatctcataaggtgggggccgcagagaaggctcctgggctggcactgagcccaccaggccccgcagggcacgggtgcccggtca

SEQ ID NO: 743191 - DNA, 120 bp, Artificial Sequence
  ENSG00000204583_11 (sequence is synthesized)
cgagggctgccactttccgtcaggagggtctcaaagggacacaaagcgccttcctggatgaaaccctccctgaggctgcactcgctctcctggccacacgcccggctgtgctgcccaagc

SEQ ID NO: 743192 - DNA, 120 bp, Artificial Sequence
  ENSG00000204583_12 (sequence is synthesized)
acacttgaggctatgggacggcgaccccagcaccaggagcagccctggggccaccacggccaccgtcaaccaggcaggagagagcggggccacatgggagctgcaccagtgtgcacttct

SEQ ID NO: 743193 - DNA, 120 bp, Artificial Sequence
  ENSG00000204590_0 (sequence is synthesized)
tgcctccctccgtctctgccaggcatggcggcaacctcacaccttccctttgctgcgtttctataaatgctttgaaaaaattactcttttcttccctcgctggaaaacaccacaaccagc

SEQ ID NO: 743194 - DNA, 120 bp, Artificial Sequence
  ENSG00000204590_1 (sequence is synthesized)
tcctcagagtgtgtcacagagtcaacaggctctcgggccagagggcctgagaagaggactgtcgcaccgtaagatcgccacatccggtcctcggttactatggtaacagctgcaggcaca

SEQ ID NO: 743195 - DNA, 120 bp, Artificial Sequence
  ENSG00000204590_2 (sequence is synthesized)
acttcgtgccctttgacctccccccaaaagtccttgtcccgcttgggtttcccttctcgcccgcttttgcacttatgatctgtaaacctgctccttatcatcgttcccacaaggaatttg

SEQ ID NO: 743196 - DNA, 120 bp, Artificial Sequence
  ENSG00000204590_3 (sequence is synthesized)
ggtcccaacaggtcggcacccaggactctcagaccgccgccctcccctaaagacctctgaccgtgcccccggtgtagtccagcaacctggacgcagtctcggctttccactaaggtcaag

SEQ ID NO: 743197 - DNA, 120 bp, Artificial Sequence
  ENSG00000204590_4 (sequence is synthesized)
cccggggctttgtagtatagcctcagcgtgtccacgccccctctcccctaggtagtaggccccgccctccgctccgccgccccctccaggtgagtggtaggttctcccgggagcgcaagg

SEQ ID NO: 743198 - DNA, 120 bp, Artificial Sequence
  ENSG00000204590_5 (sequence is synthesized)
tagtgatgacacgcgccccccctcctccgaacgcgagttggtagcgtccgtgacggagttagcctggtcctcccacgcgcgcctccttcctcgccgccggggcgccctctcggtgccact

SEQ ID NO: 743199 - DNA, 120 bp, Artificial Sequence
  ENSG00000204590_6 (sequence is synthesized)
ggctctcacgtgccagtagcccaccccgcatcatcctctcgcctcgctcctggagggaagtgactatatctcccccgtccgccttccatcgccgccgcggcggtaattctgtcgggcccg

SEQ ID NO: 743200 - DNA, 120 bp, Artificial Sequence
  ENSG00000204590_7 (sequence is synthesized)
ctgacgtcacctgctagccccgcctcctctagggtcccgggcccctgcggcgggggctgccccggggggcagtcagttgaggcggcgggagctcggcggagggcgggccaggtgactggt

SEQ ID NO: 743201 - DNA, 120 bp, Artificial Sequence
  ENSG00000204590_8 (sequence is synthesized)
tggtccgggccatgccgaggaagaagccattcagcgtgaagcagaagaagaagcagttgcaggacaaacgggagcggaagagagggcttcaagatgggctgcgctccagttccaacagcc

SEQ ID NO: 743202 - DNA, 120 bp, Artificial Sequence
  ENSG00000204590_9 (sequence is synthesized)
gcagcgggagccgggagcggcgagaggaacagaccgacacctcggacggggagtctgtgacccatcatatccgcaggcttaaccagcagccttctcaggggctgggtccacgaggctacg

SEQ ID NO: 743203 - DNA, 120 bp, Artificial Sequence
  ENSG00000204590_10 (sequence is synthesized)
acccaaatcgataccgactgcattttgagagagacagcagggaggaggtagagaggagaaagagagcagcccgggagcaagttctacagccggtcagtgctgagttgttggagctggaca

SEQ ID NO: 743204 - DNA, 120 bp, Artificial Sequence
  ENSG00000204590_11 (sequence is synthesized)
tccgggaggtgtatcagcctggctcagttctggactttcctcgacgtcctccttggagctatgagatgtccaaggagcaactaatgagccaagaggaacggagcttccaagactatcttg

SEQ ID NO: 743205 - DNA, 120 bp, Artificial Sequence
  ENSG00000204590_12 (sequence is synthesized)
ggaagattcatggggcttactcctctgagaaactcagctactttgagcacaatctggagacatggaggcagctgtggcgggtgttagagatgtctgacatcgtcctgcttatcactgata

SEQ ID NO: 743206 - DNA, 120 bp, Artificial Sequence
  ENSG00000204590_13 (sequence is synthesized)
tccgacatccagttgtgaatttcccgccagcactttatgagtatgtgactggagaacttggactggccctggtgctggttttgaacaaggtggatctggccccgccagctcttgtggttg

SEQ ID NO: 743207 - DNA, 120 bp, Artificial Sequence
  ENSG00000204590_14 (sequence is synthesized)
cctggaagcattatttccatcaacactatccccagctccacgtcgtccttttcacctcttttcctcgggacccccgcaccccacaggaccctagtagtgtcttgaagaagagtcggaggc

SEQ ID NO: 743208 - DNA, 120 bp, Artificial Sequence
  ENSG00000204590_15 (sequence is synthesized)
gggggagaggatggactcgggccctggggccagagcagttgctgagagcctgtgaagccatcactgtggggaaagtggacttgagcagctggcgggagaagattgctcgggatgtggctg

SEQ ID NO: 743209 - DNA, 120 bp, Artificial Sequence
  ENSG00000204590_16 (sequence is synthesized)
gggccacctggggtaatggctctggggaggaggaggaagaggaggatggcccagcagtcctggtggagcagcagactgattcagcaatggagccaactggcccaacccaagagcgctaca

SEQ ID NO: 743210 - DNA, 120 bp, Artificial Sequence
  ENSG00000204590_17 (sequence is synthesized)
aggatggggtggtgaccatcggctgtgtgggtttccctaatgtgggaaagtcctcgctgatcaatgggctggtggggcggaaagtcgtgagtgtctccagaaccccgggccatacccgat

SEQ ID NO: 743211 - DNA, 120 bp, Artificial Sequence
  ENSG00000204590_18 (sequence is synthesized)
actttcagacctactttcttaccccctctgtgaagctctgtgactgcccaggcctcatcttcccatctcttctgcctaggcagttgcaggttctggcagggatctaccctatcgcccaga

SEQ ID NO: 743212 - DNA, 120 bp, Artificial Sequence
  ENSG00000204590_19 (sequence is synthesized)
tccaggagccctacactgctgtgggctacctggcctcccgaattcccgtgcaggccctgctccacctgcgccacccagaggctgaggacccctcagcggaacacccctggtgtgcctggg

SEQ ID NO: 743213 - DNA, 120 bp, Artificial Sequence
  ENSG00000204590_20 (sequence is synthesized)
acatctgtgaagcctgggcagagaaacgtggttacaagacagccaaggcggctcggaatgatgtgtacagagcagccaacagtctcttgcggctggcagtggacggccgcctcagcctgt

SEQ ID NO: 743214 - DNA, 120 bp, Artificial Sequence
  ENSG00000204590_21 (sequence is synthesized)
gttttcatcccccaggctacagtgaacagaaaggcacctgggagtcccatccagagaccacggagctggtggttttgcagggcagggtggggccagcaggtgacgaggaggaggaggaag

SEQ ID NO: 743215 - DNA, 120 bp, Artificial Sequence
  ENSG00000204590_22 (sequence is synthesized)
aggaagagctgagcagctcctgtgaggaggagggagaggaggaccgggatgcggatgaggagggagaaggggatgaggagaccccaacctcggctccagggtccagcctggctggccgaa

SEQ ID NO: 743216 - DNA, 120 bp, Artificial Sequence
  ENSG00000204590_23 (sequence is synthesized)
acccttatgccctgctgggtgaggatgagtgctgagttcctcgcccagcgccatcttccctcccagtatctttgcttttggactgacctgggggtatctcccctctgccaccccaattgt

SEQ ID NO: 743217 - DNA, 120 bp, Artificial Sequence
  ENSG00000204590_24 (sequence is synthesized)
gaataaagattgtttgctttgtagccccttccccagatgaactgaggtgagagcggctgttccaggctaacagctgtgggaggcttctctcctcttctcccttcttttttcatgcattct

SEQ ID NO: 743218 - DNA, 120 bp, Artificial Sequence
  ENSG00000204590_25 (sequence is synthesized)
ctttgcaagggaaagttctcttaggagtttagtaggttctcagtctctgaaacctgcttcctctacccattctcccactctgcaccttaggaatcccgttatctacatggggaggggagg

SEQ ID NO: 743219 - DNA, 120 bp, Artificial Sequence
  ENSG00000204590_26 (sequence is synthesized)
tctaaatccagctcccttttggagtttgtgccattctccgatttgagcagcagccctgtgtgccccctgccgccagacctgctcattccaggagcttctgggagaaggaacagtaagaga

SEQ ID NO: 743220 - DNA, 120 bp, Artificial Sequence
  ENSG00000204590_27 (sequence is synthesized)
ggaactgtgtcccaagctgatgtctcttaatgagatttttacaggaattgttcaaattcagcaaatatttattgagggtctattgtgtgtcttgacctgtgctgagcaccaagcatataa

SEQ ID NO: 743221 - DNA, 120 bp, Artificial Sequence
  ENSG00000204590_28 (sequence is synthesized)
ggatgtaccaccagagcctgacctaaatttgaagcctggccatgatcaaaaccccaccttcaggcacccaagtttttggattaagaagggtgaatgatgttctccaaatcctgggggctc

SEQ ID NO: 743222 - DNA, 120 bp, Artificial Sequence
  ENSG00000204590_29 (sequence is synthesized)
atgcagtataattctaggacttcatgttgatacaaatttttagttaaggcaaaacgcttgtgaaaatgttgattaaatgtgtacgagtagttttaattactggtgaacaactagcgtgca

SEQ ID NO: 743223 - DNA, 120 bp, Artificial Sequence
  ENSG00000204590_30 (sequence is synthesized)
catttatgatttgagcagaacagccctttaagtacagtgttaagtttcattgtttaaaagcttggcagctacgagtatttgaggtacataggggcgggcacagaaccagcctcctgaatt

SEQ ID NO: 743224 - DNA, 120 bp, Artificial Sequence
  ENSG00000204590_31 (sequence is synthesized)
gagctagaacctagcaggtggccagaaccattttagggtttcacctcagcatttcggcagaaatcagctctctcgtgagtcagggcaccttaggctttgctgtatatccctttgttaagc

SEQ ID NO: 743225 - DNA, 120 bp, Artificial Sequence
  ENSG00000204590_32 (sequence is synthesized)
cagcagctagactcctagattgaattcttttagaaatgggagaatgagcttttttattgactgccagtgttgtctgtattggatgatagcaaaaagtgtagttggacaggttgcccacta

SEQ ID NO: 743226 - DNA, 120 bp, Artificial Sequence
  ENSG00000204590_33 (sequence is synthesized)
gatggagtgagaagtaccagactccttttttctctaaagcagatcctttcaggatctgagtcactgggcagtttctctaatgcgagcagacagaccctgttaaccaaggagcaaaggaaa

SEQ ID NO: 743227 - DNA, 120 bp, Artificial Sequence
  ENSG00000204590_34 (sequence is synthesized)
gtatatttaaagaggctaaggtgtttggccacatattgctttaggttcatctccattggtctcagtgtggacataactcctggaattcactccagtgcaaagtttaaataataccagcat

SEQ ID NO: 743228 - DNA, 120 bp, Artificial Sequence
  ENSG00000204590_35 (sequence is synthesized)
gagaatgtacttgaaggtttcccaaaatgtgctagacaagaaagagaaaaggtcccagctgagagaaaaatccacctgtctcccatctggggctctttggcctcactgatagaaaaggaa

SEQ ID NO: 743229 - DNA, 120 bp, Artificial Sequence
  ENSG00000204590_36 (sequence is synthesized)
aaggggcccaagctaagcttactttgagggttcatgatgttcagagatgctcaggggacttctccgctgcaggaggtggggtgaggacattggattcatttcctcaaaatatggagagaa

SEQ ID NO: 743230 - DNA, 120 bp, Artificial Sequence
  ENSG00000204590_37 (sequence is synthesized)
aggagaaaaatcagaattctatttgtacctctgcttcctgtgctgtttatctttgcttgtctttatctttttccacctcaggggtttcatcaggggtatttgggagagtctaggggtggg

SEQ ID NO: 743231 - DNA, 120 bp, Artificial Sequence
  ENSG00000204590_38 (sequence is synthesized)
gatgaagaattgactgggagctgaggaggggggatttttatgctgaagacctggcaggaggcaactcctgacacccccacagggttagactgtaaaacctcttccatgacttgctgactc

SEQ ID NO: 743232 - DNA, 120 bp, Artificial Sequence
  ENSG00000204590_39 (sequence is synthesized)
tataggataatagcaacaggaaaagaactgagggacgtgcagatgaggatgaatagggccccaacaccagtgcctgaggctgaggttagaactgactacaaagacacaggaaaccaaggg

SEQ ID NO: 743233 - DNA, 120 bp, Artificial Sequence
  ENSG00000204590_40 (sequence is synthesized)
cccagtctcccctccacgctgaaatacgcaccctcttgtctgggtcatgtctactatgtgaatacttgaccatggaggtctggggctctggtggcttccatagctggctagtctcttgat

SEQ ID NO: 743234 - DNA, 120 bp, Artificial Sequence
  ENSG00000204590_41 (sequence is synthesized)
ggagagaaatcagggcttctctcatccatgctggaatttcatttagatgtcaacttccaagtttccctttttccagatgggattatagtcctgcttctggaacagggtagctgtgtgtgg

SEQ ID NO: 743235 - DNA, 120 bp, Artificial Sequence
  ENSG00000204590_42 (sequence is synthesized)
tccaggatagttcaattatctggccctttgttcacttcttacaatcattgatacagtcaacaaaaattggttaaaaacaatatatgccagacatatatccctgagttctgggacaataac

SEQ ID NO: 743236 - DNA, 120 bp, Artificial Sequence
  ENSG00000204590_43 (sequence is synthesized)
caaaattgaataaggcaatatcctactctcaagcaatagagggtaggaatagaataataataatataatacaatagctctatagcagtatgtaaactataaaagcattattttacgtgtt

SEQ ID NO: 743237 - DNA, 120 bp, Artificial Sequence
  ENSG00000204590_44 (sequence is synthesized)
tctattgaactgtcataactaaataagatggttagtactataattatcccaaggattcattcactcatagaacatttgttgagcaattactacctgccagtcacttccaagtggtaagtg

SEQ ID NO: 743238 - DNA, 120 bp, Artificial Sequence
  ENSG00000204590_45 (sequence is synthesized)
agatagaaatggttctttgtggcgctcacaatttattggagaatggaaacacaattacaaaaaaaaagtgtgataagttctgggagaagggtggtacaggatcctgtggggtagtggtgg

SEQ ID NO: 743239 - DNA, 120 bp, Artificial Sequence
  ENSG00000204590_46 (sequence is synthesized)
ctccatataggagggacattgggatactgatcaggaaggagtgggggacagggctagaagctgcattagtataaagttatgtcagactgccaaaacaaaacaaacacaaaaaatcagtag

SEQ ID NO: 743240 - DNA, 120 bp, Artificial Sequence
  ENSG00000204590_47 (sequence is synthesized)
tctgtggtaaagaattgctataggaacagccagtaggggcagttaagctggtcttggtgaatcaggggaagcgtcctagaggaacagatgtccatgctgaggccaaatgctggacaggag

SEQ ID NO: 743241 - DNA, 120 bp, Artificial Sequence
  ENSG00000204590_48 (sequence is synthesized)
ttagccagacagggaaattgcattctgggcagaggagacagcaaaggtcaagaaacatgacaactttggaagactgtaacttgttcagaggcagagggtgcaaaggagaaatgaggaaag

SEQ ID NO: 743242 - DNA, 120 bp, Artificial Sequence
  ENSG00000204590_49 (sequence is synthesized)
gtgaagctggagaggtgggcttggtccagctcttgctgggccttttcagccgtgttaaagatttagactgtatccagagggatgttgaactttaagcctaagactgaaaaggtgagaatt

SEQ ID NO: 743243 - DNA, 120 bp, Artificial Sequence
  ENSG00000204590_50 (sequence is synthesized)
gtgccttagatcactatggttgcagtgtggagactggtttggaaaggggagaaatcagaggcttttacagccatcccagggagagagaatgaacaccagaattagggtaatggaagatgg

SEQ ID NO: 743244 - DNA, 120 bp, Artificial Sequence
  ENSG00000204590_51 (sequence is synthesized)
aaagaagagaaatcgttttatgggttgctcaggagatagaattgacatgtcttgggattgttttgctgtgtaggggagagagacaagtcaagagtatacatcctgtttctgacttggcaa

SEQ ID NO: 743245 - DNA, 120 bp, Artificial Sequence
  ENSG00000204590_52 (sequence is synthesized)
ctgggtgggtcatgggtctgtttcctgagacagttgtctacagccataccaccgtaagcgccctaaatctcatcagagacagtttatgcaaatggagcttggggaaagagaggtcgtggc

SEQ ID NO: 743246 - DNA, 120 bp, Artificial Sequence
  ENSG00000204590_53 (sequence is synthesized)
tggagacagagatttgggcatcatcaacatataggtgtggggagcagagaaggctgaggaagaaagcaggaaacatataaaaaggagagcagggaaaggagccagtgagacaggaaaaac

SEQ ID NO: 743247 - DNA, 120 bp, Artificial Sequence
  ENSG00000204590_54 (sequence is synthesized)
ctagtaacgtggtgtgatgaagctaggggaggaaggaaggaaggaagggcggcgtggaacgctgctgatgggtggtggcggggaaaatgaacgagtatccaccagcaacgagaggggcct

SEQ ID NO: 743248 - DNA, 120 bp, Artificial Sequence
  ENSG00000204590_55 (sequence is synthesized)
ccatggtcttggtgggagcatttctttggagaggtggaatcagaagccccagatgtcagagggttaaggaataatttggaggaaaagcgtaaaggcagtggaggtgaggagagaattttc

SEQ ID NO: 743249 - DNA, 120 bp, Artificial Sequence
  ENSG00000204590_56 (sequence is synthesized)
aaaatgtttggcagtgattgcaatgaaagaaaaaaatggagggagcagagtatatgcagttgaggaacttttttagtttggagtgtgttaacacgatgttaggaagaaggatcaagtgaa

SEQ ID NO: 743250 - DNA, 120 bp, Artificial Sequence
  ENSG00000204590_57 (sequence is synthesized)
ggagaaaggtgaaaatgctggaaggtggggcttagtgatgaaacaaaccttggggacaggtgggcgtggtactgagagtcccagtgaggggagtgccctcaggcaggcgccggtggcttc

SEQ ID NO: 743251 - DNA, 120 bp, Artificial Sequence
  ENSG00000204590_58 (sequence is synthesized)
tgtcacaggagggaacagcgctgacattcagctggttcgcactgatacggctcaaccagtttgttaaaacatgtctgttccagtgtcagtaatatacgagtaactgcaatatgcagtaaa

SEQ ID NO: 743252 - DNA, 120 bp, Artificial Sequence
  ENSG00000204590_59 (sequence is synthesized)
aattataaattctaatacaaactcagttcaagctaattaagagatcgcaacagccgttggtaaatggacttcccgctgcatttgagaagctttgcagcgccatctgccggtgtcgtagca

SEQ ID NO: 743253 - DNA, 120 bp, Artificial Sequence
  ENSG00000204590_60 (sequence is synthesized)
tcactgcaggctgagaggctgctttgcgccttcatcttgaagcactctgaaattgcctgtttaaattaccttggaatcatggagttgctactgcttctgaatagtttagcttctactttg

SEQ ID NO: 743254 - DNA, 120 bp, Artificial Sequence
  ENSG00000204590_61 (sequence is synthesized)
attttattgttagtgcattgtcgttcttgtgtcagtagcaagtttcagtgttttaatatttacaaatacaaaaatttttaataaaatattaaagccaaacttgaatgaagagacaacaaa

SEQ ID NO: 743255 - DNA, 120 bp, Artificial Sequence
  ENSG00000204590_62 (sequence is synthesized)
gcacatctggaaggaggggtgtgcccgctgcacctctggggatcgtgggagggggtcgtgggaccgcgtcaaccctcgcggcctatcgcggaggggatcccccaccccccctacatctgg

SEQ ID NO: 743256 - DNA, 120 bp, Artificial Sequence
  ENSG00000204590_63 (sequence is synthesized)
aaggggtggggaaggatggagagttgggggaggggaatccctccagctagcacggggcgccgtccccactgctccctgaaggagtgactccccccacgcacatccgggagggtcccaaat

SEQ ID NO: 743257 - DNA, 120 bp, Artificial Sequence
  ENSG00000204590_64 (sequence is synthesized)
agggtgtctgggaggactgaacatcggaagaagttgagtgggatgaaagggagtcaggccgatgggggagagggtcttatggcccctgagagctggccagcactggcgtcaccggcccct

SEQ ID NO: 743258 - DNA, 120 bp, Artificial Sequence
  ENSG00000204590_65 (sequence is synthesized)
tcatcccccaggctacagtgaacagaaaggtcagagcccagatattcttccccagccccctgctatagcgtaggtaaaagggtgtgggctttgtggccagagagagggtcaaacctggat

SEQ ID NO: 743259 - DNA, 120 bp, Artificial Sequence
  ENSG00000204590_66 (sequence is synthesized)
tctgtacctgttggctagctctgttacttaacatctgtgatattttcctgatctgcaaactgagggtaataattgacccttagcatagtgattgtaaagattgaagttgatgtgcacaaa

SEQ ID NO: 743260 - DNA, 120 bp, Artificial Sequence
  ENSG00000204590_67 (sequence is synthesized)
ttcatattcggagaagagagagggcgatcaggtctcattaggccccagggtgtctgaggggtgatctctgccagtggcggtgggcaaggcagaagaggcgtctgctgcagtggaaggatc

SEQ ID NO: 743261 - DNA, 120 bp, Artificial Sequence
  ENSG00000204590_68 (sequence is synthesized)
atgacagcctgagttaaattccacctcttctcagctgtgaggtcttgagtaagtgattttgctactctgagtcttagttactttgattttaaaaataaggacattgatacctgagtaaaa

SEQ ID NO: 743262 - DNA, 120 bp, Artificial Sequence
  ENSG00000204590_69 (sequence is synthesized)
caagttgtattggttatctcatttaatcctgaccaccctgaggtagggaggtgtccacactgtaaaatgaagaaacagaggctcagaaagttagttgccctgacatcacaaagctggtaa

SEQ ID NO: 743263 - DNA, 120 bp, Artificial Sequence
  ENSG00000204590_70 (sequence is synthesized)
gtggaagggccaggatttaaccctggcagcccagagcgtgatttgtattctgcaataccatttccttaatttctgagccttagttccccttttacctataggtatagcaccaagtcccat

SEQ ID NO: 743264 - DNA, 120 bp, Artificial Sequence
  ENSG00000204592_0 (sequence is synthesized)
ctcaggactcagaggctgggatcatggtagatggaaccctccttttactcctctcggaggccctggcccttacccagacctgggcgggctcccactccttgaagtatttccacacttccg

SEQ ID NO: 743265 - DNA, 120 bp, Artificial Sequence
  ENSG00000204592_1 (sequence is synthesized)
tgtcccggcccggccgcggggagccccgcttcatctctgtgggctacgtggacgacacccagttcgtgcgcttcgacaacgacgccgcgagtccgaggatggtgccgcgggcgccgtgga

SEQ ID NO: 743266 - DNA, 120 bp, Artificial Sequence
  ENSG00000204592_2 (sequence is synthesized)
tggagcaggaggggtcagagtattgggaccgggagacacggagcgccagggacaccgcacagattttccgagtgaatctgcggacgctgcgcggctactacaatcagagcgaggccgggt

SEQ ID NO: 743267 - DNA, 120 bp, Artificial Sequence
  ENSG00000204592_3 (sequence is synthesized)
ctcacaccctgcagtggatgcatggctgcgagctggggcccgacgggcgcttcctccgcgggtatgaacagttcgcctacgacggcaaggattatctcaccctgaatgaggacctgcgct

SEQ ID NO: 743268 - DNA, 120 bp, Artificial Sequence
  ENSG00000204592_4 (sequence is synthesized)
cctggaccgcggtggacacggcggctcagatctccgagcaaaagtcaaatgatgcctctgaggcggagcaccagagagcctacctggaagacacatgcgtggagtggctccacaaatacc

SEQ ID NO: 743269 - DNA, 120 bp, Artificial Sequence
  ENSG00000204592_5 (sequence is synthesized)
tggagaaggggaaggagacgctgcttcacctggagcccccaaagacacacgtgactcaccaccccatctctgaccatgaggccaccctgaggtgctgggccctgggcttctaccctgcgg

SEQ ID NO: 743270 - DNA, 120 bp, Artificial Sequence
  ENSG00000204592_6 (sequence is synthesized)
agatcacactgacctggcagcaggatggggagggccatacccaggacacggagctcgtggagaccaggcctgcaggggatggaaccttccagaagtgggcagctgtggtggtgccttctg

SEQ ID NO: 743271 - DNA, 120 bp, Artificial Sequence
  ENSG00000204592_7 (sequence is synthesized)
gagaggagcagagatacacgtgccatgtgcagcatgaggggctacccgagcccgtcaccctgagatggaagccggcttcccagcccaccatccccatcgtgggcatcattgctggcctgg

SEQ ID NO: 743272 - DNA, 120 bp, Artificial Sequence
  ENSG00000204592_8 (sequence is synthesized)
ttctccttggatctgtggtctctggagctgtggttgctgctgtgatatggaggaagaagagctcaggtggaaaaggagggagctactctaaggctgagtggagcgacagtgcccaggggt

SEQ ID NO: 743273 - DNA, 120 bp, Artificial Sequence
  ENSG00000204592_9 (sequence is synthesized)
ctgagtctcacagcttgtaaagcctgagacagctgccttgtgtgcgactgagatgcacagctgccttgtgtgcgactgagatgcaggatttcctcacgcctcccctatgtgtcttagggg

SEQ ID NO: 743274 - DNA, 120 bp, Artificial Sequence
  ENSG00000204592_10 (sequence is synthesized)
ctgaatctgtctgtgtccctgttagcacaatgtgaggaggtagagaaacagtccacctctgtgtctaccatgacccccttcctcacactgacctgtgttccttccctgttctcttttcta

SEQ ID NO: 743275 - DNA, 73 bp, Artificial Sequence
  ENSG00000204592_11 (sequence is synthesized)
cctcacactgacctgtgttccttccctgttctcttttctattaaaaataagaacctgggcagagggcagatca

SEQ ID NO: 743276 - DNA, 120 bp, Artificial Sequence
  ENSG00000204592_12 (sequence is synthesized)
agtgagccaggattgtgcgactgcactccagcctgggtgacagggtgaaacgccatctcaaaaaataaaaattgaaaaataaaaaaagaacctggatctcaatttaatttttcatattct

SEQ ID NO: 743277 - DNA, 120 bp, Artificial Sequence
  ENSG00000204592_13 (sequence is synthesized)
tgcaatgaaatggacttgaggaagctaagatcatagctagaaatacagataattccacagcacatctctagcaaatttagcctattcctattctctagcctattccttaccacctgtaat

SEQ ID NO: 743278 - DNA, 120 bp, Artificial Sequence
  ENSG00000204592_14 (sequence is synthesized)
cttgaccatataccttggagttgaatattgttttcatactgctgtggtttgaatgttccctccaacactcatgttgagacttaatccctaatgtggcaatactgaaaggtggggcctttg

SEQ ID NO: 743279 - DNA, 120 bp, Artificial Sequence
  ENSG00000204592_15 (sequence is synthesized)
agatgtgattggatcgtaaggctgtgccttcattcatgggttaatggattaatgggttatcacaggaatgggactggtggctttataagaagaggaaaagagaactgagctagcatgccc

SEQ ID NO: 743280 - DNA, 120 bp, Artificial Sequence
  ENSG00000204592_16 (sequence is synthesized)
agcccacagagagcctccactagagtgatgctaagtggaaatgtgaggtgcagctgccacagagggcccccaccagggaaatgtctagtgtctagtggatccaggccacaggagagagtg

SEQ ID NO: 743281 - DNA, 120 bp, Artificial Sequence
  ENSG00000204592_17 (sequence is synthesized)
ccttgtggagcgctgggagcaggacctgaccaccaccaggaccccagaactgtggagtcagtggcagcatgcagcgcccccttgggaaagctttaggcaccagcctgcaacccattcgag

SEQ ID NO: 743282 - DNA, 120 bp, Artificial Sequence
  ENSG00000204592_18 (sequence is synthesized)
cagccacgtaggctgcacccagcaaagccacaggcacggggctacctgaggccttgggggcccaatccctgctccagtgtgtccgtgaggcagcacacgaagtcaaaagagattattctc

SEQ ID NO: 743283 - DNA, 120 bp, Artificial Sequence
  ENSG00000204592_19 (sequence is synthesized)
ttcccacagataccttttctctcccatgaccctttaacagcatctgcttcattcccctcaccttcccaggctgatctgaggtaaactttgaagtaaaataaaagctgtgtttgagcatca

SEQ ID NO: 743284 - DNA, 120 bp, Artificial Sequence
  ENSG00000204592_20 (sequence is synthesized)
ccggccaggggagcaggtcacgacccctccccatcccccacggacggcgcgggtcccctcgaatcttcgggtcccagattcaccccaaggctgcggaacccgcccagaccctagaccggg

SEQ ID NO: 743285 - DNA, 120 bp, Artificial Sequence
  ENSG00000204592_21 (sequence is synthesized)
aggactcagaggctgggatcatggtagatggaaccctccttttactcctctcggaggccctggcccttacccagacctgggcgggtgagtgcggggtcgggatggaaacggcctctaccg

SEQ ID NO: 743286 - DNA, 120 bp, Artificial Sequence
  ENSG00000204592_22 (sequence is synthesized)
ggagtagagaggggccggcccggcgggggcgaaggactcggggagccgcgccgggaggagggtcgggccgatctcagcccctcctcgcccccaggctcccactccttgaagtatttccac

SEQ ID NO: 743287 - DNA, 120 bp, Artificial Sequence
  ENSG00000204595_0 (sequence is synthesized)
tgctagttcttatccctggacctgaacccaggcgcacatctggattagaagatgccaggctcagaggatcttcgtaaaggcaaggaccagatgcattcacacaggaaacgaaccatgttc

SEQ ID NO: 743288 - DNA, 120 bp, Artificial Sequence
  ENSG00000204595_1 (sequence is synthesized)
actaagaagcaactggaagatctgaacatcttgttcaatgagaacccatacccaaaccccagccttcagaaagaaatggcctcgaaaatagacatacacccaacagtactgcaggtctgg

SEQ ID NO: 743289 - DNA, 120 bp, Artificial Sequence
  ENSG00000204595_2 (sequence is synthesized)
catcaaaaacaagaaactccacaaccgccaataccagagggtggggtctccaccagtgtcggcctgagaaatgcagacacactacccagattgcccaacgctgctcacccgatcggcctg

SEQ ID NO: 743290 - DNA, 120 bp, Artificial Sequence
  ENSG00000204595_3 (sequence is synthesized)
gtgtacacgggtcatcgagtcccctcattccagctcatcctgtaccccaacctcaaggtccctgcaaatgacttcattggccacagaatagtccattttggctgctgccgagatcctaat

SEQ ID NO: 743291 - DNA, 120 bp, Artificial Sequence
  ENSG00000204595_4 (sequence is synthesized)
atatactgcctctaccccattttggaatcccaagtttgcgctccaagcttccattctggctctcctgcctgttcatctaaccaaagtcgagagagatgataaatacaaaaagtcacatgt

SEQ ID NO: 743292 - DNA, 120 bp, Artificial Sequence
  ENSG00000204599_0 (sequence is synthesized)
cggcagcgtcatagcggcgggcatcccatctgcacgtcacacctctttctcacctggacacgcatcccttcctaccctgccagccacgacgtttcctctttcccctctccaatgccccag

SEQ ID NO: 743293 - DNA, 120 bp, Artificial Sequence
  ENSG00000204599_1 (sequence is synthesized)
ccccagatctggcggaagaagatggagaacgggggtgggacagagttgtggacaacctctcaggagagggtcgcaaggtgggaccctgaacagtggtagaaacaaaatgagattgtccct

SEQ ID NO: 743294 - DNA, 120 bp, Artificial Sequence
  ENSG00000204599_2 (sequence is synthesized)
gaagtttgcccttcagctgagacacaaggagtagaggaagaggaaggactaacgcagaggcactcaaggtctcactatgactgtagttgagagtcctctcccttcttccctaaccctttc

SEQ ID NO: 743295 - DNA, 120 bp, Artificial Sequence
  ENSG00000204599_3 (sequence is synthesized)
cccatttctctcaccacttctttgccagtctagatccgtcctggtgccttactgtgcatacagttctactcgtctcagattcctttcttgtctgttagaaacgtatgtcaaacgaggata

SEQ ID NO: 743296 - DNA, 120 bp, Artificial Sequence
  ENSG00000204599_4 (sequence is synthesized)
cagtgtctggaactattggttctaagatataagtggaatgagcctggatcaggagaagtatgctgagctagagttgaaggaagcttctctttctaacaagagaaagcagagttaaattat

SEQ ID NO: 743297 - DNA, 120 bp, Artificial Sequence
  ENSG00000204599_5 (sequence is synthesized)
ggcagagacaagtctgttagaggctggggcctctgcagcctctacagctgcggctttggagaacttacaggtggaggcgagctgctctgtgtgcctggagtatctgaaggaacctgtcat

SEQ ID NO: 743298 - DNA, 120 bp, Artificial Sequence
  ENSG00000204599_6 (sequence is synthesized)
cattgagtgtgggcacaacttctgcaaagcttgcatcacccgctggtgggaggacctagagagggacttcccttgtcctgtctgtcgaaagacatcccgctaccgcagtctccgacctaa

SEQ ID NO: 743299 - DNA, 120 bp, Artificial Sequence
  ENSG00000204599_7 (sequence is synthesized)
tcggcaactaggcagtatggtggaaattgccaagcagctccaggccgtcaagcggaagatccgggatgagagcctctgcccccaacaccatgaggccctcagccttttctgttatgagga

SEQ ID NO: 743300 - DNA, 120 bp, Artificial Sequence
  ENSG00000204599_8 (sequence is synthesized)
ccaggaggctgtatgcttgatatgtgcaatttcccacacccaccgggcccacaccgttgtgccactggacgatgctacacaggagtacaaggaaaaactgcagaagtgtctggagcccct

SEQ ID NO: 743301 - DNA, 120 bp, Artificial Sequence
  ENSG00000204599_9 (sequence is synthesized)
ggaacagaagctgcaggagatcactcgctgcaagtcctctgaggagaagaagcctggtgagctcaagagactagtggaaagtcgccgacagcagatcttgagggagtttgaagagcttca

SEQ ID NO: 743302 - DNA, 120 bp, Artificial Sequence
  ENSG00000204599_10 (sequence is synthesized)
taggcggctggatgaagagcagcaggtgttgctttcacgactggaagaagaggaacaggacattctgcagcgactccgagaaaatgctgctcaccttggggacaagcgccgggacctggc

SEQ ID NO: 743303 - DNA, 120 bp, Artificial Sequence
  ENSG00000204599_11 (sequence is synthesized)
ccacttggctgccgaggtggagggcaagtgcttacagtcaggcttcgagatgcttaaggatgtcaaaagtaccctggaaaaatgtgaaaaggtgaagaccatggaggtgacttcagtatc

SEQ ID NO: 743304 - DNA, 120 bp, Artificial Sequence
  ENSG00000204599_12 (sequence is synthesized)
catagagctggaaaagaacttcagcaattttccccgacagtactttgccctaaggaaaatccttaaacagctaattgcggatgtgaccctggaccctgagacagctcatcctaacctagt

SEQ ID NO: 743305 - DNA, 120 bp, Artificial Sequence
  ENSG00000204599_13 (sequence is synthesized)
cctgtcagaggatcgtaagagcgtcaagttcgtggagacaagactccgggatctccctgacacaccaaggcgtttcaccttctacccttgcgtcctggctactgagggtttcacctcagg

SEQ ID NO: 743306 - DNA, 120 bp, Artificial Sequence
  ENSG00000204599_14 (sequence is synthesized)
tgccgggactccgtgagccgaaagggcgagttgactccactccctgagactggctactggcgggtgcggctatggaatggggacaaatatgcagccaccaccacaccttttacccctttg

SEQ ID NO: 743307 - DNA, 120 bp, Artificial Sequence
  ENSG00000204599_15 (sequence is synthesized)
cacatcaaggtgaaacccaagcgggtaggcatattcctagactatgaggccggcacactgtctttctacaatgtcacagaccgctctcatatctacaccttcactgatacttttactgag

SEQ ID NO: 743308 - DNA, 120 bp, Artificial Sequence
  ENSG00000204599_16 (sequence is synthesized)
aaactttggcccctcttctacccaggcatccgggctggacggaagaatgctgcaccacttaccatcaggcccccaacagattgggagtgacaggttgggatgtgggaatgactggggtga

SEQ ID NO: 743309 - DNA, 120 bp, Artificial Sequence
  ENSG00000204599_17 (sequence is synthesized)
ggcagggtcaagtgctacgggcctccttcccgtgtcctgctggaacgtcttcgtgtccacctgggtccagtcctgaatcatcttggagaaacaccttggtttctaggatggttttgtgtg

SEQ ID NO: 743310 - DNA, 120 bp, Artificial Sequence
  ENSG00000204599_18 (sequence is synthesized)
gagggggaggtaggactgggctggatgagagagcacagctgtgacttcctcctaactgtcagggtggggagctggttcccagaggattgtctaccctgaagtccatcaggttttctgttg

SEQ ID NO: 743311 - DNA, 120 bp, Artificial Sequence
  ENSG00000204599_19 (sequence is synthesized)
cacaaggacgggtcaggaaggaaggagaggcttttccagaaacaaaaaatctgtgagggtctgacttgctcaaaccagaggaggaaacagaaacccctgcacatctttttagggggttct

SEQ ID NO: 743312 - DNA, 120 bp, Artificial Sequence
  ENSG00000204599_20 (sequence is synthesized)
ttgacccaggatagtcttgcttcttgaggtagatcacaggggtctgtgtacctctgaattcatgagagatgaatgacagatgctctcatgggtctagatattgaggagtttttctgaggg

SEQ ID NO: 743313 - DNA, 120 bp, Artificial Sequence
  ENSG00000204599_21 (sequence is synthesized)
cagagattggacatcaacaaggctagaagggtcagggaagtgggctaaaggaacagattcctagagattaatgaagaggagggaggtttctttggtcttctattccaagggtaaggttgc

SEQ ID NO: 743314 - DNA, 120 bp, Artificial Sequence
  ENSG00000204599_22 (sequence is synthesized)
gattatgggtaagattggccagaggtaggaatgtggggagaaggagaggctgaaaagaaagcagaggagaacccaggtccctgcctcagccttcagcagagttggcttattgcctgcctc

SEQ ID NO: 743315 - DNA, 120 bp, Artificial Sequence
  ENSG00000204599_23 (sequence is synthesized)
tataccaataagtcagtcaccttgctcctctccagaggcaaagtggaagagatcctgcaagacacatctatcctttcacagtgttcccaagggaacttggaaaggagagtcaggtattag

SEQ ID NO: 743316 - DNA, 120 bp, Artificial Sequence
  ENSG00000204599_24 (sequence is synthesized)
aggaaagagaagggtatttgtatacaaagccctggccttaaagaatgttacttagtagctactcccaaattgtcagccttcttacctggccaaggtgtccaagccagaaaggaaaaaagg

SEQ ID NO: 743317 - DNA, 120 bp, Artificial Sequence
  ENSG00000204599_25 (sequence is synthesized)
ttatggagtctttctcaccctaaggacagggtggaagagggtggtatatagggaagggccagataggcaacttcatttggcttgtgtgcatctggcctggaactggtgttaagccaggct

SEQ ID NO: 743318 - DNA, 120 bp, Artificial Sequence
  ENSG00000204599_26 (sequence is synthesized)
tttgcttgtttgttgccatccctcaccctttgccatttcccttttcagagaatgtaaatgattttcatgttaggccaaaataaacaacttatagggtacatatgttgtcataaaaggtaa

SEQ ID NO: 743319 - DNA, 120 bp, Artificial Sequence
  ENSG00000204599_27 (sequence is synthesized)
aagtgatgcatgccaaaccaaactaaaccaatttggattatctgctattcgggtaatcttcacagaaatgactgagagaagaatctgcagtttactgagggcatttcagttcctcctacc

SEQ ID NO: 743320 - DNA, 120 bp, Artificial Sequence
  ENSG00000204599_28 (sequence is synthesized)
acctcaacaggactttgtccagactctcctcctcttacctttgtgccttgactgtggttctttgtggcaagatactttggttggttaaaataatatggaacaaaggatccactgaagtga

SEQ ID NO: 743321 - DNA, 120 bp, Artificial Sequence
  ENSG00000204599_29 (sequence is synthesized)
cccagcttccactgacacgagcctcggcgcggcttccgcttccggcgagtattgtgtgtcgcgccgcggggcgggggcgaggggaggaggaaggagggaggcagcgctccggcggctccg

SEQ ID NO: 743322 - DNA, 120 bp, Artificial Sequence
  ENSG00000204599_30 (sequence is synthesized)
gaagagaggaaaagtgtggaagtccacaagccgcccccgccccgccctcttcgtcgactttcagctgcaccgggaggcggcggcgcctggccagagccggggcctggagcctggactaga

SEQ ID NO: 743323 - DNA, 120 bp, Artificial Sequence
  ENSG00000204599_31 (sequence is synthesized)
cagcctcgccggccggggcgccagtccagcgccctgcgggcaatgggcttcagcgctcgagcacgcgcatgcgcgggcctgtatctccagaggattcctcgggtcacctggacgccagca

SEQ ID NO: 743324 - DNA, 120 bp, Artificial Sequence
  ENSG00000204599_32 (sequence is synthesized)
tctcagccacctgcccctctgggtcccttcttgcccttgattccccctgctgcttctcatcgccagccctcctcctccttcttccgcaggcaccgctagacccggccgcggccgcccgcc

SEQ ID NO: 743325 - DNA, 120 bp, Artificial Sequence
  ENSG00000204599_33 (sequence is synthesized)
gagatgcttaaggatgtcaaaagtaccctggaaaagaatattcctagaaagttcggaggctcactctcaacgatctgtccacgggatcataaggctctccttggattagtaaaagaaatc

SEQ ID NO: 743326 - DNA, 120 bp, Artificial Sequence
  ENSG00000204604_0 (sequence is synthesized)
ggggtgtgttgattctcagtgataaacaacatatttctaacatttaggattgacttctaaagactcttggtacctgaggaagaaacccagaagaggaagaggaaagcaaaggagtcgggg

SEQ ID NO: 743327 - DNA, 62 bp, Artificial Sequence
  ENSG00000204604_1 (sequence is synthesized)
agaaacccagaagaggaagaggaaagcaaaggagtcggggatggctctttctcagggtctac

SEQ ID NO: 743328 - DNA, 120 bp, Artificial Sequence
  ENSG00000204604_2 (sequence is synthesized)
tataggaacctggtctccctggatatctcttccaaatgcatgatgaatacattgtcatcaacagggcaaggcaatacagaagtgatccacacagggacattgcagagacaagcaagttat

SEQ ID NO: 743329 - DNA, 120 bp, Artificial Sequence
  ENSG00000204604_3 (sequence is synthesized)
cacattggagcattttgctcccaggaaattgagaaagacattcatgactttgtgtttcagtggcaagaagatgaaacaaatgaccatgaagcacccatgacagaaataaaaaagttgact

SEQ ID NO: 743330 - DNA, 120 bp, Artificial Sequence
  ENSG00000204604_4 (sequence is synthesized)
agtagtacagaccgatatgatcaaaggcatgctggaaacaagcctattaaaggtcagcttgaatcaagatttcatttgcatttgcgaagacataggagaattcatactggagagaaacct

SEQ ID NO: 743331 - DNA, 78 bp, Artificial Sequence
  ENSG00000204604_5 (sequence is synthesized)
agaaaccttacaaatgtgaagaatgtgagaaagttttcagttgcaaatcacatcttgaaatacatagcgacaaggctt

SEQ ID NO: 743332 - DNA, 120 bp, Artificial Sequence
  ENSG00000204604_6 (sequence is synthesized)
gattcacacctggcaaaacatactagaattcacaggggagacaaacattacacatgtaatgaatgtggcaaggtttttgatcaaaaagcaacccttgcatgtcatcatagaagtcatact

SEQ ID NO: 743333 - DNA, 120 bp, Artificial Sequence
  ENSG00000204604_7 (sequence is synthesized)
tcatagaagtcatactggagagaaaccttataagtgtaatgagtgtggcaagacctttagtcagacatcacaccttgtgtaccatcatagactgcatactggagagaaaccttacaaatg

SEQ ID NO: 743334 - DNA, 120 bp, Artificial Sequence
  ENSG00000204604_8 (sequence is synthesized)
accttcgctcgaaattcagtcctcgtaattcataaggcagttcatactgcagagaaaccctataagtgtaatgaatgtggcaaggtttttaagcaacgagcaactcttgcaggacatcgt

SEQ ID NO: 743335 - DNA, 120 bp, Artificial Sequence
  ENSG00000204604_9 (sequence is synthesized)
gacatcgtagagttcacactggagagaaaccttacagatgtgaagaatgcgacaaagttttcagtcgcaaatcacatcttgaaagacataggaggattcatactggagagaaaccataca

SEQ ID NO: 743336 - DNA, 120 bp, Artificial Sequence
  ENSG00000204604_10 (sequence is synthesized)
gtttgtgacaaggctttccggagtgattcacgtcttgcagaacatcagagagttcatactggagagagaccttacacatgtaatgaatgtggcaaggtttttagtacaaaagcgtacctc

SEQ ID NO: 743337 - DNA, 120 bp, Artificial Sequence
  ENSG00000204604_11 (sequence is synthesized)
gcatgtcatcaaaaacttcatactggagagaaactttacgaatgtgaagaatgtgacaaagtttacattcgcaaatcacaccttgaaagacataggaggattcatacaggagagaaacct

SEQ ID NO: 743338 - DNA, 120 bp, Artificial Sequence
  ENSG00000204604_12 (sequence is synthesized)
cacaagtgtggtgattgtggtaaagcctttaattcaccttcacaccttattaggcatcagagaatccatactggacagaaatcttacaaatgtcatcagtgtggcaaggtctttagtctg

SEQ ID NO: 743339 - DNA, 120 bp, Artificial Sequence
  ENSG00000204604_13 (sequence is synthesized)
aggtcactccttgcagaacatcagaaaattccttttggagacaattgtttcaagtgcaatgagtatagcaaaccatcaagcattaattgacatcagagtcaaatcagcattgacctgagt

SEQ ID NO: 743340 - DNA, 120 bp, Artificial Sequence
  ENSG00000204604_14 (sequence is synthesized)
tcagagtcaaatcagcattgacctgagtttgagttgacttaacattgatttcaagcattaatcgacattaaactgtttatgttaagaggattgggccaggcgtggtgtctcacacctgta

SEQ ID NO: 743341 - DNA, 120 bp, Artificial Sequence
  ENSG00000204604_15 (sequence is synthesized)
gtaggtcacttgaggtcatgaatttgagaccagcctggccaacagacgggagccacttttcccagcctgtatgttcttttatttatttatttatttttaagatggaatcttgctctgtcg

SEQ ID NO: 743342 - DNA, 86 bp, Artificial Sequence
  ENSG00000204604_16 (sequence is synthesized)
atttatttatttatttttaagatggaatcttgctctgtcgcccacgttggagtgcagtgatgtgatctcggttcactgcaacattt

SEQ ID NO: 743343 - DNA, 74 bp, Artificial Sequence
  ENSG00000204604_17 (sequence is synthesized)
cgtgttagctaggatggtctcgatcttctgtccttaaaatccacctgcctccaccttttttgtttctttaacaa

SEQ ID NO: 743344 - DNA, 120 bp, Artificial Sequence
  ENSG00000204604_18 (sequence is synthesized)
tgagccaccacacctggcctgttttttgtttctttaacaaaaagttatagaaatttctctgggtattgtgttgaatctacatcacattcagttataatcatttagcaatattattccatt

SEQ ID NO: 743345 - DNA, 120 bp, Artificial Sequence
  ENSG00000204604_19 (sequence is synthesized)
caatatggcttgtatctcttatttgcacatgtttttatcactttgatcaatgtttgtagatttgaaggtagaaacttctcaacttttttcatttattcctaagtatttcttactttaagt

SEQ ID NO: 743346 - DNA, 120 bp, Artificial Sequence
  ENSG00000204604_20 (sequence is synthesized)
tctttagcaaatgaaagtgtttttttaattttctttttaaattgtttattgttaatgtatggaaattcaactaatttttggtgctgttattctattcttcaaatccactgcatatgtttt

SEQ ID NO: 743347 - DNA, 120 bp, Artificial Sequence
  ENSG00000204604_21 (sequence is synthesized)
ttagttccagttgcattttggttgactctttgtgattttctacacagaagatcatgtcatctacaaagaaatagttttacttctttctttctgatttggatgagtttgatttcttttgct

SEQ ID NO: 743348 - DNA, 120 bp, Artificial Sequence
  ENSG00000204604_22 (sequence is synthesized)
atttcattgctctagctaggacagccagtattgattgaatagaaggggtgagagcattcttgcatcatgtgagatcctacaggaaaagcattccattttccctgactggttatttctgct

SEQ ID NO: 743349 - DNA, 120 bp, Artificial Sequence
  ENSG00000204604_23 (sequence is synthesized)
gtggtcatttcatggatggtctttgtattgttgaggtaaatttccttctctttctattttgtttaggatttccatgatgactggatgttgaattttgtgaaatgctttttctccatgtat

SEQ ID NO: 743350 - DNA, 120 bp, Artificial Sequence
  ENSG00000204604_24 (sequence is synthesized)
tgagatgatgtggttttcatctttcattatgttcaagtggtatatcacattgatttgcttgactatgttgaaccattttgcatcccagaaataagtggcacttgcatatcaacaatcctt

SEQ ID NO: 743351 - DNA, 120 bp, Artificial Sequence
  ENSG00000204604_25 (sequence is synthesized)
aaaattgtgcatgatatcacattttttgcaccaagataaactgatacaaatccgttataacatgtctgaacagggtttggtttgaggcactcagatgggtaagacatgagtttgaaaaga

SEQ ID NO: 743352 - DNA, 120 bp, Artificial Sequence
  ENSG00000204604_26 (sequence is synthesized)
gactcaatcaaggcaatgtaaattctgctaaaactgaaacaagaagaaacatcaaatttgcgatgagaccagatgctgtggctcaggcctgtaatcccataattttcagaggctgagaca

SEQ ID NO: 743353 - DNA, 120 bp, Artificial Sequence
  ENSG00000204604_27 (sequence is synthesized)
gttgggtcacgtgggccccggtactcaagaccagcctgggcagaatggtgaaaccaccttctctacaaaaaatacataaattagctgggcattgtggcacatgtctgctggttcagcttc

SEQ ID NO: 743354 - DNA, 120 bp, Artificial Sequence
  ENSG00000204604_28 (sequence is synthesized)
tgtggagtctgcagtgggaggatggcttgagcctaggagttcgaggctgcagggagccatgatcatgccattgtactccagcatgggtgacagagacagatagtgtatcgaaaaatgaat

SEQ ID NO: 743355 - DNA, 120 bp, Artificial Sequence
  ENSG00000204604_29 (sequence is synthesized)
ctggtaaagtttgggtagagggacaatgaaatcattgatgctttatgaaaaggttatggggacgattcccaaaataaatcaccagtttgtaaatggaaaacttattttaagttgggacaa

SEQ ID NO: 743356 - DNA, 65 bp, Artificial Sequence
  ENSG00000204604_30 (sequence is synthesized)
accagtttgtaaatggaaaacttattttaagttgggacaagatgatgttgaaagtgatgcacagg

SEQ ID NO: 743357 - DNA, 61 bp, Artificial Sequence
  ENSG00000204604_31 (sequence is synthesized)
gcacagagtggcaggcagaccatccacataagttttataggtacaactgtcaaagacgaca

SEQ ID NO: 743358 - DNA, 120 bp, Artificial Sequence
  ENSG00000204604_32 (sequence is synthesized)
atccacataagttttataggtacaactgtcaaagacgacactggagaagagccaagctggatctataaggaattgcatatgagatggcacacatattcatgctgtctgaagattcagtca

SEQ ID NO: 743359 - DNA, 120 bp, Artificial Sequence
  ENSG00000204604_33 (sequence is synthesized)
cgttaccatatcaagctgaaaatgtcaccactatctggagagttggacatgttttattgagaatgtattttttttctctggatctgttatgaacacctttgttggcttggttcagtaata

SEQ ID NO: 743360 - DNA, 120 bp, Artificial Sequence
  ENSG00000204604_34 (sequence is synthesized)
aatatgtgagacttttcatttaaaaaaagtcaaatgacttaattctgtattttaaattctgttttgtttgttttgtttttttgagatggagtcttctgaaaattttctcatcttctctaa

SEQ ID NO: 743361 - DNA, 120 bp, Artificial Sequence
  ENSG00000204604_35 (sequence is synthesized)
cccggttcatgacagacccttggactttactgttgtggaaaaatctatataaaacagtatcagtgtgtcaaagcattatggctgtcacaagcttgtgaaaggaaaataaaaattactaag

SEQ ID NO: 743362 - DNA, 120 bp, Artificial Sequence
  ENSG00000204604_36 (sequence is synthesized)
ccaaagagaaaagtcaatctgggaactgcgtcagacaaacctgccttccattttattcctaaacaagatagttacaaagattttttaaaaagctacatatgcccctcccaaaccgggaac

SEQ ID NO: 743363 - DNA, 120 bp, Artificial Sequence
  ENSG00000204604_37 (sequence is synthesized)
ctcaagatctccaccctaaaatagttctgttgaatttcaccctggcgatgtaaactgagagcttatcttcacagatgtgggaaagagcccatccctctgcacacctgagtcaaatgtcta

SEQ ID NO: 743364 - DNA, 120 bp, Artificial Sequence
  ENSG00000204604_38 (sequence is synthesized)
tctgattgcttcccttgccctatttatgtaaaaatacagggtccctgagccagcctaaggcataagtgacttatccctcctccctgctcacatataaattgtgtatttagtgaaaggctg

SEQ ID NO: 743365 - DNA, 120 bp, Artificial Sequence
  ENSG00000204604_39 (sequence is synthesized)
atcaaagattcaaagaatgttatttgttatctacctgtgacccagaaggtccccaattccagttattccacctttccagaccggaccaatgtatatatgtactgattgctgtctcgtgtg

SEQ ID NO: 743366 - DNA, 120 bp, Artificial Sequence
  ENSG00000204604_40 (sequence is synthesized)
tctgtaaaatgtgtgaaaccaaactgcagcctcaacaccatggacacacgtcatcaggacctcctgaggttcgtgttaattggccttagactctccctgtccccagacccaggacgcatg

SEQ ID NO: 743367 - DNA, 120 bp, Artificial Sequence
  ENSG00000204604_41 (sequence is synthesized)
tgtttcctttttcttcatttctattaaagatgggtctcattctgttggccaggcatgagagcggtgacaggatcagccctcactgaagcttcaatctcctgggttcaagggatcctccca

SEQ ID NO: 743368 - DNA, 120 bp, Artificial Sequence
  ENSG00000204604_42 (sequence is synthesized)
cctcagcctccaaagttgctaggaccatagccaggtgccaccgcaccgggcaaatttttgtgttcctagtagagatgggctttcaccatgttgcccgagctggtcttgaattccagggct

SEQ ID NO: 743369 - DNA, 90 bp, Artificial Sequence
  ENSG00000204604_43 (sequence is synthesized)
ccgtattggcctcccaagaccaacgtgtttcttaatttaaaaaaaaaaaaatagaccaggtgctctggctcatgcctgtaatcccagcac

SEQ ID NO: 743370 - DNA, 120 bp, Artificial Sequence; identical to SEQ ID NO: 650374
  ENSG00000204604_44 (sequence is synthesized)

SEQ ID NO: 743371 - DNA, 84 bp, Artificial Sequence
  ENSG00000204604_45 (sequence is synthesized)
gcagaagaatggcttgaataactgcactctggctgggcaagagcgagactccatctctaaaataaaattaaagtaatataaaaa

SEQ ID NO: 743372 - DNA, 120 bp, Artificial Sequence
  ENSG00000204604_46 (sequence is synthesized)
gagactccatctctaaaataaaattaaagtaatataaaaaactgcttctcatgaaagctttggtataatcttacgaggtaacatcattgttttgcaactacggtatgtgttcaaaatgtt

SEQ ID NO: 743373 - DNA, 120 bp, Artificial Sequence
  ENSG00000204604_47 (sequence is synthesized)
cttctttgaccccacatttcattagatatatttttaagccattttaaaattgtttttctctgaaatttattgtgtttagtttacattgaggactgcatgctttctagtctgtatcataca

SEQ ID NO: 743374 - DNA, 120 bp, Artificial Sequence
  ENSG00000204604_48 (sequence is synthesized)
ttggaaacattttctagtacctgataaatgattttaggttgtttcgatgtgtacttgataaagatatcaaggaactttttctttatgctaacattaaaatttagttgaagtagcctatta

SEQ ID NO: 743375 - DNA, 120 bp, Artificial Sequence
  ENSG00000204604_49 (sequence is synthesized)
agaccaggaagtggatcccgtggaatgacggtcacgccgcggcgggcggattgacttctaaagactgttggtacgtgagaaagaaacccagaagaggaagaggaaagcaaaggagtcagg

SEQ ID NO: 743376 - DNA, 76 bp, Artificial Sequence; identical to SEQ ID NO: 728674
  ENSG00000204604_50 (sequence is synthesized)

SEQ ID NO: 743377 - DNA, 120 bp, Artificial Sequence
  ENSG00000204604_51 (sequence is synthesized)
tttgggcagaggttattgttgcagatatctcttccaaatgcatgttgaagacgttgtcgtcaacagggcaaggcaatacagaagtgatccacacagggacattgcacagacaagcaagtc

SEQ ID NO: 743378 - DNA, 120 bp, Artificial Sequence
  ENSG00000204604_52 (sequence is synthesized)
atcacattggagaattttgtttccatgaaattgagaaagacattcatggcttcgagtttcagtggaaagaagatgaaacaaatggccatgcagcacccatgacagaaatcaaagagttgg

SEQ ID NO: 743379 - DNA, 120 bp, Artificial Sequence
  ENSG00000204604_53 (sequence is synthesized)
cgcacatatttcagtctgaagggaaaattggtaatcaagttgagaagtctatcaacaatgcttcctcagtttcaacatcccaaagaatttgttgtaggcccaaaacccatatttctaata

SEQ ID NO: 743380 - DNA, 120 bp, Artificial Sequence
  ENSG00000204604_54 (sequence is synthesized)
agtatggaaataattccctccattcttcattactcacacaaaaatgggaagtacacatgagagaaaaatcttttgaatgtatacagagcttcaaatcctttaattgcagctcactcttaa

SEQ ID NO: 743381 - DNA, 120 bp, Artificial Sequence
  ENSG00000204604_55 (sequence is synthesized)
aaaaacatcagataattcacttagaagagaaacaatgtaaatgtgatgtatgtggcaaggtctttaatcagaagcgataccttgcctgccatcgtagatgtcacactggtgagaaacctt

SEQ ID NO: 743382 - DNA, 120 bp, Artificial Sequence
  ENSG00000204604_56 (sequence is synthesized)
acaagtgtaatgagtgtggcaagacctttggtcataattcatccctcttcattcacaaagcgcttcatactggagagaaaccttatgaatgtgaagaatgtgacaaagttttcagtcgca

SEQ ID NO: 743383 - DNA, 120 bp, Artificial Sequence
  ENSG00000204604_57 (sequence is synthesized)
gaaaccatacaaatgtaaggtttgtgatgaggctttcgcatataattcatatctggcaaaacatactatacttcacactggagagaaaccttacacatgtaatgaatgtggcaaagtttt

SEQ ID NO: 743384 - DNA, 120 bp, Artificial Sequence
  ENSG00000204604_58 (sequence is synthesized)
ctggcaaaacatactatacttcacactggagagaaaccttacacatgtaatgaatgtggcaaagtttttaatcgactatcaacccttgcacgccatcatagacttcatactggagagaaa

SEQ ID NO: 743385 - DNA, 89 bp, Artificial Sequence
  ENSG00000204604_59 (sequence is synthesized)
gagagaaaccttacaaatgtgaagagtgtgacaaagttttcagtcgcaaatcacaccttgaaagacataggaggattcatagtgcaaag

SEQ ID NO: 743386 - DNA, 68 bp, Artificial Sequence
  ENSG00000204604_60 (sequence is synthesized)
ctggaaagacacaggagcagagggattcacacctggcacaacatcagagagttcatactggagagaaa

SEQ ID NO: 743387 - DNA, 120 bp, Artificial Sequence
  ENSG00000204604_61 (sequence is synthesized)
tataccatcataggcttcatagtggagagaagccttaatagtgtaatgagtgtggcaagaccttccatcacaattcaaccctgtaagtcataaggcaattcatactggagagaaacctta

SEQ ID NO: 743388 - DNA, 120 bp, Artificial Sequence
  ENSG00000204604_62 (sequence is synthesized)
actggagagaaaccttacaaatgggaggaatgtgacaaaagttttcagttgtaaatcaaaccttaaaacacataagaaaattcacattgaagagaaaccatacagaggtaaggtttgtga

SEQ ID NO: 743389 - DNA, 120 bp, Artificial Sequence
  ENSG00000204604_63 (sequence is synthesized)
caaggtttttgcatataatgcatatctggcaaaacatactagaattcacactggagagaaactcattataagtgtaatgagtgtggcaagaccgttggtcaaaattcacaccttgtaatt

SEQ ID NO: 743390 - DNA, 120 bp, Artificial Sequence
  ENSG00000204604_64 (sequence is synthesized)
aaaaggtcaaaattcacaccttgtaattcatagtggagagaaaccttacaagcacaatgaatgtgacatggtttttaatcaacaatcacaccttgcaagtcatcatagacttcatactgc

SEQ ID NO: 743391 - DNA, 120 bp, Artificial Sequence
  ENSG00000204604_65 (sequence is synthesized)
atagaaatcttacaaacgtgaacaatgtgacaaagttttcattcacaaatccagcttcaaatacataggagaattcacactggagaaaagccatagaaatgtaaggtttgtgacaaggct

SEQ ID NO: 743392 - DNA, 84 bp, Artificial Sequence
  ENSG00000204604_66 (sequence is synthesized)
acactccctttagtgggcagtcaccacttattcaccatcaagcaatccatggtatagggaaacttgactaatgtaatgattgtc

SEQ ID NO: 743393 - DNA, 120 bp, Artificial Sequence
  ENSG00000204604_67 (sequence is synthesized)
atccatggtatagggaaacttgactaatgtaatgattgtcacaaagttttcagtaatgctacaaccattgcacatcattggagaatccacagtgaagagatcttacaagtgtaataaatg

SEQ ID NO: 743394 - DNA, 120 bp, Artificial Sequence
  ENSG00000204604_68 (sequence is synthesized)
tggcaaatttttcagacatcgttcatgccttgcatttcactggtgaactcatgctggagagaaaccttataaatgtcatgattgaggcaaggtcttcagtcaagcttcatcctatgcaaa

SEQ ID NO: 743395 - DNA, 120 bp, Artificial Sequence
  ENSG00000204604_69 (sequence is synthesized)
acataggaggattcatacaggagagaaacctcacaagtgtgatgattgtggcaaagcgtttacttcacattcacacctcattagacatcagagaatccatgctggacagaaatcttacaa

SEQ ID NO: 743396 - DNA, 120 bp, Artificial Sequence
  ENSG00000204604_70 (sequence is synthesized)
atgtcatcagtgtggaagggtcttcagtccaaggtcactccttgcagaccatcagacaattccttttggagacagttgtttcaaatgcagtgagtatagcaaaccatcaagcattaattg

SEQ ID NO: 743397 - DNA, 120 bp, Artificial Sequence
  ENSG00000204604_71 (sequence is synthesized)
acattagagtcaaatcagccttgacctgagtttgttgatttaacattgatttcaagcattaattgccattaaactgtttatgttaagaggattgcactgggggccatggctcatgcctgt

SEQ ID NO: 743398 - DNA, 120 bp, Artificial Sequence
  ENSG00000204604_72 (sequence is synthesized)
aattccagcactttgagaggcaaagacaggtaggtcactggagctcacgagtttgagaacagcctagccaacagatgggagctacttttcccagcctttattttctttttcttgtttttt

SEQ ID NO: 743399 - DNA, 67 bp, Artificial Sequence
  ENSG00000204604_73 (sequence is synthesized)
tctcctgcctcagtctcccaagtagctgacactacagttgtgtgccaccacacctgggtaattatct

SEQ ID NO: 743400 - DNA, 120 bp, Artificial Sequence
  ENSG00000204604_74 (sequence is synthesized)
caggagtgagccactgtgcctggcctgttttttgtttctttaacaaaaagttatagagacttctatgagtattgtaccgaatctaaatcacaattgagtatataatcattgagcgatatt

SEQ ID NO: 743401 - DNA, 120 bp, Artificial Sequence
  ENSG00000204604_75 (sequence is synthesized)
tataatcattgagcgatattcatttttccaatcagtatgggatttatatctatttatacatgtttttaatcattttgatcaatgtttatagatttcaaggtacaaacctcactttttatg

SEQ ID NO: 743402 - DNA, 120 bp, Artificial Sequence
  ENSG00000204604_76 (sequence is synthesized)
tttattcctaaatatttcttactttaagttctttagcaaatggaattggtttttaattttcttttaaaattatttattgttaatgtatggaaattcaactaatttttggtgctgttattc

SEQ ID NO: 743403 - DNA, 120 bp, Artificial Sequence
  ENSG00000204604_77 (sequence is synthesized)
tattctgcaaataaactgaatgtgtttgttagttccagttgcattttggctgactctttgtgattttctttacagaaggtcatgtcatctacaaacaaataaaatttgacttctttcttt

SEQ ID NO: 743404 - DNA, 83 bp, Artificial Sequence
  ENSG00000204604_78 (sequence is synthesized)
cgtgatgctggagaattataggaacctcgtctccctggagttttggtctgtcatcccggctaaagtacagtggtgtcatctcc

SEQ ID NO: 743405 - DNA, 120 bp, Artificial Sequence
  ENSG00000204604_79 (sequence is synthesized)
gatggctcttcctcagtccctctcatctcgcttaggttccgtctctcgtgacccagtgtcatgaacttgggaagaggctgcactgggcaggtcctgggaagggctcacaccccgacatgg

SEQ ID NO: 743406 - DNA, 120 bp, Artificial Sequence
  ENSG00000204604_80 (sequence is synthesized)
taggacagccagtattgattgaatagaaggggtgagagcattcttgcatcatgtgagatcctacaggaaaagcattccgttttccctgattggttatttctgctgtggtcatttcatgga

SEQ ID NO: 743407 - DNA, 120 bp, Artificial Sequence
  ENSG00000204604_81 (sequence is synthesized)
tggtctttgtattgctgaggtaaattttcttctgtatctattttgtgtgggatttctatgatgacttgatgttgacttttgtgaaatgctttttctccatgtattgagatgatgtggttt

SEQ ID NO: 743408 - DNA, 120 bp, Artificial Sequence
  ENSG00000204604_82 (sequence is synthesized)
tcatctttcattgtgttcaagtggtatatcacattgatttgcttgactatgttgaaccatccttgcatcccagaaataagtggcacttgcatatctacaatccttttaatatcctcttga

SEQ ID NO: 743409 - DNA, 120 bp, Artificial Sequence
  ENSG00000204604_83 (sequence is synthesized)
atacagttcgctagtacaaggggtcttcaagaagttcatgaaaaaaatacatattatgtgaaaattgcacatgatgtcacattttctgcaccaaaataaactggcacaaatctgttataa

SEQ ID NO: 743410 - DNA, 120 bp, Artificial Sequence
  ENSG00000204604_84 (sequence is synthesized)
atagctgggattacagacatgtgtcactgtgcccagcctatcttttactgtggacgttgtcatcttttaagatatcagttgtgctctgtctcatctagataatgaatgtcacttggtgtg

SEQ ID NO: 743411 - DNA, 120 bp, Artificial Sequence
  ENSG00000204604_85 (sequence is synthesized)
tctataaaagtttcaaacatttttataacaggaaccctacattgattttttatttgtttatttctgttatttttcacaaacataagaaatttatactgagagtatgtcttgataatactc

SEQ ID NO: 743412 - DNA, 120 bp, Artificial Sequence
  ENSG00000204604_86 (sequence is synthesized)
atcccttatttggatttgtcagaacattctctacagttaaatccatgctttcccctctctcctcctctcattttttgtaaagataagatctcctcccataaccatttggttaaaatgtgt

SEQ ID NO: 743413 - DNA, 120 bp, Artificial Sequence
  ENSG00000204610_0 (sequence is synthesized)
ctctctctttctctctctctgtctcttagccttgcagccgtttccctctgcgattcatgtaagtgtgactcgatttcagggaaagggaactcgcgtgggctgaggagaccggagtggacg

SEQ ID NO: 743414 - DNA, 120 bp, Artificial Sequence
  ENSG00000204610_1 (sequence is synthesized)
ggctggggaaggcaccgtgatgcccgcaaccccgtccctgaaggtggtccatgagctgcctgcctgtaccctctgtgcggggccgctggaggatgcggtgaccattccctgtggacacac

SEQ ID NO: 743415 - DNA, 120 bp, Artificial Sequence
  ENSG00000204610_2 (sequence is synthesized)
cttctgccggctctgcctccccgcgctctcccagatgggggcccaatcctcgggcaagatcctgctctgcccgctctgccaagaggaggagcaggcagagactcccatggcccctgtgcc

SEQ ID NO: 743416 - DNA, 120 bp, Artificial Sequence
  ENSG00000204610_3 (sequence is synthesized)
cctgggcccgctgggagaaacttactgcgaggagcacggcgagaagatctacttcttctgcgagaacgatgccgagttcctctgtgtgttctgcagggagggtcccacgcaccaggcgca

SEQ ID NO: 743417 - DNA, 120 bp, Artificial Sequence
  ENSG00000204610_4 (sequence is synthesized)
caccgtggggttcctggacgaggccattcagccctaccgggatcgtctcaggagtcgactggaagctctgagcacggagagagatgagattgaggatgtaaagtgtcaagaagaccagaa

SEQ ID NO: 743418 - DNA, 120 bp, Artificial Sequence
  ENSG00000204610_5 (sequence is synthesized)
gcttcaagtgctgctgactcagatcgaaagcaagaagcatcaggtggaaacagcttttgagaggctgcagcaggagctggagcagcagcgatgtctcctgctggccaggctgagggagct

SEQ ID NO: 743419 - DNA, 120 bp, Artificial Sequence
  ENSG00000204610_6 (sequence is synthesized)
ggagcagcagatttggaaggagagggatgaatatatcacaaaggtctctgaggaagtcacccggcttggagcccaggtcaaggagctggaggagaagtgtcagcagccagcaagtgagct

SEQ ID NO: 743420 - DNA, 120 bp, Artificial Sequence
  ENSG00000204610_7 (sequence is synthesized)
caagaagatccgtgatttccacaggaaaatactcaccctcccagagatgatgaggatgttctcagaaaacttggcgcatcatctggaaatagattcaggggtcatcactctggaccctca

SEQ ID NO: 743421 - DNA, 120 bp, Artificial Sequence
  ENSG00000204610_8 (sequence is synthesized)
gaccgccagccggagcctggttctctcggaagacaggaagtcagtgaggtacacccggcagaagaagagcctgccagacagccccctgcgcttcgacggcctcccggcggttctgggctt

SEQ ID NO: 743422 - DNA, 120 bp, Artificial Sequence
  ENSG00000204610_9 (sequence is synthesized)
cccgggcttctcctccgggcgccaccgctggcaggttgacctgcagctgggcgacggcggcggctgcacggtgggggtggccggggagggggtgaggaggaagggagagatgggactcag

SEQ ID NO: 743423 - DNA, 120 bp, Artificial Sequence
  ENSG00000204610_10 (sequence is synthesized)
cgccgaggacggcgtctgggccgtgatcatctcgcaccagcagtgctgggccagcacctccccgggcaccgacctgccgctgagcgagatcccgcgcggcgtgagagtcgccctggacta

SEQ ID NO: 743424 - DNA, 120 bp, Artificial Sequence
  ENSG00000204610_11 (sequence is synthesized)
cgaggcggggcaggtgaccctccacaacgcccagacccaggagcccatcttcaccttcactgcctctttctccggcaaagtcttccctttctttgccgtctggaaaaaaggttcctgcct

SEQ ID NO: 743425 - DNA, 120 bp, Artificial Sequence
  ENSG00000204610_12 (sequence is synthesized)
tacgctgaaaggctgaagtggggcgcgcgaagggcggcgaagcggagacggcggctctccgggatccagctccgcccctggccagtgtgcggcccgggggctccctgtgcccgcgtgagg

SEQ ID NO: 743426 - DNA, 120 bp, Artificial Sequence
  ENSG00000204610_13 (sequence is synthesized)
cgagagaacaggggacttgagtctcgaacagcggttgtttttactttatttatcttaggccctcagctccctgacgtcctgagcctccctgtgacgctctggccttctctgtacctcaga

SEQ ID NO: 743427 - DNA, 120 bp, Artificial Sequence
  ENSG00000204610_14 (sequence is synthesized)
gtgcagaaccacagacggcttcggctgtgcctagggcaacagccaacctaggagccagcgggctttcggggaaaaaaaagaaaaagacatctaaaataaaatgtttaaactgtttcaaaa

SEQ ID NO: 743428 - DNA, 120 bp, Artificial Sequence
  ENSG00000204610_15 (sequence is synthesized)
ggtttaactgaaatgcctactattttagtaactacacatttccagcaaaagtaaagaaatgatactcaatttcattattcaccacagacgccaagatcattctttagtctgattttagcc

SEQ ID NO: 743429 - DNA, 120 bp, Artificial Sequence
  ENSG00000204610_16 (sequence is synthesized)
actttgatgctgtgggcacgcctcagagccagaagtttatggctcccacctgctcaatctgacaggaagcttctgctccccagttctccccagccactgtggtctacagattccaggaaa

SEQ ID NO: 743430 - DNA, 120 bp, Artificial Sequence
  ENSG00000204610_17 (sequence is synthesized)
cccatccccctgtgacctcatggtgtgctctgttctccaccctagggaccagaaggagccaggagtaaagaactggcttacttggccgccactgggaaattctgggtaattcgagacgcc

SEQ ID NO: 743431 - DNA, 120 bp, Artificial Sequence
  ENSG00000204610_18 (sequence is synthesized)
catctggaaatagattcagaccgccagccggagcctggttctctcggaagacaggaagtcagtgaggtacacccggcagaagaagagcctgccagacagccccctgcgcttcgacggcct

SEQ ID NO: 743432 - DNA, 120 bp, Artificial Sequence
  ENSG00000204611_0 (sequence is synthesized)
actcccggaagcagattgcgccagggaaaggccttatcgctgtgtgtgtgtttcagtctacgtggattaaacattacttcgctccgtctgcctggattaaacgtgcactttgcagtcctc

SEQ ID NO: 743433 - DNA, 120 bp, Artificial Sequence
  ENSG00000204611_1 (sequence is synthesized)
acttctccgtaccagtgatctggggatcgctacggaccttaaaatacccatagccccttcgcccctgcaacaggcacttctccccacgtttgatgtgtgaataattacattgactgagaa

SEQ ID NO: 743434 - DNA, 120 bp, Artificial Sequence
  ENSG00000204611_2 (sequence is synthesized)
attgactgagaaagaaacccagaagaggaagaagaggaaggaaaaggagtcagtgatggctactcaggggcatttgacattcaaggatgtagccatagaattctctcaggaggagtggaa

SEQ ID NO: 743435 - DNA, 120 bp, Artificial Sequence
  ENSG00000204611_3 (sequence is synthesized)
tgtgcagaaagctttgtacaaggatgtgatgttggagaactataggaacctggtcttcctaggtatctctcctaaatgtgtgatcaaggaattaccaccaacagagaacagtaatacagg

SEQ ID NO: 743436 - DNA, 120 bp, Artificial Sequence
  ENSG00000204611_4 (sequence is synthesized)
agaaaggttccaaacagtggcactggaaagacatcaaagctatgatattgaaaatttatacttcagggaaatacagaaacatctacatgaccttgaatttcaatggaaagatggtgaaac

SEQ ID NO: 743437 - DNA, 120 bp, Artificial Sequence
  ENSG00000204611_5 (sequence is synthesized)
aaatgataaagaagtgccagtgccccatgaaaacaatcttactggtaaaagagatcaacatagtcaaggggatgtagaaaacaatcatattgaaaaccagcttacatcaaactttgagtc

SEQ ID NO: 743438 - DNA, 120 bp, Artificial Sequence
  ENSG00000204611_6 (sequence is synthesized)
acgtctggctgaactgcagaaagttcaaactgaagggagactttatgaatgtaatgaaacggagaagacaggtaataatggttgtttagtttctccacacattagggaaaaaacgtatgt

SEQ ID NO: 743439 - DNA, 120 bp, Artificial Sequence
  ENSG00000204611_7 (sequence is synthesized)
atgtaatgaatgtggcaaagcctttaaagcgtcttccagccttattaatcatcagaggatacatactacagagaaaccttacaaatgcaatgagtgtggcaaagcctttcatcgggcctc

SEQ ID NO: 743440 - DNA, 120 bp, Artificial Sequence
  ENSG00000204611_8 (sequence is synthesized)
actactaactgtacacaaggtagtccatacaagagggaaatcatatcaatgtgatgtatgtggcaagatcttcagaaaaaattcatattttgtaagacaccaaaggagtcacactggaca

SEQ ID NO: 743441 - DNA, 120 bp, Artificial Sequence
  ENSG00000204611_9 (sequence is synthesized)
gaaaccctacatatgtaatgaatgtggcaagtcctttagtaaaagttcccaccttgcagttcatcagagaattcataccggtgaaaaaccttacaaatgtaatctgtgtgggaaatcctt

SEQ ID NO: 743442 - DNA, 120 bp, Artificial Sequence
  ENSG00000204611_10 (sequence is synthesized)
tagtcagcgtgtccatcttagacttcatcagacagttcatactggagagagacccttcaaatgtaatgagtgtggcaaaacctttaaacggagctcaaacctcactgtacatcaggtaat

SEQ ID NO: 743443 - DNA, 120 bp, Artificial Sequence
  ENSG00000204611_11 (sequence is synthesized)
ccatgcaggaaagaaaccatataaatgtgatgtatgtggcaaggcattcagacatagatcaaatcttgtatgtcaccggagaatccacagtggagagaaacaatacaaatgcaatgaatg

SEQ ID NO: 743444 - DNA, 120 bp, Artificial Sequence
  ENSG00000204611_12 (sequence is synthesized)
tggcaaggtcttcagtaaacgttcaagtcttgcagtgcatcgacgaattcacactgtagagaaaccttgcaaatgcaatgaatgtggcaaggtcttcagtaaacgttcaagtcttgcagt

SEQ ID NO: 743445 - DNA, 120 bp, Artificial Sequence
  ENSG00000204611_13 (sequence is synthesized)
gcatcagagaattcatactggacagaaaacttacaaatgcaataaatgtggcaaggtgtacagtaagcattcacatcttgcagtgcattggagaattcataccggcgagaaagcttataa

SEQ ID NO: 743446 - DNA, 89 bp, Artificial Sequence
  ENSG00000204611_14 (sequence is synthesized)
cagtgcattggagaattcataccggcgagaaagcttataaatgcaatgaatgtggcaaagttttcagcatacattcacgacttgcagct

SEQ ID NO: 743447 - DNA, 120 bp, Artificial Sequence
  ENSG00000204611_15 (sequence is synthesized)
tcatactggagagaaaccttacaaatgcaaagaatgtggcaaggtcttcagtgaccgttcagcttttgcaaggcatcggagaattcatactggagagaagccttacaaatgcaaagaatg

SEQ ID NO: 743448 - DNA, 120 bp, Artificial Sequence
  ENSG00000204611_16 (sequence is synthesized)
gaagccttacaaatgcaaagaatgtggcaaggtcttcagtcaatgttcacgtcttacagtgcatcggagaattcatagtggagagaaaccttacaaatgcaatgaatgcggcaaggtcta

SEQ ID NO: 743449 - DNA, 120 bp, Artificial Sequence
  ENSG00000204611_17 (sequence is synthesized)
tcatactggagagaaaccatacaaatgtcatgaatgtggcaaagcctttaatcagggctccacactcaatagacatcagagaattcataccggagagaaaccttacaaatgcaatcagtg

SEQ ID NO: 743450 - DNA, 120 bp, Artificial Sequence
  ENSG00000204611_18 (sequence is synthesized)
tgggaattcctttagtcagcgtgtccatcttagacttcatcagactgttcatactggagacagaccttacaaatgtaatgagtgtggcaaaacctttaaacggagctcaaacctcactgc

SEQ ID NO: 743451 - DNA, 120 bp, Artificial Sequence
  ENSG00000204611_19 (sequence is synthesized)
acatcagataattcatgcaggaaagaaaccatataaatgtgatgaatgtggcaaggtattcaggcatagttcacatcttgtaagtcaccagagaatccacactggagagaaaagatacaa

SEQ ID NO: 743452 - DNA, 120 bp, Artificial Sequence
  ENSG00000204611_20 (sequence is synthesized)
atgtattgaatgtggcaaagcctttgggcggttgttttccctcagcaaacaccaaagaattcattctggcaaaaaaccttataaatgtaatgagtgtgggaaatcttttatttgtcgctc

SEQ ID NO: 743453 - DNA, 120 bp, Artificial Sequence
  ENSG00000204611_21 (sequence is synthesized)
aggcctcactaaacatcgaataagacatactggagagagccttacaactaaactcaatgtgacaaggccttagacgttgtcctagtttctggaatcaccgaataattcctacttactgat

SEQ ID NO: 743454 - DNA, 120 bp, Artificial Sequence
  ENSG00000204611_22 (sequence is synthesized)
ataccttgtatatttaccccttctcttgaaatccctgtggaattgtaatctccagtattggaggtggggcccattgggaggtgattgaatcatggaagtggatttctcaaactgagaaag

SEQ ID NO: 743455 - DNA, 120 bp, Artificial Sequence
  ENSG00000204611_23 (sequence is synthesized)
atgtagcgtcatccccttggtgctgtcctggcaatagtgacttctcttgaggtctggctgtttagaagtgcatagcacttccctgtcgcttgccctcattctcaccatgtgaaataccga

SEQ ID NO: 743456 - DNA, 120 bp, Artificial Sequence
  ENSG00000204611_24 (sequence is synthesized)
cacccgctttgccttccaccatgattttaaccttcctgaggcttccctagagggtgatcagatgccagcaccatgttttcatttaagccttcagaaatatgagccaattaaactcttttc

SEQ ID NO: 743457 - DNA, 120 bp, Artificial Sequence
  ENSG00000204611_25 (sequence is synthesized)
tttatacattagccagcctcaggtttttttttgtagcaatgcagttatgacctaatacatttacacatgcagtaaatatacctaagttttaagctagtattcactactcactaggtgtaa

SEQ ID NO: 743458 - DNA, 120 bp, Artificial Sequence
  ENSG00000204611_26 (sequence is synthesized)
gaatttgtatatatattccaggatgtatacatcctggagaaaaatcacagaagtgtaatacgtgtggcaagaattctactcaaaagccagaacttgtaaatctaggtaattaaaagggca

SEQ ID NO: 743459 - DNA, 120 bp, Artificial Sequence
  ENSG00000204611_27 (sequence is synthesized)
tagatgtatgaaatgaaatgagggtggcaaaacctttactagagttcaatcactacttgtcataagagagtttatactgaaaggaaatcatataaatgtatgtgtcagaggctttcccca

SEQ ID NO: 743460 - DNA, 120 bp, Artificial Sequence
  ENSG00000204611_28 (sequence is synthesized)
ggcattggaactcactaggcatcagaatatacatctttgagaggaaccacagaaatgtaatgtgcatgctaaggtttttacccgaacatcaaaatggaaagagtattcatactagagaca

SEQ ID NO: 743461 - DNA, 120 bp, Artificial Sequence
  ENSG00000204611_29 (sequence is synthesized)
gaaagagtattcatactagagacaaccttccaaataaatggttttaaaaaatgaaatgttcaaagacctggaatcaacccaaatgcttatcagtgatagactgaataaagaaaatgtggt

SEQ ID NO: 743462 - DNA, 90 bp, Artificial Sequence
  ENSG00000204611_30 (sequence is synthesized)
gaaactaacacaggaacagaaaatcaaacagcacatgttctcacttaaaagtggaagctgaacaatgagaacacatatacccagggaggg

SEQ ID NO: 743463 - DNA, 120 bp, Artificial Sequence
  ENSG00000204611_31 (sequence is synthesized)
gtggaagctgaacaatgagaacacatatacccagggaggggagcaacacacactggggcctgctgatgggggtgggaagggcagggaagtggagcatcaggacaaatagctaatgcattt

SEQ ID NO: 743464 - DNA, 120 bp, Artificial Sequence
  ENSG00000204611_32 (sequence is synthesized)
ttgccttaataccaggtgatgggttggtagatgcagcaaaccaccatggcacacattttcctatgtaacaaatttgcaaattgtgcacatgtacccagaacttaaagtgagacaaaacca

SEQ ID NO: 743465 - DNA, 120 bp, Artificial Sequence
  ENSG00000204611_33 (sequence is synthesized)
atgtccacgcctttgcagtttgattgaacgtataaaggagaaaaatcctgtaagtatgctgaacatgaaaggacctggaagcagtagtgtgtcttcagcctttaccaaattatccctact

SEQ ID NO: 743466 - DNA, 120 bp, Artificial Sequence
  ENSG00000204611_34 (sequence is synthesized)
tgagagaaaacttggaaatgtaatcaatgtggcacaaatttcaaccagttttttaaacagactacacatctttgaaatcatactagggataaccaaatctgcttctccaagattggcctg

SEQ ID NO: 743467 - DNA, 120 bp, Artificial Sequence
  ENSG00000204611_35 (sequence is synthesized)
gaatattattacagaataactaccagacaacatttgttaaaactcaggacagtatgtattttaaaggagcaagtgcatgtgtgaaaatggctcattcagtttataaaatattacattaaa

SEQ ID NO: 743468 - DNA, 120 bp, Artificial Sequence
  ENSG00000204611_36 (sequence is synthesized)
agagggagaaccacagcaaggaggaagcctaggaagttgggggtgctagagagtgggaacaaaggagatgtaacagggaaaagggaatttaacagggaagagggattttaacagggagag

SEQ ID NO: 743469 - DNA, 120 bp, Artificial Sequence
  ENSG00000204611_37 (sequence is synthesized)
cagacagggagctcagatgggggaaaagaggcaggaatacgtggcggctggggacaatgggaaagtttggggagaaagagcaacaagaggtgaaataaatttcgaagcattgggcagaat

SEQ ID NO: 743470 - DNA, 120 bp, Artificial Sequence
  ENSG00000204611_38 (sequence is synthesized)
tctcccaggtatctctcctaaatgtgtgatcaaggaattaccaccaacagagaacagtaatacaggagaaaggttccaaacagtggcactggaaagacatcaaagctatgatattgaaaa

SEQ ID NO: 743471 - DNA, 120 bp, Artificial Sequence
  ENSG00000204611_39 (sequence is synthesized)
gagcctgtgcagaaagctttgtacaaggatgtgatgttggagaactataggaacctggtcttcctaggctggagaataatggcgcgatctcacctcactgcaacctccgtctcccaggtt

SEQ ID NO: 743472 - DNA, 120 bp, Artificial Sequence
  ENSG00000204612_0 (sequence is synthesized)
atgccgcggccggggaagagctcgtacagcgaccaaaaaccgccctactcttacatctcgctgaccgccatggcaatccagcactcggccgagaagatgctgccgctgagcgacatctac

SEQ ID NO: 743473 - DNA, 120 bp, Artificial Sequence
  ENSG00000204612_1 (sequence is synthesized)
aagttcatcatggagcgcttcccctactaccgcgagcacacacagcgctggcagaacagcctgcgccacaacctctccttcaacgactgcttcatcaagattccgcggaggcccgaccag

SEQ ID NO: 743474 - DNA, 120 bp, Artificial Sequence
  ENSG00000204612_2 (sequence is synthesized)
cctggcaagggtagcttctgggcgctgcaccccgactgcggggacatgttcgagaacggcagcttcctgcggcgtcgcaagcgcttcaaggtgctgcgcgccgaccatactcacttgcac

SEQ ID NO: 743475 - DNA, 120 bp, Artificial Sequence
  ENSG00000204612_3 (sequence is synthesized)
gcgggaagcaccaagagcgcgccgggcgccggtccgggagggcaccttcacccccatcaccaccaccacccccaccaccaccatcatcaccacgctgccgcacaccaccaccatcaccac

SEQ ID NO: 743476 - DNA, 120 bp, Artificial Sequence
  ENSG00000204612_4 (sequence is synthesized)
cacccaccccagccgccgccgccgccgcccccgccgccgccgcacatggtacactatttccatcagcaaccgcctactgctccgcagccgcctccgcacctcccgtcacagcccccgcag

SEQ ID NO: 743477 - DNA, 120 bp, Artificial Sequence
  ENSG00000204612_5 (sequence is synthesized)
gcggtgggcagcgtgggacgcctgtctcagttcccaccctacgggctgggctcggccgccgccgctgccgccgcggccgcggcgtccacgtcaggcttcaagcacccctttgccattgag

SEQ ID NO: 743478 - DNA, 120 bp, Artificial Sequence
  ENSG00000204612_6 (sequence is synthesized)
aacattattggccgggactacaagggcgtgctgcaggctggagggctgcccttggcgtccgtcatgcaccacctgggctaccccgtgcccggccagcttggcaacgtcgtcagctccgtg

SEQ ID NO: 743479 - DNA, 120 bp, Artificial Sequence
  ENSG00000204612_7 (sequence is synthesized)
tggccgcacgttggcgtcatggattcggtggccgccgccgcggccgccgcagccgcagccggagtccctgtaggcccggagtatggggccttcggggtcccggtcaagtccctgtgccac

SEQ ID NO: 743480 - DNA, 120 bp, Artificial Sequence
  ENSG00000204612_8 (sequence is synthesized)
tcggcaagccagagcctgcctgccatgccggtgcccatcaagcccacgcctgcgctgccgcccgtgtccgcgctgcagccggggctcactgtccccgcggcttcgcagcagcctccggcg

SEQ ID NO: 743481 - DNA, 120 bp, Artificial Sequence
  ENSG00000204612_9 (sequence is synthesized)
ccatccaccgtgtgctccgcggccgcggcctcgcccgttgcctctctgctggagcccacagcccctacctcggccgaaagcaagggcggctccttgcactcggtgctagtgcactcctag

SEQ ID NO: 743482 - DNA, 120 bp, Artificial Sequence
  ENSG00000204613_0 (sequence is synthesized)
cttctgacagtggacagctgacatatcaccactttccttctactgtgagtgtctctggatgggcagaaaggaatggccagcccctggttatggtcatctaaggtcacctctgaaatgctg

SEQ ID NO: 743483 - DNA, 120 bp, Artificial Sequence
  ENSG00000204613_1 (sequence is synthesized)
tgagcccctcttccttcctctcctctgctatttcccatctctgctgttggcaggagaatagaaccctggctgccagagatgcaagtgtgtgacgatatgggtgctggtgcatatttagta

SEQ ID NO: 743484 - DNA, 120 bp, Artificial Sequence
  ENSG00000204613_2 (sequence is synthesized)
tgtgcctgtgtccagccatgtgcatgtgtgggtgtgtgagtgtgtgacccagcccttcccccgtggccaagcagagagagtggccttgaggaagccatagcagcaggaccagcatggcct

SEQ ID NO: 743485 - DNA, 120 bp, Artificial Sequence
  ENSG00000204613_3 (sequence is synthesized)
ctgctgcctctgtgaccagcctggcagatgaagtcaactgccccatctgtcagggtaccctgagggagccggtcactatcgactgcggccacaacttctgccgggcctgccttacccgct

SEQ ID NO: 743486 - DNA, 120 bp, Artificial Sequence
  ENSG00000204613_4 (sequence is synthesized)
actgtgagataccaggcccagacctggaggagtcccctacttgcccactctgcaaagaacccttccgtcctgggagcttccggcccaactggcagctggctaacgtggtggagaacattg

SEQ ID NO: 743487 - DNA, 120 bp, Artificial Sequence
  ENSG00000204613_5 (sequence is synthesized)
agcgcctccagctggtgtccacactgggtttgggagaggaggatgtctgccaagagcacggagagaagatctacttcttctgtgaggatgatgagatgcagttgtgcgtggtgtgccggg

SEQ ID NO: 743488 - DNA, 120 bp, Artificial Sequence
  ENSG00000204613_6 (sequence is synthesized)
aggctggggagcacgctacccacaccatgcgcttcctggaggatgcagcggctccctatagggaacaaatccataagtgtcttaaatgtctaagaaaagagagagaggagattcaagaaa

SEQ ID NO: 743489 - DNA, 120 bp, Artificial Sequence
  ENSG00000204613_7 (sequence is synthesized)
tccagtcaagagaaaataaaaggatgcaagtcctcctgactcaggtgtccaccaagagacaacaggtgatttctgagttcgcacacctgaggaagtttctagaggaacagcagagcatcc

SEQ ID NO: 743490 - DNA, 120 bp, Artificial Sequence
  ENSG00000204613_8 (sequence is synthesized)
tcttagcacaattggagagccaggatggggacatcttgaggcaacgggatgaatttgatttgctggttgctggggagatctgccggtttagtgctcttattgaagaactggaggagaaga

SEQ ID NO: 743491 - DNA, 120 bp, Artificial Sequence
  ENSG00000204613_9 (sequence is synthesized)
atgagaggccagcaagggagctcctgacggacatcagaagcactctaataagatgtgaaaccagaaagtgccggaaaccggtggctgtgtcgccagagctgggccagaggattcgggact

SEQ ID NO: 743492 - DNA, 120 bp, Artificial Sequence
  ENSG00000204613_10 (sequence is synthesized)
ttccccagcaggccctcccgctgcagagggagatgaagatgtttctggaaaaactatgctttgagttggactatgagccagctcacatttctctagaccctcagacttcccaccccaagc

SEQ ID NO: 743493 - DNA, 120 bp, Artificial Sequence
  ENSG00000204613_11 (sequence is synthesized)
tcctcttgtccgaggaccaccagcgagctcagttctcctacaaatggcagaactcaccagacaacccccaacgttttgaccgggccacctgtgttctggcccacactggcatcacagggg

SEQ ID NO: 743494 - DNA, 120 bp, Artificial Sequence
  ENSG00000204613_12 (sequence is synthesized)
ggagacacacgtgggtggtgagtatagacctggcccatgggggcagctgcaccgtgggcgtggtgagcgaggatgtgcagcggaagggggagcttcggctgcggccagaggagggggtgt

SEQ ID NO: 743495 - DNA, 120 bp, Artificial Sequence
  ENSG00000204613_13 (sequence is synthesized)
gggctgtgaggctggcttggggcttcgtctcggctctgggctccttccccacacggctgaccctgaaggagcagccccggcaggtgagggtgtctcttgactatgaggtgggctgggtga

SEQ ID NO: 743496 - DNA, 120 bp, Artificial Sequence
  ENSG00000204613_14 (sequence is synthesized)
ccttcaccaacgctgtcacccgagagcccatctacaccttcactgcctccttcactaggaaggtcattcccttctttgggctctggggccgagggtccagtttctccctgagctcctgag

SEQ ID NO: 743497 - DNA, 120 bp, Artificial Sequence
  ENSG00000204613_15 (sequence is synthesized)
gactgctttagaagatgggatggggccgggtggtaagggatagaagagaggactctcaatctactgatcaagtcctttccccaatgcccagtggatggccagggtacctggggactcagg

SEQ ID NO: 743498 - DNA, 120 bp, Artificial Sequence
  ENSG00000204613_16 (sequence is synthesized)
ctgctgccagttctgctcaccaccatccgtgcttggcacagaagtagctgcatagaaagggcactggatttgaagtcagaagacctgggttcttgaaccagcctgtcaaccagttgtatg

SEQ ID NO: 743499 - DNA, 120 bp, Artificial Sequence
  ENSG00000204613_17 (sequence is synthesized)
actttaaacaaggcatctcacctcttttcatcttgttttcttccaataatgttagagttcatgtaatcacattctctagaaccatttagtttgtgttaactatgaaccaagcagtgtggt

SEQ ID NO: 743500 - DNA, 120 bp, Artificial Sequence
  ENSG00000204613_18 (sequence is synthesized)
ggccactggtgacttgaaaatatagagaaaaaaaaaacctgctctatatctgaaagagctcttgggaagacagagaaacataaagaggaaattacagcacagtgtggtgggtgttacggg

SEQ ID NO: 743501 - DNA, 120 bp, Artificial Sequence
  ENSG00000204613_19 (sequence is synthesized)
aagtccaaccccagcattatgggagttcaggggaaggggcatagcccagcctggaaggagagggtgagtgggggatggctttctgaaaagggtggtctaaaggatgcctatggtcaatag

SEQ ID NO: 743502 - DNA, 120 bp, Artificial Sequence
  ENSG00000204613_20 (sequence is synthesized)
ggaaaagaggggaagaagcatcttaagaagaggaaacagcagagaactggctggatgacctgtgactctggagcactgggttgtctccattgtcattatgggcagatgtgtgccatcccc

SEQ ID NO: 743503 - DNA, 120 bp, Artificial Sequence
  ENSG00000204613_21 (sequence is synthesized)
agccgacgccactcactgcctccttcctcctggtgttgccacttctgggtgagattaaggtgcagggcctgggggcaggaggacataaggtatagccataaatcataacccagggaccac

SEQ ID NO: 743504 - DNA, 120 bp, Artificial Sequence
  ENSG00000204613_22 (sequence is synthesized)
actcaaccctagggaaattgtcttcctgatcagttgattaccatctgaggtcaagaaatgagatagtgggagcaaatgggtcacaaatagctcagctgtgggctcagaaactgctaggta

SEQ ID NO: 743505 - DNA, 120 bp, Artificial Sequence
  ENSG00000204613_23 (sequence is synthesized)
aaagaattccagaaggaggccagggcataagttggatgacctatgaactttagtctaaagaattgagactaccgtaattgagactactgtagtgacatctgagaaatgggatggaagagt

SEQ ID NO: 743506 - DNA, 120 bp, Artificial Sequence
  ENSG00000204613_24 (sequence is synthesized)
gaccatgttttattttcttgttcttgtcactattgtattttattttgcataatcatgcccttcactgacagtctccttaacatcatctgtttactctgctcagtgtaaactacaatgctc

SEQ ID NO: 743507 - DNA, 120 bp, Artificial Sequence
  ENSG00000204613_25 (sequence is synthesized)
tgtcatctccctactgggtctcctgggaggaggggagccatccagggtgcaaactcaaaggcagagggcacagcgtgcttaggcccaagcttagaattcaattgagaagttctgttgttc

SEQ ID NO: 743508 - DNA, 120 bp, Artificial Sequence
  ENSG00000204613_26 (sequence is synthesized)
atccttacctcagcaggtagaaaagaggtggagatcagaagccagggattagagattgaattgctttccctgggagtgtgcagtatctcattaaaatgttgtatattcaaaaaaatacag

SEQ ID NO: 743509 - DNA, 120 bp, Artificial Sequence
  ENSG00000204613_27 (sequence is synthesized)
acacacacaagtgcctatataatgataaaacatatccaaagcacccaaacctgtgattccagaaaagtagatcctatttttgtttatttttattggctttagctgtgtcttttgaaagga

SEQ ID NO: 743510 - DNA, 120 bp, Artificial Sequence
  ENSG00000204613_28 (sequence is synthesized)
ctattatcctctaaaatgtatgtgtatgaagatcctggcttgcagctcgggagctttacacaccttgtgtcactttatcttggtaacgagccaagatcatgcaaccagttcatccatgtc

SEQ ID NO: 743511 - DNA, 120 bp, Artificial Sequence
  ENSG00000204613_29 (sequence is synthesized)
tgacccaagagctcttaactgctatgctgcactgcctcattcagagatagatgcctgcatgggtcctggcgattattttaatgctggctacacccccacaggtgacttggattcagaaat

SEQ ID NO: 743512 - DNA, 120 bp, Artificial Sequence
  ENSG00000204613_30 (sequence is synthesized)
acaatttatatttcttctttttaaattgttttattttatttttcttttaatagttatatgtcagtgagaacaatttatatgtcttacactgagaaataaaactgctcataagtgaaaaca

SEQ ID NO: 743513 - DNA, 120 bp, Artificial Sequence
  ENSG00000204614_0 (sequence is synthesized)
ggaggctgacagggtaggaacgaggccatgatccctttgcagaaggacaaccaggaggagggtgtctgccccatctgccaggagagcctgaaggaggccgtgagcaccaactgcggacat

SEQ ID NO: 743514 - DNA, 120 bp, Artificial Sequence
  ENSG00000204614_1 (sequence is synthesized)
ctcttctgtcgagtgtgcctgacacagcatgtggagaaggcctcagcctctggggtcttctgctgccccctctgccggaagccctgttctgaggaggtgctagggacaggctatatctgc

SEQ ID NO: 743515 - DNA, 120 bp, Artificial Sequence
  ENSG00000204614_2 (sequence is synthesized)
cccaaccaccagaagagggtgtgcaggttctgtgaggagagcagacttcttctatgtgtggaatgcctggtgtcccctgaacacatgtctcatcatgaactgaccattgaaaatgccctc

SEQ ID NO: 743516 - DNA, 120 bp, Artificial Sequence
  ENSG00000204614_3 (sequence is synthesized)
agccactacaaggaacgactcaatcgccggagcaggaagctcagaaaggacattgcagaacttcagcggctcaaggctcagcaggagaagaaactgcaggctctgcagcagtggctgggc

SEQ ID NO: 743517 - DNA, 120 bp, Artificial Sequence
  ENSG00000204614_4 (sequence is synthesized)
cagctggagcacatgccagcagaagcggccagaatccttgacatctccagggcagtaacacagctcagaagcctggtcattgatctggaaaggacggccaaggaattagacaccaacaca

SEQ ID NO: 743518 - DNA, 120 bp, Artificial Sequence
  ENSG00000204614_5 (sequence is synthesized)
ctgaagaatgctggtgacttactgaacaggagtgctccacagaaattagaggttatttatccccagttggagaaaggagtcagtgaattgcttcttcagccccctcagaagctctgacct

SEQ ID NO: 743519 - DNA, 120 bp, Artificial Sequence
  ENSG00000204614_6 (sequence is synthesized)
ggtctacccagtgcatcttcgggcctgccagctcctgaacatgtcaccatttcttcatgtccacagtcatcacctgatgcctgaccctctgactcttggacgatagccagcctccttcca

SEQ ID NO: 743520 - DNA, 120 bp, Artificial Sequence
  ENSG00000204614_7 (sequence is synthesized)
ggacaggctcatgcttggggctgccactgtggaggtcggggcccatggtctccaggagcatttgtgaaatctccattttgcctgtaaactgatggtagtgcccatctctcacaatctcat

SEQ ID NO: 743521 - DNA, 120 bp, Artificial Sequence
  ENSG00000204614_8 (sequence is synthesized)
tcaaataggatcctccaggcctctgaatggcccgagctcatcagcagtgacaccacctcacatgtggagcccagctgagttcctgcagtacttgttgtctgtaccactcacctggcactt

SEQ ID NO: 743522 - DNA, 120 bp, Artificial Sequence
  ENSG00000204614_9 (sequence is synthesized)
atttattattgttgtggaagacagactcaaagacagcctcccttcatgatcctcacctcttggaattcatgcccttgtttggtcccctccccttgagtgtaagtgggatctgtgacttgc

SEQ ID NO: 743523 - DNA, 120 bp, Artificial Sequence
  ENSG00000204614_10 (sequence is synthesized)
ttctaatgaatggaataaggcaaaggtgatagggtgtcactctggcaactgtgttgcattgtatagaactcctccttgctggcccacccttttagagcccctcctaggagccaagagcag

SEQ ID NO: 743524 - DNA, 120 bp, Artificial Sequence
  ENSG00000204614_11 (sequence is synthesized)
cttccagccaacaacaagcagaggccctcagtcttgtggctgcaagaacctgaattctgccaacaacccgagtgagcttggaagcagattcttccccaactgagccggataagaacctag

SEQ ID NO: 743525 - DNA, 120 bp, Artificial Sequence
  ENSG00000204614_12 (sequence is synthesized)
tccagccaacaccttgattatagtcttgtgagtacctaagctgaggacccagtgaagctgtgccaaaatttcccacccacagaaacagtgtgacaataaatgtgtgtgtgtttttttgtt

SEQ ID NO: 743526 - DNA, 120 bp, Artificial Sequence
  ENSG00000204614_13 (sequence is synthesized)
aggtgtatgaaaaataatttcaagtttaacaaacacaaggaaaccgcagggtccatgtcaaagctgatgagctatttctgaaactcgtgcagaattgtggtttgtgtggtctatgtcacg

SEQ ID NO: 743527 - DNA, 120 bp, Artificial Sequence
  ENSG00000204614_14 (sequence is synthesized)
gcacccttgagggagagtgggcaattgcctgaacttggaggctgtgtcctgtccccaggctgctccagggctgcctccttccgactgggccttcttatctgggactgttgagggcaacag

SEQ ID NO: 743528 - DNA, 120 bp, Artificial Sequence
  ENSG00000204614_15 (sequence is synthesized)
tgctggccatctctccaggtctggagccagagaagatgatctgaaattgtagcaggagaaattgaggtaggatactaagaaagcttttcaggagtggggctaggcaagaggtgcagcatg

SEQ ID NO: 743529 - DNA, 120 bp, Artificial Sequence
  ENSG00000204614_16 (sequence is synthesized)
agggaataagagtgaatcctcagtatctaagggaggtggcaggtggcgggggacttctttctttgggtcatctttggtggtgatttgacaggaaggaacaaagtggcttcaaacattata

SEQ ID NO: 743530 - DNA, 120 bp, Artificial Sequence
  ENSG00000204614_17 (sequence is synthesized)
caagtctctagtctgttctgtgtcctgttttctttctcattctttcagtgtggaatctatatgaccctgggagggatgttggttggaagaatgaccagctgatggagatgctgctgtaat

SEQ ID NO: 743531 - DNA, 120 bp, Artificial Sequence
  ENSG00000204616_0 (sequence is synthesized)
atccatttgttctcaagaggtagcaagaaacagtatccacagtggactccggggctcctacagacttggcacagcttcctacagtcttgaaacagccctgttgttctgtcatggccagtg

SEQ ID NO: 743532 - DNA, 120 bp, Artificial Sequence
  ENSG00000204616_1 (sequence is synthesized)
ggcagtttgtgaacaaactgcaagaggaagtgatctgccccatctgcctggacattctgcagaaacctgtcaccatcgactgtgggcacaatttctgcctcaaatgcatcactcagattg

SEQ ID NO: 743533 - DNA, 120 bp, Artificial Sequence
  ENSG00000204616_2 (sequence is synthesized)
gggaaacatcatgtggatttttcaaatgtcccctctgcaaaacttccgtaaggaagaacgcaatcaggttcaactcgctgttgcggaatctggtggagaaaatccaagctctacaagcct

SEQ ID NO: 743534 - DNA, 120 bp, Artificial Sequence
  ENSG00000204616_3 (sequence is synthesized)
ctgaggtgcagtccaaaaggaaagaggctacatgcccgaggcaccaggagatgttccactatttctgcgaggatgatgggaagttcctctgttttgtgtgtcgtgaatccaaggaccaca

SEQ ID NO: 743535 - DNA, 120 bp, Artificial Sequence
  ENSG00000204616_4 (sequence is synthesized)
aatcccataatgtcagcttgatcgaagaagctgcccagaattatcaggggcagattcaagagcagatccaagtcttgcagcaaaaggagaaggagacagtacaagtgaaggcacaaggtg

SEQ ID NO: 743536 - DNA, 120 bp, Artificial Sequence
  ENSG00000204616_5 (sequence is synthesized)
tacacagggtcgatgtcttcacggaccaggtagaacatgagaagcaaaggatcctcacagaatttgaactcctgcatcaagtcctagaggaggagaagaatttcctgctatcacggattt

SEQ ID NO: 743537 - DNA, 120 bp, Artificial Sequence
  ENSG00000204616_6 (sequence is synthesized)
actggctgggtcatgagggaacggaagcggggaaacactatgttgcctccactgagccacagttgaacgatctcaagaagctcgttgattccctgaagaccaagcagaacatgccaccca

SEQ ID NO: 743538 - DNA, 120 bp, Artificial Sequence
  ENSG00000204616_7 (sequence is synthesized)
ggcagctgctggaggatatcaaagtcgtcttgtgcagaagtgaagagtttcagtttctcaacccaacccctgttcctctggaactggagaaaaaactcagtgaagcaaaatcaagacatg

SEQ ID NO: 743539 - DNA, 120 bp, Artificial Sequence
  ENSG00000204616_8 (sequence is synthesized)
tggggcttgttacagaaaaataatcataaaatgaacaaaacctcagagcccgggtcatcttctgcaggcggcagaactacatcggggccaccaaatcaccactcttcagccccatcccac

SEQ ID NO: 743540 - DNA, 120 bp, Artificial Sequence
  ENSG00000204616_9 (sequence is synthesized)
tccctgtttcgggcctcgtctgctgggaaagtcacttttccagtatgtctcctggcctcttatgatgagatttctggtcaaggagcgagctctcaggatacgaagacatttgacgttgcg

SEQ ID NO: 743541 - DNA, 120 bp, Artificial Sequence
  ENSG00000204616_10 (sequence is synthesized)
ctgtccgaggagctccatgcggcactgagtgagtggctgacagcgatccgggcttggttttgtgaggttccttcaagctaagccagctcagagaacacggggagcggtggtgctacacgg

SEQ ID NO: 743542 - DNA, 120 bp, Artificial Sequence
  ENSG00000204616_11 (sequence is synthesized)
acttcggagcatagagtggcgctgagtgagtggctgagaccgaccacggttcttgacttagtggaattgggtcgaaggagtggagaatgggagggctcgggctactgagagtggagatgg

SEQ ID NO: 743543 - DNA, 120 bp, Artificial Sequence
  ENSG00000204616_12 (sequence is synthesized)
gggcgggggtggtggtgaagagagttggagaaggaatggacgaattcttgagcaaaaggaggggaagagacaatctccagccacccgccccacgcttgacttcttatcactttggctgtg

SEQ ID NO: 743544 - DNA, 120 bp, Artificial Sequence
  ENSG00000204616_13 (sequence is synthesized)
gtgccgcctagtggaaaaaggaagtccctgcagcagtccccgcactctttaagcagctgtttaccgaaggcaccagttcagccaggagtgaaatccggagaggagcaacgccagcctggg

SEQ ID NO: 743545 - DNA, 120 bp, Artificial Sequence
  ENSG00000204616_14 (sequence is synthesized)
tcacagtccatcaaaccccatgagcccgaccactctcgctcttccttacattcccacgtcccccttctctcccaacccctcatatcagcaagggaaattaattaatgagatttgataaat

SEQ ID NO: 743546 - DNA, 120 bp, Artificial Sequence
  ENSG00000204616_15 (sequence is synthesized)
cagtagatagaatgaggtccccattctgaaatatttagcagactggaaccaccacgcaagcctctgtagggggtggatggagacacttctaactttaataaactgcgactgaacgtggaa

SEQ ID NO: 743547 - DNA, 120 bp, Artificial Sequence
  ENSG00000204616_16 (sequence is synthesized)
gaatggaaaggatgtgaaaatttgactcagaaggtttgggctcaagcccagtcttgtgagtttactgtacaacctgcaaggaatcactttacctctctgagcctcaggggcagattcaag

SEQ ID NO: 743548 - DNA, 120 bp, Artificial Sequence
  ENSG00000204616_17 (sequence is synthesized)
atccacacacaattctcagcgtatatccaaatgcagtcaacattcctctctcagaaatacccacccacctctaactctgcattcatacatttaggctgcagccggggaatgcctatgcca

SEQ ID NO: 743549 - DNA, 120 bp, Artificial Sequence
  ENSG00000204616_18 (sequence is synthesized)
accatattagcacgtggttggttgttaaagaaaccagctgttttctcagccttcctccttcttcagcacagattctactatttcctgaatgcccccttgctcaactgaatagctcctggg

SEQ ID NO: 743550 - DNA, 120 bp, Artificial Sequence
  ENSG00000204616_19 (sequence is synthesized)
gctaggcagtcaccacaggaaatcagaaagggcatctctcaagggttgcataccttcctggtccaataagaatatgagagtcaaatgcagcttctacttctcccaggcatttcaaattag

SEQ ID NO: 743551 - DNA, 120 bp, Artificial Sequence
  ENSG00000204616_20 (sequence is synthesized)
tgccttgctgtgtgatagtgagttctttgctcaacccctctggactctcaccatttcatcccattctttattccccagaccaactccaggctgataggaaaaaagatgaaaacagattct

SEQ ID NO: 743552 - DNA, 120 bp, Artificial Sequence
  ENSG00000204616_21 (sequence is synthesized)
aaaatgctgtatccacccaattccactaaatggaataaatgaataaatgaatgaattcatttattccatttcctcagttcctccccaaattacacctctgccaggaaacagagggcgctc

SEQ ID NO: 743553 - DNA, 120 bp, Artificial Sequence
  ENSG00000204616_22 (sequence is synthesized)
tacactgacccctcagaaaaagatccagtgagccatgtcctctcctcggcgcctcagcacctgaccggccaggcggcatcacctcccgcgtcggcctcgctattacagcgggctgactgc

SEQ ID NO: 743554 - DNA, 120 bp, Artificial Sequence
  ENSG00000204616_23 (sequence is synthesized)
tcagtctccaccggcagacaaggtggggcacggaaaacccgcgctggtcttagaatcgcaagtacaggtttttaaggccgagctgcgccctcaacggattccccaattagaaaatgaaga

SEQ ID NO: 743555 - DNA, 120 bp, Artificial Sequence
  ENSG00000204616_24 (sequence is synthesized)
agctgcgccctcaacggattccccaattagaaaatgaagacattggccgggcgcggtggctcacgccagtaatcacagcactctgggaggctgaggatcgcttgagcccaggagtttgag

SEQ ID NO: 743556 - DNA, 120 bp, Artificial Sequence
  ENSG00000204618_0 (sequence is synthesized)
cccaaaccttacccgggaagcaggagaaccagatgaggcgttacgcaaggcctggtgtttacctcccgtgggagcctcctccctccctataaagcctgatgtggtggagagatttgacga

SEQ ID NO: 743557 - DNA, 120 bp, Artificial Sequence
  ENSG00000204618_1 (sequence is synthesized)
gactgagactctggttgaagagagaggcaatcccaggagaggggcggaaagcggcaaaagttaatgcgggagtcggagagaagggcatctacacagcaagcagcaggggcggcccgccat

SEQ ID NO: 743558 - DNA, 120 bp, Artificial Sequence
  ENSG00000204618_2 (sequence is synthesized)
ctgcgcgctcgaaggcggtcacggtggtcgcggaaggggcggcgtccagatcctggctttccatggatgcgcccgagctgggcccggggctggtggagcgtctggagcagctggcgacgt

SEQ ID NO: 743559 - DNA, 120 bp, Artificial Sequence
  ENSG00000204618_3 (sequence is synthesized)
gtcctctgtgcgggggctccttcgaggacccggtgcttctggcgtgcgagcacagcttctgccgcgcgtgtctggcccgccgctgggggactccgccggcgaccggcaccgaggcttccc

SEQ ID NO: 743560 - DNA, 120 bp, Artificial Sequence
  ENSG00000204618_4 (sequence is synthesized)
ccaccgcctgtccctgctgcggcctgccgtgtccccgccgcagcctgaggtctaatgtgcggctggcggtggaggtgcgaatcagccgcgagctgcgagagaagctggctgagcctgggg

SEQ ID NO: 743561 - DNA, 120 bp, Artificial Sequence
  ENSG00000204618_5 (sequence is synthesized)
cccgtgcggggagacgccgaggggggcgcatccccaccatgggctgcctggacctgcccggagaggatatgaggaagacatggagacgatttgaagtcccaacatccaagtcatctaatt

SEQ ID NO: 743562 - DNA, 120 bp, Artificial Sequence
  ENSG00000204618_6 (sequence is synthesized)
cagaggatgatctccctgaagattatccagtggtcaaaaaaatgcttcatagactgacagccgacctgaccctggaccctgggaccgcacaccgccgcctgctcatctccgccgaccgcc

SEQ ID NO: 743563 - DNA, 120 bp, Artificial Sequence
  ENSG00000204618_7 (sequence is synthesized)
gcagcgtacaactggccccaccagggacgcccgcgccccctgacggccccaagcgcttcgatcagctcccagctgtgctgggtgcgcagggcttcggggccggccgccactgctgggagg

SEQ ID NO: 743564 - DNA, 120 bp, Artificial Sequence
  ENSG00000204618_8 (sequence is synthesized)
tggagactgcggacgccgcctcctgcagagactcttctggggaggatgcggacgacgaggagagccactatgcagtgggcgcggccggggaatcagtgcaacgcaagggctgcgtaaggc

SEQ ID NO: 743565 - DNA, 120 bp, Artificial Sequence
  ENSG00000204618_9 (sequence is synthesized)
cctgtgggccctcacggcacccgaacccaccctgctgggcggtgttgagcccccgccgcggcgcattcgcgtggacctggactgggagcggggccgcgtggccttctacgacggccgctc

SEQ ID NO: 743566 - DNA, 120 bp, Artificial Sequence
  ENSG00000204618_10 (sequence is synthesized)
actcgacctgctttacgccttccaggcgcctggccccctgggggagcgcatcttcccgctgttctgcacctgcgaccctcgtgctccgctccgcattgtaccagcggaaagctgagtctc

SEQ ID NO: 743567 - DNA, 120 bp, Artificial Sequence
  ENSG00000204618_11 (sequence is synthesized)
gtctccaactagaagtttggcccggccactggccctgcagctgctttttgggggtggaattccccactcatttctgggaacacattcacacgcccattgcaggagtattaatagcaaccc

SEQ ID NO: 743568 - DNA, 120 bp, Artificial Sequence
  ENSG00000204618_12 (sequence is synthesized)
acattttcgccccaaaataatgagacctcacctggtctccacgtttccacgtccctgctcaaaaccaaatccattcctgccttctggctctcagaatcttctctcccctacagctactac

SEQ ID NO: 743569 - DNA, 120 bp, Artificial Sequence
  ENSG00000204618_13 (sequence is synthesized)
agtacttcctgacttctcccattcaaaccattctaggcctgcaatggggaacaggccctccccatcagtattggtaaagtgaccatgattcctacatagaggctctgctggtcaaatact

SEQ ID NO: 743570 - DNA, 120 bp, Artificial Sequence
  ENSG00000204618_14 (sequence is synthesized)
tgactcccactcttgccactcctagctccagaagggctcagggccttccccacagatctaaggactgggctaccctgcctgtccactgaggtttctcctaaaacaagaggcttgactctg

SEQ ID NO: 743571 - DNA, 120 bp, Artificial Sequence
  ENSG00000204618_15 (sequence is synthesized)
gtctgggccctgtggccctctgggaagctttgtacctcttttgcaggatctgggggtggggagggacaagctagttccccaacctcctatgactgctttctatgctcacagccttttttc

SEQ ID NO: 743572 - DNA, 120 bp, Artificial Sequence
  ENSG00000204618_16 (sequence is synthesized)
cataagaaccttcttgaaacttctccccgcacatactcacggaaaggaaccaatggtgctatttcccctctctcctcctcaacctgggaatacttcagacatctccaaactcatccttgt

SEQ ID NO: 743573 - DNA, 120 bp, Artificial Sequence
  ENSG00000204618_17 (sequence is synthesized)
gtatagtctcacacccttccccataagtataaatgggcccatatttaacacattttgtgattttgggttatttattttgtgcatctgtggcaataaatgagatctcagtggtggtatgga

SEQ ID NO: 743574 - DNA, 120 bp, Artificial Sequence
  ENSG00000204619_0 (sequence is synthesized)
gtcacacccggaagcggcgagccggaagtggggttagccaggttatccccaggggtggagaagcggaggcccaggaggagggggaataaagaaggtggaggatcctggctaccactctga

SEQ ID NO: 743575 - DNA, 120 bp, Artificial Sequence
  ENSG00000204619_1 (sequence is synthesized)
atccgataccgcttctcttagacctcagcgacagaaaaagggaagggtgtctcatcccccttcctcctctcctccctgtcctgagccttagccatggccgaggcaggggctgggctgagc

SEQ ID NO: 743576 - DNA, 120 bp, Artificial Sequence
  ENSG00000204619_2 (sequence is synthesized)
gagaccgtcactgagacaacggttaccgtgacaaccgagcccgagaaccggagccttaccatcaaacttcggaaacggaagccagagaaaaaggtagaatggacaagtgacactgtggac

SEQ ID NO: 743577 - DNA, 120 bp, Artificial Sequence
  ENSG00000204619_3 (sequence is synthesized)
aatgaacacatgggccgccgctcatccaaatgctgctgtatttatgagaaacctcgggcctttggcgagagctccacggaaagtgatgaggaggaagaagagggctgtggtcatacacac

SEQ ID NO: 743578 - DNA, 120 bp, Artificial Sequence
  ENSG00000204619_4 (sequence is synthesized)
tgtgtacgtggccaccgcaaaggacggcgtcgtgcaaccctaggaccgacccccaccacccctccccagcctcctgacccttcccagccccctccagggccaatgcagcactaaatccct

SEQ ID NO: 743579 - DNA, 120 bp, Artificial Sequence
  ENSG00000204619_5 (sequence is synthesized)
ctctcctccagcattcctgtgtctgtctggccctaaatgtatccatgtggctacttctccagccccctccttccctctcttctgcctgatagagggaagaggaagaggaggacgaacaga

SEQ ID NO: 743580 - DNA, 120 bp, Artificial Sequence
  ENSG00000204619_6 (sequence is synthesized)
catttttcctcccaatacccacccttctctctcgagggatctaggcaccttggtcccagtgtcttccttttgttctcactgccaaactgcctgtcctgggatctagttatcttggccctg

SEQ ID NO: 743581 - DNA, 120 bp, Artificial Sequence
  ENSG00000204619_7 (sequence is synthesized)
cactctcaacatgagtagcgaacacttaaattgggttttcaacagtcccagctttcactgccagggtcccagtcagattccaggaatttgcgccctaactttgcttgctaatcctggttt

SEQ ID NO: 743582 - DNA, 120 bp, Artificial Sequence
  ENSG00000204619_8 (sequence is synthesized)
agagctatcccactaaaatatttaatcctaattcttagtccttgcctgtgagatatgaggtcttacaggagacctcagagctcccagcccttctcctcctgctaacccttctcacaccct

SEQ ID NO: 743583 - DNA, 120 bp, Artificial Sequence
  ENSG00000204619_9 (sequence is synthesized)
caagaggagttagaaaagaggtccttgtcattctcacctcttatggaaaatggaataagaaataatcatatcctttcttcccacccttctcctgttatttaggatttctgacaaagctgg

SEQ ID NO: 743584 - DNA, 120 bp, Artificial Sequence
  ENSG00000204619_10 (sequence is synthesized)
cttgagattggtcacttagagccgactgtctcctctgccttttgtttttcagcttcagagacagatccaatatagtcccagggacctgggtctctgggagaggaaggaagagggagggag

SEQ ID NO: 743585 - DNA, 120 bp, Artificial Sequence
  ENSG00000204619_11 (sequence is synthesized)
caaagagattggggtatgtcccctgtagtacactcttacctcttacttcctagactttgatttctccggcagcccagatgttcagttctcttggcccctctctaccccttactgggatcc

SEQ ID NO: 743586 - DNA, 120 bp, Artificial Sequence
  ENSG00000204619_12 (sequence is synthesized)
ggttttcattttccggtccttttgccatacacagttacagagatcagtcaaatccataccaccactgagatctcatttattgccacagatgcacaaaataaataacccaaaatcacaaaa

SEQ ID NO: 743587 - DNA, 120 bp, Artificial Sequence
  ENSG00000204619_13 (sequence is synthesized)
ggattagaagagttgttggaggagctaggcctagggatatgggaggtgtggggttgaatatctagggctgggagaatcggaaggtattggagctatttggagtggcagagatggtgcagg

SEQ ID NO: 743588 - DNA, 120 bp, Artificial Sequence
  ENSG00000204619_14 (sequence is synthesized)
gggatatgggaggtgtggggttgaatatctagggctgggagaatcggaaggatgatttggggaggaagacggagaaacagcaaggattatattttcctttgaagagttgctgggaccttt

SEQ ID NO: 743589 - DNA, 120 bp, Artificial Sequence
  ENSG00000204619_15 (sequence is synthesized)
ggaaaaaggaagggagatcaaagattaggtgctggggactgaaaaataattttcatgtattaatactaccaaggatgatttggggaggaagacggagaaacagcaaggattatattttcc

SEQ ID NO: 743590 - DNA, 120 bp, Artificial Sequence
  ENSG00000204619_16 (sequence is synthesized)
tttgaagagttgctgggacctttcctaggttaggaattgtgtcttctcttatactggtggtataagaacaggaaataatacttattcctcaagggactatctgaggtaaaagacctgttc

SEQ ID NO: 743591 - DNA, 120 bp, Artificial Sequence
  ENSG00000204619_17 (sequence is synthesized)
tgttttatcttctgtcagctcctctggtgctatgcctatggtactgattgagctaaagaagaaaagagaggaggttccctgggagggagtgggaaaggttagtaagaggggactagatag

SEQ ID NO: 743592 - DNA, 120 bp, Artificial Sequence
  ENSG00000204619_18 (sequence is synthesized)
ctacaggcacagggcgaggggtagaaccacatcgcttgactcttaagtgtgtttccaactgctcccacttcccgttttctttagagaaacccagaccaaacaaggaaagggaaataggcc

SEQ ID NO: 743593 - DNA, 120 bp, Artificial Sequence
  ENSG00000204619_19 (sequence is synthesized)
acggtagggtcattactattgctccttaagcttcctcgccggtccacctacccagacaaggcaaacggaaatctgcagcaggactcagcttggtgcacacaactccgccctcgccacacc

SEQ ID NO: 743594 - DNA, 120 bp, Artificial Sequence
  ENSG00000204624_0 (sequence is synthesized)
gggttgcgagctgaggactgggattcgcgcgcagcttcccgcggtctgcttgccctggagcggagggggagccccagcctcctgcggctccgagaagcttccccctgcgacttccgcgag

SEQ ID NO: 743595 - DNA, 120 bp, Artificial Sequence
  ENSG00000204624_1 (sequence is synthesized)
gagacgagtctgcgcagcgtggtggccgccgccccccgaccctctgcgcactctctcccgcgccggcggctcagcctagccccgttcggccggccgagactatggacacggaggatgacc

SEQ ID NO: 743596 - DNA, 120 bp, Artificial Sequence
  ENSG00000204624_2 (sequence is synthesized)
ccttgctgcaggatgtgtggctagaggaggagcaggaggaggaagaagcaacgggtgaaacctttttaggggcccagaagccagggccccaacctggggcagggggacagtgttgctggc

SEQ ID NO: 743597 - DNA, 120 bp, Artificial Sequence
  ENSG00000204624_3 (sequence is synthesized)
ggcactggcccctggcttcccgacccccagcttcgggcttctggagtaccctgggctgggccttcaccaatccgtgctgtgctgggctggtgctcttcctgggctgcagcatccccatgg

SEQ ID NO: 743598 - DNA, 120 bp, Artificial Sequence
  ENSG00000204624_4 (sequence is synthesized)
ccctgtcagccttcatgttcctttactacccaccgctggacattgacatctcctacaacgcctttgagatccgcaaccacgaggcctcacagcgtttcgacgctctcactctggcgctta

SEQ ID NO: 743599 - DNA, 120 bp, Artificial Sequence
  ENSG00000204624_5 (sequence is synthesized)
agtcccagtttggatcctgggggcggaaccggcgcgatttggccgacttcacctccgagacgcttcagcgccttatctcagagcagctgcagcagctgcatctcggcaaccgctcgcggc

SEQ ID NO: 743600 - DNA, 120 bp, Artificial Sequence
  ENSG00000204624_6 (sequence is synthesized)
aagcctcccgagccccccgcgtcatccccgcggcctcactcggtggcccaggcccttaccgggacacttccgcggctcaaaagcccacagccaatcggagcgggcgacttcggcgtgaga

SEQ ID NO: 743601 - DNA, 120 bp, Artificial Sequence
  ENSG00000204624_7 (sequence is synthesized)
ccccgcccctggaggatctggcagccaaccagagtgaagacccgcgaaaccagcggctgagcaagaatgggcggtaccagcccagcatcccgccccacgcggcagtcgcggccaatcaga

SEQ ID NO: 743602 - DNA, 120 bp, Artificial Sequence
  ENSG00000204624_8 (sequence is synthesized)
gccgtgcccgccgaggcgcctcgcgctgggactactcgcgcgcctatgtgagtgccaacactcagacgcacgcgcactggcgcatcgagctcatcttcctggcgcgcggcgacgcggagc

SEQ ID NO: 743603 - DNA, 120 bp, Artificial Sequence
  ENSG00000204624_9 (sequence is synthesized)
gcaacattttcaccagtgagcgcctggtcacgatccatgagatcgagcgcaagatcatggaccacccaggcttccgggagttctgctggaagccccacgaggtgctcaaggatctgccgc

SEQ ID NO: 743604 - DNA, 120 bp, Artificial Sequence
  ENSG00000204624_10 (sequence is synthesized)
tgggctcctactcctactgctcgccccccagctcgctcatgacctacttttttcccaccgagaggggcggcaagatctactatgacggcatgggccaggacctggcggacatccggggct

SEQ ID NO: 743605 - DNA, 120 bp, Artificial Sequence
  ENSG00000204624_11 (sequence is synthesized)
ccctggagctggccatgactcaccctgagttctactggtatgtggatgagggcctctctgcagacaatctgaagagctccctcctgcgcagtgagatcctgtttggagcacccctgccca

SEQ ID NO: 743606 - DNA, 120 bp, Artificial Sequence
  ENSG00000204624_12 (sequence is synthesized)
actactactcagtagatgaccgctgggaggaacaacgggctaagtttcagagcttcgtggtcacctacgtggccatgctggccaagcagtctaccagcaaagtccaggttctctatgggg

SEQ ID NO: 743607 - DNA, 120 bp, Artificial Sequence
  ENSG00000204624_13 (sequence is synthesized)
ggacagacctgtttgactatgaagtgcgcaggacgttcaacaatgacatgctcctggccttcatcagcagcagctgcattgctgccctggtctacatcctcacctcctgctcagtgttcc

SEQ ID NO: 743608 - DNA, 120 bp, Artificial Sequence
  ENSG00000204624_14 (sequence is synthesized)
tgtccttctttgggattgccagcattggtctcagctgcctggtggccctcttcctgtaccacgtggtctttggtatccagtacttgggcatcctgaatggggtggccgccttcgtgatcg

SEQ ID NO: 743609 - DNA, 120 bp, Artificial Sequence
  ENSG00000204624_15 (sequence is synthesized)
tgggcattggtgtggacgatgtctttgtgttcatcaacacctaccgccaggccacccacctggaagacccacagctgcgcatgatccacaccgtccaaactgcaggcaaggccaccttct

SEQ ID NO: 743610 - DNA, 120 bp, Artificial Sequence
  ENSG00000204624_16 (sequence is synthesized)
tcacctccctgaccacagccgccgcctacgcagctaacgtcttctcccagatcccagccgtccacgactttggcctgttcatgtctctcatcgtgtcctgttgctggctggccgtgcttg

SEQ ID NO: 743611 - DNA, 120 bp, Artificial Sequence
  ENSG00000204624_17 (sequence is synthesized)
tcaccatgcctgcagctctgggcctctggagcctctacctggcaccactggagagctcctgccagaccagctgccaccagaattgcagccggaagacctccctgcacttccccggagacg

SEQ ID NO: 743612 - DNA, 120 bp, Artificial Sequence
  ENSG00000204624_18 (sequence is synthesized)
tgtttgccgctcccgagcaggttggaggcagccctgcccagggccccataccctacctggatgatgacatccccttgctggaggtcgaggaagagccagtgtcactggagctgggagacg

SEQ ID NO: 743613 - DNA, 120 bp, Artificial Sequence
  ENSG00000204624_19 (sequence is synthesized)
tgtccctggtgtctgtgtcccccgagggtctgcagccagcctccaacacgggcagccgcggccatctcatcgtgcagctgcaggagctgctgcaccactgggtcctgtggtcagccgtca

SEQ ID NO: 743614 - DNA, 120 bp, Artificial Sequence
  ENSG00000204624_20 (sequence is synthesized)
agagccgctgggtgattgtggggctgttcgtctccatcctcatcttgtccctggtgttcgccagccggctccgccccgccagccgggccccgctactcttccggcctgataccaacatcc

SEQ ID NO: 743615 - DNA, 120 bp, Artificial Sequence
  ENSG00000204624_21 (sequence is synthesized)
ggacgtccctggagaagaagaggcgaggctcaggggtcccctgggctagccggcctgaggccaccctgcaggatttcccaggcaccgtgtacatctctaaagtgaagagtcaaggccacc

SEQ ID NO: 743616 - DNA, 120 bp, Artificial Sequence
  ENSG00000204624_22 (sequence is synthesized)
ccgctgtctacaggctctccctcaatgccagcctgcctgctccttggcaggctgtgtcgcctggggatggagaggtgccctccttccaggtgtatagagcgccttttggtaacttcacca

SEQ ID NO: 743617 - DNA, 120 bp, Artificial Sequence
  ENSG00000204624_23 (sequence is synthesized)
agaagctgaccgcttgtatgtctacagtagggctgctccaggcggcgagcccctcccgcaagtggatgctgacgaccttggcctgtgatgccaagcggggctggaagtttgacttcagct

SEQ ID NO: 743618 - DNA, 120 bp, Artificial Sequence
  ENSG00000204624_24 (sequence is synthesized)
tctacgtggccaccaaggagcagcagcacacccggaagctgtacttcgcccagtcccacaagccccccttccacgggcgcgtatgcatggcaccccctggctgcctgcttagctccagcc

SEQ ID NO: 743619 - DNA, 120 bp, Artificial Sequence
  ENSG00000204624_25 (sequence is synthesized)
ccgatgggcctaccaaaggcttcttcttcgtgcctagtgagaaagtgcccaaggcccgtctctcagccaccttcggcttcaacccctgcgtgaacacgggctgcgggaagccggcggtgc

SEQ ID NO: 743620 - DNA, 120 bp, Artificial Sequence
  ENSG00000204624_26 (sequence is synthesized)
ggccactagtggataccggggccatggtctttgtggtcttcggcattattggcgtcaaccgcactcggcaggtggacaaccacgtcattggagacccgggtagtgttgtctacgacagca

SEQ ID NO: 743621 - DNA, 120 bp, Artificial Sequence
  ENSG00000204624_27 (sequence is synthesized)
gctttgacctcttcaaggaaattgggcacctgtgtcacctctgcaaggccatcgcagccaactccgagctggtgaagccgggtggggcccagtgcctgccttcaggctacagcatctcct

SEQ ID NO: 743622 - DNA, 120 bp, Artificial Sequence
  ENSG00000204624_28 (sequence is synthesized)
ccttcctgcagatgttgcaccctgagtgcaaggagctgcccgagcccaacctgctcccggggcagctgtcccacggggcagtgggcgtcagggagggccgcgtgcagtggatctccatgg

SEQ ID NO: 743623 - DNA, 120 bp, Artificial Sequence
  ENSG00000204624_29 (sequence is synthesized)
ctttcgagtcgaccacgtacaagggcaaatcctccttccagacctactcggactacctgcgctgggagagcttcctccagcagcagctgcaggccttgcccgagggctcagtcctgcgcc

SEQ ID NO: 743624 - DNA, 120 bp, Artificial Sequence
  ENSG00000204624_30 (sequence is synthesized)
ggggcttccagacctgcgagcactggaagcagatattcatggaaatcgtaggggtgcagagcgccctgtgcggcctggtgctatccctgctcatctgcgtggccgcggtggccgtgttca

SEQ ID NO: 743625 - DNA, 120 bp, Artificial Sequence
  ENSG00000204624_31 (sequence is synthesized)
ccacccacatcctgctcctgctgcccgtgctcctcagcatcttgggcatcgtgtgcctggtggtgaccatcatgtactggagcggctgggagatgggggctgtggaagccatctccctgt

SEQ ID NO: 743626 - DNA, 120 bp, Artificial Sequence
  ENSG00000204624_32 (sequence is synthesized)
ccatcctcgttggctcctccgtggattactgcgtccacctggtcgagggctacctgctggctggagagaacctgcccccccaccaggccgaggacgcccgaacgcagcgccagtggcgta

SEQ ID NO: 743627 - DNA, 120 bp, Artificial Sequence
  ENSG00000204624_33 (sequence is synthesized)
cgctggaggccgtgcggcacgtgggcgtggccatcgtctccagtgccctcaccacggtcatcgccacagtgcccctcttcttctgcatcatcgccccatttgccaagttcggcaagattg

SEQ ID NO: 743628 - DNA, 120 bp, Artificial Sequence
  ENSG00000204624_34 (sequence is synthesized)
tggcactcaacacgggcgtgtccatcctctacacgctgaccgtcagcaccgccctgctgggcatcatggcgcccagctctttcactcggacccggacttccttcctcaaggccctgggtg

SEQ ID NO: 743629 - DNA, 120 bp, Artificial Sequence
  ENSG00000204624_35 (sequence is synthesized)
ccgtgctgctggcaggggccctggggctgggtgcctgcctcgtgctcctgcagagcggctataagattcccctgcccgcaggggcctccctatagcccgggacgggctctggacacttgc

SEQ ID NO: 743630 - DNA, 120 bp, Artificial Sequence
  ENSG00000204624_36 (sequence is synthesized)
acctttggtcccatgggtgggggacaggagctgcttcccagctcgacttcagctagctgtgtccccaggcctgggcccagggcgccctgcgggccagcgtggaggctgacacccacacag

SEQ ID NO: 743631 - DNA, 120 bp, Artificial Sequence
  ENSG00000204624_37 (sequence is synthesized)
atggtgtggaccatgctgccttgtggagctgggagttggagacagccgccaccccacaggccgggctactggcagccacactcggctttttgcccagtggcagaagagaccagccctcct

SEQ ID NO: 743632 - DNA, 120 bp, Artificial Sequence
  ENSG00000204624_38 (sequence is synthesized)
cccatgcccggtcaccatgggggtcaggttatttttgtagggggtctccctctcacactgcctcagtgctcacaaccttccagtgtggatgttacagggtggcccccattctaccgatgt

SEQ ID NO: 743633 - DNA, 120 bp, Artificial Sequence
  ENSG00000204624_39 (sequence is synthesized)
gaaaactgaggcgccaggacacagtggctgccctgtcgctggatcagtagcagagccagagctgcctccgagcgccatgccgccctcgggaatcatacaggaagagcacagtggatccag

SEQ ID NO: 743634 - DNA, 120 bp, Artificial Sequence
  ENSG00000204624_40 (sequence is synthesized)
ggtgggggcctctcaccccctaaccccgcccccccgcaaccctccccttcagctttacggcggccagtgctgaatggccctgtggccctccctgggccttttggtcttggccagagaaga

SEQ ID NO: 743635 - DNA, 120 bp, Artificial Sequence
  ENSG00000204624_41 (sequence is synthesized)
cagaaggacccggcttgggcttctgcatgtcctacccctgaccccagcctcaaggggcccctcaaaggccctctctgggggctctggggctcagcacagctttcctcatggatctaagcc

SEQ ID NO: 743636 - DNA, 120 bp, Artificial Sequence
  ENSG00000204624_42 (sequence is synthesized)
cctgtctttcccacctgactctgagtggatgttttgggggatggcccctgtggggaggagctgccatgccggccgcctgctcacggcagaaggttgctattaaaatgacataggattgca

SEQ ID NO: 743637 - DNA, 120 bp, Artificial Sequence
  ENSG00000204624_43 (sequence is synthesized)
ctgacgaccctccaccgtggcctcagcagcttctgttcccctccccaggaagttttctagggccagatgccacagagccccagtgatctctccaaggggccaagaactttgggtgaagca

SEQ ID NO: 743638 - DNA, 120 bp, Artificial Sequence
  ENSG00000204624_44 (sequence is synthesized)
cctctcctgctgttgtccttcaaatccagaaactgggttgaaagaagagtagtcccagcatggtgtggtggaaggagcactggactggaagtgaggggacctggatcctagtccgagctt

SEQ ID NO: 743639 - DNA, 120 bp, Artificial Sequence
  ENSG00000204624_45 (sequence is synthesized)
aaccacagactcccagtttgcccttgggcaaactacttcccttctctgagcttcaggtttcccgtctgttaaaggactgcctgaggtgacctgtagggtcactttctggccctaataatc

SEQ ID NO: 743640 - DNA, 120 bp, Artificial Sequence
  ENSG00000204624_46 (sequence is synthesized)
tggaacattgactctctagtgagtctcttgagtgtgggtgggattgaaaattgtgattctaaccccaaagattaccctacctttccccttccttagagcacccaccactagtgaagtcat

SEQ ID NO: 743641 - DNA, 120 bp, Artificial Sequence
  ENSG00000204624_47 (sequence is synthesized)
cctgttccctgagtgagggatgtttagatgatttccttaataggaccagagatgtcaagtaattttcttgaggtcatactgctgaagtgcaatcttcattggggcaggcattacttctac

SEQ ID NO: 743642 - DNA, 120 bp, Artificial Sequence
  ENSG00000204624_48 (sequence is synthesized)
ggctcaccacacggcaaggtgcccgcttccaagctgaccccaccagcactcagacacgcatgcacacacacacgcagacctactatgaactggcttgtgctcagcaagagcagaattgat

SEQ ID NO: 743643 - DNA, 120 bp, Artificial Sequence
  ENSG00000204628_0 (sequence is synthesized)
ctctctttcactgcaaggcggcggcaggagaggttgtggtgctagtttctctaagccatccagtgccatcctcgtcgctgcagcgacacacgctctcgccgccgccatgactgagcagat

SEQ ID NO: 743644 - DNA, 120 bp, Artificial Sequence
  ENSG00000204628_1 (sequence is synthesized)
gacccttcgtggcaccctcaagggccacaacggctgggtaacccagatcgctactaccccgcagttcccggacatgatcctctccgcctctcgagataagaccatcatcatgtggaaact

SEQ ID NO: 743645 - DNA, 120 bp, Artificial Sequence
  ENSG00000204628_2 (sequence is synthesized)
gaccagggatgagaccaactatggaattccacagcgtgctctgcggggtcactcccactttgttagtgatgtggttatctcctcagatggccagtttgccctctcaggctcctgggatgg

SEQ ID NO: 743646 - DNA, 120 bp, Artificial Sequence
  ENSG00000204628_3 (sequence is synthesized)
aaccctgcgcctctgggatctcacaacgggcaccaccacgaggcgatttgtgggccataccaaggatgtgctgagtgtggccttctcctctgacaaccggcagattgtctctggatctcg

SEQ ID NO: 743647 - DNA, 120 bp, Artificial Sequence
  ENSG00000204628_4 (sequence is synthesized)
gagccactcagagtgggtgtcttgtgtccgcttctcgcccaacagcagcaaccctatcatcgtctcctgtggctgggacaagctggtcaaggtatggaacctggctaactgcaagctgaa

SEQ ID NO: 743648 - DNA, 120 bp, Artificial Sequence
  ENSG00000204628_5 (sequence is synthesized)
gaccaaccacattggccacacaggctatctgaacacggtgactgtctctccagatggatccctctgtgcttctggaggcaaggatggccaggccatgttatgggatctcaacgaaggcaa

SEQ ID NO: 743649 - DNA, 120 bp, Artificial Sequence
  ENSG00000204628_6 (sequence is synthesized)
acacctttacacgctagatggtggggacatcatcaacgccctgtgcttcagccctaaccgctactggctgtgtgctgccacaggccccagcatcaagatctgggatttagagggaaagat

SEQ ID NO: 743650 - DNA, 120 bp, Artificial Sequence
  ENSG00000204628_7 (sequence is synthesized)
cattgtagatgaactgaagcaagaagttatcagtaccagcagcaaggcagaaccaccccagtgcacctccctggcctggtctgctgatggccagactctgtttgctggctacacggacaa

SEQ ID NO: 743651 - DNA, 120 bp, Artificial Sequence
  ENSG00000204628_8 (sequence is synthesized)
cctggtgcgagtgtggcaggtgaccattggcacacgctagaagtttatggcagagctttacaaataaaaaaaaaactggcttttctgacttttaggtttttttttcttatatgcaaaaaa

SEQ ID NO: 743652 - DNA, 120 bp, Artificial Sequence
  ENSG00000204628_9 (sequence is synthesized)
ttccagttaattttctccctctcattctgttagtatatctagtctgtcagacacaagagcagtgtccttggcataaagtgaaatgacaagccaggttgatgaggatgccctcgtttgcca

SEQ ID NO: 743653 - DNA, 120 bp, Artificial Sequence
  ENSG00000204628_10 (sequence is synthesized)
agtggctgtcagccttcaattaataccttaattaatctgaccagttttcaaatgtctggagccttatcaccagctgtttcttcctcaaggaatacataaccaccacttacaagctggctg

SEQ ID NO: 743654 - DNA, 120 bp, Artificial Sequence
  ENSG00000204628_11 (sequence is synthesized)
ttgaaatgagagcggtttcttacagtctacccggcgttgtggcacatgcctactggaggctgaggtgggaggatctcttgaactgcaggggcttaaggctgtagtgagccaggatcgcac

SEQ ID NO: 743655 - DNA, 120 bp, Artificial Sequence
  ENSG00000204628_12 (sequence is synthesized)
ccctgcactccagcctagacaatggagcaaggtggacggatctcaaaaaaagccacttgggctgaatctagtgagactgcagaatttatgccagcctgacctgtcactgtcatttcttcc

SEQ ID NO: 743656 - DNA, 120 bp, Artificial Sequence
  ENSG00000204628_13 (sequence is synthesized)
ctgcagactctgtttgctggctacacggacaacctggtgcgagtgtggcaggtgaccattggcacacgctagaagtttatggcagagctttacaaataaaaaaaaaactggcttttctga

SEQ ID NO: 743657 - DNA, 120 bp, Artificial Sequence
  ENSG00000204628_14 (sequence is synthesized)
aggcgtgagccaccgtgcccggcctctccttgggactcttaccttgtatggaatggaagtggtgcctctggggtcccagacacgggagagaggaagcagcccaggggctgggagaagtgg

SEQ ID NO: 743658 - DNA, 120 bp, Artificial Sequence
  ENSG00000204628_15 (sequence is synthesized)
gaagcagcccaggggctgggagaagtggtgagacccagaagaacggtggacccagtcaggaagggtcctgccagcagggcgtgggccagcctcggggtcttccccaaaaggcaggtaggg

SEQ ID NO: 743659 - DNA, 120 bp, Artificial Sequence
  ENSG00000204628_16 (sequence is synthesized)
ggggcctacgggccgggcggggcggtgatgaccccaacatgccatctgagtgtcggtgctgaaatccagaggctgtttctgagctgccgcccggcccaaggctcgtggggaggcaggtgg

SEQ ID NO: 743660 - DNA, 120 bp, Artificial Sequence
  ENSG00000204628_17 (sequence is synthesized)
actccagaggacctcgtggctcaaataagaccatcatcatgtggaaactgaccagggatgagaccaactatggaattccacagcgtgctctgcggggtcactcccactttgttagtgatg

SEQ ID NO: 743661 - DNA, 120 bp, Artificial Sequence
  ENSG00000204628_18 (sequence is synthesized)
catgagccaccgcacccagcctaaagttggtttcttgaagcagttgatgagattgggatcctggttttcagaaatgattggagtgatttatgtaagttgggaggggttttttgatggggt

SEQ ID NO: 743662 - DNA, 120 bp, Artificial Sequence
  ENSG00000204628_19 (sequence is synthesized)
tggtaaggtcttacgttaaaggaaaggtatacagagataaatattggtacttgagtcattagctttcaaagaagcctggggtaatggaggaaaggtaagaattgattctgacagaatctt

SEQ ID NO: 743663 - DNA, 120 bp, Artificial Sequence
  ENSG00000204628_20 (sequence is synthesized)
gctgagactctgtttgctggctacacggacaacctggtgcgagtgtggcaggtgaccattggcacacgctagaagtttatggcagagctttacaaataaaaaaaaaactggcttttctga

SEQ ID NO: 743664 - DNA, 120 bp, Artificial Sequence
  ENSG00000204628_21 (sequence is synthesized)
gacagatggcattgtcagccaatccccaagtgggagtgaggacatgtcctgcaattctgaagggattctctgtcacttggctcttctctttcatatactcagtcacttgactctgtgatc

SEQ ID NO: 743665 - DNA, 120 bp, Artificial Sequence
  ENSG00000204628_22 (sequence is synthesized)
agagccaaatccagggttgtatgagtgatgcaatgagacagagacaaagcccaggaaatgagtctgaccgttgaatgagagtgtttgctaagtctgagaatgacaaactcctccctctca

SEQ ID NO: 743666 - DNA, 79 bp, Artificial Sequence
  ENSG00000204628_23 (sequence is synthesized)
gacaaccggcagattgtctctggatctcgagataaaaccatcaagctatggaataccctgggtgtgtgcaaatacactg

SEQ ID NO: 743667 - DNA, 120 bp, Artificial Sequence
  ENSG00000204628_24 (sequence is synthesized)
tcccaggtggtcatacactccaagtcctgtggaaagctttgcagatgccctcagttgactctttctcttgtcacatggtctgatgtcccttgtaagtcagcacactgcattggatatgtg

SEQ ID NO: 743668 - DNA, 120 bp, Artificial Sequence
  ENSG00000204628_25 (sequence is synthesized)
atggctaccgtatccagaagtgccaagcccttttttgttgggcctgaccctagctcatcaagagctaggatgttcacctgtcaaccgcacgtctatgcaggtatggaacctggctaactg

SEQ ID NO: 743669 - DNA, 120 bp, Artificial Sequence
  ENSG00000204628_26 (sequence is synthesized)
aactgaaaatgcatgtaggcattgatacatggaccccagggagcaaaatcatccctttttaacttgagaatcttgaggggcttttaagaggagactctcttgattggtaagtcttaaggt

SEQ ID NO: 743670 - DNA, 120 bp, Artificial Sequence
  ENSG00000204628_27 (sequence is synthesized)
tcggcctactttttctgcccctggttctccccgtccctatccctgtgttcctgactgcgtttagacgcttcttgtgcttccgctttgctgctacactgttaagaattgtctgacttttga

SEQ ID NO: 743671 - DNA, 120 bp, Artificial Sequence
  ENSG00000204628_28 (sequence is synthesized)
atcatgtctggctgttaatcgtaaaatttgttgagtgggacaggtttcagtaaaagcatccaatcctgtagcgcctgaagtggcttttccagcattcattactacatttctgtcggccct

SEQ ID NO: 743672 - DNA, 120 bp, Artificial Sequence
  ENSG00000204628_29 (sequence is synthesized)
cagaggtaggcataggaggccccagctactctacagccacaaactgctgtgcatttggttgcagagaagacacaaagtggctgttgagttcgtctgagtttcaggaaagggtgtctgtat

SEQ ID NO: 743673 - DNA, 81 bp, Artificial Sequence
  ENSG00000204628_30 (sequence is synthesized)
agaggcgagtggatcacttgagatcaggagttagagactagcctggccaatggtgaaaccgcatctctagttaaaaaatta

SEQ ID NO: 743674 - DNA, 120 bp, Artificial Sequence
  ENSG00000204628_31 (sequence is synthesized)
gatcaggagttagagactagcctggccaatggtgaaaccgcatctctagttaaaaaattagccagacgtgctggcaggtgccagctggccaagtaatcccagctacttgggaggctgagg

SEQ ID NO: 743675 - DNA, 120 bp, Artificial Sequence
  ENSG00000204628_32 (sequence is synthesized)
tgaggtggatgcaattggctggtttcccaggggagatccagtccatttgggaactggaaagcagagcacacctacagaagatgtttggcctccctcactttaaataagttactcagcatt

SEQ ID NO: 743676 - DNA, 120 bp, Artificial Sequence
  ENSG00000204628_33 (sequence is synthesized)
gctgaggagtgtggctgaacatttttgccaggtgcaaaagttctgagtgggcagcagtttgaacatgttttaccttgaaagctcaggtaattggcaggtggaattagagggtcctggtga

SEQ ID NO: 743677 - DNA, 80 bp, Artificial Sequence
  ENSG00000204628_34 (sequence is synthesized)
tgataacaggcgtgagtcaccgtgcccggccttatcactactattttgttttgttttgagacagtctcattctgtcgccc

SEQ ID NO: 743678 - DNA, 120 bp, Artificial Sequence
  ENSG00000204628_35 (sequence is synthesized)
aatctgagaatatgtttccaaagattactttcagcaaatgacagttaaggcatactatctggaagaaaaagatgattttctataagcctgtgggttttttttgttgtttttttgtttgtt

SEQ ID NO: 743679 - DNA, 74 bp, Artificial Sequence
  ENSG00000204628_36 (sequence is synthesized)
tgtttgtttgttttttgttttttttttgagacggagtctcactcggctctcccgggttcaagcaattctcccat

SEQ ID NO: 743680 - DNA, 61 bp, Artificial Sequence
  ENSG00000204628_37 (sequence is synthesized)
tcactcctgggtaatttttgtatgttagtagagaggattttaccatgttggccaggctggt

SEQ ID NO: 743681 - DNA, 69 bp, Artificial Sequence
  ENSG00000204628_38 (sequence is synthesized)
tcgagataaaaccatcaagctatggaataccctgggtgtgtgcaaatacactgtccagtctcactcttg

SEQ ID NO: 743682 - DNA, 72 bp, Artificial Sequence
  ENSG00000204628_39 (sequence is synthesized)
ccgggctcaagggattctggtgcctcagtctcccgagtagctggtactacaggtgcgcagccaccacgccta

SEQ ID NO: 743683 - DNA, 120 bp, Artificial Sequence
  ENSG00000204628_40 (sequence is synthesized)
agtgttgggattacaggcgtgagcccccacctgcctatctttgcctttttttttttttttctcggagacagtttcgcttgttccccaggctgaagtacaatggcgtgatctcggctgacc

SEQ ID NO: 743684 - DNA, 120 bp, Artificial Sequence
  ENSG00000204628_41 (sequence is synthesized)
gcatcaagatctggactctgtttgctggctacacggacaacctggtgcgagtgtggcaggtgaccattggcacacgctagaagtttatggcagagctttacaaataaaaaaaaaactggc

SEQ ID NO: 743685 - DNA, 120 bp, Artificial Sequence
  ENSG00000204628_42 (sequence is synthesized)
ctggaggcaagactctgtttgctggctacacggacaacctggtgcgagtgtggcaggtgaccattggcacacgctagaagtttatggcagagctttacaaataaaaaaaaaactggcttt

SEQ ID NO: 743686 - DNA, 120 bp, Artificial Sequence
  ENSG00000204632_0 (sequence is synthesized)
actcattctccccagacgccaaggatggtggtcatggcgccccgaaccctcttcctgctgctctcgggggccctgaccctgaccgagacctgggcgggctcccactccatgaggtatttc

SEQ ID NO: 743687 - DNA, 120 bp, Artificial Sequence
  ENSG00000204632_1 (sequence is synthesized)
agcgccgccgtgtcccggcccggccgcggggagccccgcttcatcgccatgggctacgtggacgacacgcagttcgtgcggttcgacagcgactcggcgtgtccgaggatggagccgcgg

SEQ ID NO: 743688 - DNA, 120 bp, Artificial Sequence
  ENSG00000204632_2 (sequence is synthesized)
gcgccgtgggtggagcaggaggggccggagtattgggaagaggagacacggaacaccaaggcccacgcacagactgacagaatgaacctgcagaccctgcgcggctactacaaccagagc

SEQ ID NO: 743689 - DNA, 120 bp, Artificial Sequence
  ENSG00000204632_3 (sequence is synthesized)
gaggccagttctcacaccctccagtggatgattggctgcgacctggggtccgacggacgcctcctccgcgggtatgaacagtatgcctacgatggcaaggattacctcgccctgaacgag

SEQ ID NO: 743690 - DNA, 120 bp, Artificial Sequence
  ENSG00000204632_4 (sequence is synthesized)
gacctgcgctcctggaccgcagcggacactgcggctcagatctccaagcgcaagtgtgaggcggccaatgtggctgaacaaaggagagcctacctggagggcacgtgcgtggagtggctc

SEQ ID NO: 743691 - DNA, 120 bp, Artificial Sequence
  ENSG00000204632_5 (sequence is synthesized)
ggccctgggcttctaccctgcggagatcatactgacctggcagcgggatggggaggaccagacccaggacgtggagctcgtggagaccaggcctgcaggggatggaaccttccagaagtg

SEQ ID NO: 743692 - DNA, 120 bp, Artificial Sequence
  ENSG00000204632_6 (sequence is synthesized)
ggcagctgtggtggtgccttctggagaggagcagagatacacgtgccatgtgcagcatgaggggctgccggagcccctcatgctgagatggaagcagtcttccctgcccaccatccccat

SEQ ID NO: 743693 - DNA, 120 bp, Artificial Sequence
  ENSG00000204632_7 (sequence is synthesized)
catgggtatcgttgctggcctggttgtccttgcagctgtagtcactggagctgcggtcgctgctgtgctgtggagaaagaagagctcagattgaaaaggagggagctactctcaggctgc

SEQ ID NO: 743694 - DNA, 120 bp, Artificial Sequence
  ENSG00000204632_8 (sequence is synthesized)
aatgtgaaacagctgccctgtgtgggactgagtggcaagtccctttgtgacttcaagaaccctgactcctctttgtgcagagaccagcccacccctgtgcccaccatgaccctcttcctc

SEQ ID NO: 743695 - DNA, 120 bp, Artificial Sequence
  ENSG00000204632_9 (sequence is synthesized)
atgctgaactgcattccttccccaatcacctttcctgttccagaaaaggggctgggatgtctccgtctctgtctcaaatttgtggtccactgagctataacttacttctgtattaaaatt

SEQ ID NO: 743696 - DNA, 120 bp, Artificial Sequence
  ENSG00000204632_10 (sequence is synthesized)
agaatctgagtataaatttactttttcaaattatttccaagagagattgatgggttaattaaaggagaagattcctgaaatttgagagacaaaataaatggaagacatgagaactttcca

SEQ ID NO: 743697 - DNA, 120 bp, Artificial Sequence
  ENSG00000204632_11 (sequence is synthesized)
agtgtggtactttgtcttgaggagatgtcctggactcacacggaaacttagggctacggaatgaagttctcactcccattaggtgacaggtttttagagaagccaatcagcgtcgccgcg

SEQ ID NO: 743698 - DNA, 120 bp, Artificial Sequence
  ENSG00000204632_12 (sequence is synthesized)
ttagggaaagcaggagcctctctgaagacctttaacagggtcggtggtgagggctgggggtcagagaccctcaccttcacctcctttcccagagcagtcttccctgcccaccatccccat

SEQ ID NO: 743699 - DNA, 120 bp, Artificial Sequence
  ENSG00000204634_0 (sequence is synthesized)
atgtggctcaagcccgaggaggtgctgctgaagaacgcgctgaagctctgggtgacccagaagagcagctgctacttcatcctgcagcggcgccgcgggcacggcgaggggggcggccgc

SEQ ID NO: 743700 - DNA, 120 bp, Artificial Sequence
  ENSG00000204634_1 (sequence is synthesized)
ctcaccggtcgcctggtcggcgctctggatgcagtgttggattccaatgcacgggtcgctccatttcgaattctgcttcaagttcccggctcccaggtttattctcccatagcatgtggt

SEQ ID NO: 743701 - DNA, 120 bp, Artificial Sequence
  ENSG00000204634_2 (sequence is synthesized)
gcaacattagaggaaatcaatcagcactgggactggctggaacaaaatctcctccacaccttgtctgtctttgataataaagatgacattgccagttttgtcaaagggaaggtaaaggct

SEQ ID NO: 743702 - DNA, 120 bp, Artificial Sequence
  ENSG00000204634_3 (sequence is synthesized)
ctgatagccgaggagaccagcagcaggctcgccgagcaggaggaggaacccgagaaattccgagaagccctggtgaagttcgaggccaggttcaacttccccgaggcggagaagctggtc

SEQ ID NO: 743703 - DNA, 120 bp, Artificial Sequence
  ENSG00000204634_4 (sequence is synthesized)
acctactactcctgctgctgttggaagggcagggtgccccgccagggctggctgtacctcagcatcaaccacctctgcttctactccttcttcctgggcaaggaacttaaacttgtggtt

SEQ ID NO: 743704 - DNA, 120 bp, Artificial Sequence
  ENSG00000204634_5 (sequence is synthesized)
ccgtgggttgatatccagaaattagaaagaacgtccaatgtctttctgacggataccatccgaatcaccacgcagaataaggagcgtgacttctccatgttcctgaacctggatgaggtg

SEQ ID NO: 743705 - DNA, 120 bp, Artificial Sequence
  ENSG00000204634_6 (sequence is synthesized)
tttaaggtcatggagcagctggccgacgtgacgctgcgaaggctgctggataatgaggtctttgacctcgaccccgatctgcaggagccgagccagatcaccaagagggacctggaagcc

SEQ ID NO: 743706 - DNA, 120 bp, Artificial Sequence
  ENSG00000204634_7 (sequence is synthesized)
agagcacagaatgagttcttccgggctttcttcaggttgccgaggaaggagaagctgcacgcggttgtggactgttcgctctggacgccgttcagtcgctgtcacaccacggggcggatg

SEQ ID NO: 743707 - DNA, 120 bp, Artificial Sequence
  ENSG00000204634_8 (sequence is synthesized)
ttcgcctctgacagctacatctgctttgccagcagagaagatggctgctgtaagatcatcctgccactcagagaggtggtgagcatcgagaagatggaggacacgagcctgctgccgcat

SEQ ID NO: 743708 - DNA, 120 bp, Artificial Sequence
  ENSG00000204634_9 (sequence is synthesized)
cccatcattgtcagtatcagaagcaaggtggccttccagttcattgagctccgggaccgagacagcctggtggaggcgctgcttgcgaggttgaagcaggtccacgccaaccaccccgtg

SEQ ID NO: 743709 - DNA, 120 bp, Artificial Sequence
  ENSG00000204634_10 (sequence is synthesized)
cactacgacacctctgcggatgatgacatggcttcactcgtgtttcattcaacaagcatgtgcagtgaccacagatttggggatcttgaaatgatgtcttctcaaaatagcgaggagagt

SEQ ID NO: 743710 - DNA, 120 bp, Artificial Sequence
  ENSG00000204634_11 (sequence is synthesized)
gagaaagagaagagcccgctgatgcaccccgatgccctggtcaccgccttccagcagtcaggcagccagagccctgactcccgaatgtccagagaacagataaaaataagcctgtggaat

SEQ ID NO: 743711 - DNA, 120 bp, Artificial Sequence
  ENSG00000204634_12 (sequence is synthesized)
gaccactttgtggaatacggcagaaccgtgtgtatgtttcgcacagagaagattcggaagctcgtagccatgggcatccctgaatctttgcgagggagactctggcttctcttctcagat

SEQ ID NO: 743712 - DNA, 120 bp, Artificial Sequence
  ENSG00000204634_13 (sequence is synthesized)
gcggtgacggatcttgcctcacaccctggttactacgggaatctggtggaggagtccctggggaaatgctgcctggtaaccgaggagatagaacgagacctgcaccgctccctgccagag

SEQ ID NO: 743713 - DNA, 120 bp, Artificial Sequence
  ENSG00000204634_14 (sequence is synthesized)
caccccgccttccagaacgaaacgggaattgctgctttgaggagagtcttgacggcctatgcccaccggaaccccaagattggatactgccagtccatgaacatcctgacctccgtgctg

SEQ ID NO: 743714 - DNA, 120 bp, Artificial Sequence
  ENSG00000204634_15 (sequence is synthesized)
ttctggctgttggttgctgtgtgtgagcggatgctgcccgattacttcaaccaccgagtgatcggggcacaagttgaccagtctgtcttcgaggagctcatcaagggtcatctcccagag

SEQ ID NO: 743715 - DNA, 120 bp, Artificial Sequence
  ENSG00000204634_16 (sequence is synthesized)
ctggcagagcacatgaacgacctctcagccctggcgtccgtctctctctcgtggttcctgaccctgttcctcagcatcatgcctctagagagtgcggtgaatgtggtagactgcttcttc

SEQ ID NO: 743716 - DNA, 120 bp, Artificial Sequence
  ENSG00000204634_17 (sequence is synthesized)
tatgatggcatcaaagccatcttccagctgggactggctgtgcttgaggccaatgctgaggacctgtgcagcagcaaggatgatggccaggccttgatgatcctcagcaggtttctagat

SEQ ID NO: 743717 - DNA, 120 bp, Artificial Sequence
  ENSG00000204634_18 (sequence is synthesized)
cacattaagaatgaggacagcccagggcccccagttggcagccaccatgcctttttctccgacgaccaggagccctaccctgtgactgatatttcggacctgatccgggattcctatgag

SEQ ID NO: 743718 - DNA, 120 bp, Artificial Sequence
  ENSG00000204634_19 (sequence is synthesized)
aaatttggagaccagtctgtggagcagatcgagcacctacgttacaagcacaggatcagggtcctccaaggccacgaggacaccacaaagcagaacgtgcttcgagtcgttatcccggaa

SEQ ID NO: 743719 - DNA, 120 bp, Artificial Sequence
  ENSG00000204634_20 (sequence is synthesized)
gtctcaattcttcctgaagacctagaggagctctacgacttattcaagagagaacatatgatgagctgttactgggagcagcccaggcccatggcctcacgccacgaccccagccggccc

SEQ ID NO: 743720 - DNA, 120 bp, Artificial Sequence
  ENSG00000204634_21 (sequence is synthesized)
tatgctgagcagtaccgcatagatgcccggcagtttgcacacctgtttcagctagtctcgccctggacctgcggggcccacacggagatcctcgccgaaaggacgttcaggctcttggat

SEQ ID NO: 743721 - DNA, 120 bp, Artificial Sequence
  ENSG00000204634_22 (sequence is synthesized)
gacaacatggaccagctcatcgagttcaaagcgtttgtgagctgcctcgatattatgtataatggagaaatgaatgagaagattaaactattatacaggcttcatatccctccagcactc

SEQ ID NO: 743722 - DNA, 120 bp, Artificial Sequence
  ENSG00000204634_23 (sequence is synthesized)
actgaaaatgaccgagacagccagtcgccgttgaggaatcctctgttgtcaacatcgagacccctggttttcgggaaacccaatggtgatgcagttgattatcagaaacagctgaagcag

SEQ ID NO: 743723 - DNA, 120 bp, Artificial Sequence
  ENSG00000204634_24 (sequence is synthesized)
atgattaaggatttagccaaagaaaaagataaaactgagaaagaattgcccaaaatgagccagagagaatttatccagttctgtaaaactctgtacagtatgttccatgaagatccagaa

SEQ ID NO: 743724 - DNA, 120 bp, Artificial Sequence
  ENSG00000204634_25 (sequence is synthesized)
gaaaatgatttgtatcaagccatcgccacagtcaccacactgctgctgcagatcggggaggtggggcagcgaggcagcagctctggaagctgctcccaggagtgtggggaggagctgcgg

SEQ ID NO: 743725 - DNA, 120 bp, Artificial Sequence
  ENSG00000204634_26 (sequence is synthesized)
gcttcagctccttctcctgaggactcggtttttgcagacactgggaagacgccccaggactcccaggcatttccagaggcggcagaaagggactggactgtctcccttgaacatatttta

SEQ ID NO: 743726 - DNA, 120 bp, Artificial Sequence
  ENSG00000204634_27 (sequence is synthesized)
gcttcacttctgactgaacagtcattagtcaacttttttgaaaagccactggacatgaaatccaaacttgaaaatgccaagatcaatcagtacaatctcaaaacttttgaaatgagccac

SEQ ID NO: 743727 - DNA, 120 bp, Artificial Sequence
  ENSG00000204634_28 (sequence is synthesized)
caatcacaatctgaacttaagctgagtaacttgtagcaagacagcagctgctatgcacactggagtccaccataccaaagcacgaaccagactgtttcttggggtcagccctaaaccgag

SEQ ID NO: 743728 - DNA, 120 bp, Artificial Sequence
  ENSG00000204634_29 (sequence is synthesized)
atttcagtctaccttaccaatggggcatctggctaaacaacctgacaaactgtggccaggggaaccgacacaaccctcaagcatttctatgtattgagaattgtcagtgccctaaggtat

SEQ ID NO: 743729 - DNA, 120 bp, Artificial Sequence
  ENSG00000204634_30 (sequence is synthesized)
ccgccgtcgcctctcgagcgggctcggctcacagcgaccggcggccggggagatgtgagctggggccggcgggcgcggccggaccgccgcgatgtggctcaagcccgaggaggtgctgct

SEQ ID NO: 743730 - DNA, 120 bp, Artificial Sequence
  ENSG00000204634_31 (sequence is synthesized)
gaaagcaggatgcacgaggtggcggccctgcagcccttgagtggggcctcattcctggagatgcagcaaagagtttgccggtttgggcttgtggagggaaagtcagtctgaatgtagatg

SEQ ID NO: 743731 - DNA, 120 bp, Artificial Sequence
  ENSG00000204634_32 (sequence is synthesized)
acgtcggggaaaccagaccgccgcggagagggacagcgcccagcgaaagcgaggctgatggagcgaagccaggaagaggatgcggagacgcgggggtctgtctggctgtgtcacccaggc

SEQ ID NO: 743732 - DNA, 120 bp, Artificial Sequence
  ENSG00000204634_33 (sequence is synthesized)
ctcagccttctgagtagctgagactacagttgttgtggaagataaagcccagcctgacatatgctctttcaaagaaagttctcaggaatatcctgtatatggcaccagacctcagacaat

SEQ ID NO: 743733 - DNA, 88 bp, Artificial Sequence
  ENSG00000204634_34 (sequence is synthesized)
acactgctgagtgaaggaggaaaaagccccttataaaaccatcagatctcctgagaacaaactcagtatcacaagaacagcatgggga

SEQ ID NO: 743734 - DNA, 120 bp, Artificial Sequence
  ENSG00000204634_35 (sequence is synthesized)
ctttacttttgtgggttgtttgggcttggatgcttgtaacatctctgtggcatcacatgggccagtcagtaactgccctccttgacccccgagcagtccatgaacatcctgacctccgtg

SEQ ID NO: 743735 - DNA, 120 bp, Artificial Sequence
  ENSG00000204634_36 (sequence is synthesized)
tttttttaaaaaggctatcttttacccattgaattaccttggtctaaaagtcagaatcaatgaactaagcatggacgcttttctggactcaaattccatctctttgttctggttacctca

SEQ ID NO: 743736 - DNA, 120 bp, Artificial Sequence
  ENSG00000204634_37 (sequence is synthesized)
gagtgattttaatttcagactgaccttagagagtgagtcctaccccagccagagccctgtgccctttcttttccaggggcacaagttgaccagtctgtcttcgaggagctcatcaagggt

SEQ ID NO: 743737 - DNA, 120 bp, Artificial Sequence
  ENSG00000204634_38 (sequence is synthesized)
accctcatgtgtatcacagctacataatgctagaacaaaatattgaatattcaagctcagagtattttttagagggtttctgcttttcccttatttacaggtttggctttttcctgatgt

SEQ ID NO: 743738 - DNA, 78 bp, Artificial Sequence
  ENSG00000204634_39 (sequence is synthesized)
tgcttttcccttatttacaggtttggctttttcctgatgttctatcagtgactggaaattgtattagtcccttctcat

SEQ ID NO: 743739 - DNA, 120 bp, Artificial Sequence
  ENSG00000204634_40 (sequence is synthesized)
ggaggcaccggggttgccctcatccctcttcttgtagcagccttgtcttttcccttcgtccaatgaattatccccaaactcactgcctttagaggacagaagtgctcctagtgggggtgt

SEQ ID NO: 743740 - DNA, 120 bp, Artificial Sequence
  ENSG00000204634_41 (sequence is synthesized)
tgctgggtggctgccccttgcccccaccaccaagttccttcctcctgtttgctgtttcacgggtcctcttagagcagaagtcccccagttaccacccactggctctccaggggaatctct

SEQ ID NO: 743741 - DNA, 120 bp, Artificial Sequence
  ENSG00000204634_42 (sequence is synthesized)
tgctttccagttttgtatggaatttgcttagtggaattcctcacccccttgctcctctctcctacatagtttcctttttgctgtcactgaatttatttaaattaaaccacatattgtttt

SEQ ID NO: 743742 - DNA, 120 bp, Artificial Sequence
  ENSG00000204634_43 (sequence is synthesized)
tcagggccaatccccttcctttaggacacatgagtggaggtgagatgtctgctgagctttcccgagctgagggtgtggtcagcaggcacaaaaggaaaattagtccattaaagcagcagc

SEQ ID NO: 743743 - DNA, 120 bp, Artificial Sequence
  ENSG00000204634_44 (sequence is synthesized)
caaacccagcacaagccgggattaatgaagctcctgacatttaaaaatttaagatttcaaactttgtttcctgtgaataagcaaagtcagtgagcgaattaagtttgtgtgtgcacgtgt

SEQ ID NO: 743744 - DNA, 120 bp, Artificial Sequence
  ENSG00000204634_45 (sequence is synthesized)
gtgcatgtgtgtgtctgcttgaacaaacagcgaatagctggatttaaaccaaccttaagacttgcaccacagctaaattccacattgctagatggggaccggagctgagtggtggccgat

SEQ ID NO: 743745 - DNA, 120 bp, Artificial Sequence
  ENSG00000204634_46 (sequence is synthesized)
gctgttcatgaggttggaggcgttttgcaatggttgttgtggaagataaagcccagcctgacatatgctctttcaaagaaagttctcaggaatatcctgtatatggcaccagacctcaga

SEQ ID NO: 743746 - DNA, 120 bp, Artificial Sequence
  ENSG00000204634_47 (sequence is synthesized)
caattcaggtcgcctggtcggcgctctggatgcagtgttggattccaatgcacgggtcgctccatttcgaattctgcttcaagttcccggctcccaggtttattctcccatagcatgtgg

SEQ ID NO: 743747 - DNA, 120 bp, Artificial Sequence
  ENSG00000204640_0 (sequence is synthesized)
tctcacaatgaaacatcttcgtccccagttccctctcatcttggccatctactgcttctgcatgctacagattccctcctcaggatttcctcaacctttagctgatccttcagatggctt

SEQ ID NO: 743748 - DNA, 120 bp, Artificial Sequence
  ENSG00000204640_1 (sequence is synthesized)
ggatattgtgcagcttgagcagctggcatattgtctgagtcagtgggcacctctttctcgccaacctaaggataatcaagacatatacaaaaggtttttgtttcactactccagaactca

SEQ ID NO: 743749 - DNA, 120 bp, Artificial Sequence
  ENSG00000204640_2 (sequence is synthesized)
caacacatccagttaaaactgggtttcctccagtgcatcctctaatgcacctggctgccaagctcgccaacaggcggatgaagagaattctgcagcgaggctcggggactgctgcagtgg

SEQ ID NO: 743750 - DNA, 120 bp, Artificial Sequence
  ENSG00000204640_3 (sequence is synthesized)
acttcaccaagaaggatcacactgcgacctggggacgaccctttttccttttcaggcccaggaatggaagaaacattgaagatgaggcccagattcagtggtgaaagaaagctggatctg

SEQ ID NO: 743751 - DNA, 120 bp, Artificial Sequence
  ENSG00000204642_0 (sequence is synthesized)
atatttttcccagacgcggaggttggggtcatggcgccccgaagcctcctcctgctgctctcaggggccctggccctgaccgatacttgggcgggctcccactccttgaggtatttcagc

SEQ ID NO: 743752 - DNA, 120 bp, Artificial Sequence
  ENSG00000204642_1 (sequence is synthesized)
accgctgtgtcgcggcccggccgcggggagccccgctacatcgccgtggagtacgtagacgacacgcaattcctgcggttcgacagcgacgccgcgattccgaggatggagccgcgggag

SEQ ID NO: 743753 - DNA, 120 bp, Artificial Sequence
  ENSG00000204642_2 (sequence is synthesized)
ccgtgggtggagcaagaggggccgcagtattgggagtggaccacagggtacgccaaggccaacgcacagactgaccgagtggccctgaggaacctgctccgccgctacaaccagagcgag

SEQ ID NO: 743754 - DNA, 120 bp, Artificial Sequence
  ENSG00000204642_3 (sequence is synthesized)
gctgggtctcacaccctccagggaatgaatggctgcgacatggggcccgacggacgcctcctccgcgggtatcaccagcacgcgtacgacggcaaggattacatctccctgaacgaggac

SEQ ID NO: 743755 - DNA, 120 bp, Artificial Sequence
  ENSG00000204642_4 (sequence is synthesized)
ctgcgctcctggaccgcggcggacaccgtggctcagatcacccagcgcttctatgaggcagaggaatatgcagaggagttcaggacctacctggagggcgagtgcctggagttgctccgc

SEQ ID NO: 743756 - DNA, 120 bp, Artificial Sequence
  ENSG00000204642_5 (sequence is synthesized)
agatacttggagaatgggaaggagacgctacagcgcgcagatcctccaaaggcacacgttgcccaccaccccatctctgaccatgaggccaccctgaggtgctgggccctgggcttctac

SEQ ID NO: 743757 - DNA, 120 bp, Artificial Sequence
  ENSG00000204642_6 (sequence is synthesized)
aacagacccaggacacagagcttgtggagaccaggcctgcaggggatggaaccttccagaagtgggccgctgtggtggtgcctcctggagaggaacagagatacacatgccatgtgcagc

SEQ ID NO: 743758 - DNA, 120 bp, Artificial Sequence
  ENSG00000204642_7 (sequence is synthesized)
acgaggggctgccccagcccctcatcctgagatgggagcagtctccccagcccaccatccccatcgtgggcatcgttgctggccttgttgtccttggagctgtggtcactggagctgtgg

SEQ ID NO: 743759 - DNA, 120 bp, Artificial Sequence
  ENSG00000204642_8 (sequence is synthesized)
tcgctgctgtgatgtggaggaagaagagctcagatagaaacagagggagctactctcaggctgcagcctactcagtggtcagcggaaacttgatgataacatggtggtcaagcttatttc

SEQ ID NO: 743760 - DNA, 120 bp, Artificial Sequence
  ENSG00000204642_9 (sequence is synthesized)
tcctgggggtgctcttccaaggatatttgggctgcctccggagtcacagtgtcttgggccgccggaaggtgggtgacatgtggatcttgttttttttgtggctgtggacatctttcaaca

SEQ ID NO: 743761 - DNA, 120 bp, Artificial Sequence
  ENSG00000204642_10 (sequence is synthesized)
ctgccttcttggccttgcaaagccttcgctttggcttcggctttaggaggggcaggagcttccttcttcgttcttggcaccatcttatgaaaagggtccagattaagatttttgactgag

SEQ ID NO: 743762 - DNA, 120 bp, Artificial Sequence
  ENSG00000204642_11 (sequence is synthesized)
tcattctaaagtaagttgcaagacccatgatactagaccactaaatacttcatcacacacctcctaagaataagaaccaacattatcacaccaaagaaaataaataattccataatatta

SEQ ID NO: 743763 - DNA, 120 bp, Artificial Sequence
  ENSG00000204642_12 (sequence is synthesized)
gagacagcttccttgtgtgggactgagaagcaagatatcaatgtagcagaattgcacttgtgcctcacgaacatacataaattttaaaaataaagaataaaaatatatctttttatagat

SEQ ID NO: 743764 - DNA, 120 bp, Artificial Sequence
  ENSG00000204642_13 (sequence is synthesized)
gaagaagaagaaactgtctctacaccttcattctcaggacaagttcattgtctggcaccaagctccttggggtgaattttcttccaaaagagtccggggagtccaggtccttcttcctgg

SEQ ID NO: 743765 - DNA, 120 bp, Artificial Sequence
  ENSG00000204642_14 (sequence is synthesized)
gagctactctcaggctgcaggaaagttgactcatactggtgtccagtgaagaaacccaggcgcataagagggacagttggatctcagggaggactgtcttcttctcacctccccggacga

SEQ ID NO: 743766 - DNA, 120 bp, Artificial Sequence
  ENSG00000204642_15 (sequence is synthesized)
tgcttcttgacacaggaaagaggatgtgctgctagggtcatcatgtcctggtttattgtgttgtcagtagaatgaaatcaaaatacatacttcataaataataaaataacccataataag

SEQ ID NO: 743767 - DNA, 120 bp, Artificial Sequence
  ENSG00000204642_16 (sequence is synthesized)
agatgaaggaggctgatccctgagattgttgggatattgtggtcaggagcctatgagggagctcacccaccccacagttcctctagccacatctgtgggctctgaccaggtcctgttttt

SEQ ID NO: 743768 - DNA, 120 bp, Artificial Sequence
  ENSG00000204642_17 (sequence is synthesized)
gttctaccccaatcactgacagtgcccagggctctggggtgtctctcacagctaataaaggtgacactccagggcaggggccctgatgtgagtggggtgttgggggggaacagaggggac

SEQ ID NO: 743769 - DNA, 120 bp, Artificial Sequence
  ENSG00000204642_18 (sequence is synthesized)
tggccctgaccgatacttgggcgggtgagtgcggggtccagagagaaacggcctctgtggggaggagtgaggggcccgcccggtgggggcgcaggactcagggagccgcctccggaggag

SEQ ID NO: 743770 - DNA, 120 bp, Artificial Sequence
  ENSG00000204642_19 (sequence is synthesized)
ggccgggggcgcaggtcacgaccaccccccatccgccacggaccgcccgggtccctcagagtctccggatccgaaatctaccccgaggcagcgggacccgcccagaccctccacccggga

SEQ ID NO: 743771 - DNA, 120 bp, Artificial Sequence
  ENSG00000204642_20 (sequence is synthesized)
atatttttcccagacgcggaggttggggtcatggcgccccgaagcctcctcctgctgctctcaggggccctggccctgaccgatacttgggcggcgacgccgcgattccgaggatggagc

SEQ ID NO: 743772 - DNA, 120 bp, Artificial Sequence
  ENSG00000204642_21 (sequence is synthesized)
tccccagcccaccatccccatcgtgggcatcgttgctggccttgttgtccttggagctgtggtcactggagctgtggtcgctgctgtgatgtggaggaagaagagctcaggcccagctcc

SEQ ID NO: 743773 - DNA, 120 bp, Artificial Sequence
  ENSG00000204642_22 (sequence is synthesized)
tgagtgtctctacctctcaaacaagtattctcatccaggagcaattttcccaccagaggacattagctatgtctggaaaaatgttttgttgccatgactggagtgaggaggaggtgctac

SEQ ID NO: 743774 - DNA, 120 bp, Artificial Sequence
  ENSG00000204642_23 (sequence is synthesized)
cagcatcttgtggggaatgaccagggatgctgaacatcctgcagtgcacaagtcagcccaatcacccacataacagataattatccagccccaataccaagattgccaagggtaaggagg

SEQ ID NO: 743775 - DNA, 120 bp, Artificial Sequence
  ENSG00000204642_24 (sequence is synthesized)
cctgccaggactttctctcccttgagtacaagcttccttgaactgagggacaccctgaaggaaaagtgtggtcccaccccagtcatctctcccttccctggagctccatctgtatgcctg

SEQ ID NO: 743776 - DNA, 120 bp, Artificial Sequence
  ENSG00000204642_25 (sequence is synthesized)
tagtgcttaggcctgtaacctggggtccaggaacccaccttcccatgagactgcatgcagaagtgatgatatgtgcacacatgacttcattacagggcattggatgttgatattcatcag

SEQ ID NO: 743777 - DNA, 120 bp, Artificial Sequence
  ENSG00000204642_26 (sequence is synthesized)
gtcagctggggcccaagacactactcttctgccaacaggccgcaatcctctgcattagagagagggtaaagattgagggaggccctaacttcaaaccttctatcactgctagtgaagtgc

SEQ ID NO: 743778 - DNA, 120 bp, Artificial Sequence
  ENSG00000204642_27 (sequence is synthesized)
gtcaaattccatcaaagaaataatattttgacaaaaaatgcaagtcacctttctaagtcccagacagcagctcaaaataaaaagcattaaacccctcaaatcttagaccaggtgaaatta

SEQ ID NO: 743779 - DNA, 120 bp, Artificial Sequence
  ENSG00000204642_28 (sequence is synthesized)
ttgaagctgcagtaaggtcttgtgggacctgcagttagagagaagggacaactcaatttgggactgcagcagaaacccctacatcatggggttcctggaagggaccctctcccttcagcg

SEQ ID NO: 743780 - DNA, 120 bp, Artificial Sequence
  ENSG00000204642_29 (sequence is synthesized)
acgcattgtgaggccatttctaggtaaaaaggtagaatttccttggattcctgaggtttattttacacttactgcttattctttgactttatagaagccaacttcagtttgaacatcttg

SEQ ID NO: 743781 - DNA, 120 bp, Artificial Sequence
  ENSG00000204642_30 (sequence is synthesized)
caattaattttttttggctctaagtggagaatttgaacttgtttctgaagaaaaccaggggctccttatgtgagcaagcaaccctccctgtggcccccttatgcaataaacataagccat

SEQ ID NO: 743782 - DNA, 120 bp, Artificial Sequence
  ENSG00000204642_31 (sequence is synthesized)
tgtgagccagcaaaatttaaagcaaggaaagcagtaaaccctccatttcagcatgtttcagcctgtctagtgatgttctagtcttgcctcactcttaacattttaaaatttataatttta

SEQ ID NO: 743783 - DNA, 120 bp, Artificial Sequence
  ENSG00000204642_32 (sequence is synthesized)
tttgattttgatttaataagaattcatatgtattcatttcttttgggtttgtcaccaaaagcctcctccaatcacctgtggagtaaagacaagtaaataaatgcatggtgttcccattta

SEQ ID NO: 743784 - DNA, 120 bp, Artificial Sequence
  ENSG00000204644_0 (sequence is synthesized)
acaggaagccacatcaaaccctggggcctttgctgggcctctccatctgcccagttactgggaggtagatagccccaggaaggaatccagtcaggcctgggcaccaggccaggagtggat

SEQ ID NO: 743785 - DNA, 120 bp, Artificial Sequence
  ENSG00000204644_1 (sequence is synthesized)
aaagctagaaagagacaccacagaagagaagatgtttgaacagctgaagccaatcgaacctgtacagaagacgctcccatgggtgggcgaggtagctgccaccctgcaggaagccatgaa

SEQ ID NO: 743786 - DNA, 120 bp, Artificial Sequence
  ENSG00000204644_2 (sequence is synthesized)
gagagattgctggagggaggcacgggtgaagaagaagccagtcacctttgaggatgtggcagtgaatttcacccaggaagagtgggactgtctagatgccagccagagggtcctttacca

SEQ ID NO: 743787 - DNA, 120 bp, Artificial Sequence
  ENSG00000204644_3 (sequence is synthesized)
ggatgttatgtcggaaacctttaagaatctaacatctgtggccagaatctttctgcataagccagagctaatcaccaagcttgagcaagaagaggaacagtggagagagtttgtccatct

SEQ ID NO: 743788 - DNA, 120 bp, Artificial Sequence
  ENSG00000204644_4 (sequence is synthesized)
cccaaacacagaaggcctttcagaaggcaagaagaaagagcttcgagaacaacatcccagtctgagagatgaggggactagtgatgacaaggtcttccttgcatgcagaggggccggcca

SEQ ID NO: 743789 - DNA, 120 bp, Artificial Sequence
  ENSG00000204644_5 (sequence is synthesized)
gtgccccctatctgccccagctgggactatggacaggacccgggtgcttcaagcatcccaggctgggccaccctttttttgctacacctgtggcaaatgtttcagcaggcgctcctacct

SEQ ID NO: 743790 - DNA, 120 bp, Artificial Sequence
  ENSG00000204644_6 (sequence is synthesized)
ctatagccaccagtttgttcacaatcccaagctgactaacagctgcagtcagtgtgggaagttgtttcggagccccaagtccctcagctatcacagacgcatgcatcttggggagaggcc

SEQ ID NO: 743791 - DNA, 120 bp, Artificial Sequence
  ENSG00000204644_7 (sequence is synthesized)
ctgggttaccggccccattcatgctctgtgtgtgggaagagcttccgggaccagtctgagctcaaacgccaccagaagatacaccaaaaccaggagccagtggatggaaaccaggagtgt

SEQ ID NO: 743792 - DNA, 120 bp, Artificial Sequence
  ENSG00000204644_8 (sequence is synthesized)
actttgaggattccaggcacccaggctgaattccagacacccatcgccagaagccagaggtccatccaggggcttttggatgtgaaccatgcaccagtggccaggtcccaggaacccata

SEQ ID NO: 743793 - DNA, 120 bp, Artificial Sequence
  ENSG00000204644_9 (sequence is synthesized)
tttagaactgagggtcctatggcccagaaccaggcatctgtacttaagaaccaagcacctgtgaccaggacccaggcacccatcactggaaccctctgtcaggatgccagatccaactct

SEQ ID NO: 743794 - DNA, 120 bp, Artificial Sequence
  ENSG00000204644_10 (sequence is synthesized)
catccagtgaagccctcaagactcaatgtcttctgttgcccccattgttctttgacttttagcaagaaatcctatctctccagacaccagaaggcccacctcacagagccgcccaactac

SEQ ID NO: 743795 - DNA, 120 bp, Artificial Sequence
  ENSG00000204644_11 (sequence is synthesized)
tgcttccattgcagcaagtctttcagctcattttccaggctggtcagacaccagcagacccactggaagcagaagagctacctttgccctatctgtgacctctcctttggggagaaagag

SEQ ID NO: 743796 - DNA, 120 bp, Artificial Sequence
  ENSG00000204644_12 (sequence is synthesized)
ggccttatggatcactggaggggctataaaggcaaggacctgtgccagagcagccaccataaatgccgggtgatcctgggccagtggcttggcttctctcatgatgtccccactatggct

SEQ ID NO: 743797 - DNA, 120 bp, Artificial Sequence
  ENSG00000204644_13 (sequence is synthesized)
ggggaggaatggaagcatggaggtgatcaatctccccccaggatccatacccccaggagaagaggcctaagagagaaggcctgcaaaggagacaaaacaaaggaggcagtgagcatcttg

SEQ ID NO: 743798 - DNA, 120 bp, Artificial Sequence
  ENSG00000204644_14 (sequence is synthesized)
aaacataaataaatggcctttctgactgagctctttctttgtgtttagttttcctgaggactgacctctggggtaatgaggctggagtagagggagacaggtgcgtggataaggaaggaa

SEQ ID NO: 743799 - DNA, 120 bp, Artificial Sequence
  ENSG00000204644_15 (sequence is synthesized)
tccccgggagaccctgtgcccctaaatcgcggtccactgcgcgcgtcaggtttctagaagcagggtagaacagacggcagacacctagcccaggctggtgttgttactaaacaatggcag

SEQ ID NO: 743800 - DNA, 120 bp, Artificial Sequence
  ENSG00000204644_16 (sequence is synthesized)
ctggtgagccaagggtgaccagggccctgaactcggtggcccagctttgagggaagcaaaattgttctcaattgtggaagaggagaatttggacagcagaacaaaaaaggaagacagcct

SEQ ID NO: 743801 - DNA, 120 bp, Artificial Sequence
  ENSG00000204653_0 (sequence is synthesized)
agatgtccaaagagcagcggctgcccaggccttgtgcagcgggcagcgagcagcccagggagccaggccccagacaccgcactcagggccatggccgacaggggcccgtggagggtgggc

SEQ ID NO: 743802 - DNA, 120 bp, Artificial Sequence
  ENSG00000204653_1 (sequence is synthesized)
gtggtgggctatggccgcctcggacagtccctcgtctcccgcctcttggctcagggaccagaacttggcctagaacttgtttttgtctggaatcgtgacccaggacgaatggcagggagc

SEQ ID NO: 743803 - DNA, 120 bp, Artificial Sequence
  ENSG00000204653_2 (sequence is synthesized)
gtgcccccttccctgcagctccagaaccttgctgcccttggggaaaggcgccctgatctggttgtggaagtggcccatcccaaaataatccatgaatctggggcacaaatcctgcgccat

SEQ ID NO: 743804 - DNA, 120 bp, Artificial Sequence
  ENSG00000204653_3 (sequence is synthesized)
gccaatctcctggtggggtccccctcagctctaagtgaccagaccacagagcggcagctcttggaggcctcacagcactgggaccacgccgtgtttgtggcccgaggggccctgtggggc

SEQ ID NO: 743805 - DNA, 120 bp, Artificial Sequence
  ENSG00000204653_4 (sequence is synthesized)
acagccctgggccttgcactgtgctctacgaaggccctgtccgtgggctctgcccctttgccccgcgaaattccaacaccatggcggcggctgccctggctgcccccagcctgggcttcg

SEQ ID NO: 743806 - DNA, 120 bp, Artificial Sequence
  ENSG00000204653_5 (sequence is synthesized)
atggggtgattggggtgctcgtggctgataccagcctcacggacatgcacgtggtggatgtagagctgagcggaccccggggccccacgggccgaagctttgctgtgcacacccgcagag

SEQ ID NO: 743807 - DNA, 120 bp, Artificial Sequence
  ENSG00000204653_6 (sequence is synthesized)
agaaccctgccgagccaggcgcggtcaccggctccgccaccgtcacggccttctggcagagcctcctggcctgctgccagctcccctccaggccggggatccatctctgctgagaagcct

SEQ ID NO: 743808 - DNA, 120 bp, Artificial Sequence
  ENSG00000204653_7 (sequence is synthesized)
cctccctcccgagacaagatcatctgcctggcctctcaccaccaccatcccacccctgccctgccccacttccccagggtctcccttctgactcagtaaagatcaccgctgcctcccccc

SEQ ID NO: 743809 - DNA, 120 bp, Artificial Sequence
  ENSG00000204653_8 (sequence is synthesized)
tgccaggcaccctcaaggcacagaggctggggctcatgttgggggcacttggcctctccaggcctcgaaggcttctcctgggctgacgcgagctggggaacgggagggacggacgtggga

SEQ ID NO: 743810 - DNA, 120 bp, Artificial Sequence
  ENSG00000204653_9 (sequence is synthesized)
ccatcccaaaataatccatgaatctggggcacaaatcctgcgccatgccaatctcctgagccttcgtgtcaccatggccacacaccccgatggcttccggcttgagggacccctggctgc

SEQ ID NO: 743811 - DNA, 120 bp, Artificial Sequence
  ENSG00000204653_10 (sequence is synthesized)
cgcggtcaccggctccgccaccgtcacggccttctggcagagcctcctgggtgcggccaggcccctctcccccggccctgggctcctgtgttctgcagagcttgggggtcccgggctctc

SEQ ID NO: 743812 - DNA, 120 bp, Artificial Sequence
  ENSG00000204653_11 (sequence is synthesized)
actagttctgcagttctggttctgtatttgttgacctttctttctttctgacctttatttccttaacctctctccatgactttgaatcctggcactgtagatgtctccatttgtgcccgc

SEQ ID NO: 743813 - DNA, 120 bp, Artificial Sequence
  ENSG00000204653_12 (sequence is synthesized)
ctctgatcgagactctctctgtctctgtccacccccagggctctgtcccgctctctccgggtcttcctccaccgcccccctgccctgtcccctcctcccaccactgcctcccccaggcgt

SEQ ID NO: 743814 - DNA, 120 bp, Artificial Sequence
  ENSG00000204655_0 (sequence is synthesized)
atggcaagcttatcaagaccctctctgcccagctgcctctgctccttcctcctcctcctcctcctccaagtgtcttccagctatgcagggcagttcagagtgataggaccaagacaccct

SEQ ID NO: 743815 - DNA, 120 bp, Artificial Sequence
  ENSG00000204655_1 (sequence is synthesized)
atccgggctctggtcggggatgaagtggaattgccatgtcgcatatctcctgggaagaacgctacaggcatggaggtggggtggtaccgcccccccttctctagggtggttcatctctac

SEQ ID NO: 743816 - DNA, 120 bp, Artificial Sequence
  ENSG00000204655_2 (sequence is synthesized)
agaaatggcaaggaccaagatggagaccaggcacctgaatatcggggccggacagagctgctgaaagatgctattggtgagggaaaggtgactctcaggatccggaatgtaaggttctca

SEQ ID NO: 743817 - DNA, 120 bp, Artificial Sequence
  ENSG00000204655_3 (sequence is synthesized)
gatgaaggaggtttcacctgcttcttccgagatcattcttaccaagaggaggcagcaatggaattgaaagtagaagatcctttctactgggtgagccctggagtgctggttctcctcgcg

SEQ ID NO: 743818 - DNA, 120 bp, Artificial Sequence
  ENSG00000204655_4 (sequence is synthesized)
gaggaaaacttcgagcagagatagagaatctccaccggacttttgatccccactttctgagggtgccctgctggaagataaccctgtttgtaattgtgccggttcttggacccttggttg

SEQ ID NO: 743819 - DNA, 120 bp, Artificial Sequence
  ENSG00000204655_5 (sequence is synthesized)
ccttgatcatctgctacaactggctacatcgaagactagcagggcaattccttgaagagctactcttccacctggaagccctctctggctaaggacaggcaggtgcccctctctccatca

SEQ ID NO: 743820 - DNA, 120 bp, Artificial Sequence
  ENSG00000204655_6 (sequence is synthesized)
gaggacacctgtactggagagcaacacaggatggtctctgccatgaactggaggccaggaatctcctcactgaaaattacagtatggtaactttgcaaatggtggttgtttcttccaaga

SEQ ID NO: 743821 - DNA, 120 bp, Artificial Sequence
  ENSG00000204655_7 (sequence is synthesized)
ctccagccctgattgcgcaaaactgaaaggcatgtgaagggaaggaagaggaagagtgcaaaacattgaagagagagctgagtgagctgaagagtgaggatatgagtagccccaacccaa

SEQ ID NO: 743822 - DNA, 120 bp, Artificial Sequence
  ENSG00000204655_8 (sequence is synthesized)
agagctacgtaagttctcttctctctgttataagcagagaataaaaagccaggaaagggagacagaagcaacaagaggaagaggcgggctattgagggatcacattcccagaggaaagga

SEQ ID NO: 743823 - DNA, 120 bp, Artificial Sequence
  ENSG00000204655_9 (sequence is synthesized)
ggagctggagagcctgggtggagggaagactcctcctgggaggtagagggcaaagaagccagctgttagagacacatttacaggtggcagagaagctggaggcactcctatctgccacct

SEQ ID NO: 743824 - DNA, 120 bp, Artificial Sequence
  ENSG00000204655_10 (sequence is synthesized)
gatccattcctccttcactgcccctaagcaggaatccaaccctagctggtctcattgcccattccacagcaactgcccagtgcctcacctctcagatcaaccattgaggcaggaatggag

SEQ ID NO: 743825 - DNA, 120 bp, Artificial Sequence
  ENSG00000204655_11 (sequence is synthesized)
aaatcccttctgagtgatgtcacatcttggcaggggtggaggagagcctggttgcccagggatttgtccttggggacatctcatccatcaagttgcacactcactggcatctttgctatg

SEQ ID NO: 743826 - DNA, 120 bp, Artificial Sequence
  ENSG00000204655_12 (sequence is synthesized)
gggacattccaatttgcactttcaggaacactctgaattccaagtagaattgatttcccttcttctgtcatctaccttttctcttcattttcccatttttattacccttctttccatttc

SEQ ID NO: 743827 - DNA, 120 bp, Artificial Sequence
  ENSG00000204655_13 (sequence is synthesized)
ggcagcctactagggacctggggaagcaaaaacgaaagctgggcaacatgcctgctttagaatgttttccttctacttacacatcttccacaggtctcagaatctttccttcctctcatc

SEQ ID NO: 743828 - DNA, 120 bp, Artificial Sequence
  ENSG00000204655_14 (sequence is synthesized)
cttttctcctatcttcatatctatcagagtatccactgtttattcaacaactactacttgatggtcagacacaaacaaacaagctaggtgctaattaataaagatacgagttttggccgg

SEQ ID NO: 743829 - DNA, 120 bp, Artificial Sequence
  ENSG00000204655_15 (sequence is synthesized)
cttcgagcagagatagagaatctccaccggacttttgagtcctttggtgttctaggaccccaggttaaggaaccaaaaaagacagggcaattccttgaagagctacgaaatcccttctga

SEQ ID NO: 743830 - DNA, 86 bp, Artificial Sequence
  ENSG00000204655_16 (sequence is synthesized)
tgactcagcctcttgaatagctgagaccacaggcttgtgtcaccatgcccagatcctttctactgggtgagccctggagtgctggt

SEQ ID NO: 743831 - DNA, 120 bp, Artificial Sequence
  ENSG00000204655_17 (sequence is synthesized)
taaggaggcagtacttttctcatccaagttcatggactttctgaattttgtccccagagtcctttggtgttctaggaccccaggttaaggaaccaaaaaagacaggtgggtggggcatga

SEQ ID NO: 743832 - DNA, 120 bp, Artificial Sequence
  ENSG00000204655_18 (sequence is synthesized)
gcctgcagtacagactgagaggaaaacttcgagcagagatagagaatctccaccggacttttgtcttccacctggaagccctctctggctaaggacaggcaggtgcccctctctccatca

SEQ ID NO: 743833 - DNA, 120 bp, Artificial Sequence
  ENSG00000204655_19 (sequence is synthesized)
cacctgcttcttccgagatcattcttaccaagaggaggcagcaatggaattgaaagtagaaggattggttgcagtggcacgatcatggctcattgcagcctccacctcccaggctcaagt

SEQ ID NO: 743834 - DNA, 120 bp, Artificial Sequence
  ENSG00000204655_20 (sequence is synthesized)
cttttgtgtgagtgcctggcaagggtgacgtggggctgtttctgcgggcacagctgcagcaattaccggagtggaggcagggcccaggcagcactgccctccaagatcttcccttgggct

SEQ ID NO: 743835 - DNA, 120 bp, Artificial Sequence
  ENSG00000204655_21 (sequence is synthesized)
tattaggtattaactgttgggtggccaagaacaattattctctcaactgagatgagatccctcaacccaaacatctcagtcctgggaatgatttccataaaaatgtacacatcaataaac

SEQ ID NO: 743836 - DNA, 120 bp, Artificial Sequence
  ENSG00000204655_22 (sequence is synthesized)
agaaactcatgcttagggatgtctgttgcatcattattcagagtagcaaggaaattgggatcaaaatcaatgcctttgagtaggtaagtgacagaatgaacaatggtagccatactgtga

SEQ ID NO: 743837 - DNA, 120 bp, Artificial Sequence
  ENSG00000204657_0 (sequence is synthesized)
ttctataaaattcattcaaccaatagagcaataattgagcctacagagacaacttatcagaaaattcattcaatataccttacgagatcatccaatagataagagacaactctagaacag

SEQ ID NO: 743838 - DNA, 120 bp, Artificial Sequence
  ENSG00000204657_1 (sequence is synthesized)
cattcagaacatagtggcactcaataaatttcccctgaatgaatgaattaatgaattagtgcatattttaatcagcctcctttgccctcacccaggaagtcagaggcaccagtgtgagta

SEQ ID NO: 743839 - DNA, 120 bp, Artificial Sequence
  ENSG00000204657_2 (sequence is synthesized)
tccatctgctgtccagtacattcatggattcctcactctcactagacaatgtttgaccaggaagaacagggaatgagaaggagctgctggatggtgatgagccttggaaagggaggctgg

SEQ ID NO: 743840 - DNA, 120 bp, Artificial Sequence
  ENSG00000204657_3 (sequence is synthesized)
gcgagcagagacagaagagaaacacctacctgctgtgacctcacaaacacccaggctgagttttgataagacaggttgaatcacactggagtgacagcctcatccctccaggtacaaaca

SEQ ID NO: 743841 - DNA, 120 bp, Artificial Sequence
  ENSG00000204657_4 (sequence is synthesized)
agaacaggccatggttaaccaaagctccacaccgggcttcctccttctgggcttctctgaacacccagggctggaaaggactctcttcgtggttgtcctcacttcctacctcctaaccct

SEQ ID NO: 743842 - DNA, 120 bp, Artificial Sequence
  ENSG00000204657_5 (sequence is synthesized)
agtgggcaacacactcatcatcctgctgtctgcgctggaccccaagctccactctccaatgtactttttcctctccaacctctccttcttggacctctgtttcaccacgagttgtgttcc

SEQ ID NO: 743843 - DNA, 120 bp, Artificial Sequence
  ENSG00000204657_6 (sequence is synthesized)
tcctgtccctggggacaactgagtgcatcctcttgacagtgatggcttttgatcgctacgtggctgtctgccagcccctccactatgccaccatcatccacccccgcctgtgctggcagc

SEQ ID NO: 743844 - DNA, 120 bp, Artificial Sequence
  ENSG00000204657_7 (sequence is synthesized)
tggcatctgtggcctgggtcattgggctagtggagtcagtggtccagacaccatccaccctgcacctgcccttctgccccgatcggcaggtggatgattttgtctgtgaggtcccagctc

SEQ ID NO: 743845 - DNA, 120 bp, Artificial Sequence
  ENSG00000204657_8 (sequence is synthesized)
taattcgactctcctgtgaagacacctcctacaatgagatccaggtggctgttgccagtgtcttcatcttggttgtgcctctcagcctcatccttgtctcttacggagccattacctggg

SEQ ID NO: 743846 - DNA, 120 bp, Artificial Sequence
  ENSG00000204657_9 (sequence is synthesized)
cagtgctgaggattaactctgcaaaagggcggaggaaagcttttgggacctgctcctcccatctcactgtggtcaccctcttctacagctcagtcattgctgtctacctccagcccaaaa

SEQ ID NO: 743847 - DNA, 120 bp, Artificial Sequence
  ENSG00000204657_10 (sequence is synthesized)
atccctatgcccaagagaggggcaagttctttggtctcttctatgcagtgggcactccttcacttaaccctctcatatacaccctgaggaacaaggaggtaaccagggcattcaggagat

SEQ ID NO: 743848 - DNA, 120 bp, Artificial Sequence
  ENSG00000204657_11 (sequence is synthesized)
tgctggggaaggaaatggggctcacacaaagctgagggagagctgcttaatgtgctttaaaagagaggagattctatgtgcttttatcagaaagtttgagttccctgcccctctgccttc

SEQ ID NO: 743849 - DNA, 120 bp, Artificial Sequence
  ENSG00000204657_12 (sequence is synthesized)
gataatctgagccagctccagctcatcacacacatgtgtgcttagaaaagtgccagatggtcagcattagcaatccctattgtgaccagagatgcagttgcccattcaaggatgcccatt

SEQ ID NO: 743850 - DNA, 120 bp, Artificial Sequence
  ENSG00000204657_13 (sequence is synthesized)
cctttttatttttttgtttcttcctgatgtacaagtggaggctgggcaccagttaagagctctgtcatggggaattgctggtaccagaagagatttttatttgattgaaggaagtcagag

SEQ ID NO: 743851 - DNA, 120 bp, Artificial Sequence
  ENSG00000204657_14 (sequence is synthesized)
agggaggtatctttatgcgaaaaattataggcatcaagtatattttatatttttttctactttaagtcttcgcctccatagtcatgttcctacctttatcacttccatttttaattcccc

SEQ ID NO: 743852 - DNA, 120 bp, Artificial Sequence
  ENSG00000204657_15 (sequence is synthesized)
tcccttgccatatccccactattccttcacctccaattctaattcctaccatatcttctttgcttctccctcatgtttttcccacttcactatatgtctgttttgtattctcattctatt

SEQ ID NO: 743853 - DNA, 120 bp, Artificial Sequence
  ENSG00000204657_16 (sequence is synthesized)
ttattcctcaaataacagcaaaagagaaggggaagctgaagcccagctaagttcggaaactcacccaagaacacacagtgtccacagcatcagaactaaaatccaggccccataattttc

SEQ ID NO: 743854 - DNA, 120 bp, Artificial Sequence
  ENSG00000204657_17 (sequence is synthesized)
agtcaggcaactctcaaatacacactgttgctttcacaccataatcaaatatcccagtatttcaggcttgagccttacaaaggaaacttagcttcttcagtcctatttcttctcttacaa

SEQ ID NO: 743855 - DNA, 120 bp, Artificial Sequence
  ENSG00000204657_18 (sequence is synthesized)
tgcccacaaatcgcaggtaaaggagcagccaaaaagacacaaaaatatcttcatgtttaggctggcacattgtggaccttggtgtcatctaccggccaaatatggtattgcatgtgacat

SEQ ID NO: 743856 - DNA, 120 bp, Artificial Sequence
  ENSG00000204657_19 (sequence is synthesized)
cccagacttctgctccagggtcatccgaactgtactttgctcaaagacatagatatggttatgatactataagcatttatgtaattgttatgttaacccaagtaacacttaaagtacaga

SEQ ID NO: 743857 - DNA, 120 bp, Artificial Sequence
  ENSG00000204657_20 (sequence is synthesized)
tgctccttgacttataatgatgttacctcccaaaaaacctatcatatactgaaaatattgtaagttgaatatgcatttcatacacctaacctaccaaacatcatagcttagcctagccta

SEQ ID NO: 743858 - DNA, 120 bp, Artificial Sequence
  ENSG00000204657_21 (sequence is synthesized)
ccttaaacatactcagaacacttacattagcctacagttcagcaaaatcctcaatacaaagtctattttataataaagttttgaatatctcatgtaatttactgaatactgtactaaaag

SEQ ID NO: 743859 - DNA, 120 bp, Artificial Sequence
  ENSG00000204657_22 (sequence is synthesized)
tgaaaaaacagaatggttatattggtactcaaagtacggtttctactgaatgtatctcttttgcattattataaagtcaaaaaatggtcaaagtcaggaaccccctgcaatttacacata

SEQ ID NO: 743860 - DNA, 120 bp, Artificial Sequence
  ENSG00000204657_23 (sequence is synthesized)
ttgacttatttaacccttataacaacactatgaagcagataatattattatcctttttcagaggtaaaaactaaaacacagaatttatgttaccacttgcaaatgtgcaagacaggattt

SEQ ID NO: 743861 - DNA, 120 bp, Artificial Sequence
  ENSG00000204657_24 (sequence is synthesized)
gaacccaggaaaactggctccagactccttgctcttaaccttgccttttggtaaaaataatgcctcccaggcccaggtgaaaagcttcaacttctcaacaagctttgaggaaatcatttc

SEQ ID NO: 743862 - DNA, 120 bp, Artificial Sequence
  ENSG00000204657_25 (sequence is synthesized)
aatctaaaactatatctaaatgatcccccagccgaaggggtttcacttccttaaaataagagtttttcaaatacttcaaagcataagaaacaacagaacaataaaacttttggaaaaagt

SEQ ID NO: 743863 - DNA, 120 bp, Artificial Sequence
  ENSG00000204659_0 (sequence is synthesized)
agccctgggacagcagctcagcaactccaccccatcttccaggtgaggcacaacatacagtgaggactaacggggaaacatcctccgagaagatacaatctcaagggtgggcctggatgt

SEQ ID NO: 743864 - DNA, 120 bp, Artificial Sequence
  ENSG00000204659_1 (sequence is synthesized)
gggcttccagagaccatctccctgaaccagatcttggggatgcagcgccccctggctcgccttcatcattctggacatccgggctcccgagacaagagcgcagcacgagtcgccagcgct

SEQ ID NO: 743865 - DNA, 120 bp, Artificial Sequence
  ENSG00000204659_2 (sequence is synthesized)
cccgaggctccccttcgagcacctgcgtgccctacaaggtccacgccctggcaaccttcgagtgctcggctacgagccatgccagccgcctgtggcagacgctgcagcagttttgggccg

SEQ ID NO: 743866 - DNA, 120 bp, Artificial Sequence
  ENSG00000204659_3 (sequence is synthesized)
gcggccgccactgcgccgcatgccctccctgtccaccttctacctgctggaccacaacacgcgccaggccgagctgggcctcgcctacggcgcgccgtgcatgcgcctcagcaaccaggc

SEQ ID NO: 743867 - DNA, 120 bp, Artificial Sequence
  ENSG00000204659_4 (sequence is synthesized)
cttcgtgttccgcggcgggcggtggaccactgagagccagctggcgaggacgcggtcgccgctgctctcgcggaccgcctggggctggaaggcgcaggtgcagcggtccaaaagccaagt

SEQ ID NO: 743868 - DNA, 120 bp, Artificial Sequence
  ENSG00000204659_5 (sequence is synthesized)
gttgctggaggagaacaactacctgaagctgcagcaggaactgctcatagacatgctgactgagaccatggcgcgcatgcacttgctggagaagcagcgcaaccccgaggtgatcccgac

SEQ ID NO: 743869 - DNA, 120 bp, Artificial Sequence
  ENSG00000204659_6 (sequence is synthesized)
ggctgcggcgcgcgccgggcagaggaagatgcgcaagcgcgcaggcgccagcgcgggcgtgctcatgatccagccgtgcgctctggactcgcagtgacgcaataaaggccgcgctacgca

SEQ ID NO: 743870 - DNA, 120 bp, Artificial Sequence
  ENSG00000204661_0 (sequence is synthesized)
ggccccaataacttgtcccagaggggatgcccagggctcagttgcctgaggacagcagtgcagttgacatggatattctctttcctctggacagtgttattggtacagagctgtgcccca

SEQ ID NO: 743871 - DNA, 120 bp, Artificial Sequence
  ENSG00000204661_1 (sequence is synthesized)
gccccattccccagatcatccatttcgtcctctttgttgtgttcagcctggtgatcctgattatcttacgcctctacattcccagggagccgtcctcagtgcctcccagagaggaggaca

SEQ ID NO: 743872 - DNA, 120 bp, Artificial Sequence
  ENSG00000204661_2 (sequence is synthesized)
gcgagaatgatcaagctgaagtgggggaatggctcaggatcggaaataaatatatcactttgaaagattacagaattctcttgaaagaactggagaaccttgagatctacactttcctgt

SEQ ID NO: 743873 - DNA, 120 bp, Artificial Sequence
  ENSG00000204661_3 (sequence is synthesized)
cgaaaaagtgcctgaagaagctctctagggagggcagctcccatcaccttccacgccaagtccgcccagggccagtgtacaaaccagcacctgctaggaaccaccggccacgtggggggc

SEQ ID NO: 743874 - DNA, 120 bp, Artificial Sequence
  ENSG00000204661_4 (sequence is synthesized)
gtgggaaagcttctcccaccagcttccatgtgtccccacgggctcccctggctcctctggcctccatgccgtcatcagtcccgaagacctccgtagagtccttggggtctccatcatccc

SEQ ID NO: 743875 - DNA, 120 bp, Artificial Sequence
  ENSG00000204661_5 (sequence is synthesized)
tccaagccacgagagcctctgtgtcccctgaagcacccttcacaccagccacctgcgagcaccctatcaccaaacccgaccagctccacagaatccttgggggagaccccacatgcaggc

SEQ ID NO: 743876 - DNA, 120 bp, Artificial Sequence
  ENSG00000204661_6 (sequence is synthesized)
aggtggaggcaggggtcccgctttcctcagcctggatgtgccaacgctgctggacgcataagacaccaaaatcccagacactcccatggacaccgaatatccgacatccacgaacaattg

SEQ ID NO: 743877 - DNA, 62 bp, Artificial Sequence
  ENSG00000204661_7 (sequence is synthesized)
ctcccatggacaccgaatatccgacatccacgaacaattgggaatctcctgaggacaacttg

SEQ ID NO: 743878 - DNA, 120 bp, Artificial Sequence
  ENSG00000204661_8 (sequence is synthesized)
ctcccgagtaactgggattacaggcttgtgccaccgcacccagctaatttttgtaattttagtcgagagaaggtgtcaccatgttagccaggcttgtcttgaactcctgaccttgagata

SEQ ID NO: 743879 - DNA, 67 bp, Artificial Sequence
  ENSG00000204661_9 (sequence is synthesized)
gacggctggatgaatcataaattgtaaacctgaataaaatgctgcaacctccaatgagaggaaaata

SEQ ID NO: 743880 - DNA, 120 bp, Artificial Sequence
  ENSG00000204661_10 (sequence is synthesized)
agttgcctgaggacagcagtgcagttgacatggatattctctttcctctggacagtgttattgggagccgtcctcagtgcctcccagagaggaggacagcgagaatgtaaggagccctca

SEQ ID NO: 743881 - DNA, 120 bp, Artificial Sequence
  ENSG00000204661_11 (sequence is synthesized)
gcccacacccagcagagaatgcttctatttttcctgctctcttttccacttttccacatcagccagaggcgctcctgtgatgggaactctcatcatccctctagggacagcagggcaggc

SEQ ID NO: 743882 - DNA, 120 bp, Artificial Sequence
  ENSG00000204661_12 (sequence is synthesized)
tcagcggcgaggacccggtcatgagaggggtgaggtctctgtggaaggacaggccctgagcccgggctcatcagccgccttcctgggcaggtgcctcggggcccagcctctgtgtgaggt

SEQ ID NO: 743883 - DNA, 120 bp, Artificial Sequence
  ENSG00000204661_13 (sequence is synthesized)
gctctgggggctgtgctgagcccctgagagcctcccacctgagactggagtcgcccctggcctcctcggaagcagaatcctccctgccagctcagaggcacctgcagacccaagagtgtg

SEQ ID NO: 743884 - DNA, 120 bp, Artificial Sequence
  ENSG00000204661_14 (sequence is synthesized)
ggcctcacatagaaaacccctccatgctttccagagaaggaaaccagaaaaaggttattacgcactttagaaaccagtgaaagagaagcacacaggctccatgagctgggcggagaaagt

SEQ ID NO: 743885 - DNA, 120 bp, Artificial Sequence
  ENSG00000204661_15 (sequence is synthesized)
aaatatatcactttgaaaggtaaggctctgagggtcccagaagccccagagatgacagcttcacctgtccctaggaacaagcaccaagtctcctaggaagtcatctgcagaggcctgatg

SEQ ID NO: 743886 - DNA, 120 bp, Artificial Sequence
  ENSG00000204661_16 (sequence is synthesized)
gggaagctcctggtagggcaattggaacccgggatccatctccgattccctgctgagttgaagccatggggtccagggagcgggtgttgcccaggaggggaccagtgaccacctggacgt

SEQ ID NO: 743887 - DNA, 120 bp, Artificial Sequence
  ENSG00000204661_17 (sequence is synthesized)
gcaggaggggatgcaggtccatgtgggcagctgtttaacatggctgagtcctctttgagactgcctctgtcctctctccccaggaggttgtcgtgacccccatgatggagcgtgtcggga

SEQ ID NO: 743888 - DNA, 120 bp, Artificial Sequence
  ENSG00000204661_18 (sequence is synthesized)
agcactttggagaggacaaagtgctgcccaccgggcacctggctatcactcctggggccctgtggccttggacagggatgctggggctccagggtctaatccccaatcccggggtctccc

SEQ ID NO: 743889 - DNA, 120 bp, Artificial Sequence
  ENSG00000204661_19 (sequence is synthesized)
ctaagggcacacgcaatcggcctcctgtaagtcccagttccctccctcgccaccataacccatctcctgctttccagattacagaattctcttgaaagaactggagaaccttgagatcta

SEQ ID NO: 743890 - DNA, 120 bp, Artificial Sequence
  ENSG00000204661_20 (sequence is synthesized)
tgtcatccctgagctcctcccagccaccagagcctttgcgtcccctgaagcacccttcacacaagccacgtgggcgttcccttccccgacgacggaatcctggctgggtgtcctggtccg

SEQ ID NO: 743891 - DNA, 120 bp, Artificial Sequence
  ENSG00000204661_21 (sequence is synthesized)
actccatgcaggctgattccgaaactgacaccataatatgcccaatgtgcaaggcccctgagcgctcctgtccacacacctggtgggtgccttctagccctcgagtgatccgaggcgttg

SEQ ID NO: 743892 - DNA, 120 bp, Artificial Sequence
  ENSG00000204661_22 (sequence is synthesized)
gtcgctgcagtgatcccaacctgggcctctcctggaggcaggaggctgctagagcctggtgccactgcacctcctcacagttcccattcaagcaccctaatcttcccacccacctaccaa

SEQ ID NO: 743893 - DNA, 120 bp, Artificial Sequence
  ENSG00000204661_23 (sequence is synthesized)
agacggagatggggtccaaacctccagtccctggagcccgtaaatctccttgggaggcttggcgcccacagagacctcttccacagcgctgcacacacagatcttccttcctagaggatc

SEQ ID NO: 743894 - DNA, 120 bp, Artificial Sequence
  ENSG00000204661_24 (sequence is synthesized)
tgaactcacttagaaaactgccagcacaggagggataacatcagctgtgccccccactggagaacccagagactctgggtcattgtcaacattgcccccagaatgggctctctgctgggg

SEQ ID NO: 743895 - DNA, 120 bp, Artificial Sequence
  ENSG00000204661_25 (sequence is synthesized)
aagatgctcaggaattgctgctcttttgcaatgccagtctctcctaacagaactgcagattccacgtgtagacctgcaaacttctgttctctgcagttccctgagtcacagtttacacaa

SEQ ID NO: 743896 - DNA, 120 bp, Artificial Sequence
  ENSG00000204669_0 (sequence is synthesized)
gctttcagttgtaacggacttcatcacatcacaaattgtactcgttctcatccttttaagaaagttcagacccaggaaaatttccatagtaccttaatgaaaaagatagaaatcagtggg

SEQ ID NO: 743897 - DNA, 120 bp, Artificial Sequence
  ENSG00000204669_1 (sequence is synthesized)
acgtgtctttcctttcatctccttttcggcttggaaatcagaatgagaaggattgtttttgctggtgttatcttattccgcctcttaggtgttatcttattccgcctcttaggtgttatc

SEQ ID NO: 743898 - DNA, 120 bp, Artificial Sequence
  ENSG00000204669_2 (sequence is synthesized)
ttattcggccgcttaggtgacctgggaacctgccagacaaaacctggtcagtactggaaagaagaggtccacattcaagatgttggaggtttgatttgcagagcatgcaatctttcactg

SEQ ID NO: 743899 - DNA, 120 bp, Artificial Sequence
  ENSG00000204669_3 (sequence is synthesized)
cccttccatggatgtcttttagacctgggaacctgccaggcagaacctggtcagtactgtaaagaagaggtccacattcaaggtggcattcaatggtattcagtcaaaggctgcacaaag

SEQ ID NO: 743900 - DNA, 120 bp, Artificial Sequence
  ENSG00000204669_4 (sequence is synthesized)
aacacatcagagtgcttcaagagtactctcgtcaagagaattctgcaactgcatgaacttgtaactactcactgctgcaatcattctttgtgcaatttctgagtcagtggcccatatcta

SEQ ID NO: 743901 - DNA, 120 bp, Artificial Sequence
  ENSG00000204669_5 (sequence is synthesized)
aaatgcttggcagatcaatcagtctcgaagcctgacctggctatcacaaaatgatggctattgtcaattagcccacttcagaaacctcagacccttgtaggtagaaggaattttgatctg

SEQ ID NO: 743902 - DNA, 120 bp, Artificial Sequence
  ENSG00000204669_6 (sequence is synthesized)
ctgagaaatagccctttcaacaccatttctctcctctcctccttctgcttaatttaccttcctaccacaaggctacaaagaaggaaaaatgttagtgattctccaagtcaaactaggcat

SEQ ID NO: 743903 - DNA, 120 bp, Artificial Sequence
  ENSG00000204669_7 (sequence is synthesized)
gtcacctctaactactttcatttccctcaataattccatactccaaaatatggttacaaatgtttcacaagacagcaagtgacctgagaatattcatttggtttccaaagcaaactgcct

SEQ ID NO: 743904 - DNA, 120 bp, Artificial Sequence
  ENSG00000204669_8 (sequence is synthesized)
tgctcctttggggtgatttatggtatagaagaaactgacttaacatatactatagggaaaaaataagccatgaatcagcaagccaggcctgcgggaaaagtatgaacccaaacaggaaag

SEQ ID NO: 743905 - DNA, 120 bp, Artificial Sequence
  ENSG00000204669_9 (sequence is synthesized)
ggctgaggcaggtggtagggctggcacttatttcttccatctgcctcagagtttatccaaattttgaattttccgtaccttaaccatgcctaaatgctttggcttgttcaattttggcag

SEQ ID NO: 743906 - DNA, 120 bp, Artificial Sequence
  ENSG00000204669_10 (sequence is synthesized)
attaagcagttcaaggtaagcagagaagtaagttcccaaccacaaggaatttaaaaggagtaggaacgtactttgaactacatttcccattttgcgatcattacgtcttctattacaatg

SEQ ID NO: 743907 - DNA, 120 bp, Artificial Sequence
  ENSG00000204669_11 (sequence is synthesized)
ccctactttggcagcatgaagagtactgcattaatttaatttaatttaaaatttaatttaaaactgtctttctctgtattttcaggagtttgaaaattcaaaaaataaataataaatgtc

SEQ ID NO: 743908 - DNA, 120 bp, Artificial Sequence
  ENSG00000204669_12 (sequence is synthesized)
agttgtaacggacttcatcacatcacaaattgtactcgttctcatccttttaagaaagttcagacccaggaaaatttccatagtaccttaatgaaaaagatagtagagacggggtttcac

SEQ ID NO: 743909 - DNA, 120 bp, Artificial Sequence
  ENSG00000204669_13 (sequence is synthesized)
ggcgatctgcccaccttggcctcccaaagcgttgggaatacaggcgtgagccactgcgtccagccatatggtgacttttttataaagacagaaatcagtgggacgtgtctttcctttcat

SEQ ID NO: 743910 - DNA, 120 bp, Artificial Sequence
  ENSG00000204671_0 (sequence is synthesized)
catctggctccagaagcccccactgaagctggccttgctctctctcgccatggcctctcactcaggcccctcgacgtctgtgctctttctgttctgctgcctgggaggctggctggcctc

SEQ ID NO: 743911 - DNA, 120 bp, Artificial Sequence
  ENSG00000204671_1 (sequence is synthesized)
ccacacgttgcccgtccgtttactacgaccaagtgatgatgtacagaaaatagtcgaggaattacagtccctctcgaagatgcttttgaaagatgtggaggaagagaagggcgtgctcgt

SEQ ID NO: 743912 - DNA, 120 bp, Artificial Sequence
  ENSG00000204671_2 (sequence is synthesized)
gtcccagaattacacgctgccgtgtctcagccctgacgcccagccgccaaacaacatccacagcccagccatccgggcatatctcaagacaatcagacagctagacaacaaatctgttat

SEQ ID NO: 743913 - DNA, 120 bp, Artificial Sequence
  ENSG00000204671_3 (sequence is synthesized)
taaacgcttcatcctgactatttctcaacagttttcagagtgcatggacctcgcactaaaatcattgacctctggagcccaacaggccaccacttaaggccatctcttcctttcggattg

SEQ ID NO: 743914 - DNA, 120 bp, Artificial Sequence
  ENSG00000204671_4 (sequence is synthesized)
gcaggaacttaaggagccttaaaaagatgaccgacagctaagtgtgggaactctgccgtgattccttaagtacatttttccaatgaataatctcagggacccctcatatgggctagtccc

SEQ ID NO: 743915 - DNA, 120 bp, Artificial Sequence
  ENSG00000204671_5 (sequence is synthesized)
gggagggctgagatgtgaatttgtgaattaccttgaaaaacattaggttattgttattagtcttggtatttatggaatgcttttcttctgcaggcttaagtcttacttattataccctcg

SEQ ID NO: 743916 - DNA, 120 bp, Artificial Sequence
  ENSG00000204671_6 (sequence is synthesized)
tgagggtgggaggtggcagctatgttaatttattgatatttattgtactaagagttgtcaatgctccctgggggagccctcggaatctatttaataaattatattgaatttttctcataa

SEQ ID NO: 743917 - DNA, 120 bp, Artificial Sequence
  ENSG00000204673_0 (sequence is synthesized)
ggcatggcctaagccggtcagctaaggccatgttaatacggggctgtcccatctctctgcggggcgcgacagctggaagagccgaacggataagagaagaggagggcgcggatggcgtcg

SEQ ID NO: 743918 - DNA, 120 bp, Artificial Sequence
  ENSG00000204673_1 (sequence is synthesized)
agagaagaggagggcgcggatggcgtcggggcgccccgaggagctgtgggaggccgtggtgggggccgctgagcgcttccgggcccggactggcacggagctggtgctgctgaccgcggc

SEQ ID NO: 743919 - DNA, 120 bp, Artificial Sequence
  ENSG00000204673_2 (sequence is synthesized)
tgtgcctatgctgcccatggtcgaggagccctggcggaggcagcgcgccgttgcctccacgacatcgcactggcccacagggctgccactgctgctcggcctcctgcgcccccaccagca

SEQ ID NO: 743920 - DNA, 120 bp, Artificial Sequence
  ENSG00000204673_3 (sequence is synthesized)
ccacagccacccagtcccacacccagcccaccccggcctaccctggccagagaggacaacgaggaggacgaggatgagcccacagagacagagacctccggggagcagctgggcattagt

SEQ ID NO: 743921 - DNA, 120 bp, Artificial Sequence
  ENSG00000204673_4 (sequence is synthesized)
gataatggagggctctttgtgatggatgaggacgccaccctccaggaccttccccccttctgtgagtcagaccccgagagtacagatgatggcagcctgagcgaggagacccccgccggc

SEQ ID NO: 743922 - DNA, 120 bp, Artificial Sequence
  ENSG00000204673_5 (sequence is synthesized)
ccccccacctgctcagtgcccccagcctcagccctacccacacagcagtacgccaagtccctgcctgtgtctgtgcccgtctggggcttcaaggagaagaggacagaggcgcggtcatca

SEQ ID NO: 743923 - DNA, 120 bp, Artificial Sequence
  ENSG00000204673_6 (sequence is synthesized)
gatgaggagaatgggccgccctcttcgcccgacctggaccgcatcgcggcgagcatgcgcgcgctggtgctgcgagaggccgaggacacccaggtcttcggggacctgccacggccgcgg

SEQ ID NO: 743924 - DNA, 120 bp, Artificial Sequence
  ENSG00000204673_7 (sequence is synthesized)
tcccacactacgcccccgccccactcccggggcctgctaatctgaggccgatccgggaccggcctccttgcgtctcccattcccaagattgtcccgcctctgccaatccccgccgtcctt

SEQ ID NO: 743925 - DNA, 120 bp, Artificial Sequence
  ENSG00000204673_8 (sequence is synthesized)
ccagcccacgacctgccgcgccgaggagcggcatctgtcccgtttcccgattgggtctgtcgtctctctccgcctagcgacagattccttctattaagggattggctcgctgagttctaa

SEQ ID NO: 743926 - DNA, 120 bp, Artificial Sequence
  ENSG00000204673_9 (sequence is synthesized)
gctctaaatgggtcaactcctttgttttccgcctagcgacaagggatttgctcgcacggcattggctccatcccctagtcgctggacagctctttttttgattggctcaaatcctgtaaa

SEQ ID NO: 743927 - DNA, 120 bp, Artificial Sequence
  ENSG00000204673_10 (sequence is synthesized)
gggcttgaccagtctctacatagtcaccgtccgcttttcctgagttctccctcccaattggctccagcttcctgggggcgtggccaagccctcctcttcccagaattggcccggggcctt

SEQ ID NO: 743928 - DNA, 120 bp, Artificial Sequence
  ENSG00000204673_11 (sequence is synthesized)
caatttacgttctttacactacggggactggggtcgtctttgcccacgtcccgacaacttgttccctgaccccctcagggatggccccaaactgtccctgcctctggcaccccctttcat

SEQ ID NO: 743929 - DNA, 120 bp, Artificial Sequence
  ENSG00000204673_12 (sequence is synthesized)
tggttccatccatccccacaacagcctgccaatcgaagcccgtccctgcatccaggatggtaccagctcccgcccctcgccccccacctccacaggtgccttaaagggccctcgtccacc

SEQ ID NO: 743930 - DNA, 120 bp, Artificial Sequence
  ENSG00000204673_13 (sequence is synthesized)
caaggtggggggcaggggccctcactctccggccctggtgtgggggagagagtgaggggttgggggatcggcagttgggaggggcgctctgagattaaagagttttacctctgagataaa

SEQ ID NO: 743931 - DNA, 120 bp, Artificial Sequence
  ENSG00000204673_14 (sequence is synthesized)
atttcctgttttcttcctagaccagtgggtcctccctggaccccgggcgaggttgggaggtctcggggcagctgagcgtggccccaggcgctcaccccatggctaccgcgttcatgctca

SEQ ID NO: 743932 - DNA, 120 bp, Artificial Sequence
  ENSG00000204673_15 (sequence is synthesized)
ggttcctcacatcttggggtgtggggtactaaaatttcgacaggaggggtggttccacccctctcctccttagctcttttccctcctccctgcatccaaagaggacagccacatcgtgct

SEQ ID NO: 743933 - DNA, 120 bp, Artificial Sequence
  ENSG00000204673_16 (sequence is synthesized)
ccccctcctgtggggaacacgtctcactttcctctaatctctccctgatcttacacgaaactcgtctatcggggcgggttcttcctccatctctcagctccttggaggaaacaggacctc

SEQ ID NO: 743934 - DNA, 120 bp, Artificial Sequence
  ENSG00000204673_17 (sequence is synthesized)
gggcgcgacagctggaagagccgaacggataagagaagaggaggtgagaggagctgtacaccacaagaggcactgagggactcaggataacgggatgaagccgtcagtgcccccagaaac

SEQ ID NO: 743935 - DNA, 120 bp, Artificial Sequence
  ENSG00000204673_18 (sequence is synthesized)
gaagcggccccggacgaatttctgagtcaccgtcgcgagaaagcgggctgagccgccattttgaagcctggcaaaccgaagcaagaaatgctgccgtgttggatctttgccagccttcgt

SEQ ID NO: 743936 - DNA, 120 bp, Artificial Sequence
  ENSG00000204673_19 (sequence is synthesized)
ctggattagaatatctgccctcctaaaggcaggcaggatggcggtcaggatttagaacaggccccggatctagactttctgagtccaggtcccagccctgcctcttccagttgtggccct

SEQ ID NO: 743937 - DNA, 120 bp, Artificial Sequence
  ENSG00000204673_20 (sequence is synthesized)
tcaagatgctgactgcccctgggcctgagtttgcaactgtaaaatggggtgaactgtaactaaagctcctgtctcatagtgtaggtgaaagggtgggatgagaaggttgatcccatcttg

SEQ ID NO: 743938 - DNA, 120 bp, Artificial Sequence
  ENSG00000204673_21 (sequence is synthesized)
ggtccttgcgtggcttctgggaggtggtggataaacctcttccttcccttggggctttgaactccctgagtgagtcagataggtgagatgccaggtgtggaatcccagcactgaataggt

SEQ ID NO: 743939 - DNA, 120 bp, Artificial Sequence
  ENSG00000204673_22 (sequence is synthesized)
gctcagcaaacaccaacatcaatgatcgtgagtcataaaaggcctgcaaatttcattcagactccagactccctgctcccttcaccctggtgggctggaccacagctgtgcctgaatccg

SEQ ID NO: 743940 - DNA, 120 bp, Artificial Sequence
  ENSG00000204673_23 (sequence is synthesized)
tgcagtggcggtgtgcttactgcctcccggaagagcgtcttccgcagcccagcagctctggctcaaccacgctggttaatggggaagaaaatgaggcacagagagggccagtgagccatc

SEQ ID NO: 743941 - DNA, 120 bp, Artificial Sequence
  ENSG00000204673_24 (sequence is synthesized)
taaggtcacacagcaggtttgagacagagtcagggcaaggacccagcccccctgccctcgctcttctcacccagtaaggagacgcaccctgcattgtctgcttagggccgacctgtcctg

SEQ ID NO: 743942 - DNA, 120 bp, Artificial Sequence
  ENSG00000204673_25 (sequence is synthesized)
caaacacaaatccctgaccttgggggaattcacagtctgatgcaggaggcagccaggttacagctgtcacaagctcaggtgacatgaatgctcatggaggaagcccagggcatcggatgg

SEQ ID NO: 743943 - DNA, 120 bp, Artificial Sequence
  ENSG00000204673_26 (sequence is synthesized)
gctcctgaagtcatctgatgcaccctgggggatcagggacaacagaggacctgccagaacagtcttgtaggaaaagccgtgtggatttcccagcacagagagcagcgccagcaccatttc

SEQ ID NO: 743944 - DNA, 120 bp, Artificial Sequence
  ENSG00000204673_27 (sequence is synthesized)
agccccgactctctgaggcctcagtcatagaaccagccagttccctctggaaggaagtgtgctgggaaggtggccactcagacagtgtgggaccccctatggagcagactggctggatct

SEQ ID NO: 743945 - DNA, 120 bp, Artificial Sequence
  ENSG00000204673_28 (sequence is synthesized)
atgggcgagggaaagtttcttccaccctaggatgagtgaaaggttggtggggaatggagcacaagtcatcaaggtcagggaccacgttttctgaaggcctcgggcctcagaggctctgga

SEQ ID NO: 743946 - DNA, 120 bp, Artificial Sequence
  ENSG00000204673_29 (sequence is synthesized)
aggccgtggaggcaggatggcccaggagctggggatggccagaacacctagagcctccagggcctgccctgaggactatggcgaggagtagcatcagctccgggtgctgaaggaaccccc

SEQ ID NO: 743947 - DNA, 120 bp, Artificial Sequence
  ENSG00000204673_30 (sequence is synthesized)
tgggccttgtgcaggacactcttgacgggatggctgggcgacggagcagggtggcatcatccatcaaattcaacacaagccccacgtggaattctaaattttctagacaccatgttaaaa

SEQ ID NO: 743948 - DNA, 120 bp, Artificial Sequence
  ENSG00000204673_31 (sequence is synthesized)
ttctagacaccatgttaaaagagtaaaaaaagcagatgaaattcctttttttttttttttttgcccaggctggcttcgaactcttgggctcggtgatccgcctgcctcggcctcccaaag

SEQ ID NO: 743949 - DNA, 120 bp, Artificial Sequence
  ENSG00000204673_32 (sequence is synthesized)
gccaccacgcccggctcgttcggctttattgtactcagtcttcagaacccagtgcaggttttattgttagaggcctctctgctaggactctctgctaggactccctgcctttccagtact

SEQ ID NO: 743950 - DNA, 120 bp, Artificial Sequence
  ENSG00000204673_33 (sequence is synthesized)
ccctgttcacatgtggctggcggctcccacagaggccagggcagggccaaaggggaaggagtacagtgacttggggcaggaggaatgggttggggcagaggacgtcgccagggtctgggc

SEQ ID NO: 743951 - DNA, 120 bp, Artificial Sequence
  ENSG00000204673_34 (sequence is synthesized)
tttggggaggacacacagcaccgctgggacaaggtgggtggagggtggtgagtgccatccaggggacgggcgggcactctgagtgggtggcgatgatgtaggccgccaagcctcagcccc

SEQ ID NO: 743952 - DNA, 120 bp, Artificial Sequence
  ENSG00000204673_35 (sequence is synthesized)
cttcttcaggtcccactgctgaccgccagaccaaactcctacagctgccgcctgcatcccagaccgcctgcatcccgctcggagcgggtccgagccctgctccctcccagcgcacctttt

SEQ ID NO: 743953 - DNA, 120 bp, Artificial Sequence
  ENSG00000204673_36 (sequence is synthesized)
attgccccgggaccaaggcggggagaatggtccagcccgcgttcggatgctgacgtgcgttccacagggggcagggctcaaggagtcgcctgagccgggggggcggggccatgggaggtt

SEQ ID NO: 743954 - DNA, 120 bp, Artificial Sequence
  ENSG00000204673_37 (sequence is synthesized)
cttccctggggcggtggacgggagggtgacggcgcgtttataagagatcggtgtttgccaaggccgtgccggattctcgagagccaaggcctgagagaagagctgatcactagacggggc

SEQ ID NO: 743955 - DNA, 120 bp, Artificial Sequence
  ENSG00000204673_38 (sequence is synthesized)
gtttcgcatacactgaagcgagggaatgcgtcctcagtgcttaccctgtagccggctccttccatagtcgccgccgaaggccccactgccccgcctcctccttttcctagtcagcgtgtt

SEQ ID NO: 743956 - DNA, 120 bp, Artificial Sequence
  ENSG00000204673_39 (sequence is synthesized)
gtcacttccggagaaaacagttcccctccgggccggacagtggtagcggcccgacccgttctagagaaggagcgggtgaaaccatttttcagaagggggttattccactggaacctcgag

SEQ ID NO: 743957 - DNA, 120 bp, Artificial Sequence
  ENSG00000204673_40 (sequence is synthesized)
ggtggatcggagtcacgtggcgcagacgctgaaggtggatccggctacggagagtgcgcaggcgcagtgttcgccctctcgccacgaagtaaacaagtgggagggtctgagagctgcacc

SEQ ID NO: 743958 - DNA, 120 bp, Artificial Sequence
  ENSG00000204673_41 (sequence is synthesized)
acctggggcaagcacgccttgaaacgcccacttccttctccatattgtatactggaattgaagccaaggaggtaccattttgctcgagggcatggcctaagccggtcagctaaggccatg

SEQ ID NO: 743959 - DNA, 120 bp, Artificial Sequence
  ENSG00000204673_42 (sequence is synthesized)
atttcctctacttttgtcgaagaagtttattgtgggtcagggacgtcaggtcgcttgccttcgtttactgtggtcatgattgagcatatgaggacggccattattgttgggggcaaatgg

SEQ ID NO: 743960 - DNA, 120 bp, Artificial Sequence
  ENSG00000204673_43 (sequence is synthesized)
aaatgctctaggcggggccatttttcttaggggcaagctgtcgtcacccttgtcaactggttcggatgaagcccctgtggccgccatcttgatctcgggcggccccgataagggaggcgg

SEQ ID NO: 743961 - DNA, 120 bp, Artificial Sequence
  ENSG00000204673_44 (sequence is synthesized)
agtgtgcggagaggaggcggggcaactgcgcggacgtgacgcaaggcgccgccatgtcttttgagggcggtgacggcgccgggccggccatgctggctacgggcacggcgcggatggcgt

SEQ ID NO: 743962 - DNA, 120 bp, Artificial Sequence
  ENSG00000204673_45 (sequence is synthesized)
cgaggactggatgggcgcggatggcgtcggggcgccccgaggagctgtgggaggccgtggtgggggccgctgagcgcttccgggcccggactggcacggagctggtgctgctgaccgcgg

SEQ ID NO: 743963 - DNA, 89 bp, Artificial Sequence
  ENSG00000204677_0 (sequence is synthesized)
agactccgtctctcgacaccaaattttggaacttaaaaagaagattcttaaaacttacaatccagattacgatgaggacctggtgcagg

SEQ ID NO: 743964 - DNA, 120 bp, Artificial Sequence
  ENSG00000204677_1 (sequence is synthesized)
aaaacttacaatccagattacgatgaggacctggtgcaggaagcttcatctgaagatgtcctgggcgttcatatgtgttttgtttttctctaaatgcaggtggacaaagacacagagaga

SEQ ID NO: 743965 - DNA, 120 bp, Artificial Sequence
  ENSG00000204677_2 (sequence is synthesized)
ccacctatacagcacatggaagaagtaccaagaggcgatgaagacatccttgggagttccacaacgtggtgacctggaagacctggaggagcatctgccagggcagacagtctctgagga

SEQ ID NO: 743966 - DNA, 120 bp, Artificial Sequence
  ENSG00000204677_3 (sequence is synthesized)
agccacaggggttcacatgatgcaggtggacccagccacaccggcaaagaaattggaagactccaccattacaggcagccaccagcagatgtcagcaagtccttcctctgcacctgcaga

SEQ ID NO: 743967 - DNA, 120 bp, Artificial Sequence
  ENSG00000204677_4 (sequence is synthesized)
agaagcaacagaaaagaccaaagtggaagaggaagtgaaaaccagaaagcccaagaagaaaaccaggaagcccagcaagaaaagccggtggaatgtcctgaaatgttgggacatttttaa

SEQ ID NO: 743968 - DNA, 120 bp, Artificial Sequence
  ENSG00000204677_5 (sequence is synthesized)
tatattttagagacctctgaagattcctcgaccaccaggaagggccccgacgtggggatgtcaacatggctcagacttgatgtggatcgtgatcatttcgggaaatgtgttactccaaaa

SEQ ID NO: 743969 - DNA, 120 bp, Artificial Sequence
  ENSG00000204677_6 (sequence is synthesized)
cacattcacataacttttattacagtgcattatcaattattgttgttaaactcttactgtgcctcatttataattacactttattataggtgtgtatgtataggaaaaaatatagtatac

SEQ ID NO: 743970 - DNA, 120 bp, Artificial Sequence
  ENSG00000204677_7 (sequence is synthesized)
aagggctcggcattatctgtggtttcacggcatccacaggatctcggaacatacaccccgcagataagggggtacagctatataaaaatgtattcttgagaaaatcaggaaaaggcaaat

SEQ ID NO: 743971 - DNA, 80 bp, Artificial Sequence
  ENSG00000204677_8 (sequence is synthesized)
tataaaaatgtattcttgagaaaatcaggaaaaggcaaataaggattgggcattaaaagatgccaaagtggctgggcgca

SEQ ID NO: 743972 - DNA, 62 bp, Artificial Sequence
  ENSG00000204677_9 (sequence is synthesized)
agtttgaaaccagcctgcgagtgcctgtaatcctagttactagggaggctgaggcaggagaa

SEQ ID NO: 743973 - DNA, 82 bp, Artificial Sequence
  ENSG00000204677_10 (sequence is synthesized)
cagcttgccaaagatgccaaagtgtgatagtgcaattgggtttttaaaaaattcttatcctcctggtgacatgcgcctgtag

SEQ ID NO: 743974 - DNA, 120 bp, Artificial Sequence
  ENSG00000204677_11 (sequence is synthesized)
gccaaagatgccaaagtgtgatagtgcaattgggtttttaaaaaattcttatcctcctggtgacatgcgcctgtagtcccagctgaggtggaaagactgcttgaggccaggagttcaaga

SEQ ID NO: 743975 - DNA, 120 bp, Artificial Sequence
  ENSG00000204677_12 (sequence is synthesized)
ggcaacatagcaagaccatatatacacacaaaaaattagccaggcatgctggtgtgtgcctgtagtcttagctacttgggaggctgaatcagggagatcacttgagcccaggagtttgag

SEQ ID NO: 743976 - DNA, 120 bp, Artificial Sequence
  ENSG00000204677_13 (sequence is synthesized)
cctgggcaacagagtgagacctcatctcttaagaagaaaattttagcctttagagatacagcctaaagtatttatgggtaaaatactataatgtctgaggtttgcttttaaataatctga

SEQ ID NO: 743977 - DNA, 120 bp, Artificial Sequence
  ENSG00000204677_14 (sequence is synthesized)
taatctgatcgtgtgagtggatgtgagtgcataaagatgaaaaaagaggccaggcgcagtgactcatatctgtaatgccagcactttgggaggctaaagcgggcagattgcttgaaccca

SEQ ID NO: 743978 - DNA, 90 bp, Artificial Sequence
  ENSG00000204677_15 (sequence is synthesized)
tgcttgaacccagaagttcggtctctacaactaaaaaaagaacttaaaaaaaagaaaaaaggtgaaacaggccgggtgcggtggctcatg

SEQ ID NO: 743979 - DNA, 120 bp, Artificial Sequence
  ENSG00000204677_16 (sequence is synthesized)
tggtcctgagatgctcactgtaggtaactgatagctgcctgataggtacaagagagtttattgctctcttcgttcttctttgatgtatgtgtgaaatgctttgtggaaggagggaaggag

SEQ ID NO: 743980 - DNA, 120 bp, Artificial Sequence
  ENSG00000204677_17 (sequence is synthesized)
gatgggagagaagcagggaggaaggaaagcactctgaacatttcctgttgtgtaggtaagaactccagcgcatctcagaccaccagagctcgggccaccaagctctgctactaagggctg

SEQ ID NO: 743981 - DNA, 120 bp, Artificial Sequence
  ENSG00000204677_18 (sequence is synthesized)
ccctcctgcttgcagtgacaccactagcagcgtaagcttccagaagaggatggttccacacacagtgccagcttcaccagtccttctgggcacaaacacacccaagggattcctgcttcg

SEQ ID NO: 743982 - DNA, 120 bp, Artificial Sequence
  ENSG00000204677_19 (sequence is synthesized)
agaatgcagggtctgagtgggctccagcatctctccctgtagattccatggcccttgtcctctccaggcccaggaaatccagcacaagacgtacagccaccttcctttttcaacctcctg

SEQ ID NO: 743983 - DNA, 120 bp, Artificial Sequence
  ENSG00000204677_20 (sequence is synthesized)
aaataccagagcagctccccttcaaatcatcccaccccttcagaaggggctcagatctgggaggaaaagggctcccagtgtggggcactgtcaccctccacaggccacagaggaccctcc

SEQ ID NO: 743984 - DNA, 120 bp, Artificial Sequence
  ENSG00000204677_21 (sequence is synthesized)
tgggatggggaaagagatgggtgggctgggtggggagactgttttctggtcacacctgttgctccccattctacctccccccacttgaatacagacaaggagacctcttgctagaaaagt

SEQ ID NO: 743985 - DNA, 120 bp, Artificial Sequence
  ENSG00000204677_22 (sequence is synthesized)
cgagactctgtttcaaaaaaaaaaaaaagtgactgtaaaagttacatgcccataaatctccatgctacaagccagggaaacagcaagaggccatgtgcagatgggagtggccccttccca

SEQ ID NO: 743986 - DNA, 120 bp, Artificial Sequence
  ENSG00000204677_23 (sequence is synthesized)
aagaggccatgtgcagatgggagtggccccttcccactcccaagatcaagagctccttatgcatccaccagcttgtaatcacttgcttcttctcacagacgttcctgagaggagacttcc

SEQ ID NO: 743987 - DNA, 120 bp, Artificial Sequence
  ENSG00000204677_24 (sequence is synthesized)
caccagcctgacatattgtcggggagaaagtcacttcccaaccttgctttaggccagtgtttactgagagacaggcatgtgcctcagaagggagaaaacttcctcccaaaacatgttagt

SEQ ID NO: 743988 - DNA, 120 bp, Artificial Sequence
  ENSG00000204677_25 (sequence is synthesized)
aaaaagaaaagaaaaaaaaaaaaccaattcgacaccaaattttggaacttaaaaagaagattcttaaaacttacaatccagtgtgttgtggcaaggatgaaatagtgtatcctaggatgc

SEQ ID NO: 743989 - DNA, 120 bp, Artificial Sequence
  ENSG00000204677_26 (sequence is synthesized)
aaggatgaaatagtgtatcctaggatgccaggggaatccaccgtctgccaccgcgagcgtgagaagccaatcacctatcactggtatcactggcatcccggccatatataccctagagtt

SEQ ID NO: 743990 - DNA, 120 bp, Artificial Sequence
  ENSG00000204677_27 (sequence is synthesized)
aaattctgactttaacctctgtttttcagagggcacaaattgttcttgtattgtttccattttacatttttttcttgaagttattttccaattgttttcattctttctgaagttttgttt

SEQ ID NO: 743991 - DNA, 120 bp, Artificial Sequence
  ENSG00000204677_28 (sequence is synthesized)
actcagttttaagtttttgtaattttgatagacttttgtgctttcattttcttaatgacttttacctcatttttaaaacaaatccatagtatggtaagttacatcaatatggagtatttt

SEQ ID NO: 743992 - DNA, 120 bp, Artificial Sequence
  ENSG00000204677_29 (sequence is synthesized)
tatgttttgtggtgatttacattctgtatgtattttacatatataaatgttaatggcctggtgcagtggctaccacctgtaatctcagcagtttgggagaccaaagcaggacgattgctt

SEQ ID NO: 743993 - DNA, 79 bp, Artificial Sequence
  ENSG00000204677_30 (sequence is synthesized)
agcctgggcaacatagtgagacctcatccctacaaaaaaaaaaaatcctttaattagctgggcatggtagcatccatgt

SEQ ID NO: 743994 - DNA, 120 bp, Artificial Sequence
  ENSG00000204677_31 (sequence is synthesized)
aacgtgaatatcagttagaaatctagttgttcattgcaaaactaaaccagattatagcagaaataagcacttggagggaaatgttacattttcactgcaggccttgaatccttagccacc

SEQ ID NO: 743995 - DNA, 120 bp, Artificial Sequence
  ENSG00000204677_32 (sequence is synthesized)
agctccgtgtccttcagtgttctgtggttcctggttccagagagatcacctgctccaatgtaacgagtgaagagttctttaggtgatggctgctgggcccagctttgctgttgtctttgc

SEQ ID NO: 743996 - DNA, 120 bp, Artificial Sequence
  ENSG00000204677_33 (sequence is synthesized)
tgtcttgtaagctttgtgtcgctcaagttcagttgtgtatgagtgtactaaccactgtgagcttctccaagcatgtgcaagcaatttgagaggagcctaatatttgcaaggaatttgaga

SEQ ID NO: 743997 - DNA, 120 bp, Artificial Sequence
  ENSG00000204677_34 (sequence is synthesized)
ggagccttttaaggatgttttattggcgggggtcaggtgagggagataacacgggggcaagaaggaaagttattaattcatgggaaactaccagcccttcatcacctaacttgtgattta

SEQ ID NO: 743998 - DNA, 120 bp, Artificial Sequence
  ENSG00000204677_35 (sequence is synthesized)
cagacactgagcacattgcaggttgagaaggtgcttggtcctttttgtagccttatgctgtgctcttcagagacgtgagtgtgctgctttttctcaccattttgtttcttgtagattgtt

SEQ ID NO: 743999 - DNA, 120 bp, Artificial Sequence
  ENSG00000204677_36 (sequence is synthesized)
ttccttgatgctggaaaacattttgaagacaagactctaaacagtgacctatgccacactagtttattggaaaatgagaaacttacattactgacaagcttggaagattcttcagtcctg

SEQ ID NO: 744000 - DNA, 120 bp, Artificial Sequence
  ENSG00000204677_37 (sequence is synthesized)
cagtgacctgtgtttccctggtctttaccttaccaatctgcttgattctcctttcttgtggcagtagttatgatgccaacttttggggttctttgtcctcctcttttcttcctacctgcc

SEQ ID NO: 744001 - DNA, 120 bp, Artificial Sequence
  ENSG00000204677_38 (sequence is synthesized)
agaggtgccactcaatatacagcactgtgtttagaaattgagggagccgtgaaatatttagcctctgctctctgagacctcagccaggtgcaaagaagagatgcagaaccacatttcaga

SEQ ID NO: 744002 - DNA, 120 bp, Artificial Sequence
  ENSG00000204677_39 (sequence is synthesized)
ttgtgttgtgtacaaccagcagcaccaaaatgtgcctgggaatcatgggggtcagaaatttacctctgaggcaggtatggctgaagctttacgaaaagagatggggcccgtgccaggcct

SEQ ID NO: 744003 - DNA, 120 bp, Artificial Sequence
  ENSG00000204677_40 (sequence is synthesized)
tagacgtgcgagaaggagggcgtgtcaggaagcagaaacagtatcagcaaaggcgctgctgggaggcatgtgggcagtgtttggggaacggccaggggctttctgtgtcaggtttacagc

SEQ ID NO: 744004 - DNA, 120 bp, Artificial Sequence
  ENSG00000204677_41 (sequence is synthesized)
atctgtgggaggctgcgttggtaaataaccccagagaagtaggctggggctacttacattaaaagtatgcatggctttgaaggccagctgagtggtataaatagaaactacaaatagtat

SEQ ID NO: 744005 - DNA, 120 bp, Artificial Sequence
  ENSG00000204677_42 (sequence is synthesized)
cacatttattgaggacagcttgtgctgccaaaagagtttttaaaatttttttggattgtgtaattggtggataaagaattattgacctaaatgtatctgatcttagagtgttttagtatg

SEQ ID NO: 744006 - DNA, 120 bp, Artificial Sequence
  ENSG00000204677_43 (sequence is synthesized)
ctagattattggaggtgaaatggctaagtcaaaggtgatgagtgtttttgagactcttaatgttaattgcaaaattaacctctaaaaaggtaggccgggcgcactggctcacgcctgtaa

SEQ ID NO: 744007 - DNA, 120 bp, Artificial Sequence
  ENSG00000204677_44 (sequence is synthesized)
gagactccacctcgaaaaaaaaataaataaataaaagccagtgccagcttagaccatgactgagagctcttggtttatcttatccttgctgagctgggtgttacaacattgaagccttct

SEQ ID NO: 744008 - DNA, 120 bp, Artificial Sequence
  ENSG00000204677_45 (sequence is synthesized)
gcagtgtcctccctccctttttctctctttctctctctctcctccctttcttccttttacttctcttatgataggctcgtctgtacttttttgatagaggtaaccatttgccacaccatt

SEQ ID NO: 744009 - DNA, 120 bp, Artificial Sequence
  ENSG00000204677_46 (sequence is synthesized)
ttctgaagggcctgctctcttccccattcatttgtgatggcacatttatcctaccctaagctttgataacgtgtcaggatctttctgtcctgtcctctcaaagaggttaaatattttttt

SEQ ID NO: 744010 - DNA, 120 bp, Artificial Sequence
  ENSG00000204677_47 (sequence is synthesized)
ctgtcctgtcctctcaaagaggttaaatatttttttataatgacttataattgactgaagttataacagttttctcatgtcaagtataaaaacaggccaggcgaggtggctcacacctgt

SEQ ID NO: 744011 - DNA, 90 bp, Artificial Sequence
  ENSG00000204677_48 (sequence is synthesized)
gggacaaccccatttctacaaaaaaaaatacaaaaattatccaggcgaggtggtgcacgtgtgtagtcccagttactcgggaggctgagg

SEQ ID NO: 744012 - DNA, 88 bp, Artificial Sequence
  ENSG00000204677_49 (sequence is synthesized)
agtctggataatagaacaagactctatctcaaaaaaaaaattgtatactttattgactcatttatgtctgatgggtatttttgattac

SEQ ID NO: 744013 - DNA, 120 bp, Artificial Sequence
  ENSG00000204677_50 (sequence is synthesized)
tttattgactcatttatgtctgatgggtatttttgattacaaattgtttagtcactactttaaggcctgctttatttttttcttaattttattgactcatttatgtcttagtctttttta

SEQ ID NO: 744014 - DNA, 120 bp, Artificial Sequence
  ENSG00000204677_51 (sequence is synthesized)
ttacaaattatttattgttcagtcactaccttagagcctgttttattttttcttaattttattaaaggatgatattgatgatgaaatgtcttacgatgatcatttagaggtttattttga

SEQ ID NO: 744015 - DNA, 120 bp, Artificial Sequence
  ENSG00000204677_52 (sequence is synthesized)
acaactggcaattccacgaatgatggaataaaacatatgaagtagaaggactggaacctccagaaaaagtactttaagttacctacaggtgatcctagtcaggtatgaattgataagaaa

SEQ ID NO: 744016 - DNA, 120 bp, Artificial Sequence
  ENSG00000204677_53 (sequence is synthesized)
tgcctgcaccttccctccttcctatctttcccttgcctacagaaaattaaaaggcaaaacaatggacatctacatattcttcattcagatcaaccagtggctagcatttgccaccttttg

SEQ ID NO: 744017 - DNA, 120 bp, Artificial Sequence
  ENSG00000204677_54 (sequence is synthesized)
cagtttctttctctttccataagtactttcttctctgaatcatttgaaagcaaatgaaaacagtagcctaaagtgtcagtttcaaccagaaaataacagctctgatttctcatggctcac

SEQ ID NO: 744018 - DNA, 120 bp, Artificial Sequence
  ENSG00000204677_55 (sequence is synthesized)
tcacactcttctgaaacgactcgggtagaggctgaggaaggccgtgttgtttgtctacctgggactagaaacaatcataacaagaataagaagcaagccgggtgcggtggctcatgcctg

SEQ ID NO: 744019 - DNA, 120 bp, Artificial Sequence
  ENSG00000204677_56 (sequence is synthesized)
tgagcccaggagtttgagaccaacctgggtaacataatgagaccttacaaaaaaaaataaaattaaatttcaaaaacataattagataccagtgtatccccagcagattgacacaaatta

SEQ ID NO: 744020 - DNA, 120 bp, Artificial Sequence
  ENSG00000204677_57 (sequence is synthesized)
gataccagtgtatccccagcagattgacacaaattaaaagtcaacagtatcctgtgttggtgaagacatacagcaactggaagtctcctgtgcatgttagccatgtttatacctttcatc

SEQ ID NO: 744021 - DNA, 120 bp, Artificial Sequence
  ENSG00000204677_58 (sequence is synthesized)
tcagcagtttcactcttaacgatatatgctagagaaactcttactcatgtgctccacagacaggtaggagggcccaaggtaaccttgtttgtaattaagaaaaaataaaaacaggaaaca

SEQ ID NO: 744022 - DNA, 120 bp, Artificial Sequence
  ENSG00000204677_59 (sequence is synthesized)
tcaccaagctaagcatacacagtgttatttttaacctacacgtttaaaacatgatgttatatacattataggaggtgcctaatgagagaactcattcctctatcaaaaaataccgtgagt

SEQ ID NO: 744023 - DNA, 120 bp, Artificial Sequence
  ENSG00000204677_60 (sequence is synthesized)
aggccgtgttgtttgtctacctgggactacacctactgaaagaagttctcaagttctgactgagttctaaaattttttgaagattagaattcttcatatgaaacaatcataacaagaata

SEQ ID NO: 744024 - DNA, 66 bp, Artificial Sequence
  ENSG00000204677_61 (sequence is synthesized)
ggtggtgggcgcccgggagcttgcagtgagccgccatccagaagtgctgggattacaggtgtgagc

SEQ ID NO: 744025 - DNA, 120 bp, Artificial Sequence
  ENSG00000204677_62 (sequence is synthesized)
gagccaccgcgcccggcctgaaaagtgcatcttcattttacagggaattctttcaaatcaaataatcaaaaactgtaaaagggggcaaagtacttttttgcagatctacaagtttcttat

SEQ ID NO: 744026 - DNA, 120 bp, Artificial Sequence
  ENSG00000204677_63 (sequence is synthesized)
gtaaataggaaaaaaagcctttgcttttctggtataagcatttaaattaaaagaggaatgaaactgttttctatccacaatgtgtgaggatgttttttatactgctgcctgaagtttaag

SEQ ID NO: 744027 - DNA, 120 bp, Artificial Sequence
  ENSG00000204677_64 (sequence is synthesized)
ttgctgattactttttaaatagataatttggtggtaagtactatattttaaaaatgcgtatgcccgttacccttcaattccattatactaaaatacccttgggaaatagagatacatgca

SEQ ID NO: 744028 - DNA, 120 bp, Artificial Sequence
  ENSG00000204677_65 (sequence is synthesized)
ctttgtttttcacagcacttattttaaaaagaacccatagaatggatcttataagtaaatttcagttgcatccataggatgcaataatatgtgaccatcaaaggtgacaatagatataga

SEQ ID NO: 744029 - DNA, 120 bp, Artificial Sequence
  ENSG00000204677_66 (sequence is synthesized)
agtacgttgatgtgcaaagatgtattttgttttagccagcgaggaaaaaagaatcagtttgattatacatttaccaaacattaagaatttaatatggtaacttttatttcagtattaaaa

SEQ ID NO: 744030 - DNA, 120 bp, Artificial Sequence
  ENSG00000204677_67 (sequence is synthesized)
atgaactacgttttcttgatccggtcagttattatgggcatttaggttgattccctgctgctgcagaagccagccttctgtgtatcaccgcatggtcccgtgacacaggaaaatgcatgt

SEQ ID NO: 744031 - DNA, 120 bp, Artificial Sequence
  ENSG00000204677_68 (sequence is synthesized)
gaggccgccagtgtcgctgctgaagggcggaccaggcgggatcgcggattctgggctagatcgcagacttgaattcgacaccaaattttggaacttaaaaagaagattcttaaaacttac

SEQ ID NO: 744032 - DNA, 120 bp, Artificial Sequence
  ENSG00000204677_69 (sequence is synthesized)
ctgggttgcagaggcagaagaaaatctgcatataaatgaactcctgcagctcaaacccttgctgttcaagggtgaactgtattacctgttaatttgtgtcactaaggaagtatctttaga

SEQ ID NO: 744033 - DNA, 120 bp, Artificial Sequence
  ENSG00000204677_70 (sequence is synthesized)
tcaaccagaaaataacagctctgatttctcatggctcacactcttctgaaacgactcgggtagaggctgaggaaggccgtgttgtttgtctacctgggactaaattctggttattgaatc

SEQ ID NO: 744034 - DNA, 120 bp, Artificial Sequence
  ENSG00000204677_71 (sequence is synthesized)
gaccggcactcagcatacggaggaccagcactggcaccggcctctgagttccctcagtttattgattaccattttcagtgtctcagcaagaggaatgcggtaggagagcagggtgtcagc

SEQ ID NO: 744035 - DNA, 120 bp, Artificial Sequence
  ENSG00000204677_72 (sequence is synthesized)
gtcctccgctgtggcaagaagaaggtctggttagaccccagtgagaccaatgaaatcgccaatgccaactcccgtcagcagatccggaagctcatcaaagacgggctgatcatccgcaag

SEQ ID NO: 744036 - DNA, 120 bp, Artificial Sequence
  ENSG00000204677_73 (sequence is synthesized)
cctgtgacggtccattcccgggctcgatgccggaaaaacaccttggcccgccggaagggcaggcacgtggccataggtgagcagaagggtacagccaatgcccgaatgccagagaaggtc

SEQ ID NO: 744037 - DNA, 120 bp, Artificial Sequence
  ENSG00000204677_74 (sequence is synthesized)
acatggatgaggagaatgacgattttgcgccggctgctcagaagataccgtgaatctaagaagatcgatcgccacacgtatcacagcctgtacctgaaggtgaaggggaatgtgttcaaa

SEQ ID NO: 744038 - DNA, 120 bp, Artificial Sequence
  ENSG00000204677_75 (sequence is synthesized)
gacaagcggattctcatggaacacatccacaagctgaaggcagacaaggcccgcaagaagctcctggctgaccaggctgaggcccgcaggtctaagaccaaggaagcaggcaagtgccct

SEQ ID NO: 744039 - DNA, 120 bp, Artificial Sequence
  ENSG00000204677_76 (sequence is synthesized)
gaagagcgcctccaggccaagaaggaggagttcatcaagactttatccaaggaggaagagaccaagaaataaaagctccccctttgtctgtacatactggcctctgtgattacatagatc

SEQ ID NO: 744040 - DNA, 120 bp, Artificial Sequence
  ENSG00000204677_77 (sequence is synthesized)
agcgcggatcccggggccagccgcccaggcagcaaagtcaggcggtcggcttcgccagcagccgatgagtctcatcctgtggattgcccagcgccagggatcaggatccggagaggtgtc

SEQ ID NO: 744041 - DNA, 120 bp, Artificial Sequence
  ENSG00000204677_78 (sequence is synthesized)
gagtgtgcagtgcgcagaatgatgagggaagcaggcacgtgcccatgttcttcttggctacgctcactttcttgttgtcccatcaggaaaaccagaaagcccaagaagaaaaccaggaag

SEQ ID NO: 744042 - DNA, 86 bp, Artificial Sequence
  ENSG00000204677_79 (sequence is synthesized)
gagtgcaatggcgtgatctcagttcacagcaacatccgcctccctggttcaagtgattctgaaacaatcataacaagaataagaag

SEQ ID NO: 744043 - DNA, 120 bp, Artificial Sequence
  ENSG00000204677_80 (sequence is synthesized)
aagtccagctgttgctcagggccctctgtggctggcaggaatcctaagggatatgtgtggaggggctgctgtgttgctgtaggcagtggctctcaccctccctgtagcctggtccctgga

SEQ ID NO: 744044 - DNA, 120 bp, Artificial Sequence
  ENSG00000204677_81 (sequence is synthesized)
atccactgggcccagggcagagcctctgggcagctggcacagtggtcacttgtcttgtcacaccctcctctctggctcagcagccttgtccttctccccacactccagtcaggcccagat

SEQ ID NO: 744045 - DNA, 120 bp, Artificial Sequence
  ENSG00000204677_82 (sequence is synthesized)
tgttctctgtgtcaggtcttccaggtaccttccctcctagtcttcccacagctcaggcaaaccctgggagggtcccctcatttctgtgctggcaactgctggcctcacctgcagattaag

SEQ ID NO: 744046 - DNA, 120 bp, Artificial Sequence
  ENSG00000204677_83 (sequence is synthesized)
gcaactgggacaaggggctttaccttgaattctgttccattgtttccaaatattcagaagctgctgggattcttttgagggctgaatattttccaagtctctaaggtcactccaggcata

SEQ ID NO: 744047 - DNA, 120 bp, Artificial Sequence
  ENSG00000204677_84 (sequence is synthesized)
gaacagtcactgtataagtgacatcggccatcatcacctcccgcaggccccaacacaaccccaggcctgtgggaggtgctgctgacccagggtgcgatccgtgggttgattggaggccct

SEQ ID NO: 744048 - DNA, 120 bp, Artificial Sequence
  ENSG00000204677_85 (sequence is synthesized)
atgggattcatgcgggaacagaaacaggccctacaggaggagaagggagggaactccatgtcacgcacaacgttgtgaagagggcgctgcctcttggaggaacagaatgacacggcttcc

SEQ ID NO: 744049 - DNA, 120 bp, Artificial Sequence
  ENSG00000204677_86 (sequence is synthesized)
cctcccttggctcagttatggaatgtgagggctgggaaagtacgtgggaagtcagaggtccctccctcatagcacagaggaaatgatacaggctgtggagaaggctccagaaatgagcac

SEQ ID NO: 744050 - DNA, 120 bp, Artificial Sequence
  ENSG00000204677_87 (sequence is synthesized)
atcagaggctctggggttggctccacagccccaggacagcagggtctgagtggttctctcgactctaactctcccctttccttcttatggccaccccatcaccgctgctcctccggacac

SEQ ID NO: 744051 - DNA, 120 bp, Artificial Sequence
  ENSG00000204677_88 (sequence is synthesized)
ggatgccctgagaacatgctccaggaaacagacacccactccatagcagcccgagcctgctgggctgagccctccacaggctgcttagtgagggagacactgaggtgctggtcgcacccc

SEQ ID NO: 744052 - DNA, 120 bp, Artificial Sequence
  ENSG00000204677_89 (sequence is synthesized)
tctagattcttcagtgtctcatatttcagacaattataaaattgcgatgctatattctttatttcatgtgtgcatatttaaatgtgttaagtcaatcactagtgctacaaccagaggagt

SEQ ID NO: 744053 - DNA, 120 bp, Artificial Sequence
  ENSG00000204677_90 (sequence is synthesized)
aaaggtgtatttccattccagatttgggtttacttttaatagtaaataacatctcagtgcaaattgtagacattttgctgattgttaaaacattaattaaaaaggatctttttctgagac

SEQ ID NO: 744054 - DNA, 120 bp, Artificial Sequence
  ENSG00000204677_91 (sequence is synthesized)
agtgttgccaggtttgtaaagtaatggacatcacttcaaactgtttggaagtaaccgaaaaatggaggaagtggcaacaaaaatttccatatacccaccttcctcagtgttttttggtga

SEQ ID NO: 744055 - DNA, 120 bp, Artificial Sequence
  ENSG00000204677_92 (sequence is synthesized)
tcccatctttgtgagtgtgataacgctcgtaacaatgactgagccaatagtgatacattcttatgaacagaaatccaaggttagcatcagtgactgagccaatagtgatacattcttatg

SEQ ID NO: 744056 - DNA, 120 bp, Artificial Sequence
  ENSG00000204677_93 (sequence is synthesized)
aacagaaatctagggttagcatcaaggttcactctgtgttgtccagcctatgggttttgacaaactgacaatgtcttttgtcaccctgacggaataatttcacatcctacacatgacctg

SEQ ID NO: 744057 - DNA, 120 bp, Artificial Sequence
  ENSG00000204677_94 (sequence is synthesized)
agctgcatctactaattcctctccttttctgaggattcctgacaactatggatgattttactgcctctataggtttccttttccagaattttatagagttggaatcatagagtatgtagc

SEQ ID NO: 744058 - DNA, 120 bp, Artificial Sequence
  ENSG00000204677_95 (sequence is synthesized)
tacgtataactaacttattttacttagcaatatacatgtaagatcttttgtatcgttttgaagcttaacagcttaataattcttatcagtgaacaatagtccattggtttcatcgaacag

SEQ ID NO: 744059 - DNA, 120 bp, Artificial Sequence
  ENSG00000204677_96 (sequence is synthesized)
ggttagttggttcactcaccgcctgaagaccatctcagctgcttccaatttgggtaattatgaataaagctgcccacattcttgtgcagattttaagatgaacataattttctaatttag

SEQ ID NO: 744060 - DNA, 120 bp, Artificial Sequence
  ENSG00000204677_97 (sequence is synthesized)
ctgggtaaatatgtagaattttgatcacttgctggtaagactatgttttccattgtgttaggcagaattcaccagtacaattatgtgggcatttttttttaaagttattacttcctgatt

SEQ ID NO: 744061 - DNA, 120 bp, Artificial Sequence
  ENSG00000204677_98 (sequence is synthesized)
aaattctataatgatagaggcctactcagattatctatctctcctttgggtggttatggtagtttctctctttgaaggcatttgtccatttcatctaagctaggaaatttgtgggtgtag

SEQ ID NO: 744062 - DNA, 120 bp, Artificial Sequence
  ENSG00000204677_99 (sequence is synthesized)
acacttgaatctgacaagttgcctgcttggttctcatcaaaggctactgtgcttcctgtcattcctactctcaaacttttcaatagactttcactcctgcacttaaaaaattgcaggcat

SEQ ID NO: 744063 - DNA, 120 bp, Artificial Sequence
  ENSG00000204677_100 (sequence is synthesized)
agatttgttgaaagtattctgttattattttcttaatgatcatgggatcagcaaggataattcctcttctattcatattgtttgtacatcgtgtcttctgtattttctttgtgattagcc

SEQ ID NO: 744064 - DNA, 120 bp, Artificial Sequence
  ENSG00000204677_101 (sequence is synthesized)
ttgctggaggtttaccaattctattgatcttttctaagaagcagcttttggttttgttgagtttctttattttattatttctattacattgatttctgcaaatattgttatattttgggg

SEQ ID NO: 744065 - DNA, 120 bp, Artificial Sequence
  ENSG00000204677_102 (sequence is synthesized)
gaggagggttgcctggtttacattacactatacttttttctctagtttcctaaggtggaaagtaagacatctggatttggattacatttagtttactgcacagaactgtgaatggcactg

SEQ ID NO: 744066 - DNA, 120 bp, Artificial Sequence
  ENSG00000204677_103 (sequence is synthesized)
atgcccctgaagtgtgcacttgattattaaaataataaatacgatgtattttggccacaatactgattttaaagccaattaaatggatgataagtacaggaggagcatatgtagatcaag

SEQ ID NO: 744067 - DNA, 120 bp, Artificial Sequence
  ENSG00000204677_104 (sequence is synthesized)
gaaagataaatgacattataacatttcaacaacaaaagaaatttaccgggcctcaaaatgcacaagggggtgatgggacactgtcatgaaatcagcagtgcatttgtgtgccaccctgtg

SEQ ID NO: 744068 - DNA, 120 bp, Artificial Sequence
  ENSG00000204677_105 (sequence is synthesized)
tgaactctgcctttttcgcagtggtgtgggggcttagccagagaaccaggtcctgacttctgtggctttcctgatggtctcatttgccttccctcatcacccaggagggtgtcccagtgg

SEQ ID NO: 744069 - DNA, 120 bp, Artificial Sequence
  ENSG00000204677_106 (sequence is synthesized)
cagccaagtttctacccttaacccacctcctttacacatgccagccccctgtccttagcatccaaggttgcctaagggattccttcagtggaaccaacatgatgacagttactctgtgtt

SEQ ID NO: 744070 - DNA, 120 bp, Artificial Sequence
  ENSG00000204677_107 (sequence is synthesized)
agtgcctgtcgtctgcacatcatcatacgtagccccctttggatctcagaagttccccagatgggacccaccagcaagagggccctgtgttgttggaggtggcagctacctctgtggctt

SEQ ID NO: 744071 - DNA, 120 bp, Artificial Sequence
  ENSG00000204677_108 (sequence is synthesized)
gtcccagggtcaccagaaattctggagagaaatagatgtggtccgtgagatgaaataagtgaaaccttcacttctgcttatttggaaagcctccctcagacttagtttcttcgtctgaaa

SEQ ID NO: 744072 - DNA, 120 bp, Artificial Sequence
  ENSG00000204677_109 (sequence is synthesized)
aatgggcgtaattactacctgatggggttattgtgagaatcacatgagccaatctatgctcagggtgcaaagcatggaactcctcttgccttctgaaattatgtgagaagatctccagca

SEQ ID NO: 744073 - DNA, 120 bp, Artificial Sequence
  ENSG00000204677_110 (sequence is synthesized)
ccactccttcatcccgagactctcccagccttgcacagtccagagaaggtcactgcagattaaaatagacctaaaagacacatctaccaaatgcagcgtgtggactttaggtggattctg

SEQ ID NO: 744074 - DNA, 120 bp, Artificial Sequence
  ENSG00000204677_111 (sequence is synthesized)
actgaaacccaccaatcccgcttgatccgtggttccactttccaccattgcagttgtctgtggtacaattcaataagatagtcttagggagatagaccacattcacataacttttattac

SEQ ID NO: 744075 - DNA, 120 bp, Artificial Sequence
  ENSG00000204677_112 (sequence is synthesized)
gattattttttgaagatacctactgagtgcagaaaacagaaaagcaattcctttgtgagaagcacaagttatgttacatattcttacataagcaaaatggttttatctgtcatagtttac

SEQ ID NO: 744076 - DNA, 120 bp, Artificial Sequence
  ENSG00000204677_113 (sequence is synthesized)
acacacacgtgcacatacacacatgtgcgttcgggtgcgcacacacacacacgcacacaaagttaaaagtcctgctgattgttaatgaccaaatccactgcttgcagggagtagtggata

SEQ ID NO: 744077 - DNA, 120 bp, Artificial Sequence
  ENSG00000204677_114 (sequence is synthesized)
acacagcctacagcttgcatgcaattcttttggctttttgacttgttctgtgatgaactgccttgaatgggtcaaccatgttttagtcttatgagaaatgaaaagattaggggcaagtaa

SEQ ID NO: 744078 - DNA, 120 bp, Artificial Sequence
  ENSG00000204677_115 (sequence is synthesized)
aaggaactctatgatcagtagttatactattatactattatactatattcaatggttatgcttttttccagttatacaagttacttgaatgatgcacaattaatttattatcattattat

SEQ ID NO: 744079 - DNA, 120 bp, Artificial Sequence
  ENSG00000204677_116 (sequence is synthesized)
aagagatgggctctctctatgttgcccaggctagaatacggtgtctattcagtggtacagtcatagctcactgtagcctggaacttctgggctcaagcagtcctcctacctcatcctcct

SEQ ID NO: 744080 - DNA, 120 bp, Artificial Sequence
  ENSG00000204677_117 (sequence is synthesized)
acacaatcatttatttatttattcatttttattattattattttttcagacaggtccccctctgttgccagtactggagtgcagtggtgggatctatcttggctccctgcaacttctgct

SEQ ID NO: 744081 - DNA, 120 bp, Artificial Sequence
  ENSG00000204677_118 (sequence is synthesized)
agctgggactacaggcatgccccaccacgcttggctaattttccttttaaggtttttttttcctcactatattgcccagcctggtctggaagtctggaacttctgggctcaagtgatcct

SEQ ID NO: 744082 - DNA, 120 bp, Artificial Sequence
  ENSG00000204677_119 (sequence is synthesized)
ctggtctggaagtctggaacttctgggctcaagtgatcctcctgcttcggcctcccaaaatgctaggattttacagatgtgagccaccacacctggcctgcacaattattataaaaagga

SEQ ID NO: 744083 - DNA, 120 bp, Artificial Sequence
  ENSG00000204677_120 (sequence is synthesized)
attaagcccagttgagttgcagaaaattgaccaccttttcatttttttttctagaaacattcatattgtagaacatattgtcaatcatcaagattccctattttttattctggtaaaact

SEQ ID NO: 744084 - DNA, 120 bp, Artificial Sequence
  ENSG00000204677_121 (sequence is synthesized)
aggattgctgcttatttcccattattttctaacaattgcttcacttatttcttttatggctttaatcagttgagtatagaaatacaagaacctccaagtcaaatatcaaggaaagaaaag

SEQ ID NO: 744085 - DNA, 120 bp, Artificial Sequence
  ENSG00000204677_122 (sequence is synthesized)
aaaaacagattagggaaagttattctgtgaaataaccatctgattataggtcatgtcaacttaataaaaaccttatataatgcatttgtgacaagggttcccaagaccacccccaggttt

SEQ ID NO: 744086 - DNA, 120 bp, Artificial Sequence
  ENSG00000204677_123 (sequence is synthesized)
ggtgattcactagaaggactcacaggattcagcaaataatcatattcagatctttaattgattacaatgaaagggtacaagcaaaatgagagggaaaaggtgcatgtggtggtcaagtct

SEQ ID NO: 744087 - DNA, 120 bp, Artificial Sequence
  ENSG00000204677_124 (sequence is synthesized)
ggaggaaaccaggcacaagcttccagaagttctctcctgtggagttcccaggatctgcttaattctcccagcctcacattttgacaacccatgtgcagtgatgtctaccagtcccagaat

SEQ ID NO: 744088 - DNA, 120 bp, Artificial Sequence
  ENSG00000204677_125 (sequence is synthesized)
ctcattagagactcagtacccaagtgttttttatggaggttactctccctcatatgtacccacattccgactctcagaaggaaagcagctgctcagaagtaaccgcattgtttctataaa

SEQ ID NO: 744089 - DNA, 120 bp, Artificial Sequence
  ENSG00000204677_126 (sequence is synthesized)
cactttagacacagtgaccagtcttagggcatggtgggaaccctcccaattccaatttcctaaacaacagccaagggccaggcttgcatgcgggtctttctaaggacggcagtctctctc

SEQ ID NO: 744090 - DNA, 120 bp, Artificial Sequence
  ENSG00000204677_127 (sequence is synthesized)
atatagaattcgacaccaaattttggaacttaaaaagaagattcttaaaacttacaatccagattctgggagttctgatgaatatgcagtcagcccagggcttcccagctgtcttcatcc

SEQ ID NO: 744091 - DNA, 120 bp, Artificial Sequence
  ENSG00000204677_128 (sequence is synthesized)
aggcctgcgccggtgttcacagtggtcctcatctaagccagccaagaagatctctgtcatccacgtgacagccagcccagatgtccctagccgtcctcatcaaggccagccagtttgctt

SEQ ID NO: 744092 - DNA, 120 bp, Artificial Sequence
  ENSG00000204677_129 (sequence is synthesized)
acacgtgtgctaattggagccagccaccctcatagaggccatcccagattacgatgaggacctggtgcaggaagcttcatctgaagatgtcctgggcgttcatatggtggacaaagacac

SEQ ID NO: 744093 - DNA, 120 bp, Artificial Sequence
  ENSG00000204677_130 (sequence is synthesized)
ttaggcaataacaatgacgtgctccaggaagctatgcatgttcaacgtgcagctcttctccaggaagctatgcatgttcaacgtgcagctcttctccaggaagctatgcatgttcaacgt

SEQ ID NO: 744094 - DNA, 120 bp, Artificial Sequence
  ENSG00000204677_131 (sequence is synthesized)
gcagctcttctccaggaagctatgcatattcaacgtgcagctcttccgtctggatggcacagaggatctgggtggcaaggcagggtcaccacccccaccctgtgtcatgagacctcctgc

SEQ ID NO: 744095 - DNA, 85 bp, Artificial Sequence
  ENSG00000204677_132 (sequence is synthesized)
cttctgaaacgactcgggtagaggctgaggaaggccgtgttgtttgtctacctgggactaagagggagaattgcttgagcccagg

SEQ ID NO: 744096 - DNA, 120 bp, Artificial Sequence
  ENSG00000204677_133 (sequence is synthesized)
acgcacacacacacacacacgcgcacgctaaccgggaatggtggcatgcgactgtggccccagctacctgggaggctgaggttggaggatcatttggacccaggaggtgaagactgcagt

SEQ ID NO: 744097 - DNA, 120 bp, Artificial Sequence
  ENSG00000204677_134 (sequence is synthesized)
cctgggtgacagagcaagaccctgtttcacaaaagaaaaagaagaagagatcatctattagtgttcttgatttttgttaaaatgtgatacgtgatagttgataagctttaggcatatgtc

SEQ ID NO: 744098 - DNA, 120 bp, Artificial Sequence
  ENSG00000204677_135 (sequence is synthesized)
gatagttgataagctttaggcatatgtcaatctgtggccatttaattttgggctaaggacttgttctattatagcacagtaatcattttactaaatagtgactatttgtcatgaaaaaca

SEQ ID NO: 744099 - DNA, 120 bp, Artificial Sequence
  ENSG00000204677_136 (sequence is synthesized)
gtatatttagttttaatacagttgagtactcacaaatttctgggggaacttcgtcaggacatttcaactgagaattgtcaggcaccttctcactgataggcatgctgctcggtggtgcag

SEQ ID NO: 744100 - DNA, 120 bp, Artificial Sequence
  ENSG00000204677_137 (sequence is synthesized)
ctcataagcagacaacccccttcatgtaatttagtaggaaaatgacagaaatacttgtgtaactataaagtaaagcagaattctggttattgaatcacagcacctactgaaagaagttct

SEQ ID NO: 744101 - DNA, 120 bp, Artificial Sequence
  ENSG00000204677_138 (sequence is synthesized)
caagttctgactgagttctaaaattttttgaagattagaattcttcatatgtaagtaaaaacaatttctgatgacccatttctagtccatcttctaaagaagtatttaatctgggccacg

SEQ ID NO: 744102 - DNA, 120 bp, Artificial Sequence
  ENSG00000204677_139 (sequence is synthesized)
ttctctttccataagtactttcttctctgaatcatttgaaagtaagttgaaaagagcatgatgttttaccccaacacttcagcgtttatctcttgtgaataatgacatatttctatgtaa

SEQ ID NO: 744103 - DNA, 120 bp, Artificial Sequence
  ENSG00000204677_140 (sequence is synthesized)
ttacagttctaccatctaactataatacagtaatttgatgtacagcccatattcagatttacctaattgtctccaaaatgttctttatttttgttttagatccacagtttaatcaaagat

SEQ ID NO: 744104 - DNA, 120 bp, Artificial Sequence
  ENSG00000204677_141 (sequence is synthesized)
taaccttgcctttggttgtcacgtctctctattcttttactttggagtagttctttcaatacatgaaacattttgaaaaatctaggctctttgttttgtagagtgacccataatctagat

SEQ ID NO: 744105 - DNA, 120 bp, Artificial Sequence
  ENSG00000204677_142 (sequence is synthesized)
atatctggttgcttttttcttctcctgactagaatagattgagcattttggcaagaatacagattaaacagtgttctcatgagtggatccagattaaacagggaataatgcctaattcag

SEQ ID NO: 744106 - DNA, 120 bp, Artificial Sequence
  ENSG00000204677_143 (sequence is synthesized)
attaggcagtgttgcgtacttaccgcctcacaccaggagatgtttgcgtctgtttgtcccacgattgctgatgctatgtttaataattttggttgaggtagtgtcaactggacatctcct

SEQ ID NO: 744107 - DNA, 120 bp, Artificial Sequence
  ENSG00000204677_144 (sequence is synthesized)
tgtgagggtagcttttcccttttgttattagtcatctgtgggatgagacatcaaagcactgtgaacatcttattccccggcaaccttcacgagctggtttcagcgtcattgctgaagcct

SEQ ID NO: 744108 - DNA, 120 bp, Artificial Sequence
  ENSG00000204677_145 (sequence is synthesized)
cttggaaacattgattacacccgtggttccaatggtgatttttctcattccttttacattgattacctgcctccttgagtaaggtagatgttgtctactccccatgttttcccttcaaaa

SEQ ID NO: 744109 - DNA, 120 bp, Artificial Sequence; identical to SEQ ID NO: 565408
  ENSG00000204677_146 (sequence is synthesized)

SEQ ID NO: 744110 - DNA, 120 bp, Artificial Sequence
  ENSG00000204677_147 (sequence is synthesized)
ggctgaggaaggccgtgttgtttgtctacctgggactagtaagtatagaaatagaattcctttgttcttaaattctacctttgactttacttttaaaatataatttctttggtacgattt

SEQ ID NO: 744111 - DNA, 120 bp, Artificial Sequence
  ENSG00000204677_148 (sequence is synthesized)
gaggcttcgtttgcgggaaagtgccatattttagcccaggagttaaaacctagagacaggagttttgttttgttaaatgatttggcttttttctggactcaccacctcttccaaatacat

SEQ ID NO: 744112 - DNA, 120 bp, Artificial Sequence
  ENSG00000204677_149 (sequence is synthesized)
caaccttcctgaagagcccttggtgcaggaggattgagaaagggagtggaaagagctccaggttcagggtccaggccatgatttagaggcctcaggtattcagggatctctgtccccaga

SEQ ID NO: 744113 - DNA, 120 bp, Artificial Sequence
  ENSG00000204677_150 (sequence is synthesized)
aaaccaaccaaattcttgtcgcagatctatcattcgtcagtgttgtgaccctaggcaggtcgcttcaaatctcttcatttcacttccctgaaccgtcaactctgagtggcagcccctgct

SEQ ID NO: 744114 - DNA, 120 bp, Artificial Sequence
  ENSG00000204677_151 (sequence is synthesized)
ctgcccatctctctgggccgacgtgggcatcacaggaaattcaaacaaaaacttttcacgagttctaaagcatgagacccatgtcaagaatgaaaagaattttagcctccactgccctgg

SEQ ID NO: 744115 - DNA, 120 bp, Artificial Sequence
  ENSG00000204677_152 (sequence is synthesized)
agtcccccaagtggcttctctattaaccactaccaagggcctggcttattcttccagacatgaaataattgaacactttatggcacttaggaagcacccgttttaaggctttaggtccat

SEQ ID NO: 744116 - DNA, 120 bp, Artificial Sequence
  ENSG00000204677_153 (sequence is synthesized)
ttaattcttcttacccttttaacataacgtaggccattaggaggcacagagggatctatagaacttcctcaggttctagcagcttctcagaagtccctgagctcagatcctatgctccgg

SEQ ID NO: 744117 - DNA, 120 bp, Artificial Sequence
  ENSG00000204677_154 (sequence is synthesized)
accctatgctcttggtcactccaatctactacctttctgtaatgtctcatctcaatacaggcatttgcctgcacacttatacgtgcaacccacagtgcaagtctttctgaagcccaactc

SEQ ID NO: 744118 - DNA, 120 bp, Artificial Sequence
  ENSG00000204677_155 (sequence is synthesized)
agattcagggggctttgctctgcagatgatgaacaatggaatcaaacatttaagctgtgaataaataattactcatttctctgatcttttgcggcaagacaccaacacctgtctttattt

SEQ ID NO: 744119 - DNA, 120 bp, Artificial Sequence
  ENSG00000204677_156 (sequence is synthesized)
gtgggccgcgcgcctgcgattttccgtccgtggtcctggggcagcccgggccagcccaggagaacccgcgagcccagcggcgcctgcacctgcggcttccgggagccgggcggctttgcg

SEQ ID NO: 744120 - DNA, 120 bp, Artificial Sequence
  ENSG00000204677_157 (sequence is synthesized)
tatttgccttgtaacagaaagttagtaataaaatcttttggctagaattaaatctcctattgtaagaaaggttacttcttgtttagtacaaaatcttctagaagggatgataaacagatc

SEQ ID NO: 744121 - DNA, 120 bp, Artificial Sequence
  ENSG00000204677_158 (sequence is synthesized)
agcagcacatgtggattctgaggaggaaatgactttggcagggatcaataagagggcaagttagctcaggtcagattaggaaggaggagccctaagaggctgccagggacacacagcctg

SEQ ID NO: 744122 - DNA, 120 bp, Artificial Sequence
  ENSG00000204677_159 (sequence is synthesized)
cactgctggtgtgcactgtttgagattggctattatatgtttatgaggcggcctggagctaggaagccaaaggccctgattccctttcttcctgcatctctcctgtgcctgctaccctcc

SEQ ID NO: 744123 - DNA, 120 bp, Artificial Sequence
  ENSG00000204677_160 (sequence is synthesized)
tcccaagcccacctcaagcagtgttactgaattgttcatgagcgccaccaccaaggtgctgacggtcactctgtatcctcctagttgagatgaaacggcaactacggcgactacgggagc

SEQ ID NO: 744124 - DNA, 86 bp, Artificial Sequence
  ENSG00000204677_161 (sequence is synthesized)
ctagccgtcctcatcaaggccagccagtttgcttacacgtgtgctaattggagccagccaccctcatagaggccatcccagacact

SEQ ID NO: 744125 - DNA, 120 bp, Artificial Sequence
  ENSG00000204677_162 (sequence is synthesized)
catggtagggccaacagtgtctcccgagggtacctggccccagaaacccagactggcggtcatcctgcacaaaagaggcggttgaatcacctgcagcgcctggagatgaggaggtaggcg

SEQ ID NO: 744126 - DNA, 120 bp, Artificial Sequence
  ENSG00000204677_163 (sequence is synthesized)
ggcgcccgtcatttccccgggcctctcttccccagcacgggcaagcactcgccgcccacgtcttctccgtccctgccctgaaggcagccagctccgcgctccgcagcggcatccccgggc

SEQ ID NO: 744127 - DNA, 120 bp, Artificial Sequence
  ENSG00000204677_164 (sequence is synthesized)
tgtctgcagtaactcttcagctcaccaacatctcatttggggggacctagctctgtcctcccagccccttgaggacaacagggagcatcactagttcatcctgaggagacactagggttg

SEQ ID NO: 744128 - DNA, 120 bp, Artificial Sequence
  ENSG00000204677_165 (sequence is synthesized)
acatgaatccccctggttcaggcctcctgggaaaggtgtgagagggatggaggcacccccaggctccttgtcacacaagcgagcagcccacccgacccagtattgcgggccagcaggccc

SEQ ID NO: 744129 - DNA, 120 bp, Artificial Sequence
  ENSG00000204677_166 (sequence is synthesized)
tcagtaggtcctggtgtcaagcaggggacacggcaggatccaagaagcactgaaatgtgtccagtcccaggagtccttcagcctctggggggtctgggggcctccagttccaggggtcct

SEQ ID NO: 744130 - DNA, 120 bp, Artificial Sequence
  ENSG00000204677_167 (sequence is synthesized)
attctggcaactgaacgttggcagtaaacgcagcttagttgtctcagaggactcacaatgggatgtgcttatagttgttgcctcgaagattacgatgaggacctggtgcaggaagcttca

SEQ ID NO: 744131 - DNA, 120 bp, Artificial Sequence
  ENSG00000204677_168 (sequence is synthesized)
aagaagtaccaagaggcgatgaaggtcaggccacctggatttgtctgagaaaaaactgttgctttcttagctttatctgatttggattaaattaagatatgagactctgacaatatgtat

SEQ ID NO: 744132 - DNA, 120 bp, Artificial Sequence
  ENSG00000204677_169 (sequence is synthesized)
cttagttacacagtgtccttggggggaattgtaagtgagagtctgtccccactgaggcttgatttaaaacagtgggagaaaatgacagcatcagtcacacattgtggggcagggagcttt

SEQ ID NO: 744133 - DNA, 120 bp, Artificial Sequence
  ENSG00000204677_170 (sequence is synthesized)
tgccttactaattttgttctctctttggagcaaaatcagttacttgccaaccaacatggacttgagaggaaatatcctctgagaaaaatttgtgtctttagtatgagttgatttgctctg

SEQ ID NO: 744134 - DNA, 120 bp, Artificial Sequence
  ENSG00000204677_171 (sequence is synthesized)
ttcttctttggggttcctttgaacactggtttttccatcttgttttctaatgtcactaagtgaagaaaagtcctgtgctcacaggacacagcatggtctgatgctcatagcaatttattt

SEQ ID NO: 744135 - DNA, 120 bp, Artificial Sequence
  ENSG00000204677_172 (sequence is synthesized)
cctggggtgacctcatggccccatttttcaagatgaggttggaggcttctgtatgtagagggcactggcttgggccaaatgccaacaaaacaaacccctgaagacatttcagggccatgc

SEQ ID NO: 744136 - DNA, 120 bp, Artificial Sequence
  ENSG00000204677_173 (sequence is synthesized)
tcacttgggagggtttgaggacatgatttagcgagcctctgttttttaaatatattttccaatcttgaaataaggtacacatatgaatgtgtgtgtgtgtgtgtgtacatatacactgtt

SEQ ID NO: 744137 - DNA, 120 bp, Artificial Sequence
  ENSG00000204677_174 (sequence is synthesized)
tttcactctttcaaatgtatgtcttctgtaacccttttatgctagaatatacaaacatgagaaatttgtgtcttaccaaagcataattttaaaaattacaaagcaaagacaggtccggtg

SEQ ID NO: 744138 - DNA, 120 bp, Artificial Sequence
  ENSG00000204677_175 (sequence is synthesized)
gccccctgaaggtgcccgtgtgagcgcccaggttcattcttcctccatgacactcacactctctgtggacagataacccctcagcagagagcagcacacagggctcagtgccttgacatc

SEQ ID NO: 744139 - DNA, 120 bp, Artificial Sequence
  ENSG00000204677_176 (sequence is synthesized)
tgagtagacctgattgtggggagctcaggggccccaggtcaccttccagggcccaaggaggtctctgagacctgcacacccatcccagggagcccctcctccctccacctctgtgcctct

SEQ ID NO: 744140 - DNA, 120 bp, Artificial Sequence
  ENSG00000204677_177 (sequence is synthesized)
gtaatcctagctactcaggaggctgagactggagaatcccttgaacccaggtggcacaggttgtggtgggtcgagatggcaccattatactccagcctgggcaagaaaagagaaactcca

SEQ ID NO: 744141 - DNA, 120 bp, Artificial Sequence
  ENSG00000204677_178 (sequence is synthesized)
tccatctcaaaaaaaaaaaaaaaaaagcaagttctgggagggacaaaaaacatagcagcaggacaggtggatccggggaggaaatgacctcgaggggataaagaagggaggacaagttag

SEQ ID NO: 744142 - DNA, 120 bp, Artificial Sequence
  ENSG00000204677_179 (sequence is synthesized)
ttagctgaggtcagattaggaaggaggagccctggatgctgcagtgaaacacggtgtggtgtgccctgtttgagatgggctctttcatgtcgaagaggttggcgtagctagaggaccaag

SEQ ID NO: 744143 - DNA, 120 bp, Artificial Sequence
  ENSG00000204677_180 (sequence is synthesized)
gctctgtcttctgagaccttcctggtgccctccttcaccatttgccttccctctccaccatggaggatagaccggcagcagctgagtctgtgctgtgaacacacctttccacacacgcca

SEQ ID NO: 744144 - DNA, 120 bp, Artificial Sequence
  ENSG00000204677_181 (sequence is synthesized)
cactcagtggagctcatgtgcttatagcgactctgtttcctaggtgacctggaagacctggaggagcatctgccagggcagacagtctctgaggaagccacaggggttcacatgatgcag

SEQ ID NO: 744145 - DNA, 120 bp, Artificial Sequence
  ENSG00000204677_182 (sequence is synthesized)
gtggacccagccacaccggcaaagagtacgtattctgggatcatctctttgtttaggtttgaaatcttagtgttgtaaaggtggcgctgcttcacctgcttttgctcaagggccactctg

SEQ ID NO: 744146 - DNA, 120 bp, Artificial Sequence
  ENSG00000204677_183 (sequence is synthesized)
cacctgcttttgctcaagggccactctggtttgagctttctgccagaaatgagatttgggaagtttggtttaaaaactactaagagtcacaccgggcacagtggctcacgcctgtaattc

SEQ ID NO: 744147 - DNA, 88 bp, Artificial Sequence
  ENSG00000204677_184 (sequence is synthesized)
atcagcagatgagaaaccccatctctcctaaaaatacaaaattacctgggtgtggtgtcacatgcctgcaatcccagctactcaggag

SEQ ID NO: 744148 - DNA, 120 bp, Artificial Sequence
  ENSG00000204677_185 (sequence is synthesized)
tgcagaactggcagaaaagcctactgcacttcccctgtgtggttaaacgacggtgaacaagtccaaggcggaaagaataaccaagtatatgccttaagatcctttcttggaggtccccag

SEQ ID NO: 744149 - DNA, 120 bp, Artificial Sequence
  ENSG00000204677_186 (sequence is synthesized)
gtgaaatactaatcagatccttcagcatttcctcctgtccaaaaggatcctgctgtattcctgtttctttgtcatgaaccgatcacggcttttcaatgatgcattatctcatttcgacaa

SEQ ID NO: 744150 - DNA, 120 bp, Artificial Sequence
  ENSG00000204677_187 (sequence is synthesized)
aatatctgagagctggctggggcacggtggctcatgcctgtaatgccatctctttgggaggccgtagagggaggattgctggagacccagagttcaagaccagcctgggcaacaaaagtg

SEQ ID NO: 744151 - DNA, 120 bp, Artificial Sequence
  ENSG00000204677_188 (sequence is synthesized)
caaaagtgagaccccgtctctacaaaaaatataaaaattaggaggtcaaggcaggtggatcacttgaagtcaagaattcaagttcagcctggcctacatggagaaaccctgtctctacta

SEQ ID NO: 744152 - DNA, 89 bp, Artificial Sequence
  ENSG00000204677_189 (sequence is synthesized)
cgaaggaaagagaaggagagagataaagaaaagaaggaacagaagtcgaaggaaggaagacacagataagagcagcaaaataagagaag

SEQ ID NO: 744153 - DNA, 120 bp, Artificial Sequence
  ENSG00000204677_190 (sequence is synthesized)
aggaaggaagacacagataagagcagcaaaataagagaagaaaaagaagcagtagagaatcaaaagagccaaaaatggtttctttgaaaagactaataaaatcgacacatttgttagcaa

SEQ ID NO: 744154 - DNA, 120 bp, Artificial Sequence
  ENSG00000204677_191 (sequence is synthesized)
cactaatcaaaggaggaagaaagagaacgcaatgtaaagctaagatgaaaagggagtacatttctgatttgaacatggcgaattaaagacaggatttccctcttttctttataggaaaca

SEQ ID NO: 744155 - DNA, 120 bp, Artificial Sequence
  ENSG00000204681_0 (sequence is synthesized)
ctctcttccccccgccctgccttcccttgcaccctccttcttccctccgcccgggagctctccctggtccccggcgccgcctccttccctcccggctccccgctccccgctcccgtggct

SEQ ID NO: 744156 - DNA, 120 bp, Artificial Sequence
  ENSG00000204681_1 (sequence is synthesized)
gccgccgccccggggaagaagagacaggggtggggtttgggggaagcgagagaggaggggagagaccctggccaggctggagcctggattcgaggggaggagggacgggaggaggagaaa

SEQ ID NO: 744157 - DNA, 120 bp, Artificial Sequence
  ENSG00000204681_2 (sequence is synthesized)
ggtggaggagaagggaggggggagcggggaggagcggccgggcctggggccttgaggcccggggagagccggggagccgggcccgcgcgccgagatgttgctgctgctgctactggcgcc

SEQ ID NO: 744158 - DNA, 120 bp, Artificial Sequence
  ENSG00000204681_3 (sequence is synthesized)
actcttcctccgccccccgggcgcgggcggggcgcagacccccaacgccacctcagaaggttgccagatcatacacccgccctgggaagggggcatcaggtaccggggcctgactcggga

SEQ ID NO: 744159 - DNA, 120 bp, Artificial Sequence
  ENSG00000204681_4 (sequence is synthesized)
ccaggtgaaggctatcaacttcctgccagtggactatgagattgagtatgtgtgccggggggagcgcgaggtggtggggcccaaggtccgcaagtgcctggccaacggctcctggacaga

SEQ ID NO: 744160 - DNA, 120 bp, Artificial Sequence
  ENSG00000204681_5 (sequence is synthesized)
tatggacacacccagccgctgtgtccgaatctgctccaagtcttatttgaccctggaaaatgggaaggttttcctgacgggtggggacctcccagctctggacggagcccgggtggattt

SEQ ID NO: 744161 - DNA, 120 bp, Artificial Sequence
  ENSG00000204681_6 (sequence is synthesized)
ccggtgtgaccccgacttccatctggtgggcagctcccggagcatctgtagtcagggccagtggagcacccccaagccccactgccaggtgaatcgaacgccacactcagaacggcgcgc

SEQ ID NO: 744162 - DNA, 120 bp, Artificial Sequence
  ENSG00000204681_7 (sequence is synthesized)
agtgtacatcggggcactgtttcccatgagcgggggctggccagggggccaggcctgccagcccgcggtggagatggcgctggaggacgtgaatagccgcagggacatcctgccggacta

SEQ ID NO: 744163 - DNA, 120 bp, Artificial Sequence
  ENSG00000204681_8 (sequence is synthesized)
tgagctcaagctcatccaccacgacagcaagtgtgatccaggccaagccaccaagtacctatatgagctgctctacaacgaccctatcaagatcatccttatgcctggctgcagctctgt

SEQ ID NO: 744164 - DNA, 120 bp, Artificial Sequence
  ENSG00000204681_9 (sequence is synthesized)
ctccacgctggtggctgaggctgctaggatgtggaacctcattgtgctttcctatggctccagctcaccagccctgtcaaaccggcagcgtttccccactttcttccgaacgcacccatc

SEQ ID NO: 744165 - DNA, 120 bp, Artificial Sequence
  ENSG00000204681_10 (sequence is synthesized)
agccacactccacaaccctacccgcgtgaaactctttgaaaagtggggctggaagaagattgctaccatccagcagaccactgaggtcttcacttcgactctggacgacctggaggaacg

SEQ ID NO: 744166 - DNA, 120 bp, Artificial Sequence
  ENSG00000204681_11 (sequence is synthesized)
agtgaaggaggctggaattgagattactttccgccagagtttcttctcagatccagctgtgcccgtcaaaaacctgaagcgccaggatgcccgaatcatcgtgggacttttctatgagac

SEQ ID NO: 744167 - DNA, 120 bp, Artificial Sequence
  ENSG00000204681_12 (sequence is synthesized)
tgaagcccggaaagttttttgtgaggtgtacaaggagcgtctctttgggaagaagtacgtctggttcctcattgggtggtatgctgacaattggttcaagatctacgacccttctatcaa

SEQ ID NO: 744168 - DNA, 120 bp, Artificial Sequence
  ENSG00000204681_13 (sequence is synthesized)
ctgcacagtggatgagatgactgaggcggtggagggccacatcacaactgagattgtcatgctgaatcctgccaatacccgcagcatttccaacatgacatcccaggaatttgtggagaa

SEQ ID NO: 744169 - DNA, 120 bp, Artificial Sequence
  ENSG00000204681_14 (sequence is synthesized)
actaaccaagcgactgaaaagacaccctgaggagacaggaggcttccaggaggcaccgctggcctatgatgccatctgggccttggcactggccctgaacaagacatctggaggaggcgg

SEQ ID NO: 744170 - DNA, 120 bp, Artificial Sequence
  ENSG00000204681_15 (sequence is synthesized)
ccgttctggtgtgcgcctggaggacttcaactacaacaaccagaccattaccgaccaaatctaccgggcaatgaactcttcgtcctttgagggtgtctctggccatgtggtgtttgatgc

SEQ ID NO: 744171 - DNA, 120 bp, Artificial Sequence
  ENSG00000204681_16 (sequence is synthesized)
cagcggctctcggatggcatggacgcttatcgagcagcttcagggtggcagctacaagaagattggctactatgacagcaccaaggatgatctttcctggtccaaaacagataaatggat

SEQ ID NO: 744172 - DNA, 120 bp, Artificial Sequence
  ENSG00000204681_17 (sequence is synthesized)
tggagggtcccccccagctgaccagaccctggtcatcaagacattccgcttcctgtcacagaaactctttatctccgtctcagttctctccagcctgggcattgtcctagctgttgtctg

SEQ ID NO: 744173 - DNA, 120 bp, Artificial Sequence
  ENSG00000204681_18 (sequence is synthesized)
tcactggctttagctgctgtcttccccctggggctcgatggttaccacattgggaggaaccagtttcctttcgtctgccaggcccgcctctggctcctgggcctgggctttagtctgggc

SEQ ID NO: 744174 - DNA, 120 bp, Artificial Sequence
  ENSG00000204681_19 (sequence is synthesized)
tacggttccatgttcaccaagatttggtgggtccacacggtcttcacaaagaaggaagaaaagaaggagtggaggaagactctggaaccctggaagctgtatgccacagtgggcctgctg

SEQ ID NO: 744175 - DNA, 120 bp, Artificial Sequence
  ENSG00000204681_20 (sequence is synthesized)
gtgggcatggatgtcctcactctcgccatctggcagatcgtggaccctctgcaccggaccattgagacatttgccaaggaggaacctaaggaagatattgacgtctctattctgccccag

SEQ ID NO: 744176 - DNA, 120 bp, Artificial Sequence
  ENSG00000204681_21 (sequence is synthesized)
ctggagcattgcagctccaggaagatgaatacatggcttggcattttctatggttacaaggggctgctgctgctgctgggaatcttccttgcttatgagaccaagagtgtgtccactgag

SEQ ID NO: 744177 - DNA, 120 bp, Artificial Sequence
  ENSG00000204681_22 (sequence is synthesized)
aagatcaatgatcaccgggctgtgggcatggctatctacaatgtggcagtcctgtgcctcatcactgctcctgtcaccatgattctgtccagccagcaggatgcagcctttgcctttgcc

SEQ ID NO: 744178 - DNA, 120 bp, Artificial Sequence
  ENSG00000204681_23 (sequence is synthesized)
tctcttgccatagttttctcctcctatatcactcttgttgtgctctttgtgcccaagatgcgcaggctgatcacccgaggggaatggcagtcggaggcgcaggacaccatgaagacaggg

SEQ ID NO: 744179 - DNA, 120 bp, Artificial Sequence
  ENSG00000204681_24 (sequence is synthesized)
tcatcgaccaacaacaacgaggaggagaagtcccggctgttggagaaggagaaccgtgaactggaaaagatcattgctgagaaagaggagcgtgtctctgaactgcgccatcaactccag

SEQ ID NO: 744180 - DNA, 120 bp, Artificial Sequence
  ENSG00000204681_25 (sequence is synthesized)
tctcggcagcagctccgctcccggcgccacccaccgacacccccagaaccctctgggggcctgcccaggggaccccctgagccccccgaccggcttagctgtgatgggagtcgagtgcat

SEQ ID NO: 744181 - DNA, 120 bp, Artificial Sequence
  ENSG00000204681_26 (sequence is synthesized)
ttgctttataagtgagggtagggtgagggaggacaggccagtagggggagggaaagggagaggggaagggcaggggactcaggaagcagggggtccccatccccagctgggaagaacatg

SEQ ID NO: 744182 - DNA, 120 bp, Artificial Sequence
  ENSG00000204681_27 (sequence is synthesized)
ctatccaatctcatctcttgtaaatacatgtccccctgtgagttctgggctgatttgggtctctcatacctctgggaaacagacctttttctctcttactgcttcatgtaattttgtatc

SEQ ID NO: 744183 - DNA, 120 bp, Artificial Sequence
  ENSG00000204681_28 (sequence is synthesized)
acctcttcacaatttagttcgtacctggcttgaagctgctcactgctcacacgctgcctcctcagcagcctcactgcatctttctcttcccatgcaacaccctcttctagttaccacggc

SEQ ID NO: 744184 - DNA, 120 bp, Artificial Sequence
  ENSG00000204681_29 (sequence is synthesized)
aacccctgcagctcctctgcctttgtgctctgttcctgtccagcaggggtctcccaacaagtgctctttccaccccaaaggggcctctccttttctccactgtcataatctctttccatc

SEQ ID NO: 744185 - DNA, 120 bp, Artificial Sequence
  ENSG00000204681_30 (sequence is synthesized)
ttacttgcccttctatactttctcacatgtggctccccctgaattttgcttcctttgggagctcattcttttcgccaaggctcacatgctccttgcctctgctctgtgcactcacgctca

SEQ ID NO: 744186 - DNA, 120 bp, Artificial Sequence
  ENSG00000204681_31 (sequence is synthesized)
gcacacatgcatcctcccctctcctgcgtgtgcccactgaacatgctcatgtgtacacacgcttttcccgtatgctttcttcatgttcagtcacatgtgctctcgggtgccctgcattca

SEQ ID NO: 744187 - DNA, 120 bp, Artificial Sequence
  ENSG00000204681_32 (sequence is synthesized)
cagctacgtgtgcccctctcatggtcatgggtctgcccttgagcgtgtttgggtaggcatgtgcaatttgtctagcatgctgagtcatgtctttcctatttgcacacgtccatgtttatc

SEQ ID NO: 744188 - DNA, 120 bp, Artificial Sequence
  ENSG00000204681_33 (sequence is synthesized)
catgtactttccctgtgtaccctccatgtaccttgtgtactttcttcccttaaatcatggtattcttctgacagagccatatgtaccctaccctgcacattgttatgcacttttccccaa

SEQ ID NO: 744189 - DNA, 120 bp, Artificial Sequence
  ENSG00000204681_34 (sequence is synthesized)
ttcatgtttggtggggccatccacaccctctccttgtcacagaatctccatttctgctcagattccccccatctccattgcattcatgtactaccctcagtctacactcacaatcatctt

SEQ ID NO: 744190 - DNA, 120 bp, Artificial Sequence
  ENSG00000204681_35 (sequence is synthesized)
ctcccaagactgctcccttttgttttgtgtttttttgaggggaattaaggaaaaataagtgggggcaggtttggagagctgcttccagtggatagttgatgagaatcctgaccaaaggaa

SEQ ID NO: 744191 - DNA, 120 bp, Artificial Sequence
  ENSG00000204681_36 (sequence is synthesized)
ggcacccttgactgttgggatagacagatggacctatggggtgggaggtggtgtccctttcacactgtggtgtctcttggggaaggatctccccgaatctcaataaaccagtgaacagtg

SEQ ID NO: 744192 - DNA, 120 bp, Artificial Sequence
  ENSG00000204681_37 (sequence is synthesized)
caggatgtgactctcccacccgtctcaggagcaccttccatgatttatgattctctgcccttcctcctcagctttccctgactcttgtccctgttctttccttctagcatcacccctctg

SEQ ID NO: 744193 - DNA, 120 bp, Artificial Sequence
  ENSG00000204681_38 (sequence is synthesized)
ctcttggtccccaggctgagcccggtcggagcctgcgaggcaaccggcaagaggtcgagtagtctccgggtgcgggccgcgccggcggggctcggtccagtcctcatggccgcctctcac

SEQ ID NO: 744194 - DNA, 120 bp, Artificial Sequence
  ENSG00000204681_39 (sequence is synthesized)
aagagtctcgtaggtccttccaagcatccttagggcctcaggtgaaaataaaatcagatacaaccatgcaaagctctagggaagtgggaagttgaaaatgcctaggatcagctctttggc

SEQ ID NO: 744195 - DNA, 120 bp, Artificial Sequence
  ENSG00000204681_40 (sequence is synthesized)
agtgggcgcagggcccagctgggggaagcggggctgggggagaggaggaaccgcggggatggaatcggggagcgctgaggcggccgatgccgggagcgtggatgttgctgctgctgctac

SEQ ID NO: 744196 - DNA, 120 bp, Artificial Sequence
  ENSG00000204681_41 (sequence is synthesized)
cattatcttttagatcccccttggccttattagcattgttcgattcatggtcacaaattgcaaacctaccctctgcctggaaagccaccttcccacctgtagggtaagggtgaggcatgt

SEQ ID NO: 744197 - DNA, 120 bp, Artificial Sequence
  ENSG00000204681_42 (sequence is synthesized)
gtggcccagactggcctatttctagatattcaacaagcccttgcctgactgacagcagcttgccaccattgctttcctgtgtgaatcccaggaaaaagtgatgtggtctgggcaagttgg

SEQ ID NO: 744198 - DNA, 120 bp, Artificial Sequence
  ENSG00000204681_43 (sequence is synthesized)
gctctccccggtcttcagcatggacaggtgtgggagggggctggggatcaggccagggaagctgggcgccagtggtaactcttctctgatccccgtctttcctgctgccagtgaatcgaa

SEQ ID NO: 744199 - DNA, 120 bp, Artificial Sequence
  ENSG00000204681_44 (sequence is synthesized)
tttgcctcttgaggttgacatcatgctgtctgtcccagtccttgccttgtcttttcctggttcctttatgtttctttaccccatctttgccttcagtggtaggagtgggtgaatggagtg

SEQ ID NO: 744200 - DNA, 120 bp, Artificial Sequence
  ENSG00000204681_45 (sequence is synthesized)
gcttcccccacacagagcctcagcaggggctcaccattcaccttcccacttggaatccacatcctaagaccagatgccttcccgaactcctcacttcagggacagaagctgttgaaggaa

SEQ ID NO: 744201 - DNA, 120 bp, Artificial Sequence
  ENSG00000204681_46 (sequence is synthesized)
ggttcagaatggctgcttctttgctctatctgagtattgctctgaaatccccagttaacctctctggtctttattccctcatgcaccccgtgtttttccaacttgttttttattcccacc

SEQ ID NO: 744202 - DNA, 120 bp, Artificial Sequence
  ENSG00000204681_47 (sequence is synthesized)
ttgagggtctcataggaaaacagttggaagccagagactgagaagcgttgaggagaggaggggaggctggcaaccatctttcttgtgaccttgtttctgccctagacatttgccaaggag

SEQ ID NO: 744203 - DNA, 120 bp, Artificial Sequence
  ENSG00000204681_48 (sequence is synthesized)
cacagcagcccagatatagaggactaggaagaatcaatgctagatctgggatcggttgcttagaagtcttaaaaagtttgttaattcttcaggtctataaagcactttacagtttacaaa

SEQ ID NO: 744204 - DNA, 120 bp, Artificial Sequence
  ENSG00000204681_49 (sequence is synthesized)
ctcctcctcctcccctccgtcggtcagtcagtccgcgaggagagtccgcggtggcggcgacggtggcgagagccgcgggggccgtaggaagccaaccttccctgcttctccggggccctc

SEQ ID NO: 744205 - DNA, 120 bp, Artificial Sequence
  ENSG00000204681_50 (sequence is synthesized)
gccccctcctccccacaaaatcagggatggaggcgcctccccggcaccctcttagcagccctccccaggaaaagtgtcccccctgagctcctaacgctccccaacagctacccctgcccc

SEQ ID NO: 744206 - DNA, 120 bp, Artificial Sequence
  ENSG00000204681_51 (sequence is synthesized)
ccacgccatggggcccggggccccttttgcccgggtggggtggccactgccgcttctggttgtgatggcggcaggggtggctccggtgtgggcctcccactccccccatctcccgcggcc

SEQ ID NO: 744207 - DNA, 120 bp, Artificial Sequence
  ENSG00000204681_52 (sequence is synthesized)
gcatgtccgttccgaggaatgggatttaatgacctttgatgccaacccatatgacagcgtgaaaaaaatcaaagaacatgtccggtctaagaccaaggttcctgtgcaggaccaggttct

SEQ ID NO: 744208 - DNA, 120 bp, Artificial Sequence
  ENSG00000204681_53 (sequence is synthesized)
tttgctgggctccaagatcttaaagccacggagaagcctctcatcttatggcattgacaaagagaagaccatccaccttaccctgaaagtggtgaagcccagtgatgaggagctgccctt

SEQ ID NO: 744209 - DNA, 120 bp, Artificial Sequence
  ENSG00000204681_54 (sequence is synthesized)
gtttcttgtggagtcaggtgatgaggcaaagaggcacctcctccaggtgcgaaggtccagctcagtggcacaagtgaaagcaatgatcgagactaagacgggtataatccctgagaccca

SEQ ID NO: 744210 - DNA, 120 bp, Artificial Sequence
  ENSG00000204681_55 (sequence is synthesized)
gattgtgacttgcaatggaaagagactggaagatgggaagatgatggcagattacggcatcagaaagggcaacttactcttcctggcatgttattgtattggagggtgaccaccctgggc

SEQ ID NO: 744211 - DNA, 120 bp, Artificial Sequence
  ENSG00000204681_56 (sequence is synthesized)
atggggtgttggcaggggtcaaaaagcttatttcttttaatctcttactcaacgaacacatcttctgatgatttcccaaaattaatgagaatgagatgagtagagtaagatttgggtggg

SEQ ID NO: 744212 - DNA, 120 bp, Artificial Sequence
  ENSG00000204681_57 (sequence is synthesized)
atgggtaggatgaagtatattgcccaactctatgtttctttgattctaacacaattaattaagtgacatgatttttactaatgtattactgagactagtaaataaatttttaaggcaaaa

SEQ ID NO: 744213 - DNA, 120 bp, Artificial Sequence
  ENSG00000204681_58 (sequence is synthesized)
gtgcaggagaggtgatgggtaaggctccagatggaagacagagaaggaagtttaatgaaagaggagaaaaaaggcacttgacaggaagagatgccagaaaggagaagaaaacggtaatta

SEQ ID NO: 744214 - DNA, 120 bp, Artificial Sequence
  ENSG00000204681_59 (sequence is synthesized)
atgatgaaagtgagtaattgagaaaggaactaatttgttcgagaaagataagagcaggaattgcagacaggggaggggccccaggagagcttgccctcatctcctcttgtctttcagtgt

SEQ ID NO: 744215 - DNA, 120 bp, Artificial Sequence
  ENSG00000204681_60 (sequence is synthesized)
tttctcaatctatatttgaggatgatcctgaatttggatccttttcaaagggaaagttcaccaggaaactgtctgcatagactccctcccatgggaagtaaactctggatcttgtctgag

SEQ ID NO: 744216 - DNA, 120 bp, Artificial Sequence
  ENSG00000204681_61 (sequence is synthesized)
aaagaatggagagctataaaaatgtgggggaggacactggaaaggggagatgaaagtccctttttcctccatcacctgcctcaaacttcctcttgcagtccccggtatcctctgtaggtt

SEQ ID NO: 744217 - DNA, 120 bp, Artificial Sequence
  ENSG00000204681_62 (sequence is synthesized)
gggggcttccttcctttaccttttaaaaaaatcttcctgctcccgattcttagacctcacgttttctcttttcctttatgaatctcacctctctcaccttcttcaggtttaaatactcca

SEQ ID NO: 744218 - DNA, 120 bp, Artificial Sequence
  ENSG00000204681_63 (sequence is synthesized)
attttccctttctctaaacttagaaatttccatgcatcaccctcttctagaattcatccctcaccattccttatataattgatttattgtaaagactcagaaataaatcaaacattctac

SEQ ID NO: 744219 - DNA, 120 bp, Artificial Sequence
  ENSG00000204681_64 (sequence is synthesized)
taagaaaaattgagaaggggagctctgggggtggaaacatattagggtaaaagacttaaaattggaggcagcattatcagaagatgaagaacaactcagggatggggtgggaagaagaca

SEQ ID NO: 744220 - DNA, 120 bp, Artificial Sequence
  ENSG00000204681_65 (sequence is synthesized)
acacacacacccctccacttcaaggtatagccaagagcttctggagccgtcaaaaaggtctgtacctgctgtctttagagcttccagtttgcccttggtcaagaaatactgtttgctagg

SEQ ID NO: 744221 - DNA, 120 bp, Artificial Sequence
  ENSG00000204682_0 (sequence is synthesized)
attgaggaccagggtcgcgccgagaggccggagggggctccaggcagcctggagctgacggcgccgggctgcgtcctcttcacctgggggtggggggtgggggcacgtactttgtgacca

SEQ ID NO: 744222 - DNA, 120 bp, Artificial Sequence
  ENSG00000204682_1 (sequence is synthesized)
ggatggtgccgagccccctctacggcgggagcttgcaggggtgcgggggtgtgactggcgctccgcggactcgtgtccacagtacagaggacatgtagggttcggccggggcgcggctgc

SEQ ID NO: 744223 - DNA, 120 bp, Artificial Sequence
  ENSG00000204682_2 (sequence is synthesized)
accggggcctgcctcgcggacctggactcgggactccgggcggccctgcctggtgccattgcctcagccaagtctcccacctctctgctcggtttcccgccccacctttcccctactacc

SEQ ID NO: 744224 - DNA, 120 bp, Artificial Sequence
  ENSG00000204682_3 (sequence is synthesized)
gcatccctgtcccctcgcttccctccgcgatgtctccatccgagtaagaaacgaagctgaacgcattggtaactgtgctcaagaagatgcaatcgcgggagccctcagggtggcgcacgg

SEQ ID NO: 744225 - DNA, 120 bp, Artificial Sequence
  ENSG00000204682_4 (sequence is synthesized)
aagaagatgcaatcgcgggagccctcagggtggcgcacggcggagaggcgacgcgggtggcgctgcagaggcgtccccaccccctccggggaccggggccccggagctgccaggcccgct

SEQ ID NO: 744226 - DNA, 120 bp, Artificial Sequence
  ENSG00000204682_5 (sequence is synthesized)
ccctgcaggtgccgggcgcctccgcagccgctgcgcggacccgactcttaaggtggcaccaccgggttcccagcccgcgcgcaacccgcagccctggctccatccgccgcacttctccct

SEQ ID NO: 744227 - DNA, 120 bp, Artificial Sequence
  ENSG00000204682_6 (sequence is synthesized)
gtagcggcgggcctgaccgtccggaacggccggagtgtgctgatgcctgctgctatctgcttgatcccttcaccctacctctcatccaggacttcttccgcggatgcgcagctagcgatt

SEQ ID NO: 744228 - DNA, 120 bp, Artificial Sequence
  ENSG00000204682_7 (sequence is synthesized)
tcgacaggcgagattgaaaattccgggcgagtatatgaggttgagtaagtcccgcttcagggaggaacgaccagaatgacatttctttaagcctaaatcaaacttttattttcgtttata

SEQ ID NO: 744229 - DNA, 120 bp, Artificial Sequence
  ENSG00000204682_8 (sequence is synthesized)
aaaagcagaaggccagcaggaaagggtcgcggaggactggcacatccacaaccgtaggactcttggatccaagtttttaggctgagactgggcggtccggggttctccttcggcgctcac

SEQ ID NO: 744230 - DNA, 120 bp, Artificial Sequence
  ENSG00000204682_9 (sequence is synthesized)
accccgcaaactcgtgggcagtgcagtgctggaggccgggggcagtggcggacccgcagggtaaccttgtctcgcgcacctcccgagcccccagcagcccactctcgtccgaatgctttg

SEQ ID NO: 744231 - DNA, 120 bp, Artificial Sequence
  ENSG00000204682_10 (sequence is synthesized)
tttatttggtgacaccagggaacgtggagaagaagatcgaagttcagtttttcttttttctttattttaaatatttttcttaactaaatggtatgtttatgtgaacccatcatctcttgg

SEQ ID NO: 744232 - DNA, 120 bp, Artificial Sequence
  ENSG00000204682_11 (sequence is synthesized)
aattaagtgtcctcagcgaactccagattcctaggggaaacctacgtgcccagagcaggaaacgcacaagtcaattcaggttccggtgccatccgcagtaaattcccttccttttgctcc

SEQ ID NO: 744233 - DNA, 120 bp, Artificial Sequence
  ENSG00000204682_12 (sequence is synthesized)
aaattcctcctctgcgtccaggagagggacccccgggactcccgcacacccaggaccgggagcggcagagcagagggcgggtgcgagggcgcgagggaagggaggcggcctgcggacctg

SEQ ID NO: 744234 - DNA, 120 bp, Artificial Sequence
  ENSG00000204682_13 (sequence is synthesized)
gggcgcgcagtttcccggctccgtgggaacctccaaccccggggcgcgcggcctaggctccgccctgccaggcttggggccgagcggcccacctagtgggtcctgacctggggaagccga

SEQ ID NO: 744235 - DNA, 120 bp, Artificial Sequence
  ENSG00000204682_14 (sequence is synthesized)
gtccgcgcgcgggtcgggccgcgacgagggaagctcgcctgggcaagtgccgcgcggggtcagacccaccccaggggttgcaaaccgcaagcgaaagtcgagaggggctggagctttccc

SEQ ID NO: 744236 - DNA, 120 bp, Artificial Sequence
  ENSG00000204682_15 (sequence is synthesized)
aaaccaaaacaaacgtacgagctgacttttcccagctaagtttcccctcaataaaaagcccgctttctgggaaagacagaaactgatccgcgctcacgattgctttcttggagattctgg

SEQ ID NO: 744237 - DNA, 120 bp, Artificial Sequence
  ENSG00000204682_16 (sequence is synthesized)
gggcactggggcgcgcaggaggcgcggcgacaaccccagcgcgcatggggcagcctggactgtgcccctcttaccaagctccttcccaggcttctccgtgcttctctctccactggggtc

SEQ ID NO: 744238 - DNA, 120 bp, Artificial Sequence
  ENSG00000204682_17 (sequence is synthesized)
ccgcctctccacgggtcacgccgaggctatatgctgcttgcaaggggtccgcgctttctcgttcggcgggaaaggcacatgttggagctcgatgttggggctcagggtgtggttgatttg

SEQ ID NO: 744239 - DNA, 120 bp, Artificial Sequence
  ENSG00000204682_18 (sequence is synthesized)
tctgctgatctgggtttcttcccagcaccgggcaggaagtgtaggagtttgggtcgccagtccagggactcgggaaacttccaggccaaccagaagaaacacttgcagacacctttcgaa

SEQ ID NO: 744240 - DNA, 120 bp, Artificial Sequence
  ENSG00000204682_19 (sequence is synthesized)
tgtcacagttttccccaggggaaaaagcagaagttgctgggcacatcacccagcacccgggcaaactctccacttacctcgcgccctgctagggggtgttgggggccctccgggaacccc

SEQ ID NO: 744241 - DNA, 120 bp, Artificial Sequence
  ENSG00000204682_20 (sequence is synthesized)
tagatgagcaagcaaagttgcaagaagtggggtggggaacgctcacccgataaaccatgcaccaaacttaatcagcctgtaatgcttactctaaatctaggcccatctaggccaggtggg

SEQ ID NO: 744242 - DNA, 120 bp, Artificial Sequence
  ENSG00000204682_21 (sequence is synthesized)
ctgagtcttgggatagtgggtgtctccttcctatgttgatacattaaggattccatatggacaattatttttagtcaaatttgtggtcctggagatagaaagaggagaagaagagagaag

SEQ ID NO: 744243 - DNA, 82 bp, Artificial Sequence
  ENSG00000204682_22 (sequence is synthesized)
ttttttgagatggagtctcgccctgttgtccaggctggagtacagtggcgccatcttggctaactgcaacctccacctcccc

SEQ ID NO: 744244 - DNA, 120 bp, Artificial Sequence
  ENSG00000204682_23 (sequence is synthesized)
ttgtgatccgcccacctcagcctccctaggtgctgggattacaggcgtgagcaaccacccggccttattgttcttatattaaaacaaaagaacctagaaaaaattgcttggttaaattgt

SEQ ID NO: 744245 - DNA, 120 bp, Artificial Sequence
  ENSG00000204682_24 (sequence is synthesized)
gaaaaaattgcttggttaaattgtagagaggaagggagggaaggaaaatgaaggcttttcttctttgttctttaaaagtccaagcactttctttcagaatcaaaatgtagagaggcagtc

SEQ ID NO: 744246 - DNA, 120 bp, Artificial Sequence
  ENSG00000204682_25 (sequence is synthesized)
agtcttggagcatgcttttgcattttaggatactactcattaattcagttttaaagcattcactgggttgagcacaattttaaaaaggttctgactcacccagatcctgtttgaagctca

SEQ ID NO: 744247 - DNA, 120 bp, Artificial Sequence
  ENSG00000204682_26 (sequence is synthesized)
actcattttgattgaaagagatttgagacaagaatttcagaagagaaaaatgtgtgttacacctggacatatatacacatgtaacagggattgtattccttctagtctaagacaagagat

SEQ ID NO: 744248 - DNA, 120 bp, Artificial Sequence
  ENSG00000204682_27 (sequence is synthesized)
tctatggtaaattatttaaaaaaattagttttttttctagcattgtattgtcaccagaaagaagagtgctgaattctctgtttctgcatttcccaataataaatctcctaggagagataa

SEQ ID NO: 744249 - DNA, 120 bp, Artificial Sequence
  ENSG00000204682_28 (sequence is synthesized)
ctttttgcagttgtgccccccacccattttctctgtggcttgctttatttcccacatatgaatacacacacagcagatacatcatgcacaaactttttttaatgtgtaatctgtaaatct

SEQ ID NO: 744250 - DNA, 120 bp, Artificial Sequence
  ENSG00000204682_29 (sequence is synthesized)
aggcccattaagttttcattgaagttgggaaactgttgaggacttacttttgttcttcaccatgcgtgcactttgccaaggatctttggtaaccaataaaacgatcatgttcactctgaa

SEQ ID NO: 744251 - DNA, 120 bp, Artificial Sequence
  ENSG00000204683_0 (sequence is synthesized)
atgcccaaacacagcaccattttcaccattttctgataatgcaggagtaggatggctaaaagtgaaagaagaatctactctatggaaagcatggcacctgaaatttctgaagatattggc

SEQ ID NO: 744252 - DNA, 120 bp, Artificial Sequence
  ENSG00000204683_1 (sequence is synthesized)
tgtcctctagcttatatgagagagagtgtttgtgctttactaatcaaccagtcatttttttcttgtgtggctgaaatgtacattccagacatgaacaggcctggtaaggcagaacggaga

SEQ ID NO: 744253 - DNA, 120 bp, Artificial Sequence
  ENSG00000204683_2 (sequence is synthesized)
cagtctctacaagccgcccatccaggcagctcctgaaccagatccaggcaactgggccaagtccccaaggctgtctctgggaccagaaggtataaccaaagggaagcatggatttaaatt

SEQ ID NO: 744254 - DNA, 120 bp, Artificial Sequence
  ENSG00000204683_3 (sequence is synthesized)
ccagggcataaaagaaaagttcaacgtatctaagaaggtgctgaaaatgacttttttgtaaatgtctgaaggacactgtcttataccataccatatacaataaaattttaaatgagcctg

SEQ ID NO: 744255 - DNA, 120 bp, Artificial Sequence
  ENSG00000204687_0 (sequence is synthesized)
atggaccactgctcctgactgtgatgttgtggcccactcaggtcccagcaccccatggtctgggggaaaatttgctggttcagccagagggctggatggacagtgtttgctgagtcacag

SEQ ID NO: 744256 - DNA, 120 bp, Artificial Sequence
  ENSG00000204687_1 (sequence is synthesized)
atatctctctcatgtagcctttgtctccacagtggtgaccaggaggcacagaacccaaacctggtatctcagctctgtggcgtctttcttcaaaatgagacgaatgaaaccatacatatg

SEQ ID NO: 744257 - DNA, 120 bp, Artificial Sequence
  ENSG00000204687_2 (sequence is synthesized)
cagatgagcatggcagtgggacagcaggccctgcccttgaatatcattgcccccaaggctgtgctggtctccctctgtggggtcttattgaatggcactgtcttctggctgctttgctgt

SEQ ID NO: 744258 - DNA, 120 bp, Artificial Sequence
  ENSG00000204687_3 (sequence is synthesized)
ggggccacgaatccctacatggtatacatcctccacctggtcgctgctgacgtgatctatctttgctgctcggcagtggggttcttacaggtgactctgctaacttatcatggagtcgtg

SEQ ID NO: 744259 - DNA, 120 bp, Artificial Sequence
  ENSG00000204687_4 (sequence is synthesized)
ttttttatccctgatttcctggccatattgtctcccttctcctttgaggtgtgtctctgtctcctggtggccatcagcacagagcggtgtgtgtgtgtcctcttccccatctggtacaga

SEQ ID NO: 744260 - DNA, 120 bp, Artificial Sequence
  ENSG00000204687_5 (sequence is synthesized)
tgcatcaacatagtaaaatcacttttcctaacttactggaaacatgtaaaggcatgtgtcatatttctaaagctttctgggctcttccatgctatcctttcacttgtgatgtgtgtgtcg

SEQ ID NO: 744261 - DNA, 120 bp, Artificial Sequence
  ENSG00000204687_6 (sequence is synthesized)
agtctgactctactcattagattcctgtgctgctcccagcagcaaaaggccaccagggtctatgcggtggtgcagatctcggcccccatgttcctactctgggccctacccctgagcgtg

SEQ ID NO: 744262 - DNA, 120 bp, Artificial Sequence
  ENSG00000204687_7 (sequence is synthesized)
gcacccctcataacagatttcaaaatgtttgtcaccacctcctatttaatttccttgttcctcattataaacagcagcgccaaccctatcatttatttctttgtggggagcctcagaaag

SEQ ID NO: 744263 - DNA, 120 bp, Artificial Sequence
  ENSG00000204687_8 (sequence is synthesized)
aaaaggctgaaggaatctctcagagtgattctccaacgggcgttagcagataagccagaggtggggaggaacaaaaaggcagctggcatcgacccaatggagcaaccacactctactcag

SEQ ID NO: 744264 - DNA, 120 bp, Artificial Sequence
  ENSG00000204687_9 (sequence is synthesized)
catgtggagaaccttcttcccagggagcacagggtcgatgtggaaacataatttcccacatctgagctggggaattgtacacatagtaacccagcctgttctgcatcataaggctgctgc

SEQ ID NO: 744265 - DNA, 120 bp, Artificial Sequence
  ENSG00000204688_0 (sequence is synthesized)
tcatgtgtctcagcacagtcttttacagcaaaaatgcatgtcacctcctcctaaaggctttccgtggcccacccacccagattcctcctttattgtgcagactctttcctaacccacacc

SEQ ID NO: 744266 - DNA, 120 bp, Artificial Sequence
  ENSG00000204688_1 (sequence is synthesized)
tcatcttaatttatttgccttcaattctgggcggcggtgttggggagggtctcaattttcccatgtatttcccagtgtttattgaatacatgaggccatactcttctagtctctctgctt

SEQ ID NO: 744267 - DNA, 120 bp, Artificial Sequence
  ENSG00000204688_2 (sequence is synthesized)
ctcatgctaggaactgaaccgaccagcctatactttaaggcttgttatttcactgactaaggaaaggctacttaagagggcaagctcagacatacataatctggagtggatcttccatgg

SEQ ID NO: 744268 - DNA, 120 bp, Artificial Sequence
  ENSG00000204688_3 (sequence is synthesized)
gaaaacacgtatataacagaaattattggcaaaactataagtatggtctacagactttctttgccctcaaccaggaagtcagaggcaccaatgtgaggttccacctgctttccagcacat

SEQ ID NO: 744269 - DNA, 120 bp, Artificial Sequence
  ENSG00000204688_4 (sequence is synthesized)
tcttggtttcctcacttctgctagacaacgtttgatcagaaggaacagggaacgagaaggagctgctggatgacgataagcctgggaaagggaggctgggtgagcagagacagaaaagaa

SEQ ID NO: 744270 - DNA, 120 bp, Artificial Sequence
  ENSG00000204688_5 (sequence is synthesized)
acacctacctgctgtgacctcacaaacacccaggctgagttttgataagacaggttgaatcacactggggtgacagcctcatccctccaggtacaaacaagaacaggccatggttaacca

SEQ ID NO: 744271 - DNA, 120 bp, Artificial Sequence
  ENSG00000204688_6 (sequence is synthesized)
aagctcccccatgggcttcctccttctgggcttctctgaacacccagcactggaaaggactctctttgtggttgtcttcacttcctacctcttgaccctggtgggcaacacactcatcat

SEQ ID NO: 744272 - DNA, 120 bp, Artificial Sequence
  ENSG00000204688_7 (sequence is synthesized)
cctgctgtctgtactgtaccccaggctccactctccaatgtactttttcctctctgacctctccttcttggacctctgctttaccacaagttgtgtcccccagatgctggtcaacctctg

SEQ ID NO: 744273 - DNA, 120 bp, Artificial Sequence
  ENSG00000204688_8 (sequence is synthesized)
gggcccaaagaagaccatcagcttcctgggatgctctgtccagctcttcatcttcctgtccctggggaccactgagtgcatcctcctgacagtgatggcctttgaccgatacgtggctgt

SEQ ID NO: 744274 - DNA, 120 bp, Artificial Sequence
  ENSG00000204688_9 (sequence is synthesized)
agtccagacaccatccaccctccacttgcccttctgtccccaccagcagatagatgactttttatgtgaggtcccatctctgattcgactctcctgtggagatacctcctacaatgaaat

SEQ ID NO: 744275 - DNA, 120 bp, Artificial Sequence
  ENSG00000204688_10 (sequence is synthesized)
ccagttggctgtgtccagtgtcatcttcgtggttgtgcctctcagcctcatccttgcctcttatggagccactgcccaggcagtgctgaggattaactctgccacagcatggagaaaggc

SEQ ID NO: 744276 - DNA, 120 bp, Artificial Sequence
  ENSG00000204688_11 (sequence is synthesized)
ctttgggacctgctcctcccatctcactgtggtcaccctcttctacagctcagtcattgctgtctacctccagcccaaaaatccgtatgcccaagggaggggcaagttctttggtctctt

SEQ ID NO: 744277 - DNA, 120 bp, Artificial Sequence
  ENSG00000204688_12 (sequence is synthesized)
ctatgcagtgggcactccttcacttaaccctctcgtatacaccctgaggaacaaggagataaagcgagcactcaggaggttactagggaaggaaagagactccagggaaagctggagagc

SEQ ID NO: 744278 - DNA, 120 bp, Artificial Sequence
  ENSG00000204688_13 (sequence is synthesized)
tgcttaatatactttcgaaattctggaggctggaaactccaagattaaggcagatttcatgcctattgagggcctgctttctgattatagaaggtgacttcttgctgtgcccacacatgg

SEQ ID NO: 744279 - DNA, 120 bp, Artificial Sequence
  ENSG00000204688_14 (sequence is synthesized)
tgaaagggactaccaactctctggagtctcttttatgagggcactaattccaattatgaagcctcttccctcatgacctaatcactgcccaaaggccccatgttctaatgccatcatctt

SEQ ID NO: 744280 - DNA, 120 bp, Artificial Sequence
  ENSG00000204688_15 (sequence is synthesized)
ggtggtttaggatttcaacatatgaattttggaaggacataagcattcaaccccctgcacatgtcttctttcctacttcctcaaggttctttctgtccagttgctccttcttctattgac

SEQ ID NO: 744281 - DNA, 120 bp, Artificial Sequence
  ENSG00000204688_16 (sequence is synthesized)
ccttttttgccttctctttctccttcactgcctcaagttacagccagaggaaaggaggaactaaaacttagcaaatctataatcacatgcaaatacacagaatggattgttacaaccaaa

SEQ ID NO: 744282 - DNA, 120 bp, Artificial Sequence
  ENSG00000204688_17 (sequence is synthesized)
atgcaggctctattgttttcaatttagcagcctttcaaatgtatatggttctggccacattaaagttgcaaataacactttttttgagactgaaataaaggtgaaatattggaaggaaaa

SEQ ID NO: 744283 - DNA, 120 bp, Artificial Sequence
  ENSG00000204688_18 (sequence is synthesized)
agtacagctcccatgcaaagtttgcttttagttctcattgtgagatcacaagtggaggctccaaccagtccagaagttcctttctatggggaagctgtggcagcaaggccgtgaagagag

SEQ ID NO: 744284 - DNA, 120 bp, Artificial Sequence
  ENSG00000204688_19 (sequence is synthesized)
aagttttccagactactacccttcccacatacacctgagccactgtggtgggtcacagtgtggctatgttatctatgagagggagaatgagaaagagagggacagagagataaaagaaat

SEQ ID NO: 744285 - DNA, 120 bp, Artificial Sequence
  ENSG00000204688_20 (sequence is synthesized)
tgggtgagaggagataggtagctccataaggcacacaaattcaaatattatcattcctatcactgtccattcttaatatttctatcctccattctgttctttttactgtcatcacttcta

SEQ ID NO: 744286 - DNA, 120 bp, Artificial Sequence
  ENSG00000204688_21 (sequence is synthesized)
tagatttcctaactccaccatgcctatttctggttatataattgctctccaattgtcatgtcagtgtaggggaactactccatcatagcattctggacaccttgcatgtatctacgtagg

SEQ ID NO: 744287 - DNA, 120 bp, Artificial Sequence
  ENSG00000204688_22 (sequence is synthesized)
tcatgtaagcaaaggcttgaagaacagctaatctgagatttagaagaatgctttttgatcctcctggaatatgagaggatgggaggccctttagaacctgcctcaatgccatctctcact

SEQ ID NO: 744288 - DNA, 120 bp, Artificial Sequence
  ENSG00000204688_23 (sequence is synthesized)
ctccttcttatatccctgggagtatgtcatgtgacaagtctttactgtctcccaggttttggatggagcatggggttttctgccccacaccctttaggatatagctgaagaatataatga

SEQ ID NO: 744289 - DNA, 120 bp, Artificial Sequence
  ENSG00000204688_24 (sequence is synthesized)
ggaatagctggattctagaactgactcctcaccagtggtatattccacaacagtgtcacagtcgtctggcccctttggtttccgtgtcatcctttttggtgtgtaggacaaggagccagg

SEQ ID NO: 744290 - DNA, 120 bp, Artificial Sequence
  ENSG00000204688_25 (sequence is synthesized)
gaattggcacgtttggcttttacttcttttttatatgtaaataataagccatctaagtgtaaaagtggctcatatcttctccagccaaatcagctaggccatggccttgccttgcttctc

SEQ ID NO: 744291 - DNA, 120 bp, Artificial Sequence
  ENSG00000204688_26 (sequence is synthesized)
atgagtgtgcttgacagtcatcaccgtcactctatcttcatttctggttcttaccgtgttagcttagttcattcaagctactatcacaagctacacataaattgggtggtttataaataa

SEQ ID NO: 744292 - DNA, 120 bp, Artificial Sequence
  ENSG00000204688_27 (sequence is synthesized)
ttggcaaaactataagtatggtctacagaatcctgaataatttctacttaaacgtcccaatatcaactctctattttgctattgacataatcttatttgagaggcaaaaaattttaaaaa

SEQ ID NO: 744293 - DNA, 120 bp, Artificial Sequence
  ENSG00000204688_28 (sequence is synthesized)
ttatatcatctttttaatttctaagccccagaacaagacaattggcagcatttttttcatgtcattttgctacattctacataatgttaagttgaggttagggattttcatttgtggagg

SEQ ID NO: 744294 - DNA, 120 bp, Artificial Sequence
  ENSG00000204694_0 (sequence is synthesized)
ctctaataacgttaggcttggtatagaagatgcagagacatgctaaaatttctcccccaattattgccaagcagaaacttggacgatcgacatggaaattgtctccacaggaaacgaaac

SEQ ID NO: 744295 - DNA, 120 bp, Artificial Sequence
  ENSG00000204694_1 (sequence is synthesized)
tattactgaatttgtcctccttggcttctatgacatccctgaactgcatttcttgttttttattgtattcactgctgtctatgtcttcatcatcatagggaatatgctgattattgtagc

SEQ ID NO: 744296 - DNA, 120 bp, Artificial Sequence
  ENSG00000204694_2 (sequence is synthesized)
agtggttagctcccagaggctccacaaacccatgtatattttcttggcgaatctgtccttcctggatattctctacacctccgcagtgatgccaaaaatgctggagggcttcctgcaaga

SEQ ID NO: 744297 - DNA, 120 bp, Artificial Sequence
  ENSG00000204694_3 (sequence is synthesized)
agcaactatctctgtggctggttgcttgctccagttctttatcttcggctctctagccacagctgaatgcttactgctggctgtcatggcatatgaccgctacctggcaatttgctaccc

SEQ ID NO: 744298 - DNA, 120 bp, Artificial Sequence
  ENSG00000204694_4 (sequence is synthesized)
actccactacccactcctgatggggcccagacggtacatggggctggtggtcacaacctggctctctggatttgtggtagatggactggttgtggccctggtggcccagctgaggttctg

SEQ ID NO: 744299 - DNA, 120 bp, Artificial Sequence
  ENSG00000204694_5 (sequence is synthesized)
tggccccaaccacattgaccagttttactgtgactttatgcttttcgtgggcctggcttgctcggatcccagagtggctcaggtgacaactctcattctgtctgtgttctgcctcactat

SEQ ID NO: 744300 - DNA, 120 bp, Artificial Sequence
  ENSG00000204694_6 (sequence is synthesized)
tccttttggactgattctgacatcttatgccagaattgtggtggcagtgctgagagttcctgctggggcaagcaggagaagggctttctccacatgctcctcccacctagctgtagtgac

SEQ ID NO: 744301 - DNA, 120 bp, Artificial Sequence
  ENSG00000204694_7 (sequence is synthesized)
cacattctatggaacgctcatgatcttttatgttgcaccctctgctgtccattcccagctcctctccaaggtcttctccctgctctacactgtggtcacccctctcttcaatcctgtgat

SEQ ID NO: 744302 - DNA, 120 bp, Artificial Sequence
  ENSG00000204694_8 (sequence is synthesized)
ctataccatgaggaacaaggaggtgcatcaggcacttcggaagattctctgtatcaaacaaactgaaacacttgattgaaggagagtaatgaagatgttattttggacttcggacacctc

SEQ ID NO: 744303 - DNA, 83 bp, Artificial Sequence
  ENSG00000204694_9 (sequence is synthesized)
gaggagtaactttgtcttattcgaccattctctttgaactcttctgcagttatactaaaaatgaaaatgatagggcaacaatt

SEQ ID NO: 744304 - DNA, 120 bp, Artificial Sequence
  ENSG00000204694_10 (sequence is synthesized)
cacccaggtattaagcctagtactcattaatcatttttcctgatcttctccctcctcccaacctccaccctcaagtaggattcagtgtgttgttcccctctatgtatccatatgttttca

SEQ ID NO: 744305 - DNA, 120 bp, Artificial Sequence
  ENSG00000204694_11 (sequence is synthesized)
tatccatatgttttcataatttagctcccacttatgagtgaagacatacggtatttgattttctgttcctgtgttagtttgcgaaggatagtagcctccaattccatccatgtcaaataa

SEQ ID NO: 744306 - DNA, 120 bp, Artificial Sequence
  ENSG00000204694_12 (sequence is synthesized)
agcctccaattccatccatgtcaaataatcaaaattatttaaactttgattagttctttattaaatatgtcataaatatttaaaaataatacagcaataccaaaataaacctagaaatat

SEQ ID NO: 744307 - DNA, 120 bp, Artificial Sequence
  ENSG00000204694_13 (sequence is synthesized)
ttaaaaatttctttctatgtgtatttatatttatacatacaagttggatcatggagtttgtaatctggttttccactgaacactgtgtcacgaacaactttttctattaacaagcatcta

SEQ ID NO: 744308 - DNA, 120 bp, Artificial Sequence
  ENSG00000204694_14 (sequence is synthesized)
tttctttattcttctgggcttcatcgtatggctaaacatgatttgttattctattttgggaatttttagttgtattctattcttttactgtacattgtttacatctggattttcctgtaa

SEQ ID NO: 744309 - DNA, 120 bp, Artificial Sequence
  ENSG00000204694_15 (sequence is synthesized)
taaacttttagcacctaaattgcaagatctaaggatatgtgtttttaaaaatctaaagctgaattccttttcttttaaacttcttttcttgtagaacatttcaaacatacataaaagaga

SEQ ID NO: 744310 - DNA, 120 bp, Artificial Sequence
  ENSG00000204694_16 (sequence is synthesized)
agagcacagtgaacccccatgtactccatgtagccaccatccagcttcaacatcaacattttgctaatcttattttaattagctacagctccttgtttgttagttttcatggaaaatttt

SEQ ID NO: 744311 - DNA, 120 bp, Artificial Sequence
  ENSG00000204694_17 (sequence is synthesized)
agggcaaattccagatgttgtataactattatgttgtgtaagttatgtatgtacatattccacatatgtatttagtataatctgtgactaataaagacattttaaaaaaccatgcccaca

SEQ ID NO: 744312 - DNA, 120 bp, Artificial Sequence
  ENSG00000204694_18 (sequence is synthesized)
caactcttaattggccctcaaaacttagcctacttgcttctatcttcagaaagccttccccgaccttgatcccacaccttctgccccacaaccccaggctgggtttggtccttctctgct

SEQ ID NO: 744313 - DNA, 120 bp, Artificial Sequence
  ENSG00000204694_19 (sequence is synthesized)
cccatggcacctacttccttccctattaccatttaccacattttcactaccaactcctgaatgacttgatgaaactactatttaaggaaggcaataagtgaagaatatataagaattatc

SEQ ID NO: 744314 - DNA, 120 bp, Artificial Sequence
  ENSG00000204694_20 (sequence is synthesized)
catcctagcagtgaatggaaacacacatatggggagaaactaaggctccctactaaaaacgtgcaacatgtgactgggacatcttgttgagctcaagcagggagggagctgaaggtagga

SEQ ID NO: 744315 - DNA, 120 bp, Artificial Sequence
  ENSG00000204694_21 (sequence is synthesized)
aattccaacattctgaagtcttcagcaaatcttagcagatcatctcctcctcacagtcctgtctttagagaacagggtcgatatttcgggaatcctatagaaagactccaagcctcagaa

SEQ ID NO: 744316 - DNA, 120 bp, Artificial Sequence
  ENSG00000204694_22 (sequence is synthesized)
tgagtttggaccagataaaataatctagagttaaagatggcccacatagggagtgccagattcactcacaaggaaatgcagatgggatcaaaggttaataaacacatattgctttgaata

SEQ ID NO: 744317 - DNA, 120 bp, Artificial Sequence
  ENSG00000204694_23 (sequence is synthesized)
aaggggatggagggtggaagagaaaatggctcaggagtggagggtaacaagggtgacatttgtaatcaatgttctacgttacttcaggttgagctcaagcagggagggagctgaaggtag

SEQ ID NO: 744318 - DNA, 120 bp, Artificial Sequence
  ENSG00000204695_0 (sequence is synthesized)
gcattttcttcctactgtctttggcttcctaaacagagtcacacttggtatcttcagagagactatggtcaatttgacttcaatgagtggattccttcttatggggttttctgatgagcg

SEQ ID NO: 744319 - DNA, 120 bp, Artificial Sequence
  ENSG00000204695_1 (sequence is synthesized)
taagcttcagattttacatgcattggtatttctggtgacatacctgctggccttgacaggcaacctcctcattatcaccatcattaccgtggaccgtcgtctccattcccccatgtatta

SEQ ID NO: 744320 - DNA, 120 bp, Artificial Sequence
  ENSG00000204695_2 (sequence is synthesized)
ctttttaaagcacctctctcttctggacctctgcttcatctctgtcacagtcccccagtccattgcaaattcacttatgggcaacggttacatttctcttgttcagtgcattcttcaggt

SEQ ID NO: 744321 - DNA, 120 bp, Artificial Sequence
  ENSG00000204695_3 (sequence is synthesized)
tttcttcttcatagctctggcctcatcagaagtggccattctcacagtgatgtcttatgacaggtacgcagcaatctgtcaaccacttcattatgagactattatggatccccgtgcctg

SEQ ID NO: 744322 - DNA, 120 bp, Artificial Sequence
  ENSG00000204695_4 (sequence is synthesized)
ctctctgggctcatgcatgctgccattaacttctccatacctctctgtgggaagagagtcattcaccaattcttctgtgatgttcctcagatgctgaaactagcctgttcttatgaattc

SEQ ID NO: 744323 - DNA, 120 bp, Artificial Sequence
  ENSG00000204695_5 (sequence is synthesized)
attaatgagattgcactggctgcattcacaacgtctgcagcatttatctgtttgatctccattgtgctctcctacattcgcatcttctctacagtgctgagaatcccatcagctgagggc

SEQ ID NO: 744324 - DNA, 120 bp, Artificial Sequence
  ENSG00000204695_6 (sequence is synthesized)
cggaccaaggtcttctccacctgcctaccacacctatttgtagccaccttctttctttcagctgcaggctttgagtttctcagactgccttctgattcctcatcgactgtggaccttgta

SEQ ID NO: 744325 - DNA, 120 bp, Artificial Sequence
  ENSG00000204695_7 (sequence is synthesized)
ttctccgtattctatactgtgatacctccaacactcaatccagtcatttatagcttacggaatgattccatgaaggcagcactgaggaagatgctgtcaaaggaagagcttcctcagaga

SEQ ID NO: 744326 - DNA, 120 bp, Artificial Sequence
  ENSG00000204695_8 (sequence is synthesized)
aaaatgtgcttaaaagccatgtttaaactctgaagaaccatacaaatgaaaggcattgttattatgtttcagattggaagagaggtgaatcttatttctacccagaatgctcttccaagc

SEQ ID NO: 744327 - DNA, 120 bp, Artificial Sequence
  ENSG00000204695_9 (sequence is synthesized)
ctgactgaaacaccagcttgattctagaacaaagatgctcagtctcaggatcaattgagatttgtttctaccgagagatccactctgagtcacacttggtatcttcagagagactatggt

SEQ ID NO: 744328 - DNA, 120 bp, Artificial Sequence
  ENSG00000204695_10 (sequence is synthesized)
tctttaaaatttaagatgttgtgctctaataatattagctttccttcctccctccaattcaagtgttattttaagtcatctttggaaaatttttctgaaatgaaggagaaagacaattag

SEQ ID NO: 744329 - DNA, 120 bp, Artificial Sequence
  ENSG00000204695_11 (sequence is synthesized)
tttggagtctggcctgtataatttaaaacttgttattaacaaataaggttggagatagatgaagctaactgggttaatattatggtgcatatatggtatttccagtgggcctcctagttt

SEQ ID NO: 744330 - DNA, 120 bp, Artificial Sequence
  ENSG00000204695_12 (sequence is synthesized)
tctatccatattaagtattcatattaagttcttttactattattacagtggtgatttcaacaatttattcagcccctagtaagtatcaagtgctttatatatatacatttttttgactca

SEQ ID NO: 744331 - DNA, 120 bp, Artificial Sequence
  ENSG00000204695_13 (sequence is synthesized)
agaaaacaactcttctagctataacatattgtccccattttgccaataggaacaataaatttaggaaggattagttaattttcctgagatttctcaaataaatggtagttaagctctgat

SEQ ID NO: 744332 - DNA, 120 bp, Artificial Sequence
  ENSG00000204695_14 (sequence is synthesized)
tcaaattaatatttgtctgactcaaacaataaggtcatttatgttccttactgatggcaaatgcattattacccaaatgtgagtgtgtatgtttatgtgtgtgtgtgatgtgtataatct

SEQ ID NO: 744333 - DNA, 120 bp, Artificial Sequence
  ENSG00000204695_15 (sequence is synthesized)
ataaatataagcatatactactataatctattaataaaattgtcatcacccttgtgcatccctattactggaggtatttatattaattcctttacttttctgatctgtacaagagtttga

SEQ ID NO: 744334 - DNA, 120 bp, Artificial Sequence
  ENSG00000204695_16 (sequence is synthesized)
caaattggttttacagagttaggcaggggatgctccctagttccatgaaacagaatatagataaactgcaaatgaagagttccaacttatgaatgtgtgagataaggaggcacaaatctt

SEQ ID NO: 744335 - DNA, 120 bp, Artificial Sequence
  ENSG00000204695_17 (sequence is synthesized)
gtgaatctgaatatctgattcaattttgtgtaatgctgcagatttcttcaagaaagactcataatttacaagagtacaaaactggactagtcccctcagttttgaagtaaatcaaagtgc

SEQ ID NO: 744336 - DNA, 120 bp, Artificial Sequence
  ENSG00000204695_18 (sequence is synthesized)
atgttttaatgacaaagggaataagcaattgctcagtaatggggaatgtttttataggacttttttgaattaatggttataatatctacatatgcatataccttagtaagttttttttct

SEQ ID NO: 744337 - DNA, 120 bp, Artificial Sequence
  ENSG00000204695_19 (sequence is synthesized)
ttttttctttaatctgccacatgagattttttcttttttttatatactttaagctctggggtacatgtgcagaacttgcaggtttgttacgtaggtatatacatgccatggtggtttgct

SEQ ID NO: 744338 - DNA, 67 bp, Artificial Sequence
  ENSG00000204695_20 (sequence is synthesized)
tgatttataatcctttgggtatataccctgtaaagggattttccacaatggttgaactagtttacag

SEQ ID NO: 744339 - DNA, 60 bp, Artificial Sequence
  ENSG00000204695_21 (sequence is synthesized)
acatttctctgaaaaagtgtctgtcaggccggggcattggctcatgcctgtaatcccagc

SEQ ID NO: 744340 - DNA, 68 bp, Artificial Sequence
  ENSG00000204695_22 (sequence is synthesized)
aactaaaaatacaaacacttagctgggcatggtgccatgaacctgtaatcccggctactcaggaggct

SEQ ID NO: 744341 - DNA, 64 bp, Artificial Sequence
  ENSG00000204695_23 (sequence is synthesized)
ttaatttttgtataaggtgcatttattaaataggggattctttccccattgcttgtttttgtca

SEQ ID NO: 744342 - DNA, 89 bp, Artificial Sequence
  ENSG00000204695_24 (sequence is synthesized)
ccatttattgatttgcatatttgaatcagctttgcatcccaggaatgaagctgacttgatcatggtagatgagctttttgatgtgctgc

SEQ ID NO: 744343 - DNA, 120 bp, Artificial Sequence
  ENSG00000204695_25 (sequence is synthesized)
tttgtacttgcggtagaattcgtctgtgaatctgtctggttctgggcttttcttggttggtaggctattaactactacctccatttcagaacatgttattggtctattcaggcattagac

SEQ ID NO: 744344 - DNA, 80 bp, Artificial Sequence
  ENSG00000204695_26 (sequence is synthesized)
ccatttcagaacatgttattggtctattcaggcattagacttcttcctggtttagtcttggaagggtttatgtgtccagg

SEQ ID NO: 744345 - DNA, 120 bp, Artificial Sequence
  ENSG00000204695_27 (sequence is synthesized)
tgtgggatcagcagtgatatgccatttatcatttttatagtgtctattgatttttctctcttgtcttctttattagtctggctagcagtctactttgttaattatttcaaaaaaaccagc

SEQ ID NO: 744346 - DNA, 65 bp, Artificial Sequence
  ENSG00000204695_28 (sequence is synthesized)
ccttagctgtactcctgcagctagctcagtctctgcgcaaacagccgcccagttttgtgcttgaa

SEQ ID NO: 744347 - DNA, 120 bp, Artificial Sequence
  ENSG00000204695_29 (sequence is synthesized)
tcagtctctgcgcaaacagccgcccagttttgtgcttgaaacccaggaccccagtagcgtaggcacccaagggaatctactgttctgtggtttgcgaaatccatgggaaaagcgtagtat

SEQ ID NO: 744348 - DNA, 120 bp, Artificial Sequence
  ENSG00000204695_30 (sequence is synthesized)
tggcttcccttggctaggggagggagttgtctgaccccttgcgcttcccgggtgaggcgatgccccaccctgcttcggctagccctccctgggctgcacccactgtctaaccagtccctg

SEQ ID NO: 744349 - DNA, 120 bp, Artificial Sequence
  ENSG00000204695_31 (sequence is synthesized)
agccctccctgggctgcacccactgtctaaccagtccctgtgagattagtcgggtatctcagttagaaatgcagaaatcatctggcttctgcattgatctcagtgggagctgcagaccga

SEQ ID NO: 744350 - DNA, 120 bp, Artificial Sequence
  ENSG00000204695_32 (sequence is synthesized)
agctgtttctattccaccatctttccagccacccacactgatttctaaagtagttgttccatattatattccctagataatcaagaattgttataaagggctgggcgtggtagctcacgc

SEQ ID NO: 744351 - DNA, 88 bp, Artificial Sequence
  ENSG00000204695_33 (sequence is synthesized)
ccttgtcaggtattttgaaaaacttttagctttttaaacacattcatggtgatatatatcgatgagtttattttgtattgccctgttc

SEQ ID NO: 744352 - DNA, 120 bp, Artificial Sequence
  ENSG00000204695_34 (sequence is synthesized)
gtgatatatatcgatgagtttattttgtattgccctgttcaacaaggttgaacatcttttcatggacttattagttatttgtgtgtcttcatttgtgaagtttttgctcagacacttggc

SEQ ID NO: 744353 - DNA, 120 bp, Artificial Sequence
  ENSG00000204700_0 (sequence is synthesized)
aataatttgactttttaaagtaaaaaatcatttttcataaatattgtgttcctgattatggactatcttagtcttcattaatccaaatgttaattcagggatgtatataaagaactcagt

SEQ ID NO: 744354 - DNA, 120 bp, Artificial Sequence
  ENSG00000204700_1 (sequence is synthesized)
aacttgagaagctattgcttgtatctgtagctggataaatatctcaatgaagcatataaagggaactgtataaaaattctactaccattatggtgcacactctctggaagtgggatactt

SEQ ID NO: 744355 - DNA, 120 bp, Artificial Sequence
  ENSG00000204700_2 (sequence is synthesized)
ttgtcttcaatctgtttgcaagtgagcggttgacaatgcatggacagactttgagtttatgtggttctttctttaggtataagaaaaagatgaatgatgattaaaaaaaatgcaagttcg

SEQ ID NO: 744356 - DNA, 120 bp, Artificial Sequence
  ENSG00000204700_3 (sequence is synthesized)
gaagacttctttattctacttggattttctaattggcctcagctggaagtagttctctttgtggttatcttgatcttctacctgatgacactgacaggaaacctgttcatcatcatcctg

SEQ ID NO: 744357 - DNA, 120 bp, Artificial Sequence
  ENSG00000204700_4 (sequence is synthesized)
tcatacgtggactcccatctccacacaccaatgtacttcttcctttcaaacctctcatttctggatctctgctacaccaccagctctatccctcagttgctggtgaatctccggggcccg

SEQ ID NO: 744358 - DNA, 120 bp, Artificial Sequence
  ENSG00000204700_5 (sequence is synthesized)
gtcctactggtggtgatgtcatatgatcgttatgtagctgtgtgtagacctttgcattacactgtcctcatgcaccctcgtttctgccacttgttggttgcggcttcttgggtaattggt

SEQ ID NO: 744359 - DNA, 120 bp, Artificial Sequence
  ENSG00000204700_6 (sequence is synthesized)
tttactatctcagcacttcattcctcctttactttctgggtacccctttgtggacatcgcctagtggatcacttcttctgtgaagttccagcacttctgcgtttatcatgtgttgacacc

SEQ ID NO: 744360 - DNA, 120 bp, Artificial Sequence
  ENSG00000204700_7 (sequence is synthesized)
catgcaaatgagctgaccctcatggtcatgagctccatttttgttctcatacctctcattctcattctcactacctatggtgccattgcccgggctgtactgagcatgcaatcaaccact

SEQ ID NO: 744361 - DNA, 120 bp, Artificial Sequence
  ENSG00000204700_8 (sequence is synthesized)
gggcttcagaaagtgtttaggacatgtggagcccatcttatggttgtatctctctttttcattccagtcatgtgcatgtatctccagccaccatcagaaaattctcctgatcagggcaag

SEQ ID NO: 744362 - DNA, 120 bp, Artificial Sequence
  ENSG00000204700_9 (sequence is synthesized)
ttcattgccctcttttatactgttgtcacaccgagtcttaatcctctaatctacactctcagaaacaagcatgtaaaaggggcagcgaagagactattggggtgggagtgggggaagtga

SEQ ID NO: 744363 - DNA, 120 bp, Artificial Sequence
  ENSG00000204700_10 (sequence is synthesized)
gtagcaatgacaatcacagttatttccagactctgttcttcatagttagatttaaaacattggcaaaaatgttataagaaggcaattaggttgatgtttttaggttgtatggcaaccaga

SEQ ID NO: 744364 - DNA, 120 bp, Artificial Sequence
  ENSG00000204700_11 (sequence is synthesized)
gagccccttcatcagtttatacctgatgaggttgtaggccaggtagagagtgacagggaacagggacaaacacaggaaggtataagaaaaagatgaatgatgattaaaaaaaatgcaagt

SEQ ID NO: 744365 - DNA, 120 bp, Artificial Sequence
  ENSG00000204700_12 (sequence is synthesized)
agggtcttagccatcttgaaaggtggtttccctgcttctttgtgatttatttttgttctaacagctcacaaaacagaatagttcagtctcacatttgttgctctttttattatttagttc

SEQ ID NO: 744366 - DNA, 120 bp, Artificial Sequence
  ENSG00000204700_13 (sequence is synthesized)
tgaaatattatgttgagataaagtttctgattagtgccactttgttcttttacaattgtatattttatttctgtgaaaattgtggactgtggtttcaacgtaaataaatgtgcatgcgaa

SEQ ID NO: 744367 - DNA, 120 bp, Artificial Sequence
  ENSG00000204700_14 (sequence is synthesized)
tagttatgaggagattatttcaaaaatgttgggaatatttctaacaatgtgctaaattatgaactgatgatatatacagaaagagaagggcaatattgcaaagacttaggctaaaaaggt

SEQ ID NO: 744368 - DNA, 120 bp, Artificial Sequence
  ENSG00000204700_15 (sequence is synthesized)
ttttggttattgaataaaccttaaatgaagctaaaaatagtcacagcaaagaaaaatggtaaacataatgaataacattgtttaagatatggtaaaggatatatcataagtatttggttg

SEQ ID NO: 744369 - DNA, 120 bp, Artificial Sequence
  ENSG00000204700_16 (sequence is synthesized)
aaagacactttttaaagacactaaattatctaatttatcctgtaggtctacatacttgtcacattgaacagtaaactaatatctctttaaaatggctctttcgttcatctgtccatttat

SEQ ID NO: 744370 - DNA, 120 bp, Artificial Sequence
  ENSG00000204700_17 (sequence is synthesized)
tcattaacttattctttattagctaaatcttattgaatgtgtactctcttccagtttgtgaaattcttggtaacatgtataaatataacatactctgtctgaacagaacacactctctgt

SEQ ID NO: 744371 - DNA, 120 bp, Artificial Sequence
  ENSG00000204700_18 (sequence is synthesized)
caggaaaaatggcaacataaaagatgaagtatctgtgcatggcttaatttgtcactgggggtaatgctaatacattaagacagcttttaaaagtcagaaacaataaactctgattactct

SEQ ID NO: 744372 - DNA, 84 bp, Artificial Sequence
  ENSG00000204700_19 (sequence is synthesized)
cagcttttaaaagtcagaaacaataaactctgattactcttcagattgtataaatctttctttcactttttaaaaatcaaaaac

SEQ ID NO: 744373 - DNA, 120 bp, Artificial Sequence
  ENSG00000204700_20 (sequence is synthesized)
tctctactaaaaatacaaaacaattagctaggcatggtggcacatgcctgtagtcccattgaagctaaacttttttttcactttacatgaacattttgaaatcactactaaattcaatat

SEQ ID NO: 744374 - DNA, 120 bp, Artificial Sequence
  ENSG00000204700_21 (sequence is synthesized)
acatgaacattttgaaatcactactaaattcaatattttcaacatattatttcatccgtatgtaaaattattgggattgcaattgttatgttttctataatcacatttttgaaaataacc

SEQ ID NO: 744375 - DNA, 120 bp, Artificial Sequence
  ENSG00000204701_0 (sequence is synthesized)
caaatttttatccactagtttttgcaatcatttatgtttttcttaacaccgtcaccccttctatatttgttaattagggatctactgtaaggaatagctttatcttcaccattcatttat

SEQ ID NO: 744376 - DNA, 120 bp, Artificial Sequence
  ENSG00000204701_1 (sequence is synthesized)
ttattcttttactttttatatcagtatgagctttataattcttcttttgttaaattcattactactaatggttaaattgtcctacaattaaatgatggcaagcccttcaaactggctttt

SEQ ID NO: 744377 - DNA, 120 bp, Artificial Sequence
  ENSG00000204701_2 (sequence is synthesized)
attttttattcatgtgtgctgatatttttggatcatttgtttactcgttttttgagtttacctttcttttttttctctcaggtaataggaaatgaatgatgatggaaaagtcaatgctag

SEQ ID NO: 744378 - DNA, 120 bp, Artificial Sequence
  ENSG00000204701_3 (sequence is synthesized)
ctctgaggggtactttattttagttggattttctaattggcctcatctggaagtagttatctttgtggttgtcttgatcttctacttgatgacactgataggaaacctgttcatcatcat

SEQ ID NO: 744379 - DNA, 120 bp, Artificial Sequence
  ENSG00000204701_4 (sequence is synthesized)
cctgtcatacctggactcccatctgcacacaccaatgtacttcttcctttcaaacctctcatttctggatctctgctacaccaccagctctatccctcagttgctggtcaatctctgggg

SEQ ID NO: 744380 - DNA, 120 bp, Artificial Sequence
  ENSG00000204701_5 (sequence is synthesized)
aaaagaccatctcttatgctggttgcatgattcaactttactttgttctcgcactgggaaccacagagtgtgtcctactggtggtgatgtcctatgaccgttatgcagctgtgtgtagac

SEQ ID NO: 744381 - DNA, 120 bp, Artificial Sequence
  ENSG00000204701_6 (sequence is synthesized)
ctttgcattacactgtcctcatgcaccctcgtttctgccacctgctggctgtggcttcttgggtaagtggttttaccaactcagcacttcattcctccttcaccttctgggtacctctgt

SEQ ID NO: 744382 - DNA, 120 bp, Artificial Sequence
  ENSG00000204701_7 (sequence is synthesized)
gtggacaccgccaagtagatcactttttctgtgaagttccagcacttctgcgattatcgtgtgttgatacccatgtcaatgagctgaccctcatgatcacaagctccatatttgttctca

SEQ ID NO: 744383 - DNA, 120 bp, Artificial Sequence
  ENSG00000204701_8 (sequence is synthesized)
tacctctcatcctcattctcacttcttatggtgccatcgtccgagctatactgaggatgcagtcaaccactgggcttcagaaagtgtttggaacatgtggagctcatcttatggctgtat

SEQ ID NO: 744384 - DNA, 120 bp, Artificial Sequence
  ENSG00000204701_9 (sequence is synthesized)
ctctctttttcattccggccatgtgcatgtatctccagccaccatcaggaaattctcaagatcaaggcaagttcattgccctcttttatactgttgtcacacctagtcttaaccctctaa

SEQ ID NO: 744385 - DNA, 120 bp, Artificial Sequence
  ENSG00000204701_10 (sequence is synthesized)
tctacaccctcagaaacaaagttgtaagaggggcagtgaagagactaatggggtgggaatgagcctgtgtatgtgtcatattaacaatataacagagtctcccctcacaatgattcatcc

SEQ ID NO: 744386 - DNA, 120 bp, Artificial Sequence
  ENSG00000204701_11 (sequence is synthesized)
gctttctcttctgtagcaatgatagtcatagctacattcagactgttttcctaattgatgtagtagatgagggaagtgtaggcatttatgttggtgatttcaaggtgatcaaaatcagag

SEQ ID NO: 744387 - DNA, 120 bp, Artificial Sequence
  ENSG00000204701_12 (sequence is synthesized)
atcagatcagtctgtgcatgatgagggcatcagctaggaagacaatatacagggaatgtggacagatacaggaaggacagagtgaaaggcattgtttgagtactgcttaagtactagaga

SEQ ID NO: 744388 - DNA, 120 bp, Artificial Sequence
  ENSG00000204701_13 (sequence is synthesized)
catggtctcacttcattgcccaggctagtctcgaacttctgggctccagagatccacccaccttggcctcccaaagtgtcaggattacaggtgtgagccacggcacccgacccaggaaga

SEQ ID NO: 744389 - DNA, 120 bp, Artificial Sequence
  ENSG00000204701_14 (sequence is synthesized)
tcactcactctgttagcacttgctgagcatgtactctaacaaggtcgtggagttcctggtaacaggtaggaataaaacacagtcagcctaaataccattcacttgtggagaaaacagcta

SEQ ID NO: 744390 - DNA, 120 bp, Artificial Sequence
  ENSG00000204701_15 (sequence is synthesized)
atccaagacagacatttctcgattgaaaataaggcatgaaatttgttgtaaatcttgataaaagcgaagctgtaaatcctatgaaaagatgatactctcaatttaaaaatctctacaata

SEQ ID NO: 744391 - DNA, 120 bp, Artificial Sequence
  ENSG00000204701_16 (sequence is synthesized)
tgtcttttaatttcttgctttttgggcagaatacttttgtcttctatctttagtttagttaaatacacagcaaaatacttcaaatccttttctccaacaatgcttattctttgtcggata

SEQ ID NO: 744392 - DNA, 120 bp, Artificial Sequence
  ENSG00000204701_17 (sequence is synthesized)
gtaaattttgagaggaattttggtccatattctttcatatccagtatcaatagtagaacaataagttttatgaattgtagtaagagaggctttgaaacagtatagcagaagtcagcatct

SEQ ID NO: 744393 - DNA, 120 bp, Artificial Sequence
  ENSG00000204701_18 (sequence is synthesized)
gagatccctcttttttgcaaggcagtgagaaatatataggaagtaaaaggagctggtaaagctgagctatggagcttataaacaaatggtcatcataggctaggtatacttaggtgaggt

SEQ ID NO: 744394 - DNA, 120 bp, Artificial Sequence
  ENSG00000204701_19 (sequence is synthesized)
aagtgcttggagcaactgcattacctaaggaactaaggaaaacatttgaggcaaatagagaggctctgaaaatgacttgaagccaatgggtgtatgaaagaattatgtgaaaatatattg

SEQ ID NO: 744395 - DNA, 120 bp, Artificial Sequence
  ENSG00000204701_20 (sequence is synthesized)
ggtgtatgaaagaattatgtgaaaatatattggaaaaattttatgatagaaactgtcatatggaaaatgatagcttatttttattttaaagcttgatctaatttgagtatttatggttaa

SEQ ID NO: 744396 - DNA, 120 bp, Artificial Sequence
  ENSG00000204701_21 (sequence is synthesized)
caaataaagaaatctattttatagaagtaatcattttgttttatatattattgtcaaccatcttcgtttgaaataattgcgctatacctagagcaatttaaactgacagtcatagtcaaa

SEQ ID NO: 744397 - DNA, 120 bp, Artificial Sequence
  ENSG00000204701_22 (sequence is synthesized)
tgaagcggaaaaatggctaaaggagaattcagtataaagtaacgtacttgcaatgcctgagttttctctataactcaaatgtcagctgtagcttttgaggcctgtgagatttagatatga

SEQ ID NO: 744398 - DNA, 120 bp, Artificial Sequence
  ENSG00000204701_23 (sequence is synthesized)
ttgattcacacactatttcctaaattattataaaaataaaaacgcatctcagaacttccctccaatttctagtgtgacttgcaattgcattgattctgctgactttatcttccttctgca

SEQ ID NO: 744399 - DNA, 120 bp, Artificial Sequence
  ENSG00000204701_24 (sequence is synthesized)
tctctgactcttcctttatttctaactaggcatgaaaaatatgaggcatgtgcccttgtccttaaccttacccaagaagtgaagaaccaagaataatgtatgtaaaatgacttttagcaa

SEQ ID NO: 744400 - DNA, 120 bp, Artificial Sequence
  ENSG00000204701_25 (sequence is synthesized)
gaattgggaccacatacggtaaaacatcacataaaaacacatttttaaaaacttaaagaacataacttcgccctttgaactgttttctactatggaaatcttacgatttggagcacttac

SEQ ID NO: 744401 - DNA, 120 bp, Artificial Sequence
  ENSG00000204701_26 (sequence is synthesized)
ggtagcatcctggtttctcacctactcaaatatcccccccctccccatctttattaaggataagtgaaaaaaatgtatttatttataatatacagcataatgttttgacatatgcataat

SEQ ID NO: 744402 - DNA, 120 bp, Artificial Sequence
  ENSG00000204701_27 (sequence is synthesized)
tatgcaattattactcaagctaattaacagatcattaactcacatacttacctgttttgtggtgagaacatttaggatctattatcttagcagttttcaactatgcagtacagtattatt

SEQ ID NO: 744403 - DNA, 120 bp, Artificial Sequence
  ENSG00000204701_28 (sequence is synthesized)
agctatagtcaccataccgtagaatagatctcttgaatttgttccttccatctgaaactttgtaccctttgaccaatatctccccattttccctatttctctccactgctaacccctgac

SEQ ID NO: 744404 - DNA, 120 bp, Artificial Sequence
  ENSG00000204701_29 (sequence is synthesized)
cttgcatctggcattgaatttataaaacatgagcgattaagagacccctaaaagaggcaatcacaggtggccccacaatgatttctttcttcctgtgccatagccaattgggaggtataa

SEQ ID NO: 744405 - DNA, 120 bp, Artificial Sequence
  ENSG00000204701_30 (sequence is synthesized)
gaaaaataactgactgtggaaggaatgaaatagagggcatgtggcaaagctggaagaggcaaagaattcagagaaaatggggtatttaaatggtaataggaaatgaatgatgatggaaaa

SEQ ID NO: 744406 - DNA, 120 bp, Artificial Sequence
  ENSG00000204702_0 (sequence is synthesized)
taaaataaaaaattattttcttaaatattgtctttctgattatggaatatcttagtcttcatttatccaaatgttaactcaaggatgtatataaaagaactcagtaacttgaaaagctat

SEQ ID NO: 744407 - DNA, 120 bp, Artificial Sequence
  ENSG00000204702_1 (sequence is synthesized)
taacttgaaaagctattacttgtatccacagctggacaaatatctcaatgaagcatacaaaggaaactgtataaaaattctactgccataatggtgcacactatctggaattgggatact

SEQ ID NO: 744408 - DNA, 120 bp, Artificial Sequence
  ENSG00000204702_2 (sequence is synthesized)
tttttctccaatctgtttgcaagtgagcagttggcaatgcatggacagactttgagtttatgcgattctttctttaggtacaggaaaaataagaatgttgatgaaaaaaaatgcaagttt

SEQ ID NO: 744409 - DNA, 120 bp, Artificial Sequence
  ENSG00000204702_3 (sequence is synthesized)
tgaagacttctttcttctacttggattttctaactggcctcatctggaagtagttctctttgtggttatcttgatcttctacttgataacactgataggaaacctgttcatcatcatcct

SEQ ID NO: 744410 - DNA, 120 bp, Artificial Sequence
  ENSG00000204702_4 (sequence is synthesized)
gtcatacctggactcccatctccacactcccatgtacttcttcctttcaaatctctcatttctggatctctgctacaccaccagctctatccctcagttgctggtgaatctctggggccc

SEQ ID NO: 744411 - DNA, 120 bp, Artificial Sequence
  ENSG00000204702_5 (sequence is synthesized)
gtcctactggtggtgatgtcctatgatcgttatgcagctgtgtgtagacctttgcattacactgtcctcatgcaccctcgtttctgccgcttgttggctgcggcttcttgggtaagtggt

SEQ ID NO: 744412 - DNA, 120 bp, Artificial Sequence
  ENSG00000204702_6 (sequence is synthesized)
tttacaacctcagcacttcattcctcctttactttctggatacccctatgtagacatcgcctagtggatcacttcttctgtgaagttccagcacttctgcgattatcatgtgttgatacc

SEQ ID NO: 744413 - DNA, 120 bp, Artificial Sequence
  ENSG00000204702_7 (sequence is synthesized)
caggcaaatgagctgaccctcatggtcatgagctccatatttgttctcatacctctcatcctcatcctcacttcctatggtgccattgcccgggctgtactgagcatgcaatcaaccact

SEQ ID NO: 744414 - DNA, 120 bp, Artificial Sequence
  ENSG00000204702_8 (sequence is synthesized)
gggcttcagaaagtgcttaggacatgtggagcccatcttatggttgtatctctctttttcattccagtcatgtgcatgtatctccagccaccatcagaaaattctcaagatcaaggcaag

SEQ ID NO: 744415 - DNA, 120 bp, Artificial Sequence
  ENSG00000204702_9 (sequence is synthesized)
ttcattgccctcttttacactgttgtcacacctagtcttaaccctctaatctacactttcagaaacaaggatgtaagaggggcagtgaagagactaatggggtgggaatgggggatgtga

SEQ ID NO: 744416 - DNA, 120 bp, Artificial Sequence
  ENSG00000204702_10 (sequence is synthesized)
gtaatgatcatttcattatcaacaatatggaaaagtgtacagatatctttgtacctgtctggagcatctgcacagacttggcccaagttcaacgttcctagctctccagctgtaactcaa

SEQ ID NO: 744417 - DNA, 120 bp, Artificial Sequence
  ENSG00000204702_11 (sequence is synthesized)
aaaacatggaatagttcagttcccccatttgttgctctgtttaatatttagttctgaaatattatgttgagataaaggttttgattagtaccattttgttcttttacaattctatattta

SEQ ID NO: 744418 - DNA, 120 bp, Artificial Sequence
  ENSG00000204702_12 (sequence is synthesized)
tttccatgaaaattgtggactgtggtttcaacataaataaatgtgtgtgtgaataattatgaggagattatttaaaaaatattggcaatatttctgacaatgtgctaaattatgaactga

SEQ ID NO: 744419 - DNA, 120 bp, Artificial Sequence
  ENSG00000204702_13 (sequence is synthesized)
ccattgatatgtataggaagagaagggcaatattgcaaagatgtaggctgaagaagtttttggttattaaataaaccttaaatgaagctaaaaatagtcacagcaaagaaaaatagtaaa

SEQ ID NO: 744420 - DNA, 120 bp, Artificial Sequence
  ENSG00000204702_14 (sequence is synthesized)
cataatgaataacaccatttattatatggtaaaggatatgtcataattttttggttgaagttcactttttaaagacactaaattatataatttatcctgtaggtctgcattcttgtcaca

SEQ ID NO: 744421 - DNA, 120 bp, Artificial Sequence
  ENSG00000204702_15 (sequence is synthesized)
ttgaacagtaaactaatatctctttaaaatggctgattcgttcatctgtccatttattcattaacttattcttcattagctaaatcttactggacatgtactctctcccagtttgtgaaa

SEQ ID NO: 744422 - DNA, 120 bp, Artificial Sequence
  ENSG00000204702_16 (sequence is synthesized)
ttcttggtaacatgtataaatataacatactttgtctgaacagaatgcactctctatcgggaaaaatggcaacataagataaaagatgaagtatctgtacatggcttaatttgtcactgg

SEQ ID NO: 744423 - DNA, 120 bp, Artificial Sequence
  ENSG00000204703_0 (sequence is synthesized)
ataaacaaacattgattgctttcctatcttacatttttttaggagtgcgaaataagtgagtcatcatgaattgggaaaatgagagctccccaaaagagtttatactacttggcttctcag

SEQ ID NO: 744424 - DNA, 120 bp, Artificial Sequence
  ENSG00000204703_1 (sequence is synthesized)
atagggcttggctacaaatgcccctttttgtggtcctgttaatatcatacacaatcaccatatttggcaatgtgtccatcatgatggtgtgcattctggatcccaaacttcatactccca

SEQ ID NO: 744425 - DNA, 120 bp, Artificial Sequence
  ENSG00000204703_2 (sequence is synthesized)
tgtatttctttctcactaatctctccatcttagatctctgctataccacaactacagtccctcatatgttggtaaatattggttgcaacaaaaagaccatcagctatgctggctgtgtgg

SEQ ID NO: 744426 - DNA, 120 bp, Artificial Sequence
  ENSG00000204703_3 (sequence is synthesized)
cccacctcatcatcttcctggccctaggtgctacagagtgtctccttctggctgttatgtcctttgacagatatgtggctgtttgcagacccctccactatgtagtcatcatgaattatt

SEQ ID NO: 744427 - DNA, 120 bp, Artificial Sequence
  ENSG00000204703_4 (sequence is synthesized)
tcatggctcattggtttcggcaactcagtgctgcagtcttccttgactcttaacatgccacgctgtggtcaccaggaagtggaccactttttctgtgaggtgcctgcacttctcaagttg

SEQ ID NO: 744428 - DNA, 120 bp, Artificial Sequence
  ENSG00000204703_5 (sequence is synthesized)
tcatgtgctgacacaaagcctattgaggctgagctcttcttctttagtgtactaattcttctaattccagtgacattgatcctcatctcctatggcttcatagctcaagcagtattaaaa

SEQ ID NO: 744429 - DNA, 120 bp, Artificial Sequence
  ENSG00000204703_6 (sequence is synthesized)
atcaggtcagcagaaggacggcaaaaagcatttgggacatgtgggtcccacatgattgtggtgtccctcttttatggaacagccatttatatgtatcttcaaccaccttcatccacctct

SEQ ID NO: 744430 - DNA, 120 bp, Artificial Sequence
  ENSG00000204703_7 (sequence is synthesized)
aaggactggggaaagatggtttccctcttctatggaatcatcacatccatgttgaactccctcatctacagccttagaaataaagatatgaaggaggccttcaagaggctgatgccaaga

SEQ ID NO: 744431 - DNA, 120 bp, Artificial Sequence
  ENSG00000204703_8 (sequence is synthesized)
atctttttctgtaagaaataagaagtactccattgtgatgagaatcttcttagtctttccttatcttcaatgatggtaatgacctttgaactcattttcctattttccaggctctggtga

SEQ ID NO: 744432 - DNA, 120 bp, Artificial Sequence
  ENSG00000204704_0 (sequence is synthesized)
ccttgtatcatcatctacctcctcctcctccttttctcactctaggatttagacattgaaggactatggaccaaagcaattatagttctttacatggttttattctgcttggcttctcta

SEQ ID NO: 744433 - DNA, 120 bp, Artificial Sequence
  ENSG00000204704_1 (sequence is synthesized)
accatccaaaaatggagatgatcctgtcaggagttgtcgccatcttctacttaattacattggtgggtaacacagccatcattcttgcatctctcctggattcccagcttcatacaccaa

SEQ ID NO: 744434 - DNA, 120 bp, Artificial Sequence
  ENSG00000204704_2 (sequence is synthesized)
tgtactttttcctcagaaatttatctttcctagatctatgtttcacaaccagcatcatccctcagatgctggtcaacttgtggggacctgataagaccatcagctatgtgggttgtatca

SEQ ID NO: 744435 - DNA, 120 bp, Artificial Sequence
  ENSG00000204704_3 (sequence is synthesized)
tccaactctatgtttacatgtggttgggctcagttgagtgccttctcctggctgttatgtcctatgatcgttttacagctatatgtaagcccttgcattattttgtagtcatgaacccac

SEQ ID NO: 744436 - DNA, 120 bp, Artificial Sequence
  ENSG00000204704_4 (sequence is synthesized)
ctcactctgaatttgcccacatgtggaaacaacattctggatcatttcttgtgtgagttgccagctctggtcaagatagcttgtgtagacaccacaacagttgaaatgtctgttttcgct

SEQ ID NO: 744437 - DNA, 120 bp, Artificial Sequence
  ENSG00000204704_5 (sequence is synthesized)
ttaggcattataattgtcctcacacctctcatccttattcttatatcctatggctacattgccaaagctgtgctgagaacgaagtcaaaagcaagccagcgaaaagcaatgaatacctgt

SEQ ID NO: 744438 - DNA, 120 bp, Artificial Sequence
  ENSG00000204704_6 (sequence is synthesized)
ggatctcatcttactgtagtgtctatgttctatggaactattatctacatgtacctgcaaccaggtaacagggcttccaaagaccagggcaagttcctcaccctcttttacaccgtcatc

SEQ ID NO: 744439 - DNA, 120 bp, Artificial Sequence
  ENSG00000204704_7 (sequence is synthesized)
actccaagtctcaacccgctcatttacaccttaagaaataaggacatgaaggatgccctgaagaaactgatgagatttcaccacaaatctacaaaaataaagaggaattgcaagtcatag

SEQ ID NO: 744440 - DNA, 120 bp, Artificial Sequence
  ENSG00000204710_0 (sequence is synthesized)
gaaggccctgattggtggacgggctgctttgggcagggccgccctcaggctatataagcgcactcgcggcggcgttggtgttatgctctgggccattcctgagctcgggtcaccctgccc

SEQ ID NO: 744441 - DNA, 120 bp, Artificial Sequence
  ENSG00000204710_1 (sequence is synthesized)
catctccatctcctatgagatgagtgactcccaagaccccaccacttcccctgtagttaccacccaggtagagctggggggctgcagccggcaaggtgggggcaatgggttcctccgttt

SEQ ID NO: 744442 - DNA, 120 bp, Artificial Sequence
  ENSG00000204710_2 (sequence is synthesized)
tcgccagcaccaggaggtccaggccttcctcagccttctggaggacagttttgtccaggaattcctctccaaagacccctgcttccagatttcagataagtatctcctggccatggtgct

SEQ ID NO: 744443 - DNA, 120 bp, Artificial Sequence
  ENSG00000204710_3 (sequence is synthesized)
ggtctacttccagcgcgcccacctgaagctcagcgagtatacccacagcagcctgttcttggccctgtaccttgcaaacgacatggaggaggacctggagggccccaaatgtgagatttt

SEQ ID NO: 744444 - DNA, 120 bp, Artificial Sequence
  ENSG00000204710_4 (sequence is synthesized)
cgagtggggaaattcctgcaccagagggataagctttgggcacggatgggtttccgggctgttgtgagccgccagtgctgtgaggaggtcatggcaaaggagccattccactgggcttgg

SEQ ID NO: 744445 - DNA, 120 bp, Artificial Sequence
  ENSG00000204710_5 (sequence is synthesized)
actcgggaccggcgcccccaccatggtggggttcagagggtctgtccacaggtccctgttcgccttccccggggccctggcctctcgccgccccactgttccccctgtggtttgccccag

SEQ ID NO: 744446 - DNA, 120 bp, Artificial Sequence
  ENSG00000204710_6 (sequence is synthesized)
cactgcagcagccacttgcttaagcctgtgtcatccaagtgcccttctctgacctctgaatgtcatcgccctccctcccaaaattatctctcaagggtcaaaaacgcctggggtggggac

SEQ ID NO: 744447 - DNA, 120 bp, Artificial Sequence
  ENSG00000204710_7 (sequence is synthesized)
tttctcatcgtcttgcctccccagatgcaactggaaccaggcacctactccctccgcatcttcccaaagcctccggcacgccctgggcactgaagctctgcagggtgaagaacagcacgc

SEQ ID NO: 744448 - DNA, 120 bp, Artificial Sequence
  ENSG00000204711_0 (sequence is synthesized)
gttcctgccgggcaggacaggtgcatagggaactcctcagaggtctgtacctcgagggctcccatggatagccttgacagatcctgccaggactggtgcgacaggaagcaacactggttg

SEQ ID NO: 744449 - DNA, 120 bp, Artificial Sequence
  ENSG00000204711_1 (sequence is synthesized)
gagatcggaccaccggacttggtggagcgcaagggctccctgaccctccgctcccatcacaagaaatactcgaagccggtgttggtgtattcctggcaccgtgacagagaagcttttccc

SEQ ID NO: 744450 - DNA, 120 bp, Artificial Sequence
  ENSG00000204711_2 (sequence is synthesized)
aaaggttatgatatagagggtcctgagaaagttaaaaaactgtgtaattcaacatatcggcgactgggaaccgatgaatccccaatttggacatcagaaacacatgaaaagttgtcacaa

SEQ ID NO: 744451 - DNA, 120 bp, Artificial Sequence
  ENSG00000204711_3 (sequence is synthesized)
gtttaaacacagaatgggttgaaatgaagagcaaggctttattgaatgaggaaacagtgagctccgggattatcgaaagggtcaccggattgcctgccacaggttttggagctgtctttc

SEQ ID NO: 744452 - DNA, 120 bp, Artificial Sequence
  ENSG00000204711_4 (sequence is synthesized)
ctagacatccaccggattggagcaaaatgtgtgcattgacaacgtactcagaagattatgttccaccatatgattatcagccacatgcttatccctgtcaagatgattattccatagtcc

SEQ ID NO: 744453 - DNA, 120 bp, Artificial Sequence
  ENSG00000204711_5 (sequence is synthesized)
acagaaaatgccgttctcagttcacggatctaaatggttctaaaagatttggcatcaacacttggcatgatgagagtgggatttatgctaattcagatgtaaaacagaaactctatccct

SEQ ID NO: 744454 - DNA, 120 bp, Artificial Sequence
  ENSG00000204711_6 (sequence is synthesized)
tgactagtgggcctattgtgccaatttaaaaataatgtatagaatcagcatctctgactaatgaaaaatggatgtagcagttgatgattttctatcttaataaatgcaatggaagtgtta

SEQ ID NO: 744455 - DNA, 120 bp, Artificial Sequence
  ENSG00000204711_7 (sequence is synthesized)
cctcctcttcatttcaactcttctctaagccttcatagcaaaggatattttctctacccatttggagaactctataatctcccaggtttgatcattgacattctaaagtcctcaaaactg

SEQ ID NO: 744456 - DNA, 120 bp, Artificial Sequence
  ENSG00000204711_8 (sequence is synthesized)
ggtgagccaaggtcaacaaaatgccctttacatgacatcttcgacttgcctttaaccaaatgttttctcctttcacatgcacaacattaataaccgtaataataaaacagtaaatcctca

SEQ ID NO: 744457 - DNA, 120 bp, Artificial Sequence
  ENSG00000204713_0 (sequence is synthesized)
acgctgccgccggcatccgctcggacgcggccacgttgtcttgcgcgctttgcccgcctggccctgggactctgaccctcggctaccctttcctgccccactagcgtggccgcgagcctc

SEQ ID NO: 744458 - DNA, 120 bp, Artificial Sequence
  ENSG00000204713_1 (sequence is synthesized)
ggtgagccggccgtattcccgctctcgcttagggggcacaggcgcaggcatcggcccggccactccaagccttcggtgcgcgggcgcgtctgggatacgggcccgggaggcgccgccctc

SEQ ID NO: 744459 - DNA, 120 bp, Artificial Sequence
  ENSG00000204713_2 (sequence is synthesized)
cgtccgcccggtgcctctcaggaacagcgaaccggagagagcgccggagagttgggctcagtgcagagctcggcgccggggcccatgcccgtgcgcccccgcaggccggcgccatggcct

SEQ ID NO: 744460 - DNA, 120 bp, Artificial Sequence
  ENSG00000204713_3 (sequence is synthesized)
ccgggagtgtggccgagtgcctgcagcaggagaccacctgccccgtgtgcctgcagtacttcgcagagcccatgatgctcgactgcggccataacatctgttgcgcgtgcctcgcccgct

SEQ ID NO: 744461 - DNA, 120 bp, Artificial Sequence
  ENSG00000204713_4 (sequence is synthesized)
gctggggcacggcagagactaacgtgtcgtgcccgcagtgccgggagaccttcccgcagaggcacatgcggcccaaccggcacctggccaacgtgacccaactggtaaagcagctgcgca

SEQ ID NO: 744462 - DNA, 120 bp, Artificial Sequence
  ENSG00000204713_5 (sequence is synthesized)
ccgagcggccgtcggggcccggcggcgagatgggcgtgtgcgagaagcaccgcgagcccctgaagctgtactgcgaggaggaccagatgcccatctgcgtggtgtgcgaccgctcccgcg

SEQ ID NO: 744463 - DNA, 120 bp, Artificial Sequence
  ENSG00000204713_6 (sequence is synthesized)
agcaccgcggccacagcgtgctgccgctcgaggaggcggtggagggcttcaaggagcaaatccagaaccagctcgaccatttaaaaagagtgaaagatttaaagaagagacgtcgggccc

SEQ ID NO: 744464 - DNA, 120 bp, Artificial Sequence
  ENSG00000204713_7 (sequence is synthesized)
agggggaacaggcacgagctgaactcttgagcctaacccagatggagagggagaagattgtttgggagtttgagcagctgtatcactccttaaaggagcatgagtatcgcctcctggccc

SEQ ID NO: 744465 - DNA, 120 bp, Artificial Sequence
  ENSG00000204713_8 (sequence is synthesized)
gccttgaggagctagacttggccatctacaatagcatcaatggtgccatcacccagttctcttgcaacatctcccacctcagcagcctgatcgctcagctagaagagaagcagcagcagc

SEQ ID NO: 744466 - DNA, 120 bp, Artificial Sequence
  ENSG00000204713_9 (sequence is synthesized)
ccaccagggagctcctgcaggacattggggacacattgagcagggctgaaagaatcaggattcctgaaccttggatcacacctccagatttgcaagagaaaatccacatttttgcccaaa

SEQ ID NO: 744467 - DNA, 120 bp, Artificial Sequence
  ENSG00000204713_10 (sequence is synthesized)
aatgtctattcttgacggagagtctaaagcagttcacagaaaaaatgcagtcagatatggagaaaatccaagaattaagagaggctcagttatactcagtggacgtgactctggacccag

SEQ ID NO: 744468 - DNA, 120 bp, Artificial Sequence
  ENSG00000204713_11 (sequence is synthesized)
acacggcctaccccagcctgatcctctctgataatctgcggcaagtgcggtacagttacctccaacaggacctgcctgacaaccccgagaggttcaatctgtttccctgtgtcttgggct

SEQ ID NO: 744469 - DNA, 120 bp, Artificial Sequence
  ENSG00000204713_12 (sequence is synthesized)
tcagtgtgcagaaaaggtggagtaacctcagccccccagaatggattctgggcagtgtctttgtggtatgggaaagaatattgggctcttacctccccaatgactgccctacccctgcgg

SEQ ID NO: 744470 - DNA, 120 bp, Artificial Sequence
  ENSG00000204713_13 (sequence is synthesized)
accccgctccagcgggtggggattttcttggactatgatgctggtgaggtctccttctacaacgtgacagagaggtgtcacaccttcactttctctcatgctaccttttgtgggcctgtc

SEQ ID NO: 744471 - DNA, 120 bp, Artificial Sequence
  ENSG00000204713_14 (sequence is synthesized)
cggccctacttcagtctgagttactcgggagggaaaagtgcagctcctctgatcatctgccccatgagtgggatagatgggttttctggccatgttgggaatcatggtcattccatggag

SEQ ID NO: 744472 - DNA, 120 bp, Artificial Sequence
  ENSG00000204713_15 (sequence is synthesized)
acctccccttgaggaggtgaattcaggccaaaagggctgttggctgtaatcctacgccaggcacaaggcatcttgttgccttgccacgtcctgtcacagctgggtatccttaccatgttc

SEQ ID NO: 744473 - DNA, 120 bp, Artificial Sequence
  ENSG00000204713_16 (sequence is synthesized)
cacgcccttgcagtgggagacaggatgtccatgttctctaccatccttttccttcccatgcagattgtgaaatgtaatgagatgtatcaagatatcctagaaataaaaaccagatgtcca

SEQ ID NO: 744474 - DNA, 120 bp, Artificial Sequence
  ENSG00000204713_17 (sequence is synthesized)
cctccagtgtttcatactttctggttttacacatcgctggagggataaagagtatggataatctttggatttggagagccgttcaagatacttccagcttcttggctcagcctggcttcc

SEQ ID NO: 744475 - DNA, 120 bp, Artificial Sequence
  ENSG00000204713_18 (sequence is synthesized)
tctggttcagccccacataatgattatggctatttgctgtcatttctgggctagggctcctttctaacaacctagactggaataaggccctgtcagcatggctccctttatcccagtttt

SEQ ID NO: 744476 - DNA, 120 bp, Artificial Sequence
  ENSG00000204713_19 (sequence is synthesized)
ccgtctgggaacagtacctctgcccctgattcccaatgtgccatagttttattaactccattaaagaagcctgtatgtgttttggttagttacagttattttacaataatggtgggtaat

SEQ ID NO: 744477 - DNA, 120 bp, Artificial Sequence
  ENSG00000204713_20 (sequence is synthesized)
ggccccacctctgttatgagataatgttctaatcaatgtctctgcctttgtatcttttctgagggctttgtctgttctcttcattctaatgaaaggtgtattctagtgctgggtgcatat

SEQ ID NO: 744478 - DNA, 120 bp, Artificial Sequence
  ENSG00000204713_21 (sequence is synthesized)
catccaggataatattctgcccaactccatcctctgttactagatcccttaccagtcacatttgtggactggtggccagtcgtataccatccctggaaggattctgggacaatattccag

SEQ ID NO: 744479 - DNA, 120 bp, Artificial Sequence
  ENSG00000204713_22 (sequence is synthesized)
ggattcattgacttcttggctccttttctccatttcctttgggggaagggggaattgaccatgcttaagtgcatcctatcaaggggcagctccgtccccatggccattggatcatgagac

SEQ ID NO: 744480 - DNA, 120 bp, Artificial Sequence
  ENSG00000204713_23 (sequence is synthesized)
actctgaagtcagaaggctggggcagatcacttcaagcaagcccccatgatggttctcagtcctgcttctctgtgggtacgtgcccctctgtttaaaaataaactgaatatggatgttta

SEQ ID NO: 744481 - DNA, 120 bp, Artificial Sequence
  ENSG00000204713_24 (sequence is synthesized)
tctaaagcagttcacagaaaaaatgcagtcagatatggagaaaatccaagaatcagctgactcactggaaggtggaattcttgatcttggctcagttttatcccatattctaccagtctc

SEQ ID NO: 744482 - DNA, 120 bp, Artificial Sequence
  ENSG00000204713_25 (sequence is synthesized)
tcaaatatgagaagactgtctccttcacatttgtaaatcctgaaaggagccctgagcctgaggatggacatcttatcaaattgacacatatccctgaagagagtcactagtatacaaaga

SEQ ID NO: 744483 - DNA, 120 bp, Artificial Sequence
  ENSG00000204713_26 (sequence is synthesized)
attagatgaaccacagctctactcagtaaaattcaggaagtagggggttcatgtgggaggctgccggtggattaggggtatgaggacacttccatggagagggtgtggccttacagggac

SEQ ID NO: 744484 - DNA, 120 bp, Artificial Sequence
  ENSG00000204713_27 (sequence is synthesized)
ctgggctgaatataagggtagtttatgtctattgcttcctatacatttcagaatcctttcccccttcattatctcatttttttttttctgtaatgggggaaataaagcctaagaaaggtg

SEQ ID NO: 744485 - DNA, 120 bp, Artificial Sequence
  ENSG00000204713_28 (sequence is synthesized)
gtaaatttatctacctactgggcttttgatgtaaagttgcttggaaaaaagaacatctgcactgaaagtgggaaacgtgggataagggtgatacccattggccagccttccctgatattt

SEQ ID NO: 744486 - DNA, 120 bp, Artificial Sequence
  ENSG00000204713_29 (sequence is synthesized)
tacatcttccctttggtcttaattaattttctcaattaacagcttcttgttctaatttgaagtttgttaactgtatttagtcaattcgcagtctgcattgatggaggagaaaaataagca

SEQ ID NO: 744487 - DNA, 120 bp, Artificial Sequence
  ENSG00000204713_30 (sequence is synthesized)
atccaaaaattaatcaatccagaattaatttgattgtttacttcggaaagaatgaacaaaaactaccttggatacgtttcacttgagccagtgtttatcattgtaatttactgagttcct

SEQ ID NO: 744488 - DNA, 120 bp, Artificial Sequence
  ENSG00000204713_31 (sequence is synthesized)
actgcttgtgggcacaggtgccagctcgggctggaggaatccagcagcactgacaggcagcaccgccagggacatggttaggagcgggcagtcaggagtcaggctgcctgggttctgggc

SEQ ID NO: 744489 - DNA, 120 bp, Artificial Sequence
  ENSG00000204713_32 (sequence is synthesized)
ctgcctctaccacttagtaaggattcaacaagtaatttcctcatctgtaacagaacagtaatagttcttacctcctgaggtataagaattaaggttagttaccatttctaacacttctag

SEQ ID NO: 744490 - DNA, 120 bp, Artificial Sequence
  ENSG00000204713_33 (sequence is synthesized)
aatagaacctgacacataataagtcctatatttatgtttattaaatcgttctaggcatttggagaagcttttccaaattaaaatttttctgctcacgagccacattcagtaaagagttgg

SEQ ID NO: 744491 - DNA, 120 bp, Artificial Sequence
  ENSG00000204713_34 (sequence is synthesized)
ccatatattattccacccaggaatactaaaattcctgggcagtctggtggattctgaaatccttatatgtaggtaaacccttctcttaattattagaaattacaaacccccacaatcttt

SEQ ID NO: 744492 - DNA, 120 bp, Artificial Sequence
  ENSG00000204713_35 (sequence is synthesized)
gataattttctattttgtatatgctgggttcatatatgcattgcatctattcagatatatactttttggggcatctagcaacatagagctagcagatacatgtcctctacaagcaagaca

SEQ ID NO: 744493 - DNA, 120 bp, Artificial Sequence
  ENSG00000204713_36 (sequence is synthesized)
aatggggagaaactccactcaatacagtggataataccagaagtggttagttcaggcatgactttccttgatctggctcttcttttcttgccacttaaaagtcttagtgggataatgtgt

SEQ ID NO: 744494 - DNA, 120 bp, Artificial Sequence
  ENSG00000204713_37 (sequence is synthesized)
gagaaattctgtttcaactataaagtgccttataaatgaatggtcatgtttaccccagagtgtcagtgagtgtcacttgagccattcagctcttgtacacagatgacttatgcaactcaa

SEQ ID NO: 744495 - DNA, 120 bp, Artificial Sequence
  ENSG00000204713_38 (sequence is synthesized)
aagttatgtatgacgtggggttggaaccgcgtttccctctgcagaatcagctgactcactggaaggtggaattcttgatcttggctcagttttatcccatattctaccagtctcaggcat

SEQ ID NO: 744496 - DNA, 120 bp, Artificial Sequence
  ENSG00000204713_39 (sequence is synthesized)
gtggttatccctgtacttaagattcccaatccctctccccttaaagcttttggttggatgatagagccatacatcatatgaaaaaattagtgcatgactaacaacagaggttctggggtt

SEQ ID NO: 744497 - DNA, 120 bp, Artificial Sequence
  ENSG00000204713_40 (sequence is synthesized)
tctggtggagaccactgctttatgatgactaaccaaagcccccttagttatgtatttcctggaaaccctcatgacttccataactttgctcttttattctttcagaattaagagaggctc

SEQ ID NO: 744498 - DNA, 120 bp, Artificial Sequence
  ENSG00000204713_41 (sequence is synthesized)
agttatactcaggtaggtgatgagagacaaaaccatattagggtaaggagtaaaaatccttgtgaacctaactactattatgaatgatttggaaattgcttagatttggattcttttggt

SEQ ID NO: 744499 - DNA, 120 bp, Artificial Sequence
  ENSG00000204713_42 (sequence is synthesized)
tacatgtataaagatgatacacaacaaccacaaaaatcctcagttgtttctatgtgttaacagtatctttgcctcctgaaatgtctcagagctgaagccatagggtaaaatcaatctcag

SEQ ID NO: 744500 - DNA, 120 bp, Artificial Sequence
  ENSG00000204713_43 (sequence is synthesized)
gtgttaaagaaggattatagggtggaaaccgcagttccccaaaagtagaacagagctggtacactagtacactgctctgcccgcccagcttcagggtcaaaccatggtttgtgacaagca

SEQ ID NO: 744501 - DNA, 120 bp, Artificial Sequence
  ENSG00000204713_44 (sequence is synthesized)
ggactgattgagctccacaatagtgctcttgagtgctagaggaagtctaggagtcttgtgtcatcccatcactgtgcctcagagcaaagtttgaaacttcccttccccctcacaaccgct

SEQ ID NO: 744502 - DNA, 120 bp, Artificial Sequence
  ENSG00000204713_45 (sequence is synthesized)
ttcaccctactatagagcctgggtaaatttaacattgcagaagtattcaaatctaaggtgtattcgtcccatagtcacagtcaccttctgttatgaattatcctctaaatgaagagaagg

SEQ ID NO: 744503 - DNA, 120 bp, Artificial Sequence
  ENSG00000204713_46 (sequence is synthesized)
actctacatacagtggatctgcagtccttggtgtgcagtggctctgatccatatttattttcaacaagtattaaatgagtactttgcttgtatcctacactgcctaacattgtgcagggt

SEQ ID NO: 744504 - DNA, 120 bp, Artificial Sequence
  ENSG00000204713_47 (sequence is synthesized)
acattgtctggttggaggtatacccatgacacaagaagaaggtaggcagctgttgtagacagattgttgaaccaggagccaagggttctggggttcttggttacctctatcagttgcctg

SEQ ID NO: 744505 - DNA, 120 bp, Artificial Sequence
  ENSG00000204713_48 (sequence is synthesized)
tcttttgtgggagtaaaaatttgtgggcttaaatttctgagaggtaatgtttgggactcttcctcctgaacaagatgtgaggagcaaatgagagaatacatatcagtatttttatttatt

SEQ ID NO: 744506 - DNA, 120 bp, Artificial Sequence
  ENSG00000204713_49 (sequence is synthesized)
tatttattattttaattttttaaattttttattattcattttagaggcaggttctctgttgcccaggctggtgtgcagtggcatggtgatagcttgctgcagcctcatactcctgggctc

SEQ ID NO: 744507 - DNA, 120 bp, Artificial Sequence
  ENSG00000204713_50 (sequence is synthesized)
ctggaattacaggcatgcaccaccatgcttgcctaatttttttacttttattttttgtagagacagggtctcaaactcctgtatgcaagcaatcctcttgcctcagcttcccaaagtgct

SEQ ID NO: 744508 - DNA, 120 bp, Artificial Sequence
  ENSG00000204713_51 (sequence is synthesized)
tgctgagattacaggcatgagccacatatccagcccattatcagtgtttttgaagcaggaaaacacttgatgatagcaagatgctgtaatactaaatgccagaggagatgacatgggtca

SEQ ID NO: 744509 - DNA, 120 bp, Artificial Sequence
  ENSG00000204713_52 (sequence is synthesized)
taaatgccagaggagatgacatgggtcatacacagttttagatttcagaacagtaagtgtaatggcctgggcagattaagaaaaacttggaggatgtgtgttttggactggacattagaa

SEQ ID NO: 744510 - DNA, 120 bp, Artificial Sequence
  ENSG00000204713_53 (sequence is synthesized)
gaagatgaatagagcttcgatgtgcagagtaaagatcttatagaatggataaaagagtgatttgggctgggtgtagtggctcacacctgtagtcctaacactttggaaggctgaaatggg

SEQ ID NO: 744511 - DNA, 120 bp, Artificial Sequence
  ENSG00000204713_54 (sequence is synthesized)
aagtctgcagtgagccatgattatgccactgtactacagtctgggtgacagagtgagacctcatctcaaaaaataaaaaaaagtaaaaaataattttaaaagagtgatttaaaaagtaag

SEQ ID NO: 744512 - DNA, 120 bp, Artificial Sequence
  ENSG00000204713_55 (sequence is synthesized)
catactgatacaggttcccagtcccttacccacagttctaaaatcccaaatctctgaaagccaaaacctttttcattattttgtgggaaattaattatagcatcaaaacctgaatttatg

SEQ ID NO: 744513 - DNA, 120 bp, Artificial Sequence
  ENSG00000204713_56 (sequence is synthesized)
tggtactgtttagagcctttatccttcattatgtaaacattcatgaatctcacagcagatctattaatacttcattatagaatgctgcctgtctaaaacctgtaatattctgaattctat

SEQ ID NO: 744514 - DNA, 120 bp, Artificial Sequence
  ENSG00000204713_57 (sequence is synthesized)
gaaacttggggcccctggaattttcagaataagggatgatgagcgtgtaagaaaacctcaattcagcgtatctgccaggcacagtggctcatgcctgaaatcccattgctttgggaagtt

SEQ ID NO: 744515 - DNA, 89 bp, Artificial Sequence
  ENSG00000204713_58 (sequence is synthesized)
cctgaattttttaaaattagggtggtagtgcacacctatggtcccagctacttgggtgtcttaggcgggagaatcacctgagcccagga

SEQ ID NO: 744516 - DNA, 120 bp, Artificial Sequence
  ENSG00000204713_59 (sequence is synthesized)
acttgggtgtcttaggcgggagaatcacctgagcccaggagtttggggttacaatgaactatgaccacaccactgcgctccagcctaggcaacagagcaagaccctatctcttaaaatca

SEQ ID NO: 744517 - DNA, 120 bp, Artificial Sequence
  ENSG00000204713_60 (sequence is synthesized)
gttcatgatggatattgtggcttcagatgtgaaagaaaagatacggggctaaaattctgtattttcagagtattctggtaaccagctaatccaagcagtaatttttgaaatgtgaagttt

SEQ ID NO: 744518 - DNA, 120 bp, Artificial Sequence
  ENSG00000204713_61 (sequence is synthesized)
agaatatattctaaataaaatacgtgcaacctccagtgggaacctcttattattggggaggtagtagaaaggcgctgggtgttctaaaataggctctcctggcccacggctgactgtctt

SEQ ID NO: 744519 - DNA, 120 bp, Artificial Sequence
  ENSG00000204713_62 (sequence is synthesized)
cttaatggggcaatactggaggcattcccattgaggtcagaaacaggccggatgcccagtatcatttatctctatttaacactgcattaaaggttctaaccagttcagttaaataaaata

SEQ ID NO: 744520 - DNA, 120 bp, Artificial Sequence
  ENSG00000204713_63 (sequence is synthesized)
attataggtatacaaattgggaaagaagttaacatacagaaatcagcagccttcatatgccagatagcagccactagaagacatattagaagagaacatgctgtttccatttgcaaaaaa

SEQ ID NO: 744521 - DNA, 120 bp, Artificial Sequence
  ENSG00000204713_64 (sequence is synthesized)
aaaacaagtgataaaatatctgggaataaatttataagaaatatacaaaaacctatgtggagaaaattataaaacattcaaagattcctgaaagacacaaaataaacttgaacaaataaa

SEQ ID NO: 744522 - DNA, 120 bp, Artificial Sequence
  ENSG00000204740_0 (sequence is synthesized)
agagttgcagatagttaccaatagtatccagttataagaagcaaatctgggaaaggaagaatagagaaataaaagaatgtttccaatgatggacttacttattacaactgcttgatctct

SEQ ID NO: 744523 - DNA, 120 bp, Artificial Sequence
  ENSG00000204740_1 (sequence is synthesized)
aatagacaataccaagtaatgctcttcttcctggacagaatgttggcattccccatgaatgaaactttttgttgcctttggattgcctgtgttttcaattctacactggctcagcaaggg

SEQ ID NO: 744524 - DNA, 120 bp, Artificial Sequence
  ENSG00000204740_2 (sequence is synthesized)
acagaaagctttcagtgtgacaatggagtctccttgcctcctgacagcatttgtgacttcacagatcagtgtggggatagcagtgatgaacggcactgtttgaattatgaaagatgtgat

SEQ ID NO: 744525 - DNA, 120 bp, Artificial Sequence
  ENSG00000204740_3 (sequence is synthesized)
tttgaggatggtctctgtcatatgactcaagatcagagtctgcaacctagttggacaaagagaagtgggatgattggtctatcacctccattttatgatcacaatggtgatgtgtctgct

SEQ ID NO: 744526 - DNA, 120 bp, Artificial Sequence
  ENSG00000204740_4 (sequence is synthesized)
cacttcctctcactggtttccagagtggattctatttcctcaagtttaagaagcagagttttccttccaacaaatgatcaacatgactgccagattacattttattacttctcctgccaa

SEQ ID NO: 744527 - DNA, 120 bp, Artificial Sequence
  ENSG00000204740_5 (sequence is synthesized)
gtgagtggcaaattaatggttgggcttcaaactgcatgtggaggtcctattcagcatttatggcaaaacacagctgcactcccaaatcagtgggagagaaatgtcatcaaaatccagagt

SEQ ID NO: 744528 - DNA, 120 bp, Artificial Sequence
  ENSG00000204740_6 (sequence is synthesized)
tcacagagatttcaggttgtttttgaaggtcaaatggcttcaacgtatgaacaggatgaagtcattgctattgatgatatatctttcagttcaggctgcttgcctgccaatgatggaatt

SEQ ID NO: 744529 - DNA, 120 bp, Artificial Sequence
  ENSG00000204740_7 (sequence is synthesized)
ttactgtgtcaagaagcattgaatgctgagcgggagctatgccatccagatacagatctctgcagatttgatgctacagatgaagagttgagattgtgtcaggcctgtgggtttgaattt

SEQ ID NO: 744530 - DNA, 120 bp, Artificial Sequence
  ENSG00000204740_8 (sequence is synthesized)
gacatgtgtgagtggacgtcagaagcatctgctggccaaatttcctggatgcgcacaaaagcgagagagatccctgcattcgaatccacacctcagcaggatcaaggaggtgatgatgaa

SEQ ID NO: 744531 - DNA, 120 bp, Artificial Sequence
  ENSG00000204740_9 (sequence is synthesized)
ggttattatgtatgggtaggcgctaagcatggtttcactcttaaccatttagacagcagggcttacctaaatagctctgtgtgtcattgcctgggcaagagctgtcatcttcaattctat

SEQ ID NO: 744532 - DNA, 120 bp, Artificial Sequence
  ENSG00000204740_10 (sequence is synthesized)
tatgcaatggaaagcagtgtcctgagagtaagactgtataataataaggaagaagaaatattttggacatacaacatatcaactcacagccaatgggtgaaagcagatgtgttaatacca

SEQ ID NO: 744533 - DNA, 120 bp, Artificial Sequence
  ENSG00000204740_11 (sequence is synthesized)
gaagatctgaagacatttaagattatttttgaagggactcttttgagccagagaagttttattgcccttgatcacctctgggtctatgcctgtggacagacccaatccagaaagctttgc

SEQ ID NO: 744534 - DNA, 120 bp, Artificial Sequence
  ENSG00000204740_12 (sequence is synthesized)
tctgcagacgaattcccttgcactagtggccagtgcatcgccaaagaatctgtctgtgactctcggcaggactgctccgatgagagtgatgaagacccagcaacttgctcaaagcatctc

SEQ ID NO: 744535 - DNA, 120 bp, Artificial Sequence
  ENSG00000204740_13 (sequence is synthesized)
acctgtgactttgagtcgggtttctgcggttgggagccatttctcacagaagattcacactggaagctgatgaaaggattgaataatggagagcaccactttcctgcagctgatcacaca

SEQ ID NO: 744536 - DNA, 120 bp, Artificial Sequence
  ENSG00000204740_14 (sequence is synthesized)
gcaaacataaatcatggatcgtttatttatttggaggcacagcgctcccccggggtggccaagcttggaagtcctgttcttacaaaattgctcactgcctctaccccatgtcaggtgcag

SEQ ID NO: 744537 - DNA, 120 bp, Artificial Sequence
  ENSG00000204740_15 (sequence is synthesized)
ttttggtatcatttgtctcaacattcaaatctctcagtttttacaagaacgtctctagatggaaacttgcaaaagcagggcaaaataatcagattctccgaatctcagtggagccacgca

SEQ ID NO: 744538 - DNA, 120 bp, Artificial Sequence
  ENSG00000204740_16 (sequence is synthesized)
aaaattgatctcattgcagaagcgggagaatctactctaccttttcagttaattttggaagctactgttttgtcgtcaaatgctaccgttgctctagatgacatcagtgtgtcccaggaa

SEQ ID NO: 744539 - DNA, 120 bp, Artificial Sequence
  ENSG00000204740_17 (sequence is synthesized)
tgtgaaatttcctataaatcactaccaaggaccagtacacaaagcaagttttccaagtgtgactttgaagcaaacagctgtgattggtttgaagcaattagtggtgaccattttgactgg

SEQ ID NO: 744540 - DNA, 120 bp, Artificial Sequence
  ENSG00000204740_18 (sequence is synthesized)
atacggagctctcagagtgaactttctgctgattttgagcaccaggctccacctcgggatcatagtctcaacgcatctcaagggcattttatgttcattctgaagaaaagcagcagcttg

SEQ ID NO: 744541 - DNA, 120 bp, Artificial Sequence
  ENSG00000204740_19 (sequence is synthesized)
tggcaagttgctaagcttcagagcccaactttcagccagacaggacctggatgcatactttccttctggttctataactatggcctgtcagtgggagcagctgagctgcagctacatatg

SEQ ID NO: 744542 - DNA, 120 bp, Artificial Sequence
  ENSG00000204740_20 (sequence is synthesized)
gaaaattctcatgactcaacagtgatttggagagtattatacaatcagggcaaacaatggttggaggcaaccattcagctagggcgcctttcgcagcccttccatttgtcactagataaa

SEQ ID NO: 744543 - DNA, 120 bp, Artificial Sequence
  ENSG00000204740_21 (sequence is synthesized)
gtcagtctgggcatttatgatggggtctcagctattgatgacatccgatttgaaaattgtactctccctcttcctgctgagagctgtgaagggctggatcatttctggtgtcgccacacc

SEQ ID NO: 744544 - DNA, 120 bp, Artificial Sequence
  ENSG00000204740_22 (sequence is synthesized)
agggcttgcatagaaaagcttcggttatgtgatctggtggatgactgtggtgatcgtactgatgaagtcaactgtgcacctgagctgcagtgtaactttgaaactggaatctgtaactgg

SEQ ID NO: 744545 - DNA, 120 bp, Artificial Sequence
  ENSG00000204740_23 (sequence is synthesized)
gaacaagatgcaaaagatgactttgattggaccaggagccagggtccaactccaacacttaacacagggccaatgaaagataacactctgggcacagctaaaggacactatctctacata

SEQ ID NO: 744546 - DNA, 120 bp, Artificial Sequence
  ENSG00000204740_24 (sequence is synthesized)
gaatcttcagagccacaggcttttcaagacagtgctgccttactcagcccaatccttaatgccactgatacaaaaggctgcaccttccgcttctattaccacatgtttggaaagcgcatt

SEQ ID NO: 744547 - DNA, 120 bp, Artificial Sequence
  ENSG00000204740_25 (sequence is synthesized)
tataggttggcaatctaccaacgaatctggagtgactcaaggggacagctgctgtggcagatatttgggaatcaaggcaacagatggattaggaaacacctcaacatttccagcaggcag

SEQ ID NO: 744548 - DNA, 120 bp, Artificial Sequence
  ENSG00000204740_26 (sequence is synthesized)
ccctttcagatattggtggaggcttcagtgggagatggcttcactggagatattgcgattgatgatctgtcatttatggactgcaccctctaccctggtaatttgccagcagacctccca

SEQ ID NO: 744549 - DNA, 120 bp, Artificial Sequence
  ENSG00000204740_27 (sequence is synthesized)
actccaccagaaacgtcagttcctgtaacattacctccacacaactgcacagacaatgaatttatctgcaggtctgatggtcactgcattgaaaaaatgcagaaatgtgattttaaatat

SEQ ID NO: 744550 - DNA, 120 bp, Artificial Sequence
  ENSG00000204740_28 (sequence is synthesized)
acaaatcagatgaagcatcctgtgttatggaagtttgcagctttgagaaaagaagcctgtgtaaatggtatcaaccaatcccagtacatttgcttcaagattcaaacacattcaggtggg

SEQ ID NO: 744551 - DNA, 120 bp, Artificial Sequence
  ENSG00000204740_29 (sequence is synthesized)
ggcttgggaacgggatcagcattcatcatggggaagaaaaccacaggccatcagtggatcatacacaaaataccactgatggctggtacctgtatgctgacagttctaatgggaaatttg

SEQ ID NO: 744552 - DNA, 120 bp, Artificial Sequence
  ENSG00000204740_30 (sequence is synthesized)
gtgacacggctgacattctcactcctatcatttcactcacgggaccaaaatgtaccttggtgttctggacacatatgaatggggccaccgttggttctctccaggtgctcatcaagaaag

SEQ ID NO: 744553 - DNA, 120 bp, Artificial Sequence
  ENSG00000204740_31 (sequence is synthesized)
ataacgttacttctaaattgtgggctcaaactggacagcaaggtgcacagtggaagagagcagaagtgtttttaggcattcgttcacatacacagattgtcttcagagccaaacgtggta

SEQ ID NO: 744554 - DNA, 120 bp, Artificial Sequence
  ENSG00000204740_32 (sequence is synthesized)
tcagttacataggagatgtagcagtggatgatatttccttccaagattgctcccctttgcttagcccagagagaaagtgtactgatcatgaattcatgtgtgctaataagcactgcattg

SEQ ID NO: 744555 - DNA, 120 bp, Artificial Sequence
  ENSG00000204740_33 (sequence is synthesized)
ccaaagacaagctgtgtgattttgtgaatgattgtgctgataattcagatgagactactttcatttgccgtacctccagtgggcgctgtgatttcgaatttgatctttgttcctggaagc

SEQ ID NO: 744556 - DNA, 120 bp, Artificial Sequence
  ENSG00000204740_34 (sequence is synthesized)
aggagaaagatgaggactttgactggaacctgaaagctagcagcatccctgcagcaggcacagagccagcagcagatcacactttgggaaattcatctggtcattacatctttataaaga

SEQ ID NO: 744557 - DNA, 120 bp, Artificial Sequence
  ENSG00000204740_35 (sequence is synthesized)
gtttgtttcctcagcagcccatgagagctgccagaatttcaagtccagttataagtaagagaagcaaaaactgcaagattatttttcattatcacatgtatggaaatggcattggggcac

SEQ ID NO: 744558 - DNA, 120 bp, Artificial Sequence
  ENSG00000204740_36 (sequence is synthesized)
tcaccttaatgcaggtgtcagtcacaaaccaaacgaaggttctacttaacctcactgtagaacaaggcaatttctggcggagagaagaactgtcactgtttggtgatgaagacttccaac

SEQ ID NO: 744559 - DNA, 120 bp, Artificial Sequence
  ENSG00000204740_37 (sequence is synthesized)
tcaaatttgaaggtagagttgggaaaggtcagcgtggagacattgcacttgatgacattgtgcttacagaaaattgtctatcactccatgattccgtgcaagaagaactggcagtgcctc

SEQ ID NO: 744560 - DNA, 120 bp, Artificial Sequence
  ENSG00000204740_38 (sequence is synthesized)
ttccaacaggtttctgcccacttggctatagggaatgtcataatggaaaatgctataggctggaacaaagctgtaacttcgtagataactgtggagataatactgatgaaaatgagtgtg

SEQ ID NO: 744561 - DNA, 120 bp, Artificial Sequence
  ENSG00000204740_39 (sequence is synthesized)
gtagctcctgtacttttgaaaaaggctggtgtggctggcaaaactcccaggctgacaactttgattgggttttaggggttggctctcatcaaagcttaagacctcccaaagaccacacac

SEQ ID NO: 744562 - DNA, 120 bp, Artificial Sequence
  ENSG00000204740_40 (sequence is synthesized)
ttggaaatgaaaatgggcacttcatgtatctggaagctactgcagtgggccttcggggtgacaaagcacacttcaggagtaccatgtggcgagaatccagtgcagcctgcaccatgagct

SEQ ID NO: 744563 - DNA, 120 bp, Artificial Sequence
  ENSG00000204740_41 (sequence is synthesized)
tctggtatttcgtatctgcaaaggccacaggatccattcagattctcatcaagacagagaaaggactatcaaaagtatggcaagaaagtaagcagaaccctggtaatcattggcaaaagg

SEQ ID NO: 744564 - DNA, 120 bp, Artificial Sequence
  ENSG00000204740_42 (sequence is synthesized)
ctgacatcctgctaggaaagttaaggaattttgaagtcatatttcaaggtatcagaacaagggacctgggaggaggagctgcaattgatgatattgaatttaaaaactgcacaactgtgg

SEQ ID NO: 744565 - DNA, 120 bp, Artificial Sequence
  ENSG00000204740_43 (sequence is synthesized)
gagagatctctgagctttgtccggaaatcactgattttttgtgccgggacaagaagtgcattgcatcccaccttctttgtgactataagccagactgctctgataggtctgatgaagctc

SEQ ID NO: 744566 - DNA, 120 bp, Artificial Sequence
  ENSG00000204740_44 (sequence is synthesized)
actgtgcacattatacaagcacaacaggaagctgcaattttgaaacaagttcaggaaactggaccacagcctgcagtcttactcaagactctgaggatgacttggactgggccattggca

SEQ ID NO: 744567 - DNA, 120 bp, Artificial Sequence
  ENSG00000204740_45 (sequence is synthesized)
gcagaattcctgccaaagcattaattccagactctgatcacacgccaggtagtggtcagcacttcctgtacgtcaactcatctggctccaaggaaggatccgttgccagaattactactt

SEQ ID NO: 744568 - DNA, 120 bp, Artificial Sequence
  ENSG00000204740_46 (sequence is synthesized)
ccaaatccttcccagcaagccttggaatgtgtactgttcggttctggttctacatgattgatcccaggagtatgggaatattaaaggtgtataccattgaagaatcggggctaaacatcc

SEQ ID NO: 744569 - DNA, 120 bp, Artificial Sequence
  ENSG00000204740_47 (sequence is synthesized)
tggtgtggtcagtgattggaaataaaagaacgggatggacatatggctctgtgcctctctccagtaacagtccgtttaaggtggcatttgaagctgatttggatggaaatgaggacatct

SEQ ID NO: 744570 - DNA, 120 bp, Artificial Sequence
  ENSG00000204740_48 (sequence is synthesized)
ttattgctcttgatgacatctcttttaccccagagtgtgtgactggaggtcctgtcccagtgcagccatcaccctgtgaagctgatcagttttcttgtatctacacactccaatgtgtcc

SEQ ID NO: 744571 - DNA, 120 bp, Artificial Sequence
  ENSG00000204740_49 (sequence is synthesized)
ctctctcagggaaatgtgatggacatgaagactgcatagatggatctgatgaaatggattgtcctctcagccccacccctccactctgtagtaacatggagttcccgtgctctacagacg

SEQ ID NO: 744572 - DNA, 120 bp, Artificial Sequence
  ENSG00000204740_50 (sequence is synthesized)
agtgtataccttccctcctgctatgcgatggagtgcccgactgccactttaatgaagatgagctcatctgctccaacaaaagctgttctaatggagctctggtgtgtgcctcctccaaca

SEQ ID NO: 744573 - DNA, 120 bp, Artificial Sequence
  ENSG00000204740_51 (sequence is synthesized)
gctgtatcccagcccaccagcgctgtgatggttttgccgactgcatggatttccagcttgatgagtccagctgctccgaatgtccattaaattactgcagaaatggtgggacttgtgtag

SEQ ID NO: 744574 - DNA, 120 bp, Artificial Sequence
  ENSG00000204740_52 (sequence is synthesized)
tggagaaaaatggtcctatgtgtcgatgtagacaaggctggaaaggaaatcgatgccatatcaagtttaatcctcctgctacagacttcacatacgctcagaataatacatggactctcc

SEQ ID NO: 744575 - DNA, 120 bp, Artificial Sequence
  ENSG00000204740_53 (sequence is synthesized)
tgggtattggattagcattcctgatgactcacatcacagttgcagtcttgtgttttcttgcaaacagaaaggtaccaataaggaaaaccgagggaagtggtaactgtgcctttgtcaatc

SEQ ID NO: 744576 - DNA, 120 bp, Artificial Sequence
  ENSG00000204740_54 (sequence is synthesized)
cagtttacgggaactggagcaacccagagaaaacagagagttctgtctattccttctcaaacccattatatggcacaacatcaggaagcctggagaccctgtcacatcatctcaaatagc

SEQ ID NO: 744577 - DNA, 120 bp, Artificial Sequence
  ENSG00000204740_55 (sequence is synthesized)
agcatcgagaccaagtctgatccaacatgtgtagtttctagaaaattgaagtctccacaatctgatagaaactcatcttctacaatggtaaaaagagaaaggattgtaaatgccagtgta

SEQ ID NO: 744578 - DNA, 120 bp, Artificial Sequence
  ENSG00000204740_56 (sequence is synthesized)
attataacatttatgaatgaattttcttgcagaatatagagaatgtttatatggaatcagaatcagtaccttatcttcactgaacatctgaatattttaataaaatttctatttaatcaa

SEQ ID NO: 744579 - DNA, 120 bp, Artificial Sequence
  ENSG00000204740_57 (sequence is synthesized)
ctgcatactgtgaagcacgtgctaaaagcacagacagttggaaattgttctgtcagcaagctagaggcgaggctattagattttctttctgttccaaatgaaaatacttttggcagctca

SEQ ID NO: 744580 - DNA, 120 bp, Artificial Sequence
  ENSG00000204740_58 (sequence is synthesized)
tggtatttcgtatctgcaaaggccacaggatccattcagattctcatcaagcgggggcggaggagaaggcgggctcccaatccggttctatccggttctcccaccatcccccgccagggg

SEQ ID NO: 744581 - DNA, 120 bp, Artificial Sequence
  ENSG00000204740_59 (sequence is synthesized)
tctcagcagctcggagggtggaggggcggcagcgccaggcaccgcgcacgcgcctttccggagccagaatgcccaagaggaaggtcagctctgctgaaggggccgccacaggaaaagcct

SEQ ID NO: 744582 - DNA, 120 bp, Artificial Sequence
  ENSG00000204740_60 (sequence is synthesized)
aatacattcatgaaaataagtgtgctggctagacaacatgtctctcaaaagtttctaacaaacaataacctgaaaatgtactatgagttctgtctattccttctcaaacccattatatgg

SEQ ID NO: 744583 - DNA, 120 bp, Artificial Sequence
  ENSG00000204740_61 (sequence is synthesized)
gtggctgacaagctccaggacacaggtaataagtaaaatctagatctcgggtctttcaattgaaactagaaacataggaaacaacaacagaagtcacaacaatttaacagttatttagag

SEQ ID NO: 744584 - DNA, 120 bp, Artificial Sequence
  ENSG00000204740_62 (sequence is synthesized)
gtgtcagtgatttgggatttaaaaatatggaatttaacatttctggtttcaaagtcaatacacagcttccatatgacactatagagtaagtaaaaaataaaagataatttatctgatgta

SEQ ID NO: 744585 - DNA, 120 bp, Artificial Sequence
  ENSG00000204764_0 (sequence is synthesized)
gccgcctcctgggaagatggcgctgcacttccagagtttggctgaattggaagtgttatgtactcatctctacatagggactgatcttacacaaagaatagaggctgagaaagcactctt

SEQ ID NO: 744586 - DNA, 120 bp, Artificial Sequence
  ENSG00000204764_1 (sequence is synthesized)
ggaacttattgacagtccagaatgtctcagcaagtgtcaacttttattagaacaaggaacaacatcctatgctcagctccttgcagcaacatgtctttcaaaacttgtcagccgagtcag

SEQ ID NO: 744587 - DNA, 120 bp, Artificial Sequence
  ENSG00000204764_2 (sequence is synthesized)
tcctttacctgttgagcagaggatggacatcagaaactacattctgaattacgtggcatcacagcccaagctggctccctttgtcatccaagctcttattcaagtcattgctaaaatcac

SEQ ID NO: 744588 - DNA, 120 bp, Artificial Sequence
  ENSG00000204764_3 (sequence is synthesized)
taagttggggtggtttgaggttcagaaagaccaatttgtcttcagagaaattattgctgatgtgaagaagtttctccagggtactgtggaacactgcataataggagtaataatcctttc

SEQ ID NO: 744589 - DNA, 120 bp, Artificial Sequence
  ENSG00000204764_4 (sequence is synthesized)
tgaattgactcaggaaatgaacctggttgattattctagaccttcagcaaaacacaggaaaatagctacctcatttcgtgatacttctctcaaagacgttttagtgctagcatgctctct

SEQ ID NO: 744590 - DNA, 120 bp, Artificial Sequence
  ENSG00000204764_5 (sequence is synthesized)
tttaaaagaggtgtttgccaaacctttaaatcttcaggatcaatgtcagcaaaatctggtaatgcaggtcttgaaactggtccttaactgccttaactttgacttcattggcagttcagc

SEQ ID NO: 744591 - DNA, 120 bp, Artificial Sequence
  ENSG00000204764_6 (sequence is synthesized)
agatgaatctgcagatgatctttgcacggtgcagattccaacaacttggagaacaattttcctggaaccagaaacattggatcttttcttcaatttgtatcattcacttccaccactact

SEQ ID NO: 744592 - DNA, 120 bp, Artificial Sequence
  ENSG00000204764_7 (sequence is synthesized)
atctcagttagcactttcatgtttagttcagtttgcttcgacaagaaggtccttatttaacagtcctgaacgtgccaagtaccttggtaatttaattaagggagtaaaaaggatacttga

SEQ ID NO: 744593 - DNA, 120 bp, Artificial Sequence
  ENSG00000204764_8 (sequence is synthesized)
aaaccctcagggtttgtctgatccaggtaattatcatgaattttgtcgatttttggctcgtttaaagacaaattatcagctgggagaattagttatggtgaaggaatatcctgaagttat

SEQ ID NO: 744594 - DNA, 120 bp, Artificial Sequence
  ENSG00000204764_9 (sequence is synthesized)
tagattgattgctaattttaccattactagcctacagcactgggaatttgctcctaacagtgttcattatttattaactctgtggcaaaggatggtagcatctgttccttttgtgaaatc

SEQ ID NO: 744595 - DNA, 120 bp, Artificial Sequence
  ENSG00000204764_10 (sequence is synthesized)
aactgaaccccacctattagacacttatgcaccagaaatcacgaaggcctttatcacttctcggttggactctgttgccatagttgtgagagatcacttagatgatccactggatgatac

SEQ ID NO: 744596 - DNA, 120 bp, Artificial Sequence
  ENSG00000204764_11 (sequence is synthesized)
tgccactgtgtttcagcagttggagcagttgtgcacggtcagcagatgtgaatatgaaaagacatgtgctcttcttgtgcagttattcgaccaaaatgcacagaattaccaaaaacttct

SEQ ID NO: 744597 - DNA, 120 bp, Artificial Sequence
  ENSG00000204764_12 (sequence is synthesized)
gcatccatattctggtgtaactgtggacatcaccattcaggaaggacgtcttgcatggctggtatacttagttgggacagttgtaggaggaagattaacatataccagtacagatgagca

SEQ ID NO: 744598 - DNA, 120 bp, Artificial Sequence
  ENSG00000204764_13 (sequence is synthesized)
tgatgctatggatggagaattatcctgtcgagtttttcagcttatatctttaatggataccggattgcctcgatgttgtaatgagaaaatagagcttgcaattctgtggttcttggatca

SEQ ID NO: 744599 - DNA, 120 bp, Artificial Sequence
  ENSG00000204764_14 (sequence is synthesized)
gtttcgtaaaacatatgttggtgatcaacttcaaagaacctcaaaggtatatgctcgtatgtcagaagtcttaggaataacagatgacaaccacgttctagagacgttcatgacaaaaat
